United States Patent Application Publication US 2021/0180091 A1 - sequence listing, part 9

SEQ ID NO: 180247 - DNA, 20 bp, Artificial Sequence
  Synthetic oligonucleotide; CAG chr2 60490135 60490154 60490138 -
tttcactagcagaatggaac

SEQ ID NO: 180248 - DNA, 20 bp, Artificial Sequence
  Synthetic oligonucleotide; TAG chr2 60490126 60490145 60490129 -
cagaatggaaccagatattg

SEQ ID NO: 180249 - DNA, 20 bp, Artificial Sequence
  Synthetic oligonucleotide; AGG chr2 60490125 60490144 60490128 -
agaatggaaccagatattgt

SEQ ID NO: 180250 - DNA, 20 bp, Artificial Sequence
  Synthetic oligonucleotide; GAG chr2 60490123 60490142 60490126 -
aatggaaccagatattgtag

SEQ ID NO: 180251 - DNA, 20 bp, Artificial Sequence
  Synthetic oligonucleotide; TAG chr2 60490118 60490137 60490121 -
aaccagatattgtaggagcc

SEQ ID NO: 180252 - DNA, 20 bp, Artificial Sequence
  Synthetic oligonucleotide; TGG chr2 60490111 60490130 60490114 -
tattgtaggagcctagcaca

SEQ ID NO: 180253 - DNA, 20 bp, Artificial Sequence
  Synthetic oligonucleotide; GGG chr2 60490110 60490129 60490113 -
attgtaggagcctagcacat

SEQ ID NO: 180254 - DNA, 20 bp, Artificial Sequence
  Synthetic oligonucleotide; TAG chr2 60490094 60490113 60490097 -
acatgggtctgttactaata

SEQ ID NO: 180255 - DNA, 20 bp, Artificial Sequence
  Synthetic oligonucleotide; GAG chr2 60490092 60490111 60490095 -
atgggtctgttactaatata

SEQ ID NO: 180256 - DNA, 20 bp, Artificial Sequence
  Synthetic oligonucleotide; AGG chr2 60490091 60490110 60490094 -
tgggtctgttactaatatag

SEQ ID NO: 180257 - DNA, 20 bp, Artificial Sequence
  Synthetic oligonucleotide; TGG chr2 60490075 60490094 60490078 -
atagaggactgtttaaatct

SEQ ID NO: 180258 - DNA, 20 bp, Artificial Sequence
  Synthetic oligonucleotide; AAG chr2 60490071 60490090 60490074 -
aggactgtttaaatcttgga

SEQ ID NO: 180259 - DNA, 20 bp, Artificial Sequence
  Synthetic oligonucleotide; CAG chr2 60490042 60490061 60490045 -
ttttgcctttgcccccattg

SEQ ID NO: 180260 - DNA, 20 bp, Artificial Sequence
  Synthetic oligonucleotide; TGG chr2 60490038 60490057 60490041 -
gcctttgcccccattgcaga

SEQ ID NO: 180261 - DNA, 20 bp, Artificial Sequence
  Synthetic oligonucleotide; GGG chr2 60490037 60490056 60490040 -
cctttgcccccattgcagat

SEQ ID NO: 180262 - DNA, 20 bp, Artificial Sequence
  Synthetic oligonucleotide; GGG chr2 60490036 60490055 60490039 -
ctttgcccccattgcagatg

SEQ ID NO: 180263 - DNA, 20 bp, Artificial Sequence
  Synthetic oligonucleotide; GAG chr2 60490034 60490053 60490037 -
ttgcccccattgcagatggg

SEQ ID NO: 180264 - DNA, 20 bp, Artificial Sequence
  Synthetic oligonucleotide; TGG chr2 60490031 60490050 60490034 -
cccccattgcagatggggag

SEQ ID NO: 180265 - DNA, 20 bp, Artificial Sequence
  Synthetic oligonucleotide; GGG chr2 60490030 60490049 60490033 -
ccccattgcagatggggagt

SEQ ID NO: 180266 - DNA, 20 bp, Artificial Sequence
  Synthetic oligonucleotide; CAG chr2 60490027 60490046 60490030 -
cattgcagatggggagtggg

SEQ ID NO: 180267 - DNA, 20 bp, Artificial Sequence
  Synthetic oligonucleotide; AGG chr2 60490026 60490045 60490029 -
attgcagatggggagtgggc

SEQ ID NO: 180268 - DNA, 20 bp, Artificial Sequence
  Synthetic oligonucleotide; CAG chr2 60490014 60490033 60490017 -
gagtgggcaggaatgacgtt

SEQ ID NO: 180269 - DNA, 20 bp, Artificial Sequence
  Synthetic oligonucleotide; AAG chr2 60490007 60490026 60490010 -
caggaatgacgttcagaatc

SEQ ID NO: 180270 - DNA, 20 bp, Artificial Sequence
  Synthetic oligonucleotide; AGG chr2 60490006 60490025 60490009 -
aggaatgacgttcagaatca

SEQ ID NO: 180271 - DNA, 20 bp, Artificial Sequence
  Synthetic oligonucleotide; GGG chr2 60490005 60490024 60490008 -
ggaatgacgttcagaatcaa

SEQ ID NO: 180272 - DNA, 20 bp, Artificial Sequence
  Synthetic oligonucleotide; CAG chr2 60489997 60490016 60490000 -
gttcagaatcaagggcccat

SEQ ID NO: 180273 - DNA, 20 bp, Artificial Sequence
  Synthetic oligonucleotide; AGG chr2 60489996 60490015 60489999 -
ttcagaatcaagggcccatc

SEQ ID NO: 180274 - DNA, 20 bp, Artificial Sequence
  Synthetic oligonucleotide; GGG chr2 60489995 60490014 60489998 -
tcagaatcaagggcccatca

SEQ ID NO: 180275 - DNA, 20 bp, Artificial Sequence
  Synthetic oligonucleotide; TGG chr2 60489985 60490004 60489988 -
gggcccatcagggtctgtat

SEQ ID NO: 180276 - DNA, 20 bp, Artificial Sequence
  Synthetic oligonucleotide; CAG chr2 60489964 60489983 60489967 -
ggtcccttgtccctctcctc

SEQ ID NO: 180277 - DNA, 20 bp, Artificial Sequence
  Synthetic oligonucleotide; TGG chr2 60489950 60489969 60489953 -
ctcctccagtccatccatgt

SEQ ID NO: 180278 - DNA, 20 bp, Artificial Sequence
  Synthetic oligonucleotide; GGG chr2 60489949 60489968 60489952 -
tcctccagtccatccatgtt

SEQ ID NO: 180279 - DNA, 20 bp, Artificial Sequence
  Synthetic oligonucleotide; CAG chr2 60489941 60489960 60489944 -
tccatccatgttgggatact

SEQ ID NO: 180280 - DNA, 20 bp, Artificial Sequence
  Synthetic oligonucleotide; AGG chr2 60489940 60489959 60489943 -
ccatccatgttgggatactc

SEQ ID NO: 180281 - DNA, 20 bp, Artificial Sequence
  Synthetic oligonucleotide; GGG chr2 60489939 60489958 60489942 -
catccatgttgggatactca

SEQ ID NO: 180282 - DNA, 20 bp, Artificial Sequence
  Synthetic oligonucleotide; TGG chr2 60489934 60489953 60489937 -
atgttgggatactcagggca

SEQ ID NO: 180283 - DNA, 20 bp, Artificial Sequence
  Synthetic oligonucleotide; TGG chr2 60489930 60489949 60489933 -
tgggatactcagggcatgga

SEQ ID NO: 180284 - DNA, 20 bp, Artificial Sequence
  Synthetic oligonucleotide; TAG chr2 60489917 60489936 60489920 -
gcatggatggtgtttcatga

SEQ ID NO: 180285 - DNA, 20 bp, Artificial Sequence
  Synthetic oligonucleotide; AAG chr2 60489883 60489902 60489886 -
ttgatgatatgtgacaaaat

SEQ ID NO: 180286 - DNA, 20 bp, Artificial Sequence
  Synthetic oligonucleotide; AGG chr2 60489882 60489901 60489885 -
tgatgatatgtgacaaaata

SEQ ID NO: 180287 - DNA, 20 bp, Artificial Sequence
  Synthetic oligonucleotide; CAG chr2 60489879 60489898 60489882 -
tgatatgtgacaaaataagg

SEQ ID NO: 180288 - DNA, 20 bp, Artificial Sequence
  Synthetic oligonucleotide; AGG chr2 60489878 60489897 60489881 -
gatatgtgacaaaataaggc

SEQ ID NO: 180289 - DNA, 20 bp, Artificial Sequence
  Synthetic oligonucleotide; TAG chr2 60489841 60489860 60489844 -
tccctgtgatctctctttaa

SEQ ID NO: 180290 - DNA, 20 bp, Artificial Sequence
  Synthetic oligonucleotide; TGG chr2 60489825 60489844 60489828 -
ttaatagtgtcctcctgctt

SEQ ID NO: 180291 - DNA, 20 bp, Artificial Sequence
  Synthetic oligonucleotide; GGG chr2 60489824 60489843 60489827 -
taatagtgtcctcctgcttt

SEQ ID NO: 180292 - DNA, 20 bp, Artificial Sequence
  Synthetic oligonucleotide; GGG chr2 60489823 60489842 60489826 -
aatagtgtcctcctgctttg

SEQ ID NO: 180293 - DNA, 20 bp, Artificial Sequence
  Synthetic oligonucleotide; GGG chr2 60489822 60489841 60489825 -
atagtgtcctcctgctttgg

SEQ ID NO: 180294 - DNA, 20 bp, Artificial Sequence
  Synthetic oligonucleotide; AAG chr2 60489814 60489833 60489817 -
ctcctgctttgggggttatt

SEQ ID NO: 180295 - DNA, 20 bp, Artificial Sequence
  Synthetic oligonucleotide; TAG chr2 60489810 60489829 60489813 -
tgctttgggggttattaagc

SEQ ID NO: 180296 - DNA, 20 bp, Artificial Sequence
  Synthetic oligonucleotide; GAG chr2 60489798 60489817 60489801 -
tattaagctagcctgaactt

SEQ ID NO: 180297 - DNA, 20 bp, Artificial Sequence
  Synthetic oligonucleotide; TGG chr2 60489785 60489804 60489788 -
tgaacttgagtaaacatttt

SEQ ID NO: 180298 - DNA, 20 bp, Artificial Sequence
  Synthetic oligonucleotide; TGG chr2 60489781 60489800 60489784 -
cttgagtaaacatttttgga

SEQ ID NO: 180299 - DNA, 20 bp, Artificial Sequence
  Synthetic oligonucleotide; GGG chr2 60489780 60489799 60489783 -
ttgagtaaacatttttggat

SEQ ID NO: 180300 - DNA, 20 bp, Artificial Sequence
  Synthetic oligonucleotide; GGG chr2 60489779 60489798 60489782 -
tgagtaaacatttttggatg

SEQ ID NO: 180301 - DNA, 20 bp, Artificial Sequence
  Synthetic oligonucleotide; GAG chr2 60489775 60489794 60489778 -
taaacatttttggatggggt

SEQ ID NO: 180302 - DNA, 20 bp, Artificial Sequence
  Synthetic oligonucleotide; GAG chr2 60489773 60489792 60489776 -
aacatttttggatggggtga

SEQ ID NO: 180303 - DNA, 20 bp, Artificial Sequence
  Synthetic oligonucleotide; AGG chr2 60489772 60489791 60489775 -
acatttttggatggggtgag

SEQ ID NO: 180304 - DNA, 20 bp, Artificial Sequence
  Synthetic oligonucleotide; GGG chr2 60489771 60489790 60489774 -
catttttggatggggtgaga

SEQ ID NO: 180305 - DNA, 20 bp, Artificial Sequence
  Synthetic oligonucleotide; GGG chr2 60489770 60489789 60489773 -
atttttggatggggtgagag

SEQ ID NO: 180306 - DNA, 20 bp, Artificial Sequence
  Synthetic oligonucleotide; GGG chr2 60489769 60489788 60489772 -
tttttggatggggtgagagg

SEQ ID NO: 180307 - DNA, 20 bp, Artificial Sequence
  Synthetic oligonucleotide; GGG chr2 60489768 60489787 60489771 -
ttttggatggggtgagaggg

SEQ ID NO: 180308 - DNA, 20 bp, Artificial Sequence
  Synthetic oligonucleotide; AAG chr2 60489758 60489777 60489761 -
ggtgagaggggggctgataa

SEQ ID NO: 180309 - DNA, 20 bp, Artificial Sequence
  Synthetic oligonucleotide; TGG chr2 60489755 60489774 60489758 -
gagaggggggctgataaaag

SEQ ID NO: 180310 - DNA, 20 bp, Artificial Sequence
  Synthetic oligonucleotide; TAG chr2 60489751 60489770 60489754 -
ggggggctgataaaagtggt

SEQ ID NO: 180311 - DNA, 20 bp, Artificial Sequence
  Synthetic oligonucleotide; TAG chr2 60489744 60489763 60489747 -
tgataaaagtggttagtaaa

SEQ ID NO: 180312 - DNA, 20 bp, Artificial Sequence
  Synthetic oligonucleotide; CAG chr2 60489740 60489759 60489743 -
aaaagtggttagtaaataga

SEQ ID NO: 180313 - DNA, 20 bp, Artificial Sequence
  Synthetic oligonucleotide; TGG chr2 60489736 60489755 60489739 -
gtggttagtaaatagacagt

SEQ ID NO: 180314 - DNA, 20 bp, Artificial Sequence
  Synthetic oligonucleotide; AAG chr2 60489732 60489751 60489735 -
ttagtaaatagacagttgga

SEQ ID NO: 180315 - DNA, 20 bp, Artificial Sequence
  Synthetic oligonucleotide; AGG chr2 60489731 60489750 60489734 -
tagtaaatagacagttggaa

SEQ ID NO: 180316 - DNA, 20 bp, Artificial Sequence
  Synthetic oligonucleotide; GAG chr2 60489729 60489748 60489732 -
gtaaatagacagttggaaag

SEQ ID NO: 180317 - DNA, 20 bp, Artificial Sequence
  Synthetic oligonucleotide; CGG chr2 60489724 60489743 60489727 -
tagacagttggaaaggagaa

SEQ ID NO: 180318 - DNA, 20 bp, Artificial Sequence
  Synthetic oligonucleotide; CGG chr2 60489719 60489738 60489722 -
agttggaaaggagaacggcc

SEQ ID NO: 180319 - DNA, 20 bp, Artificial Sequence
  Synthetic oligonucleotide; GGG chr2 60489718 60489737 60489721 -
gttggaaaggagaacggccc

SEQ ID NO: 180320 - DNA, 20 bp, Artificial Sequence
  Synthetic oligonucleotide; GGG chr2 60489717 60489736 60489720 -
ttggaaaggagaacggcccg

SEQ ID NO: 180321 - DNA, 20 bp, Artificial Sequence
  Synthetic oligonucleotide; GGG chr2 60489716 60489735 60489719 -
tggaaaggagaacggcccgg

SEQ ID NO: 180322 - DNA, 20 bp, Artificial Sequence
  Synthetic oligonucleotide; CAG chr2 60489711 60489730 60489714 -
aggagaacggcccgggggct

SEQ ID NO: 180323 - DNA, 20 bp, Artificial Sequence
  Synthetic oligonucleotide; AGG chr2 60489710 60489729 60489713 -
ggagaacggcccgggggctc

SEQ ID NO: 180324 - DNA, 20 bp, Artificial Sequence
  Synthetic oligonucleotide; GAG chr2 60489708 60489727 60489711 -
agaacggcccgggggctcag

SEQ ID NO: 180325 - DNA, 20 bp, Artificial Sequence
  Synthetic oligonucleotide; GAG chr2 60489703 60489722 60489706 -
ggcccgggggctcaggagat

SEQ ID NO: 180326 - DNA, 20 bp, Artificial Sequence
  Synthetic oligonucleotide; CAG chr2 60489699 60489718 60489702 -
cgggggctcaggagatgagc

SEQ ID NO: 180327 - DNA, 20 bp, Artificial Sequence
  Synthetic oligonucleotide; AGG chr2 60489698 60489717 60489701 -
gggggctcaggagatgagcc

SEQ ID NO: 180328 - DNA, 20 bp, Artificial Sequence
  Synthetic oligonucleotide; GGG chr2 60489697 60489716 60489700 -
ggggctcaggagatgagcca

SEQ ID NO: 180329 - DNA, 20 bp, Artificial Sequence
  Synthetic oligonucleotide; AAG chr2 60489691 60489710 60489694 -
caggagatgagccagggaac

SEQ ID NO: 180330 - DNA, 20 bp, Artificial Sequence
  Synthetic oligonucleotide; AGG chr2 60489690 60489709 60489693 -
aggagatgagccagggaaca

SEQ ID NO: 180331 - DNA, 20 bp, Artificial Sequence
  Synthetic oligonucleotide; AAG chr2 60489686 60489705 60489689 -
gatgagccagggaacaagga

SEQ ID NO: 180332 - DNA, 20 bp, Artificial Sequence
  Synthetic oligonucleotide; CAG chr2 60489683 60489702 60489686 -
gagccagggaacaaggaaag

SEQ ID NO: 180333 - DNA, 20 bp, Artificial Sequence
  Synthetic oligonucleotide; GAG chr2 60489681 60489700 60489684 -
gccagggaacaaggaaagca

SEQ ID NO: 180334 - DNA, 20 bp, Artificial Sequence
  Synthetic oligonucleotide; TAG chr2 60489674 60489693 60489677 -
aacaaggaaagcagagatgc

SEQ ID NO: 180335 - DNA, 20 bp, Artificial Sequence
  Synthetic oligonucleotide; CAG chr2 60489666 60489685 60489669 -
aagcagagatgctagtgacc

SEQ ID NO: 180336 - DNA, 20 bp, Artificial Sequence
  Synthetic oligonucleotide; GAG chr2 60489664 60489683 60489667 -
gcagagatgctagtgaccca

SEQ ID NO: 180337 - DNA, 20 bp, Artificial Sequence
  Synthetic oligonucleotide; TAG chr2 60489656 60489675 60489659 -
gctagtgacccagagtgtcc

SEQ ID NO: 180338 - DNA, 20 bp, Artificial Sequence
  Synthetic oligonucleotide; GAG chr2 60489654 60489673 60489657 -
tagtgacccagagtgtccta

SEQ ID NO: 180339 - DNA, 20 bp, Artificial Sequence
  Synthetic oligonucleotide; AGG chr2 60489653 60489672 60489656 -
agtgacccagagtgtcctag

SEQ ID NO: 180340 - DNA, 20 bp, Artificial Sequence
  Synthetic oligonucleotide; GGG chr2 60489652 60489671 60489655 -
gtgacccagagtgtcctaga

SEQ ID NO: 180341 - DNA, 20 bp, Artificial Sequence
  Synthetic oligonucleotide; GGG chr2 60489651 60489670 60489654 -
tgacccagagtgtcctagag

SEQ ID NO: 180342 - DNA, 20 bp, Artificial Sequence
  Synthetic oligonucleotide; AAG chr2 60489647 60489666 60489650 -
ccagagtgtcctagagggga

SEQ ID NO: 180343 - DNA, 20 bp, Artificial Sequence
  Synthetic oligonucleotide; TAG chr2 60489635 60489654 60489638 -
agaggggaaagaacctctgt

SEQ ID NO: 180344 - DNA, 20 bp, Artificial Sequence
  Synthetic oligonucleotide; CAG chr2 60489620 60489639 60489623 -
tctgttagaatttcaaatgt

SEQ ID NO: 180345 - DNA, 20 bp, Artificial Sequence
  Synthetic oligonucleotide; CAG chr2 60489607 60489626 60489610 -
caaatgtcagactttctttt

SEQ ID NO: 180346 - DNA, 20 bp, Artificial Sequence
  Synthetic oligonucleotide; CAG chr2 60489597 60489616 60489600 -
actttcttttcagcttcctt

SEQ ID NO: 180347 - DNA, 20 bp, Artificial Sequence
  Synthetic oligonucleotide; AGG chr2 60489596 60489615 60489599 -
ctttcttttcagcttccttc

SEQ ID NO: 180348 - DNA, 20 bp, Artificial Sequence
  Synthetic oligonucleotide; CAG chr2 60489577 60489596 60489580 -
caggtgcttcctcttctact

SEQ ID NO: 180349 - DNA, 20 bp, Artificial Sequence
  Synthetic oligonucleotide; GAG chr2 60489563 60489582 60489566 -
tctactcagaattttctttt

SEQ ID NO: 180350 - DNA, 20 bp, Artificial Sequence
  Synthetic oligonucleotide; TAG chr2 60489559 60489578 60489562 -
ctcagaattttcttttgaga

SEQ ID NO: 180351 - DNA, 20 bp, Artificial Sequence
  Synthetic oligonucleotide; AGG chr2 60489558 60489577 60489561 -
tcagaattttcttttgagat

SEQ ID NO: 180352 - DNA, 20 bp, Artificial Sequence
  Synthetic oligonucleotide; TGG chr2 60489552 60489571 60489555 -
ttttcttttgagataggtgc

SEQ ID NO: 180353 - DNA, 20 bp, Artificial Sequence
  Synthetic oligonucleotide; AAG chr2 60489543 60489562 60489546 -
gagataggtgctggtcaaac

SEQ ID NO: 180354 - DNA, 20 bp, Artificial Sequence
  Synthetic oligonucleotide; TGG chr2 60489530 60489549 60489533 -
gtcaaacaagcttttgtttg

SEQ ID NO: 180355 - DNA, 20 bp, Artificial Sequence
  Synthetic oligonucleotide; TGG chr2 60489526 60489545 60489529 -
aacaagcttttgtttgtggc

SEQ ID NO: 180356 - DNA, 20 bp, Artificial Sequence
  Synthetic oligonucleotide; TGG chr2 60489518 60489537 60489521 -
tttgtttgtggctggtcact

SEQ ID NO: 180357 - DNA, 20 bp, Artificial Sequence
  Synthetic oligonucleotide; CAG chr2 60489511 60489530 60489514 -
gtggctggtcacttggcaca

SEQ ID NO: 180358 - DNA, 20 bp, Artificial Sequence
  Synthetic oligonucleotide; TGG chr2 60489506 60489525 60489509 -
tggtcacttggcacacagtg

SEQ ID NO: 180359 - DNA, 20 bp, Artificial Sequence
  Synthetic oligonucleotide; TGG chr2 60489490 60489509 60489493 -
agtgtggctgtttgtcatcc

SEQ ID NO: 180360 - DNA, 20 bp, Artificial Sequence
  Synthetic oligonucleotide; GAG chr2 60489482 60489501 60489485 -
tgtttgtcatcctggatgat

SEQ ID NO: 180361 - DNA, 20 bp, Artificial Sequence
  Synthetic oligonucleotide; AGG chr2 60489481 60489500 60489484 -
gtttgtcatcctggatgatg

SEQ ID NO: 180362 - DNA, 20 bp, Artificial Sequence
  Synthetic oligonucleotide; CAG chr2 60489478 60489497 60489481 -
tgtcatcctggatgatgagg

SEQ ID NO: 180363 - DNA, 20 bp, Artificial Sequence
  Synthetic oligonucleotide; TGG chr2 60489466 60489485 60489469 -
tgatgaggcagctattttaa

SEQ ID NO: 180364 - DNA, 20 bp, Artificial Sequence
  Synthetic oligonucleotide; CAG chr2 60489459 60489478 60489462 -
gcagctattttaatggcacg

SEQ ID NO: 180365 - DNA, 20 bp, Artificial Sequence
  Synthetic oligonucleotide; AGG chr2 60489458 60489477 60489461 -
cagctattttaatggcacgc

SEQ ID NO: 180366 - DNA, 20 bp, Artificial Sequence
  Synthetic oligonucleotide; GGG chr2 60489457 60489476 60489460 -
agctattttaatggcacgca

SEQ ID NO: 180367 - DNA, 20 bp, Artificial Sequence
  Synthetic oligonucleotide; AAG chr2 60489435 60489454 60489438 -
gccgccgtgtgtttactgcc

SEQ ID NO: 180368 - DNA, 20 bp, Artificial Sequence
  Synthetic oligonucleotide; AAG chr2 60489428 60489447 60489431 -
tgtgtttactgccaagaaat

SEQ ID NO: 180369 - DNA, 20 bp, Artificial Sequence
  Synthetic oligonucleotide; AGG chr2 60489427 60489446 60489430 -
gtgtttactgccaagaaata

SEQ ID NO: 180370 - DNA, 20 bp, Artificial Sequence
  Synthetic oligonucleotide; GGG chr2 60489426 60489445 60489429 -
tgtttactgccaagaaataa

SEQ ID NO: 180371 - DNA, 20 bp, Artificial Sequence
  Synthetic oligonucleotide; TAG chr2 60489419 60489438 60489422 -
tgccaagaaataagggcttc

SEQ ID NO: 180372 - DNA, 20 bp, Artificial Sequence
  Synthetic oligonucleotide; AGG chr2 60489418 60489437 60489421 -
gccaagaaataagggcttct

SEQ ID NO: 180373 - DNA, 20 bp, Artificial Sequence
  Synthetic oligonucleotide; GAG chr2 60489416 60489435 60489419 -
caagaaataagggcttctag

SEQ ID NO: 180374 - DNA, 20 bp, Artificial Sequence
  Synthetic oligonucleotide; TGG chr2 60489410 60489429 60489413 -
ataagggcttctaggagact

SEQ ID NO: 180375 - DNA, 20 bp, Artificial Sequence
  Synthetic oligonucleotide; TGG chr2 60489407 60489426 60489410 -
agggcttctaggagacttgg

SEQ ID NO: 180376 - DNA, 20 bp, Artificial Sequence
  Synthetic oligonucleotide; TAG chr2 60489401 60489420 60489404 -
tctaggagacttggtggctt

SEQ ID NO: 180377 - DNA, 20 bp, Artificial Sequence
  Synthetic oligonucleotide; AGG chr2 60489400 60489419 60489403 -
ctaggagacttggtggcttt

SEQ ID NO: 180378 - DNA, 20 bp, Artificial Sequence
  Synthetic oligonucleotide; CAG chr2 60489387 60489406 60489390 -
tggctttaggaacaaacttc

SEQ ID NO: 180379 - DNA, 20 bp, Artificial Sequence
  Synthetic oligonucleotide; CGG chr2 60489384 60489403 60489387 -
ctttaggaacaaacttccag

SEQ ID NO: 180380 - DNA, 20 bp, Artificial Sequence
  Synthetic oligonucleotide; CAG chr2 60489381 60489400 60489384 -
taggaacaaacttccagcgg

SEQ ID NO: 180381 - DNA, 20 bp, Artificial Sequence
  Synthetic oligonucleotide; TAG chr2 60489374 60489393 60489377 -
aaacttccagcggcagaaat

SEQ ID NO: 180382 - DNA, 20 bp, Artificial Sequence
  Synthetic oligonucleotide; TAG chr2 60489370 60489389 60489373 -
ttccagcggcagaaattagt

SEQ ID NO: 180383 - DNA, 20 bp, Artificial Sequence
  Synthetic oligonucleotide; AGG chr2 60489369 60489388 60489372 -
tccagcggcagaaattagtt

SEQ ID NO: 180384 - DNA, 20 bp, Artificial Sequence
  Synthetic oligonucleotide; AAG chr2 60489366 60489385 60489369 -
agcggcagaaattagttagg

SEQ ID NO: 180385 - DNA, 20 bp, Artificial Sequence
  Synthetic oligonucleotide; CAG chr2 60489363 60489382 60489366 -
ggcagaaattagttaggaag

SEQ ID NO: 180386 - DNA, 20 bp, Artificial Sequence
  Synthetic oligonucleotide; GAG chr2 60489361 60489380 60489364 -
cagaaattagttaggaagca

SEQ ID NO: 180387 - DNA, 20 bp, Artificial Sequence
  Synthetic oligonucleotide; TAG chr2 60489358 60489377 60489361 -
aaattagttaggaagcagag

SEQ ID NO: 180388 - DNA, 20 bp, Artificial Sequence
  Synthetic oligonucleotide; TGG chr2 60489352 60489371 60489355 -
gttaggaagcagagtagcac

SEQ ID NO: 180389 - DNA, 20 bp, Artificial Sequence
  Synthetic oligonucleotide; GGG chr2 60489351 60489370 60489354 -
ttaggaagcagagtagcact

SEQ ID NO: 180390 - DNA, 20 bp, Artificial Sequence
  Synthetic oligonucleotide; TGG chr2 60489322 60489341 60489325 -
atgcctctattgtatgaatt

SEQ ID NO: 180391 - DNA, 20 bp, Artificial Sequence
  Synthetic oligonucleotide; TGG chr2 60489311 60489330 60489314 -
gtatgaatttggatatgttg

SEQ ID NO: 180392 - DNA, 20 bp, Artificial Sequence
  Synthetic oligonucleotide; GGG chr2 60489310 60489329 60489313 -
tatgaatttggatatgttgt

SEQ ID NO: 180393 - DNA, 20 bp, Artificial Sequence
  Synthetic oligonucleotide; AAG chr2 60489294 60489313 60489297 -
ttgtgggcaaaatgacataa

SEQ ID NO: 180394 - DNA, 20 bp, Artificial Sequence
  Synthetic oligonucleotide; TGG chr2 60489288 60489307 60489291 -
gcaaaatgacataaaagaaa

SEQ ID NO: 180395 - DNA, 20 bp, Artificial Sequence
  Synthetic oligonucleotide; GAG chr2 60489282 60489301 60489285 -
tgacataaaagaaatggaat

SEQ ID NO: 180396 - DNA, 20 bp, Artificial Sequence
  Synthetic oligonucleotide; TAG chr2 60489276 60489295 60489279 -
aaaagaaatggaatgagaaa

SEQ ID NO: 180397 - DNA, 20 bp, Artificial Sequence
  Synthetic oligonucleotide; AAG chr2 60489270 60489289 60489273 -
aatggaatgagaaatagtgt

SEQ ID NO: 180398 - DNA, 20 bp, Artificial Sequence
  Synthetic oligonucleotide; AAG chr2 60489259 60489278 60489262 -
aaatagtgtaagtgactgac

SEQ ID NO: 180399 - DNA, 20 bp, Artificial Sequence
  Synthetic oligonucleotide; AGG chr2 60489258 60489277 60489261 -
aatagtgtaagtgactgaca

SEQ ID NO: 180400 - DNA, 20 bp, Artificial Sequence
  Synthetic oligonucleotide; TGG chr2 60489248 60489267 60489251 -
gtgactgacaaggaccccat

SEQ ID NO: 180401 - DNA, 20 bp, Artificial Sequence
  Synthetic oligonucleotide; TGG chr2 60489241 60489260 60489244 -
acaaggaccccattggcatg

SEQ ID NO: 180402 - DNA, 20 bp, Artificial Sequence
  Synthetic oligonucleotide; GGG chr2 60489240 60489259 60489243 -
caaggaccccattggcatgt

SEQ ID NO: 180403 - DNA, 20 bp, Artificial Sequence
  Synthetic oligonucleotide; TAG chr2 60489236 60489255 60489239 -
gaccccattggcatgtgggc

SEQ ID NO: 180404 - DNA, 20 bp, Artificial Sequence
  Synthetic oligonucleotide; TGG chr2 60489226 60489245 60489229 -
gcatgtgggctagtgttgac

SEQ ID NO: 180405 - DNA, 20 bp, Artificial Sequence
  Synthetic oligonucleotide; CAG chr2 60489217 60489236 60489220 -
ctagtgttgactggctctca

SEQ ID NO: 180406 - DNA, 20 bp, Artificial Sequence
  Synthetic oligonucleotide; TAG chr2 60489206 60489225 60489209 -
tggctctcacagtgtgaatt

SEQ ID NO: 180407 - DNA, 20 bp, Artificial Sequence
  Synthetic oligonucleotide; TAG chr2 60489202 60489221 60489205 -
tctcacagtgtgaatttagt

SEQ ID NO: 180408 - DNA, 20 bp, Artificial Sequence
  Synthetic oligonucleotide; AGG chr2 60489201 60489220 60489204 -
ctcacagtgtgaatttagtt

SEQ ID NO: 180409 - DNA, 20 bp, Artificial Sequence
  Synthetic oligonucleotide; AAG chr2 60489169 60489188 60489172 -
tttattttccccaaactcta

SEQ ID NO: 180410 - DNA, 20 bp, Artificial Sequence
  Synthetic oligonucleotide; CAG chr2 60489163 60489182 60489166 -
ttccccaaactctaaagcaa

SEQ ID NO: 180411 - DNA, 20 bp, Artificial Sequence
  Synthetic oligonucleotide; TGG chr2 60489154 60489173 60489157 -
ctctaaagcaacagtttaat

SEQ ID NO: 180412 - DNA, 20 bp, Artificial Sequence
  Synthetic oligonucleotide; GGG chr2 60489153 60489172 60489156 -
tctaaagcaacagtttaatt

SEQ ID NO: 180413 - DNA, 20 bp, Artificial Sequence
  Synthetic oligonucleotide; GGG chr2 60489152 60489171 60489155 -
ctaaagcaacagtttaattg

SEQ ID NO: 180414 - DNA, 20 bp, Artificial Sequence
  Synthetic oligonucleotide; AAG chr2 60489146 60489165 60489149 -
caacagtttaattggggtct

SEQ ID NO: 180415 - DNA, 20 bp, Artificial Sequence
  Synthetic oligonucleotide; AGG chr2 60489145 60489164 60489148 -
aacagtttaattggggtcta

SEQ ID NO: 180416 - DNA, 20 bp, Artificial Sequence
  Synthetic oligonucleotide; TAG chr2 60489135 60489154 60489138 -
ttggggtctaaggtaccctt

SEQ ID NO: 180417 - DNA, 20 bp, Artificial Sequence
  Synthetic oligonucleotide; TAG chr2 60489109 60489128 60489112 -
cattttgaccacctattatt

SEQ ID NO: 180418 - DNA, 20 bp, Artificial Sequence
  Synthetic oligonucleotide; AGG chr2 60489108 60489127 60489111 -
attttgaccacctattattt

SEQ ID NO: 180419 - DNA, 20 bp, Artificial Sequence
  Synthetic oligonucleotide; CAG chr2 60489100 60489119 60489103 -
cacctattatttaggacaca

SEQ ID NO: 180420 - DNA, 20 bp, Artificial Sequence
  Synthetic oligonucleotide; AAG chr2 60489082 60489101 60489085 -
cacagcattttttttctttg

SEQ ID NO: 180421 - DNA, 20 bp, Artificial Sequence
  Synthetic oligonucleotide; TGG chr2 60489067 60489086 60489070 -
ctttgaagataaatttgttt

SEQ ID NO: 180422 - DNA, 20 bp, Artificial Sequence
  Synthetic oligonucleotide; GGG chr2 60489066 60489085 60489069 -
tttgaagataaatttgtttt

SEQ ID NO: 180423 - DNA, 20 bp, Artificial Sequence
  Synthetic oligonucleotide; TGG chr2 60489061 60489080 60489064 -
agataaatttgttttgggta

SEQ ID NO: 180424 - DNA, 20 bp, Artificial Sequence
  Synthetic oligonucleotide; TGG chr2 60489057 60489076 60489060 -
aaatttgttttgggtatggc

SEQ ID NO: 180425 - DNA, 20 bp, Artificial Sequence
  Synthetic oligonucleotide; GGG chr2 60489056 60489075 60489059 -
aatttgttttgggtatggct

SEQ ID NO: 180426 - DNA, 20 bp, Artificial Sequence
  Synthetic oligonucleotide; TGG chr2 60489051 60489070 60489054 -
gttttgggtatggctgggtg

SEQ ID NO: 180427 - DNA, 20 bp, Artificial Sequence
  Synthetic oligonucleotide; TAG chr2 60489048 60489067 60489051 -
ttgggtatggctgggtgtgg

SEQ ID NO: 180428 - DNA, 20 bp, Artificial Sequence
  Synthetic oligonucleotide; CAG chr2 60489029 60489048 60489032 -
gtagcttatgcctataatcc

SEQ ID NO: 180429 - DNA, 20 bp, Artificial Sequence
  Synthetic oligonucleotide; TGG chr2 60489021 60489040 60489024 -
tgcctataatcccagcactt

SEQ ID NO: 180430 - DNA, 20 bp, Artificial Sequence
  Synthetic oligonucleotide; GGG chr2 60489020 60489039 60489023 -
gcctataatcccagcacttt

SEQ ID NO: 180431 - DNA, 20 bp, Artificial Sequence
  Synthetic oligonucleotide; GAG chr2 60489018 60489037 60489021 -
ctataatcccagcactttgg

SEQ ID NO: 180432 - DNA, 20 bp, Artificial Sequence
  Synthetic oligonucleotide; AGG chr2 60489017 60489036 60489020 -
tataatcccagcactttggg

SEQ ID NO: 180433 - DNA, 20 bp, Artificial Sequence
  Synthetic oligonucleotide; GAG chr2 60489012 60489031 60489015 -
tcccagcactttgggaggct

SEQ ID NO: 180434 - DNA, 20 bp, Artificial Sequence
  Synthetic oligonucleotide; AGG chr2 60489011 60489030 60489014 -
cccagcactttgggaggctg

SEQ ID NO: 180435 - DNA, 20 bp, Artificial Sequence
  Synthetic oligonucleotide; TGG chr2 60489008 60489027 60489011 -
agcactttgggaggctgagg

SEQ ID NO: 180436 - DNA, 20 bp, Artificial Sequence
  Synthetic oligonucleotide; GGG chr2 60489007 60489026 60489010 -
gcactttgggaggctgaggt

SEQ ID NO: 180437 - DNA, 20 bp, Artificial Sequence
  Synthetic oligonucleotide; TGG chr2 60489004 60489023 60489007 -
ctttgggaggctgaggtggg

SEQ ID NO: 180438 - DNA, 20 bp, Artificial Sequence
  Synthetic oligonucleotide; AAG chr2 60488994 60489013 60488997 -
ctgaggtgggtggatcacct

SEQ ID NO: 180439 - DNA, 20 bp, Artificial Sequence
  Synthetic oligonucleotide; AGG chr2 60488993 60489012 60488996 -
tgaggtgggtggatcaccta

SEQ ID NO: 180440 - DNA, 20 bp, Artificial Sequence
  Synthetic oligonucleotide; CGG chr2 60488989 60489008 60488992 -
gtgggtggatcacctaaggt

SEQ ID NO: 180441 - DNA, 20 bp, Artificial Sequence
  Synthetic oligonucleotide; GGG chr2 60488988 60489007 60488991 -
tgggtggatcacctaaggtc

SEQ ID NO: 180442 - DNA, 20 bp, Artificial Sequence
  Synthetic oligonucleotide; GAG chr2 60488986 60489005 60488989 -
ggtggatcacctaaggtcgg

SEQ ID NO: 180443 - DNA, 20 bp, Artificial Sequence
  Synthetic oligonucleotide; GAG chr2 60488980 60488999 60488983 -
tcacctaaggtcgggagttt

SEQ ID NO: 180444 - DNA, 20 bp, Artificial Sequence
  Synthetic oligonucleotide; CAG chr2 60488975 60488994 60488978 -
taaggtcgggagtttgagac

SEQ ID NO: 180445 - DNA, 20 bp, Artificial Sequence
  Synthetic oligonucleotide; TGG chr2 60488961 60488980 60488964 -
tgagaccagcctgaccaaca

SEQ ID NO: 180446 - DNA, 20 bp, Artificial Sequence
  Synthetic oligonucleotide; GAG chr2 60488959 60488978 60488962 -
agaccagcctgaccaacatg

SEQ ID NO: 180447 - DNA, 20 bp, Artificial Sequence
  Synthetic oligonucleotide; CAG chr2 60488933 60488952 60488936 -
ccccgtctctaccaaaaata

SEQ ID NO: 180448 - DNA, 20 bp, Artificial Sequence
  Synthetic oligonucleotide; TAG chr2 60488926 60488945 60488929 -
tctaccaaaaatacagaaat

SEQ ID NO: 180449 - DNA, 20 bp, Artificial Sequence
  Synthetic oligonucleotide; TGG chr2 60488916 60488935 60488919 -
atacagaaattagccgcgtg

SEQ ID NO: 180450 - DNA, 20 bp, Artificial Sequence
  Synthetic oligonucleotide; TGG chr2 60488913 60488932 60488916 -
cagaaattagccgcgtgtgg

SEQ ID NO: 180451 - DNA, 20 bp, Artificial Sequence
  Synthetic oligonucleotide; CAG chr2 60488894 60488913 60488897 -
gtggcgcatgcctataatcc

SEQ ID NO: 180452 - DNA, 20 bp, Artificial Sequence
  Synthetic oligonucleotide; TGG chr2 60488886 60488905 60488889 -
tgcctataatcccagctact

SEQ ID NO: 180453 - DNA, 20 bp, Artificial Sequence
  Synthetic oligonucleotide; GGG chr2 60488885 60488904 60488888 -
gcctataatcccagctactt

SEQ ID NO: 180454 - DNA, 20 bp, Artificial Sequence
  Synthetic oligonucleotide; GAG chr2 60488883 60488902 60488886 -
ctataatcccagctacttgg

SEQ ID NO: 180455 - DNA, 20 bp, Artificial Sequence
  Synthetic oligonucleotide; AGG chr2 60488882 60488901 60488885 -
tataatcccagctacttggg

SEQ ID NO: 180456 - DNA, 20 bp, Artificial Sequence
  Synthetic oligonucleotide; GAG chr2 60488877 60488896 60488880 -
tcccagctacttgggaggct

SEQ ID NO: 180457 - DNA, 20 bp, Artificial Sequence
  Synthetic oligonucleotide; AGG chr2 60488876 60488895 60488879 -
cccagctacttgggaggctg

SEQ ID NO: 180458 - DNA, 20 bp, Artificial Sequence
  Synthetic oligonucleotide; CAG chr2 60488873 60488892 60488876 -
agctacttgggaggctgagg

SEQ ID NO: 180459 - DNA, 20 bp, Artificial Sequence
  Synthetic oligonucleotide; AGG chr2 60488872 60488891 60488875 -
gctacttgggaggctgaggc

SEQ ID NO: 180460 - DNA, 20 bp, Artificial Sequence
  Synthetic oligonucleotide; GAG chr2 60488870 60488889 60488873 -
tacttgggaggctgaggcag

SEQ ID NO: 180461 - DNA, 20 bp, Artificial Sequence
  Synthetic oligonucleotide; CGG chr2 60488854 60488873 60488857 -
gcaggagaatcgcttgaacc

SEQ ID NO: 180462 - DNA, 20 bp, Artificial Sequence
  Synthetic oligonucleotide; GGG chr2 60488853 60488872 60488856 -
caggagaatcgcttgaaccc

SEQ ID NO: 180463 - DNA, 20 bp, Artificial Sequence
  Synthetic oligonucleotide; GAG chr2 60488851 60488870 60488854 -
ggagaatcgcttgaacccgg

SEQ ID NO: 180464 - DNA, 20 bp, Artificial Sequence
  Synthetic oligonucleotide; AGG chr2 60488850 60488869 60488853 -
gagaatcgcttgaacccggg

SEQ ID NO: 180465 - DNA, 20 bp, Artificial Sequence
  Synthetic oligonucleotide; CGG chr2 60488847 60488866 60488850 -
aatcgcttgaacccgggagg

SEQ ID NO: 180466 - DNA, 20 bp, Artificial Sequence
  Synthetic oligonucleotide; GAG chr2 60488845 60488864 60488848 -
tcgcttgaacccgggaggcg

SEQ ID NO: 180467 - DNA, 20 bp, Artificial Sequence
  Synthetic oligonucleotide; CGG chr2 60488838 60488857 60488841 -
aacccgggaggcggagattg

SEQ ID NO: 180468 - DNA, 20 bp, Artificial Sequence
  Synthetic oligonucleotide; GAG chr2 60488834 60488853 60488837 -
cgggaggcggagattgcggt

SEQ ID NO: 180469 - DNA, 20 bp, Artificial Sequence
  Synthetic oligonucleotide; GAG chr2 60488829 60488848 60488832 -
ggcggagattgcggtgagcc

SEQ ID NO: 180470 - DNA, 20 bp, Artificial Sequence
  Synthetic oligonucleotide; CAG chr2 60488809 60488828 60488812 -
gagattgcgccattgcactc

SEQ ID NO: 180471 - DNA, 20 bp, Artificial Sequence
  Synthetic oligonucleotide; CGG chr2 60488804 60488823 60488807 -
tgcgccattgcactccagcc

SEQ ID NO: 180472 - DNA, 20 bp, Artificial Sequence
  Synthetic oligonucleotide; GGG chr2 60488803 60488822 60488806 -
gcgccattgcactccagccc

SEQ ID NO: 180473 - DNA, 20 bp, Artificial Sequence
  Synthetic oligonucleotide; AAG chr2 60488796 60488815 60488799 -
tgcactccagcccgggcaac

SEQ ID NO: 180474 - DNA, 20 bp, Artificial Sequence
  Synthetic oligonucleotide; GAG chr2 60488794 60488813 60488797 -
cactccagcccgggcaacaa

SEQ ID NO: 180475 - DNA, 20 bp, Artificial Sequence
  Synthetic oligonucleotide; CAG chr2 60488778 60488797 60488781 -
acaagagcgaaactccacct

SEQ ID NO: 180476 - DNA, 20 bp, Artificial Sequence
  Synthetic oligonucleotide; TGG chr2 60488730 60488749 60488733 -
acaaacaaacaaaatcgttt

SEQ ID NO: 180477 - DNA, 20 bp, Artificial Sequence
  Synthetic oligonucleotide; GGG chr2 60488729 60488748 60488732 -
caaacaaacaaaatcgtttt

SEQ ID NO: 180478 - DNA, 20 bp, Artificial Sequence
  Synthetic oligonucleotide; TAG chr2 60488726 60488745 60488729 -
acaaacaaaatcgttttggg

SEQ ID NO: 180479 - DNA, 20 bp, Artificial Sequence
  Synthetic oligonucleotide; CAG chr2 60488723 60488742 60488726 -
aacaaaatcgttttgggtag

SEQ ID NO: 180480 - DNA, 20 bp, Artificial Sequence
  Synthetic oligonucleotide; TGG chr2 60488720 60488739 60488723 -
aaaatcgttttgggtagcag

SEQ ID NO: 180481 - DNA, 20 bp, Artificial Sequence
  Synthetic oligonucleotide; TAG chr2 60488714 60488733 60488717 -
gttttgggtagcagtggctt

SEQ ID NO: 180482 - DNA, 20 bp, Artificial Sequence
  Synthetic oligonucleotide; AGG chr2 60488713 60488732 60488716 -
ttttgggtagcagtggcttt

SEQ ID NO: 180483 - DNA, 20 bp, Artificial Sequence
  Synthetic oligonucleotide; TGG chr2 60488703 60488722 60488706 -
cagtggctttaggctgtttt

SEQ ID NO: 180484 - DNA, 20 bp, Artificial Sequence
  Synthetic oligonucleotide; TGG chr2 60488695 60488714 60488698 -
ttaggctgtttttggatctt

SEQ ID NO: 180485 - DNA, 20 bp, Artificial Sequence
  Synthetic oligonucleotide; AAG chr2 60488649 60488668 60488652 -
tttgttattattttcatgtt

SEQ ID NO: 180486 - DNA, 20 bp, Artificial Sequence
  Synthetic oligonucleotide; TAG chr2 60488640 60488659 60488643 -
attttcatgttaagcaaaac

SEQ ID NO: 180487 - DNA, 20 bp, Artificial Sequence
  Synthetic oligonucleotide; AAG chr2 60488636 60488655 60488639 -
tcatgttaagcaaaactaga

SEQ ID NO: 180488 - DNA, 20 bp, Artificial Sequence
  Synthetic oligonucleotide; CAG chr2 60488615 60488634 60488618 -
agttttaccgaattcccctg

SEQ ID NO: 180489 - DNA, 20 bp, Artificial Sequence
  Synthetic oligonucleotide; CAG chr2 60488610 60488629 60488613 -
taccgaattcccctgcagta

SEQ ID NO: 180490 - DNA, 20 bp, Artificial Sequence
  Synthetic oligonucleotide; AAG chr2 60488606 60488625 60488609 -
gaattcccctgcagtacagt

SEQ ID NO: 180491 - DNA, 20 bp, Artificial Sequence
  Synthetic oligonucleotide; TGG chr2 60488590 60488609 60488593 -
cagtaagtattttctttcat

SEQ ID NO: 180492 - DNA, 20 bp, Artificial Sequence
  Synthetic oligonucleotide; GGG chr2 60488589 60488608 60488592 -
agtaagtattttctttcatt

SEQ ID NO: 180493 - DNA, 20 bp, Artificial Sequence
  Synthetic oligonucleotide; GGG chr2 60488588 60488607 60488591 -
gtaagtattttctttcattg

SEQ ID NO: 180494 - DNA, 20 bp, Artificial Sequence
  Synthetic oligonucleotide; GGG chr2 60488587 60488606 60488590 -
taagtattttctttcattgg

SEQ ID NO: 180495 - DNA, 20 bp, Artificial Sequence
  Synthetic oligonucleotide; AAG chr2 60488584 60488603 60488587 -
gtattttctttcattggggg

SEQ ID NO: 180496 - DNA, 20 bp, Artificial Sequence
  Synthetic oligonucleotide; CAG chr2 60488570 60488589 60488573 -
tgggggaagcaaactattta

SEQ ID NO: 180497 - DNA, 20 bp, Artificial Sequence
  Synthetic oligonucleotide; CAG chr2 60488561 60488580 60488564 -
caaactatttacagccataa

SEQ ID NO: 180498 - DNA, 20 bp, Artificial Sequence
  Synthetic oligonucleotide; AGG chr2 60488560 60488579 60488563 -
aaactatttacagccataac

SEQ ID NO: 180499 - DNA, 20 bp, Artificial Sequence
  Synthetic oligonucleotide; GGG chr2 60488559 60488578 60488562 -
aactatttacagccataaca

SEQ ID NO: 180500 - DNA, 20 bp, Artificial Sequence
  Synthetic oligonucleotide; CAG chr2 60488552 60488571 60488555 -
tacagccataacagggtttc

SEQ ID NO: 180501 - DNA, 20 bp, Artificial Sequence
  Synthetic oligonucleotide; AAG chr2 60488539 60488558 60488542 -
gggtttccagtgaattgtat

SEQ ID NO: 180502 - DNA, 20 bp, Artificial Sequence
  Synthetic oligonucleotide; TAG chr2 60488536 60488555 60488539 -
tttccagtgaattgtataag

SEQ ID NO: 180503 - DNA, 20 bp, Artificial Sequence
  Synthetic oligonucleotide; GAG chr2 60488529 60488548 60488532 -
tgaattgtataagtagcact

SEQ ID NO: 180504 - DNA, 20 bp, Artificial Sequence
  Synthetic oligonucleotide; CAG chr2 60488518 60488537 60488521 -
agtagcactgagttctgtgt

SEQ ID NO: 180505 - DNA, 20 bp, Artificial Sequence
  Synthetic oligonucleotide; TAG chr2 60488490 60488509 60488493 -
aatgaaacaaaaactgatca

SEQ ID NO: 180506 - DNA, 20 bp, Artificial Sequence
  Synthetic oligonucleotide; CAG chr2 60488469 60488488 60488472 -
agatgacattacctaaatga

SEQ ID NO: 180507 - DNA, 20 bp, Artificial Sequence
  Synthetic oligonucleotide; TGG chr2 60488422 60488441 60488425 -
catttgctgtaatcctgtta

SEQ ID NO: 180508 - DNA, 20 bp, Artificial Sequence
  Synthetic oligonucleotide; AAG chr2 60488402 60488421 60488405 -
tggcattgtcctattatctc

SEQ ID NO: 180509 - DNA, 20 bp, Artificial Sequence
  Synthetic oligonucleotide; TGG chr2 60488366 60488385 60488369 -
aaatgctgtcaaattgtaac

SEQ ID NO: 180510 - DNA, 20 bp, Artificial Sequence
  Synthetic oligonucleotide; AAG chr2 60488357 60488376 60488360 -
caaattgtaactggattgcc

SEQ ID NO: 180511 - DNA, 20 bp, Artificial Sequence
  Synthetic oligonucleotide; AGG chr2 60488356 60488375 60488359 -
aaattgtaactggattgcca

SEQ ID NO: 180512 - DNA, 20 bp, Artificial Sequence
  Synthetic oligonucleotide; CAG chr2 60488352 60488371 60488355 -
tgtaactggattgccaagga

SEQ ID NO: 180513 - DNA, 20 bp, Artificial Sequence
  Synthetic oligonucleotide; GAG chr2 60488350 60488369 60488353 -
taactggattgccaaggaca

SEQ ID NO: 180514 - DNA, 20 bp, Artificial Sequence
  Synthetic oligonucleotide; AGG chr2 60488349 60488368 60488352 -
aactggattgccaaggacag

SEQ ID NO: 180515 - DNA, 20 bp, Artificial Sequence
  Synthetic oligonucleotide; GAG chr2 60488347 60488366 60488350 -
ctggattgccaaggacagag

SEQ ID NO: 180516 - DNA, 20 bp, Artificial Sequence
  Synthetic oligonucleotide; GAG chr2 60488345 60488364 60488348 -
ggattgccaaggacagagga

SEQ ID NO: 180517 - DNA, 20 bp, Artificial Sequence
  Synthetic oligonucleotide; AGG chr2 60488344 60488363 60488347 -
gattgccaaggacagaggag

SEQ ID NO: 180518 - DNA, 20 bp, Artificial Sequence
  Synthetic oligonucleotide; CAG chr2 60488338 60488357 60488341 -
caaggacagaggagaggaac

SEQ ID NO: 180519 - DNA, 20 bp, Artificial Sequence
  Synthetic oligonucleotide; AGG chr2 60488337 60488356 60488340 -
aaggacagaggagaggaacc

SEQ ID NO: 180520 - DNA, 20 bp, Artificial Sequence
  Synthetic oligonucleotide; GGG chr2 60488336 60488355 60488339 -
aggacagaggagaggaacca

SEQ ID NO: 180521 - DNA, 20 bp, Artificial Sequence
  Synthetic oligonucleotide; GAG chr2 60488334 60488353 60488337 -
gacagaggagaggaaccagg

SEQ ID NO: 180522 - DNA, 20 bp, Artificial Sequence
  Synthetic oligonucleotide; AGG chr2 60488333 60488352 60488336 -
acagaggagaggaaccaggg

SEQ ID NO: 180523 - DNA, 20 bp, Artificial Sequence
  Synthetic oligonucleotide; TGG chr2 60488324 60488343 60488327 -
aggaaccagggaggacacaa

SEQ ID NO: 180524 - DNA, 20 bp, Artificial Sequence
  Synthetic oligonucleotide; AAG chr2 60488304 60488323 60488307 -
tggcaattcccactgcacca

SEQ ID NO: 180525 - DNA, 20 bp, Artificial Sequence
  Synthetic oligonucleotide; GAG chr2 60488302 60488321 60488305 -
gcaattcccactgcaccaaa

SEQ ID NO: 180526 - DNA, 20 bp, Artificial Sequence
  Synthetic oligonucleotide; CGG chr2 60488298 60488317 60488301 -
ttcccactgcaccaaagaga

SEQ ID NO: 180527 - DNA, 20 bp, Artificial Sequence
  Synthetic oligonucleotide; CAG chr2 60488278 60488297 60488281 -
cggtcttcttccccctctca

SEQ ID NO: 180528 - DNA, 20 bp, Artificial Sequence
  Synthetic oligonucleotide; TGG chr2 60488265 60488284 60488268 -
cctctcacagtctgaattct

SEQ ID NO: 180529 - DNA, 20 bp, Artificial Sequence
  Synthetic oligonucleotide; GAG chr2 60488263 60488282 60488266 -
tctcacagtctgaattcttg

SEQ ID NO: 180530 - DNA, 20 bp, Artificial Sequence
  Synthetic oligonucleotide; CAG chr2 60488252 60488271 60488255 -
gaattcttggagacattgtt

SEQ ID NO: 180531 - DNA, 20 bp, Artificial Sequence
  Synthetic oligonucleotide; CAG chr2 60488235 60488254 60488238 -
gttcagttaaaatcatgact

SEQ ID NO: 180532 - DNA, 20 bp, Artificial Sequence
  Synthetic oligonucleotide; AGG chr2 60488234 60488253 60488237 -
ttcagttaaaatcatgactc

SEQ ID NO: 180533 - DNA, 20 bp, Artificial Sequence
  Synthetic oligonucleotide; CAG chr2 60488222 60488241 60488225 -
catgactcaggtatctttta

SEQ ID NO: 180534 - DNA, 20 bp, Artificial Sequence
  Synthetic oligonucleotide; AGG chr2 60488221 60488240 60488224 -
atgactcaggtatcttttac

SEQ ID NO: 180535 - DNA, 20 bp, Artificial Sequence
  Synthetic oligonucleotide; TAG chr2 60488207 60488226 60488210 -
ttttacaggctttgatgaaa

SEQ ID NO: 180536 - DNA, 20 bp, Artificial Sequence
  Synthetic oligonucleotide; CAG chr2 60488203 60488222 60488206 -
acaggctttgatgaaatagt

SEQ ID NO: 180537 - DNA, 20 bp, Artificial Sequence
  Synthetic oligonucleotide; TAG chr2 60488182 60488201 60488185 -
agattcactcctcatgttcc

SEQ ID NO: 180538 - DNA, 20 bp, Artificial Sequence
  Synthetic oligonucleotide; AAG chr2 60488179 60488198 60488182 -
ttcactcctcatgttcctag

SEQ ID NO: 180539 - DNA, 20 bp, Artificial Sequence
  Synthetic oligonucleotide; AGG chr2 60488178 60488197 60488181 -
tcactcctcatgttcctaga

SEQ ID NO: 180540 - DNA, 20 bp, Artificial Sequence
  Synthetic oligonucleotide; AAG chr2 60488174 60488193 60488177 -
tcctcatgttcctagaagga

SEQ ID NO: 180541 - DNA, 20 bp, Artificial Sequence
  Synthetic oligonucleotide; AGG chr2 60488173 60488192 60488176 -
cctcatgttcctagaaggaa

SEQ ID NO: 180542 - DNA, 20 bp, Artificial Sequence
  Synthetic oligonucleotide; AAG chr2 60488170 60488189 60488173 -
catgttcctagaaggaaagg

SEQ ID NO: 180543 - DNA, 20 bp, Artificial Sequence
  Synthetic oligonucleotide; CAG chr2 60488153 60488172 60488156 -
aggaagaaacactctttgaa

SEQ ID NO: 180544 - DNA, 20 bp, Artificial Sequence
  Synthetic oligonucleotide; GAG chr2 60488145 60488164 60488148 -
acactctttgaacagcccgt

SEQ ID NO: 180545 - DNA, 20 bp, Artificial Sequence
  Synthetic oligonucleotide; CAG chr2 60488131 60488150 60488134 -
gcccgtgagacaaactcttc

SEQ ID NO: 180546 - DNA, 20 bp, Artificial Sequence
  Synthetic oligonucleotide; AGG chr2 60488130 60488149 60488133 -
cccgtgagacaaactcttcc

SEQ ID NO: 180547 - DNA, 20 bp, Artificial Sequence
  Synthetic oligonucleotide; GAG chr2 60488103 60488122 60488106 -
tttaaatgtttctacataat

SEQ ID NO: 180548 - DNA, 20 bp, Artificial Sequence
  Synthetic oligonucleotide; AAG chr2 60488090 60488109 60488093 -
acataatgagaataaattgt

SEQ ID NO: 180549 - DNA, 20 bp, Artificial Sequence
  Synthetic oligonucleotide; CAG chr2 60488066 60488085 60488069 -
gttactgtgtttttaaaacc

SEQ ID NO: 180550 - DNA, 20 bp, Artificial Sequence
  Synthetic oligonucleotide; AGG chr2 60488065 60488084 60488068 -
ttactgtgtttttaaaaccc

SEQ ID NO: 180551 - DNA, 20 bp, Artificial Sequence
  Synthetic oligonucleotide; AAG chr2 60488058 60488077 60488061 -
gtttttaaaacccaggtcaa

SEQ ID NO: 180552 - DNA, 20 bp, Artificial Sequence
  Synthetic oligonucleotide; TAG chr2 60488052 60488071 60488055 -
aaaacccaggtcaaaagtaa

SEQ ID NO: 180553 - DNA, 20 bp, Artificial Sequence
  Synthetic oligonucleotide; CAG chr2 60488047 60488066 60488050 -
ccaggtcaaaagtaatagca

SEQ ID NO: 180554 - DNA, 20 bp, Artificial Sequence
  Synthetic oligonucleotide; GAG chr2 60488045 60488064 60488048 -
aggtcaaaagtaatagcaca

SEQ ID NO: 180555 - DNA, 20 bp, Artificial Sequence
  Synthetic oligonucleotide; GAG chr2 60488043 60488062 60488046 -
gtcaaaagtaatagcacaga

SEQ ID NO: 180556 - DNA, 20 bp, Artificial Sequence
  Synthetic oligonucleotide; AGG chr2 60488042 60488061 60488045 -
tcaaaagtaatagcacagag

SEQ ID NO: 180557 - DNA, 20 bp, Artificial Sequence
  Synthetic oligonucleotide; GGG chr2 60488041 60488060 60488044 -
caaaagtaatagcacagaga

SEQ ID NO: 180558 - DNA, 20 bp, Artificial Sequence
  Synthetic oligonucleotide; AAG chr2 60488032 60488051 60488035 -
tagcacagagagggatctat

SEQ ID NO: 180559 - DNA, 20 bp, Artificial Sequence
  Synthetic oligonucleotide; CAG chr2 60487995 60488014 60487998 -
ttgttcatatattgcttccc

SEQ ID NO: 180560 - DNA, 20 bp, Artificial Sequence
  Synthetic oligonucleotide; AGG chr2 60487994 60488013 60487997 -
tgttcatatattgcttcccc

SEQ ID NO: 180561 - DNA, 20 bp, Artificial Sequence
  Synthetic oligonucleotide; TAG chr2 60487989 60488008 60487992 -
atatattgcttccccaggtt

SEQ ID NO: 180562 - DNA, 20 bp, Artificial Sequence
  Synthetic oligonucleotide; GAG chr2 60487984 60488003 60487987 -
ttgcttccccaggtttagat

SEQ ID NO: 180563 - DNA, 20 bp, Artificial Sequence
  Synthetic oligonucleotide; AGG chr2 60487983 60488002 60487986 -
tgcttccccaggtttagatg

SEQ ID NO: 180564 - DNA, 20 bp, Artificial Sequence
  Synthetic oligonucleotide; GGG chr2 60487982 60488001 60487985 -
gcttccccaggtttagatga

SEQ ID NO: 180565 - DNA, 20 bp, Artificial Sequence
  Synthetic oligonucleotide; TAG chr2 60487971 60487990 60487974 -
tttagatgagggctccattc

SEQ ID NO: 180566 - DNA, 20 bp, Artificial Sequence
  Synthetic oligonucleotide; GAG chr2 60487969 60487988 60487972 -
tagatgagggctccattcta

SEQ ID NO: 180567 - DNA, 20 bp, Artificial Sequence
  Synthetic oligonucleotide; TGG chr2 60487965 60487984 60487968 -
tgagggctccattctagagt

SEQ ID NO: 180568 - DNA, 20 bp, Artificial Sequence
  Synthetic oligonucleotide; GGG chr2 60487964 60487983 60487967 -
gagggctccattctagagtt

SEQ ID NO: 180569 - DNA, 20 bp, Artificial Sequence
  Synthetic oligonucleotide; AAG chr2 60487955 60487974 60487958 -
attctagagttgggaaaacc

SEQ ID NO: 180570 - DNA, 20 bp, Artificial Sequence
  Synthetic oligonucleotide; CAG chr2 60487951 60487970 60487954 -
tagagttgggaaaaccaagt

SEQ ID NO: 180571 - DNA, 20 bp, Artificial Sequence
  Synthetic oligonucleotide; TAG chr2 60487940 60487959 60487943 -
aaaccaagtcagtaaacctt

SEQ ID NO: 180572 - DNA, 20 bp, Artificial Sequence
  Synthetic oligonucleotide; TGG chr2 60487937 60487956 60487940 -
ccaagtcagtaaacctttag

SEQ ID NO: 180573 - DNA, 20 bp, Artificial Sequence
  Synthetic oligonucleotide; CAG chr2 60487934 60487953 60487937 -
agtcagtaaacctttagtgg

SEQ ID NO: 180574 - DNA, 20 bp, Artificial Sequence
  Synthetic oligonucleotide; CAG chr2 60487924 60487943 60487927 -
cctttagtggcagatgttat

SEQ ID NO: 180575 - DNA, 20 bp, Artificial Sequence
  Synthetic oligonucleotide; AGG chr2 60487923 60487942 60487926 -
ctttagtggcagatgttatc

SEQ ID NO: 180576 - DNA, 20 bp, Artificial Sequence
  Synthetic oligonucleotide; GGG chr2 60487922 60487941 60487925 -
tttagtggcagatgttatca

SEQ ID NO: 180577 - DNA, 20 bp, Artificial Sequence
  Synthetic oligonucleotide; GAG chr2 60487920 60487939 60487923 -
tagtggcagatgttatcagg

SEQ ID NO: 180578 - DNA, 20 bp, Artificial Sequence
  Synthetic oligonucleotide; TGG chr2 60487916 60487935 60487919 -
ggcagatgttatcagggagc

SEQ ID NO: 180579 - DNA, 20 bp, Artificial Sequence
  Synthetic oligonucleotide; GAG chr2 60487914 60487933 60487917 -
cagatgttatcagggagctg

SEQ ID NO: 180580 - DNA, 20 bp, Artificial Sequence
  Synthetic oligonucleotide; TGG chr2 60487910 60487929 60487913 -
tgttatcagggagctggagt

SEQ ID NO: 180581 - DNA, 20 bp, Artificial Sequence
  Synthetic oligonucleotide; GAG chr2 60487908 60487927 60487911 -
ttatcagggagctggagttg

SEQ ID NO: 180582 - DNA, 20 bp, Artificial Sequence
  Synthetic oligonucleotide; CAG chr2 60487883 60487902 60487886 -
cttgcattttgtgtttgtgc

SEQ ID NO: 180583 - DNA, 20 bp, Artificial Sequence
  Synthetic oligonucleotide; TAG chr2 60487855 60487874 60487858 -
catgttcctcttcatatatt

SEQ ID NO: 180584 - DNA, 20 bp, Artificial Sequence
  Synthetic oligonucleotide; CAG chr2 60487838 60487857 60487841 -
atttagaccaaattcttatc

SEQ ID NO: 180585 - DNA, 20 bp, Artificial Sequence
  Synthetic oligonucleotide; AAG chr2 60487824 60487843 60487827 -
cttatccagatttcccatta

SEQ ID NO: 180586 - DNA, 20 bp, Artificial Sequence
  Synthetic oligonucleotide; AGG chr2 60487823 60487842 60487826 -
ttatccagatttcccattaa

SEQ ID NO: 180587 - DNA, 20 bp, Artificial Sequence
  Synthetic oligonucleotide; CAG chr2 60487808 60487827 60487811 -
attaaaggttcataaatttc

SEQ ID NO: 180588 - DNA, 20 bp, Artificial Sequence
  Synthetic oligonucleotide; CAG chr2 60487791 60487810 60487794 -
ttccagttttcacctttctg

SEQ ID NO: 180589 - DNA, 20 bp, Artificial Sequence
  Synthetic oligonucleotide; TAG chr2 60487782 60487801 60487785 -
tcacctttctgcagcttcct

SEQ ID NO: 180590 - DNA, 20 bp, Artificial Sequence
  Synthetic oligonucleotide; TAG chr2 60487778 60487797 60487781 -
ctttctgcagcttccttaga

SEQ ID NO: 180591 - DNA, 20 bp, Artificial Sequence
  Synthetic oligonucleotide; TGG chr2 60487773 60487792 60487776 -
tgcagcttccttagatagaa

SEQ ID NO: 180592 - DNA, 20 bp, Artificial Sequence
  Synthetic oligonucleotide; GAG chr2 60487765 60487784 60487768 -
ccttagatagaatggttgat

SEQ ID NO: 180593 - DNA, 20 bp, Artificial Sequence
  Synthetic oligonucleotide; AAG chr2 60487742 60487761 60487745 -
aaaattaccgcattaaaatt

SEQ ID NO: 180594 - DNA, 20 bp, Artificial Sequence
  Synthetic oligonucleotide; AAG chr2 60487706 60487725 60487709 -
acattctgctgctcataaat

SEQ ID NO: 180595 - DNA, 20 bp, Artificial Sequence
  Synthetic oligonucleotide; AGG chr2 60487705 60487724 60487708 -
cattctgctgctcataaata

SEQ ID NO: 180596 - DNA, 20 bp, Artificial Sequence
  Synthetic oligonucleotide; GGG chr2 60487704 60487723 60487707 -
attctgctgctcataaataa

SEQ ID NO: 180597 - DNA, 20 bp, Artificial Sequence
  Synthetic oligonucleotide; GAG chr2 60487702 60487721 60487705 -
tctgctgctcataaataagg

SEQ ID NO: 180598 - DNA, 20 bp, Artificial Sequence
  Synthetic oligonucleotide; TGG chr2 60487699 60487718 60487702 -
gctgctcataaataagggag

SEQ ID NO: 180599 - DNA, 20 bp, Artificial Sequence
  Synthetic oligonucleotide; GGG chr2 60487698 60487717 60487701 -
ctgctcataaataagggagt

SEQ ID NO: 180600 - DNA, 20 bp, Artificial Sequence
  Synthetic oligonucleotide; TGG chr2 60487692 60487711 60487695 -
ataaataagggagtgggaaa

SEQ ID NO: 180601 - DNA, 20 bp, Artificial Sequence
  Synthetic oligonucleotide; AAG chr2 60487668 60487687 60487671 -
tactttgaacaccctcgtta

SEQ ID NO: 180602 - DNA, 20 bp, Artificial Sequence
  Synthetic oligonucleotide; AGG chr2 60487667 60487686 60487670 -
actttgaacaccctcgttaa

SEQ ID NO: 180603 - DNA, 20 bp, Artificial Sequence
  Synthetic oligonucleotide; TGG chr2 60487663 60487682 60487666 -
tgaacaccctcgttaaaggc

SEQ ID NO: 180604 - DNA, 20 bp, Artificial Sequence
  Synthetic oligonucleotide; TGG chr2 60487658 60487677 60487661 -
accctcgttaaaggctggtg

SEQ ID NO: 180605 - DNA, 20 bp, Artificial Sequence
  Synthetic oligonucleotide; CAG chr2 60487651 60487670 60487654 -
ttaaaggctggtgtggttgc

SEQ ID NO: 180606 - DNA, 20 bp, Artificial Sequence
  Synthetic oligonucleotide; GAG chr2 60487649 60487668 60487652 -
aaaggctggtgtggttgcca

SEQ ID NO: 180607 - DNA, 20 bp, Artificial Sequence
  Synthetic oligonucleotide; TAG chr2 60487644 60487663 60487647 -
ctggtgtggttgccagagaa

SEQ ID NO: 180608 - DNA, 20 bp, Artificial Sequence
  Synthetic oligonucleotide; AGG chr2 60487643 60487662 60487646 -
tggtgtggttgccagagaat

SEQ ID NO: 180609 - DNA, 20 bp, Artificial Sequence
  Synthetic oligonucleotide; GGG chr2 60487642 60487661 60487645 -
ggtgtggttgccagagaata

SEQ ID NO: 180610 - DNA, 20 bp, Artificial Sequence
  Synthetic oligonucleotide; AAG chr2 60487632 60487651 60487635 -
ccagagaatagggctaactt

SEQ ID NO: 180611 - DNA, 20 bp, Artificial Sequence
  Synthetic oligonucleotide; AGG chr2 60487631 60487650 60487634 -
cagagaatagggctaactta

SEQ ID NO: 180612 - DNA, 20 bp, Artificial Sequence
  Synthetic oligonucleotide; GGG chr2 60487630 60487649 60487633 -
agagaatagggctaacttaa

SEQ ID NO: 180613 - DNA, 20 bp, Artificial Sequence
  Synthetic oligonucleotide; GGG chr2 60487629 60487648 60487632 -
gagaatagggctaacttaag

SEQ ID NO: 180614 - DNA, 20 bp, Artificial Sequence
  Synthetic oligonucleotide; GGG chr2 60487628 60487647 60487631 -
agaatagggctaacttaagg

SEQ ID NO: 180615 - DNA, 20 bp, Artificial Sequence
  Synthetic oligonucleotide; AAG chr2 60487618 60487637 60487621 -
taacttaagggggatccgct

SEQ ID NO: 180616 - DNA, 20 bp, Artificial Sequence
  Synthetic oligonucleotide; TGG chr2 60487578 60487597 60487581 -
ttttttgttttgttttgttc

SEQ ID NO: 180617 - DNA, 20 bp, Artificial Sequence
  Synthetic oligonucleotide; AAG chr2 60487567 60487586 60487570 -
gttttgttctggattttata

SEQ ID NO: 180618 - DNA, 20 bp, Artificial Sequence
  Synthetic oligonucleotide; AGG chr2 60487566 60487585 60487569 -
ttttgttctggattttataa

SEQ ID NO: 180619 - DNA, 20 bp, Artificial Sequence
  Synthetic oligonucleotide; TAG chr2 60487556 60487575 60487559 -
gattttataaaggcatcatt

SEQ ID NO: 180620 - DNA, 20 bp, Artificial Sequence
  Synthetic oligonucleotide; TAG chr2 60487504 60487523 60487507 -
tttaaatatctaatgttgat

SEQ ID NO: 180621 - DNA, 20 bp, Artificial Sequence
  Synthetic oligonucleotide; TAG chr2 60487485 60487504 60487488 -
ttagtatgttctattattta

SEQ ID NO: 180622 - DNA, 20 bp, Artificial Sequence
  Synthetic oligonucleotide; CAG chr2 60487477 60487496 60487480 -
ttctattatttatagccctc

SEQ ID NO: 180623 - DNA, 20 bp, Artificial Sequence
  Synthetic oligonucleotide; AAG chr2 60487474 60487493 60487477 -
tattatttatagccctccag

SEQ ID NO: 180624 - DNA, 20 bp, Artificial Sequence
  Synthetic oligonucleotide; AGG chr2 60487473 60487492 60487476 -
attatttatagccctccaga

SEQ ID NO: 180625 - DNA, 20 bp, Artificial Sequence
  Synthetic oligonucleotide; AAG chr2 60487465 60487484 60487468 -
tagccctccagaaggatccc

SEQ ID NO: 180626 - DNA, 20 bp, Artificial Sequence
  Synthetic oligonucleotide; AGG chr2 60487464 60487483 60487467 -
agccctccagaaggatccca

SEQ ID NO: 180627 - DNA, 20 bp, Artificial Sequence
  Synthetic oligonucleotide; GGG chr2 60487463 60487482 60487466 -
gccctccagaaggatcccaa

SEQ ID NO: 180628 - DNA, 20 bp, Artificial Sequence
  Synthetic oligonucleotide; AAG chr2 60487460 60487479 60487463 -
ctccagaaggatcccaaggg

SEQ ID NO: 180629 - DNA, 20 bp, Artificial Sequence
  Synthetic oligonucleotide; GAG chr2 60487444 60487463 60487447 -
agggaagataatctacattt

SEQ ID NO: 180630 - DNA, 20 bp, Artificial Sequence
  Synthetic oligonucleotide; AAG chr2 60487441 60487460 60487444 -
gaagataatctacatttgag

SEQ ID NO: 180631 - DNA, 20 bp, Artificial Sequence
  Synthetic oligonucleotide; CAG chr2 60487418 60487437 60487421 -
acgatttcccaatttccata

SEQ ID NO: 180632 - DNA, 20 bp, Artificial Sequence
  Synthetic oligonucleotide; CGG chr2 60487354 60487373 60487357 -
gaattttctttttccactct

SEQ ID NO: 180633 - DNA, 20 bp, Artificial Sequence
  Synthetic oligonucleotide; TGG chr2 60487347 60487366 60487350 -
ctttttccactctcggtgtg

SEQ ID NO: 180634 - DNA, 20 bp, Artificial Sequence
  Synthetic oligonucleotide; TGG chr2 60487339 60487358 60487342 -
actctcggtgtgtggcattg

SEQ ID NO: 180635 - DNA, 20 bp, Artificial Sequence
  Synthetic oligonucleotide; GGG chr2 60487338 60487357 60487341 -
ctctcggtgtgtggcattgt

SEQ ID NO: 180636 - DNA, 20 bp, Artificial Sequence
  Synthetic oligonucleotide; GGG chr2 60487337 60487356 60487340 -
tctcggtgtgtggcattgtg

SEQ ID NO: 180637 - DNA, 20 bp, Artificial Sequence
  Synthetic oligonucleotide; CAG chr2 60487332 60487351 60487335 -
gtgtgtggcattgtggggtg

SEQ ID NO: 180638 - DNA, 20 bp, Artificial Sequence
  Synthetic oligonucleotide; AAG chr2 60487321 60487340 60487324 -
tgtggggtgcagacacctga

SEQ ID NO: 180639 - DNA, 20 bp, Artificial Sequence
  Synthetic oligonucleotide; TGG chr2 60487312 60487331 60487315 -
cagacacctgaaagcctgac

SEQ ID NO: 180640 - DNA, 20 bp, Artificial Sequence
  Synthetic oligonucleotide; GAG chr2 60487310 60487329 60487313 -
gacacctgaaagcctgactg

SEQ ID NO: 180641 - DNA, 20 bp, Artificial Sequence
  Synthetic oligonucleotide; TGG chr2 60487299 60487318 60487302 -
gcctgactggagatgtaaca

SEQ ID NO: 180642 - DNA, 20 bp, Artificial Sequence
  Synthetic oligonucleotide; GGG chr2 60487298 60487317 60487301 -
cctgactggagatgtaacat

SEQ ID NO: 180643 - DNA, 20 bp, Artificial Sequence
  Synthetic oligonucleotide; TAG chr2 60487283 60487302 60487286 -
aacatgggctctgctgacat

SEQ ID NO: 180644 - DNA, 20 bp, Artificial Sequence
  Synthetic oligonucleotide; AAG chr2 60487276 60487295 60487279 -
gctctgctgacattagcatg

SEQ ID NO: 180645 - DNA, 20 bp, Artificial Sequence
  Synthetic oligonucleotide; GAG chr2 60487274 60487293 60487277 -
tctgctgacattagcatgaa

SEQ ID NO: 180646 - DNA, 20 bp, Artificial Sequence
  Synthetic oligonucleotide; TAG chr2 60487269 60487288 60487272 -
tgacattagcatgaagagct

SEQ ID NO: 180647 - DNA, 20 bp, Artificial Sequence
  Synthetic oligonucleotide; TAG chr2 60487247 60487266 60487250 -
gctaatcgacttgcaaaata

SEQ ID NO: 180648 - DNA, 20 bp, Artificial Sequence
  Synthetic oligonucleotide; AGG chr2 60487246 60487265 60487249 -
ctaatcgacttgcaaaatat

SEQ ID NO: 180649 - DNA, 20 bp, Artificial Sequence
  Synthetic oligonucleotide; TAG chr2 60487242 60487261 60487245 -
tcgacttgcaaaatataggt

SEQ ID NO: 180650 - DNA, 20 bp, Artificial Sequence
  Synthetic oligonucleotide; AGG chr2 60487241 60487260 60487244 -
cgacttgcaaaatataggtt

SEQ ID NO: 180651 - DNA, 20 bp, Artificial Sequence
  Synthetic oligonucleotide; GGG chr2 60487240 60487259 60487243 -
gacttgcaaaatataggtta

SEQ ID NO: 180652 - DNA, 20 bp, Artificial Sequence
  Synthetic oligonucleotide; GAG chr2 60487238 60487257 60487241 -
cttgcaaaatataggttagg

SEQ ID NO: 180653 - DNA, 20 bp, Artificial Sequence
  Synthetic oligonucleotide; TAG chr2 60487230 60487249 60487233 -
atataggttagggagtttta

SEQ ID NO: 180654 - DNA, 20 bp, Artificial Sequence
  Synthetic oligonucleotide; AGG chr2 60487229 60487248 60487232 -
tataggttagggagttttat

SEQ ID NO: 180655 - DNA, 20 bp, Artificial Sequence
  Synthetic oligonucleotide; AAG chr2 60487195 60487214 60487198 -
tcttactctttcattgatta

SEQ ID NO: 180656 - DNA, 20 bp, Artificial Sequence
  Synthetic oligonucleotide; AGG chr2 60487194 60487213 60487197 -
cttactctttcattgattaa

SEQ ID NO: 180657 - DNA, 20 bp, Artificial Sequence
  Synthetic oligonucleotide; TAG chr2 60487174 60487193 60487177 -
aggcaaaatattacattaac

SEQ ID NO: 180658 - DNA, 20 bp, Artificial Sequence
  Synthetic oligonucleotide; TGG chr2 60487162 60487181 60487165 -
acattaactagatcattaca

SEQ ID NO: 180659 - DNA, 20 bp, Artificial Sequence
  Synthetic oligonucleotide; GGG chr2 60487161 60487180 60487164 -
cattaactagatcattacat

SEQ ID NO: 180660 - DNA, 20 bp, Artificial Sequence
  Synthetic oligonucleotide; AAG chr2 60487155 60487174 60487158 -
ctagatcattacatgggtaa

SEQ ID NO: 180661 - DNA, 20 bp, Artificial Sequence
  Synthetic oligonucleotide; AGG chr2 60487154 60487173 60487157 -
tagatcattacatgggtaaa

SEQ ID NO: 180662 - DNA, 20 bp, Artificial Sequence
  Synthetic oligonucleotide; TAG chr2 60487150 60487169 60487153 -
tcattacatgggtaaaaggt

SEQ ID NO: 180663 - DNA, 20 bp, Artificial Sequence
  Synthetic oligonucleotide; TAG chr2 60487134 60487153 60487137 -
aggttagaacttcacacact

SEQ ID NO: 180664 - DNA, 20 bp, Artificial Sequence
  Synthetic oligonucleotide; AGG chr2 60487133 60487152 60487136 -
ggttagaacttcacacactt

SEQ ID NO: 180665 - DNA, 20 bp, Artificial Sequence
  Synthetic oligonucleotide; GGG chr2 60487132 60487151 60487135 -
gttagaacttcacacactta

SEQ ID NO: 180666 - DNA, 20 bp, Artificial Sequence
  Synthetic oligonucleotide; GGG chr2 60487131 60487150 60487134 -
ttagaacttcacacacttag

SEQ ID NO: 180667 - DNA, 20 bp, Artificial Sequence
  Synthetic oligonucleotide; TGG chr2 60487098 60487117 60487101 -
tccttccccttcctgccttg

SEQ ID NO: 180668 - DNA, 20 bp, Artificial Sequence
  Synthetic oligonucleotide; CAG chr2 60487088 60487107 60487091 -
tcctgccttgtggcaaatca

SEQ ID NO: 180669 - DNA, 20 bp, Artificial Sequence
  Synthetic oligonucleotide; AGG chr2 60487087 60487106 60487090 -
cctgccttgtggcaaatcac

SEQ ID NO: 180670 - DNA, 20 bp, Artificial Sequence
  Synthetic oligonucleotide; TGG chr2 60487083 60487102 60487086 -
ccttgtggcaaatcacaggt

SEQ ID NO: 180671 - DNA, 20 bp, Artificial Sequence
  Synthetic oligonucleotide; GAG chr2 60487081 60487100 60487084 -
ttgtggcaaatcacaggttg

SEQ ID NO: 180672 - DNA, 20 bp, Artificial Sequence
  Synthetic oligonucleotide; AGG chr2 60487080 60487099 60487083 -
tgtggcaaatcacaggttgg

SEQ ID NO: 180673 - DNA, 20 bp, Artificial Sequence
  Synthetic oligonucleotide; CAG chr2 60487077 60487096 60487080 -
ggcaaatcacaggttggagg

SEQ ID NO: 180674 - DNA, 20 bp, Artificial Sequence
  Synthetic oligonucleotide; AGG chr2 60487076 60487095 60487079 -
gcaaatcacaggttggaggc

SEQ ID NO: 180675 - DNA, 20 bp, Artificial Sequence
  Synthetic oligonucleotide; GGG chr2 60487075 60487094 60487078 -
caaatcacaggttggaggca

SEQ ID NO: 180676 - DNA, 20 bp, Artificial Sequence
  Synthetic oligonucleotide; TAG chr2 60487058 60487077 60487061 -
gcagggaaactcactgtgtc

SEQ ID NO: 180677 - DNA, 20 bp, Artificial Sequence
  Synthetic oligonucleotide; TAG chr2 60487037 60487056 60487040 -
agcgctcctaaatgcctgaa

SEQ ID NO: 180678 - DNA, 20 bp, Artificial Sequence
  Synthetic oligonucleotide; TAG chr2 60487028 60487047 60487031 -
aaatgcctgaatagcaacgt

SEQ ID NO: 180679 - DNA, 20 bp, Artificial Sequence
  Synthetic oligonucleotide; AAG chr2 60487020 60487039 60487023 -
gaatagcaacgttagactta

SEQ ID NO: 180680 - DNA, 20 bp, Artificial Sequence
  Synthetic oligonucleotide; AGG chr2 60487019 60487038 60487022 -
aatagcaacgttagacttaa

SEQ ID NO: 180681 - DNA, 20 bp, Artificial Sequence
  Synthetic oligonucleotide; GAG chr2 60487017 60487036 60487020 -
tagcaacgttagacttaaag

SEQ ID NO: 180682 - DNA, 20 bp, Artificial Sequence
  Synthetic oligonucleotide; AGG chr2 60487016 60487035 60487019 -
agcaacgttagacttaaagg

SEQ ID NO: 180683 - DNA, 20 bp, Artificial Sequence
  Synthetic oligonucleotide; GGG chr2 60487015 60487034 60487018 -
gcaacgttagacttaaagga

SEQ ID NO: 180684 - DNA, 20 bp, Artificial Sequence
  Synthetic oligonucleotide; GGG chr2 60487014 60487033 60487017 -
caacgttagacttaaaggag

SEQ ID NO: 180685 - DNA, 20 bp, Artificial Sequence
  Synthetic oligonucleotide; GAG chr2 60486986 60487005 60486989 -
gccttcgctttgaatctccc

SEQ ID NO: 180686 - DNA, 20 bp, Artificial Sequence
  Synthetic oligonucleotide; TAG chr2 60486968 60486987 60486971 -
ccgagtcttttttattctga

SEQ ID NO: 180687 - DNA, 20 bp, Artificial Sequence
  Synthetic oligonucleotide; TAG chr2 60486963 60486982 60486966 -
tcttttttattctgatagaa

SEQ ID NO: 180688 - DNA, 20 bp, Artificial Sequence
  Synthetic oligonucleotide; TAG chr2 60486916 60486935 60486919 -
tgttctgattccatttctgt

SEQ ID NO: 180689 - DNA, 20 bp, Artificial Sequence
  Synthetic oligonucleotide; CAG chr2 60486913 60486932 60486916 -
tctgattccatttctgttag

SEQ ID NO: 180690 - DNA, 20 bp, Artificial Sequence
  Synthetic oligonucleotide; AGG chr2 60486912 60486931 60486915 -
ctgattccatttctgttagc

SEQ ID NO: 180691 - DNA, 20 bp, Artificial Sequence
  Synthetic oligonucleotide; GGG chr2 60486911 60486930 60486914 -
tgattccatttctgttagca

SEQ ID NO: 180692 - DNA, 20 bp, Artificial Sequence
  Synthetic oligonucleotide; AAG chr2 60486906 60486925 60486909 -
ccatttctgttagcagggaa

SEQ ID NO: 180693 - DNA, 20 bp, Artificial Sequence
  Synthetic oligonucleotide; AGG chr2 60486905 60486924 60486908 -
catttctgttagcagggaaa

SEQ ID NO: 180694 - DNA, 20 bp, Artificial Sequence
  Synthetic oligonucleotide; GGG chr2 60486904 60486923 60486907 -
atttctgttagcagggaaaa

SEQ ID NO: 180695 - DNA, 20 bp, Artificial Sequence
  Synthetic oligonucleotide; AAG chr2 60486890 60486909 60486893 -
ggaaaagggcaaatacatga

SEQ ID NO: 180696 - DNA, 20 bp, Artificial Sequence
  Synthetic oligonucleotide; AGG chr2 60486889 60486908 60486892 -
gaaaagggcaaatacatgaa

SEQ ID NO: 180697 - DNA, 20 bp, Artificial Sequence
  Synthetic oligonucleotide; GGG chr2 60486888 60486907 60486891 -
aaaagggcaaatacatgaaa

SEQ ID NO: 180698 - DNA, 20 bp, Artificial Sequence
  Synthetic oligonucleotide; TGG chr2 60486883 60486902 60486886 -
ggcaaatacatgaaagggcg

SEQ ID NO: 180699 - DNA, 20 bp, Artificial Sequence
  Synthetic oligonucleotide; GGG chr2 60486882 60486901 60486885 -
gcaaatacatgaaagggcgt

SEQ ID NO: 180700 - DNA, 20 bp, Artificial Sequence
  Synthetic oligonucleotide; GAG chr2 60486877 60486896 60486880 -
tacatgaaagggcgtgggct

SEQ ID NO: 180701 - DNA, 20 bp, Artificial Sequence
  Synthetic oligonucleotide; TGG chr2 60486871 60486890 60486874 -
aaagggcgtgggctgagcca

SEQ ID NO: 180702 - DNA, 20 bp, Artificial Sequence
  Synthetic oligonucleotide; CAG chr2 60486867 60486886 60486870 -
ggcgtgggctgagccatggc

SEQ ID NO: 180703 - DNA, 20 bp, Artificial Sequence
  Synthetic oligonucleotide; AGG chr2 60486866 60486885 60486869 -
gcgtgggctgagccatggcc

SEQ ID NO: 180704 - DNA, 20 bp, Artificial Sequence
  Synthetic oligonucleotide; GAG chr2 60486860 60486879 60486863 -
gctgagccatggccaggttt

SEQ ID NO: 180705 - DNA, 20 bp, Artificial Sequence
  Synthetic oligonucleotide; GAG chr2 60486858 60486877 60486861 -
tgagccatggccaggtttga

SEQ ID NO: 180706 - DNA, 20 bp, Artificial Sequence
  Synthetic oligonucleotide; CAG chr2 60486854 60486873 60486857 -
ccatggccaggtttgagaga

SEQ ID NO: 180707 - DNA, 20 bp, Artificial Sequence
  Synthetic oligonucleotide; GAG chr2 60486852 60486871 60486855 -
atggccaggtttgagagaca

SEQ ID NO: 180708 - DNA, 20 bp, Artificial Sequence
  Synthetic oligonucleotide; CAG chr2 60486842 60486861 60486845 -
ttgagagacagagtgattcg

SEQ ID NO: 180709 - DNA, 20 bp, Artificial Sequence
  Synthetic oligonucleotide; TAG chr2 60486839 60486858 60486842 -
agagacagagtgattcgcag

SEQ ID NO: 180710 - DNA, 20 bp, Artificial Sequence
  Synthetic oligonucleotide; CAG chr2 60486830 60486849 60486833 -
gtgattcgcagtagtcttcc

SEQ ID NO: 180711 - DNA, 20 bp, Artificial Sequence
  Synthetic oligonucleotide; AGG chr2 60486829 60486848 60486832 -
tgattcgcagtagtcttccc

SEQ ID NO: 180712 - DNA, 20 bp, Artificial Sequence
  Synthetic oligonucleotide; GGG chr2 60486828 60486847 60486831 -
gattcgcagtagtcttccca

SEQ ID NO: 180713 - DNA, 20 bp, Artificial Sequence
  Synthetic oligonucleotide; GAG chr2 60486821 60486840 60486824 -
agtagtcttcccagggtgtt

SEQ ID NO: 180714 - DNA, 20 bp, Artificial Sequence
  Synthetic oligonucleotide; TGG chr2 60486818 60486837 60486821 -
agtcttcccagggtgttgag

SEQ ID NO: 180715 - DNA, 20 bp, Artificial Sequence
  Synthetic oligonucleotide; GGG chr2 60486817 60486836 60486820 -
gtcttcccagggtgttgagt

SEQ ID NO: 180716 - DNA, 20 bp, Artificial Sequence
  Synthetic oligonucleotide; TGG chr2 60486804 60486823 60486807 -
gttgagtgggaacgtctccc

SEQ ID NO: 180717 - DNA, 20 bp, Artificial Sequence
  Synthetic oligonucleotide; GGG chr2 60486803 60486822 60486806 -
ttgagtgggaacgtctccct

SEQ ID NO: 180718 - DNA, 20 bp, Artificial Sequence
  Synthetic oligonucleotide; AAG chr2 60486800 60486819 60486803 -
agtgggaacgtctccctggg

SEQ ID NO: 180719 - DNA, 20 bp, Artificial Sequence
  Synthetic oligonucleotide; AGG chr2 60486799 60486818 60486802 -
gtgggaacgtctccctggga

SEQ ID NO: 180720 - DNA, 20 bp, Artificial Sequence
  Synthetic oligonucleotide; GGG chr2 60486798 60486817 60486801 -
tgggaacgtctccctgggaa

SEQ ID NO: 180721 - DNA, 20 bp, Artificial Sequence
  Synthetic oligonucleotide; TGG chr2 60486792 60486811 60486795 -
cgtctccctgggaagggatg

SEQ ID NO: 180722 - DNA, 20 bp, Artificial Sequence
  Synthetic oligonucleotide; CAG chr2 60486782 60486801 60486785 -
ggaagggatgtggtcattct

SEQ ID NO: 180723 - DNA, 20 bp, Artificial Sequence
  Synthetic oligonucleotide; TGG chr2 60486775 60486794 60486778 -
atgtggtcattctcagactg

SEQ ID NO: 180724 - DNA, 20 bp, Artificial Sequence
  Synthetic oligonucleotide; GGG chr2 60486774 60486793 60486777 -
tgtggtcattctcagactgt

SEQ ID NO: 180725 - DNA, 20 bp, Artificial Sequence
  Synthetic oligonucleotide; CAG chr2 60486769 60486788 60486772 -
tcattctcagactgtgggct

SEQ ID NO: 180726 - DNA, 20 bp, Artificial Sequence
  Synthetic oligonucleotide; AAG chr2 60486722 60486741 60486725 -
gtcaaccatctaatgctatc

SEQ ID NO: 180727 - DNA, 20 bp, Artificial Sequence
  Synthetic oligonucleotide; AGG chr2 60486721 60486740 60486724 -
tcaaccatctaatgctatca

SEQ ID NO: 180728 - DNA, 20 bp, Artificial Sequence
  Synthetic oligonucleotide; GAG chr2 60486711 60486730 60486714 -
aatgctatcaaggccttcct

SEQ ID NO: 180729 - DNA, 20 bp, Artificial Sequence
  Synthetic oligonucleotide; GAG chr2 60486709 60486728 60486712 -
tgctatcaaggccttcctga

SEQ ID NO: 180730 - DNA, 20 bp, Artificial Sequence
  Synthetic oligonucleotide; AAG chr2 60486706 60486725 60486709 -
tatcaaggccttcctgagag

SEQ ID NO: 180731 - DNA, 20 bp, Artificial Sequence
  Synthetic oligonucleotide; CAG chr2 60486700 60486719 60486703 -
ggccttcctgagagaagttt

SEQ ID NO: 180732 - DNA, 20 bp, Artificial Sequence
  Synthetic oligonucleotide; AGG chr2 60486699 60486718 60486702 -
gccttcctgagagaagtttc

SEQ ID NO: 180733 - DNA, 20 bp, Artificial Sequence
  Synthetic oligonucleotide; GAG chr2 60486681 60486700 60486684 -
tcaggcccaatcctgatgtt

SEQ ID NO: 180734 - DNA, 20 bp, Artificial Sequence
  Synthetic oligonucleotide; TGG chr2 60486677 60486696 60486680 -
gcccaatcctgatgttgagt

SEQ ID NO: 180735 - DNA, 20 bp, Artificial Sequence
  Synthetic oligonucleotide; TGG chr2 60486660 60486679 60486663 -
agttggcatgttcacatgtc

SEQ ID NO: 180736 - DNA, 20 bp, Artificial Sequence
  Synthetic oligonucleotide; CAG chr2 60486646 60486665 60486649 -
catgtctggtaataatctgc

SEQ ID NO: 180737 - DNA, 20 bp, Artificial Sequence
  Synthetic oligonucleotide; AAG chr2 60486601 60486620 60486604 -
tctgtgcattattcatctca

SEQ ID NO: 180738 - DNA, 20 bp, Artificial Sequence
  Synthetic oligonucleotide; CAG chr2 60486597 60486616 60486600 -
tgcattattcatctcaaagc

SEQ ID NO: 180739 - DNA, 20 bp, Artificial Sequence
  Synthetic oligonucleotide; GAG chr2 60486595 60486614 60486598 -
cattattcatctcaaagcca

SEQ ID NO: 180740 - DNA, 20 bp, Artificial Sequence
  Synthetic oligonucleotide; AGG chr2 60486594 60486613 60486597 -
attattcatctcaaagccag

SEQ ID NO: 180741 - DNA, 20 bp, Artificial Sequence
  Synthetic oligonucleotide; CAG chr2 60486576 60486595 60486579 -
agaggatctcatgtccatca

SEQ ID NO: 180742 - DNA, 20 bp, Artificial Sequence
  Synthetic oligonucleotide; AGG chr2 60486575 60486594 60486578 -
gaggatctcatgtccatcac

SEQ ID NO: 180743 - DNA, 20 bp, Artificial Sequence
  Synthetic oligonucleotide; GGG chr2 60486574 60486593 60486577 -
aggatctcatgtccatcaca

SEQ ID NO: 180744 - DNA, 20 bp, Artificial Sequence
  Synthetic oligonucleotide; TGG chr2 60486568 60486587 60486571 -
tcatgtccatcacagggctg

SEQ ID NO: 180745 - DNA, 20 bp, Artificial Sequence
  Synthetic oligonucleotide; TGG chr2 60486561 60486580 60486564 -
catcacagggctgtggtctg

SEQ ID NO: 180746 - DNA, 20 bp, Artificial Sequence
  Synthetic oligonucleotide; TAG chr2 60486557 60486576 60486560 -
acagggctgtggtctgtgga

SEQ ID NO: 180747 - DNA, 20 bp, Artificial Sequence
  Synthetic oligonucleotide; AGG chr2 60486556 60486575 60486559 -
cagggctgtggtctgtggat

SEQ ID NO: 180748 - DNA, 20 bp, Artificial Sequence
  Synthetic oligonucleotide; GGG chr2 60486555 60486574 60486558 -
agggctgtggtctgtggata

SEQ ID NO: 180749 - DNA, 20 bp, Artificial Sequence
  Synthetic oligonucleotide; AAG chr2 60486544 60486563 60486547 -
ctgtggatagggaaaatttc

SEQ ID NO: 180750 - DNA, 20 bp, Artificial Sequence
  Synthetic oligonucleotide; AGG chr2 60486543 60486562 60486546 -
tgtggatagggaaaatttca

SEQ ID NO: 180751 - DNA, 20 bp, Artificial Sequence
  Synthetic oligonucleotide; TGG chr2 60486534 60486553 60486537 -
ggaaaatttcaaggcttttc

SEQ ID NO: 180752 - DNA, 20 bp, Artificial Sequence
  Synthetic oligonucleotide; GGG chr2 60486533 60486552 60486536 -
gaaaatttcaaggcttttct

SEQ ID NO: 180753 - DNA, 20 bp, Artificial Sequence
  Synthetic oligonucleotide; TAG chr2 60486523 60486542 60486526 -
aggcttttctgggcctgatg

SEQ ID NO: 180754 - DNA, 20 bp, Artificial Sequence
  Synthetic oligonucleotide; CAG chr2 60486509 60486528 60486512 -
ctgatgtagccattttcttt

SEQ ID NO: 180755 - DNA, 20 bp, Artificial Sequence
  Synthetic oligonucleotide; TAG chr2 60486501 60486520 60486504 -
gccattttctttcagtatct

SEQ ID NO: 180756 - DNA, 20 bp, Artificial Sequence
  Synthetic oligonucleotide; TGG chr2 60486496 60486515 60486499 -
tttctttcagtatcttagat

SEQ ID NO: 180757 - DNA, 20 bp, Artificial Sequence
  Synthetic oligonucleotide; TAG chr2 60486493 60486512 60486496 -
ctttcagtatcttagattgg

SEQ ID NO: 180758 - DNA, 20 bp, Artificial Sequence
  Synthetic oligonucleotide; AGG chr2 60486492 60486511 60486495 -
tttcagtatcttagattggt

SEQ ID NO: 180759 - DNA, 20 bp, Artificial Sequence
  Synthetic oligonucleotide; TAG chr2 60486485 60486504 60486488 -
atcttagattggtaggtctt

SEQ ID NO: 180760 - DNA, 20 bp, Artificial Sequence
  Synthetic oligonucleotide; AAG chr2 60486449 60486468 60486452 -
aaatgtgtgtgtgtgtgcct

SEQ ID NO: 180761 - DNA, 20 bp, Artificial Sequence
  Synthetic oligonucleotide; TAG chr2 60486444 60486463 60486447 -
tgtgtgtgtgtgcctaagta

SEQ ID NO: 180762 - DNA, 20 bp, Artificial Sequence
  Synthetic oligonucleotide; CAG chr2 60486421 60486440 60486424 -
ttttcttgaatttctcactt

SEQ ID NO: 180763 - DNA, 20 bp, Artificial Sequence
  Synthetic oligonucleotide; CAG chr2 60486398 60486417 60486401 -
tacttaactacacatatgtg

SEQ ID NO: 180764 - DNA, 20 bp, Artificial Sequence
  Synthetic oligonucleotide; AAG chr2 60486394 60486413 60486397 -
taactacacatatgtgcaga

SEQ ID NO: 180765 - DNA, 20 bp, Artificial Sequence
  Synthetic oligonucleotide; TAG chr2 60486383 60486402 60486386 -
atgtgcagaaagtgaactct

SEQ ID NO: 180766 - DNA, 20 bp, Artificial Sequence
  Synthetic oligonucleotide; TGG chr2 60486376 60486395 60486379 -
gaaagtgaactcttagaatt

SEQ ID NO: 180767 - DNA, 20 bp, Artificial Sequence
  Synthetic oligonucleotide; GAG chr2 60486350 60486369 60486353 -
tccgttctttctcattgtgt

SEQ ID NO: 180768 - DNA, 20 bp, Artificial Sequence
  Synthetic oligonucleotide; AAG chr2 60486347 60486366 60486350 -
gttctttctcattgtgtgag

SEQ ID NO: 180769 - DNA, 20 bp, Artificial Sequence
  Synthetic oligonucleotide; AGG chr2 60486346 60486365 60486349 -
ttctttctcattgtgtgaga

SEQ ID NO: 180770 - DNA, 20 bp, Artificial Sequence
  Synthetic oligonucleotide; GAG chr2 60486344 60486363 60486347 -
ctttctcattgtgtgagaag

SEQ ID NO: 180771 - DNA, 20 bp, Artificial Sequence
  Synthetic oligonucleotide; AGG chr2 60486343 60486362 60486346 -
tttctcattgtgtgagaagg

SEQ ID NO: 180772 - DNA, 20 bp, Artificial Sequence
  Synthetic oligonucleotide; AAG chr2 60486338 60486357 60486341 -
cattgtgtgagaaggaggca

SEQ ID NO: 180773 - DNA, 20 bp, Artificial Sequence
  Synthetic oligonucleotide; TGG chr2 60486326 60486345 60486329 -
aggaggcaaagttgccaaat

SEQ ID NO: 180774 - DNA, 20 bp, Artificial Sequence
  Synthetic oligonucleotide; GAG chr2 60486324 60486343 60486327 -
gaggcaaagttgccaaattg

SEQ ID NO: 180775 - DNA, 20 bp, Artificial Sequence
  Synthetic oligonucleotide; AGG chr2 60486323 60486342 60486326 -
aggcaaagttgccaaattgg

SEQ ID NO: 180776 - DNA, 20 bp, Artificial Sequence
  Synthetic oligonucleotide; TGG chr2 60486320 60486339 60486323 -
caaagttgccaaattggagg

SEQ ID NO: 180777 - DNA, 20 bp, Artificial Sequence
  Synthetic oligonucleotide; GGG chr2 60486319 60486338 60486322 -
aaagttgccaaattggaggt

SEQ ID NO: 180778 - DNA, 20 bp, Artificial Sequence
  Synthetic oligonucleotide; GGG chr2 60486318 60486337 60486321 -
aagttgccaaattggaggtg

SEQ ID NO: 180779 - DNA, 20 bp, Artificial Sequence
  Synthetic oligonucleotide; AAG chr2 60486314 60486333 60486317 -
tgccaaattggaggtggggc

SEQ ID NO: 180780 - DNA, 20 bp, Artificial Sequence
  Synthetic oligonucleotide; AGG chr2 60486313 60486332 60486316 -
gccaaattggaggtggggca

SEQ ID NO: 180781 - DNA, 20 bp, Artificial Sequence
  Synthetic oligonucleotide; TGG chr2 60486310 60486329 60486313 -
aaattggaggtggggcaagg

SEQ ID NO: 180782 - DNA, 20 bp, Artificial Sequence
  Synthetic oligonucleotide; GGG chr2 60486309 60486328 60486312 -
aattggaggtggggcaaggt

SEQ ID NO: 180783 - DNA, 20 bp, Artificial Sequence
  Synthetic oligonucleotide; CAG chr2 60486305 60486324 60486308 -
ggaggtggggcaaggtgggc

SEQ ID NO: 180784 - DNA, 20 bp, Artificial Sequence
  Synthetic oligonucleotide; TAG chr2 60486302 60486321 60486305 -
ggtggggcaaggtgggccag

SEQ ID NO: 180785 - DNA, 20 bp, Artificial Sequence
  Synthetic oligonucleotide; GAG chr2 60486300 60486319 60486303 -
tggggcaaggtgggccagta

SEQ ID NO: 180786 - DNA, 20 bp, Artificial Sequence
  Synthetic oligonucleotide; TGG chr2 60486290 60486309 60486293 -
tgggccagtagagctgtgat

SEQ ID NO: 180787 - DNA, 20 bp, Artificial Sequence
  Synthetic oligonucleotide; TAG chr2 60486270 60486289 60486273 -
tggtgtctcactttgatgtg

SEQ ID NO: 180788 - DNA, 20 bp, Artificial Sequence
  Synthetic oligonucleotide; AGG chr2 60486269 60486288 60486272 -
ggtgtctcactttgatgtgt

SEQ ID NO: 180789 - DNA, 20 bp, Artificial Sequence
  Synthetic oligonucleotide; GAG chr2 60486267 60486286 60486270 -
tgtctcactttgatgtgtag

SEQ ID NO: 180790 - DNA, 20 bp, Artificial Sequence
  Synthetic oligonucleotide; GAG chr2 60486265 60486284 60486268 -
tctcactttgatgtgtagga

SEQ ID NO: 180791 - DNA, 20 bp, Artificial Sequence
  Synthetic oligonucleotide; GAG chr2 60486263 60486282 60486266 -
tcactttgatgtgtaggaga

SEQ ID NO: 180792 - DNA, 20 bp, Artificial Sequence
  Synthetic oligonucleotide; AAG chr2 60486250 60486269 60486253 -
taggagagagaacaaatcac

SEQ ID NO: 180793 - DNA, 20 bp, Artificial Sequence
  Synthetic oligonucleotide; TGG chr2 60486239 60486258 60486242 -
acaaatcacaagtcattctc

SEQ ID NO: 180794 - DNA, 20 bp, Artificial Sequence
  Synthetic oligonucleotide; AAG chr2 60486235 60486254 60486238 -
atcacaagtcattctctgga

SEQ ID NO: 180795 - DNA, 20 bp, Artificial Sequence
  Synthetic oligonucleotide; AGG chr2 60486234 60486253 60486237 -
tcacaagtcattctctggaa

SEQ ID NO: 180796 - DNA, 20 bp, Artificial Sequence
  Synthetic oligonucleotide; GAG chr2 60486232 60486251 60486235 -
acaagtcattctctggaaag

SEQ ID NO: 180797 - DNA, 20 bp, Artificial Sequence
  Synthetic oligonucleotide; TGG chr2 60486226 60486245 60486229 -
cattctctggaaaggagcca

SEQ ID NO: 180798 - DNA, 20 bp, Artificial Sequence
  Synthetic oligonucleotide; CAG chr2 60486215 60486234 60486218 -
aaggagccatggtccaccca

SEQ ID NO: 180799 - DNA, 20 bp, Artificial Sequence
  Synthetic oligonucleotide; AAG chr2 60486209 60486228 60486212 -
ccatggtccacccacagaac

SEQ ID NO: 180800 - DNA, 20 bp, Artificial Sequence
  Synthetic oligonucleotide; AGG chr2 60486208 60486227 60486211 -
catggtccacccacagaaca

SEQ ID NO: 180801 - DNA, 20 bp, Artificial Sequence
  Synthetic oligonucleotide; CAG chr2 60486192 60486211 60486195 -
aacaaggaccctgaaatccc

SEQ ID NO: 180802 - DNA, 20 bp, Artificial Sequence
  Synthetic oligonucleotide; CAG chr2 60486186 60486205 60486189 -
gaccctgaaatccccagtac

SEQ ID NO: 180803 - DNA, 20 bp, Artificial Sequence
  Synthetic oligonucleotide; TAG chr2 60486177 60486196 60486180 -
atccccagtaccagtctccc

SEQ ID NO: 180804 - DNA, 20 bp, Artificial Sequence
  Synthetic oligonucleotide; AGG chr2 60486176 60486195 60486179 -
tccccagtaccagtctccct

SEQ ID NO: 180805 - DNA, 20 bp, Artificial Sequence
  Synthetic oligonucleotide; CAG chr2 60486160 60486179 60486163 -
ccctaggatgtcttgccttt

SEQ ID NO: 180806 - DNA, 20 bp, Artificial Sequence
  Synthetic oligonucleotide; CAG chr2 60486157 60486176 60486160 -
taggatgtcttgcctttcag

SEQ ID NO: 180807 - DNA, 20 bp, Artificial Sequence
  Synthetic oligonucleotide; CAG chr2 60486149 60486168 60486152 -
cttgcctttcagcagctgtt

SEQ ID NO: 180808 - DNA, 20 bp, Artificial Sequence
  Synthetic oligonucleotide; CAG chr2 60486134 60486153 60486137 -
ctgttcagtcaaatccattt

SEQ ID NO: 180809 - DNA, 20 bp, Artificial Sequence
  Synthetic oligonucleotide; TGG chr2 60486129 60486148 60486132 -
cagtcaaatccatttcagaa

SEQ ID NO: 180810 - DNA, 20 bp, Artificial Sequence
  Synthetic oligonucleotide; GAG chr2 60486127 60486146 60486130 -
gtcaaatccatttcagaatg

SEQ ID NO: 180811 - DNA, 20 bp, Artificial Sequence
  Synthetic oligonucleotide; CAG chr2 60486122 60486141 60486125 -
atccatttcagaatggagaa

SEQ ID NO: 180812 - DNA, 20 bp, Artificial Sequence
  Synthetic oligonucleotide; CAG chr2 60486112 60486131 60486115 -
gaatggagaacagcttgtca

SEQ ID NO: 180813 - DNA, 20 bp, Artificial Sequence
  Synthetic oligonucleotide; TAG chr2 60486087 60486106 60486090 -
ctctactcttgacctgctga

SEQ ID NO: 180814 - DNA, 20 bp, Artificial Sequence
  Synthetic oligonucleotide; AAG chr2 60486081 60486100 60486084 -
tcttgacctgctgatagaac

SEQ ID NO: 180815 - DNA, 20 bp, Artificial Sequence
  Synthetic oligonucleotide; AGG chr2 60486080 60486099 60486083 -
cttgacctgctgatagaaca

SEQ ID NO: 180816 - DNA, 20 bp, Artificial Sequence
  Synthetic oligonucleotide; GGG chr2 60486079 60486098 60486082 -
ttgacctgctgatagaacaa

SEQ ID NO: 180817 - DNA, 20 bp, Artificial Sequence
  Synthetic oligonucleotide; GGG chr2 60486078 60486097 60486081 -
tgacctgctgatagaacaag

SEQ ID NO: 180818 - DNA, 20 bp, Artificial Sequence
  Synthetic oligonucleotide; TGG chr2 60486073 60486092 60486076 -
tgctgatagaacaaggggct

SEQ ID NO: 180819 - DNA, 20 bp, Artificial Sequence
  Synthetic oligonucleotide; GAG chr2 60486071 60486090 60486074 -
ctgatagaacaaggggcttg

SEQ ID NO: 180820 - DNA, 20 bp, Artificial Sequence
  Synthetic oligonucleotide; TGG chr2 60486064 60486083 60486067 -
aacaaggggcttggagattt

SEQ ID NO: 180821 - DNA, 20 bp, Artificial Sequence
  Synthetic oligonucleotide; GGG chr2 60486063 60486082 60486066 -
acaaggggcttggagatttt

SEQ ID NO: 180822 - DNA, 20 bp, Artificial Sequence
  Synthetic oligonucleotide; TAG chr2 60486060 60486079 60486063 -
aggggcttggagattttggg

SEQ ID NO: 180823 - DNA, 20 bp, Artificial Sequence
  Synthetic oligonucleotide; TGG chr2 60486054 60486073 60486057 -
ttggagattttgggtagata

SEQ ID NO: 180824 - DNA, 20 bp, Artificial Sequence
  Synthetic oligonucleotide; TAG chr2 60486048 60486067 60486051 -
attttgggtagatatggaaa

SEQ ID NO: 180825 - DNA, 20 bp, Artificial Sequence
  Synthetic oligonucleotide; AAG chr2 60486027 60486046 60486030 -
agatccctaaacatactaaa

SEQ ID NO: 180826 - DNA, 20 bp, Artificial Sequence
  Synthetic oligonucleotide; TGG chr2 60486008 60486027 60486011 -
aaagattttttttgtacgtg

SEQ ID NO: 180827 - DNA, 20 bp, Artificial Sequence
  Synthetic oligonucleotide; TGG chr2 60486005 60486024 60486008 -
gattttttttgtacgtgtgg

SEQ ID NO: 180828 - DNA, 20 bp, Artificial Sequence
  Synthetic oligonucleotide; GGG chr2 60486004 60486023 60486007 -
attttttttgtacgtgtggt

SEQ ID NO: 180829 - DNA, 20 bp, Artificial Sequence
  Synthetic oligonucleotide; GGG chr2 60486003 60486022 60486006 -
ttttttttgtacgtgtggtg

SEQ ID NO: 180830 - DNA, 20 bp, Artificial Sequence
  Synthetic oligonucleotide; GGG chr2 60486002 60486021 60486005 -
tttttttgtacgtgtggtgg

SEQ ID NO: 180831 - DNA, 20 bp, Artificial Sequence
  Synthetic oligonucleotide; GAG chr2 60486000 60486019 60486003 -
tttttgtacgtgtggtgggg

SEQ ID NO: 180832 - DNA, 20 bp, Artificial Sequence
  Synthetic oligonucleotide; GAG chr2 60485998 60486017 60486001 -
tttgtacgtgtggtggggga

SEQ ID NO: 180833 - DNA, 20 bp, Artificial Sequence
  Synthetic oligonucleotide; AGG chr2 60485997 60486016 60486000 -
ttgtacgtgtggtgggggag

SEQ ID NO: 180834 - DNA, 20 bp, Artificial Sequence
  Synthetic oligonucleotide; GAG chr2 60485995 60486014 60485998 -
gtacgtgtggtgggggagag

SEQ ID NO: 180835 - DNA, 20 bp, Artificial Sequence
  Synthetic oligonucleotide; CAG chr2 60485989 60486008 60485992 -
gtggtgggggagaggagaac

SEQ ID NO: 180836 - DNA, 20 bp, Artificial Sequence
  Synthetic oligonucleotide; GAG chr2 60485987 60486006 60485990 -
ggtgggggagaggagaacca

SEQ ID NO: 180837 - DNA, 20 bp, Artificial Sequence
  Synthetic oligonucleotide; CAG chr2 60485984 60486003 60485987 -
gggggagaggagaaccagag

SEQ ID NO: 180838 - DNA, 20 bp, Artificial Sequence
  Synthetic oligonucleotide; AAG chr2 60485981 60486000 60485984 -
ggagaggagaaccagagcag

SEQ ID NO: 180839 - DNA, 20 bp, Artificial Sequence
  Synthetic oligonucleotide; AGG chr2 60485980 60485999 60485983 -
gagaggagaaccagagcaga

SEQ ID NO: 180840 - DNA, 20 bp, Artificial Sequence
  Synthetic oligonucleotide; TGG chr2 60485976 60485995 60485979 -
ggagaaccagagcagaaggt

SEQ ID NO: 180841 - DNA, 20 bp, Artificial Sequence
  Synthetic oligonucleotide; GAG chr2 60485974 60485993 60485977 -
agaaccagagcagaaggttg

SEQ ID NO: 180842 - DNA, 20 bp, Artificial Sequence
  Synthetic oligonucleotide; AAG chr2 60485970 60485989 60485973 -
ccagagcagaaggttggaga

SEQ ID NO: 180843 - DNA, 20 bp, Artificial Sequence
  Synthetic oligonucleotide; AAG chr2 60485966 60485985 60485969 -
agcagaaggttggagaaaga

SEQ ID NO: 180844 - DNA, 20 bp, Artificial Sequence
  Synthetic oligonucleotide; TGG chr2 60485962 60485981 60485965 -
gaaggttggagaaagaaagt

SEQ ID NO: 180845 - DNA, 20 bp, Artificial Sequence
  Synthetic oligonucleotide; GGG chr2 60485961 60485980 60485964 -
aaggttggagaaagaaagtt

SEQ ID NO: 180846 - DNA, 20 bp, Artificial Sequence
  Synthetic oligonucleotide; GGG chr2 60485960 60485979 60485963 -
aggttggagaaagaaagttg

SEQ ID NO: 180847 - DNA, 20 bp, Artificial Sequence
  Synthetic oligonucleotide; AAG chr2 60485957 60485976 60485960 -
ttggagaaagaaagttgggg

SEQ ID NO: 180848 - DNA, 20 bp, Artificial Sequence
  Synthetic oligonucleotide; AGG chr2 60485956 60485975 60485959 -
tggagaaagaaagttgggga

SEQ ID NO: 180849 - DNA, 20 bp, Artificial Sequence
  Synthetic oligonucleotide; CAG chr2 60485927 60485946 60485930 -
aaatgtgcaatctcattcct

SEQ ID NO: 180850 - DNA, 20 bp, Artificial Sequence
  Synthetic oligonucleotide; GAG chr2 60485908 60485927 60485911 -
tcagccttcttgttgaaaat

SEQ ID NO: 180851 - DNA, 20 bp, Artificial Sequence
  Synthetic oligonucleotide; CAG chr2 60485902 60485921 60485905 -
ttcttgttgaaaatgagaat

SEQ ID NO: 180852 - DNA, 20 bp, Artificial Sequence
  Synthetic oligonucleotide; CAG chr2 60485896 60485915 60485899 -
ttgaaaatgagaatcagatg

SEQ ID NO: 180853 - DNA, 20 bp, Artificial Sequence
  Synthetic oligonucleotide; AAG chr2 60485878 60485897 60485881 -
tgcagcaatgtattatttcc

SEQ ID NO: 180854 - DNA, 20 bp, Artificial Sequence
  Synthetic oligonucleotide; GAG chr2 60485876 60485895 60485879 -
cagcaatgtattatttccaa

SEQ ID NO: 180855 - DNA, 20 bp, Artificial Sequence
  Synthetic oligonucleotide; TGG chr2 60485868 60485887 60485871 -
tattatttccaagagctatc

SEQ ID NO: 180856 - DNA, 20 bp, Artificial Sequence
  Synthetic oligonucleotide; TGG chr2 60485862 60485881 60485865 -
ttccaagagctatctggtga

SEQ ID NO: 180857 - DNA, 20 bp, Artificial Sequence
  Synthetic oligonucleotide; GGG chr2 60485861 60485880 60485864 -
tccaagagctatctggtgat

SEQ ID NO: 180858 - DNA, 20 bp, Artificial Sequence
  Synthetic oligonucleotide; TGG chr2 60485851 60485870 60485854 -
atctggtgatgggatccatc

SEQ ID NO: 180859 - DNA, 20 bp, Artificial Sequence
  Synthetic oligonucleotide; AAG chr2 60485846 60485865 60485849 -
gtgatgggatccatctggtg

SEQ ID NO: 180860 - DNA, 20 bp, Artificial Sequence
  Synthetic oligonucleotide; AGG chr2 60485845 60485864 60485848 -
tgatgggatccatctggtga

SEQ ID NO: 180861 - DNA, 20 bp, Artificial Sequence
  Synthetic oligonucleotide; GGG chr2 60485844 60485863 60485847 -
gatgggatccatctggtgaa

SEQ ID NO: 180862 - DNA, 20 bp, Artificial Sequence
  Synthetic oligonucleotide; TGG chr2 60485834 60485853 60485837 -
atctggtgaagggctacttc

SEQ ID NO: 180863 - DNA, 20 bp, Artificial Sequence
  Synthetic oligonucleotide; GGG chr2 60485833 60485852 60485836 -
tctggtgaagggctacttct

SEQ ID NO: 180864 - DNA, 20 bp, Artificial Sequence
  Synthetic oligonucleotide; GGG chr2 60485832 60485851 60485835 -
ctggtgaagggctacttctg

SEQ ID NO: 180865 - DNA, 20 bp, Artificial Sequence
  Synthetic oligonucleotide; GGG chr2 60485831 60485850 60485834 -
tggtgaagggctacttctgg

SEQ ID NO: 180866 - DNA, 20 bp, Artificial Sequence
  Synthetic oligonucleotide; TGG chr2 60485825 60485844 60485828 -
agggctacttctgggggacc

SEQ ID NO: 180867 - DNA, 20 bp, Artificial Sequence
  Synthetic oligonucleotide; TGG chr2 60485805 60485824 60485808 -
tggaattgctgtgtgacctt

SEQ ID NO: 180868 - DNA, 20 bp, Artificial Sequence
  Synthetic oligonucleotide; GGG chr2 60485804 60485823 60485807 -
ggaattgctgtgtgaccttt

SEQ ID NO: 180869 - DNA, 20 bp, Artificial Sequence
  Synthetic oligonucleotide; TGG chr2 60485785 60485804 60485788 -
tgggaaacacttgccttctc

SEQ ID NO: 180870 - DNA, 20 bp, Artificial Sequence
  Synthetic oligonucleotide; GGG chr2 60485784 60485803 60485787 -
gggaaacacttgccttctct

SEQ ID NO: 180871 - DNA, 20 bp, Artificial Sequence
  Synthetic oligonucleotide; GAG chr2 60485779 60485798 60485782 -
acacttgccttctctgggtt

SEQ ID NO: 180872 - DNA, 20 bp, Artificial Sequence
  Synthetic oligonucleotide; CAG chr2 60485774 60485793 60485777 -
tgccttctctgggttgagct

SEQ ID NO: 180873 - DNA, 20 bp, Artificial Sequence
  Synthetic oligonucleotide; TAG chr2 60485767 60485786 60485770 -
tctgggttgagctcagcccg

SEQ ID NO: 180874 - DNA, 20 bp, Artificial Sequence
  Synthetic oligonucleotide; AAG chr2 60485759 60485778 60485762 -
gagctcagcccgtagttcac

SEQ ID NO: 180875 - DNA, 20 bp, Artificial Sequence
  Synthetic oligonucleotide; AGG chr2 60485758 60485777 60485761 -
agctcagcccgtagttcaca

SEQ ID NO: 180876 - DNA, 20 bp, Artificial Sequence
  Synthetic oligonucleotide; GGG chr2 60485757 60485776 60485760 -
gctcagcccgtagttcacaa

SEQ ID NO: 180877 - DNA, 20 bp, Artificial Sequence
  Synthetic oligonucleotide; GGG chr2 60485756 60485775 60485759 -
ctcagcccgtagttcacaag

SEQ ID NO: 180878 - DNA, 20 bp, Artificial Sequence
  Synthetic oligonucleotide; TGG chr2 60485747 60485766 60485750 -
tagttcacaaggggcattgc

SEQ ID NO: 180879 - DNA, 20 bp, Artificial Sequence
  Synthetic oligonucleotide; TAG chr2 60485738 60485757 60485741 -
aggggcattgctggtattta

SEQ ID NO: 180880 - DNA, 20 bp, Artificial Sequence
  Synthetic oligonucleotide; CAG chr2 60485724 60485743 60485727 -
tatttatagactgtgtttga

SEQ ID NO: 180881 - DNA, 20 bp, Artificial Sequence
  Synthetic oligonucleotide; GAG chr2 60485717 60485736 60485720 -
agactgtgtttgacagtccc

SEQ ID NO: 180882 - DNA, 20 bp, Artificial Sequence
  Synthetic oligonucleotide; AAG chr2 60485711 60485730 60485714 -
tgtttgacagtcccgagtga

SEQ ID NO: 180883 - DNA, 20 bp, Artificial Sequence
  Synthetic oligonucleotide; AGG chr2 60485710 60485729 60485713 -
gtttgacagtcccgagtgaa

SEQ ID NO: 180884 - DNA, 20 bp, Artificial Sequence
  Synthetic oligonucleotide; CAG chr2 60485689 60485708 60485692 -
ggcaacttcacttctcaccc

SEQ ID NO: 180885 - DNA, 20 bp, Artificial Sequence
  Synthetic oligonucleotide; TAG chr2 60485684 60485703 60485687 -
cttcacttctcaccccagaa

SEQ ID NO: 180886 - DNA, 20 bp, Artificial Sequence
  Synthetic oligonucleotide; AAG chr2 60485680 60485699 60485683 -
acttctcaccccagaatagc

SEQ ID NO: 180887 - DNA, 20 bp, Artificial Sequence
  Synthetic oligonucleotide; TAG chr2 60485661 60485680 60485664 -
caagcgttgtttctcatatc

SEQ ID NO: 180888 - DNA, 20 bp, Artificial Sequence
  Synthetic oligonucleotide; AGG chr2 60485660 60485679 60485663 -
aagcgttgtttctcatatct

SEQ ID NO: 180889 - DNA, 20 bp, Artificial Sequence
  Synthetic oligonucleotide; TGG chr2 60485653 60485672 60485656 -
gtttctcatatctaggttgc

SEQ ID NO: 180890 - DNA, 20 bp, Artificial Sequence
  Synthetic oligonucleotide; GGG chr2 60485652 60485671 60485655 -
tttctcatatctaggttgct

SEQ ID NO: 180891 - DNA, 20 bp, Artificial Sequence
  Synthetic oligonucleotide; CAG chr2 60485648 60485667 60485651 -
tcatatctaggttgctggga

SEQ ID NO: 180892 - DNA, 20 bp, Artificial Sequence
  Synthetic oligonucleotide; CAG chr2 60485640 60485659 60485643 -
aggttgctgggacagcttcc

SEQ ID NO: 180893 - DNA, 20 bp, Artificial Sequence
  Synthetic oligonucleotide; AGG chr2 60485639 60485658 60485642 -
ggttgctgggacagcttccc

SEQ ID NO: 180894 - DNA, 20 bp, Artificial Sequence
  Synthetic oligonucleotide; CAG chr2 60485625 60485644 60485628 -
cttcccaggaacctaatatt

SEQ ID NO: 180895 - DNA, 20 bp, Artificial Sequence
  Synthetic oligonucleotide; CAG chr2 60485622 60485641 60485625 -
cccaggaacctaatattcag

SEQ ID NO: 180896 - DNA, 20 bp, Artificial Sequence
  Synthetic oligonucleotide; TGG chr2 60485608 60485627 60485611 -
attcagcagcttcgtgacgt

SEQ ID NO: 180897 - DNA, 20 bp, Artificial Sequence
  Synthetic oligonucleotide; TGG chr2 60485604 60485623 60485607 -
agcagcttcgtgacgttgga

SEQ ID NO: 180898 - DNA, 20 bp, Artificial Sequence
  Synthetic oligonucleotide; GAG chr2 60485602 60485621 60485605 -
cagcttcgtgacgttggatg

SEQ ID NO: 180899 - DNA, 20 bp, Artificial Sequence
  Synthetic oligonucleotide; AGG chr2 60485601 60485620 60485604 -
agcttcgtgacgttggatgg

SEQ ID NO: 180900 - DNA, 20 bp, Artificial Sequence
  Synthetic oligonucleotide; GGG chr2 60485600 60485619 60485603 -
gcttcgtgacgttggatgga

SEQ ID NO: 180901 - DNA, 20 bp, Artificial Sequence
  Synthetic oligonucleotide; GAG chr2 60485582 60485601 60485585 -
gagggtttttctttttaaat

SEQ ID NO: 180902 - DNA, 20 bp, Artificial Sequence
  Synthetic oligonucleotide; TGG chr2 60485574 60485593 60485577 -
ttctttttaaatgagttgat

SEQ ID NO: 180903 - DNA, 20 bp, Artificial Sequence
  Synthetic oligonucleotide; CAG chr2 60485545 60485564 60485548 -
ccactttacacattgttttc

SEQ ID NO: 180904 - DNA, 20 bp, Artificial Sequence
  Synthetic oligonucleotide; AGG chr2 60485544 60485563 60485547 -
cactttacacattgttttcc

SEQ ID NO: 180905 - DNA, 20 bp, Artificial Sequence
  Synthetic oligonucleotide; TAG chr2 60485539 60485558 60485542 -
tacacattgttttccaggtc

SEQ ID NO: 180906 - DNA, 20 bp, Artificial Sequence
  Synthetic oligonucleotide; AGG chr2 60485538 60485557 60485541 -
acacattgttttccaggtct

SEQ ID NO: 180907 - DNA, 20 bp, Artificial Sequence
  Synthetic oligonucleotide; TAG chr2 60485520 60485539 60485523 -
ctaggtttatttttccctta

SEQ ID NO: 180908 - DNA, 20 bp, Artificial Sequence
  Synthetic oligonucleotide; AGG chr2 60485519 60485538 60485522 -
taggtttatttttcccttat

SEQ ID NO: 180909 - DNA, 20 bp, Artificial Sequence
  Synthetic oligonucleotide; TAG chr2 60485516 60485535 60485519 -
gtttatttttcccttatagg

SEQ ID NO: 180910 - DNA, 20 bp, Artificial Sequence
  Synthetic oligonucleotide; AAG chr2 60485506 60485525 60485509 -
cccttataggtagaatataa

SEQ ID NO: 180911 - DNA, 20 bp, Artificial Sequence
  Synthetic oligonucleotide; GAG chr2 60485504 60485523 60485507 -
cttataggtagaatataaaa

SEQ ID NO: 180912 - DNA, 20 bp, Artificial Sequence
  Synthetic oligonucleotide; TGG chr2 60485499 60485518 60485502 -
aggtagaatataaaagagta

SEQ ID NO: 180913 - DNA, 20 bp, Artificial Sequence
  Synthetic oligonucleotide; GGG chr2 60485498 60485517 60485501 -
ggtagaatataaaagagtat

SEQ ID NO: 180914 - DNA, 20 bp, Artificial Sequence
  Synthetic oligonucleotide; GGG chr2 60485497 60485516 60485500 -
gtagaatataaaagagtatg

SEQ ID NO: 180915 - DNA, 20 bp, Artificial Sequence
  Synthetic oligonucleotide; TGG chr2 60485487 60485506 60485490 -
aaagagtatggggtctgccc

SEQ ID NO: 180916 - DNA, 20 bp, Artificial Sequence
  Synthetic oligonucleotide; CAG chr2 60485464 60485483 60485467 -
ctcacaccgttctgtttttg

SEQ ID NO: 180917 - DNA, 20 bp, Artificial Sequence
  Synthetic oligonucleotide; TAG chr2 60485460 60485479 60485463 -
caccgttctgtttttgcagt

SEQ ID NO: 180918 - DNA, 20 bp, Artificial Sequence
  Synthetic oligonucleotide; AAG chr2 60485453 60485472 60485456 -
ctgtttttgcagttagctta

SEQ ID NO: 180919 - DNA, 20 bp, Artificial Sequence
  Synthetic oligonucleotide; AGG chr2 60485452 60485471 60485455 -
tgtttttgcagttagcttaa

SEQ ID NO: 180920 - DNA, 20 bp, Artificial Sequence
  Synthetic oligonucleotide; TGG chr2 60485447 60485466 60485450 -
ttgcagttagcttaaaggca

SEQ ID NO: 180921 - DNA, 20 bp, Artificial Sequence
  Synthetic oligonucleotide; GAG chr2 60485445 60485464 60485448 -
gcagttagcttaaaggcatg

SEQ ID NO: 180922 - DNA, 20 bp, Artificial Sequence
  Synthetic oligonucleotide; AGG chr2 60485444 60485463 60485447 -
cagttagcttaaaggcatgg

SEQ ID NO: 180923 - DNA, 20 bp, Artificial Sequence
  Synthetic oligonucleotide; TGG chr2 60485434 60485453 60485437 -
aaaggcatggaggacattcc

SEQ ID NO: 180924 - DNA, 20 bp, Artificial Sequence
  Synthetic oligonucleotide; GGG chr2 60485433 60485452 60485436 -
aaggcatggaggacattcct

SEQ ID NO: 180925 - DNA, 20 bp, Artificial Sequence
  Synthetic oligonucleotide; TAG chr2 60485428 60485447 60485431 -
atggaggacattcctgggac

SEQ ID NO: 180926 - DNA, 20 bp, Artificial Sequence
  Synthetic oligonucleotide; TAG chr2 60485418 60485437 60485421 -
ttcctgggactagcatctgc

SEQ ID NO: 180927 - DNA, 20 bp, Artificial Sequence
  Synthetic oligonucleotide; AAG chr2 60485413 60485432 60485416 -
gggactagcatctgctagcc

SEQ ID NO: 180928 - DNA, 20 bp, Artificial Sequence
  Synthetic oligonucleotide; AAG chr2 60485406 60485425 60485409 -
gcatctgctagccaagaacg

SEQ ID NO: 180929 - DNA, 20 bp, Artificial Sequence
  Synthetic oligonucleotide; CAG chr2 60485399 60485418 60485402 -
ctagccaagaacgaagatga

SEQ ID NO: 180930 - DNA, 20 bp, Artificial Sequence
  Synthetic oligonucleotide; TGG chr2 60485391 60485410 60485394 -
gaacgaagatgacagcaaca

SEQ ID NO: 180931 - DNA, 20 bp, Artificial Sequence
  Synthetic oligonucleotide; TAG chr2 60485385 60485404 60485388 -
agatgacagcaacatggccg

SEQ ID NO: 180932 - DNA, 20 bp, Artificial Sequence
  Synthetic oligonucleotide; GAG chr2 60485383 60485402 60485386 -
atgacagcaacatggccgta

SEQ ID NO: 180933 - DNA, 20 bp, Artificial Sequence
  Synthetic oligonucleotide; AGG chr2 60485382 60485401 60485385 -
tgacagcaacatggccgtag

SEQ ID NO: 180934 - DNA, 20 bp, Artificial Sequence
  Synthetic oligonucleotide; TGG chr2 60485377 60485396 60485380 -
gcaacatggccgtagaggca

SEQ ID NO: 180935 - DNA, 20 bp, Artificial Sequence
  Synthetic oligonucleotide; GGG chr2 60485376 60485395 60485379 -
caacatggccgtagaggcat

SEQ ID NO: 180936 - DNA, 20 bp, Artificial Sequence
  Synthetic oligonucleotide; TGG chr2 60485367 60485386 60485370 -
cgtagaggcatgggccctgc

SEQ ID NO: 180937 - DNA, 20 bp, Artificial Sequence
  Synthetic oligonucleotide; GGG chr2 60485366 60485385 60485369 -
gtagaggcatgggccctgct

SEQ ID NO: 180938 - DNA, 20 bp, Artificial Sequence
  Synthetic oligonucleotide; GGG chr2 60485365 60485384 60485368 -
tagaggcatgggccctgctg

SEQ ID NO: 180939 - DNA, 20 bp, Artificial Sequence
  Synthetic oligonucleotide; CAG chr2 60485348 60485367 60485351 -
ctggggctaataacccactg

SEQ ID NO: 180940 - DNA, 20 bp, Artificial Sequence
  Synthetic oligonucleotide; AGG chr2 60485347 60485366 60485350 -
tggggctaataacccactgc

SEQ ID NO: 180941 - DNA, 20 bp, Artificial Sequence
  Synthetic oligonucleotide; TGG chr2 60485337 60485356 60485340 -
aacccactgcaggctatcct

SEQ ID NO: 180942 - DNA, 20 bp, Artificial Sequence
  Synthetic oligonucleotide; TGG chr2 60485325 60485344 60485328 -
gctatccttggcattcttgc

SEQ ID NO: 180943 - DNA, 20 bp, Artificial Sequence
  Synthetic oligonucleotide; GAG chr2 60485323 60485342 60485326 -
tatccttggcattcttgctg

SEQ ID NO: 180944 - DNA, 20 bp, Artificial Sequence
  Synthetic oligonucleotide; TGG chr2 60485320 60485339 60485323 -
ccttggcattcttgctggag

SEQ ID NO: 180945 - DNA, 20 bp, Artificial Sequence
  Synthetic oligonucleotide; TGG chr2 60485300 60485319 60485303 -
tggccttgctccaccctacc

SEQ ID NO: 180946 - DNA, 20 bp, Artificial Sequence
  Synthetic oligonucleotide; CAG chr2 60485284 60485303 60485287 -
tacctggtcactgtgccgtt

SEQ ID NO: 180947 - DNA, 20 bp, Artificial Sequence
  Synthetic oligonucleotide; TGG chr2 60485279 60485298 60485282 -
ggtcactgtgccgttcagtc

SEQ ID NO: 180948 - DNA, 20 bp, Artificial Sequence
  Synthetic oligonucleotide; GGG chr2 60485278 60485297 60485281 -
gtcactgtgccgttcagtct

SEQ ID NO: 180949 - DNA, 20 bp, Artificial Sequence
  Synthetic oligonucleotide; TGG chr2 60485272 60485291 60485275 -
gtgccgttcagtctgggcta

SEQ ID NO: 180950 - DNA, 20 bp, Artificial Sequence
  Synthetic oligonucleotide; AAG chr2 60485236 60485255 60485239 -
ctcatcccattgcatttcat

SEQ ID NO: 180951 - DNA, 20 bp, Artificial Sequence
  Synthetic oligonucleotide; CAG chr2 60485232 60485251 60485235 -
tcccattgcatttcataagc

SEQ ID NO: 180952 - DNA, 20 bp, Artificial Sequence
  Synthetic oligonucleotide; AAG chr2 60485222 60485241 60485225 -
tttcataagccagtaactcc

SEQ ID NO: 180953 - DNA, 20 bp, Artificial Sequence
  Synthetic oligonucleotide; AGG chr2 60485221 60485240 60485224 -
ttcataagccagtaactcca

SEQ ID NO: 180954 - DNA, 20 bp, Artificial Sequence
  Synthetic oligonucleotide; CAG chr2 60485217 60485236 60485220 -
taagccagtaactccaaggc

SEQ ID NO: 180955 - DNA, 20 bp, Artificial Sequence
  Synthetic oligonucleotide; TGG chr2 60485199 60485218 60485202 -
gccagacttccattacactc

SEQ ID NO: 180956 - DNA, 20 bp, Artificial Sequence
  Synthetic oligonucleotide; CAG chr2 60485179 60485198 60485182 -
tggatgactgcatttatttg

SEQ ID NO: 180957 - DNA, 20 bp, Artificial Sequence
  Synthetic oligonucleotide; AAG chr2 60485169 60485188 60485172 -
catttatttgcagtgacttc

SEQ ID NO: 180958 - DNA, 20 bp, Artificial Sequence
  Synthetic oligonucleotide; AGG chr2 60485168 60485187 60485171 -
atttatttgcagtgacttca

SEQ ID NO: 180959 - DNA, 20 bp, Artificial Sequence
  Synthetic oligonucleotide; AAG chr2 60485165 60485184 60485168 -
tatttgcagtgacttcaagg

SEQ ID NO: 180960 - DNA, 20 bp, Artificial Sequence
  Synthetic oligonucleotide; AAG chr2 60485162 60485181 60485165 -
ttgcagtgacttcaaggaag

SEQ ID NO: 180961 - DNA, 20 bp, Artificial Sequence
  Synthetic oligonucleotide; AGG chr2 60485161 60485180 60485164 -
tgcagtgacttcaaggaaga

SEQ ID NO: 180962 - DNA, 20 bp, Artificial Sequence
  Synthetic oligonucleotide; GGG chr2 60485160 60485179 60485163 -
gcagtgacttcaaggaagaa

SEQ ID NO: 180963 - DNA, 20 bp, Artificial Sequence
  Synthetic oligonucleotide; GGG chr2 60485159 60485178 60485162 -
cagtgacttcaaggaagaag

SEQ ID NO: 180964 - DNA, 20 bp, Artificial Sequence
  Synthetic oligonucleotide; TAG chr2 60485150 60485169 60485153 -
caaggaagaaggggcctgtt

SEQ ID NO: 180965 - DNA, 20 bp, Artificial Sequence
  Synthetic oligonucleotide; AGG chr2 60485149 60485168 60485152 -
aaggaagaaggggcctgttt

SEQ ID NO: 180966 - DNA, 20 bp, Artificial Sequence
  Synthetic oligonucleotide; TAG chr2 60485142 60485161 60485145 -
aaggggcctgtttaggaaat

SEQ ID NO: 180967 - DNA, 20 bp, Artificial Sequence
  Synthetic oligonucleotide; AGG chr2 60485141 60485160 60485144 -
aggggcctgtttaggaaatt

SEQ ID NO: 180968 - DNA, 20 bp, Artificial Sequence
  Synthetic oligonucleotide; TGG chr2 60485135 60485154 60485138 -
ctgtttaggaaattaggcac

SEQ ID NO: 180969 - DNA, 20 bp, Artificial Sequence
  Synthetic oligonucleotide; TGG chr2 60485130 60485149 60485133 -
taggaaattaggcactggcc

SEQ ID NO: 180970 - DNA, 20 bp, Artificial Sequence
  Synthetic oligonucleotide; AAG chr2 60485123 60485142 60485126 -
ttaggcactggcctggtgaa

SEQ ID NO: 180971 - DNA, 20 bp, Artificial Sequence
  Synthetic oligonucleotide; AGG chr2 60485122 60485141 60485125 -
taggcactggcctggtgaaa

SEQ ID NO: 180972 - DNA, 20 bp, Artificial Sequence
  Synthetic oligonucleotide; TGG chr2 60485103 60485122 60485106 -
aaggtcaacttgcgaaattg

SEQ ID NO: 180973 - DNA, 20 bp, Artificial Sequence
  Synthetic oligonucleotide; AAG chr2 60485096 60485115 60485099 -
acttgcgaaattgtggctgc

SEQ ID NO: 180974 - DNA, 20 bp, Artificial Sequence
  Synthetic oligonucleotide; AGG chr2 60485095 60485114 60485098 -
cttgcgaaattgtggctgca

SEQ ID NO: 180975 - DNA, 20 bp, Artificial Sequence
  Synthetic oligonucleotide; GGG chr2 60485094 60485113 60485097 -
ttgcgaaattgtggctgcaa

SEQ ID NO: 180976 - DNA, 20 bp, Artificial Sequence
  Synthetic oligonucleotide; AAG chr2 60485076 60485095 60485079 -
aagggatgcctttttcttcc

SEQ ID NO: 180977 - DNA, 20 bp, Artificial Sequence
  Synthetic oligonucleotide; AGG chr2 60485075 60485094 60485078 -
agggatgcctttttcttcca

SEQ ID NO: 180978 - DNA, 20 bp, Artificial Sequence
  Synthetic oligonucleotide; TGG chr2 60485064 60485083 60485067 -
tttcttccaaggctatgcct

SEQ ID NO: 180979 - DNA, 20 bp, Artificial Sequence
  Synthetic oligonucleotide; TGG chr2 60485061 60485080 60485064 -
cttccaaggctatgccttgg

SEQ ID NO: 180980 - DNA, 20 bp, Artificial Sequence
  Synthetic oligonucleotide; TGG chr2 60485058 60485077 60485061 -
ccaaggctatgccttggtgg

SEQ ID NO: 180981 - DNA, 20 bp, Artificial Sequence
  Synthetic oligonucleotide; TGG chr2 60485055 60485074 60485058 -
aggctatgccttggtggtgg

SEQ ID NO: 180982 - DNA, 20 bp, Artificial Sequence
  Synthetic oligonucleotide; GAG chr2 60485051 60485070 60485054 -
tatgccttggtggtggtggt

SEQ ID NO: 180983 - DNA, 20 bp, Artificial Sequence
  Synthetic oligonucleotide; AGG chr2 60485050 60485069 60485053 -
atgccttggtggtggtggtg

SEQ ID NO: 180984 - DNA, 20 bp, Artificial Sequence
  Synthetic oligonucleotide; GGG chr2 60485049 60485068 60485052 -
tgccttggtggtggtggtga

SEQ ID NO: 180985 - DNA, 20 bp, Artificial Sequence
  Synthetic oligonucleotide; TGG chr2 60484993 60485012 60484996 -
tttaaatactgttttttgtt

SEQ ID NO: 180986 - DNA, 20 bp, Artificial Sequence
  Synthetic oligonucleotide; TGG chr2 60484989 60485008 60484992 -
aatactgttttttgtttggt

SEQ ID NO: 180987 - DNA, 20 bp, Artificial Sequence
  Synthetic oligonucleotide; TGG chr2 60484985 60485004 60484988 -
ctgttttttgtttggttggt

SEQ ID NO: 180988 - DNA, 20 bp, Artificial Sequence
  Synthetic oligonucleotide; AAG chr2 60484964 60484983 60484967 -
ggtttttttttttttttttt

SEQ ID NO: 180989 - DNA, 20 bp, Artificial Sequence
  Synthetic oligonucleotide; AAG chr2 60484953 60484972 60484956 -
tttttttttaagtcctaaac

SEQ ID NO: 180990 - DNA, 20 bp, Artificial Sequence
  Synthetic oligonucleotide; CAG chr2 60484945 60484964 60484948 -
taagtcctaaacaagtgcca

SEQ ID NO: 180991 - DNA, 20 bp, Artificial Sequence
  Synthetic oligonucleotide; GAG chr2 60484943 60484962 60484946 -
agtcctaaacaagtgccaca

SEQ ID NO: 180992 - DNA, 20 bp, Artificial Sequence
  Synthetic oligonucleotide; AGG chr2 60484942 60484961 60484945 -
gtcctaaacaagtgccacag

SEQ ID NO: 180993 - DNA, 20 bp, Artificial Sequence
  Synthetic oligonucleotide; TGG chr2 60484930 60484949 60484933 -
tgccacagaggatttctttt

SEQ ID NO: 180994 - DNA, 20 bp, Artificial Sequence
  Synthetic oligonucleotide; TGG chr2 60484909 60484928 60484912 -
ggcttgaacttgataaaatt

SEQ ID NO: 180995 - DNA, 20 bp, Artificial Sequence
  Synthetic oligonucleotide; GAG chr2 60484907 60484926 60484910 -
cttgaacttgataaaatttg

SEQ ID NO: 180996 - DNA, 20 bp, Artificial Sequence
  Synthetic oligonucleotide; AAG chr2 60484899 60484918 60484902 -
tgataaaatttggagcacac

SEQ ID NO: 180997 - DNA, 20 bp, Artificial Sequence
  Synthetic oligonucleotide; TGG chr2 60484886 60484905 60484889 -
agcacacaagtttacacaca

SEQ ID NO: 180998 - DNA, 20 bp, Artificial Sequence
  Synthetic oligonucleotide; CAG chr2 60484852 60484871 60484855 -
caccccttctcccatctccc

SEQ ID NO: 180999 - DNA, 20 bp, Artificial Sequence
  Synthetic oligonucleotide; CAG chr2 60484844 60484863 60484847 -
ctcccatctccccagacccc

SEQ ID NO: 181000 - DNA, 20 bp, Artificial Sequence
  Synthetic oligonucleotide; GAG chr2 60484824 60484843 60484827 -
cagcacatatgttccataat

SEQ ID NO: 181001 - DNA, 20 bp, Artificial Sequence
  Synthetic oligonucleotide; AGG chr2 60484823 60484842 60484826 -
agcacatatgttccataatg

SEQ ID NO: 181002 - DNA, 20 bp, Artificial Sequence
  Synthetic oligonucleotide; AAG chr2 60484813 60484832 60484816 -
ttccataatgaggtgttcct

SEQ ID NO: 181003 - DNA, 20 bp, Artificial Sequence
  Synthetic oligonucleotide; GAG chr2 60484809 60484828 60484812 -
ataatgaggtgttcctaagt

SEQ ID NO: 181004 - DNA, 20 bp, Artificial Sequence
  Synthetic oligonucleotide; GAG chr2 60484792 60484811 60484795 -
agtgagaattcccataattt

SEQ ID NO: 181005 - DNA, 20 bp, Artificial Sequence
  Synthetic oligonucleotide; AGG chr2 60484791 60484810 60484794 -
gtgagaattcccataatttg

SEQ ID NO: 181006 - DNA, 20 bp, Artificial Sequence
  Synthetic oligonucleotide; TGG chr2 60484780 60484799 60484783 -
cataatttgaggttttatac

SEQ ID NO: 181007 - DNA, 20 bp, Artificial Sequence
  Synthetic oligonucleotide; TGG chr2 60484775 60484794 60484778 -
tttgaggttttatactggaa

SEQ ID NO: 181008 - DNA, 20 bp, Artificial Sequence
  Synthetic oligonucleotide; AAG chr2 60484768 60484787 60484771 -
ttttatactggaatggtgat

SEQ ID NO: 181009 - DNA, 20 bp, Artificial Sequence
  Synthetic oligonucleotide; AGG chr2 60484767 60484786 60484770 -
tttatactggaatggtgata

SEQ ID NO: 181010 - DNA, 20 bp, Artificial Sequence
  Synthetic oligonucleotide; GGG chr2 60484766 60484785 60484769 -
ttatactggaatggtgataa

SEQ ID NO: 181011 - DNA, 20 bp, Artificial Sequence
  Synthetic oligonucleotide; CAG chr2 60484763 60484782 60484766 -
tactggaatggtgataaggg

SEQ ID NO: 181012 - DNA, 20 bp, Artificial Sequence
  Synthetic oligonucleotide; AGG chr2 60484762 60484781 60484765 -
actggaatggtgataagggc

SEQ ID NO: 181013 - DNA, 20 bp, Artificial Sequence
  Synthetic oligonucleotide; CAG chr2 60484753 60484772 60484756 -
gtgataagggcaggaaacct

SEQ ID NO: 181014 - DNA, 20 bp, Artificial Sequence
  Synthetic oligonucleotide; GAG chr2 60484731 60484750 60484734 -
gcccatgtgcattttttctc

SEQ ID NO: 181015 - DNA, 20 bp, Artificial Sequence
  Synthetic oligonucleotide; TGG chr2 60484728 60484747 60484731 -
catgtgcattttttctcgag

SEQ ID NO: 181016 - DNA, 20 bp, Artificial Sequence
  Synthetic oligonucleotide; AAG chr2 60484666 60484685 60484669 -
tccaaattcccccttctctt

SEQ ID NO: 181017 - DNA, 20 bp, Artificial Sequence
  Synthetic oligonucleotide; GAG chr2 60484652 60484671 60484655 -
tctcttaagaaaaaacacgt

SEQ ID NO: 181018 - DNA, 20 bp, Artificial Sequence
  Synthetic oligonucleotide; TGG chr2 60484643 60484662 60484646 -
aaaaaacacgtgagccatgt

SEQ ID NO: 181019 - DNA, 20 bp, Artificial Sequence
  Synthetic oligonucleotide; AAG chr2 60484640 60484659 60484643 -
aaacacgtgagccatgttgg

SEQ ID NO: 181020 - DNA, 20 bp, Artificial Sequence
  Synthetic oligonucleotide; CAG chr2 60484635 60484654 60484638 -
cgtgagccatgttggaagta

SEQ ID NO: 181021 - DNA, 20 bp, Artificial Sequence
  Synthetic oligonucleotide; CAG chr2 60484623 60484642 60484626 -
tggaagtacagccttgacct

SEQ ID NO: 181022 - DNA, 20 bp, Artificial Sequence
  Synthetic oligonucleotide; CAG chr2 60484614 60484633 60484617 -
agccttgacctcagcctcac

SEQ ID NO: 181023 - DNA, 20 bp, Artificial Sequence
  Synthetic oligonucleotide; AGG chr2 60484613 60484632 60484616 -
gccttgacctcagcctcacc

SEQ ID NO: 181024 - DNA, 20 bp, Artificial Sequence
  Synthetic oligonucleotide; CGG chr2 60484608 60484627 60484611 -
gacctcagcctcaccaggtg

SEQ ID NO: 181025 - DNA, 20 bp, Artificial Sequence
  Synthetic oligonucleotide; CGG chr2 60484597 60484616 60484600 -
caccaggtgcggctgctgac

SEQ ID NO: 181026 - DNA, 20 bp, Artificial Sequence
  Synthetic oligonucleotide; TAG chr2 60484584 60484603 60484587 -
tgctgaccggtgcaaaaaaa

SEQ ID NO: 181027 - DNA, 20 bp, Artificial Sequence
  Synthetic oligonucleotide; AGG chr2 60484583 60484602 60484586 -
gctgaccggtgcaaaaaaat

SEQ ID NO: 181028 - DNA, 20 bp, Artificial Sequence
  Synthetic oligonucleotide; AAG chr2 60484567 60484586 60484570 -
aaataggaaatattatttaa

SEQ ID NO: 181029 - DNA, 20 bp, Artificial Sequence
  Synthetic oligonucleotide; AGG chr2 60484566 60484585 60484569 -
aataggaaatattatttaaa

SEQ ID NO: 181030 - DNA, 20 bp, Artificial Sequence
  Synthetic oligonucleotide; CAG chr2 60484563 60484582 60484566 -
aggaaatattatttaaaagg

SEQ ID NO: 181031 - DNA, 20 bp, Artificial Sequence
  Synthetic oligonucleotide; AGG chr2 60484562 60484581 60484565 -
ggaaatattatttaaaaggc

SEQ ID NO: 181032 - DNA, 20 bp, Artificial Sequence
  Synthetic oligonucleotide; GGG chr2 60484561 60484580 60484564 -
gaaatattatttaaaaggca

SEQ ID NO: 181033 - DNA, 20 bp, Artificial Sequence
  Synthetic oligonucleotide; GAG chr2 60484559 60484578 60484562 -
aatattatttaaaaggcagg

SEQ ID NO: 181034 - DNA, 20 bp, Artificial Sequence
  Synthetic oligonucleotide; AGG chr2 60484558 60484577 60484561 -
atattatttaaaaggcaggg

SEQ ID NO: 181035 - DNA, 20 bp, Artificial Sequence
  Synthetic oligonucleotide; GGG chr2 60484557 60484576 60484560 -
tattatttaaaaggcaggga

SEQ ID NO: 181036 - DNA, 20 bp, Artificial Sequence
  Synthetic oligonucleotide; GGG chr2 60484556 60484575 60484559 -
attatttaaaaggcagggag

SEQ ID NO: 181037 - DNA, 20 bp, Artificial Sequence
  Synthetic oligonucleotide; GAG chr2 60484554 60484573 60484557 -
tatttaaaaggcagggaggg

SEQ ID NO: 181038 - DNA, 20 bp, Artificial Sequence
  Synthetic oligonucleotide; GAG chr2 60484552 60484571 60484555 -
tttaaaaggcagggagggga

SEQ ID NO: 181039 - DNA, 20 bp, Artificial Sequence
  Synthetic oligonucleotide; CAG chr2 60484523 60484542 60484526 -
ttccacaatcactgctgttt

SEQ ID NO: 181040 - DNA, 20 bp, Artificial Sequence
  Synthetic oligonucleotide; AAG chr2 60484516 60484535 60484519 -
atcactgctgtttcagtgaa

SEQ ID NO: 181041 - DNA, 20 bp, Artificial Sequence
  Synthetic oligonucleotide; CGG chr2 60484508 60484527 60484511 -
tgtttcagtgaaaagcaacc

SEQ ID NO: 181042 - DNA, 20 bp, Artificial Sequence
  Synthetic oligonucleotide; TGG chr2 60484478 60484497 60484481 -
gtaaaacctacttccctttc

SEQ ID NO: 181043 - DNA, 20 bp, Artificial Sequence
  Synthetic oligonucleotide; TGG chr2 60484469 60484488 60484472 -
acttccctttctggtgaatg

SEQ ID NO: 181044 - DNA, 20 bp, Artificial Sequence
  Synthetic oligonucleotide; CAG chr2 60484456 60484475 60484459 -
gtgaatgtggctgtttttga

SEQ ID NO: 181045 - DNA, 20 bp, Artificial Sequence
  Synthetic oligonucleotide; CAG chr2 60484453 60484472 60484456 -
aatgtggctgtttttgacag

SEQ ID NO: 181046 - DNA, 20 bp, Artificial Sequence
  Synthetic oligonucleotide; GAG chr2 60484451 60484470 60484454 -
tgtggctgtttttgacagca

SEQ ID NO: 181047 - DNA, 20 bp, Artificial Sequence
  Synthetic oligonucleotide; AGG chr2 60484450 60484469 60484453 -
gtggctgtttttgacagcag

SEQ ID NO: 181048 - DNA, 20 bp, Artificial Sequence
  Synthetic oligonucleotide; CAG chr2 60484443 60484462 60484446 -
tttttgacagcagaggaccc

SEQ ID NO: 181049 - DNA, 20 bp, Artificial Sequence
  Synthetic oligonucleotide; GAG chr2 60484435 60484454 60484438 -
agcagaggaccccagttgtt

SEQ ID NO: 181050 - DNA, 20 bp, Artificial Sequence
  Synthetic oligonucleotide; AGG chr2 60484434 60484453 60484437 -
gcagaggaccccagttgttg

SEQ ID NO: 181051 - DNA, 20 bp, Artificial Sequence
  Synthetic oligonucleotide; AAG chr2 60484427 60484446 60484430 -
accccagttgttgaggacta

SEQ ID NO: 181052 - DNA, 20 bp, Artificial Sequence
  Synthetic oligonucleotide; GAG chr2 60484425 60484444 60484428 -
cccagttgttgaggactaaa

SEQ ID NO: 181053 - DNA, 20 bp, Artificial Sequence
  Synthetic oligonucleotide; GAG chr2 60484423 60484442 60484426 -
cagttgttgaggactaaaga

SEQ ID NO: 181054 - DNA, 20 bp, Artificial Sequence
  Synthetic oligonucleotide; GAG chr2 60484421 60484440 60484424 -
gttgttgaggactaaagaga

SEQ ID NO: 181055 - DNA, 20 bp, Artificial Sequence
  Synthetic oligonucleotide; AAG chr2 60484418 60484437 60484421 -
gttgaggactaaagagagag

SEQ ID NO: 181056 - DNA, 20 bp, Artificial Sequence
  Synthetic oligonucleotide; GAG chr2 60484413 60484432 60484416 -
ggactaaagagagagaagat

SEQ ID NO: 181057 - DNA, 20 bp, Artificial Sequence
  Synthetic oligonucleotide; AAG chr2 60484409 60484428 60484412 -
taaagagagagaagatgaga

SEQ ID NO: 181058 - DNA, 20 bp, Artificial Sequence
  Synthetic oligonucleotide; AAG chr2 60484406 60484425 60484409 -
agagagagaagatgagaaag

SEQ ID NO: 181059 - DNA, 20 bp, Artificial Sequence
  Synthetic oligonucleotide; TGG chr2 60484399 60484418 60484402 -
gaagatgagaaagaagatgc

SEQ ID NO: 181060 - DNA, 20 bp, Artificial Sequence
  Synthetic oligonucleotide; CAG chr2 60484393 60484412 60484396 -
gagaaagaagatgctggaaa

SEQ ID NO: 181061 - DNA, 20 bp, Artificial Sequence
  Synthetic oligonucleotide; GAG chr2 60484391 60484410 60484394 -
gaaagaagatgctggaaaca

SEQ ID NO: 181062 - DNA, 20 bp, Artificial Sequence
  Synthetic oligonucleotide; AGG chr2 60484390 60484409 60484393 -
aaagaagatgctggaaacag

SEQ ID NO: 181063 - DNA, 20 bp, Artificial Sequence
  Synthetic oligonucleotide; TGG chr2 60484386 60484405 60484389 -
aagatgctggaaacagaggt

SEQ ID NO: 181064 - DNA, 20 bp, Artificial Sequence
  Synthetic oligonucleotide; GAG chr2 60484384 60484403 60484387 -
gatgctggaaacagaggttg

SEQ ID NO: 181065 - DNA, 20 bp, Artificial Sequence
  Synthetic oligonucleotide; AAG chr2 60484380 60484399 60484383 -
ctggaaacagaggttggaga

SEQ ID NO: 181066 - DNA, 20 bp, Artificial Sequence
  Synthetic oligonucleotide; GAG chr2 60484378 60484397 60484381 -
ggaaacagaggttggagaaa

SEQ ID NO: 181067 - DNA, 20 bp, Artificial Sequence
  Synthetic oligonucleotide; GAG chr2 60484376 60484395 60484379 -
aaacagaggttggagaaaga

SEQ ID NO: 181068 - DNA, 20 bp, Artificial Sequence
  Synthetic oligonucleotide; AGG chr2 60484375 60484394 60484378 -
aacagaggttggagaaagag

SEQ ID NO: 181069 - DNA, 20 bp, Artificial Sequence
  Synthetic oligonucleotide; AAG chr2 60484371 60484390 60484374 -
gaggttggagaaagagaggc

SEQ ID NO: 181070 - DNA, 20 bp, Artificial Sequence
  Synthetic oligonucleotide; AGG chr2 60484370 60484389 60484373 -
aggttggagaaagagaggca

SEQ ID NO: 181071 - DNA, 20 bp, Artificial Sequence
  Synthetic oligonucleotide; AAG chr2 60484367 60484386 60484370 -
ttggagaaagagaggcaagg

SEQ ID NO: 181072 - DNA, 20 bp, Artificial Sequence
  Synthetic oligonucleotide; TAG chr2 60484364 60484383 60484367 -
gagaaagagaggcaaggaag

SEQ ID NO: 181073 - DNA, 20 bp, Artificial Sequence
  Synthetic oligonucleotide; AAG chr2 60484360 60484379 60484363 -
aagagaggcaaggaagtaga

SEQ ID NO: 181074 - DNA, 20 bp, Artificial Sequence
  Synthetic oligonucleotide; AGG chr2 60484359 60484378 60484362 -
agagaggcaaggaagtagaa

SEQ ID NO: 181075 - DNA, 20 bp, Artificial Sequence
  Synthetic oligonucleotide; GAG chr2 60484357 60484376 60484360 -
agaggcaaggaagtagaaag

SEQ ID NO: 181076 - DNA, 20 bp, Artificial Sequence
  Synthetic oligonucleotide; AGG chr2 60484356 60484375 60484359 -
gaggcaaggaagtagaaagg

SEQ ID NO: 181077 - DNA, 20 bp, Artificial Sequence
  Synthetic oligonucleotide; AAG chr2 60484351 60484370 60484354 -
aaggaagtagaaaggaggaa

SEQ ID NO: 181078 - DNA, 20 bp, Artificial Sequence
  Synthetic oligonucleotide; AGG chr2 60484350 60484369 60484353 -
aggaagtagaaaggaggaaa

SEQ ID NO: 181079 - DNA, 20 bp, Artificial Sequence
  Synthetic oligonucleotide; GGG chr2 60484349 60484368 60484352 -
ggaagtagaaaggaggaaaa

SEQ ID NO: 181080 - DNA, 20 bp, Artificial Sequence
  Synthetic oligonucleotide; GGG chr2 60484348 60484367 60484351 -
gaagtagaaaggaggaaaag

SEQ ID NO: 181081 - DNA, 20 bp, Artificial Sequence
  Synthetic oligonucleotide; AAG chr2 60484345 60484364 60484348 -
gtagaaaggaggaaaagggg

SEQ ID NO: 181082 - DNA, 20 bp, Artificial Sequence
  Synthetic oligonucleotide; GAG chr2 60484343 60484362 60484346 -
agaaaggaggaaaaggggaa

SEQ ID NO: 181083 - DNA, 20 bp, Artificial Sequence
  Synthetic oligonucleotide; GAG chr2 60484341 60484360 60484344 -
aaaggaggaaaaggggaaga

SEQ ID NO: 181084 - DNA, 20 bp, Artificial Sequence
  Synthetic oligonucleotide; AGG chr2 60484340 60484359 60484343 -
aaggaggaaaaggggaagag

SEQ ID NO: 181085 - DNA, 20 bp, Artificial Sequence
  Synthetic oligonucleotide; GAG chr2 60484338 60484357 60484341 -
ggaggaaaaggggaagagag

SEQ ID NO: 181086 - DNA, 20 bp, Artificial Sequence
  Synthetic oligonucleotide; AGG chr2 60484337 60484356 60484340 -
gaggaaaaggggaagagagg

SEQ ID NO: 181087 - DNA, 20 bp, Artificial Sequence
  Synthetic oligonucleotide; CAG chr2 60484334 60484353 60484337 -
gaaaaggggaagagaggagg

SEQ ID NO: 181088 - DNA, 20 bp, Artificial Sequence
  Synthetic oligonucleotide; AGG chr2 60484333 60484352 60484336 -
aaaaggggaagagaggaggc

SEQ ID NO: 181089 - DNA, 20 bp, Artificial Sequence
  Synthetic oligonucleotide; GGG chr2 60484332 60484351 60484335 -
aaaggggaagagaggaggca

SEQ ID NO: 181090 - DNA, 20 bp, Artificial Sequence
  Synthetic oligonucleotide; GGG chr2 60484331 60484350 60484334 -
aaggggaagagaggaggcag

SEQ ID NO: 181091 - DNA, 20 bp, Artificial Sequence
  Synthetic oligonucleotide; GGG chr2 60484330 60484349 60484333 -
aggggaagagaggaggcagg

SEQ ID NO: 181092 - DNA, 20 bp, Artificial Sequence
  Synthetic oligonucleotide; GAG chr2 60484328 60484347 60484331 -
gggaagagaggaggcagggg

SEQ ID NO: 181093 - DNA, 20 bp, Artificial Sequence
  Synthetic oligonucleotide; GAG chr2 60484326 60484345 60484329 -
gaagagaggaggcaggggga

SEQ ID NO: 181094 - DNA, 20 bp, Artificial Sequence
  Synthetic oligonucleotide; GAG chr2 60484324 60484343 60484327 -
agagaggaggcagggggaga

SEQ ID NO: 181095 - DNA, 20 bp, Artificial Sequence
  Synthetic oligonucleotide; AGG chr2 60484323 60484342 60484326 -
gagaggaggcagggggagag

SEQ ID NO: 181096 - DNA, 20 bp, Artificial Sequence
  Synthetic oligonucleotide; GGG chr2 60484322 60484341 60484325 -
agaggaggcagggggagaga

SEQ ID NO: 181097 - DNA, 20 bp, Artificial Sequence
  Synthetic oligonucleotide; TGG chr2 60484318 60484337 60484321 -
gaggcagggggagagagggt

SEQ ID NO: 181098 - DNA, 20 bp, Artificial Sequence
  Synthetic oligonucleotide; GAG chr2 60484310 60484329 60484313 -
gggagagagggttggaattc

SEQ ID NO: 181099 - DNA, 20 bp, Artificial Sequence
  Synthetic oligonucleotide; CAG chr2 60484300 60484319 60484303 -
gttggaattcgagctatttt

SEQ ID NO: 181100 - DNA, 20 bp, Artificial Sequence
  Synthetic oligonucleotide; GAG chr2 60484289 60484308 60484292 -
agctattttcagctgaatgt

SEQ ID NO: 181101 - DNA, 20 bp, Artificial Sequence
  Synthetic oligonucleotide; CAG chr2 60484284 60484303 60484287 -
ttttcagctgaatgtgagtg

SEQ ID NO: 181102 - DNA, 20 bp, Artificial Sequence
  Synthetic oligonucleotide; CAG chr2 60484274 60484293 60484277 -
aatgtgagtgcagatttcat

SEQ ID NO: 181103 - DNA, 20 bp, Artificial Sequence
  Synthetic oligonucleotide; AGG chr2 60484273 60484292 60484276 -
atgtgagtgcagatttcatc

SEQ ID NO: 181104 - DNA, 20 bp, Artificial Sequence
  Synthetic oligonucleotide; TGG chr2 60484266 60484285 60484269 -
tgcagatttcatcaggcttc

SEQ ID NO: 181105 - DNA, 20 bp, Artificial Sequence
  Synthetic oligonucleotide; GGG chr2 60484265 60484284 60484268 -
gcagatttcatcaggcttct

SEQ ID NO: 181106 - DNA, 20 bp, Artificial Sequence
  Synthetic oligonucleotide; CAG chr2 60484259 60484278 60484262 -
ttcatcaggcttctgggcta

SEQ ID NO: 181107 - DNA, 20 bp, Artificial Sequence
  Synthetic oligonucleotide; AGG chr2 60484258 60484277 60484261 -
tcatcaggcttctgggctac

SEQ ID NO: 181108 - DNA, 20 bp, Artificial Sequence
  Synthetic oligonucleotide; GGG chr2 60484257 60484276 60484260 -
catcaggcttctgggctaca

SEQ ID NO: 181109 - DNA, 20 bp, Artificial Sequence
  Synthetic oligonucleotide; CGG chr2 60484240 60484259 60484243 -
acagggaaactgactgtgtg

SEQ ID NO: 181110 - DNA, 20 bp, Artificial Sequence
  Synthetic oligonucleotide; AAG chr2 60484215 60484234 60484218 -
cttgcgtgtaacttcctgtg

SEQ ID NO: 181111 - DNA, 20 bp, Artificial Sequence
  Synthetic oligonucleotide; CAG chr2 60484212 60484231 60484215 -
gcgtgtaacttcctgtgaag

SEQ ID NO: 181112 - DNA, 20 bp, Artificial Sequence
  Synthetic oligonucleotide; TGG chr2 60484206 60484225 60484209 -
aacttcctgtgaagcagccg

SEQ ID NO: 181113 - DNA, 20 bp, Artificial Sequence
  Synthetic oligonucleotide; CAG chr2 60484181 60484200 60484184 -
actgcattttctgacactgt

SEQ ID NO: 181114 - DNA, 20 bp, Artificial Sequence
  Synthetic oligonucleotide; GAG chr2 60484179 60484198 60484182 -
tgcattttctgacactgtca

SEQ ID NO: 181115 - DNA, 20 bp, Artificial Sequence
  Synthetic oligonucleotide; TGG chr2 60484174 60484193 60484177 -
tttctgacactgtcagagtc

SEQ ID NO: 181116 - DNA, 20 bp, Artificial Sequence
  Synthetic oligonucleotide; CAG chr2 60484161 60484180 60484164 -
cagagtctggacaaccctgc

SEQ ID NO: 181117 - DNA, 20 bp, Artificial Sequence
  Synthetic oligonucleotide; TAG chr2 60484154 60484173 60484157 -
tggacaaccctgccagctcc

SEQ ID NO: 181118 - DNA, 20 bp, Artificial Sequence
  Synthetic oligonucleotide; AAG chr2 60484151 60484170 60484154 -
acaaccctgccagctcctag

SEQ ID NO: 181119 - DNA, 20 bp, Artificial Sequence
  Synthetic oligonucleotide; AGG chr2 60484150 60484169 60484153 -
caaccctgccagctcctaga

SEQ ID NO: 181120 - DNA, 20 bp, Artificial Sequence
  Synthetic oligonucleotide; GGG chr2 60484149 60484168 60484152 -
aaccctgccagctcctagaa

SEQ ID NO: 181121 - DNA, 20 bp, Artificial Sequence
  Synthetic oligonucleotide; CAG chr2 60484129 60484148 60484132 -
gggcaacccaacaactgtca

SEQ ID NO: 181122 - DNA, 20 bp, Artificial Sequence
  Synthetic oligonucleotide; AAG chr2 60484123 60484142 60484126 -
cccaacaactgtcacagacg

SEQ ID NO: 181123 - DNA, 20 bp, Artificial Sequence
  Synthetic oligonucleotide; AAG chr2 60484114 60484133 60484117 -
tgtcacagacgaagcatcaa

SEQ ID NO: 181124 - DNA, 20 bp, Artificial Sequence
  Synthetic oligonucleotide; GAG chr2 60484108 60484127 60484111 -
agacgaagcatcaaaagcat

SEQ ID NO: 181125 - DNA, 20 bp, Artificial Sequence
  Synthetic oligonucleotide; TAG chr2 60484098 60484117 60484101 -
tcaaaagcatgagctgtcga

SEQ ID NO: 181126 - DNA, 20 bp, Artificial Sequence
  Synthetic oligonucleotide; CAG chr2 60484082 60484101 60484085 -
tcgatagtgacctgcatttg

SEQ ID NO: 181127 - DNA, 20 bp, Artificial Sequence
  Synthetic oligonucleotide; GAG chr2 60484072 60484091 60484075 -
cctgcatttgcagaaaatct

SEQ ID NO: 181128 - DNA, 20 bp, Artificial Sequence
  Synthetic oligonucleotide; AGG chr2 60484071 60484090 60484074 -
ctgcatttgcagaaaatctg

SEQ ID NO: 181129 - DNA, 20 bp, Artificial Sequence
  Synthetic oligonucleotide; GGG chr2 60484070 60484089 60484073 -
tgcatttgcagaaaatctga

SEQ ID NO: 181130 - DNA, 20 bp, Artificial Sequence
  Synthetic oligonucleotide; CAG chr2 60484055 60484074 60484058 -
tctgagggctttctaattaa

SEQ ID NO: 181131 - DNA, 20 bp, Artificial Sequence
  Synthetic oligonucleotide; GAG chr2 60484053 60484072 60484056 -
tgagggctttctaattaaca

SEQ ID NO: 181132 - DNA, 20 bp, Artificial Sequence
  Synthetic oligonucleotide; AGG chr2 60484052 60484071 60484055 -
gagggctttctaattaacag

SEQ ID NO: 181133 - DNA, 20 bp, Artificial Sequence
  Synthetic oligonucleotide; GAG chr2 60484050 60484069 60484053 -
gggctttctaattaacagag

SEQ ID NO: 181134 - DNA, 20 bp, Artificial Sequence
  Synthetic oligonucleotide; TAG chr2 60484039 60484058 60484042 -
ttaacagaggagctctaaat

SEQ ID NO: 181135 - DNA, 20 bp, Artificial Sequence
  Synthetic oligonucleotide; GAG chr2 60484037 60484056 60484040 -
aacagaggagctctaaatta

SEQ ID NO: 181136 - DNA, 20 bp, Artificial Sequence
  Synthetic oligonucleotide; AAG chr2 60484032 60484051 60484035 -
aggagctctaaattagagta

SEQ ID NO: 181137 - DNA, 20 bp, Artificial Sequence
  Synthetic oligonucleotide; AAG chr2 60484020 60484039 60484023 -
ttagagtaaagctgttcgac

SEQ ID NO: 181138 - DNA, 20 bp, Artificial Sequence
  Synthetic oligonucleotide; CGG chr2 60484005 60484024 60484008 -
tcgacaagacccctcatacg

SEQ ID NO: 181139 - DNA, 20 bp, Artificial Sequence
  Synthetic oligonucleotide; AAG chr2 60484001 60484020 60484004 -
caagacccctcatacgcggt

SEQ ID NO: 181140 - DNA, 20 bp, Artificial Sequence
  Synthetic oligonucleotide; CAG chr2 60483988 60484007 60483991 -
acgcggtaagtgtcacaatg

SEQ ID NO: 181141 - DNA, 20 bp, Artificial Sequence
  Synthetic oligonucleotide; AAG chr2 60483967 60483986 60483970 -
agataatcattacatctaac

SEQ ID NO: 181142 - DNA, 20 bp, Artificial Sequence
  Synthetic oligonucleotide; CAG chr2 60483950 60483969 60483953 -
aacaagcttctgatttttaa

SEQ ID NO: 181143 - DNA, 20 bp, Artificial Sequence
  Synthetic oligonucleotide; AAG chr2 60483947 60483966 60483950 -
aagcttctgatttttaacag

SEQ ID NO: 181144 - DNA, 20 bp, Artificial Sequence
  Synthetic oligonucleotide; GAG chr2 60483940 60483959 60483943 -
tgatttttaacagaagctat

SEQ ID NO: 181145 - DNA, 20 bp, Artificial Sequence
  Synthetic oligonucleotide; TGG chr2 60483921 60483940 60483924 -
tgagaccaactcatttataa

SEQ ID NO: 181146 - DNA, 20 bp, Artificial Sequence
  Synthetic oligonucleotide; CAG chr2 60483916 60483935 60483919 -
ccaactcatttataatggtt

SEQ ID NO: 181147 - DNA, 20 bp, Artificial Sequence
  Synthetic oligonucleotide; AAG chr2 60483908 60483927 60483911 -
tttataatggttcagtttca

SEQ ID NO: 181148 - DNA, 20 bp, Artificial Sequence
  Synthetic oligonucleotide; AGG chr2 60483907 60483926 60483910 -
ttataatggttcagtttcaa

SEQ ID NO: 181149 - DNA, 20 bp, Artificial Sequence
  Synthetic oligonucleotide; GGG chr2 60483906 60483925 60483909 -
tataatggttcagtttcaaa

SEQ ID NO: 181150 - DNA, 20 bp, Artificial Sequence
  Synthetic oligonucleotide; GGG chr2 60483905 60483924 60483908 -
ataatggttcagtttcaaag

SEQ ID NO: 181151 - DNA, 20 bp, Artificial Sequence
  Synthetic oligonucleotide; GGG chr2 60483904 60483923 60483907 -
taatggttcagtttcaaagg

SEQ ID NO: 181152 - DNA, 20 bp, Artificial Sequence
  Synthetic oligonucleotide; AAG chr2 60483895 60483914 60483898 -
agtttcaaagggggaaaaaa

SEQ ID NO: 181153 - DNA, 20 bp, Artificial Sequence
  Synthetic oligonucleotide; AAG chr2 60483887 60483906 60483890 -
agggggaaaaaaaagcaacc

SEQ ID NO: 181154 - DNA, 20 bp, Artificial Sequence
  Synthetic oligonucleotide; AAG chr2 60483883 60483902 60483886 -
ggaaaaaaaagcaaccaaga

SEQ ID NO: 181155 - DNA, 20 bp, Artificial Sequence
  Synthetic oligonucleotide; AAG chr2 60483877 60483896 60483880 -
aaaagcaaccaagaaagaaa

SEQ ID NO: 181156 - DNA, 20 bp, Artificial Sequence
  Synthetic oligonucleotide; AAG chr2 60483874 60483893 60483877 -
agcaaccaagaaagaaaaag

SEQ ID NO: 181157 - DNA, 20 bp, Artificial Sequence
  Synthetic oligonucleotide; AGG chr2 60483873 60483892 60483876 -
gcaaccaagaaagaaaaaga

SEQ ID NO: 181158 - DNA, 20 bp, Artificial Sequence
  Synthetic oligonucleotide; AAG chr2 60483869 60483888 60483872 -
ccaagaaagaaaaagaagga

SEQ ID NO: 181159 - DNA, 20 bp, Artificial Sequence
  Synthetic oligonucleotide; AAG chr2 60483861 60483880 60483864 -
gaaaaagaaggaaagaaaaa

SEQ ID NO: 181160 - DNA, 20 bp, Artificial Sequence
  Synthetic oligonucleotide; AGG chr2 60483860 60483879 60483863 -
aaaaagaaggaaagaaaaaa

SEQ ID NO: 181161 - DNA, 20 bp, Artificial Sequence
  Synthetic oligonucleotide; GGG chr2 60483859 60483878 60483862 -
aaaagaaggaaagaaaaaaa

SEQ ID NO: 181162 - DNA, 20 bp, Artificial Sequence
  Synthetic oligonucleotide; GAG chr2 60483857 60483876 60483860 -
aagaaggaaagaaaaaaagg

SEQ ID NO: 181163 - DNA, 20 bp, Artificial Sequence
  Synthetic oligonucleotide; AAG chr2 60483852 60483871 60483855 -
ggaaagaaaaaaagggagaa

SEQ ID NO: 181164 - DNA, 20 bp, Artificial Sequence
  Synthetic oligonucleotide; AGG chr2 60483851 60483870 60483854 -
gaaagaaaaaaagggagaaa

SEQ ID NO: 181165 - DNA, 20 bp, Artificial Sequence
  Synthetic oligonucleotide; AAG chr2 60483848 60483867 60483851 -
agaaaaaaagggagaaaagg

SEQ ID NO: 181166 - DNA, 20 bp, Artificial Sequence
  Synthetic oligonucleotide; AAG chr2 60483844 60483863 60483847 -
aaaaagggagaaaaggaaga

SEQ ID NO: 181167 - DNA, 20 bp, Artificial Sequence
  Synthetic oligonucleotide; AAG chr2 60483840 60483859 60483843 -
agggagaaaaggaagaaaga

SEQ ID NO: 181168 - DNA, 20 bp, Artificial Sequence
  Synthetic oligonucleotide; CAG chr2 60483831 60483850 60483834 -
aggaagaaagaaagaacaac

SEQ ID NO: 181169 - DNA, 20 bp, Artificial Sequence
  Synthetic oligonucleotide; AAG chr2 60483828 60483847 60483831 -
aagaaagaaagaacaaccag

SEQ ID NO: 181170 - DNA, 20 bp, Artificial Sequence
  Synthetic oligonucleotide; TAG chr2 60483817 60483836 60483820 -
aacaaccagaagaacaaaaa

SEQ ID NO: 181171 - DNA, 20 bp, Artificial Sequence
  Synthetic oligonucleotide; AGG chr2 60483816 60483835 60483819 -
acaaccagaagaacaaaaat

SEQ ID NO: 181172 - DNA, 20 bp, Artificial Sequence
  Synthetic oligonucleotide; AAG chr2 60483812 60483831 60483815 -
ccagaagaacaaaaatagga

SEQ ID NO: 181173 - DNA, 20 bp, Artificial Sequence
  Synthetic oligonucleotide; AAG chr2 60483800 60483819 60483803 -
aaataggaaagaaaaataaa

SEQ ID NO: 181174 - DNA, 20 bp, Artificial Sequence
  Synthetic oligonucleotide; TAG chr2 60483785 60483804 60483788 -
ataaaaagaaatcctccttc

SEQ ID NO: 181175 - DNA, 20 bp, Artificial Sequence
  Synthetic oligonucleotide; TGG chr2 60483777 60483796 60483780 -
aaatcctccttctagtgctt

SEQ ID NO: 181176 - DNA, 20 bp, Artificial Sequence
  Synthetic oligonucleotide; GGG chr2 60483776 60483795 60483779 -
aatcctccttctagtgcttt

SEQ ID NO: 181177 - DNA, 20 bp, Artificial Sequence
  Synthetic oligonucleotide; GAG chr2 60483772 60483791 60483775 -
ctccttctagtgctttgggc

SEQ ID NO: 181178 - DNA, 20 bp, Artificial Sequence
  Synthetic oligonucleotide; TAG chr2 60483765 60483784 60483768 -
tagtgctttgggcgagtgct

SEQ ID NO: 181179 - DNA, 20 bp, Artificial Sequence
  Synthetic oligonucleotide; CAG chr2 60483759 60483778 60483762 -
tttgggcgagtgcttagacc

SEQ ID NO: 181180 - DNA, 20 bp, Artificial Sequence
  Synthetic oligonucleotide; AAG chr2 60483727 60483746 60483730 -
tcttcctttgttgtctgctg

SEQ ID NO: 181181 - DNA, 20 bp, Artificial Sequence
  Synthetic oligonucleotide; CAG chr2 60483720 60483739 60483723 -
ttgttgtctgctgaagcatc

SEQ ID NO: 181182 - DNA, 20 bp, Artificial Sequence
  Synthetic oligonucleotide; TAG chr2 60483702 60483721 60483705 -
tccagatacatcttctgttt

SEQ ID NO: 181183 - DNA, 20 bp, Artificial Sequence
  Synthetic oligonucleotide; CAG chr2 60483664 60483683 60483667 -
atccacgtctgctaatatgc

SEQ ID NO: 181184 - DNA, 20 bp, Artificial Sequence
  Synthetic oligonucleotide; TGG chr2 60483641 60483660 60483644 -
ctcattcatttgatgtttcc

SEQ ID NO: 181185 - DNA, 20 bp, Artificial Sequence
  Synthetic oligonucleotide; GGG chr2 60483640 60483659 60483643 -
tcattcatttgatgtttcct

SEQ ID NO: 181186 - DNA, 20 bp, Artificial Sequence
  Synthetic oligonucleotide; GGG chr2 60483639 60483658 60483642 -
cattcatttgatgtttcctg

SEQ ID NO: 181187 - DNA, 20 bp, Artificial Sequence
  Synthetic oligonucleotide; GAG chr2 60483634 60483653 60483637 -
atttgatgtttcctggggac

SEQ ID NO: 181188 - DNA, 20 bp, Artificial Sequence
  Synthetic oligonucleotide; GAG chr2 60483620 60483639 60483623 -
ggggacgagcatcctctctt

SEQ ID NO: 181189 - DNA, 20 bp, Artificial Sequence
  Synthetic oligonucleotide; CAG chr2 60483601 60483620 60483604 -
tgagttatttctgacaactg

SEQ ID NO: 181190 - DNA, 20 bp, Artificial Sequence
  Synthetic oligonucleotide; CAG chr2 60483591 60483610 60483594 -
ctgacaactgcagcattcca

SEQ ID NO: 181191 - DNA, 20 bp, Artificial Sequence
  Synthetic oligonucleotide; AGG chr2 60483590 60483609 60483593 -
tgacaactgcagcattccac

SEQ ID NO: 181192 - DNA, 20 bp, Artificial Sequence
  Synthetic oligonucleotide; GGG chr2 60483589 60483608 60483592 -
gacaactgcagcattccaca

SEQ ID NO: 181193 - DNA, 20 bp, Artificial Sequence
  Synthetic oligonucleotide; GAG chr2 60483583 60483602 60483586 -
tgcagcattccacagggtct

SEQ ID NO: 181194 - DNA, 20 bp, Artificial Sequence
  Synthetic oligonucleotide; CAG chr2 60483570 60483589 60483573 -
agggtctgagttgttgaaca

SEQ ID NO: 181195 - DNA, 20 bp, Artificial Sequence
  Synthetic oligonucleotide; TAG chr2 60483530 60483549 60483533 -
tacaatcaaaacacatgaca

SEQ ID NO: 181196 - DNA, 20 bp, Artificial Sequence
  Synthetic oligonucleotide; CAG chr2 60483526 60483545 60483529 -
atcaaaacacatgacataga

SEQ ID NO: 181197 - DNA, 20 bp, Artificial Sequence
  Synthetic oligonucleotide; CAG chr2 60483523 60483542 60483526 -
aaaacacatgacatagacag

SEQ ID NO: 181198 - DNA, 20 bp, Artificial Sequence
  Synthetic oligonucleotide; TGG chr2 60483514 60483533 60483517 -
gacatagacagcagttgatt

SEQ ID NO: 181199 - DNA, 20 bp, Artificial Sequence
  Synthetic oligonucleotide; GGG chr2 60483513 60483532 60483516 -
acatagacagcagttgattt

SEQ ID NO: 181200 - DNA, 20 bp, Artificial Sequence
  Synthetic oligonucleotide; TGG chr2 60483502 60483521 60483505 -
agttgatttgggttctgcct

SEQ ID NO: 181201 - DNA, 20 bp, Artificial Sequence
  Synthetic oligonucleotide; CAG chr2 60483498 60483517 60483501 -
gatttgggttctgccttgga

SEQ ID NO: 181202 - DNA, 20 bp, Artificial Sequence
  Synthetic oligonucleotide; GAG chr2 60483496 60483515 60483499 -
tttgggttctgccttggaca

SEQ ID NO: 181203 - DNA, 20 bp, Artificial Sequence
  Synthetic oligonucleotide; CAG chr2 60483490 60483509 60483493 -
ttctgccttggacagagaaa

SEQ ID NO: 181204 - DNA, 20 bp, Artificial Sequence
  Synthetic oligonucleotide; TGG chr2 60483485 60483504 60483488 -
ccttggacagagaaacagac

SEQ ID NO: 181205 - DNA, 20 bp, Artificial Sequence
  Synthetic oligonucleotide; GGG chr2 60483484 60483503 60483487 -
cttggacagagaaacagact

SEQ ID NO: 181206 - DNA, 20 bp, Artificial Sequence
  Synthetic oligonucleotide; GGG chr2 60483483 60483502 60483486 -
ttggacagagaaacagactg

SEQ ID NO: 181207 - DNA, 20 bp, Artificial Sequence
  Synthetic oligonucleotide; AAG chr2 60483477 60483496 60483480 -
agagaaacagactggggcta

SEQ ID NO: 181208 - DNA, 20 bp, Artificial Sequence
  Synthetic oligonucleotide; AGG chr2 60483476 60483495 60483479 -
gagaaacagactggggctaa

SEQ ID NO: 181209 - DNA, 20 bp, Artificial Sequence
  Synthetic oligonucleotide; GGG chr2 60483475 60483494 60483478 -
agaaacagactggggctaaa

SEQ ID NO: 181210 - DNA, 20 bp, Artificial Sequence
  Synthetic oligonucleotide; CAG chr2 60483468 60483487 60483471 -
gactggggctaaagggactg

SEQ ID NO: 181211 - DNA, 20 bp, Artificial Sequence
  Synthetic oligonucleotide; TGG chr2 60483458 60483477 60483461 -
aaagggactgcagctatacc

SEQ ID NO: 181212 - DNA, 20 bp, Artificial Sequence
  Synthetic oligonucleotide; GGG chr2 60483457 60483476 60483460 -
aagggactgcagctatacct

SEQ ID NO: 181213 - DNA, 20 bp, Artificial Sequence
  Synthetic oligonucleotide; GGG chr2 60483456 60483475 60483459 -
agggactgcagctatacctg

SEQ ID NO: 181214 - DNA, 20 bp, Artificial Sequence
  Synthetic oligonucleotide; GAG chr2 60483445 60483464 60483448 -
ctatacctggggacttgcct

SEQ ID NO: 181215 - DNA, 20 bp, Artificial Sequence
  Synthetic oligonucleotide; TGG chr2 60483436 60483455 60483439 -
gggacttgcctgagatcatc

SEQ ID NO: 181216 - DNA, 20 bp, Artificial Sequence
  Synthetic oligonucleotide; GGG chr2 60483435 60483454 60483438 -
ggacttgcctgagatcatct

SEQ ID NO: 181217 - DNA, 20 bp, Artificial Sequence
  Synthetic oligonucleotide; TGG chr2 60483425 60483444 60483428 -
gagatcatctgggacttgcc

SEQ ID NO: 181218 - DNA, 20 bp, Artificial Sequence
  Synthetic oligonucleotide; AAG chr2 60483418 60483437 60483421 -
tctgggacttgcctggtctc

SEQ ID NO: 181219 - DNA, 20 bp, Artificial Sequence
  Synthetic oligonucleotide; TGG chr2 60483404 60483423 60483407 -
ggtctcaagtcttctgacct

SEQ ID NO: 181220 - DNA, 20 bp, Artificial Sequence
  Synthetic oligonucleotide; CAG chr2 60483400 60483419 60483403 -
tcaagtcttctgaccttggc

SEQ ID NO: 181221 - DNA, 20 bp, Artificial Sequence
  Synthetic oligonucleotide; AGG chr2 60483399 60483418 60483402 -
caagtcttctgaccttggcc

SEQ ID NO: 181222 - DNA, 20 bp, Artificial Sequence
  Synthetic oligonucleotide; GGG chr2 60483398 60483417 60483401 -
aagtcttctgaccttggcca

SEQ ID NO: 181223 - DNA, 20 bp, Artificial Sequence
  Synthetic oligonucleotide; TGG chr2 60483385 60483404 60483388 -
ttggccagggatctttgcac

SEQ ID NO: 181224 - DNA, 20 bp, Artificial Sequence
  Synthetic oligonucleotide; GGG chr2 60483384 60483403 60483387 -
tggccagggatctttgcact

SEQ ID NO: 181225 - DNA, 20 bp, Artificial Sequence
  Synthetic oligonucleotide; CAG chr2 60483381 60483400 60483384 -
ccagggatctttgcactggg

SEQ ID NO: 181226 - DNA, 20 bp, Artificial Sequence
  Synthetic oligonucleotide; AGG chr2 60483380 60483399 60483383 -
cagggatctttgcactgggc

SEQ ID NO: 181227 - DNA, 20 bp, Artificial Sequence
  Synthetic oligonucleotide; GGG chr2 60483379 60483398 60483382 -
agggatctttgcactgggca

SEQ ID NO: 181228 - DNA, 20 bp, Artificial Sequence
  Synthetic oligonucleotide; GGG chr2 60483378 60483397 60483381 -
gggatctttgcactgggcag

SEQ ID NO: 181229 - DNA, 20 bp, Artificial Sequence
  Synthetic oligonucleotide; GAG chr2 60483370 60483389 60483373 -
tgcactgggcaggggaattt

SEQ ID NO: 181230 - DNA, 20 bp, Artificial Sequence
  Synthetic oligonucleotide; GAG chr2 60483358 60483377 60483361 -
gggaatttgagtcccaattt

SEQ ID NO: 181231 - DNA, 20 bp, Artificial Sequence
  Synthetic oligonucleotide; AGG chr2 60483357 60483376 60483360 -
ggaatttgagtcccaatttg

SEQ ID NO: 181232 - DNA, 20 bp, Artificial Sequence
  Synthetic oligonucleotide; AAG chr2 60483332 60483351 60483335 -
tcgatttaaaccacttttca

SEQ ID NO: 181233 - DNA, 20 bp, Artificial Sequence
  Synthetic oligonucleotide; AGG chr2 60483331 60483350 60483334 -
cgatttaaaccacttttcaa

SEQ ID NO: 181234 - DNA, 20 bp, Artificial Sequence
  Synthetic oligonucleotide; TGG chr2 60483322 60483341 60483325 -
ccacttttcaaaggcctgaa

SEQ ID NO: 181235 - DNA, 20 bp, Artificial Sequence
  Synthetic oligonucleotide; GAG chr2 60483320 60483339 60483323 -
acttttcaaaggcctgaatg

SEQ ID NO: 181236 - DNA, 20 bp, Artificial Sequence
  Synthetic oligonucleotide; TGG chr2 60483291 60483310 60483294 -
atttgtgtgtcttcttttcc

SEQ ID NO: 181237 - DNA, 20 bp, Artificial Sequence
  Synthetic oligonucleotide; AAG chr2 60483275 60483294 60483278 -
ttcctggtcttccccttgtc

SEQ ID NO: 181238 - DNA, 20 bp, Artificial Sequence
  Synthetic oligonucleotide; CGG chr2 60483257 60483276 60483260 -
tcaagaccatttctctacca

SEQ ID NO: 181239 - DNA, 20 bp, Artificial Sequence
  Synthetic oligonucleotide; GGG chr2 60483256 60483275 60483259 -
caagaccatttctctaccac

SEQ ID NO: 181240 - DNA, 20 bp, Artificial Sequence
  Synthetic oligonucleotide; TAG chr2 60483245 60483264 60483248 -
ctctaccacgggatatatat

SEQ ID NO: 181241 - DNA, 20 bp, Artificial Sequence
  Synthetic oligonucleotide; GAG chr2 60483243 60483262 60483246 -
ctaccacgggatatatatta

SEQ ID NO: 181242 - DNA, 20 bp, Artificial Sequence
  Synthetic oligonucleotide; AGG chr2 60483242 60483261 60483245 -
taccacgggatatatattag

SEQ ID NO: 181243 - DNA, 20 bp, Artificial Sequence
  Synthetic oligonucleotide; GGG chr2 60483241 60483260 60483244 -
accacgggatatatattaga

SEQ ID NO: 181244 - DNA, 20 bp, Artificial Sequence
  Synthetic oligonucleotide; GGG chr2 60483240 60483259 60483243 -
ccacgggatatatattagag

SEQ ID NO: 181245 - DNA, 20 bp, Artificial Sequence
  Synthetic oligonucleotide; CGG chr2 60483233 60483252 60483236 -
atatatattagaggggaaaa

SEQ ID NO: 181246 - DNA, 20 bp, Artificial Sequence
  Synthetic oligonucleotide; TGG chr2 60483213 60483232 60483216 -
cggctgtaaaccctgattgt

SEQ ID NO: 181247 - DNA, 20 bp, Artificial Sequence
  Synthetic oligonucleotide; TAG chr2 60483209 60483228 60483212 -
tgtaaaccctgattgttggc

SEQ ID NO: 181248 - DNA, 20 bp, Artificial Sequence
  Synthetic oligonucleotide; CAG chr2 60483199 60483218 60483202 -
gattgttggctagcattgtt

SEQ ID NO: 181249 - DNA, 20 bp, Artificial Sequence
  Synthetic oligonucleotide; AGG chr2 60483198 60483217 60483201 -
attgttggctagcattgttc

SEQ ID NO: 181250 - DNA, 20 bp, Artificial Sequence
  Synthetic oligonucleotide; AAG chr2 60483195 60483214 60483198 -
gttggctagcattgttcagg

SEQ ID NO: 181251 - DNA, 20 bp, Artificial Sequence
  Synthetic oligonucleotide; TAG chr2 60483190 60483209 60483193 -
ctagcattgttcaggaagtg

SEQ ID NO: 181252 - DNA, 20 bp, Artificial Sequence
  Synthetic oligonucleotide; AAG chr2 60483183 60483202 60483186 -
tgttcaggaagtgtagcatt

SEQ ID NO: 181253 - DNA, 20 bp, Artificial Sequence
  Synthetic oligonucleotide; AGG chr2 60483182 60483201 60483185 -
gttcaggaagtgtagcatta

SEQ ID NO: 181254 - DNA, 20 bp, Artificial Sequence
  Synthetic oligonucleotide; GAG chr2 60483180 60483199 60483183 -
tcaggaagtgtagcattaag

SEQ ID NO: 181255 - DNA, 20 bp, Artificial Sequence
  Synthetic oligonucleotide; CAG chr2 60483124 60483143 60483127 -
aactacccacactatccttg

SEQ ID NO: 181256 - DNA, 20 bp, Artificial Sequence
  Synthetic oligonucleotide; TGG chr2 60483114 60483133 60483117 -
actatccttgcagttattca

SEQ ID NO: 181257 - DNA, 20 bp, Artificial Sequence
  Synthetic oligonucleotide; GGG chr2 60483113 60483132 60483116 -
ctatccttgcagttattcat

SEQ ID NO: 181258 - DNA, 20 bp, Artificial Sequence
  Synthetic oligonucleotide; AAG chr2 60483065 60483084 60483068 -
ttcttctcaaacatctcgca

SEQ ID NO: 181259 - DNA, 20 bp, Artificial Sequence
  Synthetic oligonucleotide; TGG chr2 60483056 60483075 60483059 -
aacatctcgcaaagtaatca

SEQ ID NO: 181260 - DNA, 20 bp, Artificial Sequence
  Synthetic oligonucleotide; GGG chr2 60483055 60483074 60483058 -
acatctcgcaaagtaatcat

SEQ ID NO: 181261 - DNA, 20 bp, Artificial Sequence
  Synthetic oligonucleotide; AAG chr2 60483049 60483068 60483052 -
cgcaaagtaatcatgggctg

SEQ ID NO: 181262 - DNA, 20 bp, Artificial Sequence
  Synthetic oligonucleotide; CAG chr2 60483044 60483063 60483047 -
agtaatcatgggctgaagtg

SEQ ID NO: 181263 - DNA, 20 bp, Artificial Sequence
  Synthetic oligonucleotide; AGG chr2 60483043 60483062 60483046 -
gtaatcatgggctgaagtgc

SEQ ID NO: 181264 - DNA, 20 bp, Artificial Sequence
  Synthetic oligonucleotide; CAG chr2 60483032 60483051 60483035 -
ctgaagtgcaggttttcttg

SEQ ID NO: 181265 - DNA, 20 bp, Artificial Sequence
  Synthetic oligonucleotide; CAG chr2 60483020 60483039 60483023 -
ttttcttgcagtgcctttat

SEQ ID NO: 181266 - DNA, 20 bp, Artificial Sequence
  Synthetic oligonucleotide; CAG chr2 60483012 60483031 60483015 -
cagtgcctttatcagtaaat

SEQ ID NO: 181267 - DNA, 20 bp, Artificial Sequence
  Synthetic oligonucleotide; GAG chr2 60483004 60483023 60483007 -
ttatcagtaaatcagatttt

SEQ ID NO: 181268 - DNA, 20 bp, Artificial Sequence
  Synthetic oligonucleotide; CAG chr2 60482994 60483013 60482997 -
atcagattttgagcatttat

SEQ ID NO: 181269 - DNA, 20 bp, Artificial Sequence
  Synthetic oligonucleotide; AAG chr2 60482988 60483007 60482991 -
ttttgagcatttatcagcaa

SEQ ID NO: 181270 - DNA, 20 bp, Artificial Sequence
  Synthetic oligonucleotide; TAG chr2 60482984 60483003 60482987 -
gagcatttatcagcaaaagt

SEQ ID NO: 181271 - DNA, 20 bp, Artificial Sequence
  Synthetic oligonucleotide; AAG chr2 60482950 60482969 60482953 -
atcatttctgtaatgtttga

SEQ ID NO: 181272 - DNA, 20 bp, Artificial Sequence
  Synthetic oligonucleotide; AAG chr2 60482946 60482965 60482949 -
tttctgtaatgtttgaaaga

SEQ ID NO: 181273 - DNA, 20 bp, Artificial Sequence
  Synthetic oligonucleotide; CAG chr2 60482935 60482954 60482938 -
tttgaaagaaagatttgttt

SEQ ID NO: 181274 - DNA, 20 bp, Artificial Sequence
  Synthetic oligonucleotide; TGG chr2 60482932 60482951 60482935 -
gaaagaaagatttgtttcag

SEQ ID NO: 181275 - DNA, 20 bp, Artificial Sequence
  Synthetic oligonucleotide; GGG chr2 60482931 60482950 60482934 -
aaagaaagatttgtttcagt

SEQ ID NO: 181276 - DNA, 20 bp, Artificial Sequence
  Synthetic oligonucleotide; GGG chr2 60482930 60482949 60482933 -
aagaaagatttgtttcagtg

SEQ ID NO: 181277 - DNA, 20 bp, Artificial Sequence
  Synthetic oligonucleotide; CAG chr2 60482905 60482924 60482908 -
tctgccaatcaatgatcttc

SEQ ID NO: 181278 - DNA, 20 bp, Artificial Sequence
  Synthetic oligonucleotide; TAG chr2 60482864 60482883 60482867 -
tattgctgcaattatttgtc

SEQ ID NO: 181279 - DNA, 20 bp, Artificial Sequence
  Synthetic oligonucleotide; TGG chr2 60482860 60482879 60482863 -
gctgcaattatttgtctagt

SEQ ID NO: 181280 - DNA, 20 bp, Artificial Sequence
  Synthetic oligonucleotide; CAG chr2 60482841 60482860 60482844 -
ttggatatttaaaatgtcat

SEQ ID NO: 181281 - DNA, 20 bp, Artificial Sequence
  Synthetic oligonucleotide; AAG chr2 60482837 60482856 60482840 -
atatttaaaatgtcatcaga

SEQ ID NO: 181282 - DNA, 20 bp, Artificial Sequence
  Synthetic oligonucleotide; GAG chr2 60482835 60482854 60482838 -
atttaaaatgtcatcagaaa

SEQ ID NO: 181283 - DNA, 20 bp, Artificial Sequence
  Synthetic oligonucleotide; TAG chr2 60482818 60482837 60482821 -
aaagagatgattacacattc

SEQ ID NO: 181284 - DNA, 20 bp, Artificial Sequence
  Synthetic oligonucleotide; AAG chr2 60482814 60482833 60482817 -
agatgattacacattctaga

SEQ ID NO: 181285 - DNA, 20 bp, Artificial Sequence
  Synthetic oligonucleotide; AAG chr2 60482810 60482829 60482813 -
gattacacattctagaaagc

SEQ ID NO: 181286 - DNA, 20 bp, Artificial Sequence
  Synthetic oligonucleotide; AGG chr2 60482809 60482828 60482812 -
attacacattctagaaagca

SEQ ID NO: 181287 - DNA, 20 bp, Artificial Sequence
  Synthetic oligonucleotide; CAG chr2 60482780 60482799 60482783 -
ataatcacatgaactgaatc

SEQ ID NO: 181288 - DNA, 20 bp, Artificial Sequence
  Synthetic oligonucleotide; TAG chr2 60482770 60482789 60482773 -
gaactgaatccagttaaatg

SEQ ID NO: 181289 - DNA, 20 bp, Artificial Sequence
  Synthetic oligonucleotide; TGG chr2 60482765 60482784 60482768 -
gaatccagttaaatgtagtg

SEQ ID NO: 181290 - DNA, 20 bp, Artificial Sequence
  Synthetic oligonucleotide; TAG chr2 60482742 60482761 60482745 -
tactaacctgtccttcaaaa

SEQ ID NO: 181291 - DNA, 20 bp, Artificial Sequence
  Synthetic oligonucleotide; GAG chr2 60482732 60482751 60482735 -
tccttcaaaatagaattttt

SEQ ID NO: 181292 - DNA, 20 bp, Artificial Sequence
  Synthetic oligonucleotide; AAG chr2 60482720 60482739 60482723 -
gaatttttgagctaccactg

SEQ ID NO: 181293 - DNA, 20 bp, Artificial Sequence
  Synthetic oligonucleotide; CAG chr2 60482717 60482736 60482720 -
tttttgagctaccactgaag

SEQ ID NO: 181294 - DNA, 20 bp, Artificial Sequence
  Synthetic oligonucleotide; CAG chr2 60482714 60482733 60482717 -
ttgagctaccactgaagcag

SEQ ID NO: 181295 - DNA, 20 bp, Artificial Sequence
  Synthetic oligonucleotide; CAG chr2 60482695 60482714 60482698 -
gcagtcttctgccctgtttt

SEQ ID NO: 181296 - DNA, 20 bp, Artificial Sequence
  Synthetic oligonucleotide; AGG chr2 60482694 60482713 60482697 -
cagtcttctgccctgttttc

SEQ ID NO: 181297 - DNA, 20 bp, Artificial Sequence
  Synthetic oligonucleotide; AAG chr2 60482691 60482710 60482694 -
tcttctgccctgttttcagg

SEQ ID NO: 181298 - DNA, 20 bp, Artificial Sequence
  Synthetic oligonucleotide; TGG chr2 60482675 60482694 60482678 -
caggaagctgatcttaacct

SEQ ID NO: 181299 - DNA, 20 bp, Artificial Sequence
  Synthetic oligonucleotide; GGG chr2 60482674 60482693 60482677 -
aggaagctgatcttaacctt

SEQ ID NO: 181300 - DNA, 20 bp, Artificial Sequence
  Synthetic oligonucleotide; CAG chr2 60482668 60482687 60482671 -
ctgatcttaaccttgggatg

SEQ ID NO: 181301 - DNA, 20 bp, Artificial Sequence
  Synthetic oligonucleotide; CAG chr2 60482657 60482676 60482660 -
cttgggatgcagtgtgcttt

SEQ ID NO: 181302 - DNA, 20 bp, Artificial Sequence
  Synthetic oligonucleotide; AGG chr2 60482656 60482675 60482659 -
ttgggatgcagtgtgctttc

SEQ ID NO: 181303 - DNA, 20 bp, Artificial Sequence
  Synthetic oligonucleotide; GGG chr2 60482655 60482674 60482658 -
tgggatgcagtgtgctttca

SEQ ID NO: 181304 - DNA, 20 bp, Artificial Sequence
  Synthetic oligonucleotide; TGG chr2 60482651 60482670 60482654 -
atgcagtgtgctttcagggt

SEQ ID NO: 181305 - DNA, 20 bp, Artificial Sequence
  Synthetic oligonucleotide; GGG chr2 60482650 60482669 60482653 -
tgcagtgtgctttcagggtt

SEQ ID NO: 181306 - DNA, 20 bp, Artificial Sequence
  Synthetic oligonucleotide; TGG chr2 60482634 60482653 60482637 -
ggttgggtgatacttaatta

SEQ ID NO: 181307 - DNA, 20 bp, Artificial Sequence
  Synthetic oligonucleotide; GAG chr2 60482632 60482651 60482635 -
ttgggtgatacttaattatg

SEQ ID NO: 181308 - DNA, 20 bp, Artificial Sequence
  Synthetic oligonucleotide; AAG chr2 60482621 60482640 60482624 -
ttaattatggagaactttcc

SEQ ID NO: 181309 - DNA, 20 bp, Artificial Sequence
  Synthetic oligonucleotide; TGG chr2 60482610 60482629 60482613 -
gaactttccaagtctgaaaa

SEQ ID NO: 181310 - DNA, 20 bp, Artificial Sequence
  Synthetic oligonucleotide; GAG chr2 60482587 60482606 60482590 -
aattgctccttcacatacgc

SEQ ID NO: 181311 - DNA, 20 bp, Artificial Sequence
  Synthetic oligonucleotide; AAG chr2 60482584 60482603 60482587 -
tgctccttcacatacgcgag

SEQ ID NO: 181312 - DNA, 20 bp, Artificial Sequence
  Synthetic oligonucleotide; TGG chr2 60482574 60482593 60482577 -
catacgcgagaagtgcattt

SEQ ID NO: 181313 - DNA, 20 bp, Artificial Sequence
  Synthetic oligonucleotide; AAG chr2 60482542 60482561 60482545 -
tcatctgcaaatctataaat

SEQ ID NO: 181314 - DNA, 20 bp, Artificial Sequence
  Synthetic oligonucleotide; CAG chr2 60482539 60482558 60482542 -
tctgcaaatctataaataag

SEQ ID NO: 181315 - DNA, 20 bp, Artificial Sequence
  Synthetic oligonucleotide; TGG chr2 60482512 60482531 60482515 -
tctattcttcttgcttcctg

SEQ ID NO: 181316 - DNA, 20 bp, Artificial Sequence
  Synthetic oligonucleotide; TGG chr2 60482485 60482504 60482488 -
aaatgccaaatcctgatttg

SEQ ID NO: 181317 - DNA, 20 bp, Artificial Sequence
  Synthetic oligonucleotide; AAG chr2 60482480 60482499 60482483 -
ccaaatcctgatttgtggca

SEQ ID NO: 181318 - DNA, 20 bp, Artificial Sequence
  Synthetic oligonucleotide; TGG chr2 60482445 60482464 60482448 -
cctttcccactctgtatgcc

SEQ ID NO: 181319 - DNA, 20 bp, Artificial Sequence
  Synthetic oligonucleotide; CAG chr2 60482438 60482457 60482441 -
cactctgtatgcctggtgcc

SEQ ID NO: 181320 - DNA, 20 bp, Artificial Sequence
  Synthetic oligonucleotide; AGG chr2 60482437 60482456 60482440 -
actctgtatgcctggtgccc

SEQ ID NO: 181321 - DNA, 20 bp, Artificial Sequence
  Synthetic oligonucleotide; AAG chr2 60482430 60482449 60482433 -
atgcctggtgcccaggaact

SEQ ID NO: 181322 - DNA, 20 bp, Artificial Sequence
  Synthetic oligonucleotide; CAG chr2 60482427 60482446 60482430 -
cctggtgcccaggaactaag

SEQ ID NO: 181323 - DNA, 20 bp, Artificial Sequence
  Synthetic oligonucleotide; TGG chr2 60482424 60482443 60482427 -
ggtgcccaggaactaagcag

SEQ ID NO: 181324 - DNA, 20 bp, Artificial Sequence
  Synthetic oligonucleotide; CAG chr2 60482421 60482440 60482424 -
gcccaggaactaagcagtgg

SEQ ID NO: 181325 - DNA, 20 bp, Artificial Sequence
  Synthetic oligonucleotide; TGG chr2 60482418 60482437 60482421 -
caggaactaagcagtggcag

SEQ ID NO: 181326 - DNA, 20 bp, Artificial Sequence
  Synthetic oligonucleotide; TGG chr2 60482401 60482420 60482404 -
cagtggaaattacaactgtt

SEQ ID NO: 181327 - DNA, 20 bp, Artificial Sequence
  Synthetic oligonucleotide; AAG chr2 60482398 60482417 60482401 -
tggaaattacaactgtttgg

SEQ ID NO: 181328 - DNA, 20 bp, Artificial Sequence
  Synthetic oligonucleotide; AAG chr2 60482393 60482412 60482396 -
attacaactgtttggaagcc

SEQ ID NO: 181329 - DNA, 20 bp, Artificial Sequence
  Synthetic oligonucleotide; AAG chr2 60482386 60482405 60482389 -
ctgtttggaagccaagaaaa

SEQ ID NO: 181330 - DNA, 20 bp, Artificial Sequence
  Synthetic oligonucleotide; CAG chr2 60482363 60482382 60482366 -
ctccatttctcacttttctc

SEQ ID NO: 181331 - DNA, 20 bp, Artificial Sequence
  Synthetic oligonucleotide; CGG chr2 60482357 60482376 60482360 -
ttctcacttttctccagttc

SEQ ID NO: 181332 - DNA, 20 bp, Artificial Sequence
  Synthetic oligonucleotide; CGG chr2 60482347 60482366 60482350 -
tctccagttccggatattct

SEQ ID NO: 181333 - DNA, 20 bp, Artificial Sequence
  Synthetic oligonucleotide; CAG chr2 60482329 60482348 60482332 -
ctcggctctgctccatgtat

SEQ ID NO: 181334 - DNA, 20 bp, Artificial Sequence
  Synthetic oligonucleotide; CAG chr2 60482271 60482290 60482274 -
ccttctgtccgctccgtgaa

SEQ ID NO: 181335 - DNA, 20 bp, Artificial Sequence
  Synthetic oligonucleotide; AGG chr2 60482270 60482289 60482273 -
cttctgtccgctccgtgaac

SEQ ID NO: 181336 - DNA, 20 bp, Artificial Sequence
  Synthetic oligonucleotide; CAG chr2 60482264 60482283 60482267 -
tccgctccgtgaacaggaaa

SEQ ID NO: 181337 - DNA, 20 bp, Artificial Sequence
  Synthetic oligonucleotide; CAG chr2 60482256 60482275 60482259 -
gtgaacaggaaacagaaata

SEQ ID NO: 181338 - DNA, 20 bp, Artificial Sequence
  Synthetic oligonucleotide; TGG chr2 60482234 60482253 60482237 -
gctccaatttttttttttaa

SEQ ID NO: 181339 - DNA, 20 bp, Artificial Sequence
  Synthetic oligonucleotide; GAG chr2 60482232 60482251 60482235 -
tccaatttttttttttaatg

SEQ ID NO: 181340 - DNA, 20 bp, Artificial Sequence
  Synthetic oligonucleotide; AGG chr2 60482231 60482250 60482234 -
ccaatttttttttttaatgg

SEQ ID NO: 181341 - DNA, 20 bp, Artificial Sequence
  Synthetic oligonucleotide; AAG chr2 60482228 60482247 60482231 -
atttttttttttaatggagg

SEQ ID NO: 181342 - DNA, 20 bp, Artificial Sequence
  Synthetic oligonucleotide; GAG chr2 60482226 60482245 60482229 -
ttttttttttaatggaggaa

SEQ ID NO: 181343 - DNA, 20 bp, Artificial Sequence
  Synthetic oligonucleotide; AAG chr2 60482167 60482186 60482170 -
tccaaccaaactaaactctc

SEQ ID NO: 181344 - DNA, 20 bp, Artificial Sequence
  Synthetic oligonucleotide; TAG chr2 60482163 60482182 60482166 -
accaaactaaactctcaaga

SEQ ID NO: 181345 - DNA, 20 bp, Artificial Sequence
  Synthetic oligonucleotide; GAG chr2 60482154 60482173 60482157 -
aactctcaagatagaatcat

SEQ ID NO: 181346 - DNA, 20 bp, Artificial Sequence
  Synthetic oligonucleotide; GAG chr2 60482152 60482171 60482155 -
ctctcaagatagaatcatga

SEQ ID NO: 181347 - DNA, 20 bp, Artificial Sequence
  Synthetic oligonucleotide; AAG chr2 60482126 60482145 60482129 -
caaaatgtccaaaatgtcct

SEQ ID NO: 181348 - DNA, 20 bp, Artificial Sequence
  Synthetic oligonucleotide; TGG chr2 60482123 60482142 60482126 -
aatgtccaaaatgtcctaag

SEQ ID NO: 181349 - DNA, 20 bp, Artificial Sequence
  Synthetic oligonucleotide; CAG chr2 60482099 60482118 60482102 -
tcaaaccacccgccccttaa

SEQ ID NO: 181350 - DNA, 20 bp, Artificial Sequence
  Synthetic oligonucleotide; AGG chr2 60482098 60482117 60482101 -
caaaccacccgccccttaac

SEQ ID NO: 181351 - DNA, 20 bp, Artificial Sequence
  Synthetic oligonucleotide; TGG chr2 60482081 60482100 60482084 -
aacaggtctgcctctcttcc

SEQ ID NO: 181352 - DNA, 20 bp, Artificial Sequence
  Synthetic oligonucleotide; GGG chr2 60482080 60482099 60482083 -
acaggtctgcctctcttcct

SEQ ID NO: 181353 - DNA, 20 bp, Artificial Sequence
  Synthetic oligonucleotide; GAG chr2 60482078 60482097 60482081 -
aggtctgcctctcttcctgg

SEQ ID NO: 181354 - DNA, 20 bp, Artificial Sequence
  Synthetic oligonucleotide; CAG chr2 60482074 60482093 60482077 -
ctgcctctcttcctgggagt

SEQ ID NO: 181355 - DNA, 20 bp, Artificial Sequence
  Synthetic oligonucleotide; AAG chr2 60482071 60482090 60482074 -
cctctcttcctgggagtcag

SEQ ID NO: 181356 - DNA, 20 bp, Artificial Sequence
  Synthetic oligonucleotide; TGG chr2 60482054 60482073 60482057 -
cagaagtgaccttgatgaac

SEQ ID NO: 181357 - DNA, 20 bp, Artificial Sequence
  Synthetic oligonucleotide; TAG chr2 60482047 60482066 60482050 -
gaccttgatgaactggatgt

SEQ ID NO: 181358 - DNA, 20 bp, Artificial Sequence
  Synthetic oligonucleotide; AGG chr2 60482046 60482065 60482049 -
accttgatgaactggatgtt

SEQ ID NO: 181359 - DNA, 20 bp, Artificial Sequence
  Synthetic oligonucleotide; AAG chr2 60482027 60482046 60482030 -
taggtccaaaaatgacaaac

SEQ ID NO: 181360 - DNA, 20 bp, Artificial Sequence
  Synthetic oligonucleotide; TGG chr2 60482016 60482035 60482019 -
atgacaaacaagccctccac

SEQ ID NO: 181361 - DNA, 20 bp, Artificial Sequence
  Synthetic oligonucleotide; GGG chr2 60482015 60482034 60482018 -
tgacaaacaagccctccact

SEQ ID NO: 181362 - DNA, 20 bp, Artificial Sequence
  Synthetic oligonucleotide; CAG chr2 60482006 60482025 60482009 -
agccctccactgggaaacat

SEQ ID NO: 181363 - DNA, 20 bp, Artificial Sequence
  Synthetic oligonucleotide; CAG chr2 60481984 60482003 60481987 -
gtccaacccctttcttttga

SEQ ID NO: 181364 - DNA, 20 bp, Artificial Sequence
  Synthetic oligonucleotide; CAG chr2 60481981 60482000 60481984 -
caacccctttcttttgacag

SEQ ID NO: 181365 - DNA, 20 bp, Artificial Sequence
  Synthetic oligonucleotide; AGG chr2 60481980 60481999 60481983 -
aacccctttcttttgacagc

SEQ ID NO: 181366 - DNA, 20 bp, Artificial Sequence
  Synthetic oligonucleotide; TAG chr2 60481975 60481994 60481978 -
ctttcttttgacagcaggac

SEQ ID NO: 181367 - DNA, 20 bp, Artificial Sequence
  Synthetic oligonucleotide; CAG chr2 60481970 60481989 60481973 -
ttttgacagcaggactagaa

SEQ ID NO: 181368 - DNA, 20 bp, Artificial Sequence
  Synthetic oligonucleotide; CAG chr2 60481965 60481984 60481968 -
acagcaggactagaacagac

SEQ ID NO: 181369 - DNA, 20 bp, Artificial Sequence
  Synthetic oligonucleotide; GAG chr2 60481963 60481982 60481966 -
agcaggactagaacagacca

SEQ ID NO: 181370 - DNA, 20 bp, Artificial Sequence
  Synthetic oligonucleotide; AGG chr2 60481962 60481981 60481965 -
gcaggactagaacagaccag

SEQ ID NO: 181371 - DNA, 20 bp, Artificial Sequence
  Synthetic oligonucleotide; CGG chr2 60481956 60481975 60481959 -
ctagaacagaccagaggttc

SEQ ID NO: 181372 - DNA, 20 bp, Artificial Sequence
  Synthetic oligonucleotide; GAG chr2 60481954 60481973 60481957 -
agaacagaccagaggttccg

SEQ ID NO: 181373 - DNA, 20 bp, Artificial Sequence
  Synthetic oligonucleotide; AAG chr2 60481951 60481970 60481954 -
acagaccagaggttccggag

SEQ ID NO: 181374 - DNA, 20 bp, Artificial Sequence
  Synthetic oligonucleotide; AGG chr2 60481950 60481969 60481953 -
cagaccagaggttccggaga

SEQ ID NO: 181375 - DNA, 20 bp, Artificial Sequence
  Synthetic oligonucleotide; TAG chr2 60481937 60481956 60481940 -
ccggagaaggtctctatacc

SEQ ID NO: 181376 - DNA, 20 bp, Artificial Sequence
  Synthetic oligonucleotide; AGG chr2 60481936 60481955 60481939 -
cggagaaggtctctatacct

SEQ ID NO: 181377 - DNA, 20 bp, Artificial Sequence
  Synthetic oligonucleotide; TGG chr2 60481933 60481952 60481936 -
agaaggtctctatacctagg

SEQ ID NO: 181378 - DNA, 20 bp, Artificial Sequence
  Synthetic oligonucleotide; GGG chr2 60481932 60481951 60481935 -
gaaggtctctatacctaggt

SEQ ID NO: 181379 - DNA, 20 bp, Artificial Sequence
  Synthetic oligonucleotide; GAG chr2 60481923 60481942 60481926 -
tatacctaggtgggtttcct

SEQ ID NO: 181380 - DNA, 20 bp, Artificial Sequence
  Synthetic oligonucleotide; TGG chr2 60481919 60481938 60481922 -
cctaggtgggtttcctgagc

SEQ ID NO: 181381 - DNA, 20 bp, Artificial Sequence
  Synthetic oligonucleotide; GAG chr2 60481917 60481936 60481920 -
taggtgggtttcctgagctg

SEQ ID NO: 181382 - DNA, 20 bp, Artificial Sequence
  Synthetic oligonucleotide; TGG chr2 60481905 60481924 60481908 -
ctgagctggagaattttcca

SEQ ID NO: 181383 - DNA, 20 bp, Artificial Sequence
  Synthetic oligonucleotide; GGG chr2 60481904 60481923 60481907 -
tgagctggagaattttccat

SEQ ID NO: 181384 - DNA, 20 bp, Artificial Sequence
  Synthetic oligonucleotide; GGG chr2 60481903 60481922 60481906 -
gagctggagaattttccatg

SEQ ID NO: 181385 - DNA, 20 bp, Artificial Sequence
  Synthetic oligonucleotide; GAG chr2 60481887 60481906 60481890 -
catggggctgtctgtgtgtt

SEQ ID NO: 181386 - DNA, 20 bp, Artificial Sequence
  Synthetic oligonucleotide; AGG chr2 60481886 60481905 60481889 -
atggggctgtctgtgtgttg

SEQ ID NO: 181387 - DNA, 20 bp, Artificial Sequence
  Synthetic oligonucleotide; CAG chr2 60481851 60481870 60481854 -
cactttcccaattcacttcc

SEQ ID NO: 181388 - DNA, 20 bp, Artificial Sequence
  Synthetic oligonucleotide; GAG chr2 60481849 60481868 60481852 -
ctttcccaattcacttccca

SEQ ID NO: 181389 - DNA, 20 bp, Artificial Sequence
  Synthetic oligonucleotide; GAG chr2 60481847 60481866 60481850 -
ttcccaattcacttcccaga

SEQ ID NO: 181390 - DNA, 20 bp, Artificial Sequence
  Synthetic oligonucleotide; GAG chr2 60481838 60481857 60481841 -
cacttcccagagagcatgct

SEQ ID NO: 181391 - DNA, 20 bp, Artificial Sequence
  Synthetic oligonucleotide; CAG chr2 60481828 60481847 60481831 -
agagcatgctgagctcattc

SEQ ID NO: 181392 - DNA, 20 bp, Artificial Sequence
  Synthetic oligonucleotide; AGG chr2 60481827 60481846 60481830 -
gagcatgctgagctcattcc

SEQ ID NO: 181393 - DNA, 20 bp, Artificial Sequence
  Synthetic oligonucleotide; TGG chr2 60481815 60481834 60481818 -
ctcattccaggacactgtga

SEQ ID NO: 181394 - DNA, 20 bp, Artificial Sequence
  Synthetic oligonucleotide; AAG chr2 60481808 60481827 60481811 -
caggacactgtgatggtcaa

SEQ ID NO: 181395 - DNA, 20 bp, Artificial Sequence
  Synthetic oligonucleotide; AGG chr2 60481807 60481826 60481810 -
aggacactgtgatggtcaaa

SEQ ID NO: 181396 - DNA, 20 bp, Artificial Sequence
  Synthetic oligonucleotide; CAG chr2 60481788 60481807 60481791 -
aaggctctcccaccatcaca

SEQ ID NO: 181397 - DNA, 20 bp, Artificial Sequence
  Synthetic oligonucleotide; TAG chr2 60481778 60481797 60481781 -
caccatcacacagaatgtac

SEQ ID NO: 181398 - DNA, 20 bp, Artificial Sequence
  Synthetic oligonucleotide; AGG chr2 60481777 60481796 60481780 -
accatcacacagaatgtact

SEQ ID NO: 181399 - DNA, 20 bp, Artificial Sequence
  Synthetic oligonucleotide; GGG chr2 60481776 60481795 60481779 -
ccatcacacagaatgtacta

SEQ ID NO: 181400 - DNA, 20 bp, Artificial Sequence
  Synthetic oligonucleotide; TAG chr2 60481767 60481786 60481770 -
agaatgtactagggttctgt

SEQ ID NO: 181401 - DNA, 20 bp, Artificial Sequence
  Synthetic oligonucleotide; TGG chr2 60481747 60481766 60481750 -
tagaaaattaatctcacttg

SEQ ID NO: 181402 - DNA, 20 bp, Artificial Sequence
  Synthetic oligonucleotide; TGG chr2 60481722 60481741 60481725 -
aaaaaatgcccttaaaacac

SEQ ID NO: 181403 - DNA, 20 bp, Artificial Sequence
  Synthetic oligonucleotide; GAG chr2 60481720 60481739 60481723 -
aaaatgcccttaaaacactg

SEQ ID NO: 181404 - DNA, 20 bp, Artificial Sequence
  Synthetic oligonucleotide; GAG chr2 60481713 60481732 60481716 -
ccttaaaacactggagccct

SEQ ID NO: 181405 - DNA, 20 bp, Artificial Sequence
  Synthetic oligonucleotide; TGG chr2 60481700 60481719 60481703 -
gagccctgagttgtatgtgc

SEQ ID NO: 181406 - DNA, 20 bp, Artificial Sequence
  Synthetic oligonucleotide; GAG chr2 60481698 60481717 60481701 -
gccctgagttgtatgtgctg

SEQ ID NO: 181407 - DNA, 20 bp, Artificial Sequence
  Synthetic oligonucleotide; TGG chr2 60481691 60481710 60481694 -
gttgtatgtgctggagcatg

SEQ ID NO: 181408 - DNA, 20 bp, Artificial Sequence
  Synthetic oligonucleotide; GGG chr2 60481690 60481709 60481693 -
ttgtatgtgctggagcatgt

SEQ ID NO: 181409 - DNA, 20 bp, Artificial Sequence
  Synthetic oligonucleotide; GGG chr2 60481689 60481708 60481692 -
tgtatgtgctggagcatgtg

SEQ ID NO: 181410 - DNA, 20 bp, Artificial Sequence
  Synthetic oligonucleotide; AAG chr2 60481684 60481703 60481687 -
gtgctggagcatgtggggaa

SEQ ID NO: 181411 - DNA, 20 bp, Artificial Sequence
  Synthetic oligonucleotide; AAG chr2 60481680 60481699 60481683 -
tggagcatgtggggaaaaga

SEQ ID NO: 181412 - DNA, 20 bp, Artificial Sequence
  Synthetic oligonucleotide; TAG chr2 60481674 60481693 60481677 -
atgtggggaaaagaaagatg

SEQ ID NO: 181413 - DNA, 20 bp, Artificial Sequence
  Synthetic oligonucleotide; AGG chr2 60481673 60481692 60481676 -
tgtggggaaaagaaagatgt

SEQ ID NO: 181414 - DNA, 20 bp, Artificial Sequence
  Synthetic oligonucleotide; GGG chr2 60481672 60481691 60481675 -
gtggggaaaagaaagatgta

SEQ ID NO: 181415 - DNA, 20 bp, Artificial Sequence
  Synthetic oligonucleotide; GGG chr2 60481671 60481690 60481674 -
tggggaaaagaaagatgtag

SEQ ID NO: 181416 - DNA, 20 bp, Artificial Sequence
  Synthetic oligonucleotide; GGG chr2 60481670 60481689 60481673 -
ggggaaaagaaagatgtagg

SEQ ID NO: 181417 - DNA, 20 bp, Artificial Sequence
  Synthetic oligonucleotide; TGG chr2 60481667 60481686 60481670 -
gaaaagaaagatgtaggggg

SEQ ID NO: 181418 - DNA, 20 bp, Artificial Sequence
  Synthetic oligonucleotide; GAG chr2 60481665 60481684 60481668 -
aaagaaagatgtagggggtg

SEQ ID NO: 181419 - DNA, 20 bp, Artificial Sequence
  Synthetic oligonucleotide; AAG chr2 60481658 60481677 60481661 -
gatgtagggggtggagcgtc

SEQ ID NO: 181420 - DNA, 20 bp, Artificial Sequence
  Synthetic oligonucleotide; AAG chr2 60481649 60481668 60481652 -
ggtggagcgtcaagaaaaac

SEQ ID NO: 181421 - DNA, 20 bp, Artificial Sequence
  Synthetic oligonucleotide; GAG chr2 60481632 60481651 60481635 -
aacaagacaaaaaaattcac

SEQ ID NO: 181422 - DNA, 20 bp, Artificial Sequence
  Synthetic oligonucleotide; TGG chr2 60481626 60481645 60481629 -
acaaaaaaattcacgagcca

SEQ ID NO: 181423 - DNA, 20 bp, Artificial Sequence
  Synthetic oligonucleotide; TGG chr2 60481620 60481639 60481623 -
aaattcacgagccatggaaa

SEQ ID NO: 181424 - DNA, 20 bp, Artificial Sequence
  Synthetic oligonucleotide; GAG chr2 60481618 60481637 60481621 -
attcacgagccatggaaatg

SEQ ID NO: 181425 - DNA, 20 bp, Artificial Sequence
  Synthetic oligonucleotide; AAG chr2 60481615 60481634 60481618 -
cacgagccatggaaatggag

SEQ ID NO: 181426 - DNA, 20 bp, Artificial Sequence
  Synthetic oligonucleotide; CAG chr2 60481595 60481614 60481598 -
aagaaacactgtttctgctg

SEQ ID NO: 181427 - DNA, 20 bp, Artificial Sequence
  Synthetic oligonucleotide; TAG chr2 60481585 60481604 60481588 -
gtttctgctgcagttgctct

SEQ ID NO: 181428 - DNA, 20 bp, Artificial Sequence
  Synthetic oligonucleotide; CAG chr2 60481581 60481600 60481584 -
ctgctgcagttgctcttagc

SEQ ID NO: 181429 - DNA, 20 bp, Artificial Sequence
  Synthetic oligonucleotide; AGG chr2 60481580 60481599 60481583 -
tgctgcagttgctcttagcc

SEQ ID NO: 181430 - DNA, 20 bp, Artificial Sequence
  Synthetic oligonucleotide; GGG chr2 60481579 60481598 60481582 -
gctgcagttgctcttagcca

SEQ ID NO: 181431 - DNA, 20 bp, Artificial Sequence
  Synthetic oligonucleotide; GGG chr2 60481578 60481597 60481581 -
ctgcagttgctcttagccag

SEQ ID NO: 181432 - DNA, 20 bp, Artificial Sequence
  Synthetic oligonucleotide; CAG chr2 60481574 60481593 60481577 -
agttgctcttagccaggggc

SEQ ID NO: 181433 - DNA, 20 bp, Artificial Sequence
  Synthetic oligonucleotide; TGG chr2 60481569 60481588 60481572 -
ctcttagccaggggccagcg

SEQ ID NO: 181434 - DNA, 20 bp, Artificial Sequence
  Synthetic oligonucleotide; CAG chr2 60481565 60481584 60481568 -
tagccaggggccagcgtgga

SEQ ID NO: 181435 - DNA, 20 bp, Artificial Sequence
  Synthetic oligonucleotide; CAG chr2 60481527 60481546 60481530 -
ccctgtcctccttcacctgc

SEQ ID NO: 181436 - DNA, 20 bp, Artificial Sequence
  Synthetic oligonucleotide; TGG chr2 60481520 60481539 60481523 -
ctccttcacctgccagcttg

SEQ ID NO: 181437 - DNA, 20 bp, Artificial Sequence
  Synthetic oligonucleotide; GGG chr2 60481519 60481538 60481522 -
tccttcacctgccagcttgt

SEQ ID NO: 181438 - DNA, 20 bp, Artificial Sequence
  Synthetic oligonucleotide; TGG chr2 60481515 60481534 60481518 -
tcacctgccagcttgtgggc

SEQ ID NO: 181439 - DNA, 20 bp, Artificial Sequence
  Synthetic oligonucleotide; GGG chr2 60481514 60481533 60481517 -
cacctgccagcttgtgggct

SEQ ID NO: 181440 - DNA, 20 bp, Artificial Sequence
  Synthetic oligonucleotide; TGG chr2 60481511 60481530 60481514 -
ctgccagcttgtgggctggg

SEQ ID NO: 181441 - DNA, 20 bp, Artificial Sequence
  Synthetic oligonucleotide; AAG chr2 60481505 60481524 60481508 -
gcttgtgggctgggtggctt

SEQ ID NO: 181442 - DNA, 20 bp, Artificial Sequence
  Synthetic oligonucleotide; TAG chr2 60481499 60481518 60481502 -
gggctgggtggcttaagttc

SEQ ID NO: 181443 - DNA, 20 bp, Artificial Sequence
  Synthetic oligonucleotide; TGG chr2 60481493 60481512 60481496 -
ggtggcttaagttctagccc

SEQ ID NO: 181444 - DNA, 20 bp, Artificial Sequence
  Synthetic oligonucleotide; GGG chr2 60481492 60481511 60481495 -
gtggcttaagttctagccct

SEQ ID NO: 181445 - DNA, 20 bp, Artificial Sequence
  Synthetic oligonucleotide; GAG chr2 60481473 60481492 60481476 -
tgggtgaccctctgactcct

SEQ ID NO: 181446 - DNA, 20 bp, Artificial Sequence
  Synthetic oligonucleotide; GAG chr2 60481471 60481490 60481474 -
ggtgaccctctgactcctga

SEQ ID NO: 181447 - DNA, 20 bp, Artificial Sequence
  Synthetic oligonucleotide; TGG chr2 60481452 60481471 60481455 -
agagcatgtgtatgtgcttg

SEQ ID NO: 181448 - DNA, 20 bp, Artificial Sequence
  Synthetic oligonucleotide; TGG chr2 60481449 60481468 60481452 -
gcatgtgtatgtgcttgtgg

SEQ ID NO: 181449 - DNA, 20 bp, Artificial Sequence
  Synthetic oligonucleotide; GGG chr2 60481448 60481467 60481451 -
catgtgtatgtgcttgtggt

SEQ ID NO: 181450 - DNA, 20 bp, Artificial Sequence
  Synthetic oligonucleotide; TGG chr2 60481445 60481464 60481448 -
gtgtatgtgcttgtggtggg

SEQ ID NO: 181451 - DNA, 20 bp, Artificial Sequence
  Synthetic oligonucleotide; GGG chr2 60481444 60481463 60481447 -
tgtatgtgcttgtggtgggt

SEQ ID NO: 181452 - DNA, 20 bp, Artificial Sequence
  Synthetic oligonucleotide; GGG chr2 60481443 60481462 60481446 -
gtatgtgcttgtggtgggtg

SEQ ID NO: 181453 - DNA, 20 bp, Artificial Sequence
  Synthetic oligonucleotide; TAG chr2 60481438 60481457 60481441 -
tgcttgtggtgggtggggtg

SEQ ID NO: 181454 - DNA, 20 bp, Artificial Sequence
  Synthetic oligonucleotide; AAG chr2 60481428 60481447 60481431 -
gggtggggtgtagtgcgtta

SEQ ID NO: 181455 - DNA, 20 bp, Artificial Sequence
  Synthetic oligonucleotide; AAG chr2 60481420 60481439 60481423 -
tgtagtgcgttaaagccgca

SEQ ID NO: 181456 - DNA, 20 bp, Artificial Sequence
  Synthetic oligonucleotide; CAG chr2 60481417 60481436 60481420 -
agtgcgttaaagccgcaaag

SEQ ID NO: 181457 - DNA, 20 bp, Artificial Sequence
  Synthetic oligonucleotide; GAG chr2 60481415 60481434 60481418 -
tgcgttaaagccgcaaagca

SEQ ID NO: 181458 - DNA, 20 bp, Artificial Sequence
  Synthetic oligonucleotide; AGG chr2 60481414 60481433 60481417 -
gcgttaaagccgcaaagcag

SEQ ID NO: 181459 - DNA, 20 bp, Artificial Sequence
  Synthetic oligonucleotide; AAG chr2 60481407 60481426 60481410 -
agccgcaaagcagaggtgcg

SEQ ID NO: 181460 - DNA, 20 bp, Artificial Sequence
  Synthetic oligonucleotide; AGG chr2 60481406 60481425 60481409 -
gccgcaaagcagaggtgcga

SEQ ID NO: 181461 - DNA, 20 bp, Artificial Sequence
  Synthetic oligonucleotide; GGG chr2 60481405 60481424 60481408 -
ccgcaaagcagaggtgcgaa

SEQ ID NO: 181462 - DNA, 20 bp, Artificial Sequence
  Synthetic oligonucleotide; TGG chr2 60481400 60481419 60481403 -
aagcagaggtgcgaagggcc

SEQ ID NO: 181463 - DNA, 20 bp, Artificial Sequence
  Synthetic oligonucleotide; TAG chr2 60481395 60481414 60481398 -
gaggtgcgaagggcctggtg

SEQ ID NO: 181464 - DNA, 20 bp, Artificial Sequence
  Synthetic oligonucleotide; AGG chr2 60481394 60481413 60481397 -
aggtgcgaagggcctggtgt

SEQ ID NO: 181465 - DNA, 20 bp, Artificial Sequence
  Synthetic oligonucleotide; TGG chr2 60481388 60481407 60481391 -
gaagggcctggtgtaggtcg

SEQ ID NO: 181466 - DNA, 20 bp, Artificial Sequence
  Synthetic oligonucleotide; GGG chr2 60481387 60481406 60481390 -
aagggcctggtgtaggtcgt

SEQ ID NO: 181467 - DNA, 20 bp, Artificial Sequence
  Synthetic oligonucleotide; GAG chr2 60481385 60481404 60481388 -
gggcctggtgtaggtcgtgg

SEQ ID NO: 181468 - DNA, 20 bp, Artificial Sequence
  Synthetic oligonucleotide; CAG chr2 60481381 60481400 60481384 -
ctggtgtaggtcgtgggaga

SEQ ID NO: 181469 - DNA, 20 bp, Artificial Sequence
  Synthetic oligonucleotide; GAG chr2 60481379 60481398 60481382 -
ggtgtaggtcgtgggagaca

SEQ ID NO: 181470 - DNA, 20 bp, Artificial Sequence
  Synthetic oligonucleotide; GAG chr2 60481377 60481396 60481380 -
tgtaggtcgtgggagacaga

SEQ ID NO: 181471 - DNA, 20 bp, Artificial Sequence
  Synthetic oligonucleotide; AAG chr2 60481374 60481393 60481377 -
aggtcgtgggagacagagag

SEQ ID NO: 181472 - DNA, 20 bp, Artificial Sequence
  Synthetic oligonucleotide; AGG chr2 60481373 60481392 60481376 -
ggtcgtgggagacagagaga

SEQ ID NO: 181473 - DNA, 20 bp, Artificial Sequence
  Synthetic oligonucleotide; TGG chr2 60481367 60481386 60481370 -
gggagacagagagaaggccc

SEQ ID NO: 181474 - DNA, 20 bp, Artificial Sequence
  Synthetic oligonucleotide; GGG chr2 60481366 60481385 60481369 -
ggagacagagagaaggccct

SEQ ID NO: 181475 - DNA, 20 bp, Artificial Sequence
  Synthetic oligonucleotide; TAG chr2 60481341 60481360 60481344 -
ctgaatgtttttacttttcc

SEQ ID NO: 181476 - DNA, 20 bp, Artificial Sequence
  Synthetic oligonucleotide; AGG chr2 60481340 60481359 60481343 -
tgaatgtttttacttttcct

SEQ ID NO: 181477 - DNA, 20 bp, Artificial Sequence
  Synthetic oligonucleotide; AAG chr2 60481314 60481333 60481317 -
cctgcttcatttttgttttc

SEQ ID NO: 181478 - DNA, 20 bp, Artificial Sequence
  Synthetic oligonucleotide; AGG chr2 60481313 60481332 60481316 -
ctgcttcatttttgttttca

SEQ ID NO: 181479 - DNA, 20 bp, Artificial Sequence
  Synthetic oligonucleotide; GAG chr2 60481311 60481330 60481314 -
gcttcatttttgttttcaag

SEQ ID NO: 181480 - DNA, 20 bp, Artificial Sequence
  Synthetic oligonucleotide; CAG chr2 60481282 60481301 60481285 -
gtttctctcttcttgccttc

SEQ ID NO: 181481 - DNA, 20 bp, Artificial Sequence
  Synthetic oligonucleotide; AAG chr2 60481271 60481290 60481274 -
cttgccttccagcatgtccc

SEQ ID NO: 181482 - DNA, 20 bp, Artificial Sequence
  Synthetic oligonucleotide; CAG chr2 60481268 60481287 60481271 -
gccttccagcatgtcccaag

SEQ ID NO: 181483 - DNA, 20 bp, Artificial Sequence
  Synthetic oligonucleotide; GAG chr2 60481266 60481285 60481269 -
cttccagcatgtcccaagca

SEQ ID NO: 181484 - DNA, 20 bp, Artificial Sequence
  Synthetic oligonucleotide; TGG chr2 60481262 60481281 60481265 -
cagcatgtcccaagcagaga

SEQ ID NO: 181485 - DNA, 20 bp, Artificial Sequence
  Synthetic oligonucleotide; GGG chr2 60481261 60481280 60481264 -
agcatgtcccaagcagagat

SEQ ID NO: 181486 - DNA, 20 bp, Artificial Sequence
  Synthetic oligonucleotide; TGG chr2 60481258 60481277 60481261 -
atgtcccaagcagagatggg

SEQ ID NO: 181487 - DNA, 20 bp, Artificial Sequence
  Synthetic oligonucleotide; TAG chr2 60481254 60481273 60481257 -
cccaagcagagatgggtggc

SEQ ID NO: 181488 - DNA, 20 bp, Artificial Sequence
  Synthetic oligonucleotide; AGG chr2 60481253 60481272 60481256 -
ccaagcagagatgggtggct

SEQ ID NO: 181489 - DNA, 20 bp, Artificial Sequence
  Synthetic oligonucleotide; TGG chr2 60481248 60481267 60481251 -
cagagatgggtggctaggtt

SEQ ID NO: 181490 - DNA, 20 bp, Artificial Sequence
  Synthetic oligonucleotide; GGG chr2 60481247 60481266 60481250 -
agagatgggtggctaggttt

SEQ ID NO: 181491 - DNA, 20 bp, Artificial Sequence
  Synthetic oligonucleotide; TGG chr2 60481242 60481261 60481245 -
tgggtggctaggtttgggaa

SEQ ID NO: 181492 - DNA, 20 bp, Artificial Sequence
  Synthetic oligonucleotide; GGG chr2 60481241 60481260 60481244 -
gggtggctaggtttgggaat

SEQ ID NO: 181493 - DNA, 20 bp, Artificial Sequence
  Synthetic oligonucleotide; GGG chr2 60481240 60481259 60481243 -
ggtggctaggtttgggaatg

SEQ ID NO: 181494 - DNA, 20 bp, Artificial Sequence
  Synthetic oligonucleotide; TGG chr2 60481234 60481253 60481237 -
taggtttgggaatggggtgc

SEQ ID NO: 181495 - DNA, 20 bp, Artificial Sequence
  Synthetic oligonucleotide; GGG chr2 60481233 60481252 60481236 -
aggtttgggaatggggtgct

SEQ ID NO: 181496 - DNA, 20 bp, Artificial Sequence
  Synthetic oligonucleotide; GAG chr2 60481231 60481250 60481234 -
gtttgggaatggggtgctgg

SEQ ID NO: 181497 - DNA, 20 bp, Artificial Sequence
  Synthetic oligonucleotide; AGG chr2 60481230 60481249 60481233 -
tttgggaatggggtgctggg

SEQ ID NO: 181498 - DNA, 20 bp, Artificial Sequence
  Synthetic oligonucleotide; GGG chr2 60481229 60481248 60481232 -
ttgggaatggggtgctggga

SEQ ID NO: 181499 - DNA, 20 bp, Artificial Sequence
  Synthetic oligonucleotide; GGG chr2 60481228 60481247 60481231 -
tgggaatggggtgctgggag

SEQ ID NO: 181500 - DNA, 20 bp, Artificial Sequence
  Synthetic oligonucleotide; GAG chr2 60481226 60481245 60481229 -
ggaatggggtgctgggaggg

SEQ ID NO: 181501 - DNA, 20 bp, Artificial Sequence
  Synthetic oligonucleotide; AGG chr2 60481225 60481244 60481228 -
gaatggggtgctgggagggg

SEQ ID NO: 181502 - DNA, 20 bp, Artificial Sequence
  Synthetic oligonucleotide; GGG chr2 60481224 60481243 60481227 -
aatggggtgctgggagggga

SEQ ID NO: 181503 - DNA, 20 bp, Artificial Sequence
  Synthetic oligonucleotide; GGG chr2 60481223 60481242 60481226 -
atggggtgctgggaggggag

SEQ ID NO: 181504 - DNA, 20 bp, Artificial Sequence
  Synthetic oligonucleotide; CAG chr2 60481209 60481228 60481212 -
ggggaggggatatcccattc

SEQ ID NO: 181505 - DNA, 20 bp, Artificial Sequence
  Synthetic oligonucleotide; AGG chr2 60481208 60481227 60481211 -
gggaggggatatcccattcc

SEQ ID NO: 181506 - DNA, 20 bp, Artificial Sequence
  Synthetic oligonucleotide; GGG chr2 60481207 60481226 60481210 -
ggaggggatatcccattcca

SEQ ID NO: 181507 - DNA, 20 bp, Artificial Sequence
  Synthetic oligonucleotide; CAG chr2 60481197 60481216 60481200 -
tcccattccagggcccttcc

SEQ ID NO: 181508 - DNA, 20 bp, Artificial Sequence
  Synthetic oligonucleotide; TGG chr2 60481191 60481210 60481194 -
tccagggcccttcccagttt

SEQ ID NO: 181509 - DNA, 20 bp, Artificial Sequence
  Synthetic oligonucleotide; GGG chr2 60481190 60481209 60481193 -
ccagggcccttcccagtttt

SEQ ID NO: 181510 - DNA, 20 bp, Artificial Sequence
  Synthetic oligonucleotide; GGG chr2 60481189 60481208 60481192 -
cagggcccttcccagttttg

SEQ ID NO: 181511 - DNA, 20 bp, Artificial Sequence
  Synthetic oligonucleotide; TGG chr2 60481185 60481204 60481188 -
gcccttcccagttttggggc

SEQ ID NO: 181512 - DNA, 20 bp, Artificial Sequence
  Synthetic oligonucleotide; GGG chr2 60481184 60481203 60481187 -
cccttcccagttttggggct

SEQ ID NO: 181513 - DNA, 20 bp, Artificial Sequence
  Synthetic oligonucleotide; AAG chr2 60481181 60481200 60481184 -
ttcccagttttggggctggg

SEQ ID NO: 181514 - DNA, 20 bp, Artificial Sequence
  Synthetic oligonucleotide; GAG chr2 60481165 60481184 60481168 -
tgggaagcctcaatctcctt

SEQ ID NO: 181515 - DNA, 20 bp, Artificial Sequence
  Synthetic oligonucleotide; CAG chr2 60481160 60481179 60481163 -
agcctcaatctccttgagca

SEQ ID NO: 181516 - DNA, 20 bp, Artificial Sequence
  Synthetic oligonucleotide; CAG chr2 60481157 60481176 60481160 -
ctcaatctccttgagcacag

SEQ ID NO: 181517 - DNA, 20 bp, Artificial Sequence
  Synthetic oligonucleotide; AGG chr2 60481156 60481175 60481159 -
tcaatctccttgagcacagc

SEQ ID NO: 181518 - DNA, 20 bp, Artificial Sequence
  Synthetic oligonucleotide; GGG chr2 60481155 60481174 60481158 -
caatctccttgagcacagca

SEQ ID NO: 181519 - DNA, 20 bp, Artificial Sequence
  Synthetic oligonucleotide; GAG chr2 60481132 60481151 60481135 -
ctttgccttctttcttccct

SEQ ID NO: 181520 - DNA, 20 bp, Artificial Sequence
  Synthetic oligonucleotide; CGG chr2 60481126 60481145 60481129 -
cttctttcttccctgagctg

SEQ ID NO: 181521 - DNA, 20 bp, Artificial Sequence
  Synthetic oligonucleotide; TGG chr2 60481116 60481135 60481119 -
ccctgagctgcggccaccac

SEQ ID NO: 181522 - DNA, 20 bp, Artificial Sequence
  Synthetic oligonucleotide; GGG chr2 60481115 60481134 60481118 -
cctgagctgcggccaccact

SEQ ID NO: 181523 - DNA, 20 bp, Artificial Sequence
  Synthetic oligonucleotide; CAG chr2 60481106 60481125 60481109 -
cggccaccactgggctgtac

SEQ ID NO: 181524 - DNA, 20 bp, Artificial Sequence
  Synthetic oligonucleotide; AGG chr2 60481105 60481124 60481108 -
ggccaccactgggctgtacc

SEQ ID NO: 181525 - DNA, 20 bp, Artificial Sequence
  Synthetic oligonucleotide; TAG chr2 60481099 60481118 60481102 -
cactgggctgtaccaggatc

SEQ ID NO: 181526 - DNA, 20 bp, Artificial Sequence
  Synthetic oligonucleotide; TGG chr2 60481089 60481108 60481092 -
taccaggatctagtgcaact

SEQ ID NO: 181527 - DNA, 20 bp, Artificial Sequence
  Synthetic oligonucleotide; GGG chr2 60481088 60481107 60481091 -
accaggatctagtgcaactt

SEQ ID NO: 181528 - DNA, 20 bp, Artificial Sequence
  Synthetic oligonucleotide; AAG chr2 60481081 60481100 60481084 -
tctagtgcaacttgggtgac

SEQ ID NO: 181529 - DNA, 20 bp, Artificial Sequence
  Synthetic oligonucleotide; AGG chr2 60481080 60481099 60481083 -
ctagtgcaacttgggtgaca

SEQ ID NO: 181530 - DNA, 20 bp, Artificial Sequence
  Synthetic oligonucleotide; TGG chr2 60481075 60481094 60481078 -
gcaacttgggtgacaaggtg

SEQ ID NO: 181531 - DNA, 20 bp, Artificial Sequence
  Synthetic oligonucleotide; GGG chr2 60481074 60481093 60481077 -
caacttgggtgacaaggtgt

SEQ ID NO: 181532 - DNA, 20 bp, Artificial Sequence
  Synthetic oligonucleotide; TGG chr2 60481071 60481090 60481074 -
cttgggtgacaaggtgtggg

SEQ ID NO: 181533 - DNA, 20 bp, Artificial Sequence
  Synthetic oligonucleotide; CAG chr2 60481065 60481084 60481068 -
tgacaaggtgtgggtggctg

SEQ ID NO: 181534 - DNA, 20 bp, Artificial Sequence
  Synthetic oligonucleotide; AGG chr2 60481064 60481083 60481067 -
gacaaggtgtgggtggctgc

SEQ ID NO: 181535 - DNA, 20 bp, Artificial Sequence
  Synthetic oligonucleotide; GAG chr2 60481045 60481064 60481048 -
caggtgttctccctgcatct

SEQ ID NO: 181536 - DNA, 20 bp, Artificial Sequence
  Synthetic oligonucleotide; AGG chr2 60481044 60481063 60481047 -
aggtgttctccctgcatctg

SEQ ID NO: 181537 - DNA, 20 bp, Artificial Sequence
  Synthetic oligonucleotide; CAG chr2 60481041 60481060 60481044 -
tgttctccctgcatctgagg

SEQ ID NO: 181538 - DNA, 20 bp, Artificial Sequence
  Synthetic oligonucleotide; AGG chr2 60481040 60481059 60481043 -
gttctccctgcatctgaggc

SEQ ID NO: 181539 - DNA, 20 bp, Artificial Sequence
  Synthetic oligonucleotide; GGG chr2 60481039 60481058 60481042 -
ttctccctgcatctgaggca

SEQ ID NO: 181540 - DNA, 20 bp, Artificial Sequence
  Synthetic oligonucleotide; GAG chr2 60481037 60481056 60481040 -
ctccctgcatctgaggcagg

SEQ ID NO: 181541 - DNA, 20 bp, Artificial Sequence
  Synthetic oligonucleotide; AGG chr2 60481036 60481055 60481039 -
tccctgcatctgaggcaggg

SEQ ID NO: 181542 - DNA, 20 bp, Artificial Sequence
  Synthetic oligonucleotide; CAG chr2 60481033 60481052 60481036 -
ctgcatctgaggcagggagg

SEQ ID NO: 181543 - DNA, 20 bp, Artificial Sequence
  Synthetic oligonucleotide; TGG chr2 60481029 60481048 60481032 -
atctgaggcagggaggcagc

SEQ ID NO: 181544 - DNA, 20 bp, Artificial Sequence
  Synthetic oligonucleotide; GGG chr2 60481028 60481047 60481031 -
tctgaggcagggaggcagct

SEQ ID NO: 181545 - DNA, 20 bp, Artificial Sequence
  Synthetic oligonucleotide; GGG chr2 60481027 60481046 60481030 -
ctgaggcagggaggcagctg

SEQ ID NO: 181546 - DNA, 20 bp, Artificial Sequence
  Synthetic oligonucleotide; GGG chr2 60481026 60481045 60481029 -
tgaggcagggaggcagctgg

SEQ ID NO: 181547 - DNA, 20 bp, Artificial Sequence
  Synthetic oligonucleotide; CAG chr2 60481019 60481038 60481022 -
gggaggcagctgggggcttc

SEQ ID NO: 181548 - DNA, 20 bp, Artificial Sequence
  Synthetic oligonucleotide; CAG chr2 60481015 60481034 60481018 -
ggcagctgggggcttccagc

SEQ ID NO: 181549 - DNA, 20 bp, Artificial Sequence
  Synthetic oligonucleotide; CAG chr2 60480996 60481015 60480999 -
ccagcctgtaatgcccctcc

SEQ ID NO: 181550 - DNA, 20 bp, Artificial Sequence
  Synthetic oligonucleotide; AGG chr2 60480995 60481014 60480998 -
cagcctgtaatgcccctccc

SEQ ID NO: 181551 - DNA, 20 bp, Artificial Sequence
  Synthetic oligonucleotide; TAG chr2 60480990 60481009 60480993 -
tgtaatgcccctcccaggtc

SEQ ID NO: 181552 - DNA, 20 bp, Artificial Sequence
  Synthetic oligonucleotide; TAG chr2 60480982 60481001 60480985 -
ccctcccaggtctagcttcc

SEQ ID NO: 181553 - DNA, 20 bp, Artificial Sequence
  Synthetic oligonucleotide; AAG chr2 60480969 60480988 60480972 -
agcttcctagccttattttt

SEQ ID NO: 181554 - DNA, 20 bp, Artificial Sequence
  Synthetic oligonucleotide; TAG chr2 60480960 60480979 60480963 -
gccttatttttaagcccttt

SEQ ID NO: 181555 - DNA, 20 bp, Artificial Sequence
  Synthetic oligonucleotide; TGG chr2 60480957 60480976 60480960 -
ttatttttaagcccttttag

SEQ ID NO: 181556 - DNA, 20 bp, Artificial Sequence
  Synthetic oligonucleotide; GAG chr2 60480955 60480974 60480958 -
atttttaagcccttttagtg

SEQ ID NO: 181557 - DNA, 20 bp, Artificial Sequence
  Synthetic oligonucleotide; TAG chr2 60480941 60480960 60480944 -
ttagtggagcaaaaactatt

SEQ ID NO: 181558 - DNA, 20 bp, Artificial Sequence
  Synthetic oligonucleotide; GAG chr2 60480932 60480951 60480935 -
caaaaactatttagaactat

SEQ ID NO: 181559 - DNA, 20 bp, Artificial Sequence
  Synthetic oligonucleotide; TAG chr2 60480921 60480940 60480924 -
tagaactatgagttcaaaaa

SEQ ID NO: 181560 - DNA, 20 bp, Artificial Sequence
  Synthetic oligonucleotide; AGG chr2 60480920 60480939 60480923 -
agaactatgagttcaaaaat

SEQ ID NO: 181561 - DNA, 20 bp, Artificial Sequence
  Synthetic oligonucleotide; AAG chr2 60480910 60480929 60480913 -
gttcaaaaataggattattc

SEQ ID NO: 181562 - DNA, 20 bp, Artificial Sequence
  Synthetic oligonucleotide; CGG chr2 60480907 60480926 60480910 -
caaaaataggattattcaag

SEQ ID NO: 181563 - DNA, 20 bp, Artificial Sequence
  Synthetic oligonucleotide; GAG chr2 60480905 60480924 60480908 -
aaaataggattattcaagcg

SEQ ID NO: 181564 - DNA, 20 bp, Artificial Sequence
  Synthetic oligonucleotide; AGG chr2 60480904 60480923 60480907 -
aaataggattattcaagcgg

SEQ ID NO: 181565 - DNA, 20 bp, Artificial Sequence
  Synthetic oligonucleotide; TGG chr2 60480879 60480898 60480882 -
cttcacactgttctttctct

SEQ ID NO: 181566 - DNA, 20 bp, Artificial Sequence
  Synthetic oligonucleotide; GGG chr2 60480878 60480897 60480881 -
ttcacactgttctttctctt

SEQ ID NO: 181567 - DNA, 20 bp, Artificial Sequence
  Synthetic oligonucleotide; CAG chr2 60480874 60480893 60480877 -
cactgttctttctcttggga

SEQ ID NO: 181568 - DNA, 20 bp, Artificial Sequence
  Synthetic oligonucleotide; GAG chr2 60480872 60480891 60480875 -
ctgttctttctcttgggaca

SEQ ID NO: 181569 - DNA, 20 bp, Artificial Sequence
  Synthetic oligonucleotide; TGG chr2 60480868 60480887 60480871 -
tctttctcttgggacagaga

SEQ ID NO: 181570 - DNA, 20 bp, Artificial Sequence
  Synthetic oligonucleotide; GGG chr2 60480867 60480886 60480870 -
ctttctcttgggacagagat

SEQ ID NO: 181571 - DNA, 20 bp, Artificial Sequence
  Synthetic oligonucleotide; GGG chr2 60480866 60480885 60480869 -
tttctcttgggacagagatg

SEQ ID NO: 181572 - DNA, 20 bp, Artificial Sequence
  Synthetic oligonucleotide; GGG chr2 60480865 60480884 60480868 -
ttctcttgggacagagatgg

SEQ ID NO: 181573 - DNA, 20 bp, Artificial Sequence
  Synthetic oligonucleotide; CAG chr2 60480860 60480879 60480863 -
ttgggacagagatgggggtg

SEQ ID NO: 181574 - DNA, 20 bp, Artificial Sequence
  Synthetic oligonucleotide; AGG chr2 60480859 60480878 60480862 -
tgggacagagatgggggtgc

SEQ ID NO: 181575 - DNA, 20 bp, Artificial Sequence
  Synthetic oligonucleotide; TAG chr2 60480856 60480875 60480859 -
gacagagatgggggtgcagg

SEQ ID NO: 181576 - DNA, 20 bp, Artificial Sequence
  Synthetic oligonucleotide; AGG chr2 60480855 60480874 60480858 -
acagagatgggggtgcaggt

SEQ ID NO: 181577 - DNA, 20 bp, Artificial Sequence
  Synthetic oligonucleotide; GGG chr2 60480854 60480873 60480857 -
cagagatgggggtgcaggta

SEQ ID NO: 181578 - DNA, 20 bp, Artificial Sequence
  Synthetic oligonucleotide; GGG chr2 60480853 60480872 60480856 -
agagatgggggtgcaggtag

SEQ ID NO: 181579 - DNA, 20 bp, Artificial Sequence
  Synthetic oligonucleotide; GAG chr2 60480848 60480867 60480851 -
tgggggtgcaggtaggggat

SEQ ID NO: 181580 - DNA, 20 bp, Artificial Sequence
  Synthetic oligonucleotide; TAG chr2 60480843 60480862 60480846 -
gtgcaggtaggggatgagaa

SEQ ID NO: 181581 - DNA, 20 bp, Artificial Sequence
  Synthetic oligonucleotide; GAG chr2 60480841 60480860 60480844 -
gcaggtaggggatgagaata

SEQ ID NO: 181582 - DNA, 20 bp, Artificial Sequence
  Synthetic oligonucleotide; AGG chr2 60480840 60480859 60480843 -
caggtaggggatgagaatag

SEQ ID NO: 181583 - DNA, 20 bp, Artificial Sequence
  Synthetic oligonucleotide; TGG chr2 60480831 60480850 60480834 -
gatgagaatagaggaaaatg

SEQ ID NO: 181584 - DNA, 20 bp, Artificial Sequence
  Synthetic oligonucleotide; GAG chr2 60480829 60480848 60480832 -
tgagaatagaggaaaatgtg

SEQ ID NO: 181585 - DNA, 20 bp, Artificial Sequence
  Synthetic oligonucleotide; AGG chr2 60480828 60480847 60480831 -
gagaatagaggaaaatgtgg

SEQ ID NO: 181586 - DNA, 20 bp, Artificial Sequence
  Synthetic oligonucleotide; GAG chr2 60480809 60480828 60480812 -
gaggattgctaaaacaaatt

SEQ ID NO: 181587 - DNA, 20 bp, Artificial Sequence
  Synthetic oligonucleotide; GAG chr2 60480807 60480826 60480810 -
ggattgctaaaacaaattga

SEQ ID NO: 181588 - DNA, 20 bp, Artificial Sequence
  Synthetic oligonucleotide; GAG chr2 60480805 60480824 60480808 -
attgctaaaacaaattgaga

SEQ ID NO: 181589 - DNA, 20 bp, Artificial Sequence
  Synthetic oligonucleotide; AGG chr2 60480804 60480823 60480807 -
ttgctaaaacaaattgagag

SEQ ID NO: 181590 - DNA, 20 bp, Artificial Sequence
  Synthetic oligonucleotide; AAG chr2 60480801 60480820 60480804 -
ctaaaacaaattgagagagg

SEQ ID NO: 181591 - DNA, 20 bp, Artificial Sequence
  Synthetic oligonucleotide; AGG chr2 60480800 60480819 60480803 -
taaaacaaattgagagagga

SEQ ID NO: 181592 - DNA, 20 bp, Artificial Sequence
  Synthetic oligonucleotide; AAG chr2 60480797 60480816 60480800 -
aacaaattgagagaggaagg

SEQ ID NO: 181593 - DNA, 20 bp, Artificial Sequence
  Synthetic oligonucleotide; AAG chr2 60480793 60480812 60480796 -
aattgagagaggaaggaaga

SEQ ID NO: 181594 - DNA, 20 bp, Artificial Sequence
  Synthetic oligonucleotide; AGG chr2 60480792 60480811 60480795 -
attgagagaggaaggaagaa

SEQ ID NO: 181595 - DNA, 20 bp, Artificial Sequence
  Synthetic oligonucleotide; GGG chr2 60480791 60480810 60480794 -
ttgagagaggaaggaagaaa

SEQ ID NO: 181596 - DNA, 20 bp, Artificial Sequence
  Synthetic oligonucleotide; CAG chr2 60480785 60480804 60480788 -
gaggaaggaagaaagggacc

SEQ ID NO: 181597 - DNA, 20 bp, Artificial Sequence
  Synthetic oligonucleotide; TAG chr2 60480780 60480799 60480783 -
aggaagaaagggacccagac

SEQ ID NO: 181598 - DNA, 20 bp, Artificial Sequence
  Synthetic oligonucleotide; GAG chr2 60480772 60480791 60480775 -
agggacccagactagtaatt

SEQ ID NO: 181599 - DNA, 20 bp, Artificial Sequence
  Synthetic oligonucleotide; CAG chr2 60480759 60480778 60480762 -
agtaattgagaccaattcac

SEQ ID NO: 181600 - DNA, 20 bp, Artificial Sequence
  Synthetic oligonucleotide; AAG chr2 60480756 60480775 60480759 -
aattgagaccaattcaccag

SEQ ID NO: 181601 - DNA, 20 bp, Artificial Sequence
  Synthetic oligonucleotide; AAG chr2 60480749 60480768 60480752 -
accaattcaccagaagactt

SEQ ID NO: 181602 - DNA, 20 bp, Artificial Sequence
  Synthetic oligonucleotide; AGG chr2 60480748 60480767 60480751 -
ccaattcaccagaagactta

SEQ ID NO: 181603 - DNA, 20 bp, Artificial Sequence
  Synthetic oligonucleotide; TAG chr2 60480728 60480747 60480731 -
aggaaatttgacatccgctg

SEQ ID NO: 181604 - DNA, 20 bp, Artificial Sequence
  Synthetic oligonucleotide; CAG chr2 60480703 60480722 60480706 -
cttttaactgtgtaattaca

SEQ ID NO: 181605 - DNA, 20 bp, Artificial Sequence
  Synthetic oligonucleotide; TGG chr2 60480696 60480715 60480699 -
ctgtgtaattacacagcatt

SEQ ID NO: 181606 - DNA, 20 bp, Artificial Sequence
  Synthetic oligonucleotide; AAG chr2 60480692 60480711 60480695 -
gtaattacacagcatttgga

SEQ ID NO: 181607 - DNA, 20 bp, Artificial Sequence
  Synthetic oligonucleotide; GAG chr2 60480655 60480674 60480658 -
gattgtccataacaaccatt

SEQ ID NO: 181608 - DNA, 20 bp, Artificial Sequence
  Synthetic oligonucleotide; CAG chr2 60480638 60480657 60480641 -
attgagtaaatacactatta

SEQ ID NO: 181609 - DNA, 20 bp, Artificial Sequence
  Synthetic oligonucleotide; TAG chr2 60480625 60480644 60480628 -
actattacagattgccaaaa

SEQ ID NO: 181610 - DNA, 20 bp, Artificial Sequence
  Synthetic oligonucleotide; CAG chr2 60480620 60480639 60480623 -
tacagattgccaaaatagta

SEQ ID NO: 181611 - DNA, 20 bp, Artificial Sequence
  Synthetic oligonucleotide; AAG chr2 60480615 60480634 60480618 -
attgccaaaatagtacagtg

SEQ ID NO: 181612 - DNA, 20 bp, Artificial Sequence
  Synthetic oligonucleotide; TGG chr2 60480609 60480628 60480612 -
aaaatagtacagtgaagcga

SEQ ID NO: 181613 - DNA, 20 bp, Artificial Sequence
  Synthetic oligonucleotide; CAG chr2 60480604 60480623 60480607 -
agtacagtgaagcgatggac

SEQ ID NO: 181614 - DNA, 20 bp, Artificial Sequence
  Synthetic oligonucleotide; CAG chr2 60480601 60480620 60480604 -
acagtgaagcgatggaccag

SEQ ID NO: 181615 - DNA, 20 bp, Artificial Sequence
  Synthetic oligonucleotide; AAG chr2 60480590 60480609 60480593 -
atggaccagcagccactttc

SEQ ID NO: 181616 - DNA, 20 bp, Artificial Sequence
  Synthetic oligonucleotide; AGG chr2 60480589 60480608 60480592 -
tggaccagcagccactttca

SEQ ID NO: 181617 - DNA, 20 bp, Artificial Sequence
  Synthetic oligonucleotide; GGG chr2 60480588 60480607 60480591 -
ggaccagcagccactttcaa

SEQ ID NO: 181618 - DNA, 20 bp, Artificial Sequence
  Synthetic oligonucleotide; GGG chr2 60480587 60480606 60480590 -
gaccagcagccactttcaag

SEQ ID NO: 181619 - DNA, 20 bp, Artificial Sequence
  Synthetic oligonucleotide; TGG chr2 60480570 60480589 60480573 -
aaggggctgtaatcctctcc

SEQ ID NO: 181620 - DNA, 20 bp, Artificial Sequence
  Synthetic oligonucleotide; GGG chr2 60480569 60480588 60480572 -
aggggctgtaatcctctcct

SEQ ID NO: 181621 - DNA, 20 bp, Artificial Sequence
  Synthetic oligonucleotide; AAG chr2 60480564 60480583 60480567 -
ctgtaatcctctcctgggtc

SEQ ID NO: 181622 - DNA, 20 bp, Artificial Sequence
  Synthetic oligonucleotide; AGG chr2 60480563 60480582 60480566 -
tgtaatcctctcctgggtca

SEQ ID NO: 181623 - DNA, 20 bp, Artificial Sequence
  Synthetic oligonucleotide; CAG chr2 60480554 60480573 60480557 -
ctcctgggtcaaggctgacc

SEQ ID NO: 181624 - DNA, 20 bp, Artificial Sequence
  Synthetic oligonucleotide; GAG chr2 60480552 60480571 60480555 -
cctgggtcaaggctgaccca

SEQ ID NO: 181625 - DNA, 20 bp, Artificial Sequence
  Synthetic oligonucleotide; AGG chr2 60480551 60480570 60480554 -
ctgggtcaaggctgacccag

SEQ ID NO: 181626 - DNA, 20 bp, Artificial Sequence
  Synthetic oligonucleotide; TGG chr2 60480543 60480562 60480546 -
aggctgacccagaggctcct

SEQ ID NO: 181627 - DNA, 20 bp, Artificial Sequence
  Synthetic oligonucleotide; TAG chr2 60480539 60480558 60480542 -
tgacccagaggctccttggt

SEQ ID NO: 181628 - DNA, 20 bp, Artificial Sequence
  Synthetic oligonucleotide; TAG chr2 60480524 60480543 60480527 -
ttggttagtgaatcatttac

SEQ ID NO: 181629 - DNA, 20 bp, Artificial Sequence
  Synthetic oligonucleotide; AGG chr2 60480523 60480542 60480526 -
tggttagtgaatcatttact

SEQ ID NO: 181630 - DNA, 20 bp, Artificial Sequence
  Synthetic oligonucleotide; GGG chr2 60480522 60480541 60480525 -
ggttagtgaatcatttacta

SEQ ID NO: 181631 - DNA, 20 bp, Artificial Sequence
  Synthetic oligonucleotide; AAG chr2 60480519 60480538 60480522 -
tagtgaatcatttactaggg

SEQ ID NO: 181632 - DNA, 20 bp, Artificial Sequence
  Synthetic oligonucleotide; AGG chr2 60480518 60480537 60480521 -
agtgaatcatttactaggga

SEQ ID NO: 181633 - DNA, 20 bp, Artificial Sequence
  Synthetic oligonucleotide; TGG chr2 60480508 60480527 60480511 -
ttactagggaaggtttcccc

SEQ ID NO: 181634 - DNA, 20 bp, Artificial Sequence
  Synthetic oligonucleotide; TGG chr2 60480498 60480517 60480501 -
aggtttcccctggtcactgc

SEQ ID NO: 181635 - DNA, 20 bp, Artificial Sequence
  Synthetic oligonucleotide; TGG chr2 60480490 60480509 60480493 -
cctggtcactgctggctcca

SEQ ID NO: 181636 - DNA, 20 bp, Artificial Sequence
  Synthetic oligonucleotide; TGG chr2 60480485 60480504 60480488 -
tcactgctggctccatggcc

SEQ ID NO: 181637 - DNA, 20 bp, Artificial Sequence
  Synthetic oligonucleotide; CAG chr2 60480476 60480495 60480479 -
gctccatggcctggtccttc

SEQ ID NO: 181638 - DNA, 20 bp, Artificial Sequence
  Synthetic oligonucleotide; CAG chr2 60480472 60480491 60480475 -
catggcctggtccttccagc

SEQ ID NO: 181639 - DNA, 20 bp, Artificial Sequence
  Synthetic oligonucleotide; AGG chr2 60480471 60480490 60480474 -
atggcctggtccttccagcc

SEQ ID NO: 181640 - DNA, 20 bp, Artificial Sequence
  Synthetic oligonucleotide; TAG chr2 60480463 60480482 60480466 -
gtccttccagccaggtcatt

SEQ ID NO: 181641 - DNA, 20 bp, Artificial Sequence
  Synthetic oligonucleotide; TGG chr2 60480458 60480477 60480461 -
tccagccaggtcatttagaa

SEQ ID NO: 181642 - DNA, 20 bp, Artificial Sequence
  Synthetic oligonucleotide; CAG chr2 60480447 60480466 60480450 -
catttagaatggctctccaa

SEQ ID NO: 181643 - DNA, 20 bp, Artificial Sequence
  Synthetic oligonucleotide; AGG chr2 60480446 60480465 60480449 -
atttagaatggctctccaac

SEQ ID NO: 181644 - DNA, 20 bp, Artificial Sequence
  Synthetic oligonucleotide; AAG chr2 60480443 60480462 60480446 -
tagaatggctctccaacagg

SEQ ID NO: 181645 - DNA, 20 bp, Artificial Sequence
  Synthetic oligonucleotide; AAG chr2 60480438 60480457 60480441 -
tggctctccaacaggaagaa

SEQ ID NO: 181646 - DNA, 20 bp, Artificial Sequence
  Synthetic oligonucleotide; CAG chr2 60480426 60480445 60480429 -
aggaagaaaagttcactgca

SEQ ID NO: 181647 - DNA, 20 bp, Artificial Sequence
  Synthetic oligonucleotide; GAG chr2 60480400 60480419 60480403 -
ttgaatcctaattatttatt

SEQ ID NO: 181648 - DNA, 20 bp, Artificial Sequence
  Synthetic oligonucleotide; AGG chr2 60480399 60480418 60480402 -
tgaatcctaattatttattg

SEQ ID NO: 181649 - DNA, 20 bp, Artificial Sequence
  Synthetic oligonucleotide; GGG chr2 60480398 60480417 60480401 -
gaatcctaattatttattga

SEQ ID NO: 181650 - DNA, 20 bp, Artificial Sequence
  Synthetic oligonucleotide; GGG chr2 60480397 60480416 60480400 -
aatcctaattatttattgag

SEQ ID NO: 181651 - DNA, 20 bp, Artificial Sequence
  Synthetic oligonucleotide; CAG chr2 60480382 60480401 60480385 -
ttgaggggctcttctttgcc

SEQ ID NO: 181652 - DNA, 20 bp, Artificial Sequence
  Synthetic oligonucleotide; TGG chr2 60480377 60480396 60480380 -
gggctcttctttgcccagca

SEQ ID NO: 181653 - DNA, 20 bp, Artificial Sequence
  Synthetic oligonucleotide; TGG chr2 60480371 60480390 60480374 -
ttctttgcccagcatggtgc

SEQ ID NO: 181654 - DNA, 20 bp, Artificial Sequence
  Synthetic oligonucleotide; CAG chr2 60480367 60480386 60480370 -
ttgcccagcatggtgctgga

SEQ ID NO: 181655 - DNA, 20 bp, Artificial Sequence
  Synthetic oligonucleotide; CAG chr2 60480363 60480382 60480366 -
ccagcatggtgctggacagt

SEQ ID NO: 181656 - DNA, 20 bp, Artificial Sequence
  Synthetic oligonucleotide; GAG chr2 60480361 60480380 60480364 -
agcatggtgctggacagtca

SEQ ID NO: 181657 - DNA, 20 bp, Artificial Sequence
  Synthetic oligonucleotide; AGG chr2 60480360 60480379 60480363 -
gcatggtgctggacagtcag

SEQ ID NO: 181658 - DNA, 20 bp, Artificial Sequence
  Synthetic oligonucleotide; TAG chr2 60480357 60480376 60480360 -
tggtgctggacagtcagagg

SEQ ID NO: 181659 - DNA, 20 bp, Artificial Sequence
  Synthetic oligonucleotide; GAG chr2 60480348 60480367 60480351 -
acagtcagaggtagaccact

SEQ ID NO: 181660 - DNA, 20 bp, Artificial Sequence
  Synthetic oligonucleotide; TGG chr2 60480342 60480361 60480345 -
agaggtagaccactgagtct

SEQ ID NO: 181661 - DNA, 20 bp, Artificial Sequence
  Synthetic oligonucleotide; TAG chr2 60480335 60480354 60480338 -
gaccactgagtcttggttct

SEQ ID NO: 181662 - DNA, 20 bp, Artificial Sequence
  Synthetic oligonucleotide; AAG chr2 60480332 60480351 60480335 -
cactgagtcttggttcttag

SEQ ID NO: 181663 - DNA, 20 bp, Artificial Sequence
  Synthetic oligonucleotide; TAG chr2 60480318 60480337 60480321 -
tcttagaagccttgaacttt

SEQ ID NO: 181664 - DNA, 20 bp, Artificial Sequence
  Synthetic oligonucleotide; TGG chr2 60480314 60480333 60480317 -
agaagccttgaacttttagt

SEQ ID NO: 181665 - DNA, 20 bp, Artificial Sequence
  Synthetic oligonucleotide; GAG chr2 60480312 60480331 60480315 -
aagccttgaacttttagttg

SEQ ID NO: 181666 - DNA, 20 bp, Artificial Sequence
  Synthetic oligonucleotide; CAG chr2 60480306 60480325 60480309 -
tgaacttttagttggagaac

SEQ ID NO: 181667 - DNA, 20 bp, Artificial Sequence
  Synthetic oligonucleotide; TGG chr2 60480303 60480322 60480306 -
acttttagttggagaaccag

SEQ ID NO: 181668 - DNA, 20 bp, Artificial Sequence
  Synthetic oligonucleotide; TAG chr2 60480300 60480319 60480303 -
tttagttggagaaccagtgg

SEQ ID NO: 181669 - DNA, 20 bp, Artificial Sequence
  Synthetic oligonucleotide; CAG chr2 60480283 60480302 60480286 -
tggtagatacatgctgatta

SEQ ID NO: 181670 - DNA, 20 bp, Artificial Sequence
  Synthetic oligonucleotide; AGG chr2 60480282 60480301 60480285 -
ggtagatacatgctgattac

SEQ ID NO: 181671 - DNA, 20 bp, Artificial Sequence
  Synthetic oligonucleotide; GGG chr2 60480281 60480300 60480284 -
gtagatacatgctgattaca

SEQ ID NO: 181672 - DNA, 20 bp, Artificial Sequence
  Synthetic oligonucleotide; GAG chr2 60480279 60480298 60480282 -
agatacatgctgattacagg

SEQ ID NO: 181673 - DNA, 20 bp, Artificial Sequence
  Synthetic oligonucleotide; TGG chr2 60480273 60480292 60480276 -
atgctgattacagggagact

SEQ ID NO: 181674 - DNA, 20 bp, Artificial Sequence
  Synthetic oligonucleotide; CAG chr2 60480267 60480286 60480270 -
attacagggagacttggatc

SEQ ID NO: 181675 - DNA, 20 bp, Artificial Sequence
  Synthetic oligonucleotide; AGG chr2 60480266 60480285 60480269 -
ttacagggagacttggatcc

SEQ ID NO: 181676 - DNA, 20 bp, Artificial Sequence
  Synthetic oligonucleotide; GAG chr2 60480264 60480283 60480267 -
acagggagacttggatccag

SEQ ID NO: 181677 - DNA, 20 bp, Artificial Sequence
  Synthetic oligonucleotide; TGG chr2 60480258 60480277 60480261 -
agacttggatccaggagaaa

SEQ ID NO: 181678 - DNA, 20 bp, Artificial Sequence
  Synthetic oligonucleotide; GAG chr2 60480256 60480275 60480259 -
acttggatccaggagaaatg

SEQ ID NO: 181679 - DNA, 20 bp, Artificial Sequence
  Synthetic oligonucleotide; TGG chr2 60480253 60480272 60480256 -
tggatccaggagaaatggag

SEQ ID NO: 181680 - DNA, 20 bp, Artificial Sequence
  Synthetic oligonucleotide; GAG chr2 60480251 60480270 60480254 -
gatccaggagaaatggagtg

SEQ ID NO: 181681 - DNA, 20 bp, Artificial Sequence
  Synthetic oligonucleotide; GAG chr2 60480249 60480268 60480252 -
tccaggagaaatggagtgga

SEQ ID NO: 181682 - DNA, 20 bp, Artificial Sequence
  Synthetic oligonucleotide; CAG chr2 60480245 60480264 60480248 -
ggagaaatggagtggagagc

SEQ ID NO: 181683 - DNA, 20 bp, Artificial Sequence
  Synthetic oligonucleotide; AGG chr2 60480244 60480263 60480247 -
gagaaatggagtggagagcc

SEQ ID NO: 181684 - DNA, 20 bp, Artificial Sequence
  Synthetic oligonucleotide; CAG chr2 60480239 60480258 60480242 -
atggagtggagagccaggtt

SEQ ID NO: 181685 - DNA, 20 bp, Artificial Sequence
  Synthetic oligonucleotide; AAG chr2 60480236 60480255 60480239 -
gagtggagagccaggttcag

SEQ ID NO: 181686 - DNA, 20 bp, Artificial Sequence
  Synthetic oligonucleotide; GAG chr2 60480234 60480253 60480237 -
gtggagagccaggttcagaa

SEQ ID NO: 181687 - DNA, 20 bp, Artificial Sequence
  Synthetic oligonucleotide; GAG chr2 60480232 60480251 60480235 -
ggagagccaggttcagaaga

SEQ ID NO: 181688 - DNA, 20 bp, Artificial Sequence
  Synthetic oligonucleotide; CAG chr2 60480217 60480236 60480220 -
gaagagagacatatccttta

SEQ ID NO: 181689 - DNA, 20 bp, Artificial Sequence
  Synthetic oligonucleotide; AGG chr2 60480216 60480235 60480219 -
aagagagacatatcctttac

SEQ ID NO: 181690 - DNA, 20 bp, Artificial Sequence
  Synthetic oligonucleotide; TAG chr2 60480200 60480219 60480203 -
ttacaggcctttgtgttacc

SEQ ID NO: 181691 - DNA, 20 bp, Artificial Sequence
  Synthetic oligonucleotide; CAG chr2 60480196 60480215 60480199 -
aggcctttgtgttacctagc

SEQ ID NO: 181692 - DNA, 20 bp, Artificial Sequence
  Synthetic oligonucleotide; CAG chr2 60480179 60480198 60480182 -
agccagtgccttcatgtccc

SEQ ID NO: 181693 - DNA, 20 bp, Artificial Sequence
  Synthetic oligonucleotide; TGG chr2 60480171 60480190 60480174 -
ccttcatgtccccagccccc

SEQ ID NO: 181694 - DNA, 20 bp, Artificial Sequence
  Synthetic oligonucleotide; CAG chr2 60480164 60480183 60480167 -
gtccccagccccctggcctc

SEQ ID NO: 181695 - DNA, 20 bp, Artificial Sequence
  Synthetic oligonucleotide; TGG chr2 60480124 60480143 60480127 -
tcccccctcctcgctgtcct

SEQ ID NO: 181696 - DNA, 20 bp, Artificial Sequence
  Synthetic oligonucleotide; CAG chr2 60480119 60480138 60480122 -
cctcctcgctgtccttggtg

SEQ ID NO: 181697 - DNA, 20 bp, Artificial Sequence
  Synthetic oligonucleotide; GAG chr2 60480117 60480136 60480120 -
tcctcgctgtccttggtgca

SEQ ID NO: 181698 - DNA, 20 bp, Artificial Sequence
  Synthetic oligonucleotide; TGG chr2 60480114 60480133 60480117 -
tcgctgtccttggtgcagag

SEQ ID NO: 181699 - DNA, 20 bp, Artificial Sequence
  Synthetic oligonucleotide; GGG chr2 60480113 60480132 60480116 -
cgctgtccttggtgcagagt

SEQ ID NO: 181700 - DNA, 20 bp, Artificial Sequence
  Synthetic oligonucleotide; GGG chr2 60480112 60480131 60480115 -
gctgtccttggtgcagagtg

SEQ ID NO: 181701 - DNA, 20 bp, Artificial Sequence
  Synthetic oligonucleotide; CAG chr2 60480109 60480128 60480112 -
gtccttggtgcagagtgggg

SEQ ID NO: 181702 - DNA, 20 bp, Artificial Sequence
  Synthetic oligonucleotide; CAG chr2 60480100 60480119 60480103 -
gcagagtggggcagtcatct

SEQ ID NO: 181703 - DNA, 20 bp, Artificial Sequence
  Synthetic oligonucleotide; TGG chr2 60480097 60480116 60480100 -
gagtggggcagtcatctcag

SEQ ID NO: 181704 - DNA, 20 bp, Artificial Sequence
  Synthetic oligonucleotide; GGG chr2 60480096 60480115 60480099 -
agtggggcagtcatctcagt

SEQ ID NO: 181705 - DNA, 20 bp, Artificial Sequence
  Synthetic oligonucleotide; GGG chr2 60480095 60480114 60480098 -
gtggggcagtcatctcagtg

SEQ ID NO: 181706 - DNA, 20 bp, Artificial Sequence
  Synthetic oligonucleotide; CGG chr2 60480084 60480103 60480087 -
atctcagtggggcctcctcc

SEQ ID NO: 181707 - DNA, 20 bp, Artificial Sequence
  Synthetic oligonucleotide; GGG chr2 60480083 60480102 60480086 -
tctcagtggggcctcctccc

SEQ ID NO: 181708 - DNA, 20 bp, Artificial Sequence
  Synthetic oligonucleotide; GGG chr2 60480082 60480101 60480085 -
ctcagtggggcctcctcccg

SEQ ID NO: 181709 - DNA, 20 bp, Artificial Sequence
  Synthetic oligonucleotide; AAG chr2 60480079 60480098 60480082 -
agtggggcctcctcccgggg

SEQ ID NO: 181710 - DNA, 20 bp, Artificial Sequence
  Synthetic oligonucleotide; CAG chr2 60480072 60480091 60480075 -
cctcctcccggggaagtcca

SEQ ID NO: 181711 - DNA, 20 bp, Artificial Sequence
  Synthetic oligonucleotide; CGG chr2 60480057 60480076 60480060 -
gtccacagcttgctccacac

SEQ ID NO: 181712 - DNA, 20 bp, Artificial Sequence
  Synthetic oligonucleotide; GAG chr2 60480055 60480074 60480058 -
ccacagcttgctccacaccg

SEQ ID NO: 181713 - DNA, 20 bp, Artificial Sequence
  Synthetic oligonucleotide; AGG chr2 60480054 60480073 60480057 -
cacagcttgctccacaccgg

SEQ ID NO: 181714 - DNA, 20 bp, Artificial Sequence
  Synthetic oligonucleotide; GAG chr2 60480052 60480071 60480055 -
cagcttgctccacaccggag

SEQ ID NO: 181715 - DNA, 20 bp, Artificial Sequence
  Synthetic oligonucleotide; AAG chr2 60480043 60480062 60480046 -
ccacaccggaggagccgcca

SEQ ID NO: 181716 - DNA, 20 bp, Artificial Sequence
  Synthetic oligonucleotide; CAG chr2 60480039 60480058 60480042 -
accggaggagccgccaaagt

SEQ ID NO: 181717 - DNA, 20 bp, Artificial Sequence
  Synthetic oligonucleotide; AAG chr2 60480034 60480053 60480037 -
aggagccgccaaagtcagcc

SEQ ID NO: 181718 - DNA, 20 bp, Artificial Sequence
  Synthetic oligonucleotide; GAG chr2 60480032 60480051 60480035 -
gagccgccaaagtcagccaa

SEQ ID NO: 181719 - DNA, 20 bp, Artificial Sequence
  Synthetic oligonucleotide; CAG chr2 60480026 60480045 60480029 -
ccaaagtcagccaagagccg

SEQ ID NO: 181720 - DNA, 20 bp, Artificial Sequence
  Synthetic oligonucleotide; AGG chr2 60480025 60480044 60480028 -
caaagtcagccaagagccgc

SEQ ID NO: 181721 - DNA, 20 bp, Artificial Sequence
  Synthetic oligonucleotide; AAG chr2 60480011 60480030 60480014 -
agccgcaggccataaatgca

SEQ ID NO: 181722 - DNA, 20 bp, Artificial Sequence
  Synthetic oligonucleotide; AAG chr2 60479995 60480014 60479998 -
tgcaaagtatgatttaacaa

SEQ ID NO: 181723 - DNA, 20 bp, Artificial Sequence
  Synthetic oligonucleotide; CAG chr2 60479992 60480011 60479995 -
aaagtatgatttaacaaaag

SEQ ID NO: 181724 - DNA, 20 bp, Artificial Sequence
  Synthetic oligonucleotide; GAG chr2 60479984 60480003 60479987 -
atttaacaaaagcagctttt

SEQ ID NO: 181725 - DNA, 20 bp, Artificial Sequence
  Synthetic oligonucleotide; GAG chr2 60479980 60479999 60479983 -
aacaaaagcagcttttgagt

SEQ ID NO: 181726 - DNA, 20 bp, Artificial Sequence
  Synthetic oligonucleotide; AAG chr2 60479976 60479995 60479979 -
aaagcagcttttgagtgaga

SEQ ID NO: 181727 - DNA, 20 bp, Artificial Sequence
  Synthetic oligonucleotide; GAG chr2 60479971 60479990 60479974 -
agcttttgagtgagaaagct

SEQ ID NO: 181728 - DNA, 20 bp, Artificial Sequence
  Synthetic oligonucleotide; TGG chr2 60479968 60479987 60479971 -
ttttgagtgagaaagctgag

SEQ ID NO: 181729 - DNA, 20 bp, Artificial Sequence
  Synthetic oligonucleotide; GAG chr2 60479966 60479985 60479969 -
ttgagtgagaaagctgagtg

SEQ ID NO: 181730 - DNA, 20 bp, Artificial Sequence
  Synthetic oligonucleotide; CAG chr2 60479943 60479962 60479946 -
ttgtcccaacctgtcaactt

SEQ ID NO: 181731 - DNA, 20 bp, Artificial Sequence
  Synthetic oligonucleotide; CGG chr2 60479909 60479928 60479912 -
cctccccataaatcaaaaaa

SEQ ID NO: 181732 - DNA, 20 bp, Artificial Sequence
  Synthetic oligonucleotide; TGG chr2 60479905 60479924 60479908 -
cccataaatcaaaaaacggt

SEQ ID NO: 181733 - DNA, 20 bp, Artificial Sequence
  Synthetic oligonucleotide; TGG chr2 60479902 60479921 60479905 -
ataaatcaaaaaacggttgg

SEQ ID NO: 181734 - DNA, 20 bp, Artificial Sequence
  Synthetic oligonucleotide; AAG chr2 60479899 60479918 60479902 -
aatcaaaaaacggttggtgg

SEQ ID NO: 181735 - DNA, 20 bp, Artificial Sequence
  Synthetic oligonucleotide; AGG chr2 60479898 60479917 60479901 -
atcaaaaaacggttggtgga

SEQ ID NO: 181736 - DNA, 20 bp, Artificial Sequence
  Synthetic oligonucleotide; GGG chr2 60479897 60479916 60479900 -
tcaaaaaacggttggtggaa

SEQ ID NO: 181737 - DNA, 20 bp, Artificial Sequence
  Synthetic oligonucleotide; GAG chr2 60479895 60479914 60479898 -
aaaaaacggttggtggaagg

SEQ ID NO: 181738 - DNA, 20 bp, Artificial Sequence
  Synthetic oligonucleotide; AGG chr2 60479894 60479913 60479897 -
aaaaacggttggtggaaggg

SEQ ID NO: 181739 - DNA, 20 bp, Artificial Sequence
  Synthetic oligonucleotide; GGG chr2 60479893 60479912 60479896 -
aaaacggttggtggaaggga

SEQ ID NO: 181740 - DNA, 20 bp, Artificial Sequence
  Synthetic oligonucleotide; CAG chr2 60479889 60479908 60479892 -
cggttggtggaagggaggga

SEQ ID NO: 181741 - DNA, 20 bp, Artificial Sequence
  Synthetic oligonucleotide; AAG chr2 60479886 60479905 60479889 -
ttggtggaagggagggacag

SEQ ID NO: 181742 - DNA, 20 bp, Artificial Sequence
  Synthetic oligonucleotide; CAG chr2 60479872 60479891 60479875 -
ggacagaagcgtttcatttt

SEQ ID NO: 181743 - DNA, 20 bp, Artificial Sequence
  Synthetic oligonucleotide; AAG chr2 60479862 60479881 60479865 -
gtttcattttcagattttgt

SEQ ID NO: 181744 - DNA, 20 bp, Artificial Sequence
  Synthetic oligonucleotide; AAG chr2 60479841 60479860 60479844 -
agaaaataaaataaaatcaa

SEQ ID NO: 181745 - DNA, 20 bp, Artificial Sequence
  Synthetic oligonucleotide; CAG chr2 60479809 60479828 60479812 -
cacgctgataccttacatgc

SEQ ID NO: 181746 - DNA, 20 bp, Artificial Sequence
  Synthetic oligonucleotide; AGG chr2 60479808 60479827 60479811 -
acgctgataccttacatgcc

SEQ ID NO: 181747 - DNA, 20 bp, Artificial Sequence
  Synthetic oligonucleotide; GAG chr2 60479802 60479821 60479805 -
ataccttacatgccaggttt

SEQ ID NO: 181748 - DNA, 20 bp, Artificial Sequence
  Synthetic oligonucleotide; GAG chr2 60479796 60479815 60479799 -
tacatgccaggtttgagcct

SEQ ID NO: 181749 - DNA, 20 bp, Artificial Sequence
  Synthetic oligonucleotide; AGG chr2 60479795 60479814 60479798 -
acatgccaggtttgagcctg

SEQ ID NO: 181750 - DNA, 20 bp, Artificial Sequence
  Synthetic oligonucleotide; TGG chr2 60479782 60479801 60479785 -
gagcctgaggcaaatttttg

SEQ ID NO: 181751 - DNA, 20 bp, Artificial Sequence
  Synthetic oligonucleotide; AAG chr2 60479770 60479789 60479773 -
aatttttgtggccatgtaat

SEQ ID NO: 181752 - DNA, 20 bp, Artificial Sequence
  Synthetic oligonucleotide; TGG chr2 60479756 60479775 60479759 -
tgtaataagcctctttaaaa

SEQ ID NO: 181753 - DNA, 20 bp, Artificial Sequence
  Synthetic oligonucleotide; CAG chr2 60479750 60479769 60479753 -
aagcctctttaaaatggtga

SEQ ID NO: 181754 - DNA, 20 bp, Artificial Sequence
  Synthetic oligonucleotide; AAG chr2 60479713 60479732 60479716 -
gccttgaattacattgataa

SEQ ID NO: 181755 - DNA, 20 bp, Artificial Sequence
  Synthetic oligonucleotide; TAG chr2 60479696 60479715 60479699 -
taaaagacattttattgcat

SEQ ID NO: 181756 - DNA, 20 bp, Artificial Sequence
  Synthetic oligonucleotide; GAG chr2 60479694 60479713 60479697 -
aaagacattttattgcatta

SEQ ID NO: 181757 - DNA, 20 bp, Artificial Sequence
  Synthetic oligonucleotide; TGG chr2 60479690 60479709 60479693 -
acattttattgcattagagc

SEQ ID NO: 181758 - DNA, 20 bp, Artificial Sequence
  Synthetic oligonucleotide; GGG chr2 60479689 60479708 60479692 -
cattttattgcattagagct

SEQ ID NO: 181759 - DNA, 20 bp, Artificial Sequence
  Synthetic oligonucleotide; GGG chr2 60479688 60479707 60479691 -
attttattgcattagagctg

SEQ ID NO: 181760 - DNA, 20 bp, Artificial Sequence
  Synthetic oligonucleotide; CAG chr2 60479685 60479704 60479688 -
ttattgcattagagctgggg

SEQ ID NO: 181761 - DNA, 20 bp, Artificial Sequence
  Synthetic oligonucleotide; AGG chr2 60479684 60479703 60479687 -
tattgcattagagctggggc

SEQ ID NO: 181762 - DNA, 20 bp, Artificial Sequence
  Synthetic oligonucleotide; GAG chr2 60479682 60479701 60479685 -
ttgcattagagctggggcag

SEQ ID NO: 181763 - DNA, 20 bp, Artificial Sequence
  Synthetic oligonucleotide; CAG chr2 60479677 60479696 60479680 -
ttagagctggggcaggagta

SEQ ID NO: 181764 - DNA, 20 bp, Artificial Sequence
  Synthetic oligonucleotide; AGG chr2 60479676 60479695 60479679 -
tagagctggggcaggagtac

SEQ ID NO: 181765 - DNA, 20 bp, Artificial Sequence
  Synthetic oligonucleotide; CGG chr2 60479672 60479691 60479675 -
gctggggcaggagtacagga

SEQ ID NO: 181766 - DNA, 20 bp, Artificial Sequence
  Synthetic oligonucleotide; TGG chr2 60479661 60479680 60479664 -
agtacaggacggttcttgcc

SEQ ID NO: 181767 - DNA, 20 bp, Artificial Sequence
  Synthetic oligonucleotide; CGG chr2 60479657 60479676 60479660 -
caggacggttcttgcctggt

SEQ ID NO: 181768 - DNA, 20 bp, Artificial Sequence
  Synthetic oligonucleotide; CAG chr2 60479637 60479656 60479640 -
cggcctctttgaaaccgcgt

SEQ ID NO: 181769 - DNA, 20 bp, Artificial Sequence
  Synthetic oligonucleotide; CAG chr2 60479606 60479625 60479609 -
ccacactctccaccgcctga

SEQ ID NO: 181770 - DNA, 20 bp, Artificial Sequence
  Synthetic oligonucleotide; AGG chr2 60479605 60479624 60479608 -
cacactctccaccgcctgac

SEQ ID NO: 181771 - DNA, 20 bp, Artificial Sequence
  Synthetic oligonucleotide; GGG chr2 60479604 60479623 60479607 -
acactctccaccgcctgaca

SEQ ID NO: 181772 - DNA, 20 bp, Artificial Sequence
  Synthetic oligonucleotide; GAG chr2 60479598 60479617 60479601 -
tccaccgcctgacagggttt

SEQ ID NO: 181773 - DNA, 20 bp, Artificial Sequence
  Synthetic oligonucleotide; TGG chr2 60479590 60479609 60479593 -
ctgacagggtttgagtgcga

SEQ ID NO: 181774 - DNA, 20 bp, Artificial Sequence
  Synthetic oligonucleotide; CAG chr2 60479587 60479606 60479590 -
acagggtttgagtgcgatgg

SEQ ID NO: 181775 - DNA, 20 bp, Artificial Sequence
  Synthetic oligonucleotide; GAG chr2 60479582 60479601 60479585 -
gtttgagtgcgatggcagct

SEQ ID NO: 181776 - DNA, 20 bp, Artificial Sequence
  Synthetic oligonucleotide; TGG chr2 60479574 60479593 60479577 -
gcgatggcagctgagatctg

SEQ ID NO: 181777 - DNA, 20 bp, Artificial Sequence
  Synthetic oligonucleotide; GGG chr2 60479573 60479592 60479576 -
cgatggcagctgagatctgt

SEQ ID NO: 181778 - DNA, 20 bp, Artificial Sequence
  Synthetic oligonucleotide; CGG chr2 60479569 60479588 60479572 -
ggcagctgagatctgtgggc

SEQ ID NO: 181779 - DNA, 20 bp, Artificial Sequence
  Synthetic oligonucleotide; CAG chr2 60479563 60479582 60479566 -
tgagatctgtgggccggtga

SEQ ID NO: 181780 - DNA, 20 bp, Artificial Sequence
  Synthetic oligonucleotide; GAG chr2 60479561 60479580 60479564 -
agatctgtgggccggtgaca

SEQ ID NO: 181781 - DNA, 20 bp, Artificial Sequence
  Synthetic oligonucleotide; AGG chr2 60479560 60479579 60479563 -
gatctgtgggccggtgacag

SEQ ID NO: 181782 - DNA, 20 bp, Artificial Sequence
  Synthetic oligonucleotide; GGG chr2 60479559 60479578 60479562 -
atctgtgggccggtgacaga

SEQ ID NO: 181783 - DNA, 20 bp, Artificial Sequence
  Synthetic oligonucleotide; GGG chr2 60479558 60479577 60479561 -
tctgtgggccggtgacagag

SEQ ID NO: 181784 - DNA, 20 bp, Artificial Sequence
  Synthetic oligonucleotide; GGG chr2 60479557 60479576 60479560 -
ctgtgggccggtgacagagg

SEQ ID NO: 181785 - DNA, 20 bp, Artificial Sequence
  Synthetic oligonucleotide; CAG chr2 60479545 60479564 60479548 -
gacagagggggctttctacc

SEQ ID NO: 181786 - DNA, 20 bp, Artificial Sequence
  Synthetic oligonucleotide; CAG chr2 60479542 60479561 60479545 -
agagggggctttctacccag

SEQ ID NO: 181787 - DNA, 20 bp, Artificial Sequence
  Synthetic oligonucleotide; TAG chr2 60479539 60479558 60479542 -
gggggctttctacccagcag

SEQ ID NO: 181788 - DNA, 20 bp, Artificial Sequence
  Synthetic oligonucleotide; AAG chr2 60479536 60479555 60479539 -
ggctttctacccagcagtag

SEQ ID NO: 181789 - DNA, 20 bp, Artificial Sequence
  Synthetic oligonucleotide; AGG chr2 60479535 60479554 60479538 -
gctttctacccagcagtaga

SEQ ID NO: 181790 - DNA, 20 bp, Artificial Sequence
  Synthetic oligonucleotide; GAG chr2 60479530 60479549 60479533 -
ctacccagcagtagaaggtt

SEQ ID NO: 181791 - DNA, 20 bp, Artificial Sequence
  Synthetic oligonucleotide; AGG chr2 60479529 60479548 60479532 -
tacccagcagtagaaggttg

SEQ ID NO: 181792 - DNA, 20 bp, Artificial Sequence
  Synthetic oligonucleotide; TGG chr2 60479523 60479542 60479526 -
gcagtagaaggttgaggccc

SEQ ID NO: 181793 - DNA, 20 bp, Artificial Sequence
  Synthetic oligonucleotide; AAG chr2 60479520 60479539 60479523 -
gtagaaggttgaggccctgg

SEQ ID NO: 181794 - DNA, 20 bp, Artificial Sequence
  Synthetic oligonucleotide; AAG chr2 60479514 60479533 60479517 -
ggttgaggccctggaagcaa

SEQ ID NO: 181795 - DNA, 20 bp, Artificial Sequence
  Synthetic oligonucleotide; AGG chr2 60479513 60479532 60479516 -
gttgaggccctggaagcaaa

SEQ ID NO: 181796 - DNA, 20 bp, Artificial Sequence
  Synthetic oligonucleotide; CAG chr2 60479506 60479525 60479509 -
ccctggaagcaaaaggattt

SEQ ID NO: 181797 - DNA, 20 bp, Artificial Sequence
  Synthetic oligonucleotide; GAG chr2 60479500 60479519 60479503 -
aagcaaaaggatttcagcct

SEQ ID NO: 181798 - DNA, 20 bp, Artificial Sequence
  Synthetic oligonucleotide; AGG chr2 60479499 60479518 60479502 -
agcaaaaggatttcagcctg

SEQ ID NO: 181799 - DNA, 20 bp, Artificial Sequence
  Synthetic oligonucleotide; GGG chr2 60479498 60479517 60479501 -
gcaaaaggatttcagcctga

SEQ ID NO: 181800 - DNA, 20 bp, Artificial Sequence
  Synthetic oligonucleotide; GGG chr2 60479497 60479516 60479500 -
caaaaggatttcagcctgag

SEQ ID NO: 181801 - DNA, 20 bp, Artificial Sequence
  Synthetic oligonucleotide; AAG chr2 60479488 60479507 60479491 -
ttcagcctgaggggcttgtt

SEQ ID NO: 181802 - DNA, 20 bp, Artificial Sequence
  Synthetic oligonucleotide; AGG chr2 60479487 60479506 60479490 -
tcagcctgaggggcttgtta

SEQ ID NO: 181803 - DNA, 20 bp, Artificial Sequence
  Synthetic oligonucleotide; GGG chr2 60479486 60479505 60479489 -
cagcctgaggggcttgttaa

SEQ ID NO: 181804 - DNA, 20 bp, Artificial Sequence
  Synthetic oligonucleotide; GAG chr2 60479484 60479503 60479487 -
gcctgaggggcttgttaagg

SEQ ID NO: 181805 - DNA, 20 bp, Artificial Sequence
  Synthetic oligonucleotide; GAG chr2 60479482 60479501 60479485 -
ctgaggggcttgttaaggga

SEQ ID NO: 181806 - DNA, 20 bp, Artificial Sequence
  Synthetic oligonucleotide; TAG chr2 60479462 60479481 60479465 -
gagttattctttcctgttcc

SEQ ID NO: 181807 - DNA, 20 bp, Artificial Sequence
  Synthetic oligonucleotide; TAG chr2 60479459 60479478 60479462 -
ttattctttcctgttcctag

SEQ ID NO: 181808 - DNA, 20 bp, Artificial Sequence
  Synthetic oligonucleotide; GAG chr2 60479452 60479471 60479455 -
ttcctgttcctagtagacct

SEQ ID NO: 181809 - DNA, 20 bp, Artificial Sequence
  Synthetic oligonucleotide; GAG chr2 60479450 60479469 60479453 -
cctgttcctagtagacctga

SEQ ID NO: 181810 - DNA, 20 bp, Artificial Sequence
  Synthetic oligonucleotide; GAG chr2 60479448 60479467 60479451 -
tgttcctagtagacctgaga

SEQ ID NO: 181811 - DNA, 20 bp, Artificial Sequence
  Synthetic oligonucleotide; TGG chr2 60479437 60479456 60479440 -
gacctgagagagcttgacgt

SEQ ID NO: 181812 - DNA, 20 bp, Artificial Sequence
  Synthetic oligonucleotide; TGG chr2 60479434 60479453 60479437 -
ctgagagagcttgacgttgg

SEQ ID NO: 181813 - DNA, 20 bp, Artificial Sequence
  Synthetic oligonucleotide; TGG chr2 60479427 60479446 60479430 -
agcttgacgttggtggcctc

SEQ ID NO: 181814 - DNA, 20 bp, Artificial Sequence
  Synthetic oligonucleotide; CAG chr2 60479423 60479442 60479426 -
tgacgttggtggcctctggt

SEQ ID NO: 181815 - DNA, 20 bp, Artificial Sequence
  Synthetic oligonucleotide; TGG chr2 60479415 60479434 60479418 -
gtggcctctggtcagcctca

SEQ ID NO: 181816 - DNA, 20 bp, Artificial Sequence
  Synthetic oligonucleotide; TGG chr2 60479411 60479430 60479414 -
cctctggtcagcctcatggt

SEQ ID NO: 181817 - DNA, 20 bp, Artificial Sequence
  Synthetic oligonucleotide; GGG chr2 60479410 60479429 60479413 -
ctctggtcagcctcatggtt

SEQ ID NO: 181818 - DNA, 20 bp, Artificial Sequence
  Synthetic oligonucleotide; TGG chr2 60479401 60479420 60479404 -
gcctcatggttgggactgcg

SEQ ID NO: 181819 - DNA, 20 bp, Artificial Sequence
  Synthetic oligonucleotide; TAG chr2 60479392 60479411 60479395 -
ttgggactgcgtggaaatgc

SEQ ID NO: 181820 - DNA, 20 bp, Artificial Sequence
  Synthetic oligonucleotide; GAG chr2 60479385 60479404 60479388 -
tgcgtggaaatgctagacct

SEQ ID NO: 181821 - DNA, 20 bp, Artificial Sequence
  Synthetic oligonucleotide; GAG chr2 60479383 60479402 60479386 -
cgtggaaatgctagacctga

SEQ ID NO: 181822 - DNA, 20 bp, Artificial Sequence
  Synthetic oligonucleotide; AAG chr2 60479368 60479387 60479371 -
cctgagagacctcatttccc

SEQ ID NO: 181823 - DNA, 20 bp, Artificial Sequence
  Synthetic oligonucleotide; CAG chr2 60479365 60479384 60479368 -
gagagacctcatttcccaag

SEQ ID NO: 181824 - DNA, 20 bp, Artificial Sequence
  Synthetic oligonucleotide; TAG chr2 60479359 60479378 60479362 -
cctcatttcccaagcagtct

SEQ ID NO: 181825 - DNA, 20 bp, Artificial Sequence
  Synthetic oligonucleotide; GAG chr2 60479357 60479376 60479360 -
tcatttcccaagcagtctta

SEQ ID NO: 181826 - DNA, 20 bp, Artificial Sequence
  Synthetic oligonucleotide; GAG chr2 60479355 60479374 60479358 -
atttcccaagcagtcttaga

SEQ ID NO: 181827 - DNA, 20 bp, Artificial Sequence
  Synthetic oligonucleotide; TGG chr2 60479337 60479356 60479340 -
gagagactcaaaacaaaaaa

SEQ ID NO: 181828 - DNA, 20 bp, Artificial Sequence
  Synthetic oligonucleotide; CGG chr2 60479330 60479349 60479333 -
tcaaaacaaaaaatggtctc

SEQ ID NO: 181829 - DNA, 20 bp, Artificial Sequence
  Synthetic oligonucleotide; GGG chr2 60479329 60479348 60479332 -
caaaacaaaaaatggtctcc

SEQ ID NO: 181830 - DNA, 20 bp, Artificial Sequence
  Synthetic oligonucleotide; TGG chr2 60479318 60479337 60479321 -
atggtctccgggtcccaccg

SEQ ID NO: 181831 - DNA, 20 bp, Artificial Sequence
  Synthetic oligonucleotide; TGG chr2 60479311 60479330 60479314 -
ccgggtcccaccgtggtgtg

SEQ ID NO: 181832 - DNA, 20 bp, Artificial Sequence
  Synthetic oligonucleotide; CAG chr2 60479296 60479315 60479299 -
gtgtgtggccgctgtgcccg

SEQ ID NO: 181833 - DNA, 20 bp, Artificial Sequence
  Synthetic oligonucleotide; GAG chr2 60479294 60479313 60479297 -
gtgtggccgctgtgcccgca

SEQ ID NO: 181834 - DNA, 20 bp, Artificial Sequence
  Synthetic oligonucleotide; AGG chr2 60479293 60479312 60479296 -
tgtggccgctgtgcccgcag

SEQ ID NO: 181835 - DNA, 20 bp, Artificial Sequence
  Synthetic oligonucleotide; CAG chr2 60479289 60479308 60479292 -
gccgctgtgcccgcagaggc

SEQ ID NO: 181836 - DNA, 20 bp, Artificial Sequence
  Synthetic oligonucleotide; AGG chr2 60479288 60479307 60479291 -
ccgctgtgcccgcagaggcc

SEQ ID NO: 181837 - DNA, 20 bp, Artificial Sequence
  Synthetic oligonucleotide; TAG chr2 60479279 60479298 60479282 -
ccgcagaggccaggtgtcca

SEQ ID NO: 181838 - DNA, 20 bp, Artificial Sequence
  Synthetic oligonucleotide; AGG chr2 60479278 60479297 60479281 -
cgcagaggccaggtgtccat

SEQ ID NO: 181839 - DNA, 20 bp, Artificial Sequence
  Synthetic oligonucleotide; GAG chr2 60479273 60479292 60479276 -
aggccaggtgtccataggct

SEQ ID NO: 181840 - DNA, 20 bp, Artificial Sequence
  Synthetic oligonucleotide; TGG chr2 60479262 60479281 60479265 -
ccataggctgagtccccacg

SEQ ID NO: 181841 - DNA, 20 bp, Artificial Sequence
  Synthetic oligonucleotide; TAG chr2 60479253 60479272 60479256 -
gagtccccacgtggacctgc

SEQ ID NO: 181842 - DNA, 20 bp, Artificial Sequence
  Synthetic oligonucleotide; AGG chr2 60479252 60479271 60479255 -
agtccccacgtggacctgct

SEQ ID NO: 181843 - DNA, 20 bp, Artificial Sequence
  Synthetic oligonucleotide; TGG chr2 60479249 60479268 60479252 -
ccccacgtggacctgctagg

SEQ ID NO: 181844 - DNA, 20 bp, Artificial Sequence
  Synthetic oligonucleotide; GGG chr2 60479248 60479267 60479251 -
cccacgtggacctgctaggt

SEQ ID NO: 181845 - DNA, 20 bp, Artificial Sequence
  Synthetic oligonucleotide; TAG chr2 60479245 60479264 60479248 -
acgtggacctgctaggtggg

SEQ ID NO: 181846 - DNA, 20 bp, Artificial Sequence
  Synthetic oligonucleotide; AAG chr2 60479241 60479260 60479244 -
ggacctgctaggtgggtaga

SEQ ID NO: 181847 - DNA, 20 bp, Artificial Sequence
  Synthetic oligonucleotide; AGG chr2 60479240 60479259 60479243 -
gacctgctaggtgggtagaa

SEQ ID NO: 181848 - DNA, 20 bp, Artificial Sequence
  Synthetic oligonucleotide; GAG chr2 60479238 60479257 60479241 -
cctgctaggtgggtagaaag

SEQ ID NO: 181849 - DNA, 20 bp, Artificial Sequence
  Synthetic oligonucleotide; AAG chr2 60479232 60479251 60479235 -
aggtgggtagaaaggagttg

SEQ ID NO: 181850 - DNA, 20 bp, Artificial Sequence
  Synthetic oligonucleotide; TGG chr2 60479217 60479236 60479220 -
agttgaagatgttgtgctgt

SEQ ID NO: 181851 - DNA, 20 bp, Artificial Sequence
  Synthetic oligonucleotide; TGG chr2 60479213 60479232 60479216 -
gaagatgttgtgctgttggt

SEQ ID NO: 181852 - DNA, 20 bp, Artificial Sequence
  Synthetic oligonucleotide; GAG chr2 60479211 60479230 60479214 -
agatgttgtgctgttggttg

SEQ ID NO: 181853 - DNA, 20 bp, Artificial Sequence
  Synthetic oligonucleotide; AGG chr2 60479210 60479229 60479213 -
gatgttgtgctgttggttgg

SEQ ID NO: 181854 - DNA, 20 bp, Artificial Sequence
  Synthetic oligonucleotide; GAG chr2 60479208 60479227 60479211 -
tgttgtgctgttggttggag

SEQ ID NO: 181855 - DNA, 20 bp, Artificial Sequence
  Synthetic oligonucleotide; TGG chr2 60479203 60479222 60479206 -
tgctgttggttggaggagct

SEQ ID NO: 181856 - DNA, 20 bp, Artificial Sequence
  Synthetic oligonucleotide; GAG chr2 60479201 60479220 60479204 -
ctgttggttggaggagcttg

SEQ ID NO: 181857 - DNA, 20 bp, Artificial Sequence
  Synthetic oligonucleotide; AGG chr2 60479200 60479219 60479203 -
tgttggttggaggagcttgg

SEQ ID NO: 181858 - DNA, 20 bp, Artificial Sequence
  Synthetic oligonucleotide; TGG chr2 60479193 60479212 60479196 -
tggaggagcttggaggtgtc

SEQ ID NO: 181859 - DNA, 20 bp, Artificial Sequence
  Synthetic oligonucleotide; GGG chr2 60479192 60479211 60479195 -
ggaggagcttggaggtgtct

SEQ ID NO: 181860 - DNA, 20 bp, Artificial Sequence
  Synthetic oligonucleotide; TGG chr2 60479184 60479203 60479187 -
ttggaggtgtctgggaacat

SEQ ID NO: 181861 - DNA, 20 bp, Artificial Sequence
  Synthetic oligonucleotide; TGG chr2 60479169 60479188 60479172 -
aacattggatgttactcata

SEQ ID NO: 181862 - DNA, 20 bp, Artificial Sequence
  Synthetic oligonucleotide; CAG chr2 60479163 60479182 60479166 -
ggatgttactcatatggaat

SEQ ID NO: 181863 - DNA, 20 bp, Artificial Sequence
  Synthetic oligonucleotide; CAG chr2 60479160 60479179 60479163 -
tgttactcatatggaatcag

SEQ ID NO: 181864 - DNA, 20 bp, Artificial Sequence
  Synthetic oligonucleotide; TAG chr2 60479154 60479173 60479157 -
tcatatggaatcagcagaat

SEQ ID NO: 181865 - DNA, 20 bp, Artificial Sequence
  Synthetic oligonucleotide; TAG chr2 60479151 60479170 60479154 -
tatggaatcagcagaattag

SEQ ID NO: 181866 - DNA, 20 bp, Artificial Sequence
  Synthetic oligonucleotide; GAG chr2 60479149 60479168 60479152 -
tggaatcagcagaattagta

SEQ ID NO: 181867 - DNA, 20 bp, Artificial Sequence
  Synthetic oligonucleotide; AAG chr2 60479144 60479163 60479147 -
tcagcagaattagtagagcc

SEQ ID NO: 181868 - DNA, 20 bp, Artificial Sequence
  Synthetic oligonucleotide; CAG chr2 60479139 60479158 60479142 -
agaattagtagagccaagaa

SEQ ID NO: 181869 - DNA, 20 bp, Artificial Sequence
  Synthetic oligonucleotide; CGG chr2 60479135 60479154 60479138 -
ttagtagagccaagaacaga

SEQ ID NO: 181870 - DNA, 20 bp, Artificial Sequence
  Synthetic oligonucleotide; CAG chr2 60479132 60479151 60479135 -
gtagagccaagaacagacgg

SEQ ID NO: 181871 - DNA, 20 bp, Artificial Sequence
  Synthetic oligonucleotide; TGG chr2 60479117 60479136 60479120 -
gacggcagtgccacacccca

SEQ ID NO: 181872 - DNA, 20 bp, Artificial Sequence
  Synthetic oligonucleotide; TGG chr2 60479113 60479132 60479116 -
gcagtgccacaccccatggc

SEQ ID NO: 181873 - DNA, 20 bp, Artificial Sequence
  Synthetic oligonucleotide; GAG chr2 60479107 60479126 60479110 -
ccacaccccatggctggact

SEQ ID NO: 181874 - DNA, 20 bp, Artificial Sequence
  Synthetic oligonucleotide; AGG chr2 60479106 60479125 60479109 -
cacaccccatggctggactg

SEQ ID NO: 181875 - DNA, 20 bp, Artificial Sequence
  Synthetic oligonucleotide; TGG chr2 60479091 60479110 60479094 -
gactgaggctgctccaatga

SEQ ID NO: 181876 - DNA, 20 bp, Artificial Sequence
  Synthetic oligonucleotide; CAG chr2 60479088 60479107 60479091 -
tgaggctgctccaatgatgg

SEQ ID NO: 181877 - DNA, 20 bp, Artificial Sequence
  Synthetic oligonucleotide; AGG chr2 60479087 60479106 60479090 -
gaggctgctccaatgatggc

SEQ ID NO: 181878 - DNA, 20 bp, Artificial Sequence
  Synthetic oligonucleotide; CGG chr2 60479075 60479094 60479078 -
atgatggcaggttgtatctg

SEQ ID NO: 181879 - DNA, 20 bp, Artificial Sequence
  Synthetic oligonucleotide; GGG chr2 60479074 60479093 60479077 -
tgatggcaggttgtatctgc

SEQ ID NO: 181880 - DNA, 20 bp, Artificial Sequence
  Synthetic oligonucleotide; CAG chr2 60479056 60479075 60479059 -
gcgggcatctccaatttgct

SEQ ID NO: 181881 - DNA, 20 bp, Artificial Sequence
  Synthetic oligonucleotide; AGG chr2 60479055 60479074 60479058 -
cgggcatctccaatttgctc

SEQ ID NO: 181882 - DNA, 20 bp, Artificial Sequence
  Synthetic oligonucleotide; GGG chr2 60479054 60479073 60479057 -
gggcatctccaatttgctca

SEQ ID NO: 181883 - DNA, 20 bp, Artificial Sequence
  Synthetic oligonucleotide; CAG chr2 60479042 60479061 60479045 -
tttgctcagggaactctttc

SEQ ID NO: 181884 - DNA, 20 bp, Artificial Sequence
  Synthetic oligonucleotide; TGG chr2 60479037 60479056 60479040 -
tcagggaactctttccagat

SEQ ID NO: 181885 - DNA, 20 bp, Artificial Sequence
  Synthetic oligonucleotide; CAG chr2 60479033 60479052 60479036 -
ggaactctttccagattggt

SEQ ID NO: 181886 - DNA, 20 bp, Artificial Sequence
  Synthetic oligonucleotide; TGG chr2 60479030 60479049 60479033 -
actctttccagattggtcag

SEQ ID NO: 181887 - DNA, 20 bp, Artificial Sequence
  Synthetic oligonucleotide; AAG chr2 60479019 60479038 60479022 -
attggtcagtggtataaatg

SEQ ID NO: 181888 - DNA, 20 bp, Artificial Sequence
  Synthetic oligonucleotide; AGG chr2 60479018 60479037 60479021 -
ttggtcagtggtataaatga

SEQ ID NO: 181889 - DNA, 20 bp, Artificial Sequence
  Synthetic oligonucleotide; TAG chr2 60479013 60479032 60479016 -
cagtggtataaatgaaggat

SEQ ID NO: 181890 - DNA, 20 bp, Artificial Sequence
  Synthetic oligonucleotide; AGG chr2 60479012 60479031 60479015 -
agtggtataaatgaaggatt

SEQ ID NO: 181891 - DNA, 20 bp, Artificial Sequence
  Synthetic oligonucleotide; TGG chr2 60479005 60479024 60479008 -
taaatgaaggattaggaaat

SEQ ID NO: 181892 - DNA, 20 bp, Artificial Sequence
  Synthetic oligonucleotide; GGG chr2 60479004 60479023 60479007 -
aaatgaaggattaggaaatt

SEQ ID NO: 181893 - DNA, 20 bp, Artificial Sequence
  Synthetic oligonucleotide; AAG chr2 60478997 60479016 60479000 -
ggattaggaaattgggtaaa

SEQ ID NO: 181894 - DNA, 20 bp, Artificial Sequence
  Synthetic oligonucleotide; CAG chr2 60478993 60479012 60478996 -
taggaaattgggtaaaaagc

SEQ ID NO: 181895 - DNA, 20 bp, Artificial Sequence
  Synthetic oligonucleotide; AGG chr2 60478992 60479011 60478995 -
aggaaattgggtaaaaagcc

SEQ ID NO: 181896 - DNA, 20 bp, Artificial Sequence
  Synthetic oligonucleotide; GGG chr2 60478991 60479010 60478994 -
ggaaattgggtaaaaagcca

SEQ ID NO: 181897 - DNA, 20 bp, Artificial Sequence
  Synthetic oligonucleotide; GAG chr2 60478989 60479008 60478992 -
aaattgggtaaaaagccagg

SEQ ID NO: 181898 - DNA, 20 bp, Artificial Sequence
  Synthetic oligonucleotide; AGG chr2 60478988 60479007 60478991 -
aattgggtaaaaagccaggg

SEQ ID NO: 181899 - DNA, 20 bp, Artificial Sequence
  Synthetic oligonucleotide; GAG chr2 60478986 60479005 60478989 -
ttgggtaaaaagccagggag

SEQ ID NO: 181900 - DNA, 20 bp, Artificial Sequence
  Synthetic oligonucleotide; AGG chr2 60478985 60479004 60478988 -
tgggtaaaaagccagggagg

SEQ ID NO: 181901 - DNA, 20 bp, Artificial Sequence
  Synthetic oligonucleotide; GGG chr2 60478984 60479003 60478987 -
gggtaaaaagccagggagga

SEQ ID NO: 181902 - DNA, 20 bp, Artificial Sequence
  Synthetic oligonucleotide; AAG chr2 60478960 60478979 60478963 -
aaaaaaaaaaacaaaaaaca

SEQ ID NO: 181903 - DNA, 20 bp, Artificial Sequence
  Synthetic oligonucleotide; AAG chr2 60478950 60478969 60478953 -
acaaaaaacaaagcacgtca

SEQ ID NO: 181904 - DNA, 20 bp, Artificial Sequence
  Synthetic oligonucleotide; AAG chr2 60478945 60478964 60478948 -
aaacaaagcacgtcaaagcc

SEQ ID NO: 181905 - DNA, 20 bp, Artificial Sequence
  Synthetic oligonucleotide; AGG chr2 60478944 60478963 60478947 -
aacaaagcacgtcaaagcca

SEQ ID NO: 181906 - DNA, 20 bp, Artificial Sequence
  Synthetic oligonucleotide; TGG chr2 60478925 60478944 60478928 -
aaggcctgtgttttgttctg

SEQ ID NO: 181907 - DNA, 20 bp, Artificial Sequence
  Synthetic oligonucleotide; GGG chr2 60478924 60478943 60478927 -
aggcctgtgttttgttctgt

SEQ ID NO: 181908 - DNA, 20 bp, Artificial Sequence
  Synthetic oligonucleotide; CAG chr2 60478914 60478933 60478917 -
tttgttctgtgggactttgc

SEQ ID NO: 181909 - DNA, 20 bp, Artificial Sequence
  Synthetic oligonucleotide; GAG chr2 60478912 60478931 60478915 -
tgttctgtgggactttgcca

SEQ ID NO: 181910 - DNA, 20 bp, Artificial Sequence
  Synthetic oligonucleotide; GAG chr2 60478910 60478929 60478913 -
ttctgtgggactttgccaga

SEQ ID NO: 181911 - DNA, 20 bp, Artificial Sequence
  Synthetic oligonucleotide; GAG chr2 60478905 60478924 60478908 -
tgggactttgccagagagat

SEQ ID NO: 181912 - DNA, 20 bp, Artificial Sequence
  Synthetic oligonucleotide; AGG chr2 60478904 60478923 60478907 -
gggactttgccagagagatg

SEQ ID NO: 181913 - DNA, 20 bp, Artificial Sequence
  Synthetic oligonucleotide; GAG chr2 60478898 60478917 60478901 -
ttgccagagagatgaggact

SEQ ID NO: 181914 - DNA, 20 bp, Artificial Sequence
  Synthetic oligonucleotide; AGG chr2 60478897 60478916 60478900 -
tgccagagagatgaggactg

SEQ ID NO: 181915 - DNA, 20 bp, Artificial Sequence
  Synthetic oligonucleotide; TGG chr2 60478893 60478912 60478896 -
agagagatgaggactgaggc

SEQ ID NO: 181916 - DNA, 20 bp, Artificial Sequence
  Synthetic oligonucleotide; GGG chr2 60478892 60478911 60478895 -
gagagatgaggactgaggct

SEQ ID NO: 181917 - DNA, 20 bp, Artificial Sequence
  Synthetic oligonucleotide; TGG chr2 60478877 60478896 60478880 -
aggctgggctgctgtgtgcc

SEQ ID NO: 181918 - DNA, 20 bp, Artificial Sequence
  Synthetic oligonucleotide; GGG chr2 60478876 60478895 60478879 -
ggctgggctgctgtgtgcct

SEQ ID NO: 181919 - DNA, 20 bp, Artificial Sequence
  Synthetic oligonucleotide; GAG chr2 60478874 60478893 60478877 -
ctgggctgctgtgtgcctgg

SEQ ID NO: 181920 - DNA, 20 bp, Artificial Sequence
  Synthetic oligonucleotide; AGG chr2 60478873 60478892 60478876 -
tgggctgctgtgtgcctggg

SEQ ID NO: 181921 - DNA, 20 bp, Artificial Sequence
  Synthetic oligonucleotide; CGG chr2 60478870 60478889 60478873 -
gctgctgtgtgcctgggagg

SEQ ID NO: 181922 - DNA, 20 bp, Artificial Sequence
  Synthetic oligonucleotide; GGG chr2 60478869 60478888 60478872 -
ctgctgtgtgcctgggaggc

SEQ ID NO: 181923 - DNA, 20 bp, Artificial Sequence
  Synthetic oligonucleotide; AAG chr2 60478866 60478885 60478869 -
ctgtgtgcctgggaggcggg

SEQ ID NO: 181924 - DNA, 20 bp, Artificial Sequence
  Synthetic oligonucleotide; AGG chr2 60478865 60478884 60478868 -
tgtgtgcctgggaggcggga

SEQ ID NO: 181925 - DNA, 20 bp, Artificial Sequence
  Synthetic oligonucleotide; GAG chr2 60478858 60478877 60478861 -
ctgggaggcgggaaggtgct

SEQ ID NO: 181926 - DNA, 20 bp, Artificial Sequence
  Synthetic oligonucleotide; AGG chr2 60478857 60478876 60478860 -
tgggaggcgggaaggtgctg

SEQ ID NO: 181927 - DNA, 20 bp, Artificial Sequence
  Synthetic oligonucleotide; CAG chr2 60478849 60478868 60478852 -
gggaaggtgctgaggcactg

SEQ ID NO: 181928 - DNA, 20 bp, Artificial Sequence
  Synthetic oligonucleotide; GAG chr2 60478847 60478866 60478850 -
gaaggtgctgaggcactgca

SEQ ID NO: 181929 - DNA, 20 bp, Artificial Sequence
  Synthetic oligonucleotide; AAG chr2 60478844 60478863 60478847 -
ggtgctgaggcactgcagag

SEQ ID NO: 181930 - DNA, 20 bp, Artificial Sequence
  Synthetic oligonucleotide; CAG chr2 60478841 60478860 60478844 -
gctgaggcactgcagagaag

SEQ ID NO: 181931 - DNA, 20 bp, Artificial Sequence
  Synthetic oligonucleotide; CAG chr2 60478835 60478854 60478838 -
gcactgcagagaagcagctg

SEQ ID NO: 181932 - DNA, 20 bp, Artificial Sequence
  Synthetic oligonucleotide; CGG chr2 60478825 60478844 60478828 -
gaagcagctgcagcatgccc

SEQ ID NO: 181933 - DNA, 20 bp, Artificial Sequence
  Synthetic oligonucleotide; GGG chr2 60478824 60478843 60478827 -
aagcagctgcagcatgcccc

SEQ ID NO: 181934 - DNA, 20 bp, Artificial Sequence
  Synthetic oligonucleotide; CAG chr2 60478821 60478840 60478824 -
cagctgcagcatgccccggg

SEQ ID NO: 181935 - DNA, 20 bp, Artificial Sequence
  Synthetic oligonucleotide; GAG chr2 60478819 60478838 60478822 -
gctgcagcatgccccgggca

SEQ ID NO: 181936 - DNA, 20 bp, Artificial Sequence
  Synthetic oligonucleotide; AGG chr2 60478818 60478837 60478821 -
ctgcagcatgccccgggcag

SEQ ID NO: 181937 - DNA, 20 bp, Artificial Sequence
  Synthetic oligonucleotide; AAG chr2 60478803 60478822 60478806 -
ggcagaggcctgttttctga

SEQ ID NO: 181938 - DNA, 20 bp, Artificial Sequence
  Synthetic oligonucleotide; AAG chr2 60478800 60478819 60478803 -
agaggcctgttttctgaaag

SEQ ID NO: 181939 - DNA, 20 bp, Artificial Sequence
  Synthetic oligonucleotide; AGG chr2 60478799 60478818 60478802 -
gaggcctgttttctgaaaga

SEQ ID NO: 181940 - DNA, 20 bp, Artificial Sequence
  Synthetic oligonucleotide; TGG chr2 60478785 60478804 60478788 -
gaaagaaggacttgccgtca

SEQ ID NO: 181941 - DNA, 20 bp, Artificial Sequence
  Synthetic oligonucleotide; GGG chr2 60478784 60478803 60478787 -
aaagaaggacttgccgtcat

SEQ ID NO: 181942 - DNA, 20 bp, Artificial Sequence
  Synthetic oligonucleotide; GAG chr2 60478782 60478801 60478785 -
agaaggacttgccgtcatgg

SEQ ID NO: 181943 - DNA, 20 bp, Artificial Sequence
  Synthetic oligonucleotide; AGG chr2 60478781 60478800 60478784 -
gaaggacttgccgtcatggg

SEQ ID NO: 181944 - DNA, 20 bp, Artificial Sequence
  Synthetic oligonucleotide; GAG chr2 60478779 60478798 60478782 -
aggacttgccgtcatgggag

SEQ ID NO: 181945 - DNA, 20 bp, Artificial Sequence
  Synthetic oligonucleotide; AGG chr2 60478778 60478797 60478781 -
ggacttgccgtcatgggagg

SEQ ID NO: 181946 - DNA, 20 bp, Artificial Sequence
  Synthetic oligonucleotide; TGG chr2 60478773 60478792 60478776 -
tgccgtcatgggaggaggcc

SEQ ID NO: 181947 - DNA, 20 bp, Artificial Sequence
  Synthetic oligonucleotide; CAG chr2 60478765 60478784 60478768 -
tgggaggaggcctggcctcg

SEQ ID NO: 181948 - DNA, 20 bp, Artificial Sequence
  Synthetic oligonucleotide; CAG chr2 60478759 60478778 60478762 -
gaggcctggcctcgcagcac

SEQ ID NO: 181949 - DNA, 20 bp, Artificial Sequence
  Synthetic oligonucleotide; GAG chr2 60478757 60478776 60478760 -
ggcctggcctcgcagcacca

SEQ ID NO: 181950 - DNA, 20 bp, Artificial Sequence
  Synthetic oligonucleotide; CAG chr2 60478742 60478761 60478745 -
caccagagcgctccttcatt

SEQ ID NO: 181951 - DNA, 20 bp, Artificial Sequence
  Synthetic oligonucleotide; CAG chr2 60478731 60478750 60478734 -
tccttcattcagcctcacct

SEQ ID NO: 181952 - DNA, 20 bp, Artificial Sequence
  Synthetic oligonucleotide; AGG chr2 60478730 60478749 60478733 -
ccttcattcagcctcacctc

SEQ ID NO: 181953 - DNA, 20 bp, Artificial Sequence
  Synthetic oligonucleotide; GAG chr2 60478726 60478745 60478729 -
cattcagcctcacctcaggc

SEQ ID NO: 181954 - DNA, 20 bp, Artificial Sequence
  Synthetic oligonucleotide; GAG chr2 60478724 60478743 60478727 -
ttcagcctcacctcaggcga

SEQ ID NO: 181955 - DNA, 20 bp, Artificial Sequence
  Synthetic oligonucleotide; AGG chr2 60478723 60478742 60478726 -
tcagcctcacctcaggcgag

SEQ ID NO: 181956 - DNA, 20 bp, Artificial Sequence
  Synthetic oligonucleotide; GGG chr2 60478722 60478741 60478725 -
cagcctcacctcaggcgaga

SEQ ID NO: 181957 - DNA, 20 bp, Artificial Sequence
  Synthetic oligonucleotide; CAG chr2 60478719 60478738 60478722 -
cctcacctcaggcgagaggg

SEQ ID NO: 181958 - DNA, 20 bp, Artificial Sequence
  Synthetic oligonucleotide; TAG chr2 60478714 60478733 60478717 -
cctcaggcgagagggcagcc

SEQ ID NO: 181959 - DNA, 20 bp, Artificial Sequence
  Synthetic oligonucleotide; AAG chr2 60478700 60478719 60478703 -
gcagcctagttttattcctg

SEQ ID NO: 181960 - DNA, 20 bp, Artificial Sequence
  Synthetic oligonucleotide; TAG chr2 60478691 60478710 60478694 -
ttttattcctgaagaaatgt

SEQ ID NO: 181961 - DNA, 20 bp, Artificial Sequence
  Synthetic oligonucleotide; GAG chr2 60478689 60478708 60478692 -
ttattcctgaagaaatgtta

SEQ ID NO: 181962 - DNA, 20 bp, Artificial Sequence
  Synthetic oligonucleotide; TAG chr2 60478676 60478695 60478679 -
aatgttagagcctgacctgc

SEQ ID NO: 181963 - DNA, 20 bp, Artificial Sequence
  Synthetic oligonucleotide; TGG chr2 60478662 60478681 60478665 -
acctgctagaccattttttt

SEQ ID NO: 181964 - DNA, 20 bp, Artificial Sequence
  Synthetic oligonucleotide; TAG chr2 60478659 60478678 60478662 -
tgctagaccattttttttgg

SEQ ID NO: 181965 - DNA, 20 bp, Artificial Sequence
  Synthetic oligonucleotide; GAG chr2 60478657 60478676 60478660 -
ctagaccattttttttggta

SEQ ID NO: 181966 - DNA, 20 bp, Artificial Sequence
  Synthetic oligonucleotide; AAG chr2 60478649 60478668 60478652 -
ttttttttggtagagctttg

SEQ ID NO: 181967 - DNA, 20 bp, Artificial Sequence
  Synthetic oligonucleotide; TAG chr2 60478638 60478657 60478641 -
agagctttgaagccttaaat

SEQ ID NO: 181968 - DNA, 20 bp, Artificial Sequence
  Synthetic oligonucleotide; GAG chr2 60478621 60478640 60478624 -
aattagttctcataatttct

SEQ ID NO: 181969 - DNA, 20 bp, Artificial Sequence
  Synthetic oligonucleotide; CAG chr2 60478618 60478637 60478621 -
tagttctcataatttctgag

SEQ ID NO: 181970 - DNA, 20 bp, Artificial Sequence
  Synthetic oligonucleotide; TAG chr2 60478601 60478620 60478604 -
gagcagctctgtgttaacca

SEQ ID NO: 181971 - DNA, 20 bp, Artificial Sequence
  Synthetic oligonucleotide; AGG chr2 60478600 60478619 60478603 -
agcagctctgtgttaaccat

SEQ ID NO: 181972 - DNA, 20 bp, Artificial Sequence
  Synthetic oligonucleotide; TAG chr2 60478591 60478610 60478594 -
gtgttaaccataggacataa

SEQ ID NO: 181973 - DNA, 20 bp, Artificial Sequence
  Synthetic oligonucleotide; AGG chr2 60478590 60478609 60478593 -
tgttaaccataggacataat

SEQ ID NO: 181974 - DNA, 20 bp, Artificial Sequence
  Synthetic oligonucleotide; TGG chr2 60478578 60478597 60478581 -
gacataataggttttaattc

SEQ ID NO: 181975 - DNA, 20 bp, Artificial Sequence
  Synthetic oligonucleotide; GAG chr2 60478576 60478595 60478579 -
cataataggttttaattctg

SEQ ID NO: 181976 - DNA, 20 bp, Artificial Sequence
  Synthetic oligonucleotide; TGG chr2 60478571 60478590 60478574 -
taggttttaattctggagaa

SEQ ID NO: 181977 - DNA, 20 bp, Artificial Sequence
  Synthetic oligonucleotide; CAG chr2 60478567 60478586 60478570 -
ttttaattctggagaatggc

SEQ ID NO: 181978 - DNA, 20 bp, Artificial Sequence
  Synthetic oligonucleotide; TGG chr2 60478561 60478580 60478564 -
ttctggagaatggccagttc

SEQ ID NO: 181979 - DNA, 20 bp, Artificial Sequence
  Synthetic oligonucleotide; CAG chr2 60478554 60478573 60478557 -
gaatggccagttctggttct

SEQ ID NO: 181980 - DNA, 20 bp, Artificial Sequence
  Synthetic oligonucleotide; TGG chr2 60478544 60478563 60478547 -
ttctggttctcagaatctct

SEQ ID NO: 181981 - DNA, 20 bp, Artificial Sequence
  Synthetic oligonucleotide; AAG chr2 60478539 60478558 60478542 -
gttctcagaatctcttggcc

SEQ ID NO: 181982 - DNA, 20 bp, Artificial Sequence
  Synthetic oligonucleotide; CAG chr2 60478529 60478548 60478532 -
tctcttggccaagactgtca

SEQ ID NO: 181983 - DNA, 20 bp, Artificial Sequence
  Synthetic oligonucleotide; GAG chr2 60478527 60478546 60478530 -
tcttggccaagactgtcaca

SEQ ID NO: 181984 - DNA, 20 bp, Artificial Sequence
  Synthetic oligonucleotide; TAG chr2 60478521 60478540 60478524 -
ccaagactgtcacagagtat

SEQ ID NO: 181985 - DNA, 20 bp, Artificial Sequence
  Synthetic oligonucleotide; AGG chr2 60478520 60478539 60478523 -
caagactgtcacagagtatt

SEQ ID NO: 181986 - DNA, 20 bp, Artificial Sequence
  Synthetic oligonucleotide; AAG chr2 60478511 60478530 60478514 -
cacagagtattaggcctgtg

SEQ ID NO: 181987 - DNA, 20 bp, Artificial Sequence
  Synthetic oligonucleotide; AAG chr2 60478488 60478507 60478491 -
tgccttccacgcttcccctg

SEQ ID NO: 181988 - DNA, 20 bp, Artificial Sequence
  Synthetic oligonucleotide; CAG chr2 60478476 60478495 60478479 -
ttcccctgaagtccacacac

SEQ ID NO: 181989 - DNA, 20 bp, Artificial Sequence
  Synthetic oligonucleotide; TAG chr2 60478465 60478484 60478468 -
tccacacaccagtcactcaa

SEQ ID NO: 181990 - DNA, 20 bp, Artificial Sequence
  Synthetic oligonucleotide; CAG chr2 60478459 60478478 60478462 -
caccagtcactcaatagtgc

SEQ ID NO: 181991 - DNA, 20 bp, Artificial Sequence
  Synthetic oligonucleotide; AAG chr2 60478455 60478474 60478458 -
agtcactcaatagtgccaga

SEQ ID NO: 181992 - DNA, 20 bp, Artificial Sequence
  Synthetic oligonucleotide; AGG chr2 60478454 60478473 60478457 -
gtcactcaatagtgccagaa

SEQ ID NO: 181993 - DNA, 20 bp, Artificial Sequence
  Synthetic oligonucleotide; AAG chr2 60478450 60478469 60478453 -
ctcaatagtgccagaaaggc

SEQ ID NO: 181994 - DNA, 20 bp, Artificial Sequence
  Synthetic oligonucleotide; GAG chr2 60478446 60478465 60478449 -
atagtgccagaaaggcaagt

SEQ ID NO: 181995 - DNA, 20 bp, Artificial Sequence
  Synthetic oligonucleotide; AGG chr2 60478445 60478464 60478448 -
tagtgccagaaaggcaagtg

SEQ ID NO: 181996 - DNA, 20 bp, Artificial Sequence
  Synthetic oligonucleotide; GAG chr2 60478443 60478462 60478446 -
gtgccagaaaggcaagtgag

SEQ ID NO: 181997 - DNA, 20 bp, Artificial Sequence
  Synthetic oligonucleotide; AAG chr2 60478431 60478450 60478434 -
caagtgaggagattgcctga

SEQ ID NO: 181998 - DNA, 20 bp, Artificial Sequence
  Synthetic oligonucleotide; AGG chr2 60478430 60478449 60478433 -
aagtgaggagattgcctgaa

SEQ ID NO: 181999 - DNA, 20 bp, Artificial Sequence
  Synthetic oligonucleotide; GGG chr2 60478429 60478448 60478432 -
agtgaggagattgcctgaaa

SEQ ID NO: 182000 - DNA, 20 bp, Artificial Sequence
  Synthetic oligonucleotide; GGG chr2 60478428 60478447 60478431 -
gtgaggagattgcctgaaag

SEQ ID NO: 182001 - DNA, 20 bp, Artificial Sequence
  Synthetic oligonucleotide; CAG chr2 60478416 60478435 60478419 -
cctgaaaggggctgtatgac

SEQ ID NO: 182002 - DNA, 20 bp, Artificial Sequence
  Synthetic oligonucleotide; CAG chr2 60478409 60478428 60478412 -
ggggctgtatgaccagtgtc

SEQ ID NO: 182003 - DNA, 20 bp, Artificial Sequence
  Synthetic oligonucleotide; CAG chr2 60478402 60478421 60478405 -
tatgaccagtgtccagacga

SEQ ID NO: 182004 - DNA, 20 bp, Artificial Sequence
  Synthetic oligonucleotide; AGG chr2 60478401 60478420 60478404 -
atgaccagtgtccagacgac

SEQ ID NO: 182005 - DNA, 20 bp, Artificial Sequence
  Synthetic oligonucleotide; CGG chr2 60478389 60478408 60478392 -
cagacgacaggtttctgccg

SEQ ID NO: 182006 - DNA, 20 bp, Artificial Sequence
  Synthetic oligonucleotide; GAG chr2 60478382 60478401 60478385 -
caggtttctgccgcggccct

SEQ ID NO: 182007 - DNA, 20 bp, Artificial Sequence
  Synthetic oligonucleotide; AGG chr2 60478381 60478400 60478384 -
aggtttctgccgcggccctg

SEQ ID NO: 182008 - DNA, 20 bp, Artificial Sequence
  Synthetic oligonucleotide; TGG chr2 60478378 60478397 60478381 -
tttctgccgcggccctgagg

SEQ ID NO: 182009 - DNA, 20 bp, Artificial Sequence
  Synthetic oligonucleotide; CAG chr2 60478375 60478394 60478378 -
ctgccgcggccctgaggtgg

SEQ ID NO: 182010 - DNA, 20 bp, Artificial Sequence
  Synthetic oligonucleotide; TGG chr2 60478372 60478391 60478375 -
ccgcggccctgaggtggcag

SEQ ID NO: 182011 - DNA, 20 bp, Artificial Sequence
  Synthetic oligonucleotide; GGG chr2 60478371 60478390 60478374 -
cgcggccctgaggtggcagt

SEQ ID NO: 182012 - DNA, 20 bp, Artificial Sequence
  Synthetic oligonucleotide; GAG chr2 60478369 60478388 60478372 -
cggccctgaggtggcagtgg

SEQ ID NO: 182013 - DNA, 20 bp, Artificial Sequence
  Synthetic oligonucleotide; AGG chr2 60478368 60478387 60478371 -
ggccctgaggtggcagtggg

SEQ ID NO: 182014 - DNA, 20 bp, Artificial Sequence
  Synthetic oligonucleotide; GGG chr2 60478367 60478386 60478370 -
gccctgaggtggcagtggga

SEQ ID NO: 182015 - DNA, 20 bp, Artificial Sequence
  Synthetic oligonucleotide; GGG chr2 60478366 60478385 60478369 -
ccctgaggtggcagtgggag

SEQ ID NO: 182016 - DNA, 20 bp, Artificial Sequence
  Synthetic oligonucleotide; CAG chr2 60478358 60478377 60478361 -
tggcagtgggaggggtttgt

SEQ ID NO: 182017 - DNA, 20 bp, Artificial Sequence
  Synthetic oligonucleotide; AAG chr2 60478355 60478374 60478358 -
cagtgggaggggtttgtcag

SEQ ID NO: 182018 - DNA, 20 bp, Artificial Sequence
  Synthetic oligonucleotide; AGG chr2 60478354 60478373 60478357 -
agtgggaggggtttgtcaga

SEQ ID NO: 182019 - DNA, 20 bp, Artificial Sequence
  Synthetic oligonucleotide; TGG chr2 60478351 60478370 60478354 -
gggaggggtttgtcagaagg

SEQ ID NO: 182020 - DNA, 20 bp, Artificial Sequence
  Synthetic oligonucleotide; GGG chr2 60478350 60478369 60478353 -
ggaggggtttgtcagaaggt

SEQ ID NO: 182021 - DNA, 20 bp, Artificial Sequence
  Synthetic oligonucleotide; CAG chr2 60478347 60478366 60478350 -
ggggtttgtcagaaggtggg

SEQ ID NO: 182022 - DNA, 20 bp, Artificial Sequence
  Synthetic oligonucleotide; AGG chr2 60478346 60478365 60478349 -
gggtttgtcagaaggtgggc

SEQ ID NO: 182023 - DNA, 20 bp, Artificial Sequence
  Synthetic oligonucleotide; GGG chr2 60478345 60478364 60478348 -
ggtttgtcagaaggtgggca

SEQ ID NO: 182024 - DNA, 20 bp, Artificial Sequence
  Synthetic oligonucleotide; AAG chr2 60478337 60478356 60478340 -
agaaggtgggcagggtcctg

SEQ ID NO: 182025 - DNA, 20 bp, Artificial Sequence
  Synthetic oligonucleotide; CAG chr2 60478332 60478351 60478335 -
gtgggcagggtcctgaagcc

SEQ ID NO: 182026 - DNA, 20 bp, Artificial Sequence
  Synthetic oligonucleotide; CAG chr2 60478311 60478330 60478314 -
agccctgtcctccctgtcca

SEQ ID NO: 182027 - DNA, 20 bp, Artificial Sequence
  Synthetic oligonucleotide; CAG chr2 60478308 60478327 60478311 -
cctgtcctccctgtccacag

SEQ ID NO: 182028 - DNA, 20 bp, Artificial Sequence
  Synthetic oligonucleotide; AGG chr2 60478307 60478326 60478310 -
ctgtcctccctgtccacagc

SEQ ID NO: 182029 - DNA, 20 bp, Artificial Sequence
  Synthetic oligonucleotide; GAG chr2 60478296 60478315 60478299 -
gtccacagcaggacacttct

SEQ ID NO: 182030 - DNA, 20 bp, Artificial Sequence
  Synthetic oligonucleotide; GAG chr2 60478287 60478306 60478290 -
aggacacttctgagatcttc

SEQ ID NO: 182031 - DNA, 20 bp, Artificial Sequence
  Synthetic oligonucleotide; TGG chr2 60478276 60478295 60478279 -
gagatcttcgagttcctcac

SEQ ID NO: 182032 - DNA, 20 bp, Artificial Sequence
  Synthetic oligonucleotide; GGG chr2 60478275 60478294 60478278 -
agatcttcgagttcctcact

SEQ ID NO: 182033 - DNA, 20 bp, Artificial Sequence
  Synthetic oligonucleotide; GAG chr2 60478273 60478292 60478276 -
atcttcgagttcctcactgg

SEQ ID NO: 182034 - DNA, 20 bp, Artificial Sequence
  Synthetic oligonucleotide; AGG chr2 60478272 60478291 60478275 -
tcttcgagttcctcactggg

SEQ ID NO: 182035 - DNA, 20 bp, Artificial Sequence
  Synthetic oligonucleotide; GAG chr2 60478268 60478287 60478271 -
cgagttcctcactgggaggt

SEQ ID NO: 182036 - DNA, 20 bp, Artificial Sequence
  Synthetic oligonucleotide; AGG chr2 60478267 60478286 60478270 -
gagttcctcactgggaggtg

SEQ ID NO: 182037 - DNA, 20 bp, Artificial Sequence
  Synthetic oligonucleotide; CAG chr2 60478243 60478262 60478246 -
taataccttccctcattcca

SEQ ID NO: 182038 - DNA, 20 bp, Artificial Sequence
  Synthetic oligonucleotide; AGG chr2 60478242 60478261 60478245 -
aataccttccctcattccac

SEQ ID NO: 182039 - DNA, 20 bp, Artificial Sequence
  Synthetic oligonucleotide; GGG chr2 60478241 60478260 60478244 -
ataccttccctcattccaca

SEQ ID NO: 182040 - DNA, 20 bp, Artificial Sequence
  Synthetic oligonucleotide; TGG chr2 60478231 60478250 60478234 -
tcattccacagggcgactgt

SEQ ID NO: 182041 - DNA, 20 bp, Artificial Sequence
  Synthetic oligonucleotide; GGG chr2 60478230 60478249 60478233 -
cattccacagggcgactgtt

SEQ ID NO: 182042 - DNA, 20 bp, Artificial Sequence
  Synthetic oligonucleotide; GGG chr2 60478229 60478248 60478232 -
attccacagggcgactgttg

SEQ ID NO: 182043 - DNA, 20 bp, Artificial Sequence
  Synthetic oligonucleotide; CAG chr2 60478226 60478245 60478229 -
ccacagggcgactgttgggg

SEQ ID NO: 182044 - DNA, 20 bp, Artificial Sequence
  Synthetic oligonucleotide; AGG chr2 60478225 60478244 60478228 -
cacagggcgactgttggggc

SEQ ID NO: 182045 - DNA, 20 bp, Artificial Sequence
  Synthetic oligonucleotide; GAG chr2 60478218 60478237 60478221 -
cgactgttggggcaggatgt

SEQ ID NO: 182046 - DNA, 20 bp, Artificial Sequence
  Synthetic oligonucleotide; AGG chr2 60478217 60478236 60478220 -
gactgttggggcaggatgtg

SEQ ID NO: 182047 - DNA, 20 bp, Artificial Sequence
  Synthetic oligonucleotide; GAG chr2 60478215 60478234 60478218 -
ctgttggggcaggatgtgag

SEQ ID NO: 182048 - DNA, 20 bp, Artificial Sequence
  Synthetic oligonucleotide; GAG chr2 60478213 60478232 60478216 -
gttggggcaggatgtgagga

SEQ ID NO: 182049 - DNA, 20 bp, Artificial Sequence
  Synthetic oligonucleotide; TGG chr2 60478205 60478224 60478208 -
aggatgtgaggagagtactt

SEQ ID NO: 182050 - DNA, 20 bp, Artificial Sequence
  Synthetic oligonucleotide; GGG chr2 60478204 60478223 60478207 -
ggatgtgaggagagtacttt

SEQ ID NO: 182051 - DNA, 20 bp, Artificial Sequence
  Synthetic oligonucleotide; AAG chr2 60478201 60478220 60478204 -
tgtgaggagagtactttggg

SEQ ID NO: 182052 - DNA, 20 bp, Artificial Sequence
  Synthetic oligonucleotide; CAG chr2 60478180 60478199 60478183 -
agaacataacactttccacc

SEQ ID NO: 182053 - DNA, 20 bp, Artificial Sequence
  Synthetic oligonucleotide; TGG chr2 60478175 60478194 60478178 -
ataacactttccacccagcc

SEQ ID NO: 182054 - DNA, 20 bp, Artificial Sequence
  Synthetic oligonucleotide; GGG chr2 60478174 60478193 60478177 -
taacactttccacccagcct

SEQ ID NO: 182055 - DNA, 20 bp, Artificial Sequence
  Synthetic oligonucleotide; TGG chr2 60478166 60478185 60478169 -
tccacccagcctgggcaaca

SEQ ID NO: 182056 - DNA, 20 bp, Artificial Sequence
  Synthetic oligonucleotide; GAG chr2 60478162 60478181 60478165 -
cccagcctgggcaacatggt

SEQ ID NO: 182057 - DNA, 20 bp, Artificial Sequence
  Synthetic oligonucleotide; TAG chr2 60478131 60478150 60478134 -
tctacaaaaaatacaaaaat

SEQ ID NO: 182058 - DNA, 20 bp, Artificial Sequence
  Synthetic oligonucleotide; CAG chr2 60478127 60478146 60478130 -
caaaaaatacaaaaattagc

SEQ ID NO: 182059 - DNA, 20 bp, Artificial Sequence
  Synthetic oligonucleotide; AGG chr2 60478126 60478145 60478129 -
aaaaaatacaaaaattagcc

SEQ ID NO: 182060 - DNA, 20 bp, Artificial Sequence
  Synthetic oligonucleotide; TGG chr2 60478121 60478140 60478124 -
atacaaaaattagccaggtg

SEQ ID NO: 182061 - DNA, 20 bp, Artificial Sequence
  Synthetic oligonucleotide; TGG chr2 60478118 60478137 60478121 -
caaaaattagccaggtgtgg

SEQ ID NO: 182062 - DNA, 20 bp, Artificial Sequence
  Synthetic oligonucleotide; TGG chr2 60478115 60478134 60478118 -
aaattagccaggtgtggtgg

SEQ ID NO: 182063 - DNA, 20 bp, Artificial Sequence
  Synthetic oligonucleotide; TAG chr2 60478102 60478121 60478105 -
gtggtggtggcgcatgcctg

SEQ ID NO: 182064 - DNA, 20 bp, Artificial Sequence
  Synthetic oligonucleotide; TAG chr2 60478096 60478115 60478099 -
gtggcgcatgcctgtagtcc

SEQ ID NO: 182065 - DNA, 20 bp, Artificial Sequence
  Synthetic oligonucleotide; GAG chr2 60478087 60478106 60478090 -
gcctgtagtcctagctactt

SEQ ID NO: 182066 - DNA, 20 bp, Artificial Sequence
  Synthetic oligonucleotide; GAG chr2 60478085 60478104 60478088 -
ctgtagtcctagctacttga

SEQ ID NO: 182067 - DNA, 20 bp, Artificial Sequence
  Synthetic oligonucleotide; GAG chr2 60478080 60478099 60478083 -
gtcctagctacttgagagct

SEQ ID NO: 182068 - DNA, 20 bp, Artificial Sequence
  Synthetic oligonucleotide; AGG chr2 60478079 60478098 60478082 -
tcctagctacttgagagctg

SEQ ID NO: 182069 - DNA, 20 bp, Artificial Sequence
  Synthetic oligonucleotide; CAG chr2 60478076 60478095 60478079 -
tagctacttgagagctgagg

SEQ ID NO: 182070 - DNA, 20 bp, Artificial Sequence
  Synthetic oligonucleotide; AGG chr2 60478075 60478094 60478078 -
agctacttgagagctgaggc

SEQ ID NO: 182071 - DNA, 20 bp, Artificial Sequence
  Synthetic oligonucleotide; GAG chr2 60478073 60478092 60478076 -
ctacttgagagctgaggcag

SEQ ID NO: 182072 - DNA, 20 bp, Artificial Sequence
  Synthetic oligonucleotide; AGG chr2 60478072 60478091 60478075 -
tacttgagagctgaggcagg

SEQ ID NO: 182073 - DNA, 20 bp, Artificial Sequence
  Synthetic oligonucleotide; CGG chr2 60478057 60478076 60478060 -
gcaggaggactgcttgaact

SEQ ID NO: 182074 - DNA, 20 bp, Artificial Sequence
  Synthetic oligonucleotide; GGG chr2 60478056 60478075 60478059 -
caggaggactgcttgaactc

SEQ ID NO: 182075 - DNA, 20 bp, Artificial Sequence
  Synthetic oligonucleotide; GAG chr2 60478054 60478073 60478057 -
ggaggactgcttgaactcgg

SEQ ID NO: 182076 - DNA, 20 bp, Artificial Sequence
  Synthetic oligonucleotide; AGG chr2 60478053 60478072 60478056 -
gaggactgcttgaactcggg

SEQ ID NO: 182077 - DNA, 20 bp, Artificial Sequence
  Synthetic oligonucleotide; CGG chr2 60478050 60478069 60478053 -
gactgcttgaactcgggagg

SEQ ID NO: 182078 - DNA, 20 bp, Artificial Sequence
  Synthetic oligonucleotide; GAG chr2 60478048 60478067 60478051 -
ctgcttgaactcgggaggcg

SEQ ID NO: 182079 - DNA, 20 bp, Artificial Sequence
  Synthetic oligonucleotide; AGG chr2 60478047 60478066 60478050 -
tgcttgaactcgggaggcgg

SEQ ID NO: 182080 - DNA, 20 bp, Artificial Sequence
  Synthetic oligonucleotide; CAG chr2 60478041 60478060 60478044 -
aactcgggaggcggaggttg

SEQ ID NO: 182081 - DNA, 20 bp, Artificial Sequence
  Synthetic oligonucleotide; GAG chr2 60478037 60478056 60478040 -
cgggaggcggaggttgcagt

SEQ ID NO: 182082 - DNA, 20 bp, Artificial Sequence
  Synthetic oligonucleotide; AAG chr2 60478032 60478051 60478035 -
ggcggaggttgcagtgagcc

SEQ ID NO: 182083 - DNA, 20 bp, Artificial Sequence
  Synthetic oligonucleotide; CAG chr2 60478012 60478031 60478015 -
aagattgcaccactgcactc

SEQ ID NO: 182084 - DNA, 20 bp, Artificial Sequence
  Synthetic oligonucleotide; TGG chr2 60478007 60478026 60478010 -
tgcaccactgcactccagcc

SEQ ID NO: 182085 - DNA, 20 bp, Artificial Sequence
  Synthetic oligonucleotide; GGG chr2 60478006 60478025 60478009 -
gcaccactgcactccagcct

SEQ ID NO: 182086 - DNA, 20 bp, Artificial Sequence
  Synthetic oligonucleotide; CAG chr2 60478000 60478019 60478003 -
ctgcactccagcctgggcaa

SEQ ID NO: 182087 - DNA, 20 bp, Artificial Sequence
  Synthetic oligonucleotide; GAG chr2 60477998 60478017 60478001 -
gcactccagcctgggcaaca

SEQ ID NO: 182088 - DNA, 20 bp, Artificial Sequence
  Synthetic oligonucleotide; GAG chr2 60477994 60478013 60477997 -
tccagcctgggcaacagagt

SEQ ID NO: 182089 - DNA, 20 bp, Artificial Sequence
  Synthetic oligonucleotide; AAG chr2 60477961 60477980 60477964 -
aattaaaaaaaaaaaaaaaa

SEQ ID NO: 182090 - DNA, 20 bp, Artificial Sequence
  Synthetic oligonucleotide; AAG chr2 60477949 60477968 60477952 -
aaaaaaaaaagctttccata

SEQ ID NO: 182091 - DNA, 20 bp, Artificial Sequence
  Synthetic oligonucleotide; AGG chr2 60477948 60477967 60477951 -
aaaaaaaaagctttccataa

SEQ ID NO: 182092 - DNA, 20 bp, Artificial Sequence
  Synthetic oligonucleotide; CAG chr2 60477944 60477963 60477947 -
aaaaagctttccataaaggc

SEQ ID NO: 182093 - DNA, 20 bp, Artificial Sequence
  Synthetic oligonucleotide; AGG chr2 60477943 60477962 60477946 -
aaaagctttccataaaggcc

SEQ ID NO: 182094 - DNA, 20 bp, Artificial Sequence
  Synthetic oligonucleotide; CAG chr2 60477939 60477958 60477942 -
gctttccataaaggccagga

SEQ ID NO: 182095 - DNA, 20 bp, Artificial Sequence
  Synthetic oligonucleotide; AAG chr2 60477924 60477943 60477927 -
caggacagatgtgcttcctt

SEQ ID NO: 182096 - DNA, 20 bp, Artificial Sequence
  Synthetic oligonucleotide; AAG chr2 60477921 60477940 60477924 -
gacagatgtgcttccttaag

SEQ ID NO: 182097 - DNA, 20 bp, Artificial Sequence
  Synthetic oligonucleotide; AGG chr2 60477920 60477939 60477923 -
acagatgtgcttccttaaga

SEQ ID NO: 182098 - DNA, 20 bp, Artificial Sequence
  Synthetic oligonucleotide; GGG chr2 60477919 60477938 60477922 -
cagatgtgcttccttaagaa

SEQ ID NO: 182099 - DNA, 20 bp, Artificial Sequence
  Synthetic oligonucleotide; TAG chr2 60477915 60477934 60477918 -
tgtgcttccttaagaagggc

SEQ ID NO: 182100 - DNA, 20 bp, Artificial Sequence
  Synthetic oligonucleotide; GAG chr2 60477913 60477932 60477916 -
tgcttccttaagaagggcta

SEQ ID NO: 182101 - DNA, 20 bp, Artificial Sequence
  Synthetic oligonucleotide; TGG chr2 60477909 60477928 60477912 -
tccttaagaagggctagagt

SEQ ID NO: 182102 - DNA, 20 bp, Artificial Sequence
  Synthetic oligonucleotide; GAG chr2 60477907 60477926 60477910 -
cttaagaagggctagagttg

SEQ ID NO: 182103 - DNA, 20 bp, Artificial Sequence
  Synthetic oligonucleotide; AGG chr2 60477906 60477925 60477909 -
ttaagaagggctagagttgg

SEQ ID NO: 182104 - DNA, 20 bp, Artificial Sequence
  Synthetic oligonucleotide; TGG chr2 60477890 60477909 60477893 -
ttggaggccttgccctcctc

SEQ ID NO: 182105 - DNA, 20 bp, Artificial Sequence
  Synthetic oligonucleotide; GGG chr2 60477889 60477908 60477892 -
tggaggccttgccctcctct

SEQ ID NO: 182106 - DNA, 20 bp, Artificial Sequence
  Synthetic oligonucleotide; TGG chr2 60477881 60477900 60477884 -
ttgccctcctctgggcttgt

SEQ ID NO: 182107 - DNA, 20 bp, Artificial Sequence
  Synthetic oligonucleotide; TGG chr2 60477875 60477894 60477878 -
tcctctgggcttgttggcct

SEQ ID NO: 182108 - DNA, 20 bp, Artificial Sequence
  Synthetic oligonucleotide; GGG chr2 60477874 60477893 60477877 -
cctctgggcttgttggcctt

SEQ ID NO: 182109 - DNA, 20 bp, Artificial Sequence
  Synthetic oligonucleotide; GGG chr2 60477873 60477892 60477876 -
ctctgggcttgttggccttg

SEQ ID NO: 182110 - DNA, 20 bp, Artificial Sequence
  Synthetic oligonucleotide; GGG chr2 60477872 60477891 60477875 -
tctgggcttgttggccttgg

SEQ ID NO: 182111 - DNA, 20 bp, Artificial Sequence
  Synthetic oligonucleotide; GAG chr2 60477870 60477889 60477873 -
tgggcttgttggccttgggg

SEQ ID NO: 182112 - DNA, 20 bp, Artificial Sequence
  Synthetic oligonucleotide; AGG chr2 60477869 60477888 60477872 -
gggcttgttggccttggggg

SEQ ID NO: 182113 - DNA, 20 bp, Artificial Sequence
  Synthetic oligonucleotide; CAG chr2 60477861 60477880 60477864 -
tggccttgggggaggcctga

SEQ ID NO: 182114 - DNA, 20 bp, Artificial Sequence
  Synthetic oligonucleotide; GAG chr2 60477859 60477878 60477862 -
gccttgggggaggcctgaca

SEQ ID NO: 182115 - DNA, 20 bp, Artificial Sequence
  Synthetic oligonucleotide; TGG chr2 60477850 60477869 60477853 -
gaggcctgacagagccttcc

SEQ ID NO: 182116 - DNA, 20 bp, Artificial Sequence
  Synthetic oligonucleotide; GGG chr2 60477849 60477868 60477852 -
aggcctgacagagccttcct

SEQ ID NO: 182117 - DNA, 20 bp, Artificial Sequence
  Synthetic oligonucleotide; GGG chr2 60477848 60477867 60477851 -
ggcctgacagagccttcctg

SEQ ID NO: 182118 - DNA, 20 bp, Artificial Sequence
  Synthetic oligonucleotide; TGG chr2 60477832 60477851 60477835 -
cctggggctgcctgttcttc

SEQ ID NO: 182119 - DNA, 20 bp, Artificial Sequence
  Synthetic oligonucleotide; CAG chr2 60477814 60477833 60477817 -
tctggccccttctccgtgca

SEQ ID NO: 182120 - DNA, 20 bp, Artificial Sequence
  Synthetic oligonucleotide; CAG chr2 60477809 60477828 60477812 -
ccccttctccgtgcacagac

SEQ ID NO: 182121 - DNA, 20 bp, Artificial Sequence
  Synthetic oligonucleotide; TGG chr2 60477803 60477822 60477806 -
ctccgtgcacagaccagtct

SEQ ID NO: 182122 - DNA, 20 bp, Artificial Sequence
  Synthetic oligonucleotide; AAG chr2 60477795 60477814 60477798 -
acagaccagtcttggatgat

SEQ ID NO: 182123 - DNA, 20 bp, Artificial Sequence
  Synthetic oligonucleotide; CAG chr2 60477791 60477810 60477794 -
accagtcttggatgataagt

SEQ ID NO: 182124 - DNA, 20 bp, Artificial Sequence
  Synthetic oligonucleotide; AGG chr2 60477790 60477809 60477793 -
ccagtcttggatgataagtc

SEQ ID NO: 182125 - DNA, 20 bp, Artificial Sequence
  Synthetic oligonucleotide; AAG chr2 60477786 60477805 60477789 -
tcttggatgataagtcagga

SEQ ID NO: 182126 - DNA, 20 bp, Artificial Sequence
  Synthetic oligonucleotide; TGG chr2 60477774 60477793 60477777 -
agtcaggaaagccctccacc

SEQ ID NO: 182127 - DNA, 20 bp, Artificial Sequence
  Synthetic oligonucleotide; CGG chr2 60477770 60477789 60477773 -
aggaaagccctccacctggc

SEQ ID NO: 182128 - DNA, 20 bp, Artificial Sequence
  Synthetic oligonucleotide; GGG chr2 60477769 60477788 60477772 -
ggaaagccctccacctggcc

SEQ ID NO: 182129 - DNA, 20 bp, Artificial Sequence
  Synthetic oligonucleotide; CAG chr2 60477763 60477782 60477766 -
ccctccacctggccgggctg

SEQ ID NO: 182130 - DNA, 20 bp, Artificial Sequence
  Synthetic oligonucleotide; TGG chr2 60477754 60477773 60477757 -
tggccgggctgcagtgtcgc

SEQ ID NO: 182131 - DNA, 20 bp, Artificial Sequence
  Synthetic oligonucleotide; GGG chr2 60477753 60477772 60477756 -
ggccgggctgcagtgtcgct

SEQ ID NO: 182132 - DNA, 20 bp, Artificial Sequence
  Synthetic oligonucleotide; GGG chr2 60477752 60477771 60477755 -
gccgggctgcagtgtcgctg

SEQ ID NO: 182133 - DNA, 20 bp, Artificial Sequence
  Synthetic oligonucleotide; TGG chr2 60477729 60477748 60477732 -
ctgcccacacttgctgacca

SEQ ID NO: 182134 - DNA, 20 bp, Artificial Sequence
  Synthetic oligonucleotide; CAG chr2 60477704 60477723 60477707 -
ccccactcccttgtctctca

SEQ ID NO: 182135 - DNA, 20 bp, Artificial Sequence
  Synthetic oligonucleotide; CAG chr2 60477681 60477700 60477684 -
caccactgcccctgtttcca

SEQ ID NO: 182136 - DNA, 20 bp, Artificial Sequence
  Synthetic oligonucleotide; CAG chr2 60477660 60477679 60477663 -
agtgcccacgaacaaaacat

SEQ ID NO: 182137 - DNA, 20 bp, Artificial Sequence
  Synthetic oligonucleotide; AGG chr2 60477659 60477678 60477662 -
gtgcccacgaacaaaacatc

SEQ ID NO: 182138 - DNA, 20 bp, Artificial Sequence
  Synthetic oligonucleotide; GAG chr2 60477657 60477676 60477660 -
gcccacgaacaaaacatcag

SEQ ID NO: 182139 - DNA, 20 bp, Artificial Sequence
  Synthetic oligonucleotide; TGG chr2 60477649 60477668 60477652 -
acaaaacatcaggagtctct

SEQ ID NO: 182140 - DNA, 20 bp, Artificial Sequence
  Synthetic oligonucleotide; AAG chr2 60477591 60477610 60477594 -
ttctttatttattttactct

SEQ ID NO: 182141 - DNA, 20 bp, Artificial Sequence
  Synthetic oligonucleotide; TGG chr2 60477585 60477604 60477588 -
atttattttactctaagttc

SEQ ID NO: 182142 - DNA, 20 bp, Artificial Sequence
  Synthetic oligonucleotide; GGG chr2 60477584 60477603 60477587 -
tttattttactctaagttct

SEQ ID NO: 182143 - DNA, 20 bp, Artificial Sequence
  Synthetic oligonucleotide; CAG chr2 60477572 60477591 60477575 -
taagttctgggatacatgtg

SEQ ID NO: 182144 - DNA, 20 bp, Artificial Sequence
  Synthetic oligonucleotide; CAG chr2 60477563 60477582 60477566 -
ggatacatgtgcagaatgtg

SEQ ID NO: 182145 - DNA, 20 bp, Artificial Sequence
  Synthetic oligonucleotide; AGG chr2 60477562 60477581 60477565 -
gatacatgtgcagaatgtgc

SEQ ID NO: 182146 - DNA, 20 bp, Artificial Sequence
  Synthetic oligonucleotide; AAG chr2 60477549 60477568 60477552 -
aatgtgcaggtttgttacat

SEQ ID NO: 182147 - DNA, 20 bp, Artificial Sequence
  Synthetic oligonucleotide; TGG chr2 60477533 60477552 60477536 -
acataagtatacatgtacca

SEQ ID NO: 182148 - DNA, 20 bp, Artificial Sequence
  Synthetic oligonucleotide; TGG chr2 60477530 60477549 60477533 -
taagtatacatgtaccatgg

SEQ ID NO: 182149 - DNA, 20 bp, Artificial Sequence
  Synthetic oligonucleotide; TAG chr2 60477496 60477515 60477499 -
tatcaacccatcatctacat

SEQ ID NO: 182150 - DNA, 20 bp, Artificial Sequence
  Synthetic oligonucleotide; AGG chr2 60477495 60477514 60477498 -
atcaacccatcatctacatt

SEQ ID NO: 182151 - DNA, 20 bp, Artificial Sequence
  Synthetic oligonucleotide; TGG chr2 60477447 60477466 60477450 -
cttgcccctccacccatgtt

SEQ ID NO: 182152 - DNA, 20 bp, Artificial Sequence
  Synthetic oligonucleotide; TAG chr2 60477437 60477456 60477440 -
cacccatgtttggttttctt

SEQ ID NO: 182153 - DNA, 20 bp, Artificial Sequence
  Synthetic oligonucleotide; TAG chr2 60477427 60477446 60477430 -
tggttttctttagcttattc

SEQ ID NO: 182154 - DNA, 20 bp, Artificial Sequence
  Synthetic oligonucleotide; AAG chr2 60477415 60477434 60477418 -
gcttattctagtattttctc

SEQ ID NO: 182155 - DNA, 20 bp, Artificial Sequence
  Synthetic oligonucleotide; TAG chr2 60477393 60477412 60477396 -
gaccgatcgaaatgataata

SEQ ID NO: 182156 - DNA, 20 bp, Artificial Sequence
  Synthetic oligonucleotide; GAG chr2 60477391 60477410 60477394 -
ccgatcgaaatgataatata

SEQ ID NO: 182157 - DNA, 20 bp, Artificial Sequence
  Synthetic oligonucleotide; AGG chr2 60477390 60477409 60477393 -
cgatcgaaatgataatatag

SEQ ID NO: 182158 - DNA, 20 bp, Artificial Sequence
  Synthetic oligonucleotide; AAG chr2 60477383 60477402 60477386 -
aatgataatatagaggcata

SEQ ID NO: 182159 - DNA, 20 bp, Artificial Sequence
  Synthetic oligonucleotide; GAG chr2 60477368 60477387 60477371 -
gcataaagcacatttgttgt

SEQ ID NO: 182160 - DNA, 20 bp, Artificial Sequence
  Synthetic oligonucleotide; CAG chr2 60477359 60477378 60477362 -
acatttgttgtgagttgatg

SEQ ID NO: 182161 - DNA, 20 bp, Artificial Sequence
  Synthetic oligonucleotide; AAG chr2 60477351 60477370 60477354 -
tgtgagttgatgcagataaa

SEQ ID NO: 182162 - DNA, 20 bp, Artificial Sequence
  Synthetic oligonucleotide; AGG chr2 60477350 60477369 60477353 -
gtgagttgatgcagataaaa

SEQ ID NO: 182163 - DNA, 20 bp, Artificial Sequence
  Synthetic oligonucleotide; TGG chr2 60477345 60477364 60477348 -
ttgatgcagataaaaaggct

SEQ ID NO: 182164 - DNA, 20 bp, Artificial Sequence
  Synthetic oligonucleotide; GGG chr2 60477344 60477363 60477347 -
tgatgcagataaaaaggctt

SEQ ID NO: 182165 - DNA, 20 bp, Artificial Sequence
  Synthetic oligonucleotide; GGG chr2 60477343 60477362 60477346 -
gatgcagataaaaaggcttg

SEQ ID NO: 182166 - DNA, 20 bp, Artificial Sequence
  Synthetic oligonucleotide; TGG chr2 60477340 60477359 60477343 -
gcagataaaaaggcttgggg

SEQ ID NO: 182167 - DNA, 20 bp, Artificial Sequence
  Synthetic oligonucleotide; CAG chr2 60477333 60477352 60477336 -
aaaaggcttggggtggtctt

SEQ ID NO: 182168 - DNA, 20 bp, Artificial Sequence
  Synthetic oligonucleotide; GAG chr2 60477331 60477350 60477334 -
aaggcttggggtggtcttca

SEQ ID NO: 182169 - DNA, 20 bp, Artificial Sequence
  Synthetic oligonucleotide; TGG chr2 60477323 60477342 60477326 -
gggtggtcttcagagtaatt

SEQ ID NO: 182170 - DNA, 20 bp, Artificial Sequence
  Synthetic oligonucleotide; GGG chr2 60477322 60477341 60477325 -
ggtggtcttcagagtaattt

SEQ ID NO: 182171 - DNA, 20 bp, Artificial Sequence
  Synthetic oligonucleotide; GAG chr2 60477320 60477339 60477323 -
tggtcttcagagtaatttgg

SEQ ID NO: 182172 - DNA, 20 bp, Artificial Sequence
  Synthetic oligonucleotide; TGG chr2 60477304 60477323 60477307 -
ttgggagttgtgtgttctgc

SEQ ID NO: 182173 - DNA, 20 bp, Artificial Sequence
  Synthetic oligonucleotide; TAG chr2 60477295 60477314 60477298 -
gtgtgttctgctggctttga

SEQ ID NO: 182174 - DNA, 20 bp, Artificial Sequence
  Synthetic oligonucleotide; AAG chr2 60477290 60477309 60477293 -
ttctgctggctttgatagac

SEQ ID NO: 182175 - DNA, 20 bp, Artificial Sequence
  Synthetic oligonucleotide; TGG chr2 60477274 60477293 60477277 -
agacaagcccttctctgctc

SEQ ID NO: 182176 - DNA, 20 bp, Artificial Sequence
  Synthetic oligonucleotide; CAG chr2 60477271 60477290 60477274 -
caagcccttctctgctctgg

SEQ ID NO: 182177 - DNA, 20 bp, Artificial Sequence
  Synthetic oligonucleotide; AGG chr2 60477270 60477289 60477273 -
aagcccttctctgctctggc

SEQ ID NO: 182178 - DNA, 20 bp, Artificial Sequence
  Synthetic oligonucleotide; CAG chr2 60477261 60477280 60477264 -
tctgctctggcaggtgttat

SEQ ID NO: 182179 - DNA, 20 bp, Artificial Sequence
  Synthetic oligonucleotide; CAG chr2 60477214 60477233 60477217 -
tctcatcgcatccatcttca

SEQ ID NO: 182180 - DNA, 20 bp, Artificial Sequence
  Synthetic oligonucleotide; CAG chr2 60477188 60477207 60477191 -
catgcctcttcctgaatgct

SEQ ID NO: 182181 - DNA, 20 bp, Artificial Sequence
  Synthetic oligonucleotide; CAG chr2 60477160 60477179 60477163 -
aatgcgtatttcaccttcct

SEQ ID NO: 182182 - DNA, 20 bp, Artificial Sequence
  Synthetic oligonucleotide; AGG chr2 60477159 60477178 60477162 -
atgcgtatttcaccttcctc

SEQ ID NO: 182183 - DNA, 20 bp, Artificial Sequence
  Synthetic oligonucleotide; TGG chr2 60477140 60477159 60477143 -
caggtatctaatacttaacc

SEQ ID NO: 182184 - DNA, 20 bp, Artificial Sequence
  Synthetic oligonucleotide; GGG chr2 60477139 60477158 60477142 -
aggtatctaatacttaacct

SEQ ID NO: 182185 - DNA, 20 bp, Artificial Sequence
  Synthetic oligonucleotide; GAG chr2 60477137 60477156 60477140 -
gtatctaatacttaacctgg

SEQ ID NO: 182186 - DNA, 20 bp, Artificial Sequence
  Synthetic oligonucleotide; AAG chr2 60477128 60477147 60477131 -
acttaacctgggagaaacgc

SEQ ID NO: 182187 - DNA, 20 bp, Artificial Sequence
  Synthetic oligonucleotide; TGG chr2 60477123 60477142 60477126 -
acctgggagaaacgcaagtg

SEQ ID NO: 182188 - DNA, 20 bp, Artificial Sequence
  Synthetic oligonucleotide; AAG chr2 60477115 60477134 60477118 -
gaaacgcaagtgtggtttgc

SEQ ID NO: 182189 - DNA, 20 bp, Artificial Sequence
  Synthetic oligonucleotide; AGG chr2 60477114 60477133 60477117 -
aaacgcaagtgtggtttgca

SEQ ID NO: 182190 - DNA, 20 bp, Artificial Sequence
  Synthetic oligonucleotide; CAG chr2 60477106 60477125 60477109 -
gtgtggtttgcaaggctttc

SEQ ID NO: 182191 - DNA, 20 bp, Artificial Sequence
  Synthetic oligonucleotide; AGG chr2 60477105 60477124 60477108 -
tgtggtttgcaaggctttcc

SEQ ID NO: 182192 - DNA, 20 bp, Artificial Sequence
  Synthetic oligonucleotide; GAG chr2 60477063 60477082 60477066 -
catccttttcttcatttctc

SEQ ID NO: 182193 - DNA, 20 bp, Artificial Sequence
  Synthetic oligonucleotide; TGG chr2 60477060 60477079 60477063 -
ccttttcttcatttctcgag

SEQ ID NO: 182194 - DNA, 20 bp, Artificial Sequence
  Synthetic oligonucleotide; GGG chr2 60477059 60477078 60477062 -
cttttcttcatttctcgagt

SEQ ID NO: 182195 - DNA, 20 bp, Artificial Sequence
  Synthetic oligonucleotide; GGG chr2 60477058 60477077 60477061 -
ttttcttcatttctcgagtg

SEQ ID NO: 182196 - DNA, 20 bp, Artificial Sequence
  Synthetic oligonucleotide; CAG chr2 60477055 60477074 60477058 -
tcttcatttctcgagtgggg

SEQ ID NO: 182197 - DNA, 20 bp, Artificial Sequence
  Synthetic oligonucleotide; AGG chr2 60477054 60477073 60477057 -
cttcatttctcgagtggggc

SEQ ID NO: 182198 - DNA, 20 bp, Artificial Sequence
  Synthetic oligonucleotide; GGG chr2 60477053 60477072 60477056 -
ttcatttctcgagtggggca

SEQ ID NO: 182199 - DNA, 20 bp, Artificial Sequence
  Synthetic oligonucleotide; GAG chr2 60477051 60477070 60477054 -
catttctcgagtggggcagg

SEQ ID NO: 182200 - DNA, 20 bp, Artificial Sequence
  Synthetic oligonucleotide; AGG chr2 60477050 60477069 60477053 -
atttctcgagtggggcaggg

SEQ ID NO: 182201 - DNA, 20 bp, Artificial Sequence
  Synthetic oligonucleotide; CGG chr2 60477044 60477063 60477047 -
cgagtggggcagggaggcat

SEQ ID NO: 182202 - DNA, 20 bp, Artificial Sequence
  Synthetic oligonucleotide; GGG chr2 60477043 60477062 60477046 -
gagtggggcagggaggcatc

SEQ ID NO: 182203 - DNA, 20 bp, Artificial Sequence
  Synthetic oligonucleotide; GGG chr2 60477042 60477061 60477045 -
agtggggcagggaggcatcg

SEQ ID NO: 182204 - DNA, 20 bp, Artificial Sequence
  Synthetic oligonucleotide; AAG chr2 60477018 60477037 60477021 -
gtttgtgatacgtttgtgtg

SEQ ID NO: 182205 - DNA, 20 bp, Artificial Sequence
  Synthetic oligonucleotide; TGG chr2 60477014 60477033 60477017 -
gtgatacgtttgtgtgaagc

SEQ ID NO: 182206 - DNA, 20 bp, Artificial Sequence
  Synthetic oligonucleotide; CGG chr2 60477005 60477024 60477008 -
ttgtgtgaagctggacaatt

SEQ ID NO: 182207 - DNA, 20 bp, Artificial Sequence
  Synthetic oligonucleotide; GGG chr2 60477004 60477023 60477007 -
tgtgtgaagctggacaattc

SEQ ID NO: 182208 - DNA, 20 bp, Artificial Sequence
  Synthetic oligonucleotide; CAG chr2 60476998 60477017 60477001 -
aagctggacaattcgggtga

SEQ ID NO: 182209 - DNA, 20 bp, Artificial Sequence
  Synthetic oligonucleotide; CAG chr2 60476986 60477005 60476989 -
tcgggtgacagaaatatgtt

SEQ ID NO: 182210 - DNA, 20 bp, Artificial Sequence
  Synthetic oligonucleotide; AGG chr2 60476985 60477004 60476988 -
cgggtgacagaaatatgttc

SEQ ID NO: 182211 - DNA, 20 bp, Artificial Sequence
  Synthetic oligonucleotide; GGG chr2 60476984 60477003 60476987 -
gggtgacagaaatatgttca

SEQ ID NO: 182212 - DNA, 20 bp, Artificial Sequence
  Synthetic oligonucleotide; CAG chr2 60476981 60477000 60476984 -
tgacagaaatatgttcaggg

SEQ ID NO: 182213 - DNA, 20 bp, Artificial Sequence
  Synthetic oligonucleotide; AAG chr2 60476951 60476970 60476954 -
tatcgtcccttctaactaca

SEQ ID NO: 182214 - DNA, 20 bp, Artificial Sequence
  Synthetic oligonucleotide; AGG chr2 60476950 60476969 60476953 -
atcgtcccttctaactacaa

SEQ ID NO: 182215 - DNA, 20 bp, Artificial Sequence
  Synthetic oligonucleotide; TGG chr2 60476945 60476964 60476948 -
cccttctaactacaaaggca

SEQ ID NO: 182216 - DNA, 20 bp, Artificial Sequence
  Synthetic oligonucleotide; CAG chr2 60476938 60476957 60476941 -
aactacaaaggcatggattg

SEQ ID NO: 182217 - DNA, 20 bp, Artificial Sequence
  Synthetic oligonucleotide; GAG chr2 60476933 60476952 60476936 -
caaaggcatggattgcagtt

SEQ ID NO: 182218 - DNA, 20 bp, Artificial Sequence
  Synthetic oligonucleotide; CAG chr2 60476921 60476940 60476924 -
ttgcagttgagccccacttt

SEQ ID NO: 182219 - DNA, 20 bp, Artificial Sequence
  Synthetic oligonucleotide; AAG chr2 60476918 60476937 60476921 -
cagttgagccccactttcag

SEQ ID NO: 182220 - DNA, 20 bp, Artificial Sequence
  Synthetic oligonucleotide; AGG chr2 60476917 60476936 60476920 -
agttgagccccactttcaga

SEQ ID NO: 182221 - DNA, 20 bp, Artificial Sequence
  Synthetic oligonucleotide; TGG chr2 60476888 60476907 60476891 -
acacacaaaaatctcattaa

SEQ ID NO: 182222 - DNA, 20 bp, Artificial Sequence
  Synthetic oligonucleotide; TAG chr2 60476873 60476892 60476876 -
attaatggaaactgataaat

SEQ ID NO: 182223 - DNA, 20 bp, Artificial Sequence
  Synthetic oligonucleotide; GAG chr2 60476871 60476890 60476874 -
taatggaaactgataaatta

SEQ ID NO: 182224 - DNA, 20 bp, Artificial Sequence
  Synthetic oligonucleotide; GAG chr2 60476869 60476888 60476872 -
atggaaactgataaattaga

SEQ ID NO: 182225 - DNA, 20 bp, Artificial Sequence
  Synthetic oligonucleotide; CAG chr2 60476851 60476870 60476854 -
gagagtgatttttcacatta

SEQ ID NO: 182226 - DNA, 20 bp, Artificial Sequence
  Synthetic oligonucleotide; AAG chr2 60476847 60476866 60476850 -
gtgatttttcacattacaga

SEQ ID NO: 182227 - DNA, 20 bp, Artificial Sequence
  Synthetic oligonucleotide; AAG chr2 60476828 60476847 60476831 -
aaagattgttaacttttcaa

SEQ ID NO: 182228 - DNA, 20 bp, Artificial Sequence
  Synthetic oligonucleotide; AGG chr2 60476827 60476846 60476830 -
aagattgttaacttttcaaa

SEQ ID NO: 182229 - DNA, 20 bp, Artificial Sequence
  Synthetic oligonucleotide; CAG chr2 60476816 60476835 60476819 -
cttttcaaaaggtttcacca

SEQ ID NO: 182230 - DNA, 20 bp, Artificial Sequence
  Synthetic oligonucleotide; AGG chr2 60476815 60476834 60476818 -
ttttcaaaaggtttcaccac

SEQ ID NO: 182231 - DNA, 20 bp, Artificial Sequence
  Synthetic oligonucleotide; GGG chr2 60476814 60476833 60476817 -
tttcaaaaggtttcaccaca

SEQ ID NO: 182232 - DNA, 20 bp, Artificial Sequence
  Synthetic oligonucleotide; TAG chr2 60476801 60476820 60476804 -
caccacagggtttctttaaa

SEQ ID NO: 182233 - DNA, 20 bp, Artificial Sequence
  Synthetic oligonucleotide; GAG chr2 60476797 60476816 60476800 -
acagggtttctttaaatagt

SEQ ID NO: 182234 - DNA, 20 bp, Artificial Sequence
  Synthetic oligonucleotide; AAG chr2 60476777 60476796 60476780 -
gagctcccccactgaattta

SEQ ID NO: 182235 - DNA, 20 bp, Artificial Sequence
  Synthetic oligonucleotide; CAG chr2 60476764 60476783 60476767 -
gaatttaaagtgtttgttta

SEQ ID NO: 182236 - DNA, 20 bp, Artificial Sequence
  Synthetic oligonucleotide; CAG chr2 60476745 60476764 60476748 -
acagatcattaactacttga

SEQ ID NO: 182237 - DNA, 20 bp, Artificial Sequence
  Synthetic oligonucleotide; GAG chr2 60476743 60476762 60476746 -
agatcattaactacttgaca

SEQ ID NO: 182238 - DNA, 20 bp, Artificial Sequence
  Synthetic oligonucleotide; GAG chr2 60476741 60476760 60476744 -
atcattaactacttgacaga

SEQ ID NO: 182239 - DNA, 20 bp, Artificial Sequence
  Synthetic oligonucleotide; AGG chr2 60476740 60476759 60476743 -
tcattaactacttgacagag

SEQ ID NO: 182240 - DNA, 20 bp, Artificial Sequence
  Synthetic oligonucleotide; TGG chr2 60476733 60476752 60476736 -
ctacttgacagagaggatat

SEQ ID NO: 182241 - DNA, 20 bp, Artificial Sequence
  Synthetic oligonucleotide; GGG chr2 60476732 60476751 60476735 -
tacttgacagagaggatatt

SEQ ID NO: 182242 - DNA, 20 bp, Artificial Sequence
  Synthetic oligonucleotide; GGG chr2 60476731 60476750 60476734 -
acttgacagagaggatattg

SEQ ID NO: 182243 - DNA, 20 bp, Artificial Sequence
  Synthetic oligonucleotide; GGG chr2 60476730 60476749 60476733 -
cttgacagagaggatattgg

SEQ ID NO: 182244 - DNA, 20 bp, Artificial Sequence
  Synthetic oligonucleotide; TGG chr2 60476726 60476745 60476729 -
acagagaggatattgggggt

SEQ ID NO: 182245 - DNA, 20 bp, Artificial Sequence
  Synthetic oligonucleotide; GGG chr2 60476725 60476744 60476728 -
cagagaggatattgggggtt

SEQ ID NO: 182246 - DNA, 20 bp, Artificial Sequence
  Synthetic oligonucleotide; GGG chr2 60476724 60476743 60476727 -
agagaggatattgggggttg

SEQ ID NO: 182247 - DNA, 20 bp, Artificial Sequence
  Synthetic oligonucleotide; GGG chr2 60476723 60476742 60476726 -
gagaggatattgggggttgg

SEQ ID NO: 182248 - DNA, 20 bp, Artificial Sequence
  Synthetic oligonucleotide; AAG chr2 60476720 60476739 60476723 -
aggatattgggggttggggg

SEQ ID NO: 182249 - DNA, 20 bp, Artificial Sequence
  Synthetic oligonucleotide; AGG chr2 60476719 60476738 60476722 -
ggatattgggggttggggga

SEQ ID NO: 182250 - DNA, 20 bp, Artificial Sequence
  Synthetic oligonucleotide; AAG chr2 60476716 60476735 60476719 -
tattgggggttgggggaagg

SEQ ID NO: 182251 - DNA, 20 bp, Artificial Sequence
  Synthetic oligonucleotide; AAG chr2 60476703 60476722 60476706 -
gggaaggaagacacacttaa

SEQ ID NO: 182252 - DNA, 20 bp, Artificial Sequence
  Synthetic oligonucleotide; AGG chr2 60476702 60476721 60476705 -
ggaaggaagacacacttaaa

SEQ ID NO: 182253 - DNA, 20 bp, Artificial Sequence
  Synthetic oligonucleotide; TAG chr2 60476691 60476710 60476694 -
acacttaaaaggtaaaatgt

SEQ ID NO: 182254 - DNA, 20 bp, Artificial Sequence
  Synthetic oligonucleotide; AAG chr2 60476688 60476707 60476691 -
cttaaaaggtaaaatgttag

SEQ ID NO: 182255 - DNA, 20 bp, Artificial Sequence
  Synthetic oligonucleotide; GAG chr2 60476668 60476687 60476671 -
aagccctgccaattttcaat

SEQ ID NO: 182256 - DNA, 20 bp, Artificial Sequence
  Synthetic oligonucleotide; TGG chr2 60476663 60476682 60476666 -
ctgccaattttcaatgagcc

SEQ ID NO: 182257 - DNA, 20 bp, Artificial Sequence
  Synthetic oligonucleotide; AAG chr2 60476660 60476679 60476663 -
ccaattttcaatgagcctgg

SEQ ID NO: 182258 - DNA, 20 bp, Artificial Sequence
  Synthetic oligonucleotide; AGG chr2 60476659 60476678 60476662 -
caattttcaatgagcctgga

SEQ ID NO: 182259 - DNA, 20 bp, Artificial Sequence
  Synthetic oligonucleotide; GGG chr2 60476658 60476677 60476661 -
aattttcaatgagcctggaa

SEQ ID NO: 182260 - DNA, 20 bp, Artificial Sequence
  Synthetic oligonucleotide; TGG chr2 60476630 60476649 60476633 -
aaacatctctgaaattatgt

SEQ ID NO: 182261 - DNA, 20 bp, Artificial Sequence
  Synthetic oligonucleotide; TAG chr2 60476626 60476645 60476629 -
atctctgaaattatgttggt

SEQ ID NO: 182262 - DNA, 20 bp, Artificial Sequence
  Synthetic oligonucleotide; CAG chr2 60476605 60476624 60476608 -
agcaaatatgatttatttta

SEQ ID NO: 182263 - DNA, 20 bp, Artificial Sequence
  Synthetic oligonucleotide; TGG chr2 60476586 60476605 60476589 -
acagaaattcattttacaca

SEQ ID NO: 182264 - DNA, 20 bp, Artificial Sequence
  Synthetic oligonucleotide; AAG chr2 60476577 60476596 60476580 -
cattttacacatggctttcc

SEQ ID NO: 182265 - DNA, 20 bp, Artificial Sequence
  Synthetic oligonucleotide; TGG chr2 60476559 60476578 60476562 -
ccaagaaccctccatgctga

SEQ ID NO: 182266 - DNA, 20 bp, Artificial Sequence
  Synthetic oligonucleotide; GGG chr2 60476558 60476577 60476561 -
caagaaccctccatgctgat

SEQ ID NO: 182267 - DNA, 20 bp, Artificial Sequence
  Synthetic oligonucleotide; GGG chr2 60476557 60476576 60476560 -
aagaaccctccatgctgatg

SEQ ID NO: 182268 - DNA, 20 bp, Artificial Sequence
  Synthetic oligonucleotide; TGG chr2 60476552 60476571 60476555 -
ccctccatgctgatggggtg

SEQ ID NO: 182269 - DNA, 20 bp, Artificial Sequence
  Synthetic oligonucleotide; TGG chr2 60476549 60476568 60476552 -
tccatgctgatggggtgtgg

SEQ ID NO: 182270 - DNA, 20 bp, Artificial Sequence
  Synthetic oligonucleotide; GGG chr2 60476548 60476567 60476551 -
ccatgctgatggggtgtggt

SEQ ID NO: 182271 - DNA, 20 bp, Artificial Sequence
  Synthetic oligonucleotide; GAG chr2 60476546 60476565 60476549 -
atgctgatggggtgtggtgg

SEQ ID NO: 182272 - DNA, 20 bp, Artificial Sequence
  Synthetic oligonucleotide; AGG chr2 60476545 60476564 60476548 -
tgctgatggggtgtggtggg

SEQ ID NO: 182273 - DNA, 20 bp, Artificial Sequence
  Synthetic oligonucleotide; AAG chr2 60476540 60476559 60476543 -
atggggtgtggtgggaggtc

SEQ ID NO: 182274 - DNA, 20 bp, Artificial Sequence
  Synthetic oligonucleotide; AGG chr2 60476539 60476558 60476542 -
tggggtgtggtgggaggtca

SEQ ID NO: 182275 - DNA, 20 bp, Artificial Sequence
  Synthetic oligonucleotide; CAG chr2 60476532 60476551 60476535 -
tggtgggaggtcaaggacca

SEQ ID NO: 182276 - DNA, 20 bp, Artificial Sequence
  Synthetic oligonucleotide; AGG chr2 60476531 60476550 60476534 -
ggtgggaggtcaaggaccac

SEQ ID NO: 182277 - DNA, 20 bp, Artificial Sequence
  Synthetic oligonucleotide; GGG chr2 60476530 60476549 60476533 -
gtgggaggtcaaggaccaca

SEQ ID NO: 182278 - DNA, 20 bp, Artificial Sequence
  Synthetic oligonucleotide; TGG chr2 60476524 60476543 60476527 -
ggtcaaggaccacagggtgc

SEQ ID NO: 182279 - DNA, 20 bp, Artificial Sequence
  Synthetic oligonucleotide; GGG chr2 60476523 60476542 60476526 -
gtcaaggaccacagggtgct

SEQ ID NO: 182280 - DNA, 20 bp, Artificial Sequence
  Synthetic oligonucleotide; TGG chr2 60476509 60476528 60476512 -
ggtgctgggctttgctgtcc

SEQ ID NO: 182281 - DNA, 20 bp, Artificial Sequence
  Synthetic oligonucleotide; TGG chr2 60476502 60476521 60476505 -
ggctttgctgtcctggtttg

SEQ ID NO: 182282 - DNA, 20 bp, Artificial Sequence
  Synthetic oligonucleotide; TGG chr2 60476499 60476518 60476502 -
tttgctgtcctggtttgtgg

SEQ ID NO: 182283 - DNA, 20 bp, Artificial Sequence
  Synthetic oligonucleotide; TGG chr2 60476495 60476514 60476498 -
ctgtcctggtttgtggtggc

SEQ ID NO: 182284 - DNA, 20 bp, Artificial Sequence
  Synthetic oligonucleotide; GGG chr2 60476494 60476513 60476497 -
tgtcctggtttgtggtggct

SEQ ID NO: 182285 - DNA, 20 bp, Artificial Sequence
  Synthetic oligonucleotide; GGG chr2 60476493 60476512 60476496 -
gtcctggtttgtggtggctg

SEQ ID NO: 182286 - DNA, 20 bp, Artificial Sequence
  Synthetic oligonucleotide; GAG chr2 60476491 60476510 60476494 -
cctggtttgtggtggctggg

SEQ ID NO: 182287 - DNA, 20 bp, Artificial Sequence
  Synthetic oligonucleotide; GAG chr2 60476489 60476508 60476492 -
tggtttgtggtggctgggga

SEQ ID NO: 182288 - DNA, 20 bp, Artificial Sequence
  Synthetic oligonucleotide; AGG chr2 60476488 60476507 60476491 -
ggtttgtggtggctggggag

SEQ ID NO: 182289 - DNA, 20 bp, Artificial Sequence
  Synthetic oligonucleotide; TAG chr2 60476473 60476492 60476476 -
gggagaggactcccttttct

SEQ ID NO: 182290 - DNA, 20 bp, Artificial Sequence
  Synthetic oligonucleotide; GAG chr2 60476471 60476490 60476474 -
gagaggactcccttttctta

SEQ ID NO: 182291 - DNA, 20 bp, Artificial Sequence
  Synthetic oligonucleotide; GAG chr2 60476450 60476469 60476453 -
agtcctgtgtgtgcctttgt

SEQ ID NO: 182292 - DNA, 20 bp, Artificial Sequence
  Synthetic oligonucleotide; TGG chr2 60476444 60476463 60476447 -
gtgtgtgcctttgtgagcaa

SEQ ID NO: 182293 - DNA, 20 bp, Artificial Sequence
  Synthetic oligonucleotide; GGG chr2 60476443 60476462 60476446 -
tgtgtgcctttgtgagcaat

SEQ ID NO: 182294 - DNA, 20 bp, Artificial Sequence
  Synthetic oligonucleotide; CAG chr2 60476437 60476456 60476440 -
cctttgtgagcaatgggtgc

SEQ ID NO: 182295 - DNA, 20 bp, Artificial Sequence
  Synthetic oligonucleotide; AGG chr2 60476436 60476455 60476439 -
ctttgtgagcaatgggtgcc

SEQ ID NO: 182296 - DNA, 20 bp, Artificial Sequence
  Synthetic oligonucleotide; TGG chr2 60476430 60476449 60476433 -
gagcaatgggtgccaggctc

SEQ ID NO: 182297 - DNA, 20 bp, Artificial Sequence
  Synthetic oligonucleotide; GAG chr2 60476424 60476443 60476427 -
tgggtgccaggctctggcat

SEQ ID NO: 182298 - DNA, 20 bp, Artificial Sequence
  Synthetic oligonucleotide; AGG chr2 60476423 60476442 60476426 -
gggtgccaggctctggcatg

SEQ ID NO: 182299 - DNA, 20 bp, Artificial Sequence
  Synthetic oligonucleotide; GAG chr2 60476418 60476437 60476421 -
ccaggctctggcatgaggcc

SEQ ID NO: 182300 - DNA, 20 bp, Artificial Sequence
  Synthetic oligonucleotide; TGG chr2 60476406 60476425 60476409 -
atgaggccgagctttgctac

SEQ ID NO: 182301 - DNA, 20 bp, Artificial Sequence
  Synthetic oligonucleotide; TGG chr2 60476398 60476417 60476401 -
gagctttgctactggacttc

SEQ ID NO: 182302 - DNA, 20 bp, Artificial Sequence
  Synthetic oligonucleotide; GAG chr2 60476392 60476411 60476395 -
tgctactggacttctggcat

SEQ ID NO: 182303 - DNA, 20 bp, Artificial Sequence
  Synthetic oligonucleotide; GAG chr2 60476384 60476403 60476387 -
gacttctggcatgagccact

SEQ ID NO: 182304 - DNA, 20 bp, Artificial Sequence
  Synthetic oligonucleotide; TAG chr2 60476363 60476382 60476366 -
agaccttttcccttgacatt

SEQ ID NO: 182305 - DNA, 20 bp, Artificial Sequence
  Synthetic oligonucleotide; TGG chr2 60476358 60476377 60476361 -
ttttcccttgacatttagcc

SEQ ID NO: 182306 - DNA, 20 bp, Artificial Sequence
  Synthetic oligonucleotide; GGG chr2 60476357 60476376 60476360 -
tttcccttgacatttagcct

SEQ ID NO: 182307 - DNA, 20 bp, Artificial Sequence
  Synthetic oligonucleotide; TGG chr2 60476352 60476371 60476355 -
cttgacatttagcctgggtt

SEQ ID NO: 182308 - DNA, 20 bp, Artificial Sequence
  Synthetic oligonucleotide; GGG chr2 60476351 60476370 60476354 -
ttgacatttagcctgggttt

SEQ ID NO: 182309 - DNA, 20 bp, Artificial Sequence
  Synthetic oligonucleotide; GGG chr2 60476350 60476369 60476353 -
tgacatttagcctgggtttg

SEQ ID NO: 182310 - DNA, 20 bp, Artificial Sequence
  Synthetic oligonucleotide; AAG chr2 60476347 60476366 60476350 -
catttagcctgggtttgggg

SEQ ID NO: 182311 - DNA, 20 bp, Artificial Sequence
  Synthetic oligonucleotide; TGG chr2 60476336 60476355 60476339 -
ggtttggggaagtttcttcc

SEQ ID NO: 182312 - DNA, 20 bp, Artificial Sequence
  Synthetic oligonucleotide; CAG chr2 60476321 60476340 60476324 -
cttcctggttctctgacctt

SEQ ID NO: 182313 - DNA, 20 bp, Artificial Sequence
  Synthetic oligonucleotide; TGG chr2 60476312 60476331 60476315 -
tctctgaccttcagtctcat

SEQ ID NO: 182314 - DNA, 20 bp, Artificial Sequence
  Synthetic oligonucleotide; CAG chr2 60476307 60476326 60476310 -
gaccttcagtctcattggct

SEQ ID NO: 182315 - DNA, 20 bp, Artificial Sequence
  Synthetic oligonucleotide; AGG chr2 60476306 60476325 60476309 -
accttcagtctcattggctc

SEQ ID NO: 182316 - DNA, 20 bp, Artificial Sequence
  Synthetic oligonucleotide; TAG chr2 60476296 60476315 60476299 -
tcattggctcaggacacacc

SEQ ID NO: 182317 - DNA, 20 bp, Artificial Sequence
  Synthetic oligonucleotide; AGG chr2 60476295 60476314 60476298 -
cattggctcaggacacacct

SEQ ID NO: 182318 - DNA, 20 bp, Artificial Sequence
  Synthetic oligonucleotide; AAG chr2 60476281 60476300 60476284 -
acacctaggtttcctccttg

SEQ ID NO: 182319 - DNA, 20 bp, Artificial Sequence
  Synthetic oligonucleotide; CAG chr2 60476276 60476295 60476279 -
taggtttcctccttgaagct

SEQ ID NO: 182320 - DNA, 20 bp, Artificial Sequence
  Synthetic oligonucleotide; AAG chr2 60476258 60476277 60476261 -
ctcagacatgtaaactttgc

SEQ ID NO: 182321 - DNA, 20 bp, Artificial Sequence
  Synthetic oligonucleotide; CAG chr2 60476246 60476265 60476249 -
aactttgcaagactgtgtcc

SEQ ID NO: 182322 - DNA, 20 bp, Artificial Sequence
  Synthetic oligonucleotide; AGG chr2 60476245 60476264 60476248 -
actttgcaagactgtgtccc

SEQ ID NO: 182323 - DNA, 20 bp, Artificial Sequence
  Synthetic oligonucleotide; GAG chr2 60476243 60476262 60476246 -
tttgcaagactgtgtcccag

SEQ ID NO: 182324 - DNA, 20 bp, Artificial Sequence
  Synthetic oligonucleotide; AGG chr2 60476242 60476261 60476245 -
ttgcaagactgtgtcccagg

SEQ ID NO: 182325 - DNA, 20 bp, Artificial Sequence
  Synthetic oligonucleotide; CAG chr2 60476225 60476244 60476228 -
aggaggttgaaatccatcat

SEQ ID NO: 182326 - DNA, 20 bp, Artificial Sequence
  Synthetic oligonucleotide; AGG chr2 60476224 60476243 60476227 -
ggaggttgaaatccatcatc

SEQ ID NO: 182327 - DNA, 20 bp, Artificial Sequence
  Synthetic oligonucleotide; AAG chr2 60476211 60476230 60476214 -
catcatcaggctcactctct

SEQ ID NO: 182328 - DNA, 20 bp, Artificial Sequence
  Synthetic oligonucleotide; AAG chr2 60476205 60476224 60476208 -
caggctcactctctaagcct

SEQ ID NO: 182329 - DNA, 20 bp, Artificial Sequence
  Synthetic oligonucleotide; AGG chr2 60476204 60476223 60476207 -
aggctcactctctaagccta

SEQ ID NO: 182330 - DNA, 20 bp, Artificial Sequence
  Synthetic oligonucleotide; TAG chr2 60476199 60476218 60476202 -
cactctctaagcctaaggat

SEQ ID NO: 182331 - DNA, 20 bp, Artificial Sequence
  Synthetic oligonucleotide; TGG chr2 60476194 60476213 60476197 -
tctaagcctaaggattagcc

SEQ ID NO: 182332 - DNA, 20 bp, Artificial Sequence
  Synthetic oligonucleotide; GGG chr2 60476193 60476212 60476196 -
ctaagcctaaggattagcct

SEQ ID NO: 182333 - DNA, 20 bp, Artificial Sequence
  Synthetic oligonucleotide; GGG chr2 60476192 60476211 60476195 -
taagcctaaggattagcctg

SEQ ID NO: 182334 - DNA, 20 bp, Artificial Sequence
  Synthetic oligonucleotide; AAG chr2 60476186 60476205 60476189 -
taaggattagcctggggacc

SEQ ID NO: 182335 - DNA, 20 bp, Artificial Sequence
  Synthetic oligonucleotide; CAG chr2 60476181 60476200 60476184 -
attagcctggggaccaagcc

SEQ ID NO: 182336 - DNA, 20 bp, Artificial Sequence
  Synthetic oligonucleotide; AAG chr2 60476162 60476181 60476165 -
ccagccctgaactctcctat

SEQ ID NO: 182337 - DNA, 20 bp, Artificial Sequence
  Synthetic oligonucleotide; AGG chr2 60476161 60476180 60476164 -
cagccctgaactctcctata

SEQ ID NO: 182338 - DNA, 20 bp, Artificial Sequence
  Synthetic oligonucleotide; CAG chr2 60476147 60476166 60476150 -
cctataaggccctcctcatc

SEQ ID NO: 182339 - DNA, 20 bp, Artificial Sequence
  Synthetic oligonucleotide; AGG chr2 60476146 60476165 60476149 -
ctataaggccctcctcatcc

SEQ ID NO: 182340 - DNA, 20 bp, Artificial Sequence
  Synthetic oligonucleotide; AAG chr2 60476141 60476160 60476144 -
aggccctcctcatccaggtc

SEQ ID NO: 182341 - DNA, 20 bp, Artificial Sequence
  Synthetic oligonucleotide; AGG chr2 60476140 60476159 60476143 -
ggccctcctcatccaggtca

SEQ ID NO: 182342 - DNA, 20 bp, Artificial Sequence
  Synthetic oligonucleotide; GAG chr2 60476133 60476152 60476136 -
ctcatccaggtcaaggtcat

SEQ ID NO: 182343 - DNA, 20 bp, Artificial Sequence
  Synthetic oligonucleotide; AGG chr2 60476132 60476151 60476135 -
tcatccaggtcaaggtcatg

SEQ ID NO: 182344 - DNA, 20 bp, Artificial Sequence
  Synthetic oligonucleotide; GGG chr2 60476131 60476150 60476134 -
catccaggtcaaggtcatga

SEQ ID NO: 182345 - DNA, 20 bp, Artificial Sequence
  Synthetic oligonucleotide; GGG chr2 60476130 60476149 60476133 -
atccaggtcaaggtcatgag

SEQ ID NO: 182346 - DNA, 20 bp, Artificial Sequence
  Synthetic oligonucleotide; CAG chr2 60476125 60476144 60476128 -
ggtcaaggtcatgaggggaa

SEQ ID NO: 182347 - DNA, 20 bp, Artificial Sequence
  Synthetic oligonucleotide; AGG chr2 60476124 60476143 60476127 -
gtcaaggtcatgaggggaac

SEQ ID NO: 182348 - DNA, 20 bp, Artificial Sequence
  Synthetic oligonucleotide; TGG chr2 60476114 60476133 60476117 -
tgaggggaacaggtgtatcc

SEQ ID NO: 182349 - DNA, 20 bp, Artificial Sequence
  Synthetic oligonucleotide; CAG chr2 60476110 60476129 60476113 -
gggaacaggtgtatcctggc

SEQ ID NO: 182350 - DNA, 20 bp, Artificial Sequence
  Synthetic oligonucleotide; TAG chr2 60476103 60476122 60476106 -
ggtgtatcctggccagcttc

SEQ ID NO: 182351 - DNA, 20 bp, Artificial Sequence
  Synthetic oligonucleotide; CGG chr2 60476098 60476117 60476101 -
atcctggccagcttctagca

SEQ ID NO: 182352 - DNA, 20 bp, Artificial Sequence
  Synthetic oligonucleotide; TAG chr2 60476091 60476110 60476094 -
ccagcttctagcacggccta

SEQ ID NO: 182353 - DNA, 20 bp, Artificial Sequence
  Synthetic oligonucleotide; TAG chr2 60476088 60476107 60476091 -
gcttctagcacggcctatag

SEQ ID NO: 182354 - DNA, 20 bp, Artificial Sequence
  Synthetic oligonucleotide; AGG chr2 60476087 60476106 60476090 -
cttctagcacggcctatagt

SEQ ID NO: 182355 - DNA, 20 bp, Artificial Sequence
  Synthetic oligonucleotide; TGG chr2 60476079 60476098 60476082 -
acggcctatagtaggtctct

SEQ ID NO: 182356 - DNA, 20 bp, Artificial Sequence
  Synthetic oligonucleotide; TGG chr2 60476075 60476094 60476078 -
cctatagtaggtctcttggt

SEQ ID NO: 182357 - DNA, 20 bp, Artificial Sequence
  Synthetic oligonucleotide; AAG chr2 60476068 60476087 60476071 -
taggtctcttggttggtcca

SEQ ID NO: 182358 - DNA, 20 bp, Artificial Sequence
  Synthetic oligonucleotide; AGG chr2 60476067 60476086 60476070 -
aggtctcttggttggtccaa

SEQ ID NO: 182359 - DNA, 20 bp, Artificial Sequence
  Synthetic oligonucleotide; GAG chr2 60476065 60476084 60476068 -
gtctcttggttggtccaaag

SEQ ID NO: 182360 - DNA, 20 bp, Artificial Sequence
  Synthetic oligonucleotide; AGG chr2 60476064 60476083 60476067 -
tctcttggttggtccaaagg

SEQ ID NO: 182361 - DNA, 20 bp, Artificial Sequence
  Synthetic oligonucleotide; TGG chr2 60476059 60476078 60476062 -
tggttggtccaaaggaggcc

SEQ ID NO: 182362 - DNA, 20 bp, Artificial Sequence
  Synthetic oligonucleotide; TGG chr2 60476049 60476068 60476052 -
aaaggaggcctggacttgca

SEQ ID NO: 182363 - DNA, 20 bp, Artificial Sequence
  Synthetic oligonucleotide; GGG chr2 60476048 60476067 60476051 -
aaggaggcctggacttgcat

SEQ ID NO: 182364 - DNA, 20 bp, Artificial Sequence
  Synthetic oligonucleotide; GAG chr2 60476046 60476065 60476049 -
ggaggcctggacttgcatgg

SEQ ID NO: 182365 - DNA, 20 bp, Artificial Sequence
  Synthetic oligonucleotide; AGG chr2 60476045 60476064 60476048 -
gaggcctggacttgcatggg

SEQ ID NO: 182366 - DNA, 20 bp, Artificial Sequence
  Synthetic oligonucleotide; CAG chr2 60476042 60476061 60476045 -
gcctggacttgcatgggagg

SEQ ID NO: 182367 - DNA, 20 bp, Artificial Sequence
  Synthetic oligonucleotide; AGG chr2 60476041 60476060 60476044 -
cctggacttgcatgggaggc

SEQ ID NO: 182368 - DNA, 20 bp, Artificial Sequence
  Synthetic oligonucleotide; GAG chr2 60476039 60476058 60476042 -
tggacttgcatgggaggcag

SEQ ID NO: 182369 - DNA, 20 bp, Artificial Sequence
  Synthetic oligonucleotide; GAG chr2 60476037 60476056 60476040 -
gacttgcatgggaggcagga

SEQ ID NO: 182370 - DNA, 20 bp, Artificial Sequence
  Synthetic oligonucleotide; GAG chr2 60476035 60476054 60476038 -
cttgcatgggaggcaggaga

SEQ ID NO: 182371 - DNA, 20 bp, Artificial Sequence
  Synthetic oligonucleotide; AAG chr2 60476032 60476051 60476035 -
gcatgggaggcaggagagag

SEQ ID NO: 182372 - DNA, 20 bp, Artificial Sequence
  Synthetic oligonucleotide; CAG chr2 60476014 60476033 60476017 -
agaagccaccccatctaatc

SEQ ID NO: 182373 - DNA, 20 bp, Artificial Sequence
  Synthetic oligonucleotide; AAG chr2 60475998 60476017 60476001 -
aatccagtcttctcctttta

SEQ ID NO: 182374 - DNA, 20 bp, Artificial Sequence
  Synthetic oligonucleotide; TGG chr2 60475994 60476013 60475997 -
cagtcttctccttttaaaga

SEQ ID NO: 182375 - DNA, 20 bp, Artificial Sequence
  Synthetic oligonucleotide; TAG chr2 60475984 60476003 60475987 -
cttttaaagatggaaacact

SEQ ID NO: 182376 - DNA, 20 bp, Artificial Sequence
  Synthetic oligonucleotide; AGG chr2 60475983 60476002 60475986 -
ttttaaagatggaaacactt

SEQ ID NO: 182377 - DNA, 20 bp, Artificial Sequence
  Synthetic oligonucleotide; GGG chr2 60475982 60476001 60475985 -
tttaaagatggaaacactta

SEQ ID NO: 182378 - DNA, 20 bp, Artificial Sequence
  Synthetic oligonucleotide; CAG chr2 60475978 60475997 60475981 -
aagatggaaacacttagggc

SEQ ID NO: 182379 - DNA, 20 bp, Artificial Sequence
  Synthetic oligonucleotide; AAG chr2 60475974 60475993 60475977 -
tggaaacacttagggccaga

SEQ ID NO: 182380 - DNA, 20 bp, Artificial Sequence
  Synthetic oligonucleotide; AAG chr2 60475970 60475989 60475973 -
aacacttagggccagaaaga

SEQ ID NO: 182381 - DNA, 20 bp, Artificial Sequence
  Synthetic oligonucleotide; AGG chr2 60475969 60475988 60475972 -
acacttagggccagaaagaa

SEQ ID NO: 182382 - DNA, 20 bp, Artificial Sequence
  Synthetic oligonucleotide; AAG chr2 60475957 60475976 60475960 -
agaaagaaaggatttattca

SEQ ID NO: 182383 - DNA, 20 bp, Artificial Sequence
  Synthetic oligonucleotide; CAG chr2 60475946 60475965 60475949 -
atttattcaaagtcacgaaa

SEQ ID NO: 182384 - DNA, 20 bp, Artificial Sequence
  Synthetic oligonucleotide; TGG chr2 60475942 60475961 60475945 -
attcaaagtcacgaaacagc

SEQ ID NO: 182385 - DNA, 20 bp, Artificial Sequence
  Synthetic oligonucleotide; GAG chr2 60475938 60475957 60475941 -
aaagtcacgaaacagctggt

SEQ ID NO: 182386 - DNA, 20 bp, Artificial Sequence
  Synthetic oligonucleotide; TGG chr2 60475935 60475954 60475938 -
gtcacgaaacagctggtgag

SEQ ID NO: 182387 - DNA, 20 bp, Artificial Sequence
  Synthetic oligonucleotide; CAG chr2 60475932 60475951 60475935 -
acgaaacagctggtgagtgg

SEQ ID NO: 182388 - DNA, 20 bp, Artificial Sequence
  Synthetic oligonucleotide; GAG chr2 60475930 60475949 60475933 -
gaaacagctggtgagtggca

SEQ ID NO: 182389 - DNA, 20 bp, Artificial Sequence
  Synthetic oligonucleotide; TGG chr2 60475926 60475945 60475929 -
cagctggtgagtggcagagt

SEQ ID NO: 182390 - DNA, 20 bp, Artificial Sequence
  Synthetic oligonucleotide; GGG chr2 60475925 60475944 60475928 -
agctggtgagtggcagagtt

SEQ ID NO: 182391 - DNA, 20 bp, Artificial Sequence
  Synthetic oligonucleotide; GGG chr2 60475924 60475943 60475927 -
gctggtgagtggcagagttg

SEQ ID NO: 182392 - DNA, 20 bp, Artificial Sequence
  Synthetic oligonucleotide; CAG chr2 60475918 60475937 60475921 -
gagtggcagagttggggttg

SEQ ID NO: 182393 - DNA, 20 bp, Artificial Sequence
  Synthetic oligonucleotide; TAG chr2 60475911 60475930 60475914 -
agagttggggttgcagaact

SEQ ID NO: 182394 - DNA, 20 bp, Artificial Sequence
  Synthetic oligonucleotide; AGG chr2 60475910 60475929 60475913 -
gagttggggttgcagaactt

SEQ ID NO: 182395 - DNA, 20 bp, Artificial Sequence
  Synthetic oligonucleotide; TAG chr2 60475892 60475911 60475895 -
ttaggttcctgactttcctc

SEQ ID NO: 182396 - DNA, 20 bp, Artificial Sequence
  Synthetic oligonucleotide; CAG chr2 60475889 60475908 60475892 -
ggttcctgactttcctctag

SEQ ID NO: 182397 - DNA, 20 bp, Artificial Sequence
  Synthetic oligonucleotide; CAG chr2 60475880 60475899 60475883 -
ctttcctctagcagtctctc

SEQ ID NO: 182398 - DNA, 20 bp, Artificial Sequence
  Synthetic oligonucleotide; GAG chr2 60475878 60475897 60475881 -
ttcctctagcagtctctcca

SEQ ID NO: 182399 - DNA, 20 bp, Artificial Sequence
  Synthetic oligonucleotide; AGG chr2 60475877 60475896 60475880 -
tcctctagcagtctctccag

SEQ ID NO: 182400 - DNA, 20 bp, Artificial Sequence
  Synthetic oligonucleotide; AAG chr2 60475871 60475890 60475874 -
agcagtctctccagaggaac

SEQ ID NO: 182401 - DNA, 20 bp, Artificial Sequence
  Synthetic oligonucleotide; AAG chr2 60475855 60475874 60475858 -
gaacaagtccctgcttccta

SEQ ID NO: 182402 - DNA, 20 bp, Artificial Sequence
  Synthetic oligonucleotide; AGG chr2 60475854 60475873 60475857 -
aacaagtccctgcttcctaa

SEQ ID NO: 182403 - DNA, 20 bp, Artificial Sequence
  Synthetic oligonucleotide; AAG chr2 60475851 60475870 60475854 -
aagtccctgcttcctaaagg

SEQ ID NO: 182404 - DNA, 20 bp, Artificial Sequence
  Synthetic oligonucleotide; AAG chr2 60475846 60475865 60475849 -
cctgcttcctaaaggaagaa

SEQ ID NO: 182405 - DNA, 20 bp, Artificial Sequence
  Synthetic oligonucleotide; CGG chr2 60475839 60475858 60475842 -
cctaaaggaagaaaagaatc

SEQ ID NO: 182406 - DNA, 20 bp, Artificial Sequence
  Synthetic oligonucleotide; GGG chr2 60475838 60475857 60475841 -
ctaaaggaagaaaagaatcc

SEQ ID NO: 182407 - DNA, 20 bp, Artificial Sequence
  Synthetic oligonucleotide; GGG chr2 60475837 60475856 60475840 -
taaaggaagaaaagaatccg

SEQ ID NO: 182408 - DNA, 20 bp, Artificial Sequence
  Synthetic oligonucleotide; GAG chr2 60475835 60475854 60475838 -
aaggaagaaaagaatccggg

SEQ ID NO: 182409 - DNA, 20 bp, Artificial Sequence
  Synthetic oligonucleotide; TGG chr2 60475832 60475851 60475835 -
gaagaaaagaatccggggag

SEQ ID NO: 182410 - DNA, 20 bp, Artificial Sequence
  Synthetic oligonucleotide; TGG chr2 60475829 60475848 60475832 -
gaaaagaatccggggagtgg

SEQ ID NO: 182411 - DNA, 20 bp, Artificial Sequence
  Synthetic oligonucleotide; CAG chr2 60475826 60475845 60475829 -
aagaatccggggagtggtgg

SEQ ID NO: 182412 - DNA, 20 bp, Artificial Sequence
  Synthetic oligonucleotide; TGG chr2 60475823 60475842 60475826 -
aatccggggagtggtggcag

SEQ ID NO: 182413 - DNA, 20 bp, Artificial Sequence
  Synthetic oligonucleotide; GGG chr2 60475822 60475841 60475825 -
atccggggagtggtggcagt

SEQ ID NO: 182414 - DNA, 20 bp, Artificial Sequence
  Synthetic oligonucleotide; TAG chr2 60475813 60475832 60475816 -
gtggtggcagtgggaataca

SEQ ID NO: 182415 - DNA, 20 bp, Artificial Sequence
  Synthetic oligonucleotide; GAG chr2 60475811 60475830 60475814 -
ggtggcagtgggaatacata

SEQ ID NO: 182416 - DNA, 20 bp, Artificial Sequence
  Synthetic oligonucleotide; AAG chr2 60475807 60475826 60475810 -
gcagtgggaatacatagagc

SEQ ID NO: 182417 - DNA, 20 bp, Artificial Sequence
  Synthetic oligonucleotide; AGG chr2 60475806 60475825 60475809 -
cagtgggaatacatagagca

SEQ ID NO: 182418 - DNA, 20 bp, Artificial Sequence
  Synthetic oligonucleotide; GGG chr2 60475805 60475824 60475808 -
agtgggaatacatagagcaa

SEQ ID NO: 182419 - DNA, 20 bp, Artificial Sequence
  Synthetic oligonucleotide; AAG chr2 60475793 60475812 60475796 -
tagagcaagggcatctctga

SEQ ID NO: 182420 - DNA, 20 bp, Artificial Sequence
  Synthetic oligonucleotide; TAG chr2 60475790 60475809 60475793 -
agcaagggcatctctgaaag

SEQ ID NO: 182421 - DNA, 20 bp, Artificial Sequence
  Synthetic oligonucleotide; CGG chr2 60475762 60475781 60475765 -
aaataacctgataaatacct

SEQ ID NO: 182422 - DNA, 20 bp, Artificial Sequence
  Synthetic oligonucleotide; TAG chr2 60475758 60475777 60475761 -
aacctgataaatacctcgga

SEQ ID NO: 182423 - DNA, 20 bp, Artificial Sequence
  Synthetic oligonucleotide; GAG chr2 60475756 60475775 60475759 -
cctgataaatacctcggata

SEQ ID NO: 182424 - DNA, 20 bp, Artificial Sequence
  Synthetic oligonucleotide; AGG chr2 60475755 60475774 60475758 -
ctgataaatacctcggatag

SEQ ID NO: 182425 - DNA, 20 bp, Artificial Sequence
  Synthetic oligonucleotide; AAG chr2 60475751 60475770 60475754 -
taaatacctcggatagaggc

SEQ ID NO: 182426 - DNA, 20 bp, Artificial Sequence
  Synthetic oligonucleotide; AGG chr2 60475750 60475769 60475753 -
aaatacctcggatagaggca

SEQ ID NO: 182427 - DNA, 20 bp, Artificial Sequence
  Synthetic oligonucleotide; AAG chr2 60475712 60475731 60475715 -
tgcccccactacacacaaac

SEQ ID NO: 182428 - DNA, 20 bp, Artificial Sequence
  Synthetic oligonucleotide; CAG chr2 60475704 60475723 60475707 -
ctacacacaaacaagatcct

SEQ ID NO: 182429 - DNA, 20 bp, Artificial Sequence
  Synthetic oligonucleotide; GAG chr2 60475699 60475718 60475702 -
cacaaacaagatcctcagct

SEQ ID NO: 182430 - DNA, 20 bp, Artificial Sequence
  Synthetic oligonucleotide; AGG chr2 60475698 60475717 60475701 -
acaaacaagatcctcagctg

SEQ ID NO: 182431 - DNA, 20 bp, Artificial Sequence
  Synthetic oligonucleotide; CAG chr2 60475692 60475711 60475695 -
aagatcctcagctgaggact

SEQ ID NO: 182432 - DNA, 20 bp, Artificial Sequence
  Synthetic oligonucleotide; GAG chr2 60475690 60475709 60475693 -
gatcctcagctgaggactca

SEQ ID NO: 182433 - DNA, 20 bp, Artificial Sequence
  Synthetic oligonucleotide; CAG chr2 60475687 60475706 60475690 -
cctcagctgaggactcagag

SEQ ID NO: 182434 - DNA, 20 bp, Artificial Sequence
  Synthetic oligonucleotide; AGG chr2 60475686 60475705 60475689 -
ctcagctgaggactcagagc

SEQ ID NO: 182435 - DNA, 20 bp, Artificial Sequence
  Synthetic oligonucleotide; GAG chr2 60475684 60475703 60475687 -
cagctgaggactcagagcag

SEQ ID NO: 182436 - DNA, 20 bp, Artificial Sequence
  Synthetic oligonucleotide; AAG chr2 60475680 60475699 60475683 -
tgaggactcagagcaggagt

SEQ ID NO: 182437 - DNA, 20 bp, Artificial Sequence
  Synthetic oligonucleotide; AGG chr2 60475679 60475698 60475682 -
gaggactcagagcaggagta

SEQ ID NO: 182438 - DNA, 20 bp, Artificial Sequence
  Synthetic oligonucleotide; GGG chr2 60475678 60475697 60475681 -
aggactcagagcaggagtaa

SEQ ID NO: 182439 - DNA, 20 bp, Artificial Sequence
  Synthetic oligonucleotide; TGG chr2 60475658 60475677 60475661 -
gggcacccctatcctcccca

SEQ ID NO: 182440 - DNA, 20 bp, Artificial Sequence
  Synthetic oligonucleotide; AAG chr2 60475648 60475667 60475651 -
atcctccccatggctttgaa

SEQ ID NO: 182441 - DNA, 20 bp, Artificial Sequence
  Synthetic oligonucleotide; AAG chr2 60475645 60475664 60475648 -
ctccccatggctttgaaaag

SEQ ID NO: 182442 - DNA, 20 bp, Artificial Sequence
  Synthetic oligonucleotide; AAG chr2 60475641 60475660 60475644 -
ccatggctttgaaaagaaga

SEQ ID NO: 182443 - DNA, 20 bp, Artificial Sequence
  Synthetic oligonucleotide; GAG chr2 60475639 60475658 60475642 -
atggctttgaaaagaagaaa

SEQ ID NO: 182444 - DNA, 20 bp, Artificial Sequence
  Synthetic oligonucleotide; AGG chr2 60475638 60475657 60475641 -
tggctttgaaaagaagaaag

SEQ ID NO: 182445 - DNA, 20 bp, Artificial Sequence
  Synthetic oligonucleotide; GGG chr2 60475637 60475656 60475640 -
ggctttgaaaagaagaaaga

SEQ ID NO: 182446 - DNA, 20 bp, Artificial Sequence
  Synthetic oligonucleotide; GGG chr2 60475636 60475655 60475639 -
gctttgaaaagaagaaagag

SEQ ID NO: 182447 - DNA, 20 bp, Artificial Sequence
  Synthetic oligonucleotide; TGG chr2 60475628 60475647 60475631 -
aagaagaaagaggggaaatt

SEQ ID NO: 182448 - DNA, 20 bp, Artificial Sequence
  Synthetic oligonucleotide; GAG chr2 60475626 60475645 60475629 -
gaagaaagaggggaaatttg

SEQ ID NO: 182449 - DNA, 20 bp, Artificial Sequence
  Synthetic oligonucleotide; AGG chr2 60475625 60475644 60475628 -
aagaaagaggggaaatttgg

SEQ ID NO: 182450 - DNA, 20 bp, Artificial Sequence
  Synthetic oligonucleotide; GGG chr2 60475624 60475643 60475627 -
agaaagaggggaaatttgga

SEQ ID NO: 182451 - DNA, 20 bp, Artificial Sequence
  Synthetic oligonucleotide; TGG chr2 60475620 60475639 60475623 -
agaggggaaatttggaggga

SEQ ID NO: 182452 - DNA, 20 bp, Artificial Sequence
  Synthetic oligonucleotide; AAG chr2 60475615 60475634 60475618 -
ggaaatttggagggatggtc

SEQ ID NO: 182453 - DNA, 20 bp, Artificial Sequence
  Synthetic oligonucleotide; AAG chr2 60475602 60475621 60475605 -
gatggtcaagttgatgattg

SEQ ID NO: 182454 - DNA, 20 bp, Artificial Sequence
  Synthetic oligonucleotide; GAG chr2 60475600 60475619 60475603 -
tggtcaagttgatgattgaa

SEQ ID NO: 182455 - DNA, 20 bp, Artificial Sequence
  Synthetic oligonucleotide; AAG chr2 60475594 60475613 60475597 -
agttgatgattgaagagaca

SEQ ID NO: 182456 - DNA, 20 bp, Artificial Sequence
  Synthetic oligonucleotide; TAG chr2 60475591 60475610 60475594 -
tgatgattgaagagacaaag

SEQ ID NO: 182457 - DNA, 20 bp, Artificial Sequence
  Synthetic oligonucleotide; TAG chr2 60475586 60475605 60475589 -
attgaagagacaaagtagtg

SEQ ID NO: 182458 - DNA, 20 bp, Artificial Sequence
  Synthetic oligonucleotide; AGG chr2 60475585 60475604 60475588 -
ttgaagagacaaagtagtgt

SEQ ID NO: 182459 - DNA, 20 bp, Artificial Sequence
  Synthetic oligonucleotide; CAG chr2 60475561 60475580 60475564 -
aaatctcaatgtttcttgca

SEQ ID NO: 182460 - DNA, 20 bp, Artificial Sequence
  Synthetic oligonucleotide; CAG chr2 60475539 60475558 60475542 -
gtcatttgttgaaaatgtgt

SEQ ID NO: 182461 - DNA, 20 bp, Artificial Sequence
  Synthetic oligonucleotide; AAG chr2 60475535 60475554 60475538 -
tttgttgaaaatgtgtcagc

SEQ ID NO: 182462 - DNA, 20 bp, Artificial Sequence
  Synthetic oligonucleotide; AAG chr2 60475529 60475548 60475532 -
gaaaatgtgtcagcaagtac

SEQ ID NO: 182463 - DNA, 20 bp, Artificial Sequence
  Synthetic oligonucleotide; TGG chr2 60475514 60475533 60475517 -
agtacaagcccatcttaaac

SEQ ID NO: 182464 - DNA, 20 bp, Artificial Sequence
  Synthetic oligonucleotide; GAG chr2 60475507 60475526 60475510 -
gcccatcttaaactggcaat

SEQ ID NO: 182465 - DNA, 20 bp, Artificial Sequence
  Synthetic oligonucleotide; TAG chr2 60475494 60475513 60475497 -
tggcaatgagacatctgaaa

SEQ ID NO: 182466 - DNA, 20 bp, Artificial Sequence
  Synthetic oligonucleotide; AAG chr2 60475484 60475503 60475487 -
acatctgaaatagattattt

SEQ ID NO: 182467 - DNA, 20 bp, Artificial Sequence
  Synthetic oligonucleotide; CAG chr2 60475480 60475499 60475483 -
ctgaaatagattatttaagc

SEQ ID NO: 182468 - DNA, 20 bp, Artificial Sequence
  Synthetic oligonucleotide; AGG chr2 60475479 60475498 60475482 -
tgaaatagattatttaagcc

SEQ ID NO: 182469 - DNA, 20 bp, Artificial Sequence
  Synthetic oligonucleotide; GGG chr2 60475478 60475497 60475481 -
gaaatagattatttaagcca

SEQ ID NO: 182470 - DNA, 20 bp, Artificial Sequence
  Synthetic oligonucleotide; GAG chr2 60475476 60475495 60475479 -
aatagattatttaagccagg

SEQ ID NO: 182471 - DNA, 20 bp, Artificial Sequence
  Synthetic oligonucleotide; AGG chr2 60475475 60475494 60475478 -
atagattatttaagccaggg

SEQ ID NO: 182472 - DNA, 20 bp, Artificial Sequence
  Synthetic oligonucleotide; CAG chr2 60475472 60475491 60475475 -
gattatttaagccagggagg

SEQ ID NO: 182473 - DNA, 20 bp, Artificial Sequence
  Synthetic oligonucleotide; AAG chr2 60475463 60475482 60475466 -
agccagggaggcagtattgc

SEQ ID NO: 182474 - DNA, 20 bp, Artificial Sequence
  Synthetic oligonucleotide; AGG chr2 60475462 60475481 60475465 -
gccagggaggcagtattgca

SEQ ID NO: 182475 - DNA, 20 bp, Artificial Sequence
  Synthetic oligonucleotide; AAG chr2 60475459 60475478 60475462 -
agggaggcagtattgcaagg

SEQ ID NO: 182476 - DNA, 20 bp, Artificial Sequence
  Synthetic oligonucleotide; TGG chr2 60475452 60475471 60475455 -
cagtattgcaaggaagaaca

SEQ ID NO: 182477 - DNA, 20 bp, Artificial Sequence
  Synthetic oligonucleotide; CAG chr2 60475425 60475444 60475428 -
caacacttgtttgtctgact

SEQ ID NO: 182478 - DNA, 20 bp, Artificial Sequence
  Synthetic oligonucleotide; GAG chr2 60475423 60475442 60475426 -
acacttgtttgtctgactca

SEQ ID NO: 182479 - DNA, 20 bp, Artificial Sequence
  Synthetic oligonucleotide; AGG chr2 60475422 60475441 60475425 -
cacttgtttgtctgactcag

SEQ ID NO: 182480 - DNA, 20 bp, Artificial Sequence
  Synthetic oligonucleotide; TAG chr2 60475410 60475429 60475413 -
tgactcagaggaataaaaca

SEQ ID NO: 182481 - DNA, 20 bp, Artificial Sequence
  Synthetic oligonucleotide; TAG chr2 60475395 60475414 60475398 -
aaacatagtaaattttgcct

SEQ ID NO: 182482 - DNA, 20 bp, Artificial Sequence
  Synthetic oligonucleotide; CGG chr2 60475392 60475411 60475395 -
catagtaaattttgccttag

SEQ ID NO: 182483 - DNA, 20 bp, Artificial Sequence
  Synthetic oligonucleotide; GGG chr2 60475391 60475410 60475394 -
atagtaaattttgccttagc

SEQ ID NO: 182484 - DNA, 20 bp, Artificial Sequence
  Synthetic oligonucleotide; TGG chr2 60475374 60475393 60475377 -
agcgggccacccacattcat

SEQ ID NO: 182485 - DNA, 20 bp, Artificial Sequence
  Synthetic oligonucleotide; GGG chr2 60475373 60475392 60475376 -
gcgggccacccacattcatt

SEQ ID NO: 182486 - DNA, 20 bp, Artificial Sequence
  Synthetic oligonucleotide; GGG chr2 60475372 60475391 60475375 -
cgggccacccacattcattg

SEQ ID NO: 182487 - DNA, 20 bp, Artificial Sequence
  Synthetic oligonucleotide; GGG chr2 60475371 60475390 60475374 -
gggccacccacattcattgg

SEQ ID NO: 182488 - DNA, 20 bp, Artificial Sequence
  Synthetic oligonucleotide; AAG chr2 60475368 60475387 60475371 -
ccacccacattcattggggg

SEQ ID NO: 182489 - DNA, 20 bp, Artificial Sequence
  Synthetic oligonucleotide; GAG chr2 60475357 60475376 60475360 -
cattgggggaagaaacaatt

SEQ ID NO: 182490 - DNA, 20 bp, Artificial Sequence
  Synthetic oligonucleotide; AGG chr2 60475356 60475375 60475359 -
attgggggaagaaacaattg

SEQ ID NO: 182491 - DNA, 20 bp, Artificial Sequence
  Synthetic oligonucleotide; TGG chr2 60475353 60475372 60475356 -
gggggaagaaacaattgagg

SEQ ID NO: 182492 - DNA, 20 bp, Artificial Sequence
  Synthetic oligonucleotide; GGG chr2 60475352 60475371 60475355 -
ggggaagaaacaattgaggt

SEQ ID NO: 182493 - DNA, 20 bp, Artificial Sequence
  Synthetic oligonucleotide; GGG chr2 60475351 60475370 60475354 -
gggaagaaacaattgaggtg

SEQ ID NO: 182494 - DNA, 20 bp, Artificial Sequence
  Synthetic oligonucleotide; GGG chr2 60475350 60475369 60475353 -
ggaagaaacaattgaggtgg

SEQ ID NO: 182495 - DNA, 20 bp, Artificial Sequence
  Synthetic oligonucleotide; GGG chr2 60475349 60475368 60475352 -
gaagaaacaattgaggtggg

SEQ ID NO: 182496 - DNA, 20 bp, Artificial Sequence
  Synthetic oligonucleotide; CAG chr2 60475342 60475361 60475345 -
caattgaggtggggggaaaa

SEQ ID NO: 182497 - DNA, 20 bp, Artificial Sequence
  Synthetic oligonucleotide; CAG chr2 60475337 60475356 60475340 -
gaggtggggggaaaacagaa

SEQ ID NO: 182498 - DNA, 20 bp, Artificial Sequence
  Synthetic oligonucleotide; TGG chr2 60475323 60475342 60475326 -
acagaacagatgaaccttca

SEQ ID NO: 182499 - DNA, 20 bp, Artificial Sequence
  Synthetic oligonucleotide; GAG chr2 60475321 60475340 60475324 -
agaacagatgaaccttcatg

SEQ ID NO: 182500 - DNA, 20 bp, Artificial Sequence
  Synthetic oligonucleotide; AAG chr2 60475312 60475331 60475315 -
gaaccttcatggagtttcac

SEQ ID NO: 182501 - DNA, 20 bp, Artificial Sequence
  Synthetic oligonucleotide; GAG chr2 60475310 60475329 60475313 -
accttcatggagtttcacaa

SEQ ID NO: 182502 - DNA, 20 bp, Artificial Sequence
  Synthetic oligonucleotide; TGG chr2 60475301 60475320 60475304 -
gagtttcacaagagtccaca

SEQ ID NO: 182503 - DNA, 20 bp, Artificial Sequence
  Synthetic oligonucleotide; CAG chr2 60475282 60475301 60475285 -
atggttgtgtcccttatttt

SEQ ID NO: 182504 - DNA, 20 bp, Artificial Sequence
  Synthetic oligonucleotide; TGG chr2 60475267 60475286 60475270 -
attttcagaaaatgtgaaat

SEQ ID NO: 182505 - DNA, 20 bp, Artificial Sequence
  Synthetic oligonucleotide; AAG chr2 60475247 60475266 60475250 -
tggaaaatacgcacttgtga

SEQ ID NO: 182506 - DNA, 20 bp, Artificial Sequence
  Synthetic oligonucleotide; AAG chr2 60475241 60475260 60475244 -
atacgcacttgtgaaagctg

SEQ ID NO: 182507 - DNA, 20 bp, Artificial Sequence
  Synthetic oligonucleotide; CAG chr2 60475232 60475251 60475235 -
tgtgaaagctgaagatgtca

SEQ ID NO: 182508 - DNA, 20 bp, Artificial Sequence
  Synthetic oligonucleotide; CAG chr2 60475222 60475241 60475225 -
gaagatgtcacagaaatctt

SEQ ID NO: 182509 - DNA, 20 bp, Artificial Sequence
  Synthetic oligonucleotide; GAG chr2 60475220 60475239 60475223 -
agatgtcacagaaatcttca

SEQ ID NO: 182510 - DNA, 20 bp, Artificial Sequence
  Synthetic oligonucleotide; AGG chr2 60475219 60475238 60475222 -
gatgtcacagaaatcttcag

SEQ ID NO: 182511 - DNA, 20 bp, Artificial Sequence
  Synthetic oligonucleotide; TAG chr2 60475209 60475228 60475212 -
aaatcttcagaggatttatt

SEQ ID NO: 182512 - DNA, 20 bp, Artificial Sequence
  Synthetic oligonucleotide; TGG chr2 60475205 60475224 60475208 -
cttcagaggatttatttaga

SEQ ID NO: 182513 - DNA, 20 bp, Artificial Sequence
  Synthetic oligonucleotide; TGG chr2 60475182 60475201 60475185 -
tcgtatcctccgctgtcaac

SEQ ID NO: 182514 - DNA, 20 bp, Artificial Sequence
  Synthetic oligonucleotide; CAG chr2 60475173 60475192 60475176 -
ccgctgtcaactggatgaat

SEQ ID NO: 182515 - DNA, 20 bp, Artificial Sequence
  Synthetic oligonucleotide; TGG chr2 60475136 60475155 60475139 -
atgtgaatgtaaccgcctat

SEQ ID NO: 182516 - DNA, 20 bp, Artificial Sequence
  Synthetic oligonucleotide; GGG chr2 60475135 60475154 60475138 -
tgtgaatgtaaccgcctatt

SEQ ID NO: 182517 - DNA, 20 bp, Artificial Sequence
  Synthetic oligonucleotide; TGG chr2 60475109 60475128 60475112 -
catttactctgtgcccacct

SEQ ID NO: 182518 - DNA, 20 bp, Artificial Sequence
  Synthetic oligonucleotide; GGG chr2 60475108 60475127 60475111 -
atttactctgtgcccacctt

SEQ ID NO: 182519 - DNA, 20 bp, Artificial Sequence
  Synthetic oligonucleotide; AAG chr2 60475091 60475110 60475094 -
cttgggctttgcttctctct

SEQ ID NO: 182520 - DNA, 20 bp, Artificial Sequence
  Synthetic oligonucleotide; TAG chr2 60475061 60475080 60475064 -
acctgctttttctttttatc

SEQ ID NO: 182521 - DNA, 20 bp, Artificial Sequence
  Synthetic oligonucleotide; AGG chr2 60475060 60475079 60475063 -
cctgctttttctttttatct

SEQ ID NO: 182522 - DNA, 20 bp, Artificial Sequence
  Synthetic oligonucleotide; TGG chr2 60475044 60475063 60475047 -
atctaggatatcctttctct

SEQ ID NO: 182523 - DNA, 20 bp, Artificial Sequence
  Synthetic oligonucleotide; CAG chr2 60475036 60475055 60475039 -
tatcctttctcttggctctc

SEQ ID NO: 182524 - DNA, 20 bp, Artificial Sequence
  Synthetic oligonucleotide; AGG chr2 60475035 60475054 60475038 -
atcctttctcttggctctcc

SEQ ID NO: 182525 - DNA, 20 bp, Artificial Sequence
  Synthetic oligonucleotide; AAG chr2 60475022 60475041 60475025 -
gctctccaggtttaactcat

SEQ ID NO: 182526 - DNA, 20 bp, Artificial Sequence
  Synthetic oligonucleotide; AAG chr2 60475004 60475023 60475007 -
ataagttttcctctttccca

SEQ ID NO: 182527 - DNA, 20 bp, Artificial Sequence
  Synthetic oligonucleotide; TGG chr2 60474980 60474999 60474983 -
ctctctccctcccttccaaa

SEQ ID NO: 182528 - DNA, 20 bp, Artificial Sequence
  Synthetic oligonucleotide; TAG chr2 60474949 60474968 60474952 -
tctcttcctttgaatttcca

SEQ ID NO: 182529 - DNA, 20 bp, Artificial Sequence
  Synthetic oligonucleotide; CAG chr2 60474946 60474965 60474949 -
cttcctttgaatttccatag

SEQ ID NO: 182530 - DNA, 20 bp, Artificial Sequence
  Synthetic oligonucleotide; TGG chr2 60474908 60474927 60474911 -
ctcatgacacactttctaca

SEQ ID NO: 182531 - DNA, 20 bp, Artificial Sequence
  Synthetic oligonucleotide; GGG chr2 60474907 60474926 60474910 -
tcatgacacactttctacat

SEQ ID NO: 182532 - DNA, 20 bp, Artificial Sequence
  Synthetic oligonucleotide; GGG chr2 60474906 60474925 60474909 -
catgacacactttctacatg

SEQ ID NO: 182533 - DNA, 20 bp, Artificial Sequence
  Synthetic oligonucleotide; GGG chr2 60474905 60474924 60474908 -
atgacacactttctacatgg

SEQ ID NO: 182534 - DNA, 20 bp, Artificial Sequence
  Synthetic oligonucleotide; TAG chr2 60474902 60474921 60474905 -
acacactttctacatggggg

SEQ ID NO: 182535 - DNA, 20 bp, Artificial Sequence
  Synthetic oligonucleotide; GAG chr2 60474900 60474919 60474903 -
acactttctacatgggggta

SEQ ID NO: 182536 - DNA, 20 bp, Artificial Sequence
  Synthetic oligonucleotide; CAG chr2 60474886 60474905 60474889 -
ggggtagagcaatttctgtg

SEQ ID NO: 182537 - DNA, 20 bp, Artificial Sequence
  Synthetic oligonucleotide; AGG chr2 60474885 60474904 60474888 -
gggtagagcaatttctgtgc

SEQ ID NO: 182538 - DNA, 20 bp, Artificial Sequence
  Synthetic oligonucleotide; AAG chr2 60474861 60474880 60474864 -
cttaccttttctactaaatg

SEQ ID NO: 182539 - DNA, 20 bp, Artificial Sequence
  Synthetic oligonucleotide; TGG chr2 60474851 60474870 60474854 -
ctactaaatgaagcctgctg

SEQ ID NO: 182540 - DNA, 20 bp, Artificial Sequence
  Synthetic oligonucleotide; GGG chr2 60474850 60474869 60474853 -
tactaaatgaagcctgctgt

SEQ ID NO: 182541 - DNA, 20 bp, Artificial Sequence
  Synthetic oligonucleotide; GAG chr2 60474848 60474867 60474851 -
ctaaatgaagcctgctgtgg

SEQ ID NO: 182542 - DNA, 20 bp, Artificial Sequence
  Synthetic oligonucleotide; CAG chr2 60474812 60474831 60474815 -
tgttttctttgtactgccca

SEQ ID NO: 182543 - DNA, 20 bp, Artificial Sequence
  Synthetic oligonucleotide; CGG chr2 60474809 60474828 60474812 -
tttctttgtactgcccacag

SEQ ID NO: 182544 - DNA, 20 bp, Artificial Sequence
  Synthetic oligonucleotide; TAG chr2 60474805 60474824 60474808 -
tttgtactgcccacagcggc

SEQ ID NO: 182545 - DNA, 20 bp, Artificial Sequence
  Synthetic oligonucleotide; TGG chr2 60474792 60474811 60474795 -
cagcggctagcccattgctt

SEQ ID NO: 182546 - DNA, 20 bp, Artificial Sequence
  Synthetic oligonucleotide; GGG chr2 60474791 60474810 60474794 -
agcggctagcccattgcttt

SEQ ID NO: 182547 - DNA, 20 bp, Artificial Sequence
  Synthetic oligonucleotide; TAG chr2 60474783 60474802 60474786 -
gcccattgctttgggcattg

SEQ ID NO: 182548 - DNA, 20 bp, Artificial Sequence
  Synthetic oligonucleotide; AGG chr2 60474782 60474801 60474785 -
cccattgctttgggcattgt

SEQ ID NO: 182549 - DNA, 20 bp, Artificial Sequence
  Synthetic oligonucleotide; CGG chr2 60474775 60474794 60474778 -
ctttgggcattgtaggcact

SEQ ID NO: 182550 - DNA, 20 bp, Artificial Sequence
  Synthetic oligonucleotide; GAG chr2 60474748 60474767 60474751 -
tatttgttgaatgaatgcat

SEQ ID NO: 182551 - DNA, 20 bp, Artificial Sequence
  Synthetic oligonucleotide; GAG chr2 60474746 60474765 60474749 -
tttgttgaatgaatgcatga

SEQ ID NO: 182552 - DNA, 20 bp, Artificial Sequence
  Synthetic oligonucleotide; AGG chr2 60474745 60474764 60474748 -
ttgttgaatgaatgcatgag

SEQ ID NO: 182553 - DNA, 20 bp, Artificial Sequence
  Synthetic oligonucleotide; GAG chr2 60474728 60474747 60474731 -
gagaggttgaatgaatgcat

SEQ ID NO: 182554 - DNA, 20 bp, Artificial Sequence
  Synthetic oligonucleotide; GAG chr2 60474726 60474745 60474729 -
gaggttgaatgaatgcatga

SEQ ID NO: 182555 - DNA, 20 bp, Artificial Sequence
  Synthetic oligonucleotide; TGG chr2 60474713 60474732 60474716 -
tgcatgagagaatgaatgaa

SEQ ID NO: 182556 - DNA, 20 bp, Artificial Sequence
  Synthetic oligonucleotide; TGG chr2 60474701 60474720 60474704 -
tgaatgaatggaatttatcc

SEQ ID NO: 182557 - DNA, 20 bp, Artificial Sequence
  Synthetic oligonucleotide; GGG chr2 60474700 60474719 60474703 -
gaatgaatggaatttatcct

SEQ ID NO: 182558 - DNA, 20 bp, Artificial Sequence
  Synthetic oligonucleotide; TAG chr2 60474682 60474701 60474685 -
ctgggaacacacattttgca

SEQ ID NO: 182559 - DNA, 20 bp, Artificial Sequence
  Synthetic oligonucleotide; GAG chr2 60474678 60474697 60474681 -
gaacacacattttgcatagt

SEQ ID NO: 182560 - DNA, 20 bp, Artificial Sequence
  Synthetic oligonucleotide; AGG chr2 60474677 60474696 60474680 -
aacacacattttgcatagtg

SEQ ID NO: 182561 - DNA, 20 bp, Artificial Sequence
  Synthetic oligonucleotide; AAG chr2 60474641 60474660 60474644 -
aaacaaaaaaaaattgtcct

SEQ ID NO: 182562 - DNA, 20 bp, Artificial Sequence
  Synthetic oligonucleotide; CAG chr2 60474620 60474639 60474623 -
agacaatttgtctttttatg

SEQ ID NO: 182563 - DNA, 20 bp, Artificial Sequence
  Synthetic oligonucleotide; CAG chr2 60474608 60474627 60474611 -
tttttatgcagctgccctct

SEQ ID NO: 182564 - DNA, 20 bp, Artificial Sequence
  Synthetic oligonucleotide; TAG chr2 60474600 60474619 60474603 -
cagctgccctctcagtctcc

SEQ ID NO: 182565 - DNA, 20 bp, Artificial Sequence
  Synthetic oligonucleotide; AAG chr2 60474595 60474614 60474598 -
gccctctcagtctcctagat

SEQ ID NO: 182566 - DNA, 20 bp, Artificial Sequence
  Synthetic oligonucleotide; AAG chr2 60474580 60474599 60474583 -
tagataagttccgccattct

SEQ ID NO: 182567 - DNA, 20 bp, Artificial Sequence
  Synthetic oligonucleotide; AGG chr2 60474579 60474598 60474582 -
agataagttccgccattcta

SEQ ID NO: 182568 - DNA, 20 bp, Artificial Sequence
  Synthetic oligonucleotide; AAG chr2 60474573 60474592 60474576 -
gttccgccattctaaggcaa

SEQ ID NO: 182569 - DNA, 20 bp, Artificial Sequence
  Synthetic oligonucleotide; AAG chr2 60474566 60474585 60474569 -
cattctaaggcaaaagctta

SEQ ID NO: 182570 - DNA, 20 bp, Artificial Sequence
  Synthetic oligonucleotide; AAG chr2 60474534 60474553 60474537 -
aatttatctaattcacgatc

SEQ ID NO: 182571 - DNA, 20 bp, Artificial Sequence
  Synthetic oligonucleotide; TGG chr2 60474520 60474539 60474523 -
acgatcaagtgaaaatactt

SEQ ID NO: 182572 - DNA, 20 bp, Artificial Sequence
  Synthetic oligonucleotide; GGG chr2 60474519 60474538 60474522 -
cgatcaagtgaaaatacttt

SEQ ID NO: 182573 - DNA, 20 bp, Artificial Sequence
  Synthetic oligonucleotide; CAG chr2 60474514 60474533 60474517 -
aagtgaaaatactttgggcc

SEQ ID NO: 182574 - DNA, 20 bp, Artificial Sequence
  Synthetic oligonucleotide; GAG chr2 60474512 60474531 60474515 -
gtgaaaatactttgggccca

SEQ ID NO: 182575 - DNA, 20 bp, Artificial Sequence
  Synthetic oligonucleotide; AAG chr2 60474506 60474525 60474509 -
atactttgggcccagagcca

SEQ ID NO: 182576 - DNA, 20 bp, Artificial Sequence
  Synthetic oligonucleotide; TGG chr2 60474495 60474514 60474498 -
ccagagccaaagaatattat

SEQ ID NO: 182577 - DNA, 20 bp, Artificial Sequence
  Synthetic oligonucleotide; GAG chr2 60474493 60474512 60474496 -
agagccaaagaatattattg

SEQ ID NO: 182578 - DNA, 20 bp, Artificial Sequence
  Synthetic oligonucleotide; CAG chr2 60474461 60474480 60474464 -
tttaacaccctaaatttaac

SEQ ID NO: 182579 - DNA, 20 bp, Artificial Sequence
  Synthetic oligonucleotide; TGG chr2 60474457 60474476 60474460 -
acaccctaaatttaaccagc

SEQ ID NO: 182580 - DNA, 20 bp, Artificial Sequence
  Synthetic oligonucleotide; AAG chr2 60474442 60474461 60474445 -
ccagctggaattcttttttt

SEQ ID NO: 182581 - DNA, 20 bp, Artificial Sequence
  Synthetic oligonucleotide; AAG chr2 60474412 60474431 60474415 -
ctattcaaccttttgaaatg

SEQ ID NO: 182582 - DNA, 20 bp, Artificial Sequence
  Synthetic oligonucleotide; AGG chr2 60474411 60474430 60474414 -
tattcaaccttttgaaatga

SEQ ID NO: 182583 - DNA, 20 bp, Artificial Sequence
  Synthetic oligonucleotide; TAG chr2 60474398 60474417 60474401 -
gaaatgaaggatttgccttt

SEQ ID NO: 182584 - DNA, 20 bp, Artificial Sequence
  Synthetic oligonucleotide; TGG chr2 60474395 60474414 60474398 -
atgaaggatttgccttttag

SEQ ID NO: 182585 - DNA, 20 bp, Artificial Sequence
  Synthetic oligonucleotide; GGG chr2 60474394 60474413 60474397 -
tgaaggatttgccttttagt

SEQ ID NO: 182586 - DNA, 20 bp, Artificial Sequence
  Synthetic oligonucleotide; AAG chr2 60474372 60474391 60474375 -
gaaatctgcatttcaacaca

SEQ ID NO: 182587 - DNA, 20 bp, Artificial Sequence
  Synthetic oligonucleotide; TGG chr2 60474368 60474387 60474371 -
tctgcatttcaacacaaaga

SEQ ID NO: 182588 - DNA, 20 bp, Artificial Sequence
  Synthetic oligonucleotide; TGG chr2 60474352 60474371 60474355 -
aagatggaacacaatgtctt

SEQ ID NO: 182589 - DNA, 20 bp, Artificial Sequence
  Synthetic oligonucleotide; TAG chr2 60474347 60474366 60474350 -
ggaacacaatgtctttggct

SEQ ID NO: 182590 - DNA, 20 bp, Artificial Sequence
  Synthetic oligonucleotide; CAG chr2 60474336 60474355 60474339 -
tctttggcttagttgctttt

SEQ ID NO: 182591 - DNA, 20 bp, Artificial Sequence
  Synthetic oligonucleotide; AAG chr2 60474331 60474350 60474334 -
ggcttagttgcttttcagaa

SEQ ID NO: 182592 - DNA, 20 bp, Artificial Sequence
  Synthetic oligonucleotide; AAG chr2 60474327 60474346 60474330 -
tagttgcttttcagaaaagc

SEQ ID NO: 182593 - DNA, 20 bp, Artificial Sequence
  Synthetic oligonucleotide; TGG chr2 60474312 60474331 60474315 -
aaagcaagattttttttttt

SEQ ID NO: 182594 - DNA, 20 bp, Artificial Sequence
  Synthetic oligonucleotide; AAG chr2 60474286 60474305 60474289 -
tatatgctttgcttatgtta

SEQ ID NO: 182595 - DNA, 20 bp, Artificial Sequence
  Synthetic oligonucleotide; CAG chr2 60474280 60474299 60474283 -
ctttgcttatgttaaagaca

SEQ ID NO: 182596 - DNA, 20 bp, Artificial Sequence
  Synthetic oligonucleotide; CAG chr2 60474273 60474292 60474276 -
tatgttaaagacacagcttg

SEQ ID NO: 182597 - DNA, 20 bp, Artificial Sequence
  Synthetic oligonucleotide; TAG chr2 60474258 60474277 60474261 -
gcttgcagaaaaattttgtt

SEQ ID NO: 182598 - DNA, 20 bp, Artificial Sequence
  Synthetic oligonucleotide; AGG chr2 60474257 60474276 60474260 -
cttgcagaaaaattttgttt

SEQ ID NO: 182599 - DNA, 20 bp, Artificial Sequence
  Synthetic oligonucleotide; CAG chr2 60474249 60474268 60474252 -
aaaattttgtttaggcctga

SEQ ID NO: 182600 - DNA, 20 bp, Artificial Sequence
  Synthetic oligonucleotide; TGG chr2 60474244 60474263 60474247 -
tttgtttaggcctgacagat

SEQ ID NO: 182601 - DNA, 20 bp, Artificial Sequence
  Synthetic oligonucleotide; TGG chr2 60474241 60474260 60474244 -
gtttaggcctgacagattgg

SEQ ID NO: 182602 - DNA, 20 bp, Artificial Sequence
  Synthetic oligonucleotide; TGG chr2 60474237 60474256 60474240 -
aggcctgacagattggtggc

SEQ ID NO: 182603 - DNA, 20 bp, Artificial Sequence
  Synthetic oligonucleotide; TAG chr2 60474226 60474245 60474229 -
attggtggctggcattttta

SEQ ID NO: 182604 - DNA, 20 bp, Artificial Sequence
  Synthetic oligonucleotide; AAG chr2 60474220 60474239 60474223 -
ggctggcatttttatagata

SEQ ID NO: 182605 - DNA, 20 bp, Artificial Sequence
  Synthetic oligonucleotide; AGG chr2 60474219 60474238 60474222 -
gctggcatttttatagataa

SEQ ID NO: 182606 - DNA, 20 bp, Artificial Sequence
  Synthetic oligonucleotide; GGG chr2 60474218 60474237 60474221 -
ctggcatttttatagataaa

SEQ ID NO: 182607 - DNA, 20 bp, Artificial Sequence
  Synthetic oligonucleotide; GGG chr2 60474217 60474236 60474220 -
tggcatttttatagataaag

SEQ ID NO: 182608 - DNA, 20 bp, Artificial Sequence
  Synthetic oligonucleotide; GAG chr2 60474179 60474198 60474182 -
ctctacttcctccctttatt

SEQ ID NO: 182609 - DNA, 20 bp, Artificial Sequence
  Synthetic oligonucleotide; AAG chr2 60474173 60474192 60474176 -
ttcctccctttattgagaaa

SEQ ID NO: 182610 - DNA, 20 bp, Artificial Sequence
  Synthetic oligonucleotide; TAG chr2 60474168 60474187 60474171 -
ccctttattgagaaaaagcc

SEQ ID NO: 182611 - DNA, 20 bp, Artificial Sequence
  Synthetic oligonucleotide; AGG chr2 60474167 60474186 60474170 -
cctttattgagaaaaagcct

SEQ ID NO: 182612 - DNA, 20 bp, Artificial Sequence
  Synthetic oligonucleotide; GAG chr2 60474165 60474184 60474168 -
tttattgagaaaaagcctag

SEQ ID NO: 182613 - DNA, 20 bp, Artificial Sequence
  Synthetic oligonucleotide; AGG chr2 60474164 60474183 60474167 -
ttattgagaaaaagcctagg

SEQ ID NO: 182614 - DNA, 20 bp, Artificial Sequence
  Synthetic oligonucleotide; GAG chr2 60474162 60474181 60474165 -
attgagaaaaagcctaggag

SEQ ID NO: 182615 - DNA, 20 bp, Artificial Sequence
  Synthetic oligonucleotide; AAG chr2 60474150 60474169 60474153 -
cctaggaggagaactcttaa

SEQ ID NO: 182616 - DNA, 20 bp, Artificial Sequence
  Synthetic oligonucleotide; AGG chr2 60474149 60474168 60474152 -
ctaggaggagaactcttaaa

SEQ ID NO: 182617 - DNA, 20 bp, Artificial Sequence
  Synthetic oligonucleotide; AAG chr2 60474144 60474163 60474147 -
aggagaactcttaaaaggtg

SEQ ID NO: 182618 - DNA, 20 bp, Artificial Sequence
  Synthetic oligonucleotide; TAG chr2 60474140 60474159 60474143 -
gaactcttaaaaggtgaagt

SEQ ID NO: 182619 - DNA, 20 bp, Artificial Sequence
  Synthetic oligonucleotide; GAG chr2 60474124 60474143 60474127 -
aagttagtaacctgttgttt

SEQ ID NO: 182620 - DNA, 20 bp, Artificial Sequence
  Synthetic oligonucleotide; AAG chr2 60474116 60474135 60474119 -
aacctgttgtttgagtaatc

SEQ ID NO: 182621 - DNA, 20 bp, Artificial Sequence
  Synthetic oligonucleotide; AGG chr2 60474115 60474134 60474118 -
acctgttgtttgagtaatca

SEQ ID NO: 182622 - DNA, 20 bp, Artificial Sequence
  Synthetic oligonucleotide; AAG chr2 60474108 60474127 60474111 -
gtttgagtaatcaaggctct

SEQ ID NO: 182623 - DNA, 20 bp, Artificial Sequence
  Synthetic oligonucleotide; GAG chr2 60474106 60474125 60474109 -
ttgagtaatcaaggctctaa

SEQ ID NO: 182624 - DNA, 20 bp, Artificial Sequence
  Synthetic oligonucleotide; AGG chr2 60474105 60474124 60474108 -
tgagtaatcaaggctctaag

SEQ ID NO: 182625 - DNA, 20 bp, Artificial Sequence
  Synthetic oligonucleotide; TAG chr2 60474101 60474120 60474104 -
taatcaaggctctaagagga

SEQ ID NO: 182626 - DNA, 20 bp, Artificial Sequence
  Synthetic oligonucleotide; AAG chr2 60474086 60474105 60474089 -
gaggatagcattgatcaaaa

SEQ ID NO: 182627 - DNA, 20 bp, Artificial Sequence
  Synthetic oligonucleotide; GAG chr2 60474084 60474103 60474087 -
ggatagcattgatcaaaaaa

SEQ ID NO: 182628 - DNA, 20 bp, Artificial Sequence
  Synthetic oligonucleotide; GAG chr2 60474072 60474091 60474075 -
tcaaaaaagagttttaaaat

SEQ ID NO: 182629 - DNA, 20 bp, Artificial Sequence
  Synthetic oligonucleotide; AAG chr2 60474054 60474073 60474057 -
atgagtgattgatgttatta

SEQ ID NO: 182630 - DNA, 20 bp, Artificial Sequence
  Synthetic oligonucleotide; TGG chr2 60474047 60474066 60474050 -
attgatgttattaaagtcac

SEQ ID NO: 182631 - DNA, 20 bp, Artificial Sequence
  Synthetic oligonucleotide; AAG chr2 60474042 60474061 60474045 -
tgttattaaagtcactggtg

SEQ ID NO: 182632 - DNA, 20 bp, Artificial Sequence
  Synthetic oligonucleotide; AAG chr2 60474035 60474054 60474038 -
aaagtcactggtgaagtatc

SEQ ID NO: 182633 - DNA, 20 bp, Artificial Sequence
  Synthetic oligonucleotide; AGG chr2 60474034 60474053 60474037 -
aagtcactggtgaagtatca

SEQ ID NO: 182634 - DNA, 20 bp, Artificial Sequence
  Synthetic oligonucleotide; AAG chr2 60474026 60474045 60474029 -
ggtgaagtatcaaggaatct

SEQ ID NO: 182635 - DNA, 20 bp, Artificial Sequence
  Synthetic oligonucleotide; AGG chr2 60474025 60474044 60474028 -
gtgaagtatcaaggaatcta

SEQ ID NO: 182636 - DNA, 20 bp, Artificial Sequence
  Synthetic oligonucleotide; GAG chr2 60474017 60474036 60474020 -
tcaaggaatctaaggaccat

SEQ ID NO: 182637 - DNA, 20 bp, Artificial Sequence
  Synthetic oligonucleotide; GAG chr2 60474015 60474034 60474018 -
aaggaatctaaggaccatga

SEQ ID NO: 182638 - DNA, 20 bp, Artificial Sequence
  Synthetic oligonucleotide; GAG chr2 60474013 60474032 60474016 -
ggaatctaaggaccatgaga

SEQ ID NO: 182639 - DNA, 20 bp, Artificial Sequence
  Synthetic oligonucleotide; CAG chr2 60474007 60474026 60474010 -
taaggaccatgagagagttt

SEQ ID NO: 182640 - DNA, 20 bp, Artificial Sequence
  Synthetic oligonucleotide; AGG chr2 60474006 60474025 60474009 -
aaggaccatgagagagtttc

SEQ ID NO: 182641 - DNA, 20 bp, Artificial Sequence
  Synthetic oligonucleotide; GGG chr2 60474005 60474024 60474008 -
aggaccatgagagagtttca

SEQ ID NO: 182642 - DNA, 20 bp, Artificial Sequence
  Synthetic oligonucleotide; AAG chr2 60474002 60474021 60474005 -
accatgagagagtttcaggg

SEQ ID NO: 182643 - DNA, 20 bp, Artificial Sequence
  Synthetic oligonucleotide; TAG chr2 60473986 60474005 60473989 -
agggaagaaattctatattg

SEQ ID NO: 182644 - DNA, 20 bp, Artificial Sequence
  Synthetic oligonucleotide; CAG chr2 60473952 60473971 60473955 -
attgctttcttttgtttttg

SEQ ID NO: 182645 - DNA, 20 bp, Artificial Sequence
  Synthetic oligonucleotide; AAG chr2 60473936 60473955 60473939 -
tttgcagaatacacttttta

SEQ ID NO: 182646 - DNA, 20 bp, Artificial Sequence
  Synthetic oligonucleotide; CAG chr2 60473928 60473947 60473931 -
atacactttttaaagaacat

SEQ ID NO: 182647 - DNA, 20 bp, Artificial Sequence
  Synthetic oligonucleotide; AGG chr2 60473927 60473946 60473930 -
tacactttttaaagaacatc

SEQ ID NO: 182648 - DNA, 20 bp, Artificial Sequence
  Synthetic oligonucleotide; TGG chr2 60473921 60473940 60473924 -
ttttaaagaacatcaggatt

SEQ ID NO: 182649 - DNA, 20 bp, Artificial Sequence
  Synthetic oligonucleotide; CAG chr2 60473913 60473932 60473916 -
aacatcaggatttggtaaaa

SEQ ID NO: 182650 - DNA, 20 bp, Artificial Sequence
  Synthetic oligonucleotide; CAG chr2 60473909 60473928 60473912 -
tcaggatttggtaaaacagc

SEQ ID NO: 182651 - DNA, 20 bp, Artificial Sequence
  Synthetic oligonucleotide; AAG chr2 60473901 60473920 60473904 -
tggtaaaacagccagtaaaa

SEQ ID NO: 182652 - DNA, 20 bp, Artificial Sequence
  Synthetic oligonucleotide; AAG chr2 60473893 60473912 60473896 -
cagccagtaaaaaagcaatg

SEQ ID NO: 182653 - DNA, 20 bp, Artificial Sequence
  Synthetic oligonucleotide; AGG chr2 60473892 60473911 60473895 -
agccagtaaaaaagcaatga

SEQ ID NO: 182654 - DNA, 20 bp, Artificial Sequence
  Synthetic oligonucleotide; TAG chr2 60473859 60473878 60473862 -
cacatgtaaatgctcatttc

SEQ ID NO: 182655 - DNA, 20 bp, Artificial Sequence
  Synthetic oligonucleotide; AAG chr2 60473851 60473870 60473854 -
aatgctcatttctagaacaa

SEQ ID NO: 182656 - DNA, 20 bp, Artificial Sequence
  Synthetic oligonucleotide; GAG chr2 60473849 60473868 60473852 -
tgctcatttctagaacaaaa

SEQ ID NO: 182657 - DNA, 20 bp, Artificial Sequence
  Synthetic oligonucleotide; GAG chr2 60473847 60473866 60473850 -
ctcatttctagaacaaaaga

SEQ ID NO: 182658 - DNA, 20 bp, Artificial Sequence
  Synthetic oligonucleotide; CAG chr2 60473827 60473846 60473830 -
gagtgcgattttgacaatat

SEQ ID NO: 182659 - DNA, 20 bp, Artificial Sequence
  Synthetic oligonucleotide; AAG chr2 60473824 60473843 60473827 -
tgcgattttgacaatatcag

SEQ ID NO: 182660 - DNA, 20 bp, Artificial Sequence
  Synthetic oligonucleotide; AGG chr2 60473823 60473842 60473826 -
gcgattttgacaatatcaga

SEQ ID NO: 182661 - DNA, 20 bp, Artificial Sequence
  Synthetic oligonucleotide; AAG chr2 60473814 60473833 60473817 -
acaatatcagaaggttaatt

SEQ ID NO: 182662 - DNA, 20 bp, Artificial Sequence
  Synthetic oligonucleotide; AAG chr2 60473811 60473830 60473814 -
atatcagaaggttaattaag

SEQ ID NO: 182663 - DNA, 20 bp, Artificial Sequence
  Synthetic oligonucleotide; GAG chr2 60473803 60473822 60473806 -
aggttaattaagaagtctgt

SEQ ID NO: 182664 - DNA, 20 bp, Artificial Sequence
  Synthetic oligonucleotide; AAG chr2 60473792 60473811 60473795 -
gaagtctgtgagtgatgata

SEQ ID NO: 182665 - DNA, 20 bp, Artificial Sequence
  Synthetic oligonucleotide; TGG chr2 60473788 60473807 60473791 -
tctgtgagtgatgataaagc

SEQ ID NO: 182666 - DNA, 20 bp, Artificial Sequence
  Synthetic oligonucleotide; CAG chr2 60473772 60473791 60473775 -
aagctggcacattttcatta

SEQ ID NO: 182667 - DNA, 20 bp, Artificial Sequence
  Synthetic oligonucleotide; AAG chr2 60473756 60473775 60473759 -
attacagattgacacaactc

SEQ ID NO: 182668 - DNA, 20 bp, Artificial Sequence
  Synthetic oligonucleotide; CAG chr2 60473750 60473769 60473753 -
gattgacacaactcaagtca

SEQ ID NO: 182669 - DNA, 20 bp, Artificial Sequence
  Synthetic oligonucleotide; AGG chr2 60473749 60473768 60473752 -
attgacacaactcaagtcac

SEQ ID NO: 182670 - DNA, 20 bp, Artificial Sequence
  Synthetic oligonucleotide; TAG chr2 60473744 60473763 60473747 -
cacaactcaagtcacaggca

SEQ ID NO: 182671 - DNA, 20 bp, Artificial Sequence
  Synthetic oligonucleotide; AAG chr2 60473714 60473733 60473717 -
ttgctctataatactctgat

SEQ ID NO: 182672 - DNA, 20 bp, Artificial Sequence
  Synthetic oligonucleotide; CAG chr2 60473710 60473729 60473713 -
tctataatactctgataagt

SEQ ID NO: 182673 - DNA, 20 bp, Artificial Sequence
  Synthetic oligonucleotide; GAG chr2 60473708 60473727 60473711 -
tataatactctgataagtca

SEQ ID NO: 182674 - DNA, 20 bp, Artificial Sequence
  Synthetic oligonucleotide; AAG chr2 60473700 60473719 60473703 -
tctgataagtcagagaatct

SEQ ID NO: 182675 - DNA, 20 bp, Artificial Sequence
  Synthetic oligonucleotide; GAG chr2 60473696 60473715 60473699 -
ataagtcagagaatctaagt

SEQ ID NO: 182676 - DNA, 20 bp, Artificial Sequence
  Synthetic oligonucleotide; AAG chr2 60473693 60473712 60473696 -
agtcagagaatctaagtgag

SEQ ID NO: 182677 - DNA, 20 bp, Artificial Sequence
  Synthetic oligonucleotide; TGG chr2 60473687 60473706 60473690 -
agaatctaagtgagaagaac

SEQ ID NO: 182678 - DNA, 20 bp, Artificial Sequence
  Synthetic oligonucleotide; TGG chr2 60473678 60473697 60473681 -
gtgagaagaactggtatcta

SEQ ID NO: 182679 - DNA, 20 bp, Artificial Sequence
  Synthetic oligonucleotide; TAG chr2 60473669 60473688 60473672 -
actggtatctatggtaaaca

SEQ ID NO: 182680 - DNA, 20 bp, Artificial Sequence
  Synthetic oligonucleotide; AGG chr2 60473668 60473687 60473671 -
ctggtatctatggtaaacat

SEQ ID NO: 182681 - DNA, 20 bp, Artificial Sequence
  Synthetic oligonucleotide; GGG chr2 60473667 60473686 60473670 -
tggtatctatggtaaacata

SEQ ID NO: 182682 - DNA, 20 bp, Artificial Sequence
  Synthetic oligonucleotide; AAG chr2 60473662 60473681 60473665 -
tctatggtaaacatagggtc

SEQ ID NO: 182683 - DNA, 20 bp, Artificial Sequence
  Synthetic oligonucleotide; GAG chr2 60473660 60473679 60473663 -
tatggtaaacatagggtcaa

SEQ ID NO: 182684 - DNA, 20 bp, Artificial Sequence
  Synthetic oligonucleotide; TAG chr2 60473656 60473675 60473659 -
gtaaacatagggtcaagagc

SEQ ID NO: 182685 - DNA, 20 bp, Artificial Sequence
  Synthetic oligonucleotide; CGG chr2 60473650 60473669 60473653 -
atagggtcaagagctagatg

SEQ ID NO: 182686 - DNA, 20 bp, Artificial Sequence
  Synthetic oligonucleotide; TAG chr2 60473642 60473661 60473645 -
aagagctagatgcggctgaa

SEQ ID NO: 182687 - DNA, 20 bp, Artificial Sequence
  Synthetic oligonucleotide; AAG chr2 60473638 60473657 60473641 -
gctagatgcggctgaataga

SEQ ID NO: 182688 - DNA, 20 bp, Artificial Sequence
  Synthetic oligonucleotide; AGG chr2 60473637 60473656 60473640 -
ctagatgcggctgaatagaa

SEQ ID NO: 182689 - DNA, 20 bp, Artificial Sequence
  Synthetic oligonucleotide; CAG chr2 60473622 60473641 60473625 -
tagaaaggacatttactttg

SEQ ID NO: 182690 - DNA, 20 bp, Artificial Sequence
  Synthetic oligonucleotide; TAG chr2 60473618 60473637 60473621 -
aaggacatttactttgcagt

SEQ ID NO: 182691 - DNA, 20 bp, Artificial Sequence
  Synthetic oligonucleotide; AGG chr2 60473617 60473636 60473620 -
aggacatttactttgcagtt

SEQ ID NO: 182692 - DNA, 20 bp, Artificial Sequence
  Synthetic oligonucleotide; AAG chr2 60473612 60473631 60473615 -
atttactttgcagttaggta

SEQ ID NO: 182693 - DNA, 20 bp, Artificial Sequence
  Synthetic oligonucleotide; AAG chr2 60473609 60473628 60473612 -
tactttgcagttaggtaaag

SEQ ID NO: 182694 - DNA, 20 bp, Artificial Sequence
  Synthetic oligonucleotide; TAG chr2 60473602 60473621 60473605 -
cagttaggtaaagaagcctc

SEQ ID NO: 182695 - DNA, 20 bp, Artificial Sequence
  Synthetic oligonucleotide; CAG chr2 60473597 60473616 60473600 -
aggtaaagaagcctctagct

SEQ ID NO: 182696 - DNA, 20 bp, Artificial Sequence
  Synthetic oligonucleotide; TAG chr2 60473592 60473611 60473595 -
aagaagcctctagctcagac

SEQ ID NO: 182697 - DNA, 20 bp, Artificial Sequence
  Synthetic oligonucleotide; TGG chr2 60473569 60473588 60473572 -
ctgcactgttgttatttgtg

SEQ ID NO: 182698 - DNA, 20 bp, Artificial Sequence
  Synthetic oligonucleotide; TAG chr2 60473558 60473577 60473561 -
ttatttgtgtggcttgaacc

SEQ ID NO: 182699 - DNA, 20 bp, Artificial Sequence
  Synthetic oligonucleotide; CGG chr2 60473551 60473570 60473554 -
tgtggcttgaacctagtaat

SEQ ID NO: 182700 - DNA, 20 bp, Artificial Sequence
  Synthetic oligonucleotide; CAG chr2 60473545 60473564 60473548 -
ttgaacctagtaatcggatt

SEQ ID NO: 182701 - DNA, 20 bp, Artificial Sequence
  Synthetic oligonucleotide; TGG chr2 60473539 60473558 60473542 -
ctagtaatcggattcagaac

SEQ ID NO: 182702 - DNA, 20 bp, Artificial Sequence
  Synthetic oligonucleotide; TGG chr2 60473534 60473553 60473537 -
aatcggattcagaactggaa

SEQ ID NO: 182703 - DNA, 20 bp, Artificial Sequence
  Synthetic oligonucleotide; GGG chr2 60473533 60473552 60473536 -
atcggattcagaactggaat

SEQ ID NO: 182704 - DNA, 20 bp, Artificial Sequence
  Synthetic oligonucleotide; CAG chr2 60473524 60473543 60473527 -
agaactggaatgggttcctt

SEQ ID NO: 182705 - DNA, 20 bp, Artificial Sequence
  Synthetic oligonucleotide; AGG chr2 60473523 60473542 60473526 -
gaactggaatgggttccttc

SEQ ID NO: 182706 - DNA, 20 bp, Artificial Sequence
  Synthetic oligonucleotide; GGG chr2 60473522 60473541 60473525 -
aactggaatgggttccttca

SEQ ID NO: 182707 - DNA, 20 bp, Artificial Sequence
  Synthetic oligonucleotide; CAG chr2 60473504 60473523 60473507 -
cagggtactttacaaacgtt

SEQ ID NO: 182708 - DNA, 20 bp, Artificial Sequence
  Synthetic oligonucleotide; AGG chr2 60473503 60473522 60473506 -
agggtactttacaaacgttc

SEQ ID NO: 182709 - DNA, 20 bp, Artificial Sequence
  Synthetic oligonucleotide; AAG chr2 60473491 60473510 60473494 -
aaacgttcaggatgcatttt

SEQ ID NO: 182710 - DNA, 20 bp, Artificial Sequence
  Synthetic oligonucleotide; TAG chr2 60473486 60473505 60473489 -
ttcaggatgcattttaagtg

SEQ ID NO: 182711 - DNA, 20 bp, Artificial Sequence
  Synthetic oligonucleotide; TAG chr2 60473481 60473500 60473484 -
gatgcattttaagtgtagtc

SEQ ID NO: 182712 - DNA, 20 bp, Artificial Sequence
  Synthetic oligonucleotide; AAG chr2 60473478 60473497 60473481 -
gcattttaagtgtagtctag

SEQ ID NO: 182713 - DNA, 20 bp, Artificial Sequence
  Synthetic oligonucleotide; AGG chr2 60473477 60473496 60473480 -
cattttaagtgtagtctaga

SEQ ID NO: 182714 - DNA, 20 bp, Artificial Sequence
  Synthetic oligonucleotide; TGG chr2 60473474 60473493 60473477 -
tttaagtgtagtctagaagg

SEQ ID NO: 182715 - DNA, 20 bp, Artificial Sequence
  Synthetic oligonucleotide; TGG chr2 60473467 60473486 60473470 -
gtagtctagaaggtggtaca

SEQ ID NO: 182716 - DNA, 20 bp, Artificial Sequence
  Synthetic oligonucleotide; AAG chr2 60473464 60473483 60473467 -
gtctagaaggtggtacatgg

SEQ ID NO: 182717 - DNA, 20 bp, Artificial Sequence
  Synthetic oligonucleotide; GAG chr2 60473462 60473481 60473465 -
ctagaaggtggtacatggaa

SEQ ID NO: 182718 - DNA, 20 bp, Artificial Sequence
  Synthetic oligonucleotide; GAG chr2 60473457 60473476 60473460 -
aggtggtacatggaagagct

SEQ ID NO: 182719 - DNA, 20 bp, Artificial Sequence
  Synthetic oligonucleotide; AGG chr2 60473456 60473475 60473459 -
ggtggtacatggaagagctg

SEQ ID NO: 182720 - DNA, 20 bp, Artificial Sequence
  Synthetic oligonucleotide; GGG chr2 60473455 60473474 60473458 -
gtggtacatggaagagctga

SEQ ID NO: 182721 - DNA, 20 bp, Artificial Sequence
  Synthetic oligonucleotide; GAG chr2 60473448 60473467 60473451 -
atggaagagctgagggactt

SEQ ID NO: 182722 - DNA, 20 bp, Artificial Sequence
  Synthetic oligonucleotide; AGG chr2 60473447 60473466 60473450 -
tggaagagctgagggacttg

SEQ ID NO: 182723 - DNA, 20 bp, Artificial Sequence
  Synthetic oligonucleotide; TGG chr2 60473440 60473459 60473443 -
gctgagggacttgaggatta

SEQ ID NO: 182724 - DNA, 20 bp, Artificial Sequence
  Synthetic oligonucleotide; AAG chr2 60473430 60473449 60473433 -
ttgaggattatggactgcga

SEQ ID NO: 182725 - DNA, 20 bp, Artificial Sequence
  Synthetic oligonucleotide; AGG chr2 60473429 60473448 60473432 -
tgaggattatggactgcgaa

SEQ ID NO: 182726 - DNA, 20 bp, Artificial Sequence
  Synthetic oligonucleotide; TAG chr2 60473422 60473441 60473425 -
tatggactgcgaaaggactg

SEQ ID NO: 182727 - DNA, 20 bp, Artificial Sequence
  Synthetic oligonucleotide; AGG chr2 60473421 60473440 60473424 -
atggactgcgaaaggactgt

SEQ ID NO: 182728 - DNA, 20 bp, Artificial Sequence
  Synthetic oligonucleotide; TAG chr2 60473418 60473437 60473421 -
gactgcgaaaggactgtagg

SEQ ID NO: 182729 - DNA, 20 bp, Artificial Sequence
  Synthetic oligonucleotide; TGG chr2 60473405 60473424 60473408 -
ctgtaggtagtcctgtattt

SEQ ID NO: 182730 - DNA, 20 bp, Artificial Sequence
  Synthetic oligonucleotide; TAG chr2 60473389 60473408 60473392 -
attttggcctgtcaccaata

SEQ ID NO: 182731 - DNA, 20 bp, Artificial Sequence
  Synthetic oligonucleotide; GAG chr2 60473387 60473406 60473390 -
tttggcctgtcaccaatata

SEQ ID NO: 182732 - DNA, 20 bp, Artificial Sequence
  Synthetic oligonucleotide; TAG chr2 60473370 60473389 60473373 -
atagagacccctcctcatca

SEQ ID NO: 182733 - DNA, 20 bp, Artificial Sequence
  Synthetic oligonucleotide; AAG chr2 60473347 60473366 60473350 -
tgtcatccattctctttttg

SEQ ID NO: 182734 - DNA, 20 bp, Artificial Sequence
  Synthetic oligonucleotide; CAG chr2 60473341 60473360 60473344 -
ccattctctttttgaagacc

SEQ ID NO: 182735 - DNA, 20 bp, Artificial Sequence
  Synthetic oligonucleotide; AGG chr2 60473340 60473359 60473343 -
cattctctttttgaagaccc

SEQ ID NO: 182736 - DNA, 20 bp, Artificial Sequence
  Synthetic oligonucleotide; GGG chr2 60473339 60473358 60473342 -
attctctttttgaagaccca

SEQ ID NO: 182737 - DNA, 20 bp, Artificial Sequence
  Synthetic oligonucleotide; AAG chr2 60473333 60473352 60473336 -
tttttgaagacccagggtga

SEQ ID NO: 182738 - DNA, 20 bp, Artificial Sequence
  Synthetic oligonucleotide; AAG chr2 60473329 60473348 60473332 -
tgaagacccagggtgaaaga

SEQ ID NO: 182739 - DNA, 20 bp, Artificial Sequence
  Synthetic oligonucleotide; AGG chr2 60473328 60473347 60473331 -
gaagacccagggtgaaagaa

SEQ ID NO: 182740 - DNA, 20 bp, Artificial Sequence
  Synthetic oligonucleotide; GGG chr2 60473327 60473346 60473330 -
aagacccagggtgaaagaaa

SEQ ID NO: 182741 - DNA, 20 bp, Artificial Sequence
  Synthetic oligonucleotide; GGG chr2 60473326 60473345 60473329 -
agacccagggtgaaagaaag

SEQ ID NO: 182742 - DNA, 20 bp, Artificial Sequence
  Synthetic oligonucleotide; GGG chr2 60473325 60473344 60473328 -
gacccagggtgaaagaaagg

SEQ ID NO: 182743 - DNA, 20 bp, Artificial Sequence
  Synthetic oligonucleotide; CAG chr2 60473319 60473338 60473322 -
gggtgaaagaaagggggtca

SEQ ID NO: 182744 - DNA, 20 bp, Artificial Sequence
  Synthetic oligonucleotide; GAG chr2 60473310 60473329 60473313 -
aaagggggtcacagtgtcac

SEQ ID NO: 182745 - DNA, 20 bp, Artificial Sequence
  Synthetic oligonucleotide; TAG chr2 60473306 60473325 60473309 -
ggggtcacagtgtcacgaga

SEQ ID NO: 182746 - DNA, 20 bp, Artificial Sequence
  Synthetic oligonucleotide; TGG chr2 60473292 60473311 60473295 -
acgagatagcccattccacg

SEQ ID NO: 182747 - DNA, 20 bp, Artificial Sequence
  Synthetic oligonucleotide; GGG chr2 60473291 60473310 60473294 -
cgagatagcccattccacgt

SEQ ID NO: 182748 - DNA, 20 bp, Artificial Sequence
  Synthetic oligonucleotide; CAG chr2 60473287 60473306 60473290 -
atagcccattccacgtggga

SEQ ID NO: 182749 - DNA, 20 bp, Artificial Sequence
  Synthetic oligonucleotide; CAG chr2 60473241 60473260 60473244 -
cactgaaaaaaaaaaaaaaa

SEQ ID NO: 182750 - DNA, 20 bp, Artificial Sequence
  Synthetic oligonucleotide; AGG chr2 60473240 60473259 60473243 -
actgaaaaaaaaaaaaaaac

SEQ ID NO: 182751 - DNA, 20 bp, Artificial Sequence
  Synthetic oligonucleotide; GGG chr2 60473239 60473258 60473242 -
ctgaaaaaaaaaaaaaaaca

SEQ ID NO: 182752 - DNA, 20 bp, Artificial Sequence
  Synthetic oligonucleotide; TAG chr2 60473214 60473233 60473217 -
attatctaaaaacatatgtt

SEQ ID NO: 182753 - DNA, 20 bp, Artificial Sequence
  Synthetic oligonucleotide; AGG chr2 60473213 60473232 60473216 -
ttatctaaaaacatatgttt

SEQ ID NO: 182754 - DNA, 20 bp, Artificial Sequence
  Synthetic oligonucleotide; CAG chr2 60473183 60473202 60473186 -
cacacattcacacacgtaca

SEQ ID NO: 182755 - DNA, 20 bp, Artificial Sequence
  Synthetic oligonucleotide; AAG chr2 60473102 60473121 60473105 -
gcacatgctaacacatgcac

SEQ ID NO: 182756 - DNA, 20 bp, Artificial Sequence
  Synthetic oligonucleotide; CAG chr2 60473081 60473100 60473084 -
agcatacacacacatgcaca

SEQ ID NO: 182757 - DNA, 20 bp, Artificial Sequence
  Synthetic oligonucleotide; TAG chr2 60472975 60472994 60472978 -
acacacacacacgtacattt

SEQ ID NO: 182758 - DNA, 20 bp, Artificial Sequence
  Synthetic oligonucleotide; TAG chr2 60472968 60472987 60472971 -
cacacgtacattttagtgaa

SEQ ID NO: 182759 - DNA, 20 bp, Artificial Sequence
  Synthetic oligonucleotide; TGG chr2 60472945 60472964 60472948 -
cacacatctatgtactcctg

SEQ ID NO: 182760 - DNA, 20 bp, Artificial Sequence
  Synthetic oligonucleotide; GAG chr2 60472943 60472962 60472946 -
cacatctatgtactcctgtg

SEQ ID NO: 182761 - DNA, 20 bp, Artificial Sequence
  Synthetic oligonucleotide; GAG chr2 60472941 60472960 60472944 -
catctatgtactcctgtgga

SEQ ID NO: 182762 - DNA, 20 bp, Artificial Sequence
  Synthetic oligonucleotide; TGG chr2 60472933 60472952 60472936 -
tactcctgtggagagtcctg

SEQ ID NO: 182763 - DNA, 20 bp, Artificial Sequence
  Synthetic oligonucleotide; AAG chr2 60472915 60472934 60472918 -
tgtggttttaatacctgtta

SEQ ID NO: 182764 - DNA, 20 bp, Artificial Sequence
  Synthetic oligonucleotide; TGG chr2 60472911 60472930 60472914 -
gttttaatacctgttaaagt

SEQ ID NO: 182765 - DNA, 20 bp, Artificial Sequence
  Synthetic oligonucleotide; GGG chr2 60472910 60472929 60472913 -
ttttaatacctgttaaagtt

SEQ ID NO: 182766 - DNA, 20 bp, Artificial Sequence
  Synthetic oligonucleotide; AAG chr2 60472901 60472920 60472904 -
ctgttaaagttgggctccca

SEQ ID NO: 182767 - DNA, 20 bp, Artificial Sequence
  Synthetic oligonucleotide; CAG chr2 60472898 60472917 60472901 -
ttaaagttgggctcccaaag

SEQ ID NO: 182768 - DNA, 20 bp, Artificial Sequence
  Synthetic oligonucleotide; TGG chr2 60472882 60472901 60472885 -
aaagcagtcattaaacgtgt

SEQ ID NO: 182769 - DNA, 20 bp, Artificial Sequence
  Synthetic oligonucleotide; TAG chr2 60472863 60472882 60472866 -
ttggaatgatgctttttgct

SEQ ID NO: 182770 - DNA, 20 bp, Artificial Sequence
  Synthetic oligonucleotide; TGG chr2 60472854 60472873 60472857 -
tgctttttgcttagctgttt

SEQ ID NO: 182771 - DNA, 20 bp, Artificial Sequence
  Synthetic oligonucleotide; TGG chr2 60472845 60472864 60472848 -
cttagctgttttggcacatt

SEQ ID NO: 182772 - DNA, 20 bp, Artificial Sequence
  Synthetic oligonucleotide; CAG chr2 60472835 60472854 60472838 -
ttggcacatttggaaatctg

SEQ ID NO: 182773 - DNA, 20 bp, Artificial Sequence
  Synthetic oligonucleotide; TAG chr2 60472818 60472837 60472821 -
ctgcagtattacctgttgat

SEQ ID NO: 182774 - DNA, 20 bp, Artificial Sequence
  Synthetic oligonucleotide; TAG chr2 60472815 60472834 60472818 -
cagtattacctgttgattag

SEQ ID NO: 182775 - DNA, 20 bp, Artificial Sequence
  Synthetic oligonucleotide; CAG chr2 60472811 60472830 60472814 -
attacctgttgattagtaga

SEQ ID NO: 182776 - DNA, 20 bp, Artificial Sequence
  Synthetic oligonucleotide; TGG chr2 60472803 60472822 60472806 -
ttgattagtagacagtaatg

SEQ ID NO: 182777 - DNA, 20 bp, Artificial Sequence
  Synthetic oligonucleotide; CAG chr2 60472786 60472805 60472789 -
atgtggctgtattacacacc

SEQ ID NO: 182778 - DNA, 20 bp, Artificial Sequence
  Synthetic oligonucleotide; TAG chr2 60472779 60472798 60472782 -
tgtattacacacccagtgat

SEQ ID NO: 182779 - DNA, 20 bp, Artificial Sequence
  Synthetic oligonucleotide; CAG chr2 60472773 60472792 60472776 -
acacacccagtgattagttt

SEQ ID NO: 182780 - DNA, 20 bp, Artificial Sequence
  Synthetic oligonucleotide; TAG chr2 60472763 60472782 60472766 -
tgattagtttcagaaacaaa

SEQ ID NO: 182781 - DNA, 20 bp, Artificial Sequence
  Synthetic oligonucleotide; TAG chr2 60472752 60472771 60472755 -
agaaacaaatagcatgttaa

SEQ ID NO: 182782 - DNA, 20 bp, Artificial Sequence
  Synthetic oligonucleotide; AAG chr2 60472747 60472766 60472750 -
caaatagcatgttaatagtc

SEQ ID NO: 182783 - DNA, 20 bp, Artificial Sequence
  Synthetic oligonucleotide; AGG chr2 60472746 60472765 60472749 -
aaatagcatgttaatagtca

SEQ ID NO: 182784 - DNA, 20 bp, Artificial Sequence
  Synthetic oligonucleotide; GAG chr2 60472736 60472755 60472739 -
ttaatagtcaaggaatcttt

SEQ ID NO: 182785 - DNA, 20 bp, Artificial Sequence
  Synthetic oligonucleotide; GAG chr2 60472725 60472744 60472728 -
ggaatctttgagatgttctt

SEQ ID NO: 182786 - DNA, 20 bp, Artificial Sequence
  Synthetic oligonucleotide; AGG chr2 60472724 60472743 60472727 -
gaatctttgagatgttcttg

SEQ ID NO: 182787 - DNA, 20 bp, Artificial Sequence
  Synthetic oligonucleotide; CAG chr2 60472688 60472707 60472691 -
tgatttaatgacttaaattc

SEQ ID NO: 182788 - DNA, 20 bp, Artificial Sequence
  Synthetic oligonucleotide; AGG chr2 60472687 60472706 60472690 -
gatttaatgacttaaattcc

SEQ ID NO: 182789 - DNA, 20 bp, Artificial Sequence
  Synthetic oligonucleotide; TGG chr2 60472674 60472693 60472677 -
aaattccaggaacatcccac

SEQ ID NO: 182790 - DNA, 20 bp, Artificial Sequence
  Synthetic oligonucleotide; GGG chr2 60472673 60472692 60472676 -
aattccaggaacatcccact

SEQ ID NO: 182791 - DNA, 20 bp, Artificial Sequence
  Synthetic oligonucleotide; TAG chr2 60472668 60472687 60472671 -
caggaacatcccactgggct

SEQ ID NO: 182792 - DNA, 20 bp, Artificial Sequence
  Synthetic oligonucleotide; GAG chr2 60472666 60472685 60472669 -
ggaacatcccactgggctta

SEQ ID NO: 182793 - DNA, 20 bp, Artificial Sequence
  Synthetic oligonucleotide; AAG chr2 60472652 60472671 60472655 -
ggcttagagctctttgtcaa

SEQ ID NO: 182794 - DNA, 20 bp, Artificial Sequence
  Synthetic oligonucleotide; TGG chr2 60472648 60472667 60472651 -
tagagctctttgtcaaaagt

SEQ ID NO: 182795 - DNA, 20 bp, Artificial Sequence
  Synthetic oligonucleotide; TAG chr2 60472632 60472651 60472635 -
aagttggtacccaatatatg

SEQ ID NO: 182796 - DNA, 20 bp, Artificial Sequence
  Synthetic oligonucleotide; AAG chr2 60472622 60472641 60472625 -
ccaatatatgtagaaatgta

SEQ ID NO: 182797 - DNA, 20 bp, Artificial Sequence
  Synthetic oligonucleotide; AAG chr2 60472594 60472613 60472597 -
aaatgtataacattaaatca

SEQ ID NO: 182798 - DNA, 20 bp, Artificial Sequence
  Synthetic oligonucleotide; CAG chr2 60472584 60472603 60472587 -
cattaaatcaaagccattcc

SEQ ID NO: 182799 - DNA, 20 bp, Artificial Sequence
  Synthetic oligonucleotide; AAG chr2 60472547 60472566 60472550 -
tttaatgaaacctgaaaaat

SEQ ID NO: 182800 - DNA, 20 bp, Artificial Sequence
  Synthetic oligonucleotide; GAG chr2 60472545 60472564 60472548 -
taatgaaacctgaaaaataa

SEQ ID NO: 182801 - DNA, 20 bp, Artificial Sequence
  Synthetic oligonucleotide; CAG chr2 60472526 60472545 60472529 -
agagtcactatttttaaatt

SEQ ID NO: 182802 - DNA, 20 bp, Artificial Sequence
  Synthetic oligonucleotide; AAG chr2 60472519 60472538 60472522 -
ctatttttaaattcagccat

SEQ ID NO: 182803 - DNA, 20 bp, Artificial Sequence
  Synthetic oligonucleotide; AGG chr2 60472518 60472537 60472521 -
tatttttaaattcagccata

SEQ ID NO: 182804 - DNA, 20 bp, Artificial Sequence
  Synthetic oligonucleotide; AAG chr2 60472491 60472510 60472494 -
tttgcaacctaataatgtgt

SEQ ID NO: 182805 - DNA, 20 bp, Artificial Sequence
  Synthetic oligonucleotide; AGG chr2 60472490 60472509 60472493 -
ttgcaacctaataatgtgta

SEQ ID NO: 182806 - DNA, 20 bp, Artificial Sequence
  Synthetic oligonucleotide; GAG chr2 60472480 60472499 60472483 -
ataatgtgtaaggcatttct

SEQ ID NO: 182807 - DNA, 20 bp, Artificial Sequence
  Synthetic oligonucleotide; AGG chr2 60472479 60472498 60472482 -
taatgtgtaaggcatttctg

SEQ ID NO: 182808 - DNA, 20 bp, Artificial Sequence
  Synthetic oligonucleotide; AAG chr2 60472472 60472491 60472475 -
taaggcatttctgaggcccc

SEQ ID NO: 182809 - DNA, 20 bp, Artificial Sequence
  Synthetic oligonucleotide; TGG chr2 60472469 60472488 60472472 -
ggcatttctgaggccccaag

SEQ ID NO: 182810 - DNA, 20 bp, Artificial Sequence
  Synthetic oligonucleotide; TGG chr2 60472460 60472479 60472463 -
gaggccccaagtggaaatac

SEQ ID NO: 182811 - DNA, 20 bp, Artificial Sequence
  Synthetic oligonucleotide; GGG chr2 60472459 60472478 60472462 -
aggccccaagtggaaatact

SEQ ID NO: 182812 - DNA, 20 bp, Artificial Sequence
  Synthetic oligonucleotide; TAG chr2 60472454 60472473 60472457 -
ccaagtggaaatactgggtc

SEQ ID NO: 182813 - DNA, 20 bp, Artificial Sequence
  Synthetic oligonucleotide; GAG chr2 60472452 60472471 60472455 -
aagtggaaatactgggtcta

SEQ ID NO: 182814 - DNA, 20 bp, Artificial Sequence
  Synthetic oligonucleotide; GAG chr2 60472450 60472469 60472453 -
gtggaaatactgggtctaga

SEQ ID NO: 182815 - DNA, 20 bp, Artificial Sequence
  Synthetic oligonucleotide; TAG chr2 60472435 60472454 60472438 -
ctagagagacctttatgaaa

SEQ ID NO: 182816 - DNA, 20 bp, Artificial Sequence
  Synthetic oligonucleotide; CAG chr2 60472430 60472449 60472433 -
gagacctttatgaaatagaa

SEQ ID NO: 182817 - DNA, 20 bp, Artificial Sequence
  Synthetic oligonucleotide; AGG chr2 60472429 60472448 60472432 -
agacctttatgaaatagaac

SEQ ID NO: 182818 - DNA, 20 bp, Artificial Sequence
  Synthetic oligonucleotide; CAG chr2 60472410 60472429 60472413 -
caggttgaaacaccttccac

SEQ ID NO: 182819 - DNA, 20 bp, Artificial Sequence
  Synthetic oligonucleotide; AAG chr2 60472405 60472424 60472408 -
tgaaacaccttccaccagaa

SEQ ID NO: 182820 - DNA, 20 bp, Artificial Sequence
  Synthetic oligonucleotide; AAG chr2 60472399 60472418 60472402 -
accttccaccagaaaagtgt

SEQ ID NO: 182821 - DNA, 20 bp, Artificial Sequence
  Synthetic oligonucleotide; AAG chr2 60472385 60472404 60472388 -
aagtgtaagacatttgaaaa

SEQ ID NO: 182822 - DNA, 20 bp, Artificial Sequence
  Synthetic oligonucleotide; GAG chr2 60472379 60472398 60472382 -
aagacatttgaaaaaagatt

SEQ ID NO: 182823 - DNA, 20 bp, Artificial Sequence
  Synthetic oligonucleotide; CAG chr2 60472375 60472394 60472378 -
catttgaaaaaagattgagt

SEQ ID NO: 182824 - DNA, 20 bp, Artificial Sequence
  Synthetic oligonucleotide; AAG chr2 60472370 60472389 60472373 -
gaaaaaagattgagtcagaa

SEQ ID NO: 182825 - DNA, 20 bp, Artificial Sequence
  Synthetic oligonucleotide; AGG chr2 60472369 60472388 60472372 -
aaaaaagattgagtcagaaa

SEQ ID NO: 182826 - DNA, 20 bp, Artificial Sequence
  Synthetic oligonucleotide; GGG chr2 60472368 60472387 60472371 -
aaaaagattgagtcagaaaa

SEQ ID NO: 182827 - DNA, 20 bp, Artificial Sequence
  Synthetic oligonucleotide; GAG chr2 60472350 60472369 60472353 -
aagggaaatgtgtcccattt

SEQ ID NO: 182828 - DNA, 20 bp, Artificial Sequence
  Synthetic oligonucleotide; GAG chr2 60472348 60472367 60472351 -
gggaaatgtgtcccatttga

SEQ ID NO: 182829 - DNA, 20 bp, Artificial Sequence
  Synthetic oligonucleotide; CAG chr2 60472343 60472362 60472346 -
atgtgtcccatttgagagac

SEQ ID NO: 182830 - DNA, 20 bp, Artificial Sequence
  Synthetic oligonucleotide; AAG chr2 60472339 60472358 60472342 -
gtcccatttgagagaccaga

SEQ ID NO: 182831 - DNA, 20 bp, Artificial Sequence
  Synthetic oligonucleotide; AGG chr2 60472338 60472357 60472341 -
tcccatttgagagaccagaa

SEQ ID NO: 182832 - DNA, 20 bp, Artificial Sequence
  Synthetic oligonucleotide; GGG chr2 60472337 60472356 60472340 -
cccatttgagagaccagaaa

SEQ ID NO: 182833 - DNA, 20 bp, Artificial Sequence
  Synthetic oligonucleotide; AAG chr2 60472330 60472349 60472333 -
gagagaccagaaagggaaac

SEQ ID NO: 182834 - DNA, 20 bp, Artificial Sequence
  Synthetic oligonucleotide; GAG chr2 60472328 60472347 60472331 -
gagaccagaaagggaaacaa

SEQ ID NO: 182835 - DNA, 20 bp, Artificial Sequence
  Synthetic oligonucleotide; CAG chr2 60472323 60472342 60472326 -
cagaaagggaaacaagagtc

SEQ ID NO: 182836 - DNA, 20 bp, Artificial Sequence
  Synthetic oligonucleotide; CAG chr2 60472303 60472322 60472306 -
cagttcctgctgtgtccgtg

SEQ ID NO: 182837 - DNA, 20 bp, Artificial Sequence
  Synthetic oligonucleotide; CAG chr2 60472294 60472313 60472297 -
ctgtgtccgtgcagttgcca

SEQ ID NO: 182838 - DNA, 20 bp, Artificial Sequence
  Synthetic oligonucleotide; CGG chr2 60472273 60472292 60472276 -
agctgcgttcgctgacatgt

SEQ ID NO: 182839 - DNA, 20 bp, Artificial Sequence
  Synthetic oligonucleotide; TGG chr2 60472264 60472283 60472267 -
cgctgacatgtcggctttaa

SEQ ID NO: 182840 - DNA, 20 bp, Artificial Sequence
  Synthetic oligonucleotide; AAG chr2 60472261 60472280 60472264 -
tgacatgtcggctttaatgg

SEQ ID NO: 182841 - DNA, 20 bp, Artificial Sequence
  Synthetic oligonucleotide; CAG chr2 60472258 60472277 60472261 -
catgtcggctttaatggaag

SEQ ID NO: 182842 - DNA, 20 bp, Artificial Sequence
  Synthetic oligonucleotide; GAG chr2 60472254 60472273 60472257 -
tcggctttaatggaagcagt

SEQ ID NO: 182843 - DNA, 20 bp, Artificial Sequence
  Synthetic oligonucleotide; AGG chr2 60472253 60472272 60472256 -
cggctttaatggaagcagtg

SEQ ID NO: 182844 - DNA, 20 bp, Artificial Sequence
  Synthetic oligonucleotide; TGG chr2 60472238 60472257 60472241 -
cagtgaggacacaatctgtc

SEQ ID NO: 182845 - DNA, 20 bp, Artificial Sequence
  Synthetic oligonucleotide; AAG chr2 60472232 60472251 60472235 -
ggacacaatctgtctggcac

SEQ ID NO: 182846 - DNA, 20 bp, Artificial Sequence
  Synthetic oligonucleotide; TGG chr2 60472228 60472247 60472231 -
acaatctgtctggcacaagc

SEQ ID NO: 182847 - DNA, 20 bp, Artificial Sequence
  Synthetic oligonucleotide; TGG chr2 60472223 60472242 60472226 -
ctgtctggcacaagctggtt

SEQ ID NO: 182848 - DNA, 20 bp, Artificial Sequence
  Synthetic oligonucleotide; GGG chr2 60472222 60472241 60472225 -
tgtctggcacaagctggttt

SEQ ID NO: 182849 - DNA, 20 bp, Artificial Sequence
  Synthetic oligonucleotide; AAG chr2 60472205 60472224 60472208 -
tttgggtgttgtctcatgct

SEQ ID NO: 182850 - DNA, 20 bp, Artificial Sequence
  Synthetic oligonucleotide; AAG chr2 60472202 60472221 60472205 -
gggtgttgtctcatgctaag

SEQ ID NO: 182851 - DNA, 20 bp, Artificial Sequence
  Synthetic oligonucleotide; AGG chr2 60472201 60472220 60472204 -
ggtgttgtctcatgctaaga

SEQ ID NO: 182852 - DNA, 20 bp, Artificial Sequence
  Synthetic oligonucleotide; TGG chr2 60472195 60472214 60472198 -
gtctcatgctaagaaggccc

SEQ ID NO: 182853 - DNA, 20 bp, Artificial Sequence
  Synthetic oligonucleotide; TGG chr2 60472186 60472205 60472189 -
taagaaggccctggacctga

SEQ ID NO: 182854 - DNA, 20 bp, Artificial Sequence
  Synthetic oligonucleotide; GAG chr2 60472184 60472203 60472187 -
agaaggccctggacctgatg

SEQ ID NO: 182855 - DNA, 20 bp, Artificial Sequence
  Synthetic oligonucleotide; GAG chr2 60472182 60472201 60472185 -
aaggccctggacctgatgga

SEQ ID NO: 182856 - DNA, 20 bp, Artificial Sequence
  Synthetic oligonucleotide; TGG chr2 60472177 60472196 60472180 -
cctggacctgatggagagcc

SEQ ID NO: 182857 - DNA, 20 bp, Artificial Sequence
  Synthetic oligonucleotide; CAG chr2 60472149 60472168 60472152 -
ttccctgtccttatcaatga

SEQ ID NO: 182858 - DNA, 20 bp, Artificial Sequence
  Synthetic oligonucleotide; CGG chr2 60472145 60472164 60472148 -
ctgtccttatcaatgacaga

SEQ ID NO: 182859 - DNA, 20 bp, Artificial Sequence
  Synthetic oligonucleotide; GAG chr2 60472143 60472162 60472146 -
gtccttatcaatgacagacg

SEQ ID NO: 182860 - DNA, 20 bp, Artificial Sequence
  Synthetic oligonucleotide; AGG chr2 60472142 60472161 60472145 -
tccttatcaatgacagacgg

SEQ ID NO: 182861 - DNA, 20 bp, Artificial Sequence
  Synthetic oligonucleotide; GGG chr2 60472141 60472160 60472144 -
ccttatcaatgacagacgga

SEQ ID NO: 182862 - DNA, 20 bp, Artificial Sequence
  Synthetic oligonucleotide; TGG chr2 60472138 60472157 60472141 -
tatcaatgacagacggaggg

SEQ ID NO: 182863 - DNA, 20 bp, Artificial Sequence
  Synthetic oligonucleotide; TGG chr2 60472119 60472138 60472122 -
gtggaacctgaatttcctaa

SEQ ID NO: 182864 - DNA, 20 bp, Artificial Sequence
  Synthetic oligonucleotide; GAG chr2 60472117 60472136 60472120 -
ggaacctgaatttcctaatg

SEQ ID NO: 182865 - DNA, 20 bp, Artificial Sequence
  Synthetic oligonucleotide; AGG chr2 60472116 60472135 60472119 -
gaacctgaatttcctaatgg

SEQ ID NO: 182866 - DNA, 20 bp, Artificial Sequence
  Synthetic oligonucleotide; GGG chr2 60472115 60472134 60472118 -
aacctgaatttcctaatgga

SEQ ID NO: 182867 - DNA, 20 bp, Artificial Sequence
  Synthetic oligonucleotide; TAG chr2 60472107 60472126 60472110 -
tttcctaatggagggatcct

SEQ ID NO: 182868 - DNA, 20 bp, Artificial Sequence
  Synthetic oligonucleotide; AGG chr2 60472106 60472125 60472109 -
ttcctaatggagggatcctt

SEQ ID NO: 182869 - DNA, 20 bp, Artificial Sequence
  Synthetic oligonucleotide; GGG chr2 60472105 60472124 60472108 -
tcctaatggagggatcctta

SEQ ID NO: 182870 - DNA, 20 bp, Artificial Sequence
  Synthetic oligonucleotide; AAG chr2 60472095 60472114 60472098 -
gggatccttagggattccct

SEQ ID NO: 182871 - DNA, 20 bp, Artificial Sequence
  Synthetic oligonucleotide; CAG chr2 60472070 60472089 60472073 -
taatttgtttttgactgttc

SEQ ID NO: 182872 - DNA, 20 bp, Artificial Sequence
  Synthetic oligonucleotide; AAG chr2 60472062 60472081 60472065 -
ttttgactgttccagtccta

SEQ ID NO: 182873 - DNA, 20 bp, Artificial Sequence
  Synthetic oligonucleotide; AGG chr2 60472061 60472080 60472064 -
tttgactgttccagtcctaa

SEQ ID NO: 182874 - DNA, 20 bp, Artificial Sequence
  Synthetic oligonucleotide; GAG chr2 60472059 60472078 60472062 -
tgactgttccagtcctaaag

SEQ ID NO: 182875 - DNA, 20 bp, Artificial Sequence
  Synthetic oligonucleotide; AGG chr2 60472058 60472077 60472061 -
gactgttccagtcctaaagg

SEQ ID NO: 182876 - DNA, 20 bp, Artificial Sequence
  Synthetic oligonucleotide; TGG chr2 60472055 60472074 60472058 -
tgttccagtcctaaaggagg

SEQ ID NO: 182877 - DNA, 20 bp, Artificial Sequence
  Synthetic oligonucleotide; GGG chr2 60472054 60472073 60472057 -
gttccagtcctaaaggaggt

SEQ ID NO: 182878 - DNA, 20 bp, Artificial Sequence
  Synthetic oligonucleotide; TGG chr2 60472048 60472067 60472051 -
gtcctaaaggaggtgggtcc

SEQ ID NO: 182879 - DNA, 20 bp, Artificial Sequence
  Synthetic oligonucleotide; CAG chr2 60472044 60472063 60472047 -
taaaggaggtgggtcctgga

SEQ ID NO: 182880 - DNA, 20 bp, Artificial Sequence
  Synthetic oligonucleotide; AGG chr2 60472043 60472062 60472046 -
aaaggaggtgggtcctggac

SEQ ID NO: 182881 - DNA, 20 bp, Artificial Sequence
  Synthetic oligonucleotide; GAG chr2 60472041 60472060 60472044 -
aggaggtgggtcctggacag

SEQ ID NO: 182882 - DNA, 20 bp, Artificial Sequence
  Synthetic oligonucleotide; AGG chr2 60472040 60472059 60472043 -
ggaggtgggtcctggacagg

SEQ ID NO: 182883 - DNA, 20 bp, Artificial Sequence
  Synthetic oligonucleotide; GGG chr2 60472039 60472058 60472042 -
gaggtgggtcctggacagga

SEQ ID NO: 182884 - DNA, 20 bp, Artificial Sequence
  Synthetic oligonucleotide; CAG chr2 60472032 60472051 60472035 -
gtcctggacaggagggaaaa

SEQ ID NO: 182885 - DNA, 20 bp, Artificial Sequence
  Synthetic oligonucleotide; TGG chr2 60472024 60472043 60472027 -
caggagggaaaacagcctca

SEQ ID NO: 182886 - DNA, 20 bp, Artificial Sequence
  Synthetic oligonucleotide; TGG chr2 60472017 60472036 60472020 -
gaaaacagcctcatggccca

SEQ ID NO: 182887 - DNA, 20 bp, Artificial Sequence
  Synthetic oligonucleotide; GGG chr2 60472016 60472035 60472019 -
aaaacagcctcatggcccat

SEQ ID NO: 182888 - DNA, 20 bp, Artificial Sequence
  Synthetic oligonucleotide; CAG chr2 60472005 60472024 60472008 -
atggcccatgggtctctgcc

SEQ ID NO: 182889 - DNA, 20 bp, Artificial Sequence
  Synthetic oligonucleotide; AGG chr2 60472004 60472023 60472007 -
tggcccatgggtctctgccc

SEQ ID NO: 182890 - DNA, 20 bp, Artificial Sequence
  Synthetic oligonucleotide; GGG chr2 60472003 60472022 60472006 -
ggcccatgggtctctgccca

SEQ ID NO: 182891 - DNA, 20 bp, Artificial Sequence
  Synthetic oligonucleotide; AAG chr2 60471993 60472012 60471996 -
tctctgcccagggaatttca

SEQ ID NO: 182892 - DNA, 20 bp, Artificial Sequence
  Synthetic oligonucleotide; CAG chr2 60471986 60472005 60471989 -
ccagggaatttcaaagcttc

SEQ ID NO: 182893 - DNA, 20 bp, Artificial Sequence
  Synthetic oligonucleotide; AAG chr2 60471962 60471981 60471965 -
gttcatacttcccttaccct

SEQ ID NO: 182894 - DNA, 20 bp, Artificial Sequence
  Synthetic oligonucleotide; CAG chr2 60471958 60471977 60471961 -
atacttcccttaccctaaga

SEQ ID NO: 182895 - DNA, 20 bp, Artificial Sequence
  Synthetic oligonucleotide; CAG chr2 60471955 60471974 60471958 -
cttcccttaccctaagacag

SEQ ID NO: 182896 - DNA, 20 bp, Artificial Sequence
  Synthetic oligonucleotide; CAG chr2 60471944 60471963 60471947 -
ctaagacagcagtgctgatt

SEQ ID NO: 182897 - DNA, 20 bp, Artificial Sequence
  Synthetic oligonucleotide; GAG chr2 60471938 60471957 60471941 -
cagcagtgctgattcagctt

SEQ ID NO: 182898 - DNA, 20 bp, Artificial Sequence
  Synthetic oligonucleotide; GAG chr2 60471928 60471947 60471931 -
gattcagcttgagtgtgcat

SEQ ID NO: 182899 - DNA, 20 bp, Artificial Sequence
  Synthetic oligonucleotide; TGG chr2 60471918 60471937 60471921 -
gagtgtgcatgagaatcacc

SEQ ID NO: 182900 - DNA, 20 bp, Artificial Sequence
  Synthetic oligonucleotide; GAG chr2 60471916 60471935 60471919 -
gtgtgcatgagaatcacctg

SEQ ID NO: 182901 - DNA, 20 bp, Artificial Sequence
  Synthetic oligonucleotide; TAG chr2 60471900 60471919 60471903 -
cctggagaatttattcaaca

SEQ ID NO: 182902 - DNA, 20 bp, Artificial Sequence
  Synthetic oligonucleotide; AAG chr2 60471897 60471916 60471900 -
ggagaatttattcaacatag

SEQ ID NO: 182903 - DNA, 20 bp, Artificial Sequence
  Synthetic oligonucleotide; AGG chr2 60471896 60471915 60471899 -
gagaatttattcaacataga

SEQ ID NO: 182904 - DNA, 20 bp, Artificial Sequence
  Synthetic oligonucleotide; CAG chr2 60471866 60471885 60471869 -
cccaccctcaatttctgatt

SEQ ID NO: 182905 - DNA, 20 bp, Artificial Sequence
  Synthetic oligonucleotide; AAG chr2 60471862 60471881 60471865 -
ccctcaatttctgattcagt

SEQ ID NO: 182906 - DNA, 20 bp, Artificial Sequence
  Synthetic oligonucleotide; GAG chr2 60471856 60471875 60471859 -
atttctgattcagtaagtct

SEQ ID NO: 182907 - DNA, 20 bp, Artificial Sequence
  Synthetic oligonucleotide; AGG chr2 60471855 60471874 60471858 -
tttctgattcagtaagtctg

SEQ ID NO: 182908 - DNA, 20 bp, Artificial Sequence
  Synthetic oligonucleotide; TGG chr2 60471852 60471871 60471855 -
ctgattcagtaagtctgagg

SEQ ID NO: 182909 - DNA, 20 bp, Artificial Sequence
  Synthetic oligonucleotide; AAG chr2 60471844 60471863 60471847 -
gtaagtctgaggtggtgccc

SEQ ID NO: 182910 - DNA, 20 bp, Artificial Sequence
  Synthetic oligonucleotide; CAG chr2 60471818 60471837 60471821 -
ttgcattttgaacaaactcc

SEQ ID NO: 182911 - DNA, 20 bp, Artificial Sequence
  Synthetic oligonucleotide; AGG chr2 60471817 60471836 60471820 -
tgcattttgaacaaactccc

SEQ ID NO: 182912 - DNA, 20 bp, Artificial Sequence
  Synthetic oligonucleotide; CGG chr2 60471804 60471823 60471807 -
aactcccaggtgatgctgat

SEQ ID NO: 182913 - DNA, 20 bp, Artificial Sequence
  Synthetic oligonucleotide; GGG chr2 60471803 60471822 60471806 -
actcccaggtgatgctgatc

SEQ ID NO: 182914 - DNA, 20 bp, Artificial Sequence
  Synthetic oligonucleotide; GGG chr2 60471802 60471821 60471805 -
ctcccaggtgatgctgatcg

SEQ ID NO: 182915 - DNA, 20 bp, Artificial Sequence
  Synthetic oligonucleotide; GGG chr2 60471801 60471820 60471804 -
tcccaggtgatgctgatcgg

SEQ ID NO: 182916 - DNA, 20 bp, Artificial Sequence
  Synthetic oligonucleotide; TGG chr2 60471798 60471817 60471801 -
caggtgatgctgatcggggg

SEQ ID NO: 182917 - DNA, 20 bp, Artificial Sequence
  Synthetic oligonucleotide; GGG chr2 60471797 60471816 60471800 -
aggtgatgctgatcgggggt

SEQ ID NO: 182918 - DNA, 20 bp, Artificial Sequence
  Synthetic oligonucleotide; TGG chr2 60471792 60471811 60471795 -
atgctgatcgggggtgggcc

SEQ ID NO: 182919 - DNA, 20 bp, Artificial Sequence
  Synthetic oligonucleotide; GGG chr2 60471791 60471810 60471794 -
tgctgatcgggggtgggcct

SEQ ID NO: 182920 - DNA, 20 bp, Artificial Sequence
  Synthetic oligonucleotide; GAG chr2 60471778 60471797 60471781 -
tgggcctgggtctgcgctgt

SEQ ID NO: 182921 - DNA, 20 bp, Artificial Sequence
  Synthetic oligonucleotide; AAG chr2 60471763 60471782 60471766 -
gctgtgagaatcacttgcct

SEQ ID NO: 182922 - DNA, 20 bp, Artificial Sequence
  Synthetic oligonucleotide; GAG chr2 60471761 60471780 60471764 -
tgtgagaatcacttgcctaa

SEQ ID NO: 182923 - DNA, 20 bp, Artificial Sequence
  Synthetic oligonucleotide; AAG chr2 60471750 60471769 60471753 -
cttgcctaagagcactaaca

SEQ ID NO: 182924 - DNA, 20 bp, Artificial Sequence
  Synthetic oligonucleotide; AAG chr2 60471742 60471761 60471745 -
agagcactaacaaagaaaaa

SEQ ID NO: 182925 - DNA, 20 bp, Artificial Sequence
  Synthetic oligonucleotide; GAG chr2 60471740 60471759 60471743 -
agcactaacaaagaaaaaaa

SEQ ID NO: 182926 - DNA, 20 bp, Artificial Sequence
  Synthetic oligonucleotide; AGG chr2 60471739 60471758 60471742 -
gcactaacaaagaaaaaaag

SEQ ID NO: 182927 - DNA, 20 bp, Artificial Sequence
  Synthetic oligonucleotide; TAG chr2 60471729 60471748 60471732 -
agaaaaaaagaggacataac

SEQ ID NO: 182928 - DNA, 20 bp, Artificial Sequence
  Synthetic oligonucleotide; TAG chr2 60471713 60471732 60471716 -
taactagatcacccacttcc

SEQ ID NO: 182929 - DNA, 20 bp, Artificial Sequence
  Synthetic oligonucleotide; CAG chr2 60471709 60471728 60471712 -
tagatcacccacttcctagc

SEQ ID NO: 182930 - DNA, 20 bp, Artificial Sequence
  Synthetic oligonucleotide; CAG chr2 60471702 60471721 60471705 -
cccacttcctagccagcaac

SEQ ID NO: 182931 - DNA, 20 bp, Artificial Sequence
  Synthetic oligonucleotide; GAG chr2 60471700 60471719 60471703 -
cacttcctagccagcaacca

SEQ ID NO: 182932 - DNA, 20 bp, Artificial Sequence
  Synthetic oligonucleotide; TGG chr2 60471689 60471708 60471692 -
cagcaaccagagcccatctc

SEQ ID NO: 182933 - DNA, 20 bp, Artificial Sequence
  Synthetic oligonucleotide; TGG chr2 60471685 60471704 60471688 -
aaccagagcccatctctggc

SEQ ID NO: 182934 - DNA, 20 bp, Artificial Sequence
  Synthetic oligonucleotide; GGG chr2 60471684 60471703 60471687 -
accagagcccatctctggct

SEQ ID NO: 182935 - DNA, 20 bp, Artificial Sequence
  Synthetic oligonucleotide; GGG chr2 60471683 60471702 60471686 -
ccagagcccatctctggctg

SEQ ID NO: 182936 - DNA, 20 bp, Artificial Sequence
  Synthetic oligonucleotide; GAG chr2 60471681 60471700 60471684 -
agagcccatctctggctggg

SEQ ID NO: 182937 - DNA, 20 bp, Artificial Sequence
  Synthetic oligonucleotide; AAG chr2 60471673 60471692 60471676 -
tctctggctggggagaatga

SEQ ID NO: 182938 - DNA, 20 bp, Artificial Sequence
  Synthetic oligonucleotide; AAG chr2 60471668 60471687 60471671 -
ggctggggagaatgaaagcg

SEQ ID NO: 182939 - DNA, 20 bp, Artificial Sequence
  Synthetic oligonucleotide; AGG chr2 60471667 60471686 60471670 -
gctggggagaatgaaagcga

SEQ ID NO: 182940 - DNA, 20 bp, Artificial Sequence
  Synthetic oligonucleotide; TGG chr2 60471664 60471683 60471667 -
ggggagaatgaaagcgaagg

SEQ ID NO: 182941 - DNA, 20 bp, Artificial Sequence
  Synthetic oligonucleotide; GGG chr2 60471663 60471682 60471666 -
gggagaatgaaagcgaaggt

SEQ ID NO: 182942 - DNA, 20 bp, Artificial Sequence
  Synthetic oligonucleotide; AAG chr2 60471658 60471677 60471661 -
aatgaaagcgaaggtgggaa

SEQ ID NO: 182943 - DNA, 20 bp, Artificial Sequence
  Synthetic oligonucleotide; AAG chr2 60471655 60471674 60471658 -
gaaagcgaaggtgggaaaag

SEQ ID NO: 182944 - DNA, 20 bp, Artificial Sequence
  Synthetic oligonucleotide; GAG chr2 60471653 60471672 60471656 -
aagcgaaggtgggaaaagaa

SEQ ID NO: 182945 - DNA, 20 bp, Artificial Sequence
  Synthetic oligonucleotide; AGG chr2 60471652 60471671 60471655 -
agcgaaggtgggaaaagaag

SEQ ID NO: 182946 - DNA, 20 bp, Artificial Sequence
  Synthetic oligonucleotide; CAG chr2 60471641 60471660 60471644 -
gaaaagaagaggccctcaac

SEQ ID NO: 182947 - DNA, 20 bp, Artificial Sequence
  Synthetic oligonucleotide; AGG chr2 60471640 60471659 60471643 -
aaaagaagaggccctcaacc

SEQ ID NO: 182948 - DNA, 20 bp, Artificial Sequence
  Synthetic oligonucleotide; GGG chr2 60471639 60471658 60471642 -
aaagaagaggccctcaacca

SEQ ID NO: 182949 - DNA, 20 bp, Artificial Sequence
  Synthetic oligonucleotide; GGG chr2 60471638 60471657 60471641 -
aagaagaggccctcaaccag

SEQ ID NO: 182950 - DNA, 20 bp, Artificial Sequence
  Synthetic oligonucleotide; CAG chr2 60471635 60471654 60471638 -
aagaggccctcaaccagggg

SEQ ID NO: 182951 - DNA, 20 bp, Artificial Sequence
  Synthetic oligonucleotide; TGG chr2 60471616 60471635 60471619 -
gcagctccttttccccacct

SEQ ID NO: 182952 - DNA, 20 bp, Artificial Sequence
  Synthetic oligonucleotide; TGG chr2 60471611 60471630 60471614 -
tccttttccccaccttggcc

SEQ ID NO: 182953 - DNA, 20 bp, Artificial Sequence
  Synthetic oligonucleotide; GGG chr2 60471610 60471629 60471613 -
ccttttccccaccttggcct

SEQ ID NO: 182954 - DNA, 20 bp, Artificial Sequence
  Synthetic oligonucleotide; AAG chr2 60471607 60471626 60471610 -
tttccccaccttggcctggg

SEQ ID NO: 182955 - DNA, 20 bp, Artificial Sequence
  Synthetic oligonucleotide; AGG chr2 60471606 60471625 60471609 -
ttccccaccttggcctggga

SEQ ID NO: 182956 - DNA, 20 bp, Artificial Sequence
  Synthetic oligonucleotide; CAG chr2 60471603 60471622 60471606 -
cccaccttggcctgggaagg

SEQ ID NO: 182957 - DNA, 20 bp, Artificial Sequence
  Synthetic oligonucleotide; GAG chr2 60471601 60471620 60471604 -
caccttggcctgggaaggca

SEQ ID NO: 182958 - DNA, 20 bp, Artificial Sequence
  Synthetic oligonucleotide; GAG chr2 60471589 60471608 60471592 -
ggaaggcagagctgctcctc

SEQ ID NO: 182959 - DNA, 20 bp, Artificial Sequence
  Synthetic oligonucleotide; CAG chr2 60471577 60471596 60471580 -
tgctcctcgagtttgacgct

SEQ ID NO: 182960 - DNA, 20 bp, Artificial Sequence
  Synthetic oligonucleotide; AAG chr2 60471574 60471593 60471577 -
tcctcgagtttgacgctcag

SEQ ID NO: 182961 - DNA, 20 bp, Artificial Sequence
  Synthetic oligonucleotide; AAG chr2 60471544 60471563 60471547 -
tgtgatactttactttgcct

SEQ ID NO: 182962 - DNA, 20 bp, Artificial Sequence
  Synthetic oligonucleotide; AAG chr2 60471524 60471543 60471527 -
aagccgtgatgaaataattg

SEQ ID NO: 182963 - DNA, 20 bp, Artificial Sequence
  Synthetic oligonucleotide; AGG chr2 60471523 60471542 60471526 -
agccgtgatgaaataattga

SEQ ID NO: 182964 - DNA, 20 bp, Artificial Sequence
  Synthetic oligonucleotide; TAG chr2 60471515 60471534 60471518 -
tgaaataattgaaggcatca

SEQ ID NO: 182965 - DNA, 20 bp, Artificial Sequence
  Synthetic oligonucleotide; AAG chr2 60471511 60471530 60471514 -
ataattgaaggcatcatagc

SEQ ID NO: 182966 - DNA, 20 bp, Artificial Sequence
  Synthetic oligonucleotide; AAG chr2 60471508 60471527 60471511 -
attgaaggcatcatagcaag

SEQ ID NO: 182967 - DNA, 20 bp, Artificial Sequence
  Synthetic oligonucleotide; AAG chr2 60471503 60471522 60471506 -
aggcatcatagcaagaagtt

SEQ ID NO: 182968 - DNA, 20 bp, Artificial Sequence
  Synthetic oligonucleotide; TAG chr2 60471497 60471516 60471500 -
catagcaagaagttaagccc

SEQ ID NO: 182969 - DNA, 20 bp, Artificial Sequence
  Synthetic oligonucleotide; AGG chr2 60471496 60471515 60471499 -
atagcaagaagttaagccct

SEQ ID NO: 182970 - DNA, 20 bp, Artificial Sequence
  Synthetic oligonucleotide; GGG chr2 60471495 60471514 60471498 -
tagcaagaagttaagcccta

SEQ ID NO: 182971 - DNA, 20 bp, Artificial Sequence
  Synthetic oligonucleotide; GAG chr2 60471493 60471512 60471496 -
gcaagaagttaagccctagg

SEQ ID NO: 182972 - DNA, 20 bp, Artificial Sequence
  Synthetic oligonucleotide; AGG chr2 60471492 60471511 60471495 -
caagaagttaagccctaggg

SEQ ID NO: 182973 - DNA, 20 bp, Artificial Sequence
  Synthetic oligonucleotide; TAG chr2 60471477 60471496 60471480 -
tagggaggctattaacaatt

SEQ ID NO: 182974 - DNA, 20 bp, Artificial Sequence
  Synthetic oligonucleotide; CAG chr2 60471468 60471487 60471471 -
tattaacaatttagcatttc

SEQ ID NO: 182975 - DNA, 20 bp, Artificial Sequence
  Synthetic oligonucleotide; TGG chr2 60471459 60471478 60471462 -
tttagcatttccagttcatg

SEQ ID NO: 182976 - DNA, 20 bp, Artificial Sequence
  Synthetic oligonucleotide; GGG chr2 60471458 60471477 60471461 -
ttagcatttccagttcatgt

SEQ ID NO: 182977 - DNA, 20 bp, Artificial Sequence
  Synthetic oligonucleotide; AAG chr2 60471435 60471454 60471438 -
aatgtcgattttacttacca

SEQ ID NO: 182978 - DNA, 20 bp, Artificial Sequence
  Synthetic oligonucleotide; GAG chr2 60471433 60471452 60471436 -
tgtcgattttacttaccaaa

SEQ ID NO: 182979 - DNA, 20 bp, Artificial Sequence
  Synthetic oligonucleotide; TGG chr2 60471423 60471442 60471426 -
acttaccaaagagaatatta

SEQ ID NO: 182980 - DNA, 20 bp, Artificial Sequence
  Synthetic oligonucleotide; TAG chr2 60471413 60471432 60471416 -
gagaatattatggatgtgtt

SEQ ID NO: 182981 - DNA, 20 bp, Artificial Sequence
  Synthetic oligonucleotide; TGG chr2 60471410 60471429 60471413 -
aatattatggatgtgtttag

SEQ ID NO: 182982 - DNA, 20 bp, Artificial Sequence
  Synthetic oligonucleotide; AAG chr2 60471407 60471426 60471410 -
attatggatgtgtttagtgg

SEQ ID NO: 182983 - DNA, 20 bp, Artificial Sequence
  Synthetic oligonucleotide; AAG chr2 60471404 60471423 60471407 -
atggatgtgtttagtggaag

SEQ ID NO: 182984 - DNA, 20 bp, Artificial Sequence
  Synthetic oligonucleotide; CAG chr2 60471401 60471420 60471404 -
gatgtgtttagtggaagaag

SEQ ID NO: 182985 - DNA, 20 bp, Artificial Sequence
  Synthetic oligonucleotide; CAG chr2 60471398 60471417 60471401 -
gtgtttagtggaagaagcag

SEQ ID NO: 182986 - DNA, 20 bp, Artificial Sequence
  Synthetic oligonucleotide; CAG chr2 60471392 60471411 60471395 -
agtggaagaagcagcagaat

SEQ ID NO: 182987 - DNA, 20 bp, Artificial Sequence
  Synthetic oligonucleotide; TGG chr2 60471388 60471407 60471391 -
gaagaagcagcagaatcagc

SEQ ID NO: 182988 - DNA, 20 bp, Artificial Sequence
  Synthetic oligonucleotide; GGG chr2 60471387 60471406 60471390 -
aagaagcagcagaatcagct

SEQ ID NO: 182989 - DNA, 20 bp, Artificial Sequence
  Synthetic oligonucleotide; GGG chr2 60471386 60471405 60471389 -
agaagcagcagaatcagctg

SEQ ID NO: 182990 - DNA, 20 bp, Artificial Sequence
  Synthetic oligonucleotide; CAG chr2 60471379 60471398 60471382 -
gcagaatcagctggggtccc

SEQ ID NO: 182991 - DNA, 20 bp, Artificial Sequence
  Synthetic oligonucleotide; TGG chr2 60471375 60471394 60471378 -
aatcagctggggtccccagt

SEQ ID NO: 182992 - DNA, 20 bp, Artificial Sequence
  Synthetic oligonucleotide; AAG chr2 60471350 60471369 60471353 -
ttgctttgaccctcttcctg

SEQ ID NO: 182993 - DNA, 20 bp, Artificial Sequence
  Synthetic oligonucleotide; AGG chr2 60471349 60471368 60471352 -
tgctttgaccctcttcctga

SEQ ID NO: 182994 - DNA, 20 bp, Artificial Sequence
  Synthetic oligonucleotide; AAG chr2 60471346 60471365 60471349 -
tttgaccctcttcctgaagg

SEQ ID NO: 182995 - DNA, 20 bp, Artificial Sequence
  Synthetic oligonucleotide; AAG chr2 60471335 60471354 60471338 -
tcctgaaggaagataaatgc

SEQ ID NO: 182996 - DNA, 20 bp, Artificial Sequence
  Synthetic oligonucleotide; AGG chr2 60471334 60471353 60471337 -
cctgaaggaagataaatgca

SEQ ID NO: 182997 - DNA, 20 bp, Artificial Sequence
  Synthetic oligonucleotide; GGG chr2 60471333 60471352 60471336 -
ctgaaggaagataaatgcaa

SEQ ID NO: 182998 - DNA, 20 bp, Artificial Sequence
  Synthetic oligonucleotide; GAG chr2 60471329 60471348 60471332 -
aggaagataaatgcaagggt

SEQ ID NO: 182999 - DNA, 20 bp, Artificial Sequence
  Synthetic oligonucleotide; AAG chr2 60471319 60471338 60471322 -
atgcaagggtgagtctcaca

SEQ ID NO: 183000 - DNA, 20 bp, Artificial Sequence
  Synthetic oligonucleotide; CAG chr2 60471315 60471334 60471318 -
aagggtgagtctcacaaaga

SEQ ID NO: 183001 - DNA, 20 bp, Artificial Sequence
  Synthetic oligonucleotide; AAG chr2 60471297 60471316 60471300 -
gacagtgtgctttttttcta

SEQ ID NO: 183002 - DNA, 20 bp, Artificial Sequence
  Synthetic oligonucleotide; TAG chr2 60471290 60471309 60471293 -
tgctttttttctaaagtaaa

SEQ ID NO: 183003 - DNA, 20 bp, Artificial Sequence
  Synthetic oligonucleotide; TAG chr2 60471282 60471301 60471285 -
ttctaaagtaaatagcttct

SEQ ID NO: 183004 - DNA, 20 bp, Artificial Sequence
  Synthetic oligonucleotide; AGG chr2 60471281 60471300 60471284 -
tctaaagtaaatagcttctt

SEQ ID NO: 183005 - DNA, 20 bp, Artificial Sequence
  Synthetic oligonucleotide; TAG chr2 60471274 60471293 60471277 -
taaatagcttcttaggctga

SEQ ID NO: 183006 - DNA, 20 bp, Artificial Sequence
  Synthetic oligonucleotide; TAG chr2 60471262 60471281 60471265 -
taggctgatagaaatgtttt

SEQ ID NO: 183007 - DNA, 20 bp, Artificial Sequence
  Synthetic oligonucleotide; CAG chr2 60471246 60471265 60471249 -
tttttagctgtctaattctg

SEQ ID NO: 183008 - DNA, 20 bp, Artificial Sequence
  Synthetic oligonucleotide; AGG chr2 60471245 60471264 60471248 -
ttttagctgtctaattctgc

SEQ ID NO: 183009 - DNA, 20 bp, Artificial Sequence
  Synthetic oligonucleotide; GGG chr2 60471244 60471263 60471247 -
tttagctgtctaattctgca

SEQ ID NO: 183010 - DNA, 20 bp, Artificial Sequence
  Synthetic oligonucleotide; GGG chr2 60471243 60471262 60471246 -
ttagctgtctaattctgcag

SEQ ID NO: 183011 - DNA, 20 bp, Artificial Sequence
  Synthetic oligonucleotide; AAG chr2 60471240 60471259 60471243 -
gctgtctaattctgcagggg

SEQ ID NO: 183012 - DNA, 20 bp, Artificial Sequence
  Synthetic oligonucleotide; CAG chr2 60471237 60471256 60471240 -
gtctaattctgcaggggaag

SEQ ID NO: 183013 - DNA, 20 bp, Artificial Sequence
  Synthetic oligonucleotide; GAG chr2 60471235 60471254 60471238 -
ctaattctgcaggggaagca

SEQ ID NO: 183014 - DNA, 20 bp, Artificial Sequence
  Synthetic oligonucleotide; AGG chr2 60471234 60471253 60471237 -
taattctgcaggggaagcag

SEQ ID NO: 183015 - DNA, 20 bp, Artificial Sequence
  Synthetic oligonucleotide; TAG chr2 60471231 60471250 60471234 -
ttctgcaggggaagcagagg

SEQ ID NO: 183016 - DNA, 20 bp, Artificial Sequence
  Synthetic oligonucleotide; GAG chr2 60471229 60471248 60471232 -
ctgcaggggaagcagaggta

SEQ ID NO: 183017 - DNA, 20 bp, Artificial Sequence
  Synthetic oligonucleotide; AGG chr2 60471228 60471247 60471231 -
tgcaggggaagcagaggtag

SEQ ID NO: 183018 - DNA, 20 bp, Artificial Sequence
  Synthetic oligonucleotide; GGG chr2 60471227 60471246 60471230 -
gcaggggaagcagaggtaga

SEQ ID NO: 183019 - DNA, 20 bp, Artificial Sequence
  Synthetic oligonucleotide; CAG chr2 60471218 60471237 60471221 -
gcagaggtagagggtgaaca

SEQ ID NO: 183020 - DNA, 20 bp, Artificial Sequence
  Synthetic oligonucleotide; AAG chr2 60471213 60471232 60471216 -
ggtagagggtgaacacagca

SEQ ID NO: 183021 - DNA, 20 bp, Artificial Sequence
  Synthetic oligonucleotide; AGG chr2 60471212 60471231 60471215 -
gtagagggtgaacacagcaa

SEQ ID NO: 183022 - DNA, 20 bp, Artificial Sequence
  Synthetic oligonucleotide; GAG chr2 60471208 60471227 60471211 -
agggtgaacacagcaaaggt

SEQ ID NO: 183023 - DNA, 20 bp, Artificial Sequence
  Synthetic oligonucleotide; AGG chr2 60471207 60471226 60471210 -
gggtgaacacagcaaaggtg

SEQ ID NO: 183024 - DNA, 20 bp, Artificial Sequence
  Synthetic oligonucleotide; CAG chr2 60471203 60471222 60471206 -
gaacacagcaaaggtgaggc

SEQ ID NO: 183025 - DNA, 20 bp, Artificial Sequence
  Synthetic oligonucleotide; AGG chr2 60471202 60471221 60471205 -
aacacagcaaaggtgaggcc

SEQ ID NO: 183026 - DNA, 20 bp, Artificial Sequence
  Synthetic oligonucleotide; GAG chr2 60471200 60471219 60471203 -
cacagcaaaggtgaggccag

SEQ ID NO: 183027 - DNA, 20 bp, Artificial Sequence
  Synthetic oligonucleotide; AGG chr2 60471199 60471218 60471202 -
acagcaaaggtgaggccagg

SEQ ID NO: 183028 - DNA, 20 bp, Artificial Sequence
  Synthetic oligonucleotide; CAG chr2 60471194 60471213 60471197 -
aaaggtgaggccaggaggcc

SEQ ID NO: 183029 - DNA, 20 bp, Artificial Sequence
  Synthetic oligonucleotide; AGG chr2 60471193 60471212 60471196 -
aaggtgaggccaggaggccc

SEQ ID NO: 183030 - DNA, 20 bp, Artificial Sequence
  Synthetic oligonucleotide; CAG chr2 60471190 60471209 60471193 -
gtgaggccaggaggcccagg

SEQ ID NO: 183031 - DNA, 20 bp, Artificial Sequence
  Synthetic oligonucleotide; CAG chr2 60471187 60471206 60471190 -
aggccaggaggcccaggcag

SEQ ID NO: 183032 - DNA, 20 bp, Artificial Sequence
  Synthetic oligonucleotide; GAG chr2 60471185 60471204 60471188 -
gccaggaggcccaggcagca

SEQ ID NO: 183033 - DNA, 20 bp, Artificial Sequence
  Synthetic oligonucleotide; CAG chr2 60471182 60471201 60471185 -
aggaggcccaggcagcagag

SEQ ID NO: 183034 - DNA, 20 bp, Artificial Sequence
  Synthetic oligonucleotide; AGG chr2 60471181 60471200 60471184 -
ggaggcccaggcagcagagc

SEQ ID NO: 183035 - DNA, 20 bp, Artificial Sequence
  Synthetic oligonucleotide; GAG chr2 60471161 60471180 60471164 -
aggccttgttttccaattgt

SEQ ID NO: 183036 - DNA, 20 bp, Artificial Sequence
  Synthetic oligonucleotide; AAG chr2 60471155 60471174 60471158 -
tgttttccaattgtgagacc

SEQ ID NO: 183037 - DNA, 20 bp, Artificial Sequence
  Synthetic oligonucleotide; CAG chr2 60471151 60471170 60471154 -
ttccaattgtgagaccaagt

SEQ ID NO: 183038 - DNA, 20 bp, Artificial Sequence
  Synthetic oligonucleotide; TGG chr2 60471143 60471162 60471146 -
gtgagaccaagtcagttcat

SEQ ID NO: 183039 - DNA, 20 bp, Artificial Sequence
  Synthetic oligonucleotide; AAG chr2 60471130 60471149 60471133 -
agttcattggcacctttcga

SEQ ID NO: 183040 - DNA, 20 bp, Artificial Sequence
  Synthetic oligonucleotide; TAG chr2 60471120 60471139 60471123 -
cacctttcgaaagccccatg

SEQ ID NO: 183041 - DNA, 20 bp, Artificial Sequence
  Synthetic oligonucleotide; TGG chr2 60471111 60471130 60471114 -
aaagccccatgtagcgctgc

SEQ ID NO: 183042 - DNA, 20 bp, Artificial Sequence
  Synthetic oligonucleotide; GGG chr2 60471110 60471129 60471113 -
aagccccatgtagcgctgct

SEQ ID NO: 183043 - DNA, 20 bp, Artificial Sequence
  Synthetic oligonucleotide; TGG chr2 60471106 60471125 60471109 -
cccatgtagcgctgctgggc

SEQ ID NO: 183044 - DNA, 20 bp, Artificial Sequence
  Synthetic oligonucleotide; AAG chr2 60471093 60471112 60471096 -
gctgggctggaccctccccc

SEQ ID NO: 183045 - DNA, 20 bp, Artificial Sequence
  Synthetic oligonucleotide; CGG chr2 60471089 60471108 60471092 -
ggctggaccctcccccaaga

SEQ ID NO: 183046 - DNA, 20 bp, Artificial Sequence
  Synthetic oligonucleotide; AAG chr2 60471084 60471103 60471087 -
gaccctcccccaagacggtt

SEQ ID NO: 183047 - DNA, 20 bp, Artificial Sequence
  Synthetic oligonucleotide; TGG chr2 60471071 60471090 60471074 -
gacggttaagtactgcttaa

SEQ ID NO: 183048 - DNA, 20 bp, Artificial Sequence
  Synthetic oligonucleotide; CAG chr2 60471066 60471085 60471069 -
ttaagtactgcttaatggat

SEQ ID NO: 183049 - DNA, 20 bp, Artificial Sequence
  Synthetic oligonucleotide; TAG chr2 60471063 60471082 60471066 -
agtactgcttaatggatcag

SEQ ID NO: 183050 - DNA, 20 bp, Artificial Sequence
  Synthetic oligonucleotide; CAG chr2 60471057 60471076 60471060 -
gcttaatggatcagtagaaa

SEQ ID NO: 183051 - DNA, 20 bp, Artificial Sequence
  Synthetic oligonucleotide; AGG chr2 60471056 60471075 60471059 -
cttaatggatcagtagaaac

SEQ ID NO: 183052 - DNA, 20 bp, Artificial Sequence
  Synthetic oligonucleotide; TGG chr2 60471043 60471062 60471046 -
tagaaacaggaccttcttgt

SEQ ID NO: 183053 - DNA, 20 bp, Artificial Sequence
  Synthetic oligonucleotide; GGG chr2 60471042 60471061 60471045 -
agaaacaggaccttcttgtt

SEQ ID NO: 183054 - DNA, 20 bp, Artificial Sequence
  Synthetic oligonucleotide; CAG chr2 60471039 60471058 60471042 -
aacaggaccttcttgttggg

SEQ ID NO: 183055 - DNA, 20 bp, Artificial Sequence
  Synthetic oligonucleotide; AAG chr2 60471034 60471053 60471037 -
gaccttcttgttgggcagtg

SEQ ID NO: 183056 - DNA, 20 bp, Artificial Sequence
  Synthetic oligonucleotide; CGG chr2 60471027 60471046 60471030 -
ttgttgggcagtgaagacca

SEQ ID NO: 183057 - DNA, 20 bp, Artificial Sequence
  Synthetic oligonucleotide; CAG chr2 60471024 60471043 60471027 -
ttgggcagtgaagaccacgg

SEQ ID NO: 183058 - DNA, 20 bp, Artificial Sequence
  Synthetic oligonucleotide; AGG chr2 60471023 60471042 60471026 -
tgggcagtgaagaccacggc

SEQ ID NO: 183059 - DNA, 20 bp, Artificial Sequence
  Synthetic oligonucleotide; GAG chr2 60471021 60471040 60471024 -
ggcagtgaagaccacggcag

SEQ ID NO: 183060 - DNA, 20 bp, Artificial Sequence
  Synthetic oligonucleotide; CAG chr2 60471018 60471037 60471021 -
agtgaagaccacggcaggag

SEQ ID NO: 183061 - DNA, 20 bp, Artificial Sequence
  Synthetic oligonucleotide; CAG chr2 60471015 60471034 60471018 -
gaagaccacggcaggagcag

SEQ ID NO: 183062 - DNA, 20 bp, Artificial Sequence
  Synthetic oligonucleotide; AGG chr2 60471014 60471033 60471017 -
aagaccacggcaggagcagc

SEQ ID NO: 183063 - DNA, 20 bp, Artificial Sequence
  Synthetic oligonucleotide; GGG chr2 60471013 60471032 60471016 -
agaccacggcaggagcagca

SEQ ID NO: 183064 - DNA, 20 bp, Artificial Sequence
  Synthetic oligonucleotide; GGG chr2 60471012 60471031 60471015 -
gaccacggcaggagcagcag

SEQ ID NO: 183065 - DNA, 20 bp, Artificial Sequence
  Synthetic oligonucleotide; GGG chr2 60471011 60471030 60471014 -
accacggcaggagcagcagg

SEQ ID NO: 183066 - DNA, 20 bp, Artificial Sequence
  Synthetic oligonucleotide; GGG chr2 60471010 60471029 60471013 -
ccacggcaggagcagcaggg

SEQ ID NO: 183067 - DNA, 20 bp, Artificial Sequence
  Synthetic oligonucleotide; AAG chr2 60471007 60471026 60471010 -
cggcaggagcagcagggggg

SEQ ID NO: 183068 - DNA, 20 bp, Artificial Sequence
  Synthetic oligonucleotide; GAG chr2 60471005 60471024 60471008 -
gcaggagcagcaggggggaa

SEQ ID NO: 183069 - DNA, 20 bp, Artificial Sequence
  Synthetic oligonucleotide; CAG chr2 60470993 60471012 60470996 -
ggggggaagagacaaattcc

SEQ ID NO: 183070 - DNA, 20 bp, Artificial Sequence
  Synthetic oligonucleotide; AGG chr2 60470992 60471011 60470995 -
gggggaagagacaaattccc

SEQ ID NO: 183071 - DNA, 20 bp, Artificial Sequence
  Synthetic oligonucleotide; AAG chr2 60470988 60471007 60470991 -
gaagagacaaattcccagga

SEQ ID NO: 183072 - DNA, 20 bp, Artificial Sequence
  Synthetic oligonucleotide; TGG chr2 60470980 60470999 60470983 -
aaattcccaggaaagaccac

SEQ ID NO: 183073 - DNA, 20 bp, Artificial Sequence
  Synthetic oligonucleotide; CAG chr2 60470975 60470994 60470978 -
cccaggaaagaccactggat

SEQ ID NO: 183074 - DNA, 20 bp, Artificial Sequence
  Synthetic oligonucleotide; AGG chr2 60470974 60470993 60470977 -
ccaggaaagaccactggatc

SEQ ID NO: 183075 - DNA, 20 bp, Artificial Sequence
  Synthetic oligonucleotide; GAG chr2 60470972 60470991 60470975 -
aggaaagaccactggatcag

SEQ ID NO: 183076 - DNA, 20 bp, Artificial Sequence
  Synthetic oligonucleotide; CAG chr2 60470968 60470987 60470971 -
aagaccactggatcaggagt

SEQ ID NO: 183077 - DNA, 20 bp, Artificial Sequence
  Synthetic oligonucleotide; AGG chr2 60470967 60470986 60470970 -
agaccactggatcaggagtc

SEQ ID NO: 183078 - DNA, 20 bp, Artificial Sequence
  Synthetic oligonucleotide; GAG chr2 60470965 60470984 60470968 -
accactggatcaggagtcag

SEQ ID NO: 183079 - DNA, 20 bp, Artificial Sequence
  Synthetic oligonucleotide; TGG chr2 60470940 60470959 60470943 -
taattctaatcttcacattg

SEQ ID NO: 183080 - DNA, 20 bp, Artificial Sequence
  Synthetic oligonucleotide; CAG chr2 60470929 60470948 60470932 -
ttcacattgtggttaatcat

SEQ ID NO: 183081 - DNA, 20 bp, Artificial Sequence
  Synthetic oligonucleotide; TAG chr2 60470924 60470943 60470927 -
attgtggttaatcatcagtg

SEQ ID NO: 183082 - DNA, 20 bp, Artificial Sequence
  Synthetic oligonucleotide; TGG chr2 60470918 60470937 60470921 -
gttaatcatcagtgtagcca

SEQ ID NO: 183083 - DNA, 20 bp, Artificial Sequence
  Synthetic oligonucleotide; GGG chr2 60470917 60470936 60470920 -
ttaatcatcagtgtagccat

SEQ ID NO: 183084 - DNA, 20 bp, Artificial Sequence
  Synthetic oligonucleotide; AAG chr2 60470913 60470932 60470916 -
tcatcagtgtagccatgggc

SEQ ID NO: 183085 - DNA, 20 bp, Artificial Sequence
  Synthetic oligonucleotide; TGG chr2 60470895 60470914 60470898 -
gcaagtcacttaatttctca

SEQ ID NO: 183086 - DNA, 20 bp, Artificial Sequence
  Synthetic oligonucleotide; CAG chr2 60470889 60470908 60470892 -
cacttaatttctcatggcct

SEQ ID NO: 183087 - DNA, 20 bp, Artificial Sequence
  Synthetic oligonucleotide; AAG chr2 60470867 60470886 60470870 -
gtttccccatctgtaaaatg

SEQ ID NO: 183088 - DNA, 20 bp, Artificial Sequence
  Synthetic oligonucleotide; AGG chr2 60470866 60470885 60470869 -
tttccccatctgtaaaatga

SEQ ID NO: 183089 - DNA, 20 bp, Artificial Sequence
  Synthetic oligonucleotide; GGG chr2 60470865 60470884 60470868 -
ttccccatctgtaaaatgaa

SEQ ID NO: 183090 - DNA, 20 bp, Artificial Sequence
  Synthetic oligonucleotide; CAG chr2 60470861 60470880 60470864 -
ccatctgtaaaatgaaggga

SEQ ID NO: 183091 - DNA, 20 bp, Artificial Sequence
  Synthetic oligonucleotide; TAG chr2 60470849 60470868 60470852 -
tgaagggacagacttgatga

SEQ ID NO: 183092 - DNA, 20 bp, Artificial Sequence
  Synthetic oligonucleotide; TAG chr2 60470845 60470864 60470848 -
gggacagacttgatgatagc

SEQ ID NO: 183093 - DNA, 20 bp, Artificial Sequence
  Synthetic oligonucleotide; AGG chr2 60470844 60470863 60470847 -
ggacagacttgatgatagct

SEQ ID NO: 183094 - DNA, 20 bp, Artificial Sequence
  Synthetic oligonucleotide; GGG chr2 60470843 60470862 60470846 -
gacagacttgatgatagcta

SEQ ID NO: 183095 - DNA, 20 bp, Artificial Sequence
  Synthetic oligonucleotide; TAG chr2 60470828 60470847 60470831 -
agctagggttttttacaact

SEQ ID NO: 183096 - DNA, 20 bp, Artificial Sequence
  Synthetic oligonucleotide; CAG chr2 60470784 60470803 60470787 -
acaaaaacaaactatgctgc

SEQ ID NO: 183097 - DNA, 20 bp, Artificial Sequence
  Synthetic oligonucleotide; TAG chr2 60470780 60470799 60470783 -
aaacaaactatgctgccaga

SEQ ID NO: 183098 - DNA, 20 bp, Artificial Sequence
  Synthetic oligonucleotide; CAG chr2 60470776 60470795 60470779 -
aaactatgctgccagatagt

SEQ ID NO: 183099 - DNA, 20 bp, Artificial Sequence
  Synthetic oligonucleotide; GAG chr2 60470771 60470790 60470774 -
atgctgccagatagtcagat

SEQ ID NO: 183100 - DNA, 20 bp, Artificial Sequence
  Synthetic oligonucleotide; CGG chr2 60470752 60470771 60470755 -
tgagacctcactttgccaca

SEQ ID NO: 183101 - DNA, 20 bp, Artificial Sequence
  Synthetic oligonucleotide; CAG chr2 60470748 60470767 60470751 -
acctcactttgccacacggc

SEQ ID NO: 183102 - DNA, 20 bp, Artificial Sequence
  Synthetic oligonucleotide; TAG chr2 60470739 60470758 60470742 -
tgccacacggccagacactg

SEQ ID NO: 183103 - DNA, 20 bp, Artificial Sequence
  Synthetic oligonucleotide; GAG chr2 60470737 60470756 60470740 -
ccacacggccagacactgta

SEQ ID NO: 183104 - DNA, 20 bp, Artificial Sequence
  Synthetic oligonucleotide; TGG chr2 60470731 60470750 60470734 -
ggccagacactgtagagatc

SEQ ID NO: 183105 - DNA, 20 bp, Artificial Sequence
  Synthetic oligonucleotide; CAG chr2 60470719 60470738 60470722 -
tagagatctggtcctgccgt

SEQ ID NO: 183106 - DNA, 20 bp, Artificial Sequence
  Synthetic oligonucleotide; TAG chr2 60470710 60470729 60470713 -
ggtcctgccgtcagcttgtt

SEQ ID NO: 183107 - DNA, 20 bp, Artificial Sequence
  Synthetic oligonucleotide; AGG chr2 60470709 60470728 60470712 -
gtcctgccgtcagcttgttt

SEQ ID NO: 183108 - DNA, 20 bp, Artificial Sequence
  Synthetic oligonucleotide; GGG chr2 60470708 60470727 60470711 -
tcctgccgtcagcttgttta

SEQ ID NO: 183109 - DNA, 20 bp, Artificial Sequence
  Synthetic oligonucleotide; TGG chr2 60470701 60470720 60470704 -
gtcagcttgtttagggctaa

SEQ ID NO: 183110 - DNA, 20 bp, Artificial Sequence
  Synthetic oligonucleotide; GGG chr2 60470700 60470719 60470703 -
tcagcttgtttagggctaat

SEQ ID NO: 183111 - DNA, 20 bp, Artificial Sequence
  Synthetic oligonucleotide; TAG chr2 60470693 60470712 60470696 -
gtttagggctaatgggtttg

SEQ ID NO: 183112 - DNA, 20 bp, Artificial Sequence
  Synthetic oligonucleotide; AAG chr2 60470688 60470707 60470691 -
gggctaatgggtttgtagac

SEQ ID NO: 183113 - DNA, 20 bp, Artificial Sequence
  Synthetic oligonucleotide; AAG chr2 60470676 60470695 60470679 -
ttgtagacaagtttgccaac

SEQ ID NO: 183114 - DNA, 20 bp, Artificial Sequence
  Synthetic oligonucleotide; GAG chr2 60470674 60470693 60470677 -
gtagacaagtttgccaacaa

SEQ ID NO: 183115 - DNA, 20 bp, Artificial Sequence
  Synthetic oligonucleotide; GAG chr2 60470663 60470682 60470666 -
tgccaacaagagattcatgc

SEQ ID NO: 183116 - DNA, 20 bp, Artificial Sequence
  Synthetic oligonucleotide; AGG chr2 60470662 60470681 60470665 -
gccaacaagagattcatgcg

SEQ ID NO: 183117 - DNA, 20 bp, Artificial Sequence
  Synthetic oligonucleotide; GGG chr2 60470661 60470680 60470664 -
ccaacaagagattcatgcga

SEQ ID NO: 183118 - DNA, 20 bp, Artificial Sequence
  Synthetic oligonucleotide; GGG chr2 60470660 60470679 60470663 -
caacaagagattcatgcgag

SEQ ID NO: 183119 - DNA, 20 bp, Artificial Sequence
  Synthetic oligonucleotide; TAG chr2 60470656 60470675 60470659 -
aagagattcatgcgaggggc

SEQ ID NO: 183120 - DNA, 20 bp, Artificial Sequence
  Synthetic oligonucleotide; AGG chr2 60470655 60470674 60470658 -
agagattcatgcgaggggct

SEQ ID NO: 183121 - DNA, 20 bp, Artificial Sequence
  Synthetic oligonucleotide; TGG chr2 60470650 60470669 60470653 -
ttcatgcgaggggctaggca

SEQ ID NO: 183122 - DNA, 20 bp, Artificial Sequence
  Synthetic oligonucleotide; TAG chr2 60470645 60470664 60470648 -
gcgaggggctaggcatggat

SEQ ID NO: 183123 - DNA, 20 bp, Artificial Sequence
  Synthetic oligonucleotide; AGG chr2 60470644 60470663 60470647 -
cgaggggctaggcatggatt

SEQ ID NO: 183124 - DNA, 20 bp, Artificial Sequence
  Synthetic oligonucleotide; TAG chr2 60470640 60470659 60470643 -
gggctaggcatggattaggt

SEQ ID NO: 183125 - DNA, 20 bp, Artificial Sequence
  Synthetic oligonucleotide; CAG chr2 60470637 60470656 60470640 -
ctaggcatggattaggttag

SEQ ID NO: 183126 - DNA, 20 bp, Artificial Sequence
  Synthetic oligonucleotide; TGG chr2 60470618 60470637 60470621 -
gcagttctcccatttcttgc

SEQ ID NO: 183127 - DNA, 20 bp, Artificial Sequence
  Synthetic oligonucleotide; GAG chr2 60470616 60470635 60470619 -
agttctcccatttcttgctg

SEQ ID NO: 183128 - DNA, 20 bp, Artificial Sequence
  Synthetic oligonucleotide; AGG chr2 60470615 60470634 60470618 -
gttctcccatttcttgctgg

SEQ ID NO: 183129 - DNA, 20 bp, Artificial Sequence
  Synthetic oligonucleotide; AAG chr2 60470605 60470624 60470608 -
ttcttgctggaggcctgctg

SEQ ID NO: 183130 - DNA, 20 bp, Artificial Sequence
  Synthetic oligonucleotide; CAG chr2 60470597 60470616 60470600 -
ggaggcctgctgaagcactt

SEQ ID NO: 183131 - DNA, 20 bp, Artificial Sequence
  Synthetic oligonucleotide; AGG chr2 60470596 60470615 60470599 -
gaggcctgctgaagcacttc

SEQ ID NO: 183132 - DNA, 20 bp, Artificial Sequence
  Synthetic oligonucleotide; GGG chr2 60470595 60470614 60470598 -
aggcctgctgaagcacttca

SEQ ID NO: 183133 - DNA, 20 bp, Artificial Sequence
  Synthetic oligonucleotide; CAG chr2 60470584 60470603 60470587 -
agcacttcagggtctcttcc

SEQ ID NO: 183134 - DNA, 20 bp, Artificial Sequence
  Synthetic oligonucleotide; GAG chr2 60470582 60470601 60470585 -
cacttcagggtctcttccca

SEQ ID NO: 183135 - DNA, 20 bp, Artificial Sequence
  Synthetic oligonucleotide; AAG chr2 60470578 60470597 60470581 -
tcagggtctcttcccagagt

SEQ ID NO: 183136 - DNA, 20 bp, Artificial Sequence
  Synthetic oligonucleotide; TGG chr2 60470575 60470594 60470578 -
gggtctcttcccagagtaag

SEQ ID NO: 183137 - DNA, 20 bp, Artificial Sequence
  Synthetic oligonucleotide; CAG chr2 60470572 60470591 60470575 -
tctcttcccagagtaagtgg

SEQ ID NO: 183138 - DNA, 20 bp, Artificial Sequence
  Synthetic oligonucleotide; GAG chr2 60470570 60470589 60470573 -
tcttcccagagtaagtggca

SEQ ID NO: 183139 - DNA, 20 bp, Artificial Sequence
  Synthetic oligonucleotide; AAG chr2 60470541 60470560 60470544 -
aaatttgatactccccatac

SEQ ID NO: 183140 - DNA, 20 bp, Artificial Sequence
  Synthetic oligonucleotide; AGG chr2 60470540 60470559 60470543 -
aatttgatactccccataca

SEQ ID NO: 183141 - DNA, 20 bp, Artificial Sequence
  Synthetic oligonucleotide; AAG chr2 60470533 60470552 60470536 -
tactccccatacaaggatcc

SEQ ID NO: 183142 - DNA, 20 bp, Artificial Sequence
  Synthetic oligonucleotide; TGG chr2 60470512 60470531 60470515 -
agtacctgttgcgtttatgc

SEQ ID NO: 183143 - DNA, 20 bp, Artificial Sequence
  Synthetic oligonucleotide; GGG chr2 60470511 60470530 60470514 -
gtacctgttgcgtttatgct

SEQ ID NO: 183144 - DNA, 20 bp, Artificial Sequence
  Synthetic oligonucleotide; CAG chr2 60470504 60470523 60470507 -
ttgcgtttatgctgggatca

SEQ ID NO: 183145 - DNA, 20 bp, Artificial Sequence
  Synthetic oligonucleotide; GAG chr2 60470502 60470521 60470505 -
gcgtttatgctgggatcaca

SEQ ID NO: 183146 - DNA, 20 bp, Artificial Sequence
  Synthetic oligonucleotide; TGG chr2 60470494 60470513 60470497 -
gctgggatcacagagatacc

SEQ ID NO: 183147 - DNA, 20 bp, Artificial Sequence
  Synthetic oligonucleotide; GGG chr2 60470493 60470512 60470496 -
ctgggatcacagagatacct

SEQ ID NO: 183148 - DNA, 20 bp, Artificial Sequence
  Synthetic oligonucleotide; AAG chr2 60470475 60470494 60470478 -
ctgggttgcctgtgtttcct

SEQ ID NO: 183149 - DNA, 20 bp, Artificial Sequence
  Synthetic oligonucleotide; AAG chr2 60470470 60470489 60470473 -
ttgcctgtgtttcctaagaa

SEQ ID NO: 183150 - DNA, 20 bp, Artificial Sequence
  Synthetic oligonucleotide; AGG chr2 60470469 60470488 60470472 -
tgcctgtgtttcctaagaaa

SEQ ID NO: 183151 - DNA, 20 bp, Artificial Sequence
  Synthetic oligonucleotide; TGG chr2 60470456 60470475 60470459 -
taagaaaaggatgtctgttt

SEQ ID NO: 183152 - DNA, 20 bp, Artificial Sequence
  Synthetic oligonucleotide; CAG chr2 60470453 60470472 60470456 -
gaaaaggatgtctgttttgg

SEQ ID NO: 183153 - DNA, 20 bp, Artificial Sequence
  Synthetic oligonucleotide; TAG chr2 60470444 60470463 60470447 -
gtctgttttggcagcaaact

SEQ ID NO: 183154 - DNA, 20 bp, Artificial Sequence
  Synthetic oligonucleotide; CGG chr2 60470437 60470456 60470440 -
ttggcagcaaacttagtgaa

SEQ ID NO: 183155 - DNA, 20 bp, Artificial Sequence
  Synthetic oligonucleotide; GAG chr2 60470432 60470451 60470435 -
agcaaacttagtgaacggct

SEQ ID NO: 183156 - DNA, 20 bp, Artificial Sequence
  Synthetic oligonucleotide; AGG chr2 60470431 60470450 60470434 -
gcaaacttagtgaacggctg

SEQ ID NO: 183157 - DNA, 20 bp, Artificial Sequence
  Synthetic oligonucleotide; AAG chr2 60470421 60470440 60470424 -
tgaacggctgaggcaaaaac

SEQ ID NO: 183158 - DNA, 20 bp, Artificial Sequence
  Synthetic oligonucleotide; AAG chr2 60470414 60470433 60470417 -
ctgaggcaaaaacaagtgca

SEQ ID NO: 183159 - DNA, 20 bp, Artificial Sequence
  Synthetic oligonucleotide; TGG chr2 60470410 60470429 60470413 -
ggcaaaaacaagtgcaaaga

SEQ ID NO: 183160 - DNA, 20 bp, Artificial Sequence
  Synthetic oligonucleotide; CAG chr2 60470402 60470421 60470405 -
caagtgcaaagatggattct

SEQ ID NO: 183161 - DNA, 20 bp, Artificial Sequence
  Synthetic oligonucleotide; TAG chr2 60470366 60470385 60470369 -
aaataccatgacaaaatctg

SEQ ID NO: 183162 - DNA, 20 bp, Artificial Sequence
  Synthetic oligonucleotide; CAG chr2 60470326 60470345 60470329 -
ctcaattcacttgacgtaaa

SEQ ID NO: 183163 - DNA, 20 bp, Artificial Sequence
  Synthetic oligonucleotide; TAG chr2 60470316 60470335 60470319 -
ttgacgtaaacagtcaaatg

SEQ ID NO: 183164 - DNA, 20 bp, Artificial Sequence
  Synthetic oligonucleotide; AAG chr2 60470298 60470317 60470301 -
tgtagacatacttgtttgtt

SEQ ID NO: 183165 - DNA, 20 bp, Artificial Sequence
  Synthetic oligonucleotide; CGG chr2 60470293 60470312 60470296 -
acatacttgtttgttaagtc

SEQ ID NO: 183166 - DNA, 20 bp, Artificial Sequence
  Synthetic oligonucleotide; TGG chr2 60470275 60470294 60470278 -
tccggtcttcctgcttgtgt

SEQ ID NO: 183167 - DNA, 20 bp, Artificial Sequence
  Synthetic oligonucleotide; TGG chr2 60470263 60470282 60470266 -
gcttgtgttggttcactttg

SEQ ID NO: 183168 - DNA, 20 bp, Artificial Sequence
  Synthetic oligonucleotide; TGG chr2 60470246 60470265 60470249 -
ttgtggtgtttattttgttt

SEQ ID NO: 183169 - DNA, 20 bp, Artificial Sequence
  Synthetic oligonucleotide; GGG chr2 60470245 60470264 60470248 -
tgtggtgtttattttgtttt

SEQ ID NO: 183170 - DNA, 20 bp, Artificial Sequence
  Synthetic oligonucleotide; CAG chr2 60470241 60470260 60470244 -
gtgtttattttgttttgggt

SEQ ID NO: 183171 - DNA, 20 bp, Artificial Sequence
  Synthetic oligonucleotide; GAG chr2 60470239 60470258 60470242 -
gtttattttgttttgggtca

SEQ ID NO: 183172 - DNA, 20 bp, Artificial Sequence
  Synthetic oligonucleotide; GAG chr2 60470237 60470256 60470240 -
ttattttgttttgggtcaga

SEQ ID NO: 183173 - DNA, 20 bp, Artificial Sequence
  Synthetic oligonucleotide; AGG chr2 60470236 60470255 60470239 -
tattttgttttgggtcagag

SEQ ID NO: 183174 - DNA, 20 bp, Artificial Sequence
  Synthetic oligonucleotide; TAG chr2 60470219 60470238 60470222 -
gagaggatgaaatgtctctg

SEQ ID NO: 183175 - DNA, 20 bp, Artificial Sequence
  Synthetic oligonucleotide; CAG chr2 60470209 60470228 60470212 -
aatgtctctgtagatgttct

SEQ ID NO: 183176 - DNA, 20 bp, Artificial Sequence
  Synthetic oligonucleotide; AGG chr2 60470208 60470227 60470211 -
atgtctctgtagatgttctc

SEQ ID NO: 183177 - DNA, 20 bp, Artificial Sequence
  Synthetic oligonucleotide; TAG chr2 60470204 60470223 60470207 -
ctctgtagatgttctcaggc

SEQ ID NO: 183178 - DNA, 20 bp, Artificial Sequence
  Synthetic oligonucleotide; AGG chr2 60470203 60470222 60470206 -
tctgtagatgttctcaggct

SEQ ID NO: 183179 - DNA, 20 bp, Artificial Sequence
  Synthetic oligonucleotide; TGG chr2 60470200 60470219 60470203 -
gtagatgttctcaggctagg

SEQ ID NO: 183180 - DNA, 20 bp, Artificial Sequence
  Synthetic oligonucleotide; CAG chr2 60470188 60470207 60470191 -
aggctaggtggtgcttccac

SEQ ID NO: 183181 - DNA, 20 bp, Artificial Sequence
  Synthetic oligonucleotide; AGG chr2 60470187 60470206 60470190 -
ggctaggtggtgcttccacc

SEQ ID NO: 183182 - DNA, 20 bp, Artificial Sequence
  Synthetic oligonucleotide; GGG chr2 60470186 60470205 60470189 -
gctaggtggtgcttccacca

SEQ ID NO: 183183 - DNA, 20 bp, Artificial Sequence
  Synthetic oligonucleotide; CAG chr2 60470173 60470192 60470176 -
tccaccagggcttccctctg

SEQ ID NO: 183184 - DNA, 20 bp, Artificial Sequence
  Synthetic oligonucleotide; AGG chr2 60470172 60470191 60470175 -
ccaccagggcttccctctgc

SEQ ID NO: 183185 - DNA, 20 bp, Artificial Sequence
  Synthetic oligonucleotide; TGG chr2 60470167 60470186 60470170 -
agggcttccctctgcaggcc

SEQ ID NO: 183186 - DNA, 20 bp, Artificial Sequence
  Synthetic oligonucleotide; CAG chr2 60470161 60470180 60470164 -
tccctctgcaggcctggtaa

SEQ ID NO: 183187 - DNA, 20 bp, Artificial Sequence
  Synthetic oligonucleotide; CAG chr2 60470158 60470177 60470161 -
ctctgcaggcctggtaacag

SEQ ID NO: 183188 - DNA, 20 bp, Artificial Sequence
  Synthetic oligonucleotide; AAG chr2 60470138 60470157 60470141 -
cagacctatgctgtctgtgt

SEQ ID NO: 183189 - DNA, 20 bp, Artificial Sequence
  Synthetic oligonucleotide; GAG chr2 60470136 60470155 60470139 -
gacctatgctgtctgtgtaa

SEQ ID NO: 183190 - DNA, 20 bp, Artificial Sequence
  Synthetic oligonucleotide; CAG chr2 60470127 60470146 60470130 -
tgtctgtgtaagagccttct

SEQ ID NO: 183191 - DNA, 20 bp, Artificial Sequence
  Synthetic oligonucleotide; CAG chr2 60470124 60470143 60470127 -
ctgtgtaagagccttctcag

SEQ ID NO: 183192 - DNA, 20 bp, Artificial Sequence
  Synthetic oligonucleotide; CAG chr2 60470103 60470122 60470106 -
agcacaccatcgttacccac

SEQ ID NO: 183193 - DNA, 20 bp, Artificial Sequence
  Synthetic oligonucleotide; AGG chr2 60470102 60470121 60470105 -
gcacaccatcgttacccacc

SEQ ID NO: 183194 - DNA, 20 bp, Artificial Sequence
  Synthetic oligonucleotide; AAG chr2 60470089 60470108 60470092 -
acccaccaggctccttgcga

SEQ ID NO: 183195 - DNA, 20 bp, Artificial Sequence
  Synthetic oligonucleotide; AGG chr2 60470088 60470107 60470091 -
cccaccaggctccttgcgaa

SEQ ID NO: 183196 - DNA, 20 bp, Artificial Sequence
  Synthetic oligonucleotide; TGG chr2 60470065 60470084 60470068 -
aaatcttgtcccaactgcct

SEQ ID NO: 183197 - DNA, 20 bp, Artificial Sequence
  Synthetic oligonucleotide; TGG chr2 60470055 60470074 60470058 -
ccaactgccttggctgtgct

SEQ ID NO: 183198 - DNA, 20 bp, Artificial Sequence
  Synthetic oligonucleotide; CAG chr2 60470052 60470071 60470055 -
actgccttggctgtgcttgg

SEQ ID NO: 183199 - DNA, 20 bp, Artificial Sequence
  Synthetic oligonucleotide; AAG chr2 60470037 60470056 60470040 -
cttggcagtgtgctctatat

SEQ ID NO: 183200 - DNA, 20 bp, Artificial Sequence
  Synthetic oligonucleotide; AGG chr2 60470036 60470055 60470039 -
ttggcagtgtgctctatata

SEQ ID NO: 183201 - DNA, 20 bp, Artificial Sequence
  Synthetic oligonucleotide; GAG chr2 60470034 60470053 60470037 -
ggcagtgtgctctatataag

SEQ ID NO: 183202 - DNA, 20 bp, Artificial Sequence
  Synthetic oligonucleotide; CAG chr2 60470029 60470048 60470032 -
tgtgctctatataaggagaa

SEQ ID NO: 183203 - DNA, 20 bp, Artificial Sequence
  Synthetic oligonucleotide; AGG chr2 60470028 60470047 60470031 -
gtgctctatataaggagaac

SEQ ID NO: 183204 - DNA, 20 bp, Artificial Sequence
  Synthetic oligonucleotide; GAG chr2 60470010 60470029 60470013 -
acaggatgtattttacactt

SEQ ID NO: 183205 - DNA, 20 bp, Artificial Sequence
  Synthetic oligonucleotide; TAG chr2 60469996 60470015 60469999 -
acacttgagacctgctatcc

SEQ ID NO: 183206 - DNA, 20 bp, Artificial Sequence
  Synthetic oligonucleotide; GAG chr2 60469994 60470013 60469997 -
acttgagacctgctatccta

SEQ ID NO: 183207 - DNA, 20 bp, Artificial Sequence
  Synthetic oligonucleotide; AAG chr2 60469973 60469992 60469976 -
agtacaacaacaacacttct

SEQ ID NO: 183208 - DNA, 20 bp, Artificial Sequence
  Synthetic oligonucleotide; AAG chr2 60469957 60469976 60469960 -
ttctaagtgctcttaatatt

SEQ ID NO: 183209 - DNA, 20 bp, Artificial Sequence
  Synthetic oligonucleotide; TGG chr2 60469950 60469969 60469953 -
tgctcttaatattaagctaa

SEQ ID NO: 183210 - DNA, 20 bp, Artificial Sequence
  Synthetic oligonucleotide; AAG chr2 60469922 60469941 60469925 -
atactgtttgttcaccatca

SEQ ID NO: 183211 - DNA, 20 bp, Artificial Sequence
  Synthetic oligonucleotide; TAG chr2 60469868 60469887 60469871 -
catcatgaactccaaacctc

SEQ ID NO: 183212 - DNA, 20 bp, Artificial Sequence
  Synthetic oligonucleotide; CAG chr2 60469859 60469878 60469862 -
ctccaaacctctagaacaca

SEQ ID NO: 183213 - DNA, 20 bp, Artificial Sequence
  Synthetic oligonucleotide; GAG chr2 60469857 60469876 60469860 -
ccaaacctctagaacacaca

SEQ ID NO: 183214 - DNA, 20 bp, Artificial Sequence
  Synthetic oligonucleotide; CAG chr2 60469831 60469850 60469834 -
ctcctgcaccatctatcctc

SEQ ID NO: 183215 - DNA, 20 bp, Artificial Sequence
  Synthetic oligonucleotide; AAG chr2 60469820 60469839 60469823 -
tctatcctccagtctgtctc

SEQ ID NO: 183216 - DNA, 20 bp, Artificial Sequence
  Synthetic oligonucleotide; TGG chr2 60469816 60469835 60469819 -
tcctccagtctgtctcaaga

SEQ ID NO: 183217 - DNA, 20 bp, Artificial Sequence
  Synthetic oligonucleotide; CAG chr2 60469812 60469831 60469815 -
ccagtctgtctcaagatgga

SEQ ID NO: 183218 - DNA, 20 bp, Artificial Sequence
  Synthetic oligonucleotide; TGG chr2 60469804 60469823 60469807 -
tctcaagatggacagctaca

SEQ ID NO: 183219 - DNA, 20 bp, Artificial Sequence
  Synthetic oligonucleotide; TAG chr2 60469800 60469819 60469803 -
aagatggacagctacatggt

SEQ ID NO: 183220 - DNA, 20 bp, Artificial Sequence
  Synthetic oligonucleotide; TAG chr2 60469796 60469815 60469799 -
tggacagctacatggttagt

SEQ ID NO: 183221 - DNA, 20 bp, Artificial Sequence
  Synthetic oligonucleotide; TAG chr2 60469792 60469811 60469795 -
cagctacatggttagttagc

SEQ ID NO: 183222 - DNA, 20 bp, Artificial Sequence
  Synthetic oligonucleotide; GAG chr2 60469790 60469809 60469793 -
gctacatggttagttagcta

SEQ ID NO: 183223 - DNA, 20 bp, Artificial Sequence
  Synthetic oligonucleotide; AGG chr2 60469789 60469808 60469792 -
ctacatggttagttagctag

SEQ ID NO: 183224 - DNA, 20 bp, Artificial Sequence
  Synthetic oligonucleotide; GAG chr2 60469787 60469806 60469790 -
acatggttagttagctagag

SEQ ID NO: 183225 - DNA, 20 bp, Artificial Sequence
  Synthetic oligonucleotide; AGG chr2 60469786 60469805 60469789 -
catggttagttagctagagg

SEQ ID NO: 183226 - DNA, 20 bp, Artificial Sequence
  Synthetic oligonucleotide; TGG chr2 60469780 60469799 60469783 -
tagttagctagaggaggact

SEQ ID NO: 183227 - DNA, 20 bp, Artificial Sequence
  Synthetic oligonucleotide; AAG chr2 60469775 60469794 60469778 -
agctagaggaggacttggaa

SEQ ID NO: 183228 - DNA, 20 bp, Artificial Sequence
  Synthetic oligonucleotide; TAG chr2 60469771 60469790 60469774 -
agaggaggacttggaaaagc

SEQ ID NO: 183229 - DNA, 20 bp, Artificial Sequence
  Synthetic oligonucleotide; AGG chr2 60469770 60469789 60469773 -
gaggaggacttggaaaagct

SEQ ID NO: 183230 - DNA, 20 bp, Artificial Sequence
  Synthetic oligonucleotide; CAG chr2 60469740 60469759 60469743 -
cacataaaccgtaaaatccc

SEQ ID NO: 183231 - DNA, 20 bp, Artificial Sequence
  Synthetic oligonucleotide; CAG chr2 60469699 60469718 60469702 -
tcctcttctcaaaaaaatct

SEQ ID NO: 183232 - DNA, 20 bp, Artificial Sequence
  Synthetic oligonucleotide; TAG chr2 60469672 60469691 60469675 -
acaaatgtttcattgactat

SEQ ID NO: 183233 - DNA, 20 bp, Artificial Sequence
  Synthetic oligonucleotide; TAG chr2 60469658 60469677 60469661 -
gactattagattcattttat

SEQ ID NO: 183234 - DNA, 20 bp, Artificial Sequence
  Synthetic oligonucleotide; GAG chr2 60469652 60469671 60469655 -
tagattcattttattagtgt

SEQ ID NO: 183235 - DNA, 20 bp, Artificial Sequence
  Synthetic oligonucleotide; AAG chr2 60469649 60469668 60469652 -
attcattttattagtgtgag

SEQ ID NO: 183236 - DNA, 20 bp, Artificial Sequence
  Synthetic oligonucleotide; CAG chr2 60469632 60469651 60469635 -
gagaagtcacttgtcttcac

SEQ ID NO: 183237 - DNA, 20 bp, Artificial Sequence
  Synthetic oligonucleotide; GAG chr2 60469630 60469649 60469633 -
gaagtcacttgtcttcacca

SEQ ID NO: 183238 - DNA, 20 bp, Artificial Sequence
  Synthetic oligonucleotide; AAG chr2 60469620 60469639 60469623 -
gtcttcaccagagtacaaca

SEQ ID NO: 183239 - DNA, 20 bp, Artificial Sequence
  Synthetic oligonucleotide; CAG chr2 60469615 60469634 60469618 -
caccagagtacaacaaagtg

SEQ ID NO: 183240 - DNA, 20 bp, Artificial Sequence
  Synthetic oligonucleotide; TGG chr2 60469607 60469626 60469610 -
tacaacaaagtgcagtaaaa

SEQ ID NO: 183241 - DNA, 20 bp, Artificial Sequence
  Synthetic oligonucleotide; AAG chr2 60469602 60469621 60469605 -
caaagtgcagtaaaatggtg

SEQ ID NO: 183242 - DNA, 20 bp, Artificial Sequence
  Synthetic oligonucleotide; TGG chr2 60469598 60469617 60469601 -
gtgcagtaaaatggtgaaga

SEQ ID NO: 183243 - DNA, 20 bp, Artificial Sequence
  Synthetic oligonucleotide; GGG chr2 60469597 60469616 60469600 -
tgcagtaaaatggtgaagat

SEQ ID NO: 183244 - DNA, 20 bp, Artificial Sequence
  Synthetic oligonucleotide; CAG chr2 60469593 60469612 60469596 -
gtaaaatggtgaagatgggt

SEQ ID NO: 183245 - DNA, 20 bp, Artificial Sequence
  Synthetic oligonucleotide; AGG chr2 60469592 60469611 60469595 -
taaaatggtgaagatgggtc

SEQ ID NO: 183246 - DNA, 20 bp, Artificial Sequence
  Synthetic oligonucleotide; GGG chr2 60469591 60469610 60469594 -
aaaatggtgaagatgggtca

SEQ ID NO: 183247 - DNA, 20 bp, Artificial Sequence
  Synthetic oligonucleotide; TGG chr2 60469584 60469603 60469587 -
tgaagatgggtcagggtttc

SEQ ID NO: 183248 - DNA, 20 bp, Artificial Sequence
  Synthetic oligonucleotide; GGG chr2 60469583 60469602 60469586 -
gaagatgggtcagggtttct

SEQ ID NO: 183249 - DNA, 20 bp, Artificial Sequence
  Synthetic oligonucleotide; TGG chr2 60469577 60469596 60469580 -
gggtcagggtttctgggtgc

SEQ ID NO: 183250 - DNA, 20 bp, Artificial Sequence
  Synthetic oligonucleotide; TGG chr2 60469568 60469587 60469571 -
tttctgggtgctggcattat

SEQ ID NO: 183251 - DNA, 20 bp, Artificial Sequence
  Synthetic oligonucleotide; TGG chr2 60469560 60469579 60469563 -
tgctggcattattggaatgc

SEQ ID NO: 183252 - DNA, 20 bp, Artificial Sequence
  Synthetic oligonucleotide; TGG chr2 60469538 60469557 60469541 -
gttctttccttgtcatttaa

SEQ ID NO: 183253 - DNA, 20 bp, Artificial Sequence
  Synthetic oligonucleotide; AAG chr2 60469532 60469551 60469535 -
tccttgtcatttaatggtca

SEQ ID NO: 183254 - DNA, 20 bp, Artificial Sequence
  Synthetic oligonucleotide; TGG chr2 60469524 60469543 60469527 -
atttaatggtcaaagttatt

SEQ ID NO: 183255 - DNA, 20 bp, Artificial Sequence
  Synthetic oligonucleotide; CAG chr2 60469517 60469536 60469520 -
ggtcaaagttatttggaccc

SEQ ID NO: 183256 - DNA, 20 bp, Artificial Sequence
  Synthetic oligonucleotide; AAG chr2 60469514 60469533 60469517 -
caaagttatttggaccccag

SEQ ID NO: 183257 - DNA, 20 bp, Artificial Sequence
  Synthetic oligonucleotide; GAG chr2 60469479 60469498 60469482 -
cttccattgctttgtattgt

SEQ ID NO: 183258 - DNA, 20 bp, Artificial Sequence
  Synthetic oligonucleotide; AAG chr2 60469476 60469495 60469479 -
ccattgctttgtattgtgag

SEQ ID NO: 183259 - DNA, 20 bp, Artificial Sequence
  Synthetic oligonucleotide; AAG chr2 60469461 60469480 60469464 -
gtgagaagccacatctgtgt

SEQ ID NO: 183260 - DNA, 20 bp, Artificial Sequence
  Synthetic oligonucleotide; AGG chr2 60469460 60469479 60469463 -
tgagaagccacatctgtgta

SEQ ID NO: 183261 - DNA, 20 bp, Artificial Sequence
  Synthetic oligonucleotide; CAG chr2 60469453 60469472 60469456 -
ccacatctgtgtaaggtttc

SEQ ID NO: 183262 - DNA, 20 bp, Artificial Sequence
  Synthetic oligonucleotide; CAG chr2 60469446 60469465 60469449 -
tgtgtaaggtttccagttga

SEQ ID NO: 183263 - DNA, 20 bp, Artificial Sequence
  Synthetic oligonucleotide; AGG chr2 60469445 60469464 60469448 -
gtgtaaggtttccagttgac

SEQ ID NO: 183264 - DNA, 20 bp, Artificial Sequence
  Synthetic oligonucleotide; TAG chr2 60469438 60469457 60469441 -
gtttccagttgacaggattc

SEQ ID NO: 183265 - DNA, 20 bp, Artificial Sequence
  Synthetic oligonucleotide; GAG chr2 60469436 60469455 60469439 -
ttccagttgacaggattcta

SEQ ID NO: 183266 - DNA, 20 bp, Artificial Sequence
  Synthetic oligonucleotide; TGG chr2 60469431 60469450 60469434 -
gttgacaggattctagagta

SEQ ID NO: 183267 - DNA, 20 bp, Artificial Sequence
  Synthetic oligonucleotide; CAG chr2 60469426 60469445 60469429 -
caggattctagagtatggcc

SEQ ID NO: 183268 - DNA, 20 bp, Artificial Sequence
  Synthetic oligonucleotide; CAG chr2 60469421 60469440 60469424 -
ttctagagtatggcccagct

SEQ ID NO: 183269 - DNA, 20 bp, Artificial Sequence
  Synthetic oligonucleotide; CAG chr2 60469416 60469435 60469419 -
gagtatggcccagctcagtc

SEQ ID NO: 183270 - DNA, 20 bp, Artificial Sequence
  Synthetic oligonucleotide; CAG chr2 60469406 60469425 60469409 -
cagctcagtccagaaatgcc

SEQ ID NO: 183271 - DNA, 20 bp, Artificial Sequence
  Synthetic oligonucleotide; AGG chr2 60469405 60469424 60469408 -
agctcagtccagaaatgccc

SEQ ID NO: 183272 - DNA, 20 bp, Artificial Sequence
  Synthetic oligonucleotide; AAG chr2 60469387 60469406 60469390 -
ccaggtttcccctatcactg

SEQ ID NO: 183273 - DNA, 20 bp, Artificial Sequence
  Synthetic oligonucleotide; AGG chr2 60469386 60469405 60469389 -
caggtttcccctatcactga

SEQ ID NO: 183274 - DNA, 20 bp, Artificial Sequence
  Synthetic oligonucleotide; TAG chr2 60469369 60469388 60469372 -
tgaaggcgctatcataaata

SEQ ID NO: 183275 - DNA, 20 bp, Artificial Sequence
  Synthetic oligonucleotide; TGG chr2 60469364 60469383 60469367 -
gcgctatcataaatatagca

SEQ ID NO: 183276 - DNA, 20 bp, Artificial Sequence
  Synthetic oligonucleotide; GGG chr2 60469363 60469382 60469366 -
cgctatcataaatatagcat

SEQ ID NO: 183277 - DNA, 20 bp, Artificial Sequence
  Synthetic oligonucleotide; AAG chr2 60469360 60469379 60469363 -
tatcataaatatagcatggg

SEQ ID NO: 183278 - DNA, 20 bp, Artificial Sequence
  Synthetic oligonucleotide; GAG chr2 60469358 60469377 60469361 -
tcataaatatagcatgggaa

SEQ ID NO: 183279 - DNA, 20 bp, Artificial Sequence
  Synthetic oligonucleotide; AGG chr2 60469357 60469376 60469360 -
cataaatatagcatgggaag

SEQ ID NO: 183280 - DNA, 20 bp, Artificial Sequence
  Synthetic oligonucleotide; GGG chr2 60469356 60469375 60469359 -
ataaatatagcatgggaaga

SEQ ID NO: 183281 - DNA, 20 bp, Artificial Sequence
  Synthetic oligonucleotide; GGG chr2 60469355 60469374 60469358 -
taaatatagcatgggaagag

SEQ ID NO: 183282 - DNA, 20 bp, Artificial Sequence
  Synthetic oligonucleotide; GGG chr2 60469354 60469373 60469357 -
aaatatagcatgggaagagg

SEQ ID NO: 183283 - DNA, 20 bp, Artificial Sequence
  Synthetic oligonucleotide; GGG chr2 60469353 60469372 60469356 -
aatatagcatgggaagaggg

SEQ ID NO: 183284 - DNA, 20 bp, Artificial Sequence
  Synthetic oligonucleotide; CAG chr2 60469350 60469369 60469353 -
atagcatgggaagagggggg

SEQ ID NO: 183285 - DNA, 20 bp, Artificial Sequence
  Synthetic oligonucleotide; GAG chr2 60469348 60469367 60469351 -
agcatgggaagaggggggca

SEQ ID NO: 183286 - DNA, 20 bp, Artificial Sequence
  Synthetic oligonucleotide; AGG chr2 60469347 60469366 60469350 -
gcatgggaagaggggggcag

SEQ ID NO: 183287 - DNA, 20 bp, Artificial Sequence
  Synthetic oligonucleotide; GGG chr2 60469346 60469365 60469349 -
catgggaagaggggggcaga

SEQ ID NO: 183288 - DNA, 20 bp, Artificial Sequence
  Synthetic oligonucleotide; CAG chr2 60469342 60469361 60469345 -
ggaagaggggggcagaggga

SEQ ID NO: 183289 - DNA, 20 bp, Artificial Sequence
  Synthetic oligonucleotide; GAG chr2 60469340 60469359 60469343 -
aagaggggggcagagggaca

SEQ ID NO: 183290 - DNA, 20 bp, Artificial Sequence
  Synthetic oligonucleotide; AAG chr2 60469336 60469355 60469339 -
ggggggcagagggacagaga

SEQ ID NO: 183291 - DNA, 20 bp, Artificial Sequence
  Synthetic oligonucleotide; AAG chr2 60469331 60469350 60469334 -
gcagagggacagagaaagca

SEQ ID NO: 183292 - DNA, 20 bp, Artificial Sequence
  Synthetic oligonucleotide; TGG chr2 60469328 60469347 60469331 -
gagggacagagaaagcaaag

SEQ ID NO: 183293 - DNA, 20 bp, Artificial Sequence
  Synthetic oligonucleotide; GGG chr2 60469327 60469346 60469330 -
agggacagagaaagcaaagt

SEQ ID NO: 183294 - DNA, 20 bp, Artificial Sequence
  Synthetic oligonucleotide; CAG chr2 60469279 60469298 60469282 -
caaatctactcatttcctat

SEQ ID NO: 183295 - DNA, 20 bp, Artificial Sequence
  Synthetic oligonucleotide; TGG chr2 60469260 60469279 60469263 -
tcagcattttgctttttgct

SEQ ID NO: 183296 - DNA, 20 bp, Artificial Sequence
  Synthetic oligonucleotide; GGG chr2 60469259 60469278 60469262 -
cagcattttgctttttgctt

SEQ ID NO: 183297 - DNA, 20 bp, Artificial Sequence
  Synthetic oligonucleotide; AAG chr2 60469246 60469265 60469249 -
tttgcttgggtttgtctata

SEQ ID NO: 183298 - DNA, 20 bp, Artificial Sequence
  Synthetic oligonucleotide; AAG chr2 60469241 60469260 60469244 -
ttgggtttgtctataaagta

SEQ ID NO: 183299 - DNA, 20 bp, Artificial Sequence
  Synthetic oligonucleotide; CAG chr2 60469219 60469238 60469222 -
gttaatgtatgcatgtaaac

SEQ ID NO: 183300 - DNA, 20 bp, Artificial Sequence
  Synthetic oligonucleotide; CAG chr2 60469211 60469230 60469214 -
atgcatgtaaaccagccttg

SEQ ID NO: 183301 - DNA, 20 bp, Artificial Sequence
  Synthetic oligonucleotide; CAG chr2 60469188 60469207 60469191 -
ataaaatccccccatgtttc

SEQ ID NO: 183302 - DNA, 20 bp, Artificial Sequence
  Synthetic oligonucleotide; AGG chr2 60469187 60469206 60469190 -
taaaatccccccatgtttcc

SEQ ID NO: 183303 - DNA, 20 bp, Artificial Sequence
  Synthetic oligonucleotide; CAG chr2 60469168 60469187 60469171 -
caggctacccacaatattac

SEQ ID NO: 183304 - DNA, 20 bp, Artificial Sequence
  Synthetic oligonucleotide; AAG chr2 60469131 60469150 60469134 -
cttacacatcttctttccac

SEQ ID NO: 183305 - DNA, 20 bp, Artificial Sequence
  Synthetic oligonucleotide; AAG chr2 60469101 60469120 60469104 -
tcaaacaacaacaaataaat

SEQ ID NO: 183306 - DNA, 20 bp, Artificial Sequence
  Synthetic oligonucleotide; AAG chr2 60469087 60469106 60469090 -
ataaataagcaaatgaacca

SEQ ID NO: 183307 - DNA, 20 bp, Artificial Sequence
  Synthetic oligonucleotide; AAG chr2 60469038 60469057 60469041 -
accctttcacttttgtcaaa

SEQ ID NO: 183308 - DNA, 20 bp, Artificial Sequence
  Synthetic oligonucleotide; CAG chr2 60469016 60469035 60469019 -
gaccgaaattgaaaacaaaa

SEQ ID NO: 183309 - DNA, 20 bp, Artificial Sequence
  Synthetic oligonucleotide; TGG chr2 60469007 60469026 60469010 -
tgaaaacaaaacagaaactc

SEQ ID NO: 183310 - DNA, 20 bp, Artificial Sequence
  Synthetic oligonucleotide; GGG chr2 60469006 60469025 60469009 -
gaaaacaaaacagaaactct

SEQ ID NO: 183311 - DNA, 20 bp, Artificial Sequence
  Synthetic oligonucleotide; CAG chr2 60468976 60468995 60468979 -
tcaccactcttcttttgttt

SEQ ID NO: 183312 - DNA, 20 bp, Artificial Sequence
  Synthetic oligonucleotide; AGG chr2 60468975 60468994 60468978 -
caccactcttcttttgtttc

SEQ ID NO: 183313 - DNA, 20 bp, Artificial Sequence
  Synthetic oligonucleotide; TGG chr2 60468969 60468988 60468972 -
tcttcttttgtttcaggcct

SEQ ID NO: 183314 - DNA, 20 bp, Artificial Sequence
  Synthetic oligonucleotide; GGG chr2 60468968 60468987 60468971 -
cttcttttgtttcaggcctt

SEQ ID NO: 183315 - DNA, 20 bp, Artificial Sequence
  Synthetic oligonucleotide; AAG chr2 60468949 60468968 60468952 -
tgggcctgttaactatctgc

SEQ ID NO: 183316 - DNA, 20 bp, Artificial Sequence
  Synthetic oligonucleotide; AGG chr2 60468948 60468967 60468951 -
gggcctgttaactatctgca

SEQ ID NO: 183317 - DNA, 20 bp, Artificial Sequence
  Synthetic oligonucleotide; TGG chr2 60468915 60468934 60468918 -
gatgttgtaatctattttaa

SEQ ID NO: 183318 - DNA, 20 bp, Artificial Sequence
  Synthetic oligonucleotide; TGG chr2 60468892 60468911 60468895 -
aattgaaatgtgatatcctg

SEQ ID NO: 183319 - DNA, 20 bp, Artificial Sequence
  Synthetic oligonucleotide; TAG chr2 60468869 60468888 60468872 -
tttatgatgcacgttgtttg

SEQ ID NO: 183320 - DNA, 20 bp, Artificial Sequence
  Synthetic oligonucleotide; TAG chr2 60468863 60468882 60468866 -
atgcacgttgtttgtagctg

SEQ ID NO: 183321 - DNA, 20 bp, Artificial Sequence
  Synthetic oligonucleotide; TGG chr2 60468850 60468869 60468853 -
gtagctgtagtgcttgattt

SEQ ID NO: 183322 - DNA, 20 bp, Artificial Sequence
  Synthetic oligonucleotide; GGG chr2 60468849 60468868 60468852 -
tagctgtagtgcttgatttt

SEQ ID NO: 183323 - DNA, 20 bp, Artificial Sequence
  Synthetic oligonucleotide; CAG chr2 60468837 60468856 60468840 -
ttgattttgggtttctttca

SEQ ID NO: 183324 - DNA, 20 bp, Artificial Sequence
  Synthetic oligonucleotide; TGG chr2 60468820 60468839 60468823 -
tcacagataaacttctgcac

SEQ ID NO: 183325 - DNA, 20 bp, Artificial Sequence
  Synthetic oligonucleotide; GAG chr2 60468818 60468837 60468821 -
acagataaacttctgcactg

SEQ ID NO: 183326 - DNA, 20 bp, Artificial Sequence
  Synthetic oligonucleotide; AGG chr2 60468817 60468836 60468820 -
cagataaacttctgcactgg

SEQ ID NO: 183327 - DNA, 20 bp, Artificial Sequence
  Synthetic oligonucleotide; GGG chr2 60468816 60468835 60468819 -
agataaacttctgcactgga

SEQ ID NO: 183328 - DNA, 20 bp, Artificial Sequence
  Synthetic oligonucleotide; GGG chr2 60468815 60468834 60468818 -
gataaacttctgcactggag

SEQ ID NO: 183329 - DNA, 20 bp, Artificial Sequence
  Synthetic oligonucleotide; TGG chr2 60468788 60468807 60468791 -
tcctcccctcgttctgcaca

SEQ ID NO: 183330 - DNA, 20 bp, Artificial Sequence
  Synthetic oligonucleotide; GAG chr2 60468786 60468805 60468789 -
ctcccctcgttctgcacatg

SEQ ID NO: 183331 - DNA, 20 bp, Artificial Sequence
  Synthetic oligonucleotide; TGG chr2 60468767 60468786 60468770 -
ggagctctaatccccacgcc

SEQ ID NO: 183332 - DNA, 20 bp, Artificial Sequence
  Synthetic oligonucleotide; GGG chr2 60468766 60468785 60468769 -
gagctctaatccccacgcct

SEQ ID NO: 183333 - DNA, 20 bp, Artificial Sequence
  Synthetic oligonucleotide; GAG chr2 60468761 60468780 60468764 -
ctaatccccacgcctgggat

SEQ ID NO: 183334 - DNA, 20 bp, Artificial Sequence
  Synthetic oligonucleotide; CAG chr2 60468756 60468775 60468759 -
ccccacgcctgggatgagtg

SEQ ID NO: 183335 - DNA, 20 bp, Artificial Sequence
  Synthetic oligonucleotide; CAG chr2 60468742 60468761 60468745 -
tgagtgcagaatatgccccg

SEQ ID NO: 183336 - DNA, 20 bp, Artificial Sequence
  Synthetic oligonucleotide; AGG chr2 60468741 60468760 60468744 -
gagtgcagaatatgccccgc

SEQ ID NO: 183337 - DNA, 20 bp, Artificial Sequence
  Synthetic oligonucleotide; GGG chr2 60468740 60468759 60468743 -
agtgcagaatatgccccgca

SEQ ID NO: 183338 - DNA, 20 bp, Artificial Sequence
  Synthetic oligonucleotide; AAG chr2 60468730 60468749 60468733 -
atgccccgcagggtatttgt

SEQ ID NO: 183339 - DNA, 20 bp, Artificial Sequence
  Synthetic oligonucleotide; GAG chr2 60468725 60468744 60468728 -
ccgcagggtatttgtaagtt

SEQ ID NO: 183340 - DNA, 20 bp, Artificial Sequence
  Synthetic oligonucleotide; TAG chr2 60468692 60468711 60468695 -
tctacaaatgtccatgtgta

SEQ ID NO: 183341 - DNA, 20 bp, Artificial Sequence
  Synthetic oligonucleotide; GAG chr2 60468690 60468709 60468693 -
tacaaatgtccatgtgtata

SEQ ID NO: 183342 - DNA, 20 bp, Artificial Sequence
  Synthetic oligonucleotide; GAG chr2 60468685 60468704 60468688 -
atgtccatgtgtatagagat

SEQ ID NO: 183343 - DNA, 20 bp, Artificial Sequence
  Synthetic oligonucleotide; TGG chr2 60468676 60468695 60468679 -
tgtatagagatgagaatttc

SEQ ID NO: 183344 - DNA, 20 bp, Artificial Sequence
  Synthetic oligonucleotide; AAG chr2 60468655 60468674 60468658 -
ggaaattgcccttacttttt

SEQ ID NO: 183345 - DNA, 20 bp, Artificial Sequence
  Synthetic oligonucleotide; AAG chr2 60468647 60468666 60468650 -
cccttactttttaagtactg

SEQ ID NO: 183346 - DNA, 20 bp, Artificial Sequence
  Synthetic oligonucleotide; AGG chr2 60468646 60468665 60468649 -
ccttactttttaagtactga

SEQ ID NO: 183347 - DNA, 20 bp, Artificial Sequence
  Synthetic oligonucleotide; GAG chr2 60468644 60468663 60468647 -
ttactttttaagtactgaag

SEQ ID NO: 183348 - DNA, 20 bp, Artificial Sequence
  Synthetic oligonucleotide; TAG chr2 60468629 60468648 60468632 -
tgaaggagttacttccaaaa

SEQ ID NO: 183349 - DNA, 20 bp, Artificial Sequence
  Synthetic oligonucleotide; TGG chr2 60468596 60468615 60468599 -
gtattattccattactcact

SEQ ID NO: 183350 - DNA, 20 bp, Artificial Sequence
  Synthetic oligonucleotide; CAG chr2 60468593 60468612 60468596 -
ttattccattactcacttgg

SEQ ID NO: 183351 - DNA, 20 bp, Artificial Sequence
  Synthetic oligonucleotide; CAG chr2 60468573 60468592 60468576 -
cagccgctccccactccact

SEQ ID NO: 183352 - DNA, 20 bp, Artificial Sequence
  Synthetic oligonucleotide; CAG chr2 60468567 60468586 60468570 -
ctccccactccactcagccc

SEQ ID NO: 183353 - DNA, 20 bp, Artificial Sequence
  Synthetic oligonucleotide; GAG chr2 60468565 60468584 60468568 -
ccccactccactcagcccca

SEQ ID NO: 183354 - DNA, 20 bp, Artificial Sequence
  Synthetic oligonucleotide; AGG chr2 60468564 60468583 60468567 -
cccactccactcagccccag

SEQ ID NO: 183355 - DNA, 20 bp, Artificial Sequence
  Synthetic oligonucleotide; GGG chr2 60468563 60468582 60468566 -
ccactccactcagccccaga

SEQ ID NO: 183356 - DNA, 20 bp, Artificial Sequence
  Synthetic oligonucleotide; TGG chr2 60468530 60468549 60468533 -
tcccctttttctttcctcac

SEQ ID NO: 183357 - DNA, 20 bp, Artificial Sequence
  Synthetic oligonucleotide; GAG chr2 60468528 60468547 60468531 -
ccctttttctttcctcactg

SEQ ID NO: 183358 - DNA, 20 bp, Artificial Sequence
  Synthetic oligonucleotide; AGG chr2 60468527 60468546 60468530 -
cctttttctttcctcactgg

SEQ ID NO: 183359 - DNA, 20 bp, Artificial Sequence
  Synthetic oligonucleotide; TGG chr2 60468523 60468542 60468526 -
tttctttcctcactggaggc

SEQ ID NO: 183360 - DNA, 20 bp, Artificial Sequence
  Synthetic oligonucleotide; GGG chr2 60468522 60468541 60468525 -
ttctttcctcactggaggct

SEQ ID NO: 183361 - DNA, 20 bp, Artificial Sequence
  Synthetic oligonucleotide; GAG chr2 60468520 60468539 60468523 -
ctttcctcactggaggctgg

SEQ ID NO: 183362 - DNA, 20 bp, Artificial Sequence
  Synthetic oligonucleotide; TAG chr2 60468513 60468532 60468516 -
cactggaggctgggagctga

SEQ ID NO: 183363 - DNA, 20 bp, Artificial Sequence
  Synthetic oligonucleotide; TAG chr2 60468510 60468529 60468513 -
tggaggctgggagctgatag

SEQ ID NO: 183364 - DNA, 20 bp, Artificial Sequence
  Synthetic oligonucleotide; TGG chr2 60468497 60468516 60468500 -
ctgatagtagctcatccctg

SEQ ID NO: 183365 - DNA, 20 bp, Artificial Sequence
  Synthetic oligonucleotide; GGG chr2 60468496 60468515 60468499 -
tgatagtagctcatccctgt

SEQ ID NO: 183366 - DNA, 20 bp, Artificial Sequence
  Synthetic oligonucleotide; CAG chr2 60468484 60468503 60468487 -
atccctgtgggtcttctccc

SEQ ID NO: 183367 - DNA, 20 bp, Artificial Sequence
  Synthetic oligonucleotide; AGG chr2 60468483 60468502 60468486 -
tccctgtgggtcttctcccc

SEQ ID NO: 183368 - DNA, 20 bp, Artificial Sequence
  Synthetic oligonucleotide; GGG chr2 60468482 60468501 60468485 -
ccctgtgggtcttctcccca

SEQ ID NO: 183369 - DNA, 20 bp, Artificial Sequence
  Synthetic oligonucleotide; TGG chr2 60468464 60468483 60468467 -
cagggtcttgtcttgctccg

SEQ ID NO: 183370 - DNA, 20 bp, Artificial Sequence
  Synthetic oligonucleotide; TAG chr2 60468460 60468479 60468463 -
gtcttgtcttgctccgtggc

SEQ ID NO: 183371 - DNA, 20 bp, Artificial Sequence
  Synthetic oligonucleotide; AAG chr2 60468451 60468470 60468454 -
tgctccgtggctagtgattg

SEQ ID NO: 183372 - DNA, 20 bp, Artificial Sequence
  Synthetic oligonucleotide; TGG chr2 60468435 60468454 60468438 -
attgaagatgcctgtgcctc

SEQ ID NO: 183373 - DNA, 20 bp, Artificial Sequence
  Synthetic oligonucleotide; GAG chr2 60468433 60468452 60468436 -
tgaagatgcctgtgcctctg

SEQ ID NO: 183374 - DNA, 20 bp, Artificial Sequence
  Synthetic oligonucleotide; TGG chr2 60468417 60468436 60468420 -
tctggagcccattttattac

SEQ ID NO: 183375 - DNA, 20 bp, Artificial Sequence
  Synthetic oligonucleotide; TGG chr2 60468401 60468420 60468404 -
ttactggacattcactcctg

SEQ ID NO: 183376 - DNA, 20 bp, Artificial Sequence
  Synthetic oligonucleotide; TAG chr2 60468391 60468410 60468394 -
ttcactcctgtggcctcatt

SEQ ID NO: 183377 - DNA, 20 bp, Artificial Sequence
  Synthetic oligonucleotide; AGG chr2 60468390 60468409 60468393 -
tcactcctgtggcctcattt

SEQ ID NO: 183378 - DNA, 20 bp, Artificial Sequence
  Synthetic oligonucleotide; TGG chr2 60468383 60468402 60468386 -
tgtggcctcatttaggactt

SEQ ID NO: 183379 - DNA, 20 bp, Artificial Sequence
  Synthetic oligonucleotide; GGG chr2 60468382 60468401 60468385 -
gtggcctcatttaggacttt

SEQ ID NO: 183380 - DNA, 20 bp, Artificial Sequence
  Synthetic oligonucleotide; TAG chr2 60468377 60468396 60468380 -
ctcatttaggactttgggta

SEQ ID NO: 183381 - DNA, 20 bp, Artificial Sequence
  Synthetic oligonucleotide; TGG chr2 60468370 60468389 60468373 -
aggactttgggtatagtcca

SEQ ID NO: 183382 - DNA, 20 bp, Artificial Sequence
  Synthetic oligonucleotide; TAG chr2 60468357 60468376 60468360 -
tagtccatggcacacatctt

SEQ ID NO: 183383 - DNA, 20 bp, Artificial Sequence
  Synthetic oligonucleotide; AAG chr2 60468352 60468371 60468355 -
catggcacacatctttagcc

SEQ ID NO: 183384 - DNA, 20 bp, Artificial Sequence
  Synthetic oligonucleotide; AGG chr2 60468351 60468370 60468354 -
atggcacacatctttagcca

SEQ ID NO: 183385 - DNA, 20 bp, Artificial Sequence
  Synthetic oligonucleotide; CAG chr2 60468347 60468366 60468350 -
cacacatctttagccaaggc

SEQ ID NO: 183386 - DNA, 20 bp, Artificial Sequence
  Synthetic oligonucleotide; AAG chr2 60468338 60468357 60468341 -
ttagccaaggccagaatcaa

SEQ ID NO: 183387 - DNA, 20 bp, Artificial Sequence
  Synthetic oligonucleotide; AGG chr2 60468337 60468356 60468340 -
tagccaaggccagaatcaaa

SEQ ID NO: 183388 - DNA, 20 bp, Artificial Sequence
  Synthetic oligonucleotide; GAG chr2 60468335 60468354 60468338 -
gccaaggccagaatcaaaag

SEQ ID NO: 183389 - DNA, 20 bp, Artificial Sequence
  Synthetic oligonucleotide; CAG chr2 60468331 60468350 60468334 -
aggccagaatcaaaaggagt

SEQ ID NO: 183390 - DNA, 20 bp, Artificial Sequence
  Synthetic oligonucleotide; TAG chr2 60468326 60468345 60468329 -
agaatcaaaaggagtcagtt

SEQ ID NO: 183391 - DNA, 20 bp, Artificial Sequence
  Synthetic oligonucleotide; AGG chr2 60468325 60468344 60468328 -
gaatcaaaaggagtcagttt

SEQ ID NO: 183392 - DNA, 20 bp, Artificial Sequence
  Synthetic oligonucleotide; GGG chr2 60468324 60468343 60468327 -
aatcaaaaggagtcagttta

SEQ ID NO: 183393 - DNA, 20 bp, Artificial Sequence
  Synthetic oligonucleotide; CAG chr2 60468315 60468334 60468318 -
gagtcagtttagggttattc

SEQ ID NO: 183394 - DNA, 20 bp, Artificial Sequence
  Synthetic oligonucleotide; GAG chr2 60468313 60468332 60468316 -
gtcagtttagggttattcca

SEQ ID NO: 183395 - DNA, 20 bp, Artificial Sequence
  Synthetic oligonucleotide; TAG chr2 60468264 60468283 60468267 -
tttacatgtgtatttgaaca

SEQ ID NO: 183396 - DNA, 20 bp, Artificial Sequence
  Synthetic oligonucleotide; TGG chr2 60468212 60468231 60468215 -
attttgactaatttttctcc

SEQ ID NO: 183397 - DNA, 20 bp, Artificial Sequence
  Synthetic oligonucleotide; TAG chr2 60468206 60468225 60468209 -
actaatttttctcctggttt

SEQ ID NO: 183398 - DNA, 20 bp, Artificial Sequence
  Synthetic oligonucleotide; GAG chr2 60468204 60468223 60468207 -
taatttttctcctggtttta

SEQ ID NO: 183399 - DNA, 20 bp, Artificial Sequence
  Synthetic oligonucleotide; TAG chr2 60468184 60468203 60468187 -
gagaaaaatgcacatcattg

SEQ ID NO: 183400 - DNA, 20 bp, Artificial Sequence
  Synthetic oligonucleotide; AAG chr2 60468171 60468190 60468174 -
atcattgtagttaaaatgtg

SEQ ID NO: 183401 - DNA, 20 bp, Artificial Sequence
  Synthetic oligonucleotide; AGG chr2 60468170 60468189 60468173 -
tcattgtagttaaaatgtga

SEQ ID NO: 183402 - DNA, 20 bp, Artificial Sequence
  Synthetic oligonucleotide; CAG chr2 60468053 60468072 60468056 -
accaccaccaccatcaccac

SEQ ID NO: 183403 - DNA, 20 bp, Artificial Sequence
  Synthetic oligonucleotide; CAG chr2 60467957 60467976 60467960 -
accaccaccaccatcaccac

SEQ ID NO: 183404 - DNA, 20 bp, Artificial Sequence
  Synthetic oligonucleotide; CAG chr2 60467870 60467889 60467873 -
accaccaccaccatcaccac

SEQ ID NO: 183405 - DNA, 20 bp, Artificial Sequence
  Synthetic oligonucleotide; CAG chr2 60467855 60467874 60467858 -
accaccagtaccatcaccac

SEQ ID NO: 183406 - DNA, 20 bp, Artificial Sequence
  Synthetic oligonucleotide; TAG chr2 60467852 60467871 60467855 -
accagtaccatcaccaccag

SEQ ID NO: 183407 - DNA, 20 bp, Artificial Sequence
  Synthetic oligonucleotide; CAG chr2 60467816 60467835 60467819 -
accaccatcaccatcaccac

SEQ ID NO: 183408 - DNA, 20 bp, Artificial Sequence
  Synthetic oligonucleotide; CAG chr2 60467801 60467820 60467804 -
accaccagtaccatcaccac

SEQ ID NO: 183409 - DNA, 20 bp, Artificial Sequence
  Synthetic oligonucleotide; CAG chr2 60467723 60467742 60467726 -
accaccaccaccatcaccac

SEQ ID NO: 183410 - DNA, 20 bp, Artificial Sequence
  Synthetic oligonucleotide; CAG chr2 60467708 60467727 60467711 -
accaccagtaccatcaccac

SEQ ID NO: 183411 - DNA, 20 bp, Artificial Sequence
  Synthetic oligonucleotide; CAG chr2 60467669 60467688 60467672 -
accaccatcaccatcaccac

SEQ ID NO: 183412 - DNA, 20 bp, Artificial Sequence
  Synthetic oligonucleotide; CAG chr2 60467546 60467565 60467549 -
actaccaccaccaccatcac

SEQ ID NO: 183413 - DNA, 20 bp, Artificial Sequence
  Synthetic oligonucleotide; CAG chr2 60467519 60467538 60467522 -
atcaccatcaccatcaccac

SEQ ID NO: 183414 - DNA, 20 bp, Artificial Sequence
  Synthetic oligonucleotide; CAG chr2 60467417 60467436 60467420 -
actaccaccaccaccatcac

SEQ ID NO: 183415 - DNA, 20 bp, Artificial Sequence
  Synthetic oligonucleotide; CAG chr2 60467390 60467409 60467393 -
atcaccatcaccatcaccac

SEQ ID NO: 183416 - DNA, 20 bp, Artificial Sequence
  Synthetic oligonucleotide; CAG chr2 60467219 60467238 60467222 -
actaccaccaccaccatcac

SEQ ID NO: 183417 - DNA, 20 bp, Artificial Sequence
  Synthetic oligonucleotide; AAG chr2 60467050 60467069 60467053 -
ccaccaccatttacttgttc

SEQ ID NO: 183418 - DNA, 20 bp, Artificial Sequence
  Synthetic oligonucleotide; GAG chr2 60467046 60467065 60467049 -
caccatttacttgttcaagt

SEQ ID NO: 183419 - DNA, 20 bp, Artificial Sequence
  Synthetic oligonucleotide; TAG chr2 60467037 60467056 60467040 -
cttgttcaagtgagctttta

SEQ ID NO: 183420 - DNA, 20 bp, Artificial Sequence
  Synthetic oligonucleotide; TAG chr2 60467034 60467053 60467037 -
gttcaagtgagcttttatag

SEQ ID NO: 183421 - DNA, 20 bp, Artificial Sequence
  Synthetic oligonucleotide; AGG chr2 60467033 60467052 60467036 -
ttcaagtgagcttttatagt

SEQ ID NO: 183422 - DNA, 20 bp, Artificial Sequence
  Synthetic oligonucleotide; GGG chr2 60467032 60467051 60467035 -
tcaagtgagcttttatagta

SEQ ID NO: 183423 - DNA, 20 bp, Artificial Sequence
  Synthetic oligonucleotide; AAG chr2 60466981 60467000 60466984 -
tttatacaaatgttttctga

SEQ ID NO: 183424 - DNA, 20 bp, Artificial Sequence
  Synthetic oligonucleotide; TAG chr2 60466969 60466988 60466972 -
ttttctgaaagatactgttt

SEQ ID NO: 183425 - DNA, 20 bp, Artificial Sequence
  Synthetic oligonucleotide; CAG chr2 60466957 60466976 60466960 -
tactgttttagaaaataata

SEQ ID NO: 183426 - DNA, 20 bp, Artificial Sequence
  Synthetic oligonucleotide; TAG chr2 60466940 60466959 60466943 -
atacagtttgcttctctgtg

SEQ ID NO: 183427 - DNA, 20 bp, Artificial Sequence
  Synthetic oligonucleotide; AGG chr2 60466939 60466958 60466942 -
tacagtttgcttctctgtgt

SEQ ID NO: 183428 - DNA, 20 bp, Artificial Sequence
  Synthetic oligonucleotide; TGG chr2 60466930 60466949 60466933 -
cttctctgtgtaggaacaca

SEQ ID NO: 183429 - DNA, 20 bp, Artificial Sequence
  Synthetic oligonucleotide; TGG chr2 60466914 60466933 60466917 -
cacatggtatgaatcatgca

SEQ ID NO: 183430 - DNA, 20 bp, Artificial Sequence
  Synthetic oligonucleotide; AAG chr2 60466907 60466926 60466910 -
tatgaatcatgcatggctaa

SEQ ID NO: 183431 - DNA, 20 bp, Artificial Sequence
  Synthetic oligonucleotide; AGG chr2 60466906 60466925 60466909 -
atgaatcatgcatggctaaa

SEQ ID NO: 183432 - DNA, 20 bp, Artificial Sequence
  Synthetic oligonucleotide; TAG chr2 60466902 60466921 60466905 -
atcatgcatggctaaaaggt

SEQ ID NO: 183433 - DNA, 20 bp, Artificial Sequence
  Synthetic oligonucleotide; AGG chr2 60466901 60466920 60466904 -
tcatgcatggctaaaaggtt

SEQ ID NO: 183434 - DNA, 20 bp, Artificial Sequence
  Synthetic oligonucleotide; GGG chr2 60466900 60466919 60466903 -
catgcatggctaaaaggtta

SEQ ID NO: 183435 - DNA, 20 bp, Artificial Sequence
  Synthetic oligonucleotide; GGG chr2 60466899 60466918 60466902 -
atgcatggctaaaaggttag

SEQ ID NO: 183436 - DNA, 20 bp, Artificial Sequence
  Synthetic oligonucleotide; GGG chr2 60466898 60466917 60466901 -
tgcatggctaaaaggttagg

SEQ ID NO: 183437 - DNA, 20 bp, Artificial Sequence
  Synthetic oligonucleotide; TGG chr2 60466895 60466914 60466898 -
atggctaaaaggttaggggg

SEQ ID NO: 183438 - DNA, 20 bp, Artificial Sequence
  Synthetic oligonucleotide; GGG chr2 60466894 60466913 60466897 -
tggctaaaaggttagggggt

SEQ ID NO: 183439 - DNA, 20 bp, Artificial Sequence
  Synthetic oligonucleotide; CAG chr2 60466891 60466910 60466894 -
ctaaaaggttagggggtggg

SEQ ID NO: 183440 - DNA, 20 bp, Artificial Sequence
  Synthetic oligonucleotide; AAG chr2 60466866 60466885 60466869 -
attccaccctaaacacaaaa

SEQ ID NO: 183441 - DNA, 20 bp, Artificial Sequence
  Synthetic oligonucleotide; CAG chr2 60466863 60466882 60466866 -
ccaccctaaacacaaaaaag

SEQ ID NO: 183442 - DNA, 20 bp, Artificial Sequence
  Synthetic oligonucleotide; AGG chr2 60466862 60466881 60466865 -
caccctaaacacaaaaaagc

SEQ ID NO: 183443 - DNA, 20 bp, Artificial Sequence
  Synthetic oligonucleotide; AAG chr2 60466856 60466875 60466859 -
aaacacaaaaaagcaggttc

SEQ ID NO: 183444 - DNA, 20 bp, Artificial Sequence
  Synthetic oligonucleotide; AAG chr2 60466853 60466872 60466856 -
cacaaaaaagcaggttcaag

SEQ ID NO: 183445 - DNA, 20 bp, Artificial Sequence
  Synthetic oligonucleotide; AAG chr2 60466848 60466867 60466851 -
aaaagcaggttcaagaagaa

SEQ ID NO: 183446 - DNA, 20 bp, Artificial Sequence
  Synthetic oligonucleotide; AAG chr2 60466845 60466864 60466848 -
agcaggttcaagaagaaaag

SEQ ID NO: 183447 - DNA, 20 bp, Artificial Sequence
  Synthetic oligonucleotide; AAG chr2 60466819 60466838 60466822 -
gacatctaatttttatttga

SEQ ID NO: 183448 - DNA, 20 bp, Artificial Sequence
  Synthetic oligonucleotide; TGG chr2 60466795 60466814 60466798 -
aaatgaaaaataacctgctg

SEQ ID NO: 183449 - DNA, 20 bp, Artificial Sequence
  Synthetic oligonucleotide; AAG chr2 60466791 60466810 60466794 -
gaaaaataacctgctgtgga

SEQ ID NO: 183450 - DNA, 20 bp, Artificial Sequence
  Synthetic oligonucleotide; AAG chr2 60466781 60466800 60466784 -
ctgctgtggaaagaaaaaaa

SEQ ID NO: 183451 - DNA, 20 bp, Artificial Sequence
  Synthetic oligonucleotide; AAG chr2 60466776 60466795 60466779 -
gtggaaagaaaaaaaaagaa

SEQ ID NO: 183452 - DNA, 20 bp, Artificial Sequence
  Synthetic oligonucleotide; AGG chr2 60466775 60466794 60466778 -
tggaaagaaaaaaaaagaaa

SEQ ID NO: 183453 - DNA, 20 bp, Artificial Sequence
  Synthetic oligonucleotide; AAG chr2 60466769 60466788 60466772 -
gaaaaaaaaagaaaaggaaa

SEQ ID NO: 183454 - DNA, 20 bp, Artificial Sequence
  Synthetic oligonucleotide; AGG chr2 60466768 60466787 60466771 -
aaaaaaaaagaaaaggaaaa

SEQ ID NO: 183455 - DNA, 20 bp, Artificial Sequence
  Synthetic oligonucleotide; TGG chr2 60466762 60466781 60466765 -
aaagaaaaggaaaaaggtca

SEQ ID NO: 183456 - DNA, 20 bp, Artificial Sequence
  Synthetic oligonucleotide; GAG chr2 60466760 60466779 60466763 -
agaaaaggaaaaaggtcatg

SEQ ID NO: 183457 - DNA, 20 bp, Artificial Sequence
  Synthetic oligonucleotide; GAG chr2 60466758 60466777 60466761 -
aaaaggaaaaaggtcatgga

SEQ ID NO: 183458 - DNA, 20 bp, Artificial Sequence
  Synthetic oligonucleotide; GAG chr2 60466756 60466775 60466759 -
aaggaaaaaggtcatggaga

SEQ ID NO: 183459 - DNA, 20 bp, Artificial Sequence
  Synthetic oligonucleotide; AAG chr2 60466746 60466765 60466749 -
gtcatggagagagaataaca

SEQ ID NO: 183460 - DNA, 20 bp, Artificial Sequence
  Synthetic oligonucleotide; GAG chr2 60466744 60466763 60466747 -
catggagagagaataacaaa

SEQ ID NO: 183461 - DNA, 20 bp, Artificial Sequence
  Synthetic oligonucleotide; AAG chr2 60466740 60466759 60466743 -
gagagagaataacaaagagc

SEQ ID NO: 183462 - DNA, 20 bp, Artificial Sequence
  Synthetic oligonucleotide; CAG chr2 60466733 60466752 60466736 -
aataacaaagagcaagatgc

SEQ ID NO: 183463 - DNA, 20 bp, Artificial Sequence
  Synthetic oligonucleotide; GAG chr2 60466731 60466750 60466734 -
taacaaagagcaagatgcca

SEQ ID NO: 183464 - DNA, 20 bp, Artificial Sequence
  Synthetic oligonucleotide; AAG chr2 60466726 60466745 60466729 -
aagagcaagatgccagagtt

SEQ ID NO: 183465 - DNA, 20 bp, Artificial Sequence
  Synthetic oligonucleotide; AGG chr2 60466725 60466744 60466728 -
agagcaagatgccagagtta

SEQ ID NO: 183466 - DNA, 20 bp, Artificial Sequence
  Synthetic oligonucleotide; AAG chr2 60466718 60466737 60466721 -
gatgccagagttaaggctct

SEQ ID NO: 183467 - DNA, 20 bp, Artificial Sequence
  Synthetic oligonucleotide; AGG chr2 60466717 60466736 60466720 -
atgccagagttaaggctcta

SEQ ID NO: 183468 - DNA, 20 bp, Artificial Sequence
  Synthetic oligonucleotide; GGG chr2 60466716 60466735 60466719 -
tgccagagttaaggctctaa

SEQ ID NO: 183469 - DNA, 20 bp, Artificial Sequence
  Synthetic oligonucleotide; GGG chr2 60466715 60466734 60466718 -
gccagagttaaggctctaag

SEQ ID NO: 183470 - DNA, 20 bp, Artificial Sequence
  Synthetic oligonucleotide; GGG chr2 60466714 60466733 60466717 -
ccagagttaaggctctaagg

SEQ ID NO: 183471 - DNA, 20 bp, Artificial Sequence
  Synthetic oligonucleotide; TAG chr2 60466703 60466722 60466706 -
gctctaagggggactgtttt

SEQ ID NO: 183472 - DNA, 20 bp, Artificial Sequence
  Synthetic oligonucleotide; TGG chr2 60466699 60466718 60466702 -
taagggggactgtttttaga

SEQ ID NO: 183473 - DNA, 20 bp, Artificial Sequence
  Synthetic oligonucleotide; GGG chr2 60466698 60466717 60466701 -
aagggggactgtttttagat

SEQ ID NO: 183474 - DNA, 20 bp, Artificial Sequence
  Synthetic oligonucleotide; GAG chr2 60466696 60466715 60466699 -
gggggactgtttttagatgg

SEQ ID NO: 183475 - DNA, 20 bp, Artificial Sequence
  Synthetic oligonucleotide; AGG chr2 60466695 60466714 60466698 -
ggggactgtttttagatggg

SEQ ID NO: 183476 - DNA, 20 bp, Artificial Sequence
  Synthetic oligonucleotide; GGG chr2 60466694 60466713 60466697 -
gggactgtttttagatggga

SEQ ID NO: 183477 - DNA, 20 bp, Artificial Sequence
  Synthetic oligonucleotide; GAG chr2 60466692 60466711 60466695 -
gactgtttttagatgggagg

SEQ ID NO: 183478 - DNA, 20 bp, Artificial Sequence
  Synthetic oligonucleotide; TGG chr2 60466666 60466685 60466669 -
acacttacccatcttgtaaa

SEQ ID NO: 183479 - DNA, 20 bp, Artificial Sequence
  Synthetic oligonucleotide; AAG chr2 60466657 60466676 60466660 -
catcttgtaaatggtatctg

SEQ ID NO: 183480 - DNA, 20 bp, Artificial Sequence
  Synthetic oligonucleotide; GAG chr2 60466655 60466674 60466658 -
tcttgtaaatggtatctgaa

SEQ ID NO: 183481 - DNA, 20 bp, Artificial Sequence
  Synthetic oligonucleotide; CAG chr2 60466652 60466671 60466655 -
tgtaaatggtatctgaagag

SEQ ID NO: 183482 - DNA, 20 bp, Artificial Sequence
  Synthetic oligonucleotide; AGG chr2 60466651 60466670 60466654 -
gtaaatggtatctgaagagc

SEQ ID NO: 183483 - DNA, 20 bp, Artificial Sequence
  Synthetic oligonucleotide; GGG chr2 60466650 60466669 60466653 -
taaatggtatctgaagagca

SEQ ID NO: 183484 - DNA, 20 bp, Artificial Sequence
  Synthetic oligonucleotide; GAG chr2 60466637 60466656 60466640 -
aagagcagggcatgcaccct

SEQ ID NO: 183485 - DNA, 20 bp, Artificial Sequence
  Synthetic oligonucleotide; CAG chr2 60466632 60466651 60466635 -
cagggcatgcaccctgagac

SEQ ID NO: 183486 - DNA, 20 bp, Artificial Sequence
  Synthetic oligonucleotide; AAG chr2 60466624 60466643 60466627 -
gcaccctgagaccagattca

SEQ ID NO: 183487 - DNA, 20 bp, Artificial Sequence
  Synthetic oligonucleotide; CAG chr2 60466620 60466639 60466623 -
cctgagaccagattcaaagc

SEQ ID NO: 183488 - DNA, 20 bp, Artificial Sequence
  Synthetic oligonucleotide; TAG chr2 60466596 60466615 60466599 -
tgtttatttttgttaactcc

SEQ ID NO: 183489 - DNA, 20 bp, Artificial Sequence
  Synthetic oligonucleotide; AGG chr2 60466595 60466614 60466598 -
gtttatttttgttaactcct

SEQ ID NO: 183490 - DNA, 20 bp, Artificial Sequence
  Synthetic oligonucleotide; TAG chr2 60466586 60466605 60466589 -
tgttaactcctaggtaatcc

SEQ ID NO: 183491 - DNA, 20 bp, Artificial Sequence
  Synthetic oligonucleotide; AGG chr2 60466585 60466604 60466588 -
gttaactcctaggtaatcct

SEQ ID NO: 183492 - DNA, 20 bp, Artificial Sequence
  Synthetic oligonucleotide; AAG chr2 60466577 60466596 60466580 -
ctaggtaatcctaggtaaca

SEQ ID NO: 183493 - DNA, 20 bp, Artificial Sequence
  Synthetic oligonucleotide; GAG chr2 60466575 60466594 60466578 -
aggtaatcctaggtaacaaa

SEQ ID NO: 183494 - DNA, 20 bp, Artificial Sequence
  Synthetic oligonucleotide; AAG chr2 60466554 60466573 60466557 -
agttattgtgtgaatttcat

SEQ ID NO: 183495 - DNA, 20 bp, Artificial Sequence
  Synthetic oligonucleotide; CAG chr2 60466547 60466566 60466550 -
gtgtgaatttcataagccct

SEQ ID NO: 183496 - DNA, 20 bp, Artificial Sequence
  Synthetic oligonucleotide; AGG chr2 60466546 60466565 60466549 -
tgtgaatttcataagccctc

SEQ ID NO: 183497 - DNA, 20 bp, Artificial Sequence
  Synthetic oligonucleotide; GAG chr2 60466539 60466558 60466542 -
ttcataagccctcaggtcct

SEQ ID NO: 183498 - DNA, 20 bp, Artificial Sequence
  Synthetic oligonucleotide; AGG chr2 60466538 60466557 60466541 -
tcataagccctcaggtcctg

SEQ ID NO: 183499 - DNA, 20 bp, Artificial Sequence
  Synthetic oligonucleotide; GGG chr2 60466537 60466556 60466540 -
cataagccctcaggtcctga

SEQ ID NO: 183500 - DNA, 20 bp, Artificial Sequence
  Synthetic oligonucleotide; TGG chr2 60466533 60466552 60466536 -
agccctcaggtcctgagggc

SEQ ID NO: 183501 - DNA, 20 bp, Artificial Sequence
  Synthetic oligonucleotide; GGG chr2 60466532 60466551 60466535 -
gccctcaggtcctgagggct

SEQ ID NO: 183502 - DNA, 20 bp, Artificial Sequence
  Synthetic oligonucleotide; TGG chr2 60466529 60466548 60466532 -
ctcaggtcctgagggctggg

SEQ ID NO: 183503 - DNA, 20 bp, Artificial Sequence
  Synthetic oligonucleotide; CAG chr2 60466524 60466543 60466527 -
gtcctgagggctgggtggtt

SEQ ID NO: 183504 - DNA, 20 bp, Artificial Sequence
  Synthetic oligonucleotide; AGG chr2 60466523 60466542 60466526 -
tcctgagggctgggtggttc

SEQ ID NO: 183505 - DNA, 20 bp, Artificial Sequence
  Synthetic oligonucleotide; GGG chr2 60466522 60466541 60466525 -
cctgagggctgggtggttca

SEQ ID NO: 183506 - DNA, 20 bp, Artificial Sequence
  Synthetic oligonucleotide; GGG chr2 60466521 60466540 60466524 -
ctgagggctgggtggttcag

SEQ ID NO: 183507 - DNA, 20 bp, Artificial Sequence
  Synthetic oligonucleotide; AAG chr2 60466514 60466533 60466517 -
ctgggtggttcaggggttaa

SEQ ID NO: 183508 - DNA, 20 bp, Artificial Sequence
  Synthetic oligonucleotide; AAG chr2 60466488 60466507 60466491 -
ctcatctgctcccttccccc

SEQ ID NO: 183509 - DNA, 20 bp, Artificial Sequence
  Synthetic oligonucleotide; TGG chr2 60466484 60466503 60466487 -
tctgctcccttcccccaagc

SEQ ID NO: 183510 - DNA, 20 bp, Artificial Sequence
  Synthetic oligonucleotide; GGG chr2 60466483 60466502 60466486 -
ctgctcccttcccccaagct

SEQ ID NO: 183511 - DNA, 20 bp, Artificial Sequence
  Synthetic oligonucleotide; AAG chr2 60466477 60466496 60466480 -
ccttcccccaagctgggcct

SEQ ID NO: 183512 - DNA, 20 bp, Artificial Sequence
  Synthetic oligonucleotide; TGG chr2 60466472 60466491 60466475 -
ccccaagctgggcctaagcc

SEQ ID NO: 183513 - DNA, 20 bp, Artificial Sequence
  Synthetic oligonucleotide; GGG chr2 60466471 60466490 60466474 -
cccaagctgggcctaagcct

SEQ ID NO: 183514 - DNA, 20 bp, Artificial Sequence
  Synthetic oligonucleotide; TAG chr2 60466467 60466486 60466470 -
agctgggcctaagcctgggt

SEQ ID NO: 183515 - DNA, 20 bp, Artificial Sequence
  Synthetic oligonucleotide; AGG chr2 60466466 60466485 60466469 -
gctgggcctaagcctgggtt

SEQ ID NO: 183516 - DNA, 20 bp, Artificial Sequence
  Synthetic oligonucleotide; CAG chr2 60466460 60466479 60466463 -
cctaagcctgggttaggtca

SEQ ID NO: 183517 - DNA, 20 bp, Artificial Sequence
  Synthetic oligonucleotide; CAG chr2 60466453 60466472 60466456 -
ctgggttaggtcacagattg

SEQ ID NO: 183518 - DNA, 20 bp, Artificial Sequence
  Synthetic oligonucleotide; AAG chr2 60466450 60466469 60466453 -
ggttaggtcacagattgcag

SEQ ID NO: 183519 - DNA, 20 bp, Artificial Sequence
  Synthetic oligonucleotide; AGG chr2 60466449 60466468 60466452 -
gttaggtcacagattgcaga

SEQ ID NO: 183520 - DNA, 20 bp, Artificial Sequence
  Synthetic oligonucleotide; TAG chr2 60466444 60466463 60466447 -
gtcacagattgcagaaggtt

SEQ ID NO: 183521 - DNA, 20 bp, Artificial Sequence
  Synthetic oligonucleotide; AGG chr2 60466443 60466462 60466446 -
tcacagattgcagaaggttt

SEQ ID NO: 183522 - DNA, 20 bp, Artificial Sequence
  Synthetic oligonucleotide; GAG chr2 60466441 60466460 60466444 -
acagattgcagaaggtttag

SEQ ID NO: 183523 - DNA, 20 bp, Artificial Sequence
  Synthetic oligonucleotide; AGG chr2 60466440 60466459 60466443 -
cagattgcagaaggtttagg

SEQ ID NO: 183524 - DNA, 20 bp, Artificial Sequence
  Synthetic oligonucleotide; TGG chr2 60466436 60466455 60466439 -
ttgcagaaggtttaggaggt

SEQ ID NO: 183525 - DNA, 20 bp, Artificial Sequence
  Synthetic oligonucleotide; GGG chr2 60466435 60466454 60466438 -
tgcagaaggtttaggaggtt

SEQ ID NO: 183526 - DNA, 20 bp, Artificial Sequence
  Synthetic oligonucleotide; CGG chr2 60466428 60466447 60466431 -
ggtttaggaggttgggctca

SEQ ID NO: 183527 - DNA, 20 bp, Artificial Sequence
  Synthetic oligonucleotide; TAG chr2 60466421 60466440 60466424 -
gaggttgggctcacggtttc

SEQ ID NO: 183528 - DNA, 20 bp, Artificial Sequence
  Synthetic oligonucleotide; TGG chr2 60466407 60466426 60466410 -
ggtttctagtccctgcatgc

SEQ ID NO: 183529 - DNA, 20 bp, Artificial Sequence
  Synthetic oligonucleotide; TGG chr2 60466403 60466422 60466406 -
tctagtccctgcatgctggc

SEQ ID NO: 183530 - DNA, 20 bp, Artificial Sequence
  Synthetic oligonucleotide; GGG chr2 60466402 60466421 60466405 -
ctagtccctgcatgctggct

SEQ ID NO: 183531 - DNA, 20 bp, Artificial Sequence
  Synthetic oligonucleotide; TGG chr2 60466399 60466418 60466402 -
gtccctgcatgctggctggg

SEQ ID NO: 183532 - DNA, 20 bp, Artificial Sequence
  Synthetic oligonucleotide; GGG chr2 60466398 60466417 60466401 -
tccctgcatgctggctgggt

SEQ ID NO: 183533 - DNA, 20 bp, Artificial Sequence
  Synthetic oligonucleotide; GGG chr2 60466397 60466416 60466400 -
ccctgcatgctggctgggtg

SEQ ID NO: 183534 - DNA, 20 bp, Artificial Sequence
  Synthetic oligonucleotide; GAG chr2 60466395 60466414 60466398 -
ctgcatgctggctgggtggg

SEQ ID NO: 183535 - DNA, 20 bp, Artificial Sequence
  Synthetic oligonucleotide; GAG chr2 60466393 60466412 60466396 -
gcatgctggctgggtgggga

SEQ ID NO: 183536 - DNA, 20 bp, Artificial Sequence
  Synthetic oligonucleotide; TGG chr2 60466378 60466397 60466381 -
ggggagagctctcctgttgc

SEQ ID NO: 183537 - DNA, 20 bp, Artificial Sequence
  Synthetic oligonucleotide; GGG chr2 60466377 60466396 60466380 -
gggagagctctcctgttgct

SEQ ID NO: 183538 - DNA, 20 bp, Artificial Sequence
  Synthetic oligonucleotide; GGG chr2 60466376 60466395 60466379 -
ggagagctctcctgttgctg

SEQ ID NO: 183539 - DNA, 20 bp, Artificial Sequence
  Synthetic oligonucleotide; GGG chr2 60466375 60466394 60466378 -
gagagctctcctgttgctgg

SEQ ID NO: 183540 - DNA, 20 bp, Artificial Sequence
  Synthetic oligonucleotide; TGG chr2 60466368 60466387 60466371 -
ctcctgttgctgggggcatc

SEQ ID NO: 183541 - DNA, 20 bp, Artificial Sequence
  Synthetic oligonucleotide; GGG chr2 60466367 60466386 60466370 -
tcctgttgctgggggcatct

SEQ ID NO: 183542 - DNA, 20 bp, Artificial Sequence
  Synthetic oligonucleotide; GGG chr2 60466366 60466385 60466369 -
cctgttgctgggggcatctg

SEQ ID NO: 183543 - DNA, 20 bp, Artificial Sequence
  Synthetic oligonucleotide; TGG chr2 60466357 60466376 60466360 -
gggggcatctggggcctgca

SEQ ID NO: 183544 - DNA, 20 bp, Artificial Sequence
  Synthetic oligonucleotide; GGG chr2 60466356 60466375 60466359 -
ggggcatctggggcctgcat

SEQ ID NO: 183545 - DNA, 20 bp, Artificial Sequence
  Synthetic oligonucleotide; GGG chr2 60466355 60466374 60466358 -
gggcatctggggcctgcatg

SEQ ID NO: 183546 - DNA, 20 bp, Artificial Sequence
  Synthetic oligonucleotide; TGG chr2 60466349 60466368 60466352 -
ctggggcctgcatggggctg

SEQ ID NO: 183547 - DNA, 20 bp, Artificial Sequence
  Synthetic oligonucleotide; CGG chr2 60466343 60466362 60466346 -
cctgcatggggctgtggaaa

SEQ ID NO: 183548 - DNA, 20 bp, Artificial Sequence
  Synthetic oligonucleotide; GAG chr2 60466341 60466360 60466344 -
tgcatggggctgtggaaacg

SEQ ID NO: 183549 - DNA, 20 bp, Artificial Sequence
  Synthetic oligonucleotide; TGG chr2 60466331 60466350 60466334 -
tgtggaaacggagccacttt

SEQ ID NO: 183550 - DNA, 20 bp, Artificial Sequence
  Synthetic oligonucleotide; GAG chr2 60466329 60466348 60466332 -
tggaaacggagccacttttg

SEQ ID NO: 183551 - DNA, 20 bp, Artificial Sequence
  Synthetic oligonucleotide; AGG chr2 60466328 60466347 60466331 -
ggaaacggagccacttttgg

SEQ ID NO: 183552 - DNA, 20 bp, Artificial Sequence
  Synthetic oligonucleotide; GGG chr2 60466327 60466346 60466330 -
gaaacggagccacttttgga

SEQ ID NO: 183553 - DNA, 20 bp, Artificial Sequence
  Synthetic oligonucleotide; AAG chr2 60466324 60466343 60466327 -
acggagccacttttggaggg

SEQ ID NO: 183554 - DNA, 20 bp, Artificial Sequence
  Synthetic oligonucleotide; AGG chr2 60466323 60466342 60466326 -
cggagccacttttggaggga

SEQ ID NO: 183555 - DNA, 20 bp, Artificial Sequence
  Synthetic oligonucleotide; GGG chr2 60466322 60466341 60466325 -
ggagccacttttggagggaa

SEQ ID NO: 183556 - DNA, 20 bp, Artificial Sequence
  Synthetic oligonucleotide; TAG chr2 60466318 60466337 60466321 -
ccacttttggagggaaggga

SEQ ID NO: 183557 - DNA, 20 bp, Artificial Sequence
  Synthetic oligonucleotide; AAG chr2 60466315 60466334 60466318 -
cttttggagggaagggatag

SEQ ID NO: 183558 - DNA, 20 bp, Artificial Sequence
  Synthetic oligonucleotide; AGG chr2 60466314 60466333 60466317 -
ttttggagggaagggataga

SEQ ID NO: 183559 - DNA, 20 bp, Artificial Sequence
  Synthetic oligonucleotide; GGG chr2 60466313 60466332 60466316 -
tttggagggaagggatagaa

SEQ ID NO: 183560 - DNA, 20 bp, Artificial Sequence
  Synthetic oligonucleotide; GAG chr2 60466311 60466330 60466314 -
tggagggaagggatagaagg

SEQ ID NO: 183561 - DNA, 20 bp, Artificial Sequence
  Synthetic oligonucleotide; GAG chr2 60466306 60466325 60466309 -
ggaagggatagaagggagtt

SEQ ID NO: 183562 - DNA, 20 bp, Artificial Sequence
  Synthetic oligonucleotide; CAG chr2 60466303 60466322 60466306 -
agggatagaagggagttgag

SEQ ID NO: 183563 - DNA, 20 bp, Artificial Sequence
  Synthetic oligonucleotide; CAG chr2 60466298 60466317 60466301 -
tagaagggagttgagcagtt

SEQ ID NO: 183564 - DNA, 20 bp, Artificial Sequence
  Synthetic oligonucleotide; GAG chr2 60466296 60466315 60466299 -
gaagggagttgagcagttca

SEQ ID NO: 183565 - DNA, 20 bp, Artificial Sequence
  Synthetic oligonucleotide; AGG chr2 60466295 60466314 60466298 -
aagggagttgagcagttcag

SEQ ID NO: 183566 - DNA, 20 bp, Artificial Sequence
  Synthetic oligonucleotide; GAG chr2 60466293 60466312 60466296 -
gggagttgagcagttcagag

SEQ ID NO: 183567 - DNA, 20 bp, Artificial Sequence
  Synthetic oligonucleotide; AGG chr2 60466292 60466311 60466295 -
ggagttgagcagttcagagg

SEQ ID NO: 183568 - DNA, 20 bp, Artificial Sequence
  Synthetic oligonucleotide; GGG chr2 60466291 60466310 60466294 -
gagttgagcagttcagagga

SEQ ID NO: 183569 - DNA, 20 bp, Artificial Sequence
  Synthetic oligonucleotide; TGG chr2 60466288 60466307 60466291 -
ttgagcagttcagaggaggg

SEQ ID NO: 183570 - DNA, 20 bp, Artificial Sequence
  Synthetic oligonucleotide; GAG chr2 60466286 60466305 60466289 -
gagcagttcagaggagggtg

SEQ ID NO: 183571 - DNA, 20 bp, Artificial Sequence
  Synthetic oligonucleotide; GAG chr2 60466281 60466300 60466284 -
gttcagaggagggtggagtt

SEQ ID NO: 183572 - DNA, 20 bp, Artificial Sequence
  Synthetic oligonucleotide; GAG chr2 60466279 60466298 60466282 -
tcagaggagggtggagttga

SEQ ID NO: 183573 - DNA, 20 bp, Artificial Sequence
  Synthetic oligonucleotide; AGG chr2 60466278 60466297 60466281 -
cagaggagggtggagttgag

SEQ ID NO: 183574 - DNA, 20 bp, Artificial Sequence
  Synthetic oligonucleotide; AAG chr2 60466273 60466292 60466276 -
gagggtggagttgagaggcc

SEQ ID NO: 183575 - DNA, 20 bp, Artificial Sequence
  Synthetic oligonucleotide; AGG chr2 60466272 60466291 60466275 -
agggtggagttgagaggcca

SEQ ID NO: 183576 - DNA, 20 bp, Artificial Sequence
  Synthetic oligonucleotide; GGG chr2 60466271 60466290 60466274 -
gggtggagttgagaggccaa

SEQ ID NO: 183577 - DNA, 20 bp, Artificial Sequence
  Synthetic oligonucleotide; CAG chr2 60466261 60466280 60466264 -
gagaggccaagggctgttgc

SEQ ID NO: 183578 - DNA, 20 bp, Artificial Sequence
  Synthetic oligonucleotide; AGG chr2 60466260 60466279 60466263 -
agaggccaagggctgttgcc

SEQ ID NO: 183579 - DNA, 20 bp, Artificial Sequence
  Synthetic oligonucleotide; GGG chr2 60466259 60466278 60466262 -
gaggccaagggctgttgcca

SEQ ID NO: 183580 - DNA, 20 bp, Artificial Sequence
  Synthetic oligonucleotide; TAG chr2 60466251 60466270 60466254 -
gggctgttgccagggaaaca

SEQ ID NO: 183581 - DNA, 20 bp, Artificial Sequence
  Synthetic oligonucleotide; CGG chr2 60466244 60466263 60466247 -
tgccagggaaacatagttct

SEQ ID NO: 183582 - DNA, 20 bp, Artificial Sequence
  Synthetic oligonucleotide; CAG chr2 60466237 60466256 60466240 -
gaaacatagttctcggtctt

SEQ ID NO: 183583 - DNA, 20 bp, Artificial Sequence
  Synthetic oligonucleotide; TGG chr2 60466232 60466251 60466235 -
atagttctcggtcttcagcc

SEQ ID NO: 183584 - DNA, 20 bp, Artificial Sequence
  Synthetic oligonucleotide; GAG chr2 60466222 60466241 60466225 -
gtcttcagcctggtcttcct

SEQ ID NO: 183585 - DNA, 20 bp, Artificial Sequence
  Synthetic oligonucleotide; AGG chr2 60466221 60466240 60466224 -
tcttcagcctggtcttcctg

SEQ ID NO: 183586 - DNA, 20 bp, Artificial Sequence
  Synthetic oligonucleotide; GGG chr2 60466220 60466239 60466223 -
cttcagcctggtcttcctga

SEQ ID NO: 183587 - DNA, 20 bp, Artificial Sequence
  Synthetic oligonucleotide; TGG chr2 60466216 60466235 60466219 -
agcctggtcttcctgagggc

SEQ ID NO: 183588 - DNA, 20 bp, Artificial Sequence
  Synthetic oligonucleotide; GGG chr2 60466215 60466234 60466218 -
gcctggtcttcctgagggct

SEQ ID NO: 183589 - DNA, 20 bp, Artificial Sequence
  Synthetic oligonucleotide; GAG chr2 60466213 60466232 60466216 -
ctggtcttcctgagggctgg

SEQ ID NO: 183590 - DNA, 20 bp, Artificial Sequence
  Synthetic oligonucleotide; TGG chr2 60466199 60466218 60466202 -
ggctgggagtttgatttgac

SEQ ID NO: 183591 - DNA, 20 bp, Artificial Sequence
  Synthetic oligonucleotide; TAG chr2 60466196 60466215 60466199 -
tgggagtttgatttgactgg

SEQ ID NO: 183592 - DNA, 20 bp, Artificial Sequence
  Synthetic oligonucleotide; AGG chr2 60466195 60466214 60466198 -
gggagtttgatttgactggt

SEQ ID NO: 183593 - DNA, 20 bp, Artificial Sequence
  Synthetic oligonucleotide; AAG chr2 60466191 60466210 60466194 -
gtttgatttgactggtagga

SEQ ID NO: 183594 - DNA, 20 bp, Artificial Sequence
  Synthetic oligonucleotide; GAG chr2 60466185 60466204 60466188 -
tttgactggtaggaaagtct

SEQ ID NO: 183595 - DNA, 20 bp, Artificial Sequence
  Synthetic oligonucleotide; TAG chr2 60466177 60466196 60466180 -
gtaggaaagtctgagcttga

SEQ ID NO: 183596 - DNA, 20 bp, Artificial Sequence
  Synthetic oligonucleotide; AGG chr2 60466176 60466195 60466179 -
taggaaagtctgagcttgat

SEQ ID NO: 183597 - DNA, 20 bp, Artificial Sequence
  Synthetic oligonucleotide; GGG chr2 60466175 60466194 60466178 -
aggaaagtctgagcttgata

SEQ ID NO: 183598 - DNA, 20 bp, Artificial Sequence
  Synthetic oligonucleotide; AAG chr2 60466144 60466163 60466147 -
tcctctcccaccttcccaca

SEQ ID NO: 183599 - DNA, 20 bp, Artificial Sequence
  Synthetic oligonucleotide; AGG chr2 60466143 60466162 60466146 -
cctctcccaccttcccacaa

SEQ ID NO: 183600 - DNA, 20 bp, Artificial Sequence
  Synthetic oligonucleotide; GGG chr2 60466142 60466161 60466145 -
ctctcccaccttcccacaaa

SEQ ID NO: 183601 - DNA, 20 bp, Artificial Sequence
  Synthetic oligonucleotide; GAG chr2 60466140 60466159 60466143 -
ctcccaccttcccacaaagg

SEQ ID NO: 183602 - DNA, 20 bp, Artificial Sequence
  Synthetic oligonucleotide; AGG chr2 60466139 60466158 60466142 -
tcccaccttcccacaaaggg

SEQ ID NO: 183603 - DNA, 20 bp, Artificial Sequence
  Synthetic oligonucleotide; GGG chr2 60466138 60466157 60466141 -
cccaccttcccacaaaggga

SEQ ID NO: 183604 - DNA, 20 bp, Artificial Sequence
  Synthetic oligonucleotide; TAG chr2 60466131 60466150 60466134 -
tcccacaaagggagggtaca

SEQ ID NO: 183605 - DNA, 20 bp, Artificial Sequence
  Synthetic oligonucleotide; TGG chr2 60466123 60466142 60466126 -
agggagggtacatagtttgc

SEQ ID NO: 183606 - DNA, 20 bp, Artificial Sequence
  Synthetic oligonucleotide; TGG chr2 60466111 60466130 60466114 -
tagtttgctggtgcccctgc

SEQ ID NO: 183607 - DNA, 20 bp, Artificial Sequence
  Synthetic oligonucleotide; CAG chr2 60466108 60466127 60466111 -
tttgctggtgcccctgctgg

SEQ ID NO: 183608 - DNA, 20 bp, Artificial Sequence
  Synthetic oligonucleotide; AGG chr2 60466107 60466126 60466110 -
ttgctggtgcccctgctggc

SEQ ID NO: 183609 - DNA, 20 bp, Artificial Sequence
  Synthetic oligonucleotide; TAG chr2 60466097 60466116 60466100 -
ccctgctggcaggaccaatt

SEQ ID NO: 183610 - DNA, 20 bp, Artificial Sequence
  Synthetic oligonucleotide; AGG chr2 60466096 60466115 60466099 -
cctgctggcaggaccaattt

SEQ ID NO: 183611 - DNA, 20 bp, Artificial Sequence
  Synthetic oligonucleotide; GAG chr2 60466094 60466113 60466097 -
tgctggcaggaccaatttag

SEQ ID NO: 183612 - DNA, 20 bp, Artificial Sequence
  Synthetic oligonucleotide; CAG chr2 60466087 60466106 60466090 -
aggaccaatttaggagtgac

SEQ ID NO: 183613 - DNA, 20 bp, Artificial Sequence
  Synthetic oligonucleotide; AAG chr2 60466081 60466100 60466084 -
aatttaggagtgaccagaac

SEQ ID NO: 183614 - DNA, 20 bp, Artificial Sequence
  Synthetic oligonucleotide; AGG chr2 60466080 60466099 60466083 -
atttaggagtgaccagaaca

SEQ ID NO: 183615 - DNA, 20 bp, Artificial Sequence
  Synthetic oligonucleotide; TGG chr2 60466073 60466092 60466076 -
agtgaccagaacaaggtatg

SEQ ID NO: 183616 - DNA, 20 bp, Artificial Sequence
  Synthetic oligonucleotide; AAG chr2 60466070 60466089 60466073 -
gaccagaacaaggtatgtgg

SEQ ID NO: 183617 - DNA, 20 bp, Artificial Sequence
  Synthetic oligonucleotide; TGG chr2 60466067 60466086 60466070 -
cagaacaaggtatgtggaag

SEQ ID NO: 183618 - DNA, 20 bp, Artificial Sequence
  Synthetic oligonucleotide; GGG chr2 60466066 60466085 60466069 -
agaacaaggtatgtggaagt

SEQ ID NO: 183619 - DNA, 20 bp, Artificial Sequence
  Synthetic oligonucleotide; TGG chr2 60466060 60466079 60466063 -
aggtatgtggaagtgggttg

SEQ ID NO: 183620 - DNA, 20 bp, Artificial Sequence
  Synthetic oligonucleotide; GGG chr2 60466059 60466078 60466062 -
ggtatgtggaagtgggttgt

SEQ ID NO: 183621 - DNA, 20 bp, Artificial Sequence
  Synthetic oligonucleotide; GGG chr2 60466058 60466077 60466061 -
gtatgtggaagtgggttgtg

SEQ ID NO: 183622 - DNA, 20 bp, Artificial Sequence
  Synthetic oligonucleotide; GGG chr2 60466057 60466076 60466060 -
tatgtggaagtgggttgtgg

SEQ ID NO: 183623 - DNA, 20 bp, Artificial Sequence
  Synthetic oligonucleotide; CAG chr2 60466052 60466071 60466055 -
ggaagtgggttgtgggggtc

SEQ ID NO: 183624 - DNA, 20 bp, Artificial Sequence
  Synthetic oligonucleotide; AAG chr2 60466048 60466067 60466051 -
gtgggttgtgggggtccaga

SEQ ID NO: 183625 - DNA, 20 bp, Artificial Sequence
  Synthetic oligonucleotide; TAG chr2 60466042 60466061 60466045 -
tgtgggggtccagaaagctc

SEQ ID NO: 183626 - DNA, 20 bp, Artificial Sequence
  Synthetic oligonucleotide; TGG chr2 60466015 60466034 60466018 -
aacctgatgcccattccact

SEQ ID NO: 183627 - DNA, 20 bp, Artificial Sequence
  Synthetic oligonucleotide; CGG chr2 60466012 60466031 60466015 -
ctgatgcccattccacttgg

SEQ ID NO: 183628 - DNA, 20 bp, Artificial Sequence
  Synthetic oligonucleotide; TGG chr2 60465992 60466011 60465995 -
cggcattaacctgctgcccc

SEQ ID NO: 183629 - DNA, 20 bp, Artificial Sequence
  Synthetic oligonucleotide; CAG chr2 60465985 60466004 60465988 -
aacctgctgcccctggcttc

SEQ ID NO: 183630 - DNA, 20 bp, Artificial Sequence
  Synthetic oligonucleotide; GAG chr2 60465983 60466002 60465986 -
cctgctgcccctggcttcca

SEQ ID NO: 183631 - DNA, 20 bp, Artificial Sequence
  Synthetic oligonucleotide; TAG chr2 60465976 60465995 60465979 -
cccctggcttccagagctca

SEQ ID NO: 183632 - DNA, 20 bp, Artificial Sequence
  Synthetic oligonucleotide; TGG chr2 60465963 60465982 60465966 -
gagctcatagcacttccctg

SEQ ID NO: 183633 - DNA, 20 bp, Artificial Sequence
  Synthetic oligonucleotide; CAG chr2 60465944 60465963 60465947 -
gtggccactctgctgtgtgc

SEQ ID NO: 183634 - DNA, 20 bp, Artificial Sequence
  Synthetic oligonucleotide; TAG chr2 60465923 60465942 60465926 -
agtcacccctgctctttaac

SEQ ID NO: 183635 - DNA, 20 bp, Artificial Sequence
  Synthetic oligonucleotide; GAG chr2 60465921 60465940 60465924 -
tcacccctgctctttaacta

SEQ ID NO: 183636 - DNA, 20 bp, Artificial Sequence
  Synthetic oligonucleotide; TGG chr2 60465910 60465929 60465913 -
ctttaactagagcctccttt

SEQ ID NO: 183637 - DNA, 20 bp, Artificial Sequence
  Synthetic oligonucleotide; TGG chr2 60465905 60465924 60465908 -
actagagcctccttttggcc

SEQ ID NO: 183638 - DNA, 20 bp, Artificial Sequence
  Synthetic oligonucleotide; GGG chr2 60465904 60465923 60465907 -
ctagagcctccttttggcct

SEQ ID NO: 183639 - DNA, 20 bp, Artificial Sequence
  Synthetic oligonucleotide; AAG chr2 60465899 60465918 60465902 -
gcctccttttggcctgggtt

SEQ ID NO: 183640 - DNA, 20 bp, Artificial Sequence
  Synthetic oligonucleotide; AGG chr2 60465898 60465917 60465901 -
cctccttttggcctgggtta

SEQ ID NO: 183641 - DNA, 20 bp, Artificial Sequence
  Synthetic oligonucleotide; TGG chr2 60465893 60465912 60465896 -
ttttggcctgggttaaggcc

SEQ ID NO: 183642 - DNA, 20 bp, Artificial Sequence
  Synthetic oligonucleotide; TGG chr2 60465888 60465907 60465891 -
gcctgggttaaggcctggac

SEQ ID NO: 183643 - DNA, 20 bp, Artificial Sequence
  Synthetic oligonucleotide; GGG chr2 60465887 60465906 60465890 -
cctgggttaaggcctggact

SEQ ID NO: 183644 - DNA, 20 bp, Artificial Sequence
  Synthetic oligonucleotide; TGG chr2 60465875 60465894 60465878 -
cctggactgggaccttcctc

SEQ ID NO: 183645 - DNA, 20 bp, Artificial Sequence
  Synthetic oligonucleotide; AAG chr2 60465872 60465891 60465875 -
ggactgggaccttcctctgg

SEQ ID NO: 183646 - DNA, 20 bp, Artificial Sequence
  Synthetic oligonucleotide; CGG chr2 60465864 60465883 60465867 -
accttcctctggaagccgtt

SEQ ID NO: 183647 - DNA, 20 bp, Artificial Sequence
  Synthetic oligonucleotide; GGG chr2 60465863 60465882 60465866 -
ccttcctctggaagccgttc

SEQ ID NO: 183648 - DNA, 20 bp, Artificial Sequence
  Synthetic oligonucleotide; GGG chr2 60465862 60465881 60465865 -
cttcctctggaagccgttcg

SEQ ID NO: 183649 - DNA, 20 bp, Artificial Sequence
  Synthetic oligonucleotide; TGG chr2 60465850 60465869 60465853 -
gccgttcggggtgtgtaatg

SEQ ID NO: 183650 - DNA, 20 bp, Artificial Sequence
  Synthetic oligonucleotide; TAG chr2 60465846 60465865 60465849 -
ttcggggtgtgtaatgtggt

SEQ ID NO: 183651 - DNA, 20 bp, Artificial Sequence
  Synthetic oligonucleotide; CAG chr2 60465833 60465852 60465836 -
atgtggttagtcattaccct

SEQ ID NO: 183652 - DNA, 20 bp, Artificial Sequence
  Synthetic oligonucleotide; TGG chr2 60465816 60465835 60465819 -
cctcagtaattaatcacccc

SEQ ID NO: 183653 - DNA, 20 bp, Artificial Sequence
  Synthetic oligonucleotide; TAG chr2 60465813 60465832 60465816 -
cagtaattaatcacccctgg

SEQ ID NO: 183654 - DNA, 20 bp, Artificial Sequence
  Synthetic oligonucleotide; TAG chr2 60465779 60465798 60465782 -
cacattcacattcgacctga

SEQ ID NO: 183655 - DNA, 20 bp, Artificial Sequence
  Synthetic oligonucleotide; CAG chr2 60465772 60465791 60465775 -
acattcgacctgatagttta

SEQ ID NO: 183656 - DNA, 20 bp, Artificial Sequence
  Synthetic oligonucleotide; GAG chr2 60465770 60465789 60465773 -
attcgacctgatagtttaca

SEQ ID NO: 183657 - DNA, 20 bp, Artificial Sequence
  Synthetic oligonucleotide; AGG chr2 60465769 60465788 60465772 -
ttcgacctgatagtttacag

SEQ ID NO: 183658 - DNA, 20 bp, Artificial Sequence
  Synthetic oligonucleotide; GGG chr2 60465768 60465787 60465771 -
tcgacctgatagtttacaga

SEQ ID NO: 183659 - DNA, 20 bp, Artificial Sequence
  Synthetic oligonucleotide; CAG chr2 60465723 60465742 60465726 -
gaacttcccaacaattctta

SEQ ID NO: 183660 - DNA, 20 bp, Artificial Sequence
  Synthetic oligonucleotide; AGG chr2 60465722 60465741 60465725 -
aacttcccaacaattcttac

SEQ ID NO: 183661 - DNA, 20 bp, Artificial Sequence
  Synthetic oligonucleotide; CAG chr2 60465697 60465716 60465700 -
ctgtttttatgctcatttta

SEQ ID NO: 183662 - DNA, 20 bp, Artificial Sequence
  Synthetic oligonucleotide; TAG chr2 60465693 60465712 60465696 -
ttttatgctcattttacaga

SEQ ID NO: 183663 - DNA, 20 bp, Artificial Sequence
  Synthetic oligonucleotide; AGG chr2 60465692 60465711 60465695 -
tttatgctcattttacagat

SEQ ID NO: 183664 - DNA, 20 bp, Artificial Sequence
  Synthetic oligonucleotide; AAG chr2 60465683 60465702 60465686 -
attttacagataggaattcc

SEQ ID NO: 183665 - DNA, 20 bp, Artificial Sequence
  Synthetic oligonucleotide; CAG chr2 60465677 60465696 60465680 -
cagataggaattccaagact

SEQ ID NO: 183666 - DNA, 20 bp, Artificial Sequence
  Synthetic oligonucleotide; GAG chr2 60465675 60465694 60465678 -
gataggaattccaagactca

SEQ ID NO: 183667 - DNA, 20 bp, Artificial Sequence
  Synthetic oligonucleotide; CAG chr2 60465655 60465674 60465658 -
gagaaatcaaatgactatcc

SEQ ID NO: 183668 - DNA, 20 bp, Artificial Sequence
  Synthetic oligonucleotide; GAG chr2 60465653 60465672 60465656 -
gaaatcaaatgactatccca

SEQ ID NO: 183669 - DNA, 20 bp, Artificial Sequence
  Synthetic oligonucleotide; TAG chr2 60465642 60465661 60465645 -
actatcccagagttacaatc

SEQ ID NO: 183670 - DNA, 20 bp, Artificial Sequence
  Synthetic oligonucleotide; TGG chr2 60465639 60465658 60465642 -
atcccagagttacaatctag

SEQ ID NO: 183671 - DNA, 20 bp, Artificial Sequence
  Synthetic oligonucleotide; TAG chr2 60465632 60465651 60465635 -
agttacaatctagtggataa

SEQ ID NO: 183672 - DNA, 20 bp, Artificial Sequence
  Synthetic oligonucleotide; GAG chr2 60465630 60465649 60465633 -
ttacaatctagtggataata

SEQ ID NO: 183673 - DNA, 20 bp, Artificial Sequence
  Synthetic oligonucleotide; TAG chr2 60465626 60465645 60465629 -
aatctagtggataatagagc

SEQ ID NO: 183674 - DNA, 20 bp, Artificial Sequence
  Synthetic oligonucleotide; AGG chr2 60465625 60465644 60465628 -
atctagtggataatagagct

SEQ ID NO: 183675 - DNA, 20 bp, Artificial Sequence
  Synthetic oligonucleotide; CAG chr2 60465618 60465637 60465621 -
ggataatagagctaggcctc

SEQ ID NO: 183676 - DNA, 20 bp, Artificial Sequence
  Synthetic oligonucleotide; CAG chr2 60465612 60465631 60465615 -
tagagctaggcctccagtct

SEQ ID NO: 183677 - DNA, 20 bp, Artificial Sequence
  Synthetic oligonucleotide; GAG chr2 60465586 60465605 60465589 -
tccttgttcttctgaatctt

SEQ ID NO: 183678 - DNA, 20 bp, Artificial Sequence
  Synthetic oligonucleotide; AGG chr2 60465585 60465604 60465588 -
ccttgttcttctgaatcttg

SEQ ID NO: 183679 - DNA, 20 bp, Artificial Sequence
  Synthetic oligonucleotide; TAG chr2 60465580 60465599 60465583 -
ttcttctgaatcttgaggct

SEQ ID NO: 183680 - DNA, 20 bp, Artificial Sequence
  Synthetic oligonucleotide; TGG chr2 60465557 60465576 60465560 -
atcacatgactttttcacat

SEQ ID NO: 183681 - DNA, 20 bp, Artificial Sequence
  Synthetic oligonucleotide; TAG chr2 60465546 60465565 60465549 -
ttttcacattggtgacatac

SEQ ID NO: 183682 - DNA, 20 bp, Artificial Sequence
  Synthetic oligonucleotide; TGG chr2 60465540 60465559 60465543 -
cattggtgacatactagaaa

SEQ ID NO: 183683 - DNA, 20 bp, Artificial Sequence
  Synthetic oligonucleotide; GGG chr2 60465539 60465558 60465542 -
attggtgacatactagaaat

SEQ ID NO: 183684 - DNA, 20 bp, Artificial Sequence
  Synthetic oligonucleotide; GGG chr2 60465538 60465557 60465541 -
ttggtgacatactagaaatg

SEQ ID NO: 183685 - DNA, 20 bp, Artificial Sequence
  Synthetic oligonucleotide; GGG chr2 60465537 60465556 60465540 -
tggtgacatactagaaatgg

SEQ ID NO: 183686 - DNA, 20 bp, Artificial Sequence
  Synthetic oligonucleotide; AAG chr2 60465519 60465538 60465522 -
gggggtcattccttcccata

SEQ ID NO: 183687 - DNA, 20 bp, Artificial Sequence
  Synthetic oligonucleotide; AAG chr2 60465498 60465517 60465501 -
agtaaaatgaaataaaataa

SEQ ID NO: 183688 - DNA, 20 bp, Artificial Sequence
  Synthetic oligonucleotide; CAG chr2 60465494 60465513 60465497 -
aaatgaaataaaataaaagc

SEQ ID NO: 183689 - DNA, 20 bp, Artificial Sequence
  Synthetic oligonucleotide; TAG chr2 60465491 60465510 60465494 -
tgaaataaaataaaagccag

SEQ ID NO: 183690 - DNA, 20 bp, Artificial Sequence
  Synthetic oligonucleotide; AGG chr2 60465490 60465509 60465493 -
gaaataaaataaaagccagt

SEQ ID NO: 183691 - DNA, 20 bp, Artificial Sequence
  Synthetic oligonucleotide; TGG chr2 60465487 60465506 60465490 -
ataaaataaaagccagtagg

SEQ ID NO: 183692 - DNA, 20 bp, Artificial Sequence
  Synthetic oligonucleotide; GGG chr2 60465486 60465505 60465489 -
taaaataaaagccagtaggt

SEQ ID NO: 183693 - DNA, 20 bp, Artificial Sequence
  Synthetic oligonucleotide; TAG chr2 60465479 60465498 60465482 -
aaagccagtaggtgggctaa

SEQ ID NO: 183694 - DNA, 20 bp, Artificial Sequence
  Synthetic oligonucleotide; AAG chr2 60465451 60465470 60465454 -
tttaacccttttgatgtctc

SEQ ID NO: 183695 - DNA, 20 bp, Artificial Sequence
  Synthetic oligonucleotide; TAG chr2 60465438 60465457 60465441 -
atgtctcaagttcctatgct

SEQ ID NO: 183696 - DNA, 20 bp, Artificial Sequence
  Synthetic oligonucleotide; AGG chr2 60465437 60465456 60465440 -
tgtctcaagttcctatgctt

SEQ ID NO: 183697 - DNA, 20 bp, Artificial Sequence
  Synthetic oligonucleotide; GGG chr2 60465436 60465455 60465439 -
gtctcaagttcctatgctta

SEQ ID NO: 183698 - DNA, 20 bp, Artificial Sequence
  Synthetic oligonucleotide; GGG chr2 60465435 60465454 60465438 -
tctcaagttcctatgcttag

SEQ ID NO: 183699 - DNA, 20 bp, Artificial Sequence
  Synthetic oligonucleotide; CAG chr2 60465431 60465450 60465434 -
aagttcctatgcttaggggc

SEQ ID NO: 183700 - DNA, 20 bp, Artificial Sequence
  Synthetic oligonucleotide; AGG chr2 60465430 60465449 60465433 -
agttcctatgcttaggggcc

SEQ ID NO: 183701 - DNA, 20 bp, Artificial Sequence
  Synthetic oligonucleotide; CAG chr2 60465424 60465443 60465427 -
tatgcttaggggccaggtgt

SEQ ID NO: 183702 - DNA, 20 bp, Artificial Sequence
  Synthetic oligonucleotide; GAG chr2 60465380 60465399 60465383 -
aatccccgtaaatgcccaat

SEQ ID NO: 183703 - DNA, 20 bp, Artificial Sequence
  Synthetic oligonucleotide; AGG chr2 60465379 60465398 60465382 -
atccccgtaaatgcccaatg

SEQ ID NO: 183704 - DNA, 20 bp, Artificial Sequence
  Synthetic oligonucleotide; GAG chr2 60465366 60465385 60465369 -
cccaatgaggctctcaaatt

SEQ ID NO: 183705 - DNA, 20 bp, Artificial Sequence
  Synthetic oligonucleotide; AAG chr2 60465363 60465382 60465366 -
aatgaggctctcaaattgag

SEQ ID NO: 183706 - DNA, 20 bp, Artificial Sequence
  Synthetic oligonucleotide; CAG chr2 60465349 60465368 60465352 -
attgagaagttgattttcat

SEQ ID NO: 183707 - DNA, 20 bp, Artificial Sequence
  Synthetic oligonucleotide; GAG chr2 60465347 60465366 60465350 -
tgagaagttgattttcatca

SEQ ID NO: 183708 - DNA, 20 bp, Artificial Sequence
  Synthetic oligonucleotide; AAG chr2 60465338 60465357 60465341 -
gattttcatcagagtaaatg

SEQ ID NO: 183709 - DNA, 20 bp, Artificial Sequence
  Synthetic oligonucleotide; TAG chr2 60465300 60465319 60465303 -
tacacatcaataaatcaatg

SEQ ID NO: 183710 - DNA, 20 bp, Artificial Sequence
  Synthetic oligonucleotide; CAG chr2 60465281 60465300 60465284 -
gtagccctaattttgccaca

SEQ ID NO: 183711 - DNA, 20 bp, Artificial Sequence
  Synthetic oligonucleotide; AGG chr2 60465280 60465299 60465283 -
tagccctaattttgccacac

SEQ ID NO: 183712 - DNA, 20 bp, Artificial Sequence
  Synthetic oligonucleotide; CAG chr2 60465267 60465286 60465270 -
gccacacaggaaatcaattc

SEQ ID NO: 183713 - DNA, 20 bp, Artificial Sequence
  Synthetic oligonucleotide; AAG chr2 60465248 60465267 60465251 -
ccagtctttctaaatcatca

SEQ ID NO: 183714 - DNA, 20 bp, Artificial Sequence
  Synthetic oligonucleotide; AAG chr2 60465233 60465252 60465236 -
catcaaagatgttatgaaca

SEQ ID NO: 183715 - DNA, 20 bp, Artificial Sequence
  Synthetic oligonucleotide; TGG chr2 60465215 60465234 60465218 -
caaagtaatttcacaaatta

SEQ ID NO: 183716 - DNA, 20 bp, Artificial Sequence
  Synthetic oligonucleotide; AAG chr2 60465211 60465230 60465214 -
gtaatttcacaaattatggc

SEQ ID NO: 183717 - DNA, 20 bp, Artificial Sequence
  Synthetic oligonucleotide; CAG chr2 60465187 60465206 60465190 -
aacacatttattgatgactg

SEQ ID NO: 183718 - DNA, 20 bp, Artificial Sequence
  Synthetic oligonucleotide; TAG chr2 60465182 60465201 60465185 -
atttattgatgactgcagtt

SEQ ID NO: 183719 - DNA, 20 bp, Artificial Sequence
  Synthetic oligonucleotide; AGG chr2 60465181 60465200 60465184 -
tttattgatgactgcagttt

SEQ ID NO: 183720 - DNA, 20 bp, Artificial Sequence
  Synthetic oligonucleotide; TAG chr2 60465174 60465193 60465177 -
atgactgcagtttaggaatt

SEQ ID NO: 183721 - DNA, 20 bp, Artificial Sequence
  Synthetic oligonucleotide; GAG chr2 60465164 60465183 60465167 -
tttaggaatttagaatctgt

SEQ ID NO: 183722 - DNA, 20 bp, Artificial Sequence
  Synthetic oligonucleotide; TGG chr2 60465146 60465165 60465149 -
gtgagcactgtaatataata

SEQ ID NO: 183723 - DNA, 20 bp, Artificial Sequence
  Synthetic oligonucleotide; CGG chr2 60465138 60465157 60465141 -
tgtaatataatatggtacac

SEQ ID NO: 183724 - DNA, 20 bp, Artificial Sequence
  Synthetic oligonucleotide; GAG chr2 60465132 60465151 60465135 -
ataatatggtacaccggcat

SEQ ID NO: 183725 - DNA, 20 bp, Artificial Sequence
  Synthetic oligonucleotide; GAG chr2 60465127 60465146 60465130 -
atggtacaccggcatgagct

SEQ ID NO: 183726 - DNA, 20 bp, Artificial Sequence
  Synthetic oligonucleotide; CAG chr2 60465117 60465136 60465120 -
ggcatgagctgagtgaaata

SEQ ID NO: 183727 - DNA, 20 bp, Artificial Sequence
  Synthetic oligonucleotide; TGG chr2 60465108 60465127 60465111 -
tgagtgaaatacagattata

SEQ ID NO: 183728 - DNA, 20 bp, Artificial Sequence
  Synthetic oligonucleotide; TAG chr2 60465079 60465098 60465082 -
tgtaatgcatcatttgctat

SEQ ID NO: 183729 - DNA, 20 bp, Artificial Sequence
  Synthetic oligonucleotide; TGG chr2 60465076 60465095 60465079 -
aatgcatcatttgctattag

SEQ ID NO: 183730 - DNA, 20 bp, Artificial Sequence
  Synthetic oligonucleotide; TGG chr2 60465071 60465090 60465074 -
atcatttgctattagtggac

SEQ ID NO: 183731 - DNA, 20 bp, Artificial Sequence
  Synthetic oligonucleotide; CAG chr2 60465058 60465077 60465061 -
agtggactggtaataattac

SEQ ID NO: 183732 - DNA, 20 bp, Artificial Sequence
  Synthetic oligonucleotide; AAG chr2 60465050 60465069 60465053 -
ggtaataattaccagtttca

SEQ ID NO: 183733 - DNA, 20 bp, Artificial Sequence
  Synthetic oligonucleotide; CAG chr2 60465047 60465066 60465050 -
aataattaccagtttcaaag

SEQ ID NO: 183734 - DNA, 20 bp, Artificial Sequence
  Synthetic oligonucleotide; TAG chr2 60465026 60465045 60465029 -
agctctctccatgtaatctt

SEQ ID NO: 183735 - DNA, 20 bp, Artificial Sequence
  Synthetic oligonucleotide; CAG chr2 60465011 60465030 60465014 -
atctttagtctcaatcgtaa

SEQ ID NO: 183736 - DNA, 20 bp, Artificial Sequence
  Synthetic oligonucleotide; TAG chr2 60464981 60465000 60464984 -
cattgacattatgattacac

SEQ ID NO: 183737 - DNA, 20 bp, Artificial Sequence
  Synthetic oligonucleotide; TAG chr2 60464964 60464983 60464967 -
cactagctgccctcatgatc

SEQ ID NO: 183738 - DNA, 20 bp, Artificial Sequence
  Synthetic oligonucleotide; TAG chr2 60464955 60464974 60464958 -
ccctcatgatctagaatatc

SEQ ID NO: 183739 - DNA, 20 bp, Artificial Sequence
  Synthetic oligonucleotide; TGG chr2 60464948 60464967 60464951 -
gatctagaatatctagttga

SEQ ID NO: 183740 - DNA, 20 bp, Artificial Sequence
  Synthetic oligonucleotide; GGG chr2 60464947 60464966 60464950 -
atctagaatatctagttgat

SEQ ID NO: 183741 - DNA, 20 bp, Artificial Sequence
  Synthetic oligonucleotide; TAG chr2 60464929 60464948 60464932 -
atgggaatactaaaatgcga

SEQ ID NO: 183742 - DNA, 20 bp, Artificial Sequence
  Synthetic oligonucleotide; AAG chr2 60464898 60464917 60464901 -
gtatgttgtatgctcattat

SEQ ID NO: 183743 - DNA, 20 bp, Artificial Sequence
  Synthetic oligonucleotide; GAG chr2 60464864 60464883 60464867 -
ttttctctgacctgatgtat

SEQ ID NO: 183744 - DNA, 20 bp, Artificial Sequence
  Synthetic oligonucleotide; GAG chr2 60464862 60464881 60464865 -
ttctctgacctgatgtatga

SEQ ID NO: 183745 - DNA, 20 bp, Artificial Sequence
  Synthetic oligonucleotide; GAG chr2 60464860 60464879 60464863 -
ctctgacctgatgtatgaga

SEQ ID NO: 183746 - DNA, 20 bp, Artificial Sequence
  Synthetic oligonucleotide; GAG chr2 60464858 60464877 60464861 -
ctgacctgatgtatgagaga

SEQ ID NO: 183747 - DNA, 20 bp, Artificial Sequence
  Synthetic oligonucleotide; AGG chr2 60464857 60464876 60464860 -
tgacctgatgtatgagagag

SEQ ID NO: 183748 - DNA, 20 bp, Artificial Sequence
  Synthetic oligonucleotide; GGG chr2 60464856 60464875 60464859 -
gacctgatgtatgagagaga

SEQ ID NO: 183749 - DNA, 20 bp, Artificial Sequence
  Synthetic oligonucleotide; GGG chr2 60464855 60464874 60464858 -
acctgatgtatgagagagag

SEQ ID NO: 183750 - DNA, 20 bp, Artificial Sequence
  Synthetic oligonucleotide; GAG chr2 60464853 60464872 60464856 -
ctgatgtatgagagagaggg

SEQ ID NO: 183751 - DNA, 20 bp, Artificial Sequence
  Synthetic oligonucleotide; AGG chr2 60464852 60464871 60464855 -
tgatgtatgagagagagggg

SEQ ID NO: 183752 - DNA, 20 bp, Artificial Sequence
  Synthetic oligonucleotide; CAG chr2 60464840 60464859 60464843 -
gagaggggaggataacatca

SEQ ID NO: 183753 - DNA, 20 bp, Artificial Sequence
  Synthetic oligonucleotide; TAG chr2 60464824 60464843 60464827 -
atcacagtgttaacatactg

SEQ ID NO: 183754 - DNA, 20 bp, Artificial Sequence
  Synthetic oligonucleotide; TGG chr2 60464807 60464826 60464810 -
ctgtagcatgatcacataac

SEQ ID NO: 183755 - DNA, 20 bp, Artificial Sequence
  Synthetic oligonucleotide; AAG chr2 60464794 60464813 60464797 -
acataactggctctgaaaaa

SEQ ID NO: 183756 - DNA, 20 bp, Artificial Sequence
  Synthetic oligonucleotide; TAG chr2 60464789 60464808 60464792 -
actggctctgaaaaaaagtt

SEQ ID NO: 183757 - DNA, 20 bp, Artificial Sequence
  Synthetic oligonucleotide; AGG chr2 60464788 60464807 60464791 -
ctggctctgaaaaaaagttt

SEQ ID NO: 183758 - DNA, 20 bp, Artificial Sequence
  Synthetic oligonucleotide; CAG chr2 60464780 60464799 60464783 -
gaaaaaaagtttaggatgct

SEQ ID NO: 183759 - DNA, 20 bp, Artificial Sequence
  Synthetic oligonucleotide; AGG chr2 60464779 60464798 60464782 -
aaaaaaagtttaggatgctc

SEQ ID NO: 183760 - DNA, 20 bp, Artificial Sequence
  Synthetic oligonucleotide; GGG chr2 60464778 60464797 60464781 -
aaaaaagtttaggatgctca

SEQ ID NO: 183761 - DNA, 20 bp, Artificial Sequence
  Synthetic oligonucleotide; CAG chr2 60464775 60464794 60464778 -
aaagtttaggatgctcaggg

SEQ ID NO: 183762 - DNA, 20 bp, Artificial Sequence
  Synthetic oligonucleotide; TGG chr2 60464762 60464781 60464765 -
ctcagggcagcaaaataaaa

SEQ ID NO: 183763 - DNA, 20 bp, Artificial Sequence
  Synthetic oligonucleotide; AAG chr2 60464746 60464765 60464749 -
aaaatggacttttctcattt

SEQ ID NO: 183764 - DNA, 20 bp, Artificial Sequence
  Synthetic oligonucleotide; AAG chr2 60464734 60464753 60464737 -
tctcatttaagcctttttga

SEQ ID NO: 183765 - DNA, 20 bp, Artificial Sequence
  Synthetic oligonucleotide; AGG chr2 60464733 60464752 60464736 -
ctcatttaagcctttttgaa

SEQ ID NO: 183766 - DNA, 20 bp, Artificial Sequence
  Synthetic oligonucleotide; GAG chr2 60464722 60464741 60464725 -
ctttttgaaaggatacaaat

SEQ ID NO: 183767 - DNA, 20 bp, Artificial Sequence
  Synthetic oligonucleotide; TAG chr2 60464709 60464728 60464712 -
tacaaatgagatccttgatg

SEQ ID NO: 183768 - DNA, 20 bp, Artificial Sequence
  Synthetic oligonucleotide; CAG chr2 60464694 60464713 60464697 -
tgatgtagtgctgtatgcca

SEQ ID NO: 183769 - DNA, 20 bp, Artificial Sequence
  Synthetic oligonucleotide; TGG chr2 60464687 60464706 60464690 -
gtgctgtatgccacagattt

SEQ ID NO: 183770 - DNA, 20 bp, Artificial Sequence
  Synthetic oligonucleotide; TGG chr2 60464661 60464680 60464664 -
ttatcaatgactacaattca

SEQ ID NO: 183771 - DNA, 20 bp, Artificial Sequence
  Synthetic oligonucleotide; CAG chr2 60464646 60464665 60464649 -
attcatggcacatgtgaaac

SEQ ID NO: 183772 - DNA, 20 bp, Artificial Sequence
  Synthetic oligonucleotide; GAG chr2 60464630 60464649 60464633 -
aaaccagcaccactaattat

SEQ ID NO: 183773 - DNA, 20 bp, Artificial Sequence
  Synthetic oligonucleotide; TAG chr2 60464625 60464644 60464628 -
agcaccactaattatgagtc

SEQ ID NO: 183774 - DNA, 20 bp, Artificial Sequence
  Synthetic oligonucleotide; TGG chr2 60464619 60464638 60464622 -
actaattatgagtctagtcc

SEQ ID NO: 183775 - DNA, 20 bp, Artificial Sequence
  Synthetic oligonucleotide; AAG chr2 60464597 60464616 60464600 -
gatttcaatcgatgttttat

SEQ ID NO: 183776 - DNA, 20 bp, Artificial Sequence
  Synthetic oligonucleotide; AGG chr2 60464596 60464615 60464599 -
atttcaatcgatgttttata

SEQ ID NO: 183777 - DNA, 20 bp, Artificial Sequence
  Synthetic oligonucleotide; AAG chr2 60464579 60464598 60464582 -
ataaggtaaaatataatttt

SEQ ID NO: 183778 - DNA, 20 bp, Artificial Sequence
  Synthetic oligonucleotide; AGG chr2 60464578 60464597 60464581 -
taaggtaaaatataatttta

SEQ ID NO: 183779 - DNA, 20 bp, Artificial Sequence
  Synthetic oligonucleotide; TGG chr2 60464571 60464590 60464574 -
aaatataattttaaggcatt

SEQ ID NO: 183780 - DNA, 20 bp, Artificial Sequence
  Synthetic oligonucleotide; GAG chr2 60464569 60464588 60464572 -
atataattttaaggcatttg

SEQ ID NO: 183781 - DNA, 20 bp, Artificial Sequence
  Synthetic oligonucleotide; AAG chr2 60464553 60464572 60464556 -
tttggagtgatgaacgtgtt

SEQ ID NO: 183782 - DNA, 20 bp, Artificial Sequence
  Synthetic oligonucleotide; AGG chr2 60464552 60464571 60464555 -
ttggagtgatgaacgtgtta

SEQ ID NO: 183783 - DNA, 20 bp, Artificial Sequence
  Synthetic oligonucleotide; TGG chr2 60464546 60464565 60464549 -
tgatgaacgtgttaaggact

SEQ ID NO: 183784 - DNA, 20 bp, Artificial Sequence
  Synthetic oligonucleotide; CAG chr2 60464538 60464557 60464541 -
gtgttaaggacttggattat

SEQ ID NO: 183785 - DNA, 20 bp, Artificial Sequence
  Synthetic oligonucleotide; CAG chr2 60464511 60464530 60464514 -
atctttttacttgcccaact

SEQ ID NO: 183786 - DNA, 20 bp, Artificial Sequence
  Synthetic oligonucleotide; CAG chr2 60464503 60464522 60464506 -
acttgcccaactcagatcgt

SEQ ID NO: 183787 - DNA, 20 bp, Artificial Sequence
  Synthetic oligonucleotide; AGG chr2 60464502 60464521 60464505 -
cttgcccaactcagatcgtc

SEQ ID NO: 183788 - DNA, 20 bp, Artificial Sequence
  Synthetic oligonucleotide; TAG chr2 60464494 60464513 60464497 -
actcagatcgtcaggctaaa

SEQ ID NO: 183789 - DNA, 20 bp, Artificial Sequence
  Synthetic oligonucleotide; AGG chr2 60464493 60464512 60464496 -
ctcagatcgtcaggctaaat

SEQ ID NO: 183790 - DNA, 20 bp, Artificial Sequence
  Synthetic oligonucleotide; TAG chr2 60464485 60464504 60464488 -
gtcaggctaaataggaatga

SEQ ID NO: 183791 - DNA, 20 bp, Artificial Sequence
  Synthetic oligonucleotide; CAG chr2 60464477 60464496 60464480 -
aaataggaatgatagtcacc

SEQ ID NO: 183792 - DNA, 20 bp, Artificial Sequence
  Synthetic oligonucleotide; GAG chr2 60464475 60464494 60464478 -
ataggaatgatagtcaccca

SEQ ID NO: 183793 - DNA, 20 bp, Artificial Sequence
  Synthetic oligonucleotide; TAG chr2 60464469 60464488 60464472 -
atgatagtcacccagagatc

SEQ ID NO: 183794 - DNA, 20 bp, Artificial Sequence
  Synthetic oligonucleotide; AGG chr2 60464468 60464487 60464471 -
tgatagtcacccagagatct

SEQ ID NO: 183795 - DNA, 20 bp, Artificial Sequence
  Synthetic oligonucleotide; GGG chr2 60464467 60464486 60464470 -
gatagtcacccagagatcta

SEQ ID NO: 183796 - DNA, 20 bp, Artificial Sequence
  Synthetic oligonucleotide; GAG chr2 60464465 60464484 60464468 -
tagtcacccagagatctagg

SEQ ID NO: 183797 - DNA, 20 bp, Artificial Sequence
  Synthetic oligonucleotide; AGG chr2 60464464 60464483 60464467 -
agtcacccagagatctaggg

SEQ ID NO: 183798 - DNA, 20 bp, Artificial Sequence
  Synthetic oligonucleotide; AAG chr2 60464459 60464478 60464462 -
cccagagatctagggaggac

SEQ ID NO: 183799 - DNA, 20 bp, Artificial Sequence
  Synthetic oligonucleotide; AGG chr2 60464458 60464477 60464461 -
ccagagatctagggaggaca

SEQ ID NO: 183800 - DNA, 20 bp, Artificial Sequence
  Synthetic oligonucleotide; GAG chr2 60464456 60464475 60464459 -
agagatctagggaggacaag

SEQ ID NO: 183801 - DNA, 20 bp, Artificial Sequence
  Synthetic oligonucleotide; AGG chr2 60464455 60464474 60464458 -
gagatctagggaggacaagg

SEQ ID NO: 183802 - DNA, 20 bp, Artificial Sequence
  Synthetic oligonucleotide; AAG chr2 60464452 60464471 60464455 -
atctagggaggacaaggagg

SEQ ID NO: 183803 - DNA, 20 bp, Artificial Sequence
  Synthetic oligonucleotide; CAG chr2 60464446 60464465 60464449 -
ggaggacaaggaggaagcca

SEQ ID NO: 183804 - DNA, 20 bp, Artificial Sequence
  Synthetic oligonucleotide; GAG chr2 60464444 60464463 60464447 -
aggacaaggaggaagccaca

SEQ ID NO: 183805 - DNA, 20 bp, Artificial Sequence
  Synthetic oligonucleotide; AGG chr2 60464443 60464462 60464446 -
ggacaaggaggaagccacag

SEQ ID NO: 183806 - DNA, 20 bp, Artificial Sequence
  Synthetic oligonucleotide; TAG chr2 60464434 60464453 60464437 -
ggaagccacagaggatcatg

SEQ ID NO: 183807 - DNA, 20 bp, Artificial Sequence
  Synthetic oligonucleotide; TGG chr2 60464430 60464449 60464433 -
gccacagaggatcatgtagt

SEQ ID NO: 183808 - DNA, 20 bp, Artificial Sequence
  Synthetic oligonucleotide; CAG chr2 60464424 60464443 60464427 -
gaggatcatgtagttggaac

SEQ ID NO: 183809 - DNA, 20 bp, Artificial Sequence
  Synthetic oligonucleotide; TAG chr2 60464420 60464439 60464423 -
atcatgtagttggaaccaga

SEQ ID NO: 183810 - DNA, 20 bp, Artificial Sequence
  Synthetic oligonucleotide; CAG chr2 60464408 60464427 60464411 -
gaaccagatagttttttttc

SEQ ID NO: 183811 - DNA, 20 bp, Artificial Sequence
  Synthetic oligonucleotide; TGG chr2 60464399 60464418 60464402 -
agttttttttccagcctatt

SEQ ID NO: 183812 - DNA, 20 bp, Artificial Sequence
  Synthetic oligonucleotide; GGG chr2 60464398 60464417 60464401 -
gttttttttccagcctattt

SEQ ID NO: 183813 - DNA, 20 bp, Artificial Sequence
  Synthetic oligonucleotide; AAG chr2 60464391 60464410 60464394 -
ttccagcctatttgggaccc

SEQ ID NO: 183814 - DNA, 20 bp, Artificial Sequence
  Synthetic oligonucleotide; AAG chr2 60464343 60464362 60464346 -
ttataaaaatgttctcaatg

SEQ ID NO: 183815 - DNA, 20 bp, Artificial Sequence
  Synthetic oligonucleotide; AAG chr2 60464323 60464342 60464326 -
aagctttttatttccctttg

SEQ ID NO: 183816 - DNA, 20 bp, Artificial Sequence
  Synthetic oligonucleotide; GAG chr2 60464321 60464340 60464324 -
gctttttatttccctttgaa

SEQ ID NO: 183817 - DNA, 20 bp, Artificial Sequence
  Synthetic oligonucleotide; GAG chr2 60464319 60464338 60464322 -
tttttatttccctttgaaga

SEQ ID NO: 183818 - DNA, 20 bp, Artificial Sequence
  Synthetic oligonucleotide; AGG chr2 60464318 60464337 60464321 -
ttttatttccctttgaagag

SEQ ID NO: 183819 - DNA, 20 bp, Artificial Sequence
  Synthetic oligonucleotide; GAG chr2 60464316 60464335 60464319 -
ttatttccctttgaagagag

SEQ ID NO: 183820 - DNA, 20 bp, Artificial Sequence
  Synthetic oligonucleotide; AGG chr2 60464315 60464334 60464318 -
tatttccctttgaagagagg

SEQ ID NO: 183821 - DNA, 20 bp, Artificial Sequence
  Synthetic oligonucleotide; TAG chr2 60464302 60464321 60464305 -
agagaggaggcaaacaaaaa

SEQ ID NO: 183822 - DNA, 20 bp, Artificial Sequence
  Synthetic oligonucleotide; AGG chr2 60464301 60464320 60464304 -
gagaggaggcaaacaaaaat

SEQ ID NO: 183823 - DNA, 20 bp, Artificial Sequence
  Synthetic oligonucleotide; CAG chr2 60464298 60464317 60464301 -
aggaggcaaacaaaaatagg

SEQ ID NO: 183824 - DNA, 20 bp, Artificial Sequence
  Synthetic oligonucleotide; CAG chr2 60464277 60464296 60464280 -
agataatgtgatactaatgt

SEQ ID NO: 183825 - DNA, 20 bp, Artificial Sequence
  Synthetic oligonucleotide; TAG chr2 60464230 60464249 60464233 -
cttttttcccccttccacat

SEQ ID NO: 183826 - DNA, 20 bp, Artificial Sequence
  Synthetic oligonucleotide; TGG chr2 60464205 60464224 60464208 -
aaatgtttgaaacctaattt

SEQ ID NO: 183827 - DNA, 20 bp, Artificial Sequence
  Synthetic oligonucleotide; AAG chr2 60464179 60464198 60464182 -
cttaccatctaatcttgttt

SEQ ID NO: 183828 - DNA, 20 bp, Artificial Sequence
  Synthetic oligonucleotide; GAG chr2 60464177 60464196 60464180 -
taccatctaatcttgtttaa

SEQ ID NO: 183829 - DNA, 20 bp, Artificial Sequence
  Synthetic oligonucleotide; CAG chr2 60464167 60464186 60464170 -
tcttgtttaagagatttacc

SEQ ID NO: 183830 - DNA, 20 bp, Artificial Sequence
  Synthetic oligonucleotide; AGG chr2 60464166 60464185 60464169 -
cttgtttaagagatttaccc

SEQ ID NO: 183831 - DNA, 20 bp, Artificial Sequence
  Synthetic oligonucleotide; GAG chr2 60464164 60464183 60464167 -
tgtttaagagatttacccag

SEQ ID NO: 183832 - DNA, 20 bp, Artificial Sequence
  Synthetic oligonucleotide; GAG chr2 60464160 60464179 60464163 -
taagagatttacccaggagt

SEQ ID NO: 183833 - DNA, 20 bp, Artificial Sequence
  Synthetic oligonucleotide; GAG chr2 60464150 60464169 60464153 -
acccaggagtgagatatatt

SEQ ID NO: 183834 - DNA, 20 bp, Artificial Sequence
  Synthetic oligonucleotide; TGG chr2 60464147 60464166 60464150 -
caggagtgagatatattgag

SEQ ID NO: 183835 - DNA, 20 bp, Artificial Sequence
  Synthetic oligonucleotide; GGG chr2 60464146 60464165 60464149 -
aggagtgagatatattgagt

SEQ ID NO: 183836 - DNA, 20 bp, Artificial Sequence
  Synthetic oligonucleotide; AAG chr2 60464126 60464145 60464129 -
gggattataaatgcgttgta

SEQ ID NO: 183837 - DNA, 20 bp, Artificial Sequence
  Synthetic oligonucleotide; AAG chr2 60464115 60464134 60464118 -
tgcgttgtaaagtaaattac

SEQ ID NO: 183838 - DNA, 20 bp, Artificial Sequence
  Synthetic oligonucleotide; AGG chr2 60464114 60464133 60464117 -
gcgttgtaaagtaaattaca

SEQ ID NO: 183839 - DNA, 20 bp, Artificial Sequence
  Synthetic oligonucleotide; CAG chr2 60464110 60464129 60464113 -
tgtaaagtaaattacaaggt

SEQ ID NO: 183840 - DNA, 20 bp, Artificial Sequence
  Synthetic oligonucleotide; AGG chr2 60464109 60464128 60464112 -
gtaaagtaaattacaaggtc

SEQ ID NO: 183841 - DNA, 20 bp, Artificial Sequence
  Synthetic oligonucleotide; GGG chr2 60464108 60464127 60464111 -
taaagtaaattacaaggtca

SEQ ID NO: 183842 - DNA, 20 bp, Artificial Sequence
  Synthetic oligonucleotide; CAG chr2 60464105 60464124 60464108 -
agtaaattacaaggtcaggg

SEQ ID NO: 183843 - DNA, 20 bp, Artificial Sequence
  Synthetic oligonucleotide; AGG chr2 60464104 60464123 60464107 -
gtaaattacaaggtcagggc

SEQ ID NO: 183844 - DNA, 20 bp, Artificial Sequence
  Synthetic oligonucleotide; GAG chr2 60464102 60464121 60464105 -
aaattacaaggtcagggcag

SEQ ID NO: 183845 - DNA, 20 bp, Artificial Sequence
  Synthetic oligonucleotide; TAG chr2 60464090 60464109 60464093 -
cagggcaggagtccattatt

SEQ ID NO: 183846 - DNA, 20 bp, Artificial Sequence
  Synthetic oligonucleotide; AAG chr2 60464085 60464104 60464088 -
caggagtccattatttagac

SEQ ID NO: 183847 - DNA, 20 bp, Artificial Sequence
  Synthetic oligonucleotide; GAG chr2 60464077 60464096 60464080 -
cattatttagacaagtgctt

SEQ ID NO: 183848 - DNA, 20 bp, Artificial Sequence
  Synthetic oligonucleotide; GAG chr2 60464073 60464092 60464076 -
atttagacaagtgcttgagc

SEQ ID NO: 183849 - DNA, 20 bp, Artificial Sequence
  Synthetic oligonucleotide; AGG chr2 60464072 60464091 60464075 -
tttagacaagtgcttgagcg

SEQ ID NO: 183850 - DNA, 20 bp, Artificial Sequence
  Synthetic oligonucleotide; TGG chr2 60464068 60464087 60464071 -
gacaagtgcttgagcgaggc

SEQ ID NO: 183851 - DNA, 20 bp, Artificial Sequence
  Synthetic oligonucleotide; TGG chr2 60464058 60464077 60464061 -
tgagcgaggctggcttattt

SEQ ID NO: 183852 - DNA, 20 bp, Artificial Sequence
  Synthetic oligonucleotide; CAG chr2 60464050 60464069 60464053 -
gctggcttattttggaatac

SEQ ID NO: 183853 - DNA, 20 bp, Artificial Sequence
  Synthetic oligonucleotide; TGG chr2 60464043 60464062 60464046 -
tattttggaataccagtgtt

SEQ ID NO: 183854 - DNA, 20 bp, Artificial Sequence
  Synthetic oligonucleotide; GGG chr2 60464042 60464061 60464045 -
attttggaataccagtgttt

SEQ ID NO: 183855 - DNA, 20 bp, Artificial Sequence
  Synthetic oligonucleotide; GGG chr2 60464041 60464060 60464044 -
ttttggaataccagtgtttg

SEQ ID NO: 183856 - DNA, 20 bp, Artificial Sequence
  Synthetic oligonucleotide; GGG chr2 60464040 60464059 60464043 -
tttggaataccagtgtttgg

SEQ ID NO: 183857 - DNA, 20 bp, Artificial Sequence
  Synthetic oligonucleotide; GAG chr2 60464032 60464051 60464035 -
accagtgtttgggggctcct

SEQ ID NO: 183858 - DNA, 20 bp, Artificial Sequence
  Synthetic oligonucleotide; AAG chr2 60464029 60464048 60464032 -
agtgtttgggggctcctgag

SEQ ID NO: 183859 - DNA, 20 bp, Artificial Sequence
  Synthetic oligonucleotide; CGG chr2 60464019 60464038 60464022 -
ggctcctgagaagaccctgc

SEQ ID NO: 183860 - DNA, 20 bp, Artificial Sequence
  Synthetic oligonucleotide; TGG chr2 60463994 60464013 60463997 -
tttctttctgacttgctaaa

SEQ ID NO: 183861 - DNA, 20 bp, Artificial Sequence
  Synthetic oligonucleotide; GAG chr2 60463992 60464011 60463995 -
tctttctgacttgctaaatg

SEQ ID NO: 183862 - DNA, 20 bp, Artificial Sequence
  Synthetic oligonucleotide; AGG chr2 60463991 60464010 60463994 -
ctttctgacttgctaaatgg

SEQ ID NO: 183863 - DNA, 20 bp, Artificial Sequence
  Synthetic oligonucleotide; TGG chr2 60463944 60463963 60463947 -
attctcactcttaacctccc

SEQ ID NO: 183864 - DNA, 20 bp, Artificial Sequence
  Synthetic oligonucleotide; TAG chr2 60463941 60463960 60463944 -
ctcactcttaacctccctgg

SEQ ID NO: 183865 - DNA, 20 bp, Artificial Sequence
  Synthetic oligonucleotide; TAG chr2 60463917 60463936 60463920 -
ttttttttttttttccttct

SEQ ID NO: 183866 - DNA, 20 bp, Artificial Sequence
  Synthetic oligonucleotide; AAG chr2 60463913 60463932 60463916 -
ttttttttttccttcttaga

SEQ ID NO: 183867 - DNA, 20 bp, Artificial Sequence
  Synthetic oligonucleotide; TAG chr2 60463896 60463915 60463899 -
agaaagttactgacaaatac

SEQ ID NO: 183868 - DNA, 20 bp, Artificial Sequence
  Synthetic oligonucleotide; TGG chr2 60463890 60463909 60463893 -
ttactgacaaatactagctg

SEQ ID NO: 183869 - DNA, 20 bp, Artificial Sequence
  Synthetic oligonucleotide; AAG chr2 60463882 60463901 60463885 -
aaatactagctgtggcctta

SEQ ID NO: 183870 - DNA, 20 bp, Artificial Sequence
  Synthetic oligonucleotide; CAG chr2 60463871 60463890 60463874 -
gtggccttaaagaactcttg

SEQ ID NO: 183871 - DNA, 20 bp, Artificial Sequence
  Synthetic oligonucleotide; AAG chr2 60463856 60463875 60463859 -
tcttgcagcccttcttttaa

SEQ ID NO: 183872 - DNA, 20 bp, Artificial Sequence
  Synthetic oligonucleotide; AAG chr2 60463853 60463872 60463856 -
tgcagcccttcttttaaaag

SEQ ID NO: 183873 - DNA, 20 bp, Artificial Sequence
  Synthetic oligonucleotide; AGG chr2 60463852 60463871 60463855 -
gcagcccttcttttaaaaga

SEQ ID NO: 183874 - DNA, 20 bp, Artificial Sequence
  Synthetic oligonucleotide; GAG chr2 60463850 60463869 60463853 -
agcccttcttttaaaagaag

SEQ ID NO: 183875 - DNA, 20 bp, Artificial Sequence
  Synthetic oligonucleotide; AAG chr2 60463845 60463864 60463848 -
ttcttttaaaagaaggagaa

SEQ ID NO: 183876 - DNA, 20 bp, Artificial Sequence
  Synthetic oligonucleotide; CAG chr2 60463830 60463849 60463833 -
gagaaaagtttgttatttct

SEQ ID NO: 183877 - DNA, 20 bp, Artificial Sequence
  Synthetic oligonucleotide; AAG chr2 60463818 60463837 60463821 -
ttatttctcagttatatttt

SEQ ID NO: 183878 - DNA, 20 bp, Artificial Sequence
  Synthetic oligonucleotide; AGG chr2 60463817 60463836 60463820 -
tatttctcagttatatttta

SEQ ID NO: 183879 - DNA, 20 bp, Artificial Sequence
  Synthetic oligonucleotide; CAG chr2 60463804 60463823 60463807 -
tattttaaggcttttttttt

SEQ ID NO: 183880 - DNA, 20 bp, Artificial Sequence
  Synthetic oligonucleotide; TGG chr2 60463795 60463814 60463798 -
gctttttttttcagaatctc

SEQ ID NO: 183881 - DNA, 20 bp, Artificial Sequence
  Synthetic oligonucleotide; GGG chr2 60463794 60463813 60463797 -
ctttttttttcagaatctct

SEQ ID NO: 183882 - DNA, 20 bp, Artificial Sequence
  Synthetic oligonucleotide; AAG chr2 60463791 60463810 60463794 -
tttttttcagaatctctggg

SEQ ID NO: 183883 - DNA, 20 bp, Artificial Sequence
  Synthetic oligonucleotide; TGG chr2 60463763 60463782 60463766 -
tttttctcatcctcgtcctt

SEQ ID NO: 183884 - DNA, 20 bp, Artificial Sequence
  Synthetic oligonucleotide; CAG chr2 60463730 60463749 60463733 -
ttctgccctttttaatgttg

SEQ ID NO: 183885 - DNA, 20 bp, Artificial Sequence
  Synthetic oligonucleotide; TAG chr2 60463722 60463741 60463725 -
tttttaatgttgcagttgac

SEQ ID NO: 183886 - DNA, 20 bp, Artificial Sequence
  Synthetic oligonucleotide; TGG chr2 60463711 60463730 60463714 -
gcagttgactagtaaactgt

SEQ ID NO: 183887 - DNA, 20 bp, Artificial Sequence
  Synthetic oligonucleotide; CAG chr2 60463707 60463726 60463710 -
ttgactagtaaactgttggt

SEQ ID NO: 183888 - DNA, 20 bp, Artificial Sequence
  Synthetic oligonucleotide; TAG chr2 60463677 60463696 60463680 -
atatatatatatatttaatg

SEQ ID NO: 183889 - DNA, 20 bp, Artificial Sequence
  Synthetic oligonucleotide; TAG chr2 60463650 60463669 60463653 -
ctccccatatatatttaatt

SEQ ID NO: 183890 - DNA, 20 bp, Artificial Sequence
  Synthetic oligonucleotide; AAG chr2 60463620 60463639 60463623 -
cccaaatgaaatattttgtg

SEQ ID NO: 183891 - DNA, 20 bp, Artificial Sequence
  Synthetic oligonucleotide; AAG chr2 60463615 60463634 60463618 -
atgaaatattttgtgaagtc

SEQ ID NO: 183892 - DNA, 20 bp, Artificial Sequence
  Synthetic oligonucleotide; TGG chr2 60463611 60463630 60463614 -
aatattttgtgaagtcaagc

SEQ ID NO: 183893 - DNA, 20 bp, Artificial Sequence
  Synthetic oligonucleotide; AAG chr2 60463595 60463614 60463598 -
aagctggcccttctttgcca

SEQ ID NO: 183894 - DNA, 20 bp, Artificial Sequence
  Synthetic oligonucleotide; TGG chr2 60463592 60463611 60463595 -
ctggcccttctttgccaaag

SEQ ID NO: 183895 - DNA, 20 bp, Artificial Sequence
  Synthetic oligonucleotide; TGG chr2 60463576 60463595 60463579 -
aaagtggcatttaccactct

SEQ ID NO: 183896 - DNA, 20 bp, Artificial Sequence
  Synthetic oligonucleotide; GGG chr2 60463575 60463594 60463578 -
aagtggcatttaccactctt

SEQ ID NO: 183897 - DNA, 20 bp, Artificial Sequence
  Synthetic oligonucleotide; CAG chr2 60463565 60463584 60463568 -
taccactcttgggttctttt

SEQ ID NO: 183898 - DNA, 20 bp, Artificial Sequence
  Synthetic oligonucleotide; AAG chr2 60463561 60463580 60463564 -
actcttgggttcttttcagc

SEQ ID NO: 183899 - DNA, 20 bp, Artificial Sequence
  Synthetic oligonucleotide; AGG chr2 60463560 60463579 60463563 -
ctcttgggttcttttcagca

SEQ ID NO: 183900 - DNA, 20 bp, Artificial Sequence
  Synthetic oligonucleotide; GGG chr2 60463559 60463578 60463562 -
tcttgggttcttttcagcaa

SEQ ID NO: 183901 - DNA, 20 bp, Artificial Sequence
  Synthetic oligonucleotide; AAG chr2 60463542 60463561 60463545 -
caagggaaataatgtgactt

SEQ ID NO: 183902 - DNA, 20 bp, Artificial Sequence
  Synthetic oligonucleotide; CAG chr2 60463539 60463558 60463542 -
gggaaataatgtgacttaag

SEQ ID NO: 183903 - DNA, 20 bp, Artificial Sequence
  Synthetic oligonucleotide; AGG chr2 60463538 60463557 60463541 -
ggaaataatgtgacttaagc

SEQ ID NO: 183904 - DNA, 20 bp, Artificial Sequence
  Synthetic oligonucleotide; GGG chr2 60463537 60463556 60463540 -
gaaataatgtgacttaagca

SEQ ID NO: 183905 - DNA, 20 bp, Artificial Sequence
  Synthetic oligonucleotide; CAG chr2 60463526 60463545 60463529 -
acttaagcagggcccctctc

SEQ ID NO: 183906 - DNA, 20 bp, Artificial Sequence
  Synthetic oligonucleotide; CGG chr2 60463522 60463541 60463525 -
aagcagggcccctctccaga

SEQ ID NO: 183907 - DNA, 20 bp, Artificial Sequence
  Synthetic oligonucleotide; TGG chr2 60463517 60463536 60463520 -
gggcccctctccagacggct

SEQ ID NO: 183908 - DNA, 20 bp, Artificial Sequence
  Synthetic oligonucleotide; TGG chr2 60463510 60463529 60463513 -
tctccagacggcttggctac

SEQ ID NO: 183909 - DNA, 20 bp, Artificial Sequence
  Synthetic oligonucleotide; CAG chr2 60463506 60463525 60463509 -
cagacggcttggctactggc

SEQ ID NO: 183910 - DNA, 20 bp, Artificial Sequence
  Synthetic oligonucleotide; GAG chr2 60463504 60463523 60463507 -
gacggcttggctactggcca

SEQ ID NO: 183911 - DNA, 20 bp, Artificial Sequence
  Synthetic oligonucleotide; TAG chr2 60463496 60463515 60463499 -
ggctactggccagagttgac

SEQ ID NO: 183912 - DNA, 20 bp, Artificial Sequence
  Synthetic oligonucleotide; TGG chr2 60463462 60463481 60463465 -
ctttctgtttctttctcaac

SEQ ID NO: 183913 - DNA, 20 bp, Artificial Sequence
  Synthetic oligonucleotide; GAG chr2 60463460 60463479 60463463 -
ttctgtttctttctcaactg

SEQ ID NO: 183914 - DNA, 20 bp, Artificial Sequence
  Synthetic oligonucleotide; GAG chr2 60463455 60463474 60463458 -
tttctttctcaactggagct

SEQ ID NO: 183915 - DNA, 20 bp, Artificial Sequence
  Synthetic oligonucleotide; CAG chr2 60463449 60463468 60463452 -
tctcaactggagctgagtcc

SEQ ID NO: 183916 - DNA, 20 bp, Artificial Sequence
  Synthetic oligonucleotide; GAG chr2 60463444 60463463 60463447 -
actggagctgagtcccagcc

SEQ ID NO: 183917 - DNA, 20 bp, Artificial Sequence
  Synthetic oligonucleotide; AGG chr2 60463443 60463462 60463446 -
ctggagctgagtcccagccg

SEQ ID NO: 183918 - DNA, 20 bp, Artificial Sequence
  Synthetic oligonucleotide; GGG chr2 60463442 60463461 60463445 -
tggagctgagtcccagccga

SEQ ID NO: 183919 - DNA, 20 bp, Artificial Sequence
  Synthetic oligonucleotide; CAG chr2 60463437 60463456 60463440 -
ctgagtcccagccgagggcg

SEQ ID NO: 183920 - DNA, 20 bp, Artificial Sequence
  Synthetic oligonucleotide; AGG chr2 60463436 60463455 60463439 -
tgagtcccagccgagggcgc

SEQ ID NO: 183921 - DNA, 20 bp, Artificial Sequence
  Synthetic oligonucleotide; TGG chr2 60463420 60463439 60463423 -
gcgcaggatgttgtataatt

SEQ ID NO: 183922 - DNA, 20 bp, Artificial Sequence
  Synthetic oligonucleotide; TAG chr2 60463407 60463426 60463410 -
tataatttggttcacgttgt

SEQ ID NO: 183923 - DNA, 20 bp, Artificial Sequence
  Synthetic oligonucleotide; GAG chr2 60463390 60463409 60463393 -
tgttagcctctcaaaacaat

SEQ ID NO: 183924 - DNA, 20 bp, Artificial Sequence
  Synthetic oligonucleotide; AGG chr2 60463389 60463408 60463392 -
gttagcctctcaaaacaatg

SEQ ID NO: 183925 - DNA, 20 bp, Artificial Sequence
  Synthetic oligonucleotide; GAG chr2 60463387 60463406 60463390 -
tagcctctcaaaacaatgag

SEQ ID NO: 183926 - DNA, 20 bp, Artificial Sequence
  Synthetic oligonucleotide; AGG chr2 60463386 60463405 60463389 -
agcctctcaaaacaatgagg

SEQ ID NO: 183927 - DNA, 20 bp, Artificial Sequence
  Synthetic oligonucleotide; GAG chr2 60463384 60463403 60463387 -
cctctcaaaacaatgaggag

SEQ ID NO: 183928 - DNA, 20 bp, Artificial Sequence
  Synthetic oligonucleotide; AGG chr2 60463383 60463402 60463386 -
ctctcaaaacaatgaggagg

SEQ ID NO: 183929 - DNA, 20 bp, Artificial Sequence
  Synthetic oligonucleotide; TAG chr2 60463379 60463398 60463382 -
caaaacaatgaggaggagga

SEQ ID NO: 183930 - DNA, 20 bp, Artificial Sequence
  Synthetic oligonucleotide; TAG chr2 60463374 60463393 60463377 -
caatgaggaggaggatagtg

SEQ ID NO: 183931 - DNA, 20 bp, Artificial Sequence
  Synthetic oligonucleotide; CAG chr2 60463364 60463383 60463367 -
gaggatagtgtagcatttct

SEQ ID NO: 183932 - DNA, 20 bp, Artificial Sequence
  Synthetic oligonucleotide; TGG chr2 60463347 60463366 60463350 -
tctcagcctgctgcctgtca

SEQ ID NO: 183933 - DNA, 20 bp, Artificial Sequence
  Synthetic oligonucleotide; TGG chr2 60463341 60463360 60463344 -
cctgctgcctgtcatggcgc

SEQ ID NO: 183934 - DNA, 20 bp, Artificial Sequence
  Synthetic oligonucleotide; TAG chr2 60463316 60463335 60463319 -
gttttaactgttccttaaac

SEQ ID NO: 183935 - DNA, 20 bp, Artificial Sequence
  Synthetic oligonucleotide; AGG chr2 60463315 60463334 60463318 -
ttttaactgttccttaaact

SEQ ID NO: 183936 - DNA, 20 bp, Artificial Sequence
  Synthetic oligonucleotide; AAG chr2 60463297 60463316 60463300 -
ctaggatgctgtgtctgctt

SEQ ID NO: 183937 - DNA, 20 bp, Artificial Sequence
  Synthetic oligonucleotide; CGG chr2 60463293 60463312 60463296 -
gatgctgtgtctgcttaagt

SEQ ID NO: 183938 - DNA, 20 bp, Artificial Sequence
  Synthetic oligonucleotide; CAG chr2 60463287 60463306 60463290 -
gtgtctgcttaagtcggcac

SEQ ID NO: 183939 - DNA, 20 bp, Artificial Sequence
  Synthetic oligonucleotide; CAG chr2 60463265 60463284 60463268 -
gccactcctcctaacttttc

SEQ ID NO: 183940 - DNA, 20 bp, Artificial Sequence
  Synthetic oligonucleotide; CGG chr2 60463245 60463264 60463248 -
cagacttgcatttgtctgac

SEQ ID NO: 183941 - DNA, 20 bp, Artificial Sequence
  Synthetic oligonucleotide; GGG chr2 60463244 60463263 60463247 -
agacttgcatttgtctgacc

SEQ ID NO: 183942 - DNA, 20 bp, Artificial Sequence
  Synthetic oligonucleotide; GGG chr2 60463243 60463262 60463246 -
gacttgcatttgtctgaccg

SEQ ID NO: 183943 - DNA, 20 bp, Artificial Sequence
  Synthetic oligonucleotide; GGG chr2 60463242 60463261 60463245 -
acttgcatttgtctgaccgg

SEQ ID NO: 183944 - DNA, 20 bp, Artificial Sequence
  Synthetic oligonucleotide; AAG chr2 60463229 60463248 60463232 -
tgaccgggggacaactccta

SEQ ID NO: 183945 - DNA, 20 bp, Artificial Sequence
  Synthetic oligonucleotide; TGG chr2 60463224 60463243 60463227 -
gggggacaactcctaaagat

SEQ ID NO: 183946 - DNA, 20 bp, Artificial Sequence
  Synthetic oligonucleotide; CAG chr2 60463218 60463237 60463221 -
caactcctaaagattggata

SEQ ID NO: 183947 - DNA, 20 bp, Artificial Sequence
  Synthetic oligonucleotide; AAG chr2 60463194 60463213 60463197 -
ctatccgttaaatctgaatg

SEQ ID NO: 183948 - DNA, 20 bp, Artificial Sequence
  Synthetic oligonucleotide; CAG chr2 60463182 60463201 60463185 -
tctgaatgaagtttttcttt

SEQ ID NO: 183949 - DNA, 20 bp, Artificial Sequence
  Synthetic oligonucleotide; GAG chr2 60463161 60463180 60463164 -
agattttttaaacattcttt

SEQ ID NO: 183950 - DNA, 20 bp, Artificial Sequence
  Synthetic oligonucleotide; TGG chr2 60463151 60463170 60463154 -
aacattctttgagataaaaa

SEQ ID NO: 183951 - DNA, 20 bp, Artificial Sequence
  Synthetic oligonucleotide; TGG chr2 60463139 60463158 60463142 -
gataaaaatggacgtcccca

SEQ ID NO: 183952 - DNA, 20 bp, Artificial Sequence
  Synthetic oligonucleotide; GGG chr2 60463138 60463157 60463141 -
ataaaaatggacgtccccat

SEQ ID NO: 183953 - DNA, 20 bp, Artificial Sequence
  Synthetic oligonucleotide; GGG chr2 60463137 60463156 60463140 -
taaaaatggacgtccccatg

SEQ ID NO: 183954 - DNA, 20 bp, Artificial Sequence
  Synthetic oligonucleotide; TGG chr2 60463129 60463148 60463132 -
gacgtccccatggggtgttg

SEQ ID NO: 183955 - DNA, 20 bp, Artificial Sequence
  Synthetic oligonucleotide; TGG chr2 60463117 60463136 60463120 -
gggtgttgtggaaccaaaat

SEQ ID NO: 183956 - DNA, 20 bp, Artificial Sequence
  Synthetic oligonucleotide; GGG chr2 60463116 60463135 60463119 -
ggtgttgtggaaccaaaatt

SEQ ID NO: 183957 - DNA, 20 bp, Artificial Sequence
  Synthetic oligonucleotide; CAG chr2 60463096 60463115 60463099 -
gggactcactgatcctccca

SEQ ID NO: 183958 - DNA, 20 bp, Artificial Sequence
  Synthetic oligonucleotide; TGG chr2 60463091 60463110 60463094 -
tcactgatcctcccacagtc

SEQ ID NO: 183959 - DNA, 20 bp, Artificial Sequence
  Synthetic oligonucleotide; GGG chr2 60463090 60463109 60463093 -
cactgatcctcccacagtct

SEQ ID NO: 183960 - DNA, 20 bp, Artificial Sequence
  Synthetic oligonucleotide; GGG chr2 60463089 60463108 60463092 -
actgatcctcccacagtctg

SEQ ID NO: 183961 - DNA, 20 bp, Artificial Sequence
  Synthetic oligonucleotide; GAG chr2 60463083 60463102 60463086 -
cctcccacagtctggggtgt

SEQ ID NO: 183962 - DNA, 20 bp, Artificial Sequence
  Synthetic oligonucleotide; TAG chr2 60463072 60463091 60463075 -
ctggggtgtgagaatgttgc

SEQ ID NO: 183963 - DNA, 20 bp, Artificial Sequence
  Synthetic oligonucleotide; CGG chr2 60463058 60463077 60463061 -
tgttgctagtcttttttcca

SEQ ID NO: 183964 - DNA, 20 bp, Artificial Sequence
  Synthetic oligonucleotide; AAG chr2 60463055 60463074 60463058 -
tgctagtcttttttccacgg

SEQ ID NO: 183965 - DNA, 20 bp, Artificial Sequence
  Synthetic oligonucleotide; GAG chr2 60463044 60463063 60463047 -
tttccacggaagtattttat

SEQ ID NO: 183966 - DNA, 20 bp, Artificial Sequence
  Synthetic oligonucleotide; TAG chr2 60463012 60463031 60463015 -
attttaacaatatcaacaat

SEQ ID NO: 183967 - DNA, 20 bp, Artificial Sequence
  Synthetic oligonucleotide; CAG chr2 60463002 60463021 60463005 -
tatcaacaattagtgtgttt

SEQ ID NO: 183968 - DNA, 20 bp, Artificial Sequence
  Synthetic oligonucleotide; AGG chr2 60463001 60463020 60463004 -
atcaacaattagtgtgtttc

SEQ ID NO: 183969 - DNA, 20 bp, Artificial Sequence
  Synthetic oligonucleotide; AAG chr2 60462988 60463007 60462991 -
gtgtttcaggctaatgctga

SEQ ID NO: 183970 - DNA, 20 bp, Artificial Sequence
  Synthetic oligonucleotide; TAG chr2 60462979 60462998 60462982 -
gctaatgctgaaagcatctt

SEQ ID NO: 183971 - DNA, 20 bp, Artificial Sequence
  Synthetic oligonucleotide; AGG chr2 60462978 60462997 60462981 -
ctaatgctgaaagcatcttt

SEQ ID NO: 183972 - DNA, 20 bp, Artificial Sequence
  Synthetic oligonucleotide; GGG chr2 60462977 60462996 60462980 -
taatgctgaaagcatcttta

SEQ ID NO: 183973 - DNA, 20 bp, Artificial Sequence
  Synthetic oligonucleotide; TAG chr2 60462971 60462990 60462974 -
tgaaagcatctttagggcca

SEQ ID NO: 183974 - DNA, 20 bp, Artificial Sequence
  Synthetic oligonucleotide; TAG chr2 60462961 60462980 60462964 -
tttagggccatagaacattg

SEQ ID NO: 183975 - DNA, 20 bp, Artificial Sequence
  Synthetic oligonucleotide; GAG chr2 60462957 60462976 60462960 -
gggccatagaacattgtagt

SEQ ID NO: 183976 - DNA, 20 bp, Artificial Sequence
  Synthetic oligonucleotide; TAG chr2 60462906 60462925 60462909 -
ctatgaaatgtttgcctatt

SEQ ID NO: 183977 - DNA, 20 bp, Artificial Sequence
  Synthetic oligonucleotide; AAG chr2 60462902 60462921 60462905 -
gaaatgtttgcctatttaga

SEQ ID NO: 183978 - DNA, 20 bp, Artificial Sequence
  Synthetic oligonucleotide; CAG chr2 60462886 60462905 60462889 -
tagaaagttcacctgtcacc

SEQ ID NO: 183979 - DNA, 20 bp, Artificial Sequence
  Synthetic oligonucleotide; AGG chr2 60462885 60462904 60462888 -
agaaagttcacctgtcaccc

SEQ ID NO: 183980 - DNA, 20 bp, Artificial Sequence
  Synthetic oligonucleotide; GGG chr2 60462884 60462903 60462887 -
gaaagttcacctgtcaccca

SEQ ID NO: 183981 - DNA, 20 bp, Artificial Sequence
  Synthetic oligonucleotide; GGG chr2 60462883 60462902 60462886 -
aaagttcacctgtcacccag

SEQ ID NO: 183982 - DNA, 20 bp, Artificial Sequence
  Synthetic oligonucleotide; GGG chr2 60462882 60462901 60462885 -
aagttcacctgtcacccagg

SEQ ID NO: 183983 - DNA, 20 bp, Artificial Sequence
  Synthetic oligonucleotide; GGG chr2 60462881 60462900 60462884 -
agttcacctgtcacccaggg

SEQ ID NO: 183984 - DNA, 20 bp, Artificial Sequence
  Synthetic oligonucleotide; TAG chr2 60462876 60462895 60462879 -
acctgtcacccaggggggaa

SEQ ID NO: 183985 - DNA, 20 bp, Artificial Sequence
  Synthetic oligonucleotide; AAG chr2 60462872 60462891 60462875 -
gtcacccaggggggaataga

SEQ ID NO: 183986 - DNA, 20 bp, Artificial Sequence
  Synthetic oligonucleotide; TGG chr2 60462868 60462887 60462871 -
cccaggggggaatagaaagc

SEQ ID NO: 183987 - DNA, 20 bp, Artificial Sequence
  Synthetic oligonucleotide; GGG chr2 60462867 60462886 60462870 -
ccaggggggaatagaaagct

SEQ ID NO: 183988 - DNA, 20 bp, Artificial Sequence
  Synthetic oligonucleotide; TAG chr2 60462861 60462880 60462864 -
gggaatagaaagctgggatt

SEQ ID NO: 183989 - DNA, 20 bp, Artificial Sequence
  Synthetic oligonucleotide; AGG chr2 60462860 60462879 60462863 -
ggaatagaaagctgggattt

SEQ ID NO: 183990 - DNA, 20 bp, Artificial Sequence
  Synthetic oligonucleotide; AAG chr2 60462857 60462876 60462860 -
atagaaagctgggatttagg

SEQ ID NO: 183991 - DNA, 20 bp, Artificial Sequence
  Synthetic oligonucleotide; AAG chr2 60462849 60462868 60462852 -
ctgggatttaggaagccaaa

SEQ ID NO: 183992 - DNA, 20 bp, Artificial Sequence
  Synthetic oligonucleotide; TGG chr2 60462840 60462859 60462843 -
aggaagccaaaaagtttcct

SEQ ID NO: 183993 - DNA, 20 bp, Artificial Sequence
  Synthetic oligonucleotide; GGG chr2 60462839 60462858 60462842 -
ggaagccaaaaagtttcctt

SEQ ID NO: 183994 - DNA, 20 bp, Artificial Sequence
  Synthetic oligonucleotide; AAG chr2 60462825 60462844 60462828 -
ttccttgggtcaccttgtcc

SEQ ID NO: 183995 - DNA, 20 bp, Artificial Sequence
  Synthetic oligonucleotide; AAG chr2 60462809 60462828 60462812 -
gtccaagtttctcacttaac

SEQ ID NO: 183996 - DNA, 20 bp, Artificial Sequence
  Synthetic oligonucleotide; AGG chr2 60462808 60462827 60462811 -
tccaagtttctcacttaaca

SEQ ID NO: 183997 - DNA, 20 bp, Artificial Sequence
  Synthetic oligonucleotide; GAG chr2 60462806 60462825 60462809 -
caagtttctcacttaacaag

SEQ ID NO: 183998 - DNA, 20 bp, Artificial Sequence
  Synthetic oligonucleotide; AGG chr2 60462805 60462824 60462808 -
aagtttctcacttaacaagg

SEQ ID NO: 183999 - DNA, 20 bp, Artificial Sequence
  Synthetic oligonucleotide; CAG chr2 60462799 60462818 60462802 -
ctcacttaacaaggaggaaa

SEQ ID NO: 184000 - DNA, 20 bp, Artificial Sequence
  Synthetic oligonucleotide; GAG chr2 60462797 60462816 60462800 -
cacttaacaaggaggaaaca

SEQ ID NO: 184001 - DNA, 20 bp, Artificial Sequence
  Synthetic oligonucleotide; AGG chr2 60462796 60462815 60462799 -
acttaacaaggaggaaacag

SEQ ID NO: 184002 - DNA, 20 bp, Artificial Sequence
  Synthetic oligonucleotide; TGG chr2 60462789 60462808 60462792 -
aaggaggaaacagaggcaca

SEQ ID NO: 184003 - DNA, 20 bp, Artificial Sequence
  Synthetic oligonucleotide; GAG chr2 60462787 60462806 60462790 -
ggaggaaacagaggcacatg

SEQ ID NO: 184004 - DNA, 20 bp, Artificial Sequence
  Synthetic oligonucleotide; GAG chr2 60462782 60462801 60462785 -
aaacagaggcacatggagat

SEQ ID NO: 184005 - DNA, 20 bp, Artificial Sequence
  Synthetic oligonucleotide; TGG chr2 60462778 60462797 60462781 -
agaggcacatggagatgaga

SEQ ID NO: 184006 - DNA, 20 bp, Artificial Sequence
  Synthetic oligonucleotide; CAG chr2 60462761 60462780 60462764 -
agatggcttgccccaaacta

SEQ ID NO: 184007 - DNA, 20 bp, Artificial Sequence
  Synthetic oligonucleotide; TGG chr2 60462754 60462773 60462757 -
ttgccccaaactacagctga

SEQ ID NO: 184008 - DNA, 20 bp, Artificial Sequence
  Synthetic oligonucleotide; TGG chr2 60462748 60462767 60462751 -
caaactacagctgatggaac

SEQ ID NO: 184009 - DNA, 20 bp, Artificial Sequence
  Synthetic oligonucleotide; AAG chr2 60462744 60462763 60462747 -
ctacagctgatggaactgga

SEQ ID NO: 184010 - DNA, 20 bp, Artificial Sequence
  Synthetic oligonucleotide; TAG chr2 60462739 60462758 60462742 -
gctgatggaactggaaagtt

SEQ ID NO: 184011 - DNA, 20 bp, Artificial Sequence
  Synthetic oligonucleotide; AAG chr2 60462736 60462755 60462739 -
gatggaactggaaagtttag

SEQ ID NO: 184012 - DNA, 20 bp, Artificial Sequence
  Synthetic oligonucleotide; GAG chr2 60462724 60462743 60462727 -
aagtttagaagacatttgtt

SEQ ID NO: 184013 - DNA, 20 bp, Artificial Sequence
  Synthetic oligonucleotide; AGG chr2 60462723 60462742 60462726 -
agtttagaagacatttgttg

SEQ ID NO: 184014 - DNA, 20 bp, Artificial Sequence
  Synthetic oligonucleotide; TAG chr2 60462716 60462735 60462719 -
aagacatttgttgaggtgcc

SEQ ID NO: 184015 - DNA, 20 bp, Artificial Sequence
  Synthetic oligonucleotide; TAG chr2 60462709 60462728 60462712 -
ttgttgaggtgcctagaatg

SEQ ID NO: 184016 - DNA, 20 bp, Artificial Sequence
  Synthetic oligonucleotide; AGG chr2 60462708 60462727 60462711 -
tgttgaggtgcctagaatgt

SEQ ID NO: 184017 - DNA, 20 bp, Artificial Sequence
  Synthetic oligonucleotide; GGG chr2 60462707 60462726 60462710 -
gttgaggtgcctagaatgta

SEQ ID NO: 184018 - DNA, 20 bp, Artificial Sequence
  Synthetic oligonucleotide; AAG chr2 60462692 60462711 60462695 -
atgtagggaccttcatcctc

SEQ ID NO: 184019 - DNA, 20 bp, Artificial Sequence
  Synthetic oligonucleotide; CAG chr2 60462688 60462707 60462691 -
agggaccttcatcctcaagc

SEQ ID NO: 184020 - DNA, 20 bp, Artificial Sequence
  Synthetic oligonucleotide; TGG chr2 60462682 60462701 60462685 -
cttcatcctcaagccagaac

SEQ ID NO: 184021 - DNA, 20 bp, Artificial Sequence
  Synthetic oligonucleotide; CAG chr2 60462678 60462697 60462681 -
atcctcaagccagaactggt

SEQ ID NO: 184022 - DNA, 20 bp, Artificial Sequence
  Synthetic oligonucleotide; AGG chr2 60462677 60462696 60462680 -
tcctcaagccagaactggtc

SEQ ID NO: 184023 - DNA, 20 bp, Artificial Sequence
  Synthetic oligonucleotide; TGG chr2 60462662 60462681 60462665 -
tggtcaggatttttctgctt

SEQ ID NO: 184024 - DNA, 20 bp, Artificial Sequence
  Synthetic oligonucleotide; GGG chr2 60462661 60462680 60462664 -
ggtcaggatttttctgcttt

SEQ ID NO: 184025 - DNA, 20 bp, Artificial Sequence
  Synthetic oligonucleotide; GGG chr2 60462660 60462679 60462663 -
gtcaggatttttctgctttg

SEQ ID NO: 184026 - DNA, 20 bp, Artificial Sequence
  Synthetic oligonucleotide; TGG chr2 60462655 60462674 60462658 -
gatttttctgctttggggat

SEQ ID NO: 184027 - DNA, 20 bp, Artificial Sequence
  Synthetic oligonucleotide; TAG chr2 60462640 60462659 60462643 -
gggattggatataaaatttc

SEQ ID NO: 184028 - DNA, 20 bp, Artificial Sequence
  Synthetic oligonucleotide; GAG chr2 60462633 60462652 60462636 -
gatataaaatttctagaact

SEQ ID NO: 184029 - DNA, 20 bp, Artificial Sequence
  Synthetic oligonucleotide; TGG chr2 60462625 60462644 60462628 -
atttctagaactgagtttaa

SEQ ID NO: 184030 - DNA, 20 bp, Artificial Sequence
  Synthetic oligonucleotide; CAG chr2 60462622 60462641 60462625 -
tctagaactgagtttaatgg

SEQ ID NO: 184031 - DNA, 20 bp, Artificial Sequence
  Synthetic oligonucleotide; AGG chr2 60462621 60462640 60462624 -
ctagaactgagtttaatggc

SEQ ID NO: 184032 - DNA, 20 bp, Artificial Sequence
  Synthetic oligonucleotide; AAG chr2 60462618 60462637 60462621 -
gaactgagtttaatggcagg

SEQ ID NO: 184033 - DNA, 20 bp, Artificial Sequence
  Synthetic oligonucleotide; TGG chr2 60462609 60462628 60462612 -
ttaatggcaggaagatcaat

SEQ ID NO: 184034 - DNA, 20 bp, Artificial Sequence
  Synthetic oligonucleotide; TGG chr2 60462594 60462613 60462597 -
tcaattggaccaatatttac

SEQ ID NO: 184035 - DNA, 20 bp, Artificial Sequence
  Synthetic oligonucleotide; GGG chr2 60462593 60462612 60462596 -
caattggaccaatatttact

SEQ ID NO: 184036 - DNA, 20 bp, Artificial Sequence
  Synthetic oligonucleotide; CAG chr2 60462580 60462599 60462583 -
atttactgggtacccatgct

SEQ ID NO: 184037 - DNA, 20 bp, Artificial Sequence
  Synthetic oligonucleotide; CAG chr2 60462571 60462590 60462574 -
gtacccatgctcagacgtgc

SEQ ID NO: 184038 - DNA, 20 bp, Artificial Sequence
  Synthetic oligonucleotide; AGG chr2 60462570 60462589 60462573 -
tacccatgctcagacgtgcc

SEQ ID NO: 184039 - DNA, 20 bp, Artificial Sequence
  Synthetic oligonucleotide; CAG chr2 60462565 60462584 60462568 -
atgctcagacgtgccaggca

SEQ ID NO: 184040 - DNA, 20 bp, Artificial Sequence
  Synthetic oligonucleotide; AGG chr2 60462564 60462583 60462567 -
tgctcagacgtgccaggcac

SEQ ID NO: 184041 - DNA, 20 bp, Artificial Sequence
  Synthetic oligonucleotide; GGG chr2 60462563 60462582 60462566 -
gctcagacgtgccaggcaca

SEQ ID NO: 184042 - DNA, 20 bp, Artificial Sequence
  Synthetic oligonucleotide; GGG chr2 60462562 60462581 60462565 -
ctcagacgtgccaggcacag

SEQ ID NO: 184043 - DNA, 20 bp, Artificial Sequence
  Synthetic oligonucleotide; GGG chr2 60462561 60462580 60462564 -
tcagacgtgccaggcacagg

SEQ ID NO: 184044 - DNA, 20 bp, Artificial Sequence
  Synthetic oligonucleotide; TAG chr2 60462558 60462577 60462561 -
gacgtgccaggcacaggggg

SEQ ID NO: 184045 - DNA, 20 bp, Artificial Sequence
  Synthetic oligonucleotide; AGG chr2 60462557 60462576 60462560 -
acgtgccaggcacagggggt

SEQ ID NO: 184046 - DNA, 20 bp, Artificial Sequence
  Synthetic oligonucleotide; CAG chr2 60462553 60462572 60462556 -
gccaggcacagggggtaggt

SEQ ID NO: 184047 - DNA, 20 bp, Artificial Sequence
  Synthetic oligonucleotide; GAG chr2 60462549 60462568 60462552 -
ggcacagggggtaggtcagt

SEQ ID NO: 184048 - DNA, 20 bp, Artificial Sequence
  Synthetic oligonucleotide; AGG chr2 60462548 60462567 60462551 -
gcacagggggtaggtcagtg

SEQ ID NO: 184049 - DNA, 20 bp, Artificial Sequence
  Synthetic oligonucleotide; GGG chr2 60462547 60462566 60462550 -
cacagggggtaggtcagtga

SEQ ID NO: 184050 - DNA, 20 bp, Artificial Sequence
  Synthetic oligonucleotide; TAG chr2 60462542 60462561 60462545 -
ggggtaggtcagtgagggct

SEQ ID NO: 184051 - DNA, 20 bp, Artificial Sequence
  Synthetic oligonucleotide; AGG chr2 60462541 60462560 60462544 -
gggtaggtcagtgagggctt

SEQ ID NO: 184052 - DNA, 20 bp, Artificial Sequence
  Synthetic oligonucleotide; TGG chr2 60462535 60462554 60462538 -
gtcagtgagggcttaggcct

SEQ ID NO: 184053 - DNA, 20 bp, Artificial Sequence
  Synthetic oligonucleotide; GGG chr2 60462534 60462553 60462537 -
tcagtgagggcttaggcctt

SEQ ID NO: 184054 - DNA, 20 bp, Artificial Sequence
  Synthetic oligonucleotide; GGG chr2 60462533 60462552 60462536 -
cagtgagggcttaggccttg

SEQ ID NO: 184055 - DNA, 20 bp, Artificial Sequence
  Synthetic oligonucleotide; GAG chr2 60462528 60462547 60462531 -
agggcttaggccttggggtt

SEQ ID NO: 184056 - DNA, 20 bp, Artificial Sequence
  Synthetic oligonucleotide; AGG chr2 60462527 60462546 60462530 -
gggcttaggccttggggttg

SEQ ID NO: 184057 - DNA, 20 bp, Artificial Sequence
  Synthetic oligonucleotide; GGG chr2 60462526 60462545 60462529 -
ggcttaggccttggggttga

SEQ ID NO: 184058 - DNA, 20 bp, Artificial Sequence
  Synthetic oligonucleotide; GGG chr2 60462525 60462544 60462528 -
gcttaggccttggggttgag

SEQ ID NO: 184059 - DNA, 20 bp, Artificial Sequence
  Synthetic oligonucleotide; TGG chr2 60462522 60462541 60462525 -
taggccttggggttgagggg

SEQ ID NO: 184060 - DNA, 20 bp, Artificial Sequence
  Synthetic oligonucleotide; GGG chr2 60462521 60462540 60462524 -
aggccttggggttgaggggt

SEQ ID NO: 184061 - DNA, 20 bp, Artificial Sequence
  Synthetic oligonucleotide; GGG chr2 60462520 60462539 60462523 -
ggccttggggttgaggggtg

SEQ ID NO: 184062 - DNA, 20 bp, Artificial Sequence
  Synthetic oligonucleotide; GGG chr2 60462519 60462538 60462522 -
gccttggggttgaggggtgg

SEQ ID NO: 184063 - DNA, 20 bp, Artificial Sequence
  Synthetic oligonucleotide; CAG chr2 60462516 60462535 60462519 -
ttggggttgaggggtggggg

SEQ ID NO: 184064 - DNA, 20 bp, Artificial Sequence
  Synthetic oligonucleotide; AGG chr2 60462515 60462534 60462518 -
tggggttgaggggtgggggc

SEQ ID NO: 184065 - DNA, 20 bp, Artificial Sequence
  Synthetic oligonucleotide; GGG chr2 60462514 60462533 60462517 -
ggggttgaggggtgggggca

SEQ ID NO: 184066 - DNA, 20 bp, Artificial Sequence
  Synthetic oligonucleotide; AAG chr2 60462511 60462530 60462514 -
gttgaggggtgggggcaggg

SEQ ID NO: 184067 - DNA, 20 bp, Artificial Sequence
  Synthetic oligonucleotide; AGG chr2 60462510 60462529 60462513 -
ttgaggggtgggggcaggga

SEQ ID NO: 184068 - DNA, 20 bp, Artificial Sequence
  Synthetic oligonucleotide; TGG chr2 60462506 60462525 60462509 -
ggggtgggggcagggaaggc

SEQ ID NO: 184069 - DNA, 20 bp, Artificial Sequence
  Synthetic oligonucleotide; GAG chr2 60462504 60462523 60462507 -
ggtgggggcagggaaggctg

SEQ ID NO: 184070 - DNA, 20 bp, Artificial Sequence
  Synthetic oligonucleotide; AGG chr2 60462503 60462522 60462506 -
gtgggggcagggaaggctgg

SEQ ID NO: 184071 - DNA, 20 bp, Artificial Sequence
  Synthetic oligonucleotide; TGG chr2 60462500 60462519 60462503 -
ggggcagggaaggctggagg

SEQ ID NO: 184072 - DNA, 20 bp, Artificial Sequence
  Synthetic oligonucleotide; AAG chr2 60462488 60462507 60462491 -
gctggaggtggaacataaat

SEQ ID NO: 184073 - DNA, 20 bp, Artificial Sequence
  Synthetic oligonucleotide; CAG chr2 60462466 60462485 60462469 -
gcaattgctgatgcccgcct

SEQ ID NO: 184074 - DNA, 20 bp, Artificial Sequence
  Synthetic oligonucleotide; TGG chr2 60462446 60462465 60462449 -
cagtgattaaacattgatgt

SEQ ID NO: 184075 - DNA, 20 bp, Artificial Sequence
  Synthetic oligonucleotide; CAG chr2 60462428 60462447 60462431 -
gttggtgttgtattattttg

SEQ ID NO: 184076 - DNA, 20 bp, Artificial Sequence
  Synthetic oligonucleotide; AGG chr2 60462427 60462446 60462430 -
ttggtgttgtattattttgc

SEQ ID NO: 184077 - DNA, 20 bp, Artificial Sequence
  Synthetic oligonucleotide; AAG chr2 60462422 60462441 60462425 -
gttgtattattttgcaggta

SEQ ID NO: 184078 - DNA, 20 bp, Artificial Sequence
  Synthetic oligonucleotide; GAG chr2 60462417 60462436 60462420 -
attattttgcaggtaaagat

SEQ ID NO: 184079 - DNA, 20 bp, Artificial Sequence
  Synthetic oligonucleotide; CAG chr2 60462412 60462431 60462415 -
tttgcaggtaaagatgagcc

SEQ ID NO: 184080 - DNA, 20 bp, Artificial Sequence
  Synthetic oligonucleotide; CAG chr2 60462409 60462428 60462412 -
gcaggtaaagatgagcccag

SEQ ID NO: 184081 - DNA, 20 bp, Artificial Sequence
  Synthetic oligonucleotide; CAG chr2 60462384 60462403 60462387 -
acacatgtacaacttgcaaa

SEQ ID NO: 184082 - DNA, 20 bp, Artificial Sequence
  Synthetic oligonucleotide; CAG chr2 60462373 60462392 60462376 -
acttgcaaacagccattcac

SEQ ID NO: 184083 - DNA, 20 bp, Artificial Sequence
  Synthetic oligonucleotide; TGG chr2 60462366 60462385 60462369 -
aacagccattcaccagtgca

SEQ ID NO: 184084 - DNA, 20 bp, Artificial Sequence
  Synthetic oligonucleotide; CAG chr2 60462345 60462364 60462348 -
ggtttctcttgcaacacgca

SEQ ID NO: 184085 - DNA, 20 bp, Artificial Sequence
  Synthetic oligonucleotide; TGG chr2 60462334 60462353 60462337 -
caacacgcacagaacactca

SEQ ID NO: 184086 - DNA, 20 bp, Artificial Sequence
  Synthetic oligonucleotide; AAG chr2 60462328 60462347 60462331 -
gcacagaacactcatggatt

SEQ ID NO: 184087 - DNA, 20 bp, Artificial Sequence
  Synthetic oligonucleotide; TAG chr2 60462317 60462336 60462320 -
tcatggattaagaatctact

SEQ ID NO: 184088 - DNA, 20 bp, Artificial Sequence
  Synthetic oligonucleotide; AAG chr2 60462313 60462332 60462316 -
ggattaagaatctacttaga

SEQ ID NO: 184089 - DNA, 20 bp, Artificial Sequence
  Synthetic oligonucleotide; CGG chr2 60462304 60462323 60462307 -
atctacttagaaagcgaaca

SEQ ID NO: 184090 - DNA, 20 bp, Artificial Sequence
  Synthetic oligonucleotide; AAG chr2 60462301 60462320 60462304 -
tacttagaaagcgaacacgg

SEQ ID NO: 184091 - DNA, 20 bp, Artificial Sequence
  Synthetic oligonucleotide; CGG chr2 60462285 60462304 60462288 -
acggaagtcccctgaccccg

SEQ ID NO: 184092 - DNA, 20 bp, Artificial Sequence
  Synthetic oligonucleotide; GGG chr2 60462284 60462303 60462287 -
cggaagtcccctgaccccgc

SEQ ID NO: 184093 - DNA, 20 bp, Artificial Sequence
  Synthetic oligonucleotide; TGG chr2 60462280 60462299 60462283 -
agtcccctgaccccgcgggt

SEQ ID NO: 184094 - DNA, 20 bp, Artificial Sequence
  Synthetic oligonucleotide; CAG chr2 60462269 60462288 60462272 -
cccgcgggttggtatccctt

SEQ ID NO: 184095 - DNA, 20 bp, Artificial Sequence
  Synthetic oligonucleotide; AGG chr2 60462268 60462287 60462271 -
ccgcgggttggtatcccttc

SEQ ID NO: 184096 - DNA, 20 bp, Artificial Sequence
  Synthetic oligonucleotide; TAG chr2 60462263 60462282 60462266 -
ggttggtatcccttcaggac

SEQ ID NO: 184097 - DNA, 20 bp, Artificial Sequence
  Synthetic oligonucleotide; AGG chr2 60462262 60462281 60462265 -
gttggtatcccttcaggact

SEQ ID NO: 184098 - DNA, 20 bp, Artificial Sequence
  Synthetic oligonucleotide; CAG chr2 60462257 60462276 60462260 -
tatcccttcaggactaggtg

SEQ ID NO: 184099 - DNA, 20 bp, Artificial Sequence
  Synthetic oligonucleotide; CAG chr2 60462243 60462262 60462246 -
taggtgcagaatgtccttcc

SEQ ID NO: 184100 - DNA, 20 bp, Artificial Sequence
  Synthetic oligonucleotide; TGG chr2 60462229 60462248 60462232 -
ccttcccagccacctctcca

SEQ ID NO: 184101 - DNA, 20 bp, Artificial Sequence
  Synthetic oligonucleotide; GGG chr2 60462228 60462247 60462231 -
cttcccagccacctctccat

SEQ ID NO: 184102 - DNA, 20 bp, Artificial Sequence
  Synthetic oligonucleotide; CAG chr2 60462215 60462234 60462218 -
tctccatgggattcatattg

SEQ ID NO: 184103 - DNA, 20 bp, Artificial Sequence
  Synthetic oligonucleotide; AAG chr2 60462190 60462209 60462193 -
aataacccctttaacctgct

SEQ ID NO: 184104 - DNA, 20 bp, Artificial Sequence
  Synthetic oligonucleotide; CAG chr2 60462182 60462201 60462185 -
ctttaacctgctaagaatac

SEQ ID NO: 184105 - DNA, 20 bp, Artificial Sequence
  Synthetic oligonucleotide; AGG chr2 60462181 60462200 60462184 -
tttaacctgctaagaatacc

SEQ ID NO: 184106 - DNA, 20 bp, Artificial Sequence
  Synthetic oligonucleotide; CAG chr2 60462176 60462195 60462179 -
cctgctaagaataccaggat

SEQ ID NO: 184107 - DNA, 20 bp, Artificial Sequence
  Synthetic oligonucleotide; GAG chr2 60462169 60462188 60462172 -
agaataccaggatcagtatc

SEQ ID NO: 184108 - DNA, 20 bp, Artificial Sequence
  Synthetic oligonucleotide; GAG chr2 60462167 60462186 60462170 -
aataccaggatcagtatcga

SEQ ID NO: 184109 - DNA, 20 bp, Artificial Sequence
  Synthetic oligonucleotide; GAG chr2 60462165 60462184 60462168 -
taccaggatcagtatcgaga

SEQ ID NO: 184110 - DNA, 20 bp, Artificial Sequence
  Synthetic oligonucleotide; AGG chr2 60462164 60462183 60462167 -
accaggatcagtatcgagag

SEQ ID NO: 184111 - DNA, 20 bp, Artificial Sequence
  Synthetic oligonucleotide; CGG chr2 60462157 60462176 60462160 -
tcagtatcgagagaggcttc

SEQ ID NO: 184112 - DNA, 20 bp, Artificial Sequence
  Synthetic oligonucleotide; TGG chr2 60462152 60462171 60462155 -
atcgagagaggcttccggcc

SEQ ID NO: 184113 - DNA, 20 bp, Artificial Sequence
  Synthetic oligonucleotide; CAG chr2 60462149 60462168 60462152 -
gagagaggcttccggcctgg

SEQ ID NO: 184114 - DNA, 20 bp, Artificial Sequence
  Synthetic oligonucleotide; AAG chr2 60462146 60462165 60462149 -
agaggcttccggcctggcag

SEQ ID NO: 184115 - DNA, 20 bp, Artificial Sequence
  Synthetic oligonucleotide; AGG chr2 60462145 60462164 60462148 -
gaggcttccggcctggcaga

SEQ ID NO: 184116 - DNA, 20 bp, Artificial Sequence
  Synthetic oligonucleotide; GGG chr2 60462144 60462163 60462147 -
aggcttccggcctggcagaa

SEQ ID NO: 184117 - DNA, 20 bp, Artificial Sequence
  Synthetic oligonucleotide; TAG chr2 60462115 60462134 60462118 -
ccacccactccccccctgtt

SEQ ID NO: 184118 - DNA, 20 bp, Artificial Sequence
  Synthetic oligonucleotide; GAG chr2 60462103 60462122 60462106 -
cccctgtttagtccaccacc

SEQ ID NO: 184119 - DNA, 20 bp, Artificial Sequence
  Synthetic oligonucleotide; TGG chr2 60462092 60462111 60462095 -
tccaccaccgagacatcact

SEQ ID NO: 184120 - DNA, 20 bp, Artificial Sequence
  Synthetic oligonucleotide; TAG chr2 60462077 60462096 60462080 -
tcacttggacccccaccgca

SEQ ID NO: 184121 - DNA, 20 bp, Artificial Sequence
  Synthetic oligonucleotide; GAG chr2 60462075 60462094 60462078 -
acttggacccccaccgcata

SEQ ID NO: 184122 - DNA, 20 bp, Artificial Sequence
  Synthetic oligonucleotide; TGG chr2 60462068 60462087 60462071 -
cccccaccgcatagagcgcc

SEQ ID NO: 184123 - DNA, 20 bp, Artificial Sequence
  Synthetic oligonucleotide; GGG chr2 60462067 60462086 60462070 -
ccccaccgcatagagcgcct

SEQ ID NO: 184124 - DNA, 20 bp, Artificial Sequence
  Synthetic oligonucleotide; GGG chr2 60462066 60462085 60462069 -
cccaccgcatagagcgcctg

SEQ ID NO: 184125 - DNA, 20 bp, Artificial Sequence
  Synthetic oligonucleotide; GGG chr2 60462065 60462084 60462068 -
ccaccgcatagagcgcctgg

SEQ ID NO: 184126 - DNA, 20 bp, Artificial Sequence
  Synthetic oligonucleotide; CGG chr2 60462062 60462081 60462065 -
ccgcatagagcgcctggggg

SEQ ID NO: 184127 - DNA, 20 bp, Artificial Sequence
  Synthetic oligonucleotide; AAG chr2 60462059 60462078 60462062 -
catagagcgcctgggggcgg

SEQ ID NO: 184128 - DNA, 20 bp, Artificial Sequence
  Synthetic oligonucleotide; GAG chr2 60462057 60462076 60462060 -
tagagcgcctgggggcggaa

SEQ ID NO: 184129 - DNA, 20 bp, Artificial Sequence
  Synthetic oligonucleotide; TGG chr2 60462053 60462072 60462056 -
gcgcctgggggcggaagaga

SEQ ID NO: 184130 - DNA, 20 bp, Artificial Sequence
  Synthetic oligonucleotide; TGG chr2 60462047 60462066 60462050 -
gggggcggaagagatggccc

SEQ ID NO: 184131 - DNA, 20 bp, Artificial Sequence
  Synthetic oligonucleotide; GAG chr2 60462031 60462050 60462034 -
gccctggccacccatcaccc

SEQ ID NO: 184132 - DNA, 20 bp, Artificial Sequence
  Synthetic oligonucleotide; CAG chr2 60462019 60462038 60462022 -
catcacccgagtgcctttga

SEQ ID NO: 184133 - DNA, 20 bp, Artificial Sequence
  Synthetic oligonucleotide; AGG chr2 60462018 60462037 60462021 -
atcacccgagtgcctttgac

SEQ ID NO: 184134 - DNA, 20 bp, Artificial Sequence
  Synthetic oligonucleotide; GGG chr2 60462017 60462036 60462020 -
tcacccgagtgcctttgaca

SEQ ID NO: 184135 - DNA, 20 bp, Artificial Sequence
  Synthetic oligonucleotide; CGG chr2 60462009 60462028 60462012 -
gtgcctttgacagggtgctg

SEQ ID NO: 184136 - DNA, 20 bp, Artificial Sequence
  Synthetic oligonucleotide; TGG chr2 60461996 60462015 60461999 -
ggtgctgcggttgaatccaa

SEQ ID NO: 184137 - DNA, 20 bp, Artificial Sequence
  Synthetic oligonucleotide; TGG chr2 60461990 60462009 60461993 -
gcggttgaatccaatggcta

SEQ ID NO: 184138 - DNA, 20 bp, Artificial Sequence
  Synthetic oligonucleotide; GAG chr2 60461988 60462007 60461991 -
ggttgaatccaatggctatg

SEQ ID NO: 184139 - DNA, 20 bp, Artificial Sequence
  Synthetic oligonucleotide; TGG chr2 60461975 60461994 60461978 -
ggctatggagcctcccgcca

SEQ ID NO: 184140 - DNA, 20 bp, Artificial Sequence
  Synthetic oligonucleotide; TAG chr2 60461965 60461984 60461968 -
cctcccgccatggatttctc

SEQ ID NO: 184141 - DNA, 20 bp, Artificial Sequence
  Synthetic oligonucleotide; AGG chr2 60461964 60461983 60461967 -
ctcccgccatggatttctct

SEQ ID NO: 184142 - DNA, 20 bp, Artificial Sequence
  Synthetic oligonucleotide; GAG chr2 60461962 60461981 60461965 -
cccgccatggatttctctag

SEQ ID NO: 184143 - DNA, 20 bp, Artificial Sequence
  Synthetic oligonucleotide; TAG chr2 60461956 60461975 60461959 -
atggatttctctaggagact

SEQ ID NO: 184144 - DNA, 20 bp, Artificial Sequence
  Synthetic oligonucleotide; GAG chr2 60461954 60461973 60461957 -
ggatttctctaggagactta

SEQ ID NO: 184145 - DNA, 20 bp, Artificial Sequence
  Synthetic oligonucleotide; GAG chr2 60461952 60461971 60461955 -
atttctctaggagacttaga

SEQ ID NO: 184146 - DNA, 20 bp, Artificial Sequence
  Synthetic oligonucleotide; TGG chr2 60461948 60461967 60461951 -
ctctaggagacttagagagc

SEQ ID NO: 184147 - DNA, 20 bp, Artificial Sequence
  Synthetic oligonucleotide; CAG chr2 60461945 60461964 60461948 -
taggagacttagagagctgg

SEQ ID NO: 184148 - DNA, 20 bp, Artificial Sequence
  Synthetic oligonucleotide; AGG chr2 60461944 60461963 60461947 -
aggagacttagagagctggc

SEQ ID NO: 184149 - DNA, 20 bp, Artificial Sequence
  Synthetic oligonucleotide; GGG chr2 60461943 60461962 60461946 -
ggagacttagagagctggca

SEQ ID NO: 184150 - DNA, 20 bp, Artificial Sequence
  Synthetic oligonucleotide; TAG chr2 60461932 60461951 60461935 -
gagctggcagggaacacgtc

SEQ ID NO: 184151 - DNA, 20 bp, Artificial Sequence
  Synthetic oligonucleotide; CAG chr2 60461915 60461934 60461918 -
gtctagcccaccgctgtccc

SEQ ID NO: 184152 - DNA, 20 bp, Artificial Sequence
  Synthetic oligonucleotide; AGG chr2 60461914 60461933 60461917 -
tctagcccaccgctgtcccc

SEQ ID NO: 184153 - DNA, 20 bp, Artificial Sequence
  Synthetic oligonucleotide; CGG chr2 60461910 60461929 60461913 -
gcccaccgctgtccccaggc

SEQ ID NO: 184154 - DNA, 20 bp, Artificial Sequence
  Synthetic oligonucleotide; CAG chr2 60461905 60461924 60461908 -
ccgctgtccccaggccggcc

SEQ ID NO: 184155 - DNA, 20 bp, Artificial Sequence
  Synthetic oligonucleotide; AAG chr2 60461893 60461912 60461896 -
ggccggcccagccctatgca

SEQ ID NO: 184156 - DNA, 20 bp, Artificial Sequence
  Synthetic oligonucleotide; AGG chr2 60461892 60461911 60461895 -
gccggcccagccctatgcaa

SEQ ID NO: 184157 - DNA, 20 bp, Artificial Sequence
  Synthetic oligonucleotide; CAG chr2 60461874 60461893 60461877 -
aaaggttactgcaaccattc

SEQ ID NO: 184158 - DNA, 20 bp, Artificial Sequence
  Synthetic oligonucleotide; CAG chr2 60461870 60461889 60461873 -
gttactgcaaccattccagc

SEQ ID NO: 184159 - DNA, 20 bp, Artificial Sequence
  Synthetic oligonucleotide; AGG chr2 60461869 60461888 60461872 -
ttactgcaaccattccagcc

SEQ ID NO: 184160 - DNA, 20 bp, Artificial Sequence
  Synthetic oligonucleotide; TAG chr2 60461866 60461885 60461869 -
ctgcaaccattccagccagg

SEQ ID NO: 184161 - DNA, 20 bp, Artificial Sequence
  Synthetic oligonucleotide; AAG chr2 60461862 60461881 60461865 -
aaccattccagccaggtagc

SEQ ID NO: 184162 - DNA, 20 bp, Artificial Sequence
  Synthetic oligonucleotide; TGG chr2 60461849 60461868 60461852 -
aggtagcaagccgcccttcc

SEQ ID NO: 184163 - DNA, 20 bp, Artificial Sequence
  Synthetic oligonucleotide; CAG chr2 60461802 60461821 60461805 -
aatccgcccctcctccctcc

SEQ ID NO: 184164 - DNA, 20 bp, Artificial Sequence
  Synthetic oligonucleotide; CGG chr2 60461795 60461814 60461798 -
ccctcctccctcccagcccc

SEQ ID NO: 184165 - DNA, 20 bp, Artificial Sequence
  Synthetic oligonucleotide; AAG chr2 60461790 60461809 60461793 -
ctccctcccagcccccggtc

SEQ ID NO: 184166 - DNA, 20 bp, Artificial Sequence
  Synthetic oligonucleotide; AAG chr2 60461784 60461803 60461787 -
cccagcccccggtcaagtcc

SEQ ID NO: 184167 - DNA, 20 bp, Artificial Sequence
  Synthetic oligonucleotide; GAG chr2 60461775 60461794 60461778 -
cggtcaagtccaagtcatgc

SEQ ID NO: 184168 - DNA, 20 bp, Artificial Sequence
  Synthetic oligonucleotide; CGG chr2 60461767 60461786 60461770 -
tccaagtcatgcgagttctg

SEQ ID NO: 184169 - DNA, 20 bp, Artificial Sequence
  Synthetic oligonucleotide; AAG chr2 60461763 60461782 60461766 -
agtcatgcgagttctgcggc

SEQ ID NO: 184170 - DNA, 20 bp, Artificial Sequence
  Synthetic oligonucleotide; CAG chr2 60461748 60461767 60461751 -
gcggcaagacgttcaaattt

SEQ ID NO: 184171 - DNA, 20 bp, Artificial Sequence
  Synthetic oligonucleotide; GAG chr2 60461746 60461765 60461749 -
ggcaagacgttcaaatttca

SEQ ID NO: 184172 - DNA, 20 bp, Artificial Sequence
  Synthetic oligonucleotide; TGG chr2 60461738 60461757 60461741 -
gttcaaatttcagagcaacc

SEQ ID NO: 184173 - DNA, 20 bp, Artificial Sequence
  Synthetic oligonucleotide; TGG chr2 60461735 60461754 60461738 -
caaatttcagagcaacctgg

SEQ ID NO: 184174 - DNA, 20 bp, Artificial Sequence
  Synthetic oligonucleotide; CGG chr2 60461727 60461746 60461730 -
agagcaacctggtggtgcac

SEQ ID NO: 184175 - DNA, 20 bp, Artificial Sequence
  Synthetic oligonucleotide; CAG chr2 60461722 60461741 60461725 -
aacctggtggtgcaccggcg

SEQ ID NO: 184176 - DNA, 20 bp, Artificial Sequence
  Synthetic oligonucleotide; CGG chr2 60461714 60461733 60461717 -
ggtgcaccggcgcagccaca

SEQ ID NO: 184177 - DNA, 20 bp, Artificial Sequence
  Synthetic oligonucleotide; GGG chr2 60461713 60461732 60461716 -
gtgcaccggcgcagccacac

SEQ ID NO: 184178 - DNA, 20 bp, Artificial Sequence
  Synthetic oligonucleotide; GAG chr2 60461709 60461728 60461712 -
accggcgcagccacacgggc

SEQ ID NO: 184179 - DNA, 20 bp, Artificial Sequence
  Synthetic oligonucleotide; AAG chr2 60461706 60461725 60461709 -
ggcgcagccacacgggcgag

SEQ ID NO: 184180 - DNA, 20 bp, Artificial Sequence
  Synthetic oligonucleotide; AAG chr2 60461697 60461716 60461700 -
acacgggcgagaagccctac

SEQ ID NO: 184181 - DNA, 20 bp, Artificial Sequence
  Synthetic oligonucleotide; CAG chr2 60461667 60461686 60461670 -
tgtgcgaccacgcgtgcacc

SEQ ID NO: 184182 - DNA, 20 bp, Artificial Sequence
  Synthetic oligonucleotide; AGG chr2 60461666 60461685 60461669 -
gtgcgaccacgcgtgcaccc

SEQ ID NO: 184183 - DNA, 20 bp, Artificial Sequence
  Synthetic oligonucleotide; CAG chr2 60461662 60461681 60461665 -
gaccacgcgtgcacccaggc

SEQ ID NO: 184184 - DNA, 20 bp, Artificial Sequence
  Synthetic oligonucleotide; AAG chr2 60461658 60461677 60461661 -
acgcgtgcacccaggccagc

SEQ ID NO: 184185 - DNA, 20 bp, Artificial Sequence
  Synthetic oligonucleotide; AAG chr2 60461652 60461671 60461655 -
gcacccaggccagcaagctg

SEQ ID NO: 184186 - DNA, 20 bp, Artificial Sequence
  Synthetic oligonucleotide; AAG chr2 60461640 60461659 60461643 -
gcaagctgaagcgccacatg

SEQ ID NO: 184187 - DNA, 20 bp, Artificial Sequence
  Synthetic oligonucleotide; CGG chr2 60461609 60461628 60461612 -
gcacaaatcgtcccccatga

SEQ ID NO: 184188 - DNA, 20 bp, Artificial Sequence
  Synthetic oligonucleotide; AAG chr2 60461604 60461623 60461607 -
aatcgtcccccatgacggtc

SEQ ID NO: 184189 - DNA, 20 bp, Artificial Sequence
  Synthetic oligonucleotide; CGG chr2 60461593 60461612 60461596 -
atgacggtcaagtccgacga

SEQ ID NO: 184190 - DNA, 20 bp, Artificial Sequence
  Synthetic oligonucleotide; CAG chr2 60461578 60461597 60461581 -
gacgacggtctctccaccgc

SEQ ID NO: 184191 - DNA, 20 bp, Artificial Sequence
  Synthetic oligonucleotide; CGG chr2 60461570 60461589 60461573 -
tctctccaccgccagctccc

SEQ ID NO: 184192 - DNA, 20 bp, Artificial Sequence
  Synthetic oligonucleotide; CGG chr2 60461563 60461582 60461566 -
accgccagctccccggaacc

SEQ ID NO: 184193 - DNA, 20 bp, Artificial Sequence
  Synthetic oligonucleotide; CAG chr2 60461557 60461576 60461560 -
agctccccggaacccggcac

SEQ ID NO: 184194 - DNA, 20 bp, Artificial Sequence
  Synthetic oligonucleotide; TGG chr2 60461549 60461568 60461552 -
ggaacccggcaccagcgact

SEQ ID NO: 184195 - DNA, 20 bp, Artificial Sequence
  Synthetic oligonucleotide; TGG chr2 60461546 60461565 60461549 -
acccggcaccagcgacttgg

SEQ ID NO: 184196 - DNA, 20 bp, Artificial Sequence
  Synthetic oligonucleotide; GGG chr2 60461545 60461564 60461548 -
cccggcaccagcgacttggt

SEQ ID NO: 184197 - DNA, 20 bp, Artificial Sequence
  Synthetic oligonucleotide; CAG chr2 60461542 60461561 60461545 -
ggcaccagcgacttggtggg

SEQ ID NO: 184198 - DNA, 20 bp, Artificial Sequence
  Synthetic oligonucleotide; CAG chr2 60461536 60461555 60461539 -
agcgacttggtgggcagcgc

SEQ ID NO: 184199 - DNA, 20 bp, Artificial Sequence
  Synthetic oligonucleotide; CAG chr2 60461533 60461552 60461536 -
gacttggtgggcagcgccag

SEQ ID NO: 184200 - DNA, 20 bp, Artificial Sequence
  Synthetic oligonucleotide; AAG chr2 60461523 60461542 60461526 -
gcagcgccagcagcgcgctc

SEQ ID NO: 184201 - DNA, 20 bp, Artificial Sequence
  Synthetic oligonucleotide; TGG chr2 60461516 60461535 60461519 -
cagcagcgcgctcaagtccg

SEQ ID NO: 184202 - DNA, 20 bp, Artificial Sequence
  Synthetic oligonucleotide; TGG chr2 60461513 60461532 60461516 -
cagcgcgctcaagtccgtgg

SEQ ID NO: 184203 - DNA, 20 bp, Artificial Sequence
  Synthetic oligonucleotide; AAG chr2 60461508 60461527 60461511 -
cgctcaagtccgtggtggcc

SEQ ID NO: 184204 - DNA, 20 bp, Artificial Sequence
  Synthetic oligonucleotide; AAG chr2 60461502 60461521 60461505 -
agtccgtggtggccaagttc

SEQ ID NO: 184205 - DNA, 20 bp, Artificial Sequence
  Synthetic oligonucleotide; GAG chr2 60461500 60461519 60461503 -
tccgtggtggccaagttcaa

SEQ ID NO: 184206 - DNA, 20 bp, Artificial Sequence
  Synthetic oligonucleotide; GAG chr2 60461496 60461515 60461499 -
tggtggccaagttcaagagc

SEQ ID NO: 184207 - DNA, 20 bp, Artificial Sequence
  Synthetic oligonucleotide; CGG chr2 60461474 60461493 60461477 -
gaacgaccccaacctgatcc

SEQ ID NO: 184208 - DNA, 20 bp, Artificial Sequence
  Synthetic oligonucleotide; GAG chr2 60461472 60461491 60461475 -
acgaccccaacctgatcccg

SEQ ID NO: 184209 - DNA, 20 bp, Artificial Sequence
  Synthetic oligonucleotide; CGG chr2 60461467 60461486 60461470 -
cccaacctgatcccggagaa

SEQ ID NO: 184210 - DNA, 20 bp, Artificial Sequence
  Synthetic oligonucleotide; GGG chr2 60461466 60461485 60461469 -
ccaacctgatcccggagaac

SEQ ID NO: 184211 - DNA, 20 bp, Artificial Sequence
  Synthetic oligonucleotide; GGG chr2 60461465 60461484 60461468 -
caacctgatcccggagaacg

SEQ ID NO: 184212 - DNA, 20 bp, Artificial Sequence
  Synthetic oligonucleotide; GAG chr2 60461460 60461479 60461463 -
tgatcccggagaacggggac

SEQ ID NO: 184213 - DNA, 20 bp, Artificial Sequence
  Synthetic oligonucleotide; AGG chr2 60461459 60461478 60461462 -
gatcccggagaacggggacg

SEQ ID NO: 184214 - DNA, 20 bp, Artificial Sequence
  Synthetic oligonucleotide; GAG chr2 60461457 60461476 60461460 -
tcccggagaacggggacgag

SEQ ID NO: 184215 - DNA, 20 bp, Artificial Sequence
  Synthetic oligonucleotide; AGG chr2 60461456 60461475 60461459 -
cccggagaacggggacgagg

SEQ ID NO: 184216 - DNA, 20 bp, Artificial Sequence
  Synthetic oligonucleotide; AAG chr2 60461453 60461472 60461456 -
ggagaacggggacgaggagg

SEQ ID NO: 184217 - DNA, 20 bp, Artificial Sequence
  Synthetic oligonucleotide; GAG chr2 60461451 60461470 60461454 -
agaacggggacgaggaggaa

SEQ ID NO: 184218 - DNA, 20 bp, Artificial Sequence
  Synthetic oligonucleotide; AGG chr2 60461450 60461469 60461453 -
gaacggggacgaggaggaag

SEQ ID NO: 184219 - DNA, 20 bp, Artificial Sequence
  Synthetic oligonucleotide; GAG chr2 60461448 60461467 60461451 -
acggggacgaggaggaagag

SEQ ID NO: 184220 - DNA, 20 bp, Artificial Sequence
  Synthetic oligonucleotide; AGG chr2 60461447 60461466 60461450 -
cggggacgaggaggaagagg

SEQ ID NO: 184221 - DNA, 20 bp, Artificial Sequence
  Synthetic oligonucleotide; GAG chr2 60461439 60461458 60461442 -
aggaggaagaggaggacgac

SEQ ID NO: 184222 - DNA, 20 bp, Artificial Sequence
  Synthetic oligonucleotide; AGG chr2 60461438 60461457 60461441 -
ggaggaagaggaggacgacg

SEQ ID NO: 184223 - DNA, 20 bp, Artificial Sequence
  Synthetic oligonucleotide; AAG chr2 60461435 60461454 60461438 -
ggaagaggaggacgacgagg

SEQ ID NO: 184224 - DNA, 20 bp, Artificial Sequence
  Synthetic oligonucleotide; GAG chr2 60461433 60461452 60461436 -
aagaggaggacgacgaggaa

SEQ ID NO: 184225 - DNA, 20 bp, Artificial Sequence
  Synthetic oligonucleotide; AGG chr2 60461432 60461451 60461435 -
agaggaggacgacgaggaag

SEQ ID NO: 184226 - DNA, 20 bp, Artificial Sequence
  Synthetic oligonucleotide; AAG chr2 60461429 60461448 60461432 -
ggaggacgacgaggaagagg

SEQ ID NO: 184227 - DNA, 20 bp, Artificial Sequence
  Synthetic oligonucleotide; AAG chr2 60461426 60461445 60461429 -
ggacgacgaggaagaggaag

SEQ ID NO: 184228 - DNA, 20 bp, Artificial Sequence
  Synthetic oligonucleotide; GAG chr2 60461424 60461443 60461427 -
acgacgaggaagaggaagaa

SEQ ID NO: 184229 - DNA, 20 bp, Artificial Sequence
  Synthetic oligonucleotide; AGG chr2 60461423 60461442 60461426 -
cgacgaggaagaggaagaag

SEQ ID NO: 184230 - DNA, 20 bp, Artificial Sequence
  Synthetic oligonucleotide; GAG chr2 60461421 60461440 60461424 -
acgaggaagaggaagaagag

SEQ ID NO: 184231 - DNA, 20 bp, Artificial Sequence
  Synthetic oligonucleotide; AGG chr2 60461420 60461439 60461423 -
cgaggaagaggaagaagagg

SEQ ID NO: 184232 - DNA, 20 bp, Artificial Sequence
  Synthetic oligonucleotide; AAG chr2 60461417 60461436 60461420 -
ggaagaggaagaagaggagg

SEQ ID NO: 184233 - DNA, 20 bp, Artificial Sequence
  Synthetic oligonucleotide; GAG chr2 60461415 60461434 60461418 -
aagaggaagaagaggaggaa

SEQ ID NO: 184234 - DNA, 20 bp, Artificial Sequence
  Synthetic oligonucleotide; AGG chr2 60461414 60461433 60461417 -
agaggaagaagaggaggaag

SEQ ID NO: 184235 - DNA, 20 bp, Artificial Sequence
  Synthetic oligonucleotide; GAG chr2 60461412 60461431 60461415 -
aggaagaagaggaggaagag

SEQ ID NO: 184236 - DNA, 20 bp, Artificial Sequence
  Synthetic oligonucleotide; AGG chr2 60461411 60461430 60461414 -
ggaagaagaggaggaagagg

SEQ ID NO: 184237 - DNA, 20 bp, Artificial Sequence
  Synthetic oligonucleotide; GAG chr2 60461409 60461428 60461412 -
aagaagaggaggaagaggag

SEQ ID NO: 184238 - DNA, 20 bp, Artificial Sequence
  Synthetic oligonucleotide; AGG chr2 60461408 60461427 60461411 -
agaagaggaggaagaggagg

SEQ ID NO: 184239 - DNA, 20 bp, Artificial Sequence
  Synthetic oligonucleotide; GAG chr2 60461406 60461425 60461409 -
aagaggaggaagaggaggag

SEQ ID NO: 184240 - DNA, 20 bp, Artificial Sequence
  Synthetic oligonucleotide; AGG chr2 60461405 60461424 60461408 -
agaggaggaagaggaggagg

SEQ ID NO: 184241 - DNA, 20 bp, Artificial Sequence
  Synthetic oligonucleotide; GAG chr2 60461403 60461422 60461406 -
aggaggaagaggaggaggag

SEQ ID NO: 184242 - DNA, 20 bp, Artificial Sequence
  Synthetic oligonucleotide; CGG chr2 60461396 60461415 60461399 -
agaggaggaggaggagctga

SEQ ID NO: 184243 - DNA, 20 bp, Artificial Sequence
  Synthetic oligonucleotide; GAG chr2 60461394 60461413 60461397 -
aggaggaggaggagctgacg

SEQ ID NO: 184244 - DNA, 20 bp, Artificial Sequence
  Synthetic oligonucleotide; GAG chr2 60461392 60461411 60461395 -
gaggaggaggagctgacgga

SEQ ID NO: 184245 - DNA, 20 bp, Artificial Sequence
  Synthetic oligonucleotide; GAG chr2 60461388 60461407 60461391 -
aggaggagctgacggagagc

SEQ ID NO: 184246 - DNA, 20 bp, Artificial Sequence
  Synthetic oligonucleotide; GAG chr2 60461386 60461405 60461389 -
gaggagctgacggagagcga

SEQ ID NO: 184247 - DNA, 20 bp, Artificial Sequence
  Synthetic oligonucleotide; AGG chr2 60461385 60461404 60461388 -
aggagctgacggagagcgag

SEQ ID NO: 184248 - DNA, 20 bp, Artificial Sequence
  Synthetic oligonucleotide; GGG chr2 60461384 60461403 60461387 -
ggagctgacggagagcgaga

SEQ ID NO: 184249 - DNA, 20 bp, Artificial Sequence
  Synthetic oligonucleotide; TGG chr2 60461381 60461400 60461384 -
gctgacggagagcgagaggg

SEQ ID NO: 184250 - DNA, 20 bp, Artificial Sequence
  Synthetic oligonucleotide; CGG chr2 60461374 60461393 60461377 -
gagagcgagagggtggacta

SEQ ID NO: 184251 - DNA, 20 bp, Artificial Sequence
  Synthetic oligonucleotide; CGG chr2 60461368 60461387 60461371 -
gagagggtggactacggctt

SEQ ID NO: 184252 - DNA, 20 bp, Artificial Sequence
  Synthetic oligonucleotide; GGG chr2 60461367 60461386 60461370 -
agagggtggactacggcttc

SEQ ID NO: 184253 - DNA, 20 bp, Artificial Sequence
  Synthetic oligonucleotide; GAG chr2 60461362 60461381 60461365 -
gtggactacggcttcgggct

SEQ ID NO: 184254 - DNA, 20 bp, Artificial Sequence
  Synthetic oligonucleotide; TGG chr2 60461357 60461376 60461360 -
ctacggcttcgggctgagcc

SEQ ID NO: 184255 - DNA, 20 bp, Artificial Sequence
  Synthetic oligonucleotide; GAG chr2 60461355 60461374 60461358 -
acggcttcgggctgagcctg

SEQ ID NO: 184256 - DNA, 20 bp, Artificial Sequence
  Synthetic oligonucleotide; AGG chr2 60461354 60461373 60461357 -
cggcttcgggctgagcctgg

SEQ ID NO: 184257 - DNA, 20 bp, Artificial Sequence
  Synthetic oligonucleotide; CGG chr2 60461351 60461370 60461354 -
cttcgggctgagcctggagg

SEQ ID NO: 184258 - DNA, 20 bp, Artificial Sequence
  Synthetic oligonucleotide; GAG chr2 60461337 60461356 60461340 -
tggaggcggcgcgccaccac

SEQ ID NO: 184259 - DNA, 20 bp, Artificial Sequence
  Synthetic oligonucleotide; CAG chr2 60461332 60461351 60461335 -
gcggcgcgccaccacgagaa

SEQ ID NO: 184260 - DNA, 20 bp, Artificial Sequence
  Synthetic oligonucleotide; CGG chr2 60461325 60461344 60461328 -
gccaccacgagaacagctcg

SEQ ID NO: 184261 - DNA, 20 bp, Artificial Sequence
  Synthetic oligonucleotide; GGG chr2 60461324 60461343 60461327 -
ccaccacgagaacagctcgc

SEQ ID NO: 184262 - DNA, 20 bp, Artificial Sequence
  Synthetic oligonucleotide; GGG chr2 60461323 60461342 60461326 -
caccacgagaacagctcgcg

SEQ ID NO: 184263 - DNA, 20 bp, Artificial Sequence
  Synthetic oligonucleotide; CGG chr2 60461318 60461337 60461321 -
cgagaacagctcgcggggcg

SEQ ID NO: 184264 - DNA, 20 bp, Artificial Sequence
  Synthetic oligonucleotide; TGG chr2 60461312 60461331 60461315 -
cagctcgcggggcgcggtcg

SEQ ID NO: 184265 - DNA, 20 bp, Artificial Sequence
  Synthetic oligonucleotide; GGG chr2 60461311 60461330 60461314 -
agctcgcggggcgcggtcgt

SEQ ID NO: 184266 - DNA, 20 bp, Artificial Sequence
  Synthetic oligonucleotide; TGG chr2 60461306 60461325 60461309 -
gcggggcgcggtcgtgggcg

SEQ ID NO: 184267 - DNA, 20 bp, Artificial Sequence
  Synthetic oligonucleotide; GGG chr2 60461305 60461324 60461308 -
cggggcgcggtcgtgggcgt

SEQ ID NO: 184268 - DNA, 20 bp, Artificial Sequence
  Synthetic oligonucleotide; GAG chr2 60461298 60461317 60461301 -
cggtcgtgggcgtgggcgac

SEQ ID NO: 184269 - DNA, 20 bp, Artificial Sequence
  Synthetic oligonucleotide; GAG chr2 60461296 60461315 60461299 -
gtcgtgggcgtgggcgacga

SEQ ID NO: 184270 - DNA, 20 bp, Artificial Sequence
  Synthetic oligonucleotide; CAG chr2 60461271 60461290 60461274 -
gcgccctgcccgacgtcatg

SEQ ID NO: 184271 - DNA, 20 bp, Artificial Sequence
  Synthetic oligonucleotide; AGG chr2 60461270 60461289 60461273 -
cgccctgcccgacgtcatgc

SEQ ID NO: 184272 - DNA, 20 bp, Artificial Sequence
  Synthetic oligonucleotide; GGG chr2 60461269 60461288 60461272 -
gccctgcccgacgtcatgca

SEQ ID NO: 184273 - DNA, 20 bp, Artificial Sequence
  Synthetic oligonucleotide; TGG chr2 60461264 60461283 60461267 -
gcccgacgtcatgcagggca

SEQ ID NO: 184274 - DNA, 20 bp, Artificial Sequence
  Synthetic oligonucleotide; CAG chr2 60461257 60461276 60461260 -
gtcatgcagggcatggtgct

SEQ ID NO: 184275 - DNA, 20 bp, Artificial Sequence
  Synthetic oligonucleotide; CAG chr2 60461247 60461266 60461250 -
gcatggtgctcagctccatg

SEQ ID NO: 184276 - DNA, 20 bp, Artificial Sequence
  Synthetic oligonucleotide; CAG chr2 60461239 60461258 60461242 -
ctcagctccatgcagcactt

SEQ ID NO: 184277 - DNA, 20 bp, Artificial Sequence
  Synthetic oligonucleotide; GAG chr2 60461235 60461254 60461238 -
gctccatgcagcacttcagc

SEQ ID NO: 184278 - DNA, 20 bp, Artificial Sequence
  Synthetic oligonucleotide; AGG chr2 60461234 60461253 60461237 -
ctccatgcagcacttcagcg

SEQ ID NO: 184279 - DNA, 20 bp, Artificial Sequence
  Synthetic oligonucleotide; CAG chr2 60461223 60461242 60461226 -
acttcagcgaggccttccac

SEQ ID NO: 184280 - DNA, 20 bp, Artificial Sequence
  Synthetic oligonucleotide; AGG chr2 60461222 60461241 60461225 -
cttcagcgaggccttccacc

SEQ ID NO: 184281 - DNA, 20 bp, Artificial Sequence
  Synthetic oligonucleotide; TGG chr2 60461216 60461235 60461219 -
cgaggccttccaccaggtcc

SEQ ID NO: 184282 - DNA, 20 bp, Artificial Sequence
  Synthetic oligonucleotide; GGG chr2 60461215 60461234 60461218 -
gaggccttccaccaggtcct

SEQ ID NO: 184283 - DNA, 20 bp, Artificial Sequence
  Synthetic oligonucleotide; GAG chr2 60461211 60461230 60461214 -
ccttccaccaggtcctgggc

SEQ ID NO: 184284 - DNA, 20 bp, Artificial Sequence
  Synthetic oligonucleotide; AAG chr2 60461208 60461227 60461211 -
tccaccaggtcctgggcgag

SEQ ID NO: 184285 - DNA, 20 bp, Artificial Sequence
  Synthetic oligonucleotide; AAG chr2 60461202 60461221 60461205 -
aggtcctgggcgagaagcat

SEQ ID NO: 184286 - DNA, 20 bp, Artificial Sequence
  Synthetic oligonucleotide; CGG chr2 60461197 60461216 60461200 -
ctgggcgagaagcataagcg

SEQ ID NO: 184287 - DNA, 20 bp, Artificial Sequence
  Synthetic oligonucleotide; TGG chr2 60461189 60461208 60461192 -
gaagcataagcgcggccacc

SEQ ID NO: 184288 - DNA, 20 bp, Artificial Sequence
  Synthetic oligonucleotide; GAG chr2 60461184 60461203 60461187 -
ataagcgcggccacctggcc

SEQ ID NO: 184289 - DNA, 20 bp, Artificial Sequence
  Synthetic oligonucleotide; AGG chr2 60461183 60461202 60461186 -
taagcgcggccacctggccg

SEQ ID NO: 184290 - DNA, 20 bp, Artificial Sequence
  Synthetic oligonucleotide; GAG chr2 60461178 60461197 60461181 -
gcggccacctggccgaggcc

SEQ ID NO: 184291 - DNA, 20 bp, Artificial Sequence
  Synthetic oligonucleotide; AGG chr2 60461177 60461196 60461180 -
cggccacctggccgaggccg

SEQ ID NO: 184292 - DNA, 20 bp, Artificial Sequence
  Synthetic oligonucleotide; GGG chr2 60461176 60461195 60461179 -
ggccacctggccgaggccga

SEQ ID NO: 184293 - DNA, 20 bp, Artificial Sequence
  Synthetic oligonucleotide; CAG chr2 60461170 60461189 60461173 -
ctggccgaggccgagggcca

SEQ ID NO: 184294 - DNA, 20 bp, Artificial Sequence
  Synthetic oligonucleotide; AGG chr2 60461169 60461188 60461172 -
tggccgaggccgagggccac

SEQ ID NO: 184295 - DNA, 20 bp, Artificial Sequence
  Synthetic oligonucleotide; GGG chr2 60461168 60461187 60461171 -
ggccgaggccgagggccaca

SEQ ID NO: 184296 - DNA, 20 bp, Artificial Sequence
  Synthetic oligonucleotide; AAG chr2 60461153 60461172 60461156 -
ccacagggacacttgcgacg

SEQ ID NO: 184297 - DNA, 20 bp, Artificial Sequence
  Synthetic oligonucleotide; CGG chr2 60461147 60461166 60461150 -
ggacacttgcgacgaagact

SEQ ID NO: 184298 - DNA, 20 bp, Artificial Sequence
  Synthetic oligonucleotide; TGG chr2 60461144 60461163 60461147 -
cacttgcgacgaagactcgg

SEQ ID NO: 184299 - DNA, 20 bp, Artificial Sequence
  Synthetic oligonucleotide; CGG chr2 60461140 60461159 60461143 -
tgcgacgaagactcggtggc

SEQ ID NO: 184300 - DNA, 20 bp, Artificial Sequence
  Synthetic oligonucleotide; GAG chr2 60461136 60461155 60461139 -
acgaagactcggtggccggc

SEQ ID NO: 184301 - DNA, 20 bp, Artificial Sequence
  Synthetic oligonucleotide; CGG chr2 60461132 60461151 60461135 -
agactcggtggccggcgagt

SEQ ID NO: 184302 - DNA, 20 bp, Artificial Sequence
  Synthetic oligonucleotide; TAG chr2 60461123 60461142 60461126 -
ggccggcgagtcggaccgca

SEQ ID NO: 184303 - DNA, 20 bp, Artificial Sequence
  Synthetic oligonucleotide; TGG chr2 60461116 60461135 60461119 -
gagtcggaccgcatagacga

SEQ ID NO: 184304 - DNA, 20 bp, Artificial Sequence
  Synthetic oligonucleotide; TGG chr2 60461104 60461123 60461107 -
atagacgatggcactgttaa

SEQ ID NO: 184305 - DNA, 20 bp, Artificial Sequence
  Synthetic oligonucleotide; CGG chr2 60461098 60461117 60461101 -
gatggcactgttaatggccg

SEQ ID NO: 184306 - DNA, 20 bp, Artificial Sequence
  Synthetic oligonucleotide; CGG chr2 60461087 60461106 60461090 -
taatggccgcggctgctccc

SEQ ID NO: 184307 - DNA, 20 bp, Artificial Sequence
  Synthetic oligonucleotide; GGG chr2 60461086 60461105 60461089 -
aatggccgcggctgctcccc

SEQ ID NO: 184308 - DNA, 20 bp, Artificial Sequence
  Synthetic oligonucleotide; GAG chr2 60461082 60461101 60461085 -
gccgcggctgctccccgggc

SEQ ID NO: 184309 - DNA, 20 bp, Artificial Sequence
  Synthetic oligonucleotide; CGG chr2 60461078 60461097 60461081 -
cggctgctccccgggcgagt

SEQ ID NO: 184310 - DNA, 20 bp, Artificial Sequence
  Synthetic oligonucleotide; CGG chr2 60461072 60461091 60461075 -
ctccccgggcgagtcggcct

SEQ ID NO: 184311 - DNA, 20 bp, Artificial Sequence
  Synthetic oligonucleotide; GGG chr2 60461071 60461090 60461074 -
tccccgggcgagtcggcctc

SEQ ID NO: 184312 - DNA, 20 bp, Artificial Sequence
  Synthetic oligonucleotide; GGG chr2 60461070 60461089 60461073 -
ccccgggcgagtcggcctcg

SEQ ID NO: 184313 - DNA, 20 bp, Artificial Sequence
  Synthetic oligonucleotide; GGG chr2 60461069 60461088 60461072 -
cccgggcgagtcggcctcgg

SEQ ID NO: 184314 - DNA, 20 bp, Artificial Sequence
  Synthetic oligonucleotide; GGG chr2 60461068 60461087 60461071 -
ccgggcgagtcggcctcggg

SEQ ID NO: 184315 - DNA, 20 bp, Artificial Sequence
  Synthetic oligonucleotide; AAG chr2 60461055 60461074 60461058 -
cctcggggggcctgtccaaa

SEQ ID NO: 184316 - DNA, 20 bp, Artificial Sequence
  Synthetic oligonucleotide; TGG chr2 60461045 60461064 60461048 -
cctgtccaaaaagctgctgc

SEQ ID NO: 184317 - DNA, 20 bp, Artificial Sequence
  Synthetic oligonucleotide; GGG chr2 60461044 60461063 60461047 -
ctgtccaaaaagctgctgct

SEQ ID NO: 184318 - DNA, 20 bp, Artificial Sequence
  Synthetic oligonucleotide; CAG chr2 60461041 60461060 60461044 -
tccaaaaagctgctgctggg

SEQ ID NO: 184319 - DNA, 20 bp, Artificial Sequence
  Synthetic oligonucleotide; CAG chr2 60461035 60461054 60461038 -
aagctgctgctgggcagccc

SEQ ID NO: 184320 - DNA, 20 bp, Artificial Sequence
  Synthetic oligonucleotide; GAG chr2 60461026 60461045 60461029 -
ctgggcagccccagctcgct

SEQ ID NO: 184321 - DNA, 20 bp, Artificial Sequence
  Synthetic oligonucleotide; AAG chr2 60461013 60461032 60461016 -
gctcgctgagccccttctct

SEQ ID NO: 184322 - DNA, 20 bp, Artificial Sequence
  Synthetic oligonucleotide; AAG chr2 60461004 60461023 60461007 -
gccccttctctaagcgcatc

SEQ ID NO: 184323 - DNA, 20 bp, Artificial Sequence
  Synthetic oligonucleotide; GAG chr2 60460998 60461017 60461001 -
tctctaagcgcatcaagctc

SEQ ID NO: 184324 - DNA, 20 bp, Artificial Sequence
  Synthetic oligonucleotide; AAG chr2 60460995 60461014 60460998 -
ctaagcgcatcaagctcgag

SEQ ID NO: 184325 - DNA, 20 bp, Artificial Sequence
  Synthetic oligonucleotide; AGG chr2 60460994 60461013 60460997 -
taagcgcatcaagctcgaga

SEQ ID NO: 184326 - DNA, 20 bp, Artificial Sequence
  Synthetic oligonucleotide; GAG chr2 60460992 60461011 60460995 -
agcgcatcaagctcgagaag

SEQ ID NO: 184327 - DNA, 20 bp, Artificial Sequence
  Synthetic oligonucleotide; CGG chr2 60460976 60460995 60460979 -
gaaggagttcgacctgcccc

SEQ ID NO: 184328 - DNA, 20 bp, Artificial Sequence
  Synthetic oligonucleotide; CGG chr2 60460958 60460977 60460961 -
cccggccgcgatgcccaaca

SEQ ID NO: 184329 - DNA, 20 bp, Artificial Sequence
  Synthetic oligonucleotide; GAG chr2 60460956 60460975 60460959 -
cggccgcgatgcccaacacg

SEQ ID NO: 184330 - DNA, 20 bp, Artificial Sequence
  Synthetic oligonucleotide; CAG chr2 60460941 60460960 60460944 -
acacggagaacgtgtactcg

SEQ ID NO: 184331 - DNA, 20 bp, Artificial Sequence
  Synthetic oligonucleotide; TGG chr2 60460938 60460957 60460941 -
cggagaacgtgtactcgcag

SEQ ID NO: 184332 - DNA, 20 bp, Artificial Sequence
  Synthetic oligonucleotide; CGG chr2 60460930 60460949 60460933 -
gtgtactcgcagtggctcgc

SEQ ID NO: 184333 - DNA, 20 bp, Artificial Sequence
  Synthetic oligonucleotide; CGG chr2 60460922 60460941 60460925 -
gcagtggctcgccggctacg

SEQ ID NO: 184334 - DNA, 20 bp, Artificial Sequence
  Synthetic oligonucleotide; CAG chr2 60460915 60460934 60460918 -
ctcgccggctacgcggcctc

SEQ ID NO: 184335 - DNA, 20 bp, Artificial Sequence
  Synthetic oligonucleotide; AGG chr2 60460914 60460933 60460917 -
tcgccggctacgcggcctcc

SEQ ID NO: 184336 - DNA, 20 bp, Artificial Sequence
  Synthetic oligonucleotide; CAG chr2 60460911 60460930 60460914 -
ccggctacgcggcctccagg

SEQ ID NO: 184337 - DNA, 20 bp, Artificial Sequence
  Synthetic oligonucleotide; AAG chr2 60460904 60460923 60460907 -
cgcggcctccaggcagctca

SEQ ID NO: 184338 - DNA, 20 bp, Artificial Sequence
  Synthetic oligonucleotide; TAG chr2 60460891 60460910 60460894 -
cagctcaaagatcccttcct

SEQ ID NO: 184339 - DNA, 20 bp, Artificial Sequence
  Synthetic oligonucleotide; CGG chr2 60460885 60460904 60460888 -
aaagatcccttccttagctt

SEQ ID NO: 184340 - DNA, 20 bp, Artificial Sequence
  Synthetic oligonucleotide; GAG chr2 60460883 60460902 60460886 -
agatcccttccttagcttcg

SEQ ID NO: 184341 - DNA, 20 bp, Artificial Sequence
  Synthetic oligonucleotide; CAG chr2 60460876 60460895 60460879 -
ttccttagcttcggagactc

SEQ ID NO: 184342 - DNA, 20 bp, Artificial Sequence
  Synthetic oligonucleotide; CGG chr2 60460850 60460869 60460853 -
atcgccttttgcctcctcgt

SEQ ID NO: 184343 - DNA, 20 bp, Artificial Sequence
  Synthetic oligonucleotide; GAG chr2 60460848 60460867 60460851 -
cgccttttgcctcctcgtcg

SEQ ID NO: 184344 - DNA, 20 bp, Artificial Sequence
  Synthetic oligonucleotide; CGG chr2 60460838 60460857 60460841 -
ctcctcgtcggagcactcct

SEQ ID NO: 184345 - DNA, 20 bp, Artificial Sequence
  Synthetic oligonucleotide; GAG chr2 60460836 60460855 60460839 -
cctcgtcggagcactcctcg

SEQ ID NO: 184346 - DNA, 20 bp, Artificial Sequence
  Synthetic oligonucleotide; CGG chr2 60460831 60460850 60460834 -
tcggagcactcctcggagaa

SEQ ID NO: 184347 - DNA, 20 bp, Artificial Sequence
  Synthetic oligonucleotide; GGG chr2 60460830 60460849 60460833 -
cggagcactcctcggagaac

SEQ ID NO: 184348 - DNA, 20 bp, Artificial Sequence
  Synthetic oligonucleotide; GAG chr2 60460828 60460847 60460831 -
gagcactcctcggagaacgg

SEQ ID NO: 184349 - DNA, 20 bp, Artificial Sequence
  Synthetic oligonucleotide; CGG chr2 60460804 60460823 60460807 -
ttgcgcttctccacaccgcc

SEQ ID NO: 184350 - DNA, 20 bp, Artificial Sequence
  Synthetic oligonucleotide; GGG chr2 60460803 60460822 60460806 -
tgcgcttctccacaccgccc

SEQ ID NO: 184351 - DNA, 20 bp, Artificial Sequence
  Synthetic oligonucleotide; GGG chr2 60460802 60460821 60460805 -
gcgcttctccacaccgcccg

SEQ ID NO: 184352 - DNA, 20 bp, Artificial Sequence
  Synthetic oligonucleotide; GAG chr2 60460800 60460819 60460803 -
gcttctccacaccgcccggg

SEQ ID NO: 184353 - DNA, 20 bp, Artificial Sequence
  Synthetic oligonucleotide; TGG chr2 60460796 60460815 60460799 -
ctccacaccgcccggggagc

SEQ ID NO: 184354 - DNA, 20 bp, Artificial Sequence
  Synthetic oligonucleotide; CGG chr2 60460792 60460811 60460795 -
acaccgcccggggagctgga

SEQ ID NO: 184355 - DNA, 20 bp, Artificial Sequence
  Synthetic oligonucleotide; GAG chr2 60460790 60460809 60460793 -
accgcccggggagctggacg

SEQ ID NO: 184356 - DNA, 20 bp, Artificial Sequence
  Synthetic oligonucleotide; AGG chr2 60460789 60460808 60460792 -
ccgcccggggagctggacgg

SEQ ID NO: 184357 - DNA, 20 bp, Artificial Sequence
  Synthetic oligonucleotide; GGG chr2 60460788 60460807 60460791 -
cgcccggggagctggacgga

SEQ ID NO: 184358 - DNA, 20 bp, Artificial Sequence
  Synthetic oligonucleotide; CGG chr2 60460781 60460800 60460784 -
ggagctggacggagggatct

SEQ ID NO: 184359 - DNA, 20 bp, Artificial Sequence
  Synthetic oligonucleotide; GGG chr2 60460780 60460799 60460783 -
gagctggacggagggatctc

SEQ ID NO: 184360 - DNA, 20 bp, Artificial Sequence
  Synthetic oligonucleotide; GGG chr2 60460779 60460798 60460782 -
agctggacggagggatctcg

SEQ ID NO: 184361 - DNA, 20 bp, Artificial Sequence
  Synthetic oligonucleotide; CAG chr2 60460774 60460793 60460777 -
gacggagggatctcggggcg

SEQ ID NO: 184362 - DNA, 20 bp, Artificial Sequence
  Synthetic oligonucleotide; CGG chr2 60460771 60460790 60460774 -
ggagggatctcggggcgcag

SEQ ID NO: 184363 - DNA, 20 bp, Artificial Sequence
  Synthetic oligonucleotide; CGG chr2 60460766 60460785 60460769 -
gatctcggggcgcagcggca

SEQ ID NO: 184364 - DNA, 20 bp, Artificial Sequence
  Synthetic oligonucleotide; GGG chr2 60460765 60460784 60460768 -
atctcggggcgcagcggcac

SEQ ID NO: 184365 - DNA, 20 bp, Artificial Sequence
  Synthetic oligonucleotide; AAG chr2 60460762 60460781 60460765 -
tcggggcgcagcggcacggg

SEQ ID NO: 184366 - DNA, 20 bp, Artificial Sequence
  Synthetic oligonucleotide; TGG chr2 60460759 60460778 60460762 -
gggcgcagcggcacgggaag

SEQ ID NO: 184367 - DNA, 20 bp, Artificial Sequence
  Synthetic oligonucleotide; GAG chr2 60460757 60460776 60460760 -
gcgcagcggcacgggaagtg

SEQ ID NO: 184368 - DNA, 20 bp, Artificial Sequence
  Synthetic oligonucleotide; AGG chr2 60460756 60460775 60460759 -
cgcagcggcacgggaagtgg

SEQ ID NO: 184369 - DNA, 20 bp, Artificial Sequence
  Synthetic oligonucleotide; GGG chr2 60460755 60460774 60460758 -
gcagcggcacgggaagtgga

SEQ ID NO: 184370 - DNA, 20 bp, Artificial Sequence
  Synthetic oligonucleotide; GAG chr2 60460753 60460772 60460756 -
agcggcacgggaagtggagg

SEQ ID NO: 184371 - DNA, 20 bp, Artificial Sequence
  Synthetic oligonucleotide; TAG chr2 60460738 60460757 60460741 -
ggagggagcacgccccatat

SEQ ID NO: 184372 - DNA, 20 bp, Artificial Sequence
  Synthetic oligonucleotide; TGG chr2 60460735 60460754 60460738 -
gggagcacgccccatattag

SEQ ID NO: 184373 - DNA, 20 bp, Artificial Sequence
  Synthetic oligonucleotide; CGG chr2 60460730 60460749 60460733 -
cacgccccatattagtggtc

SEQ ID NO: 184374 - DNA, 20 bp, Artificial Sequence
  Synthetic oligonucleotide; GGG chr2 60460729 60460748 60460732 -
acgccccatattagtggtcc

SEQ ID NO: 184375 - DNA, 20 bp, Artificial Sequence
  Synthetic oligonucleotide; CGG chr2 60460724 60460743 60460727 -
ccatattagtggtccgggcc

SEQ ID NO: 184376 - DNA, 20 bp, Artificial Sequence
  Synthetic oligonucleotide; GGG chr2 60460723 60460742 60460726 -
catattagtggtccgggccc

SEQ ID NO: 184377 - DNA, 20 bp, Artificial Sequence
  Synthetic oligonucleotide; CAG chr2 60460720 60460739 60460723 -
attagtggtccgggcccggg

SEQ ID NO: 184378 - DNA, 20 bp, Artificial Sequence
  Synthetic oligonucleotide; AGG chr2 60460719 60460738 60460722 -
ttagtggtccgggcccgggc

SEQ ID NO: 184379 - DNA, 20 bp, Artificial Sequence
  Synthetic oligonucleotide; CAG chr2 60460714 60460733 60460717 -
ggtccgggcccgggcaggcc

SEQ ID NO: 184380 - DNA, 20 bp, Artificial Sequence
  Synthetic oligonucleotide; AAG chr2 60460706 60460725 60460709 -
cccgggcaggcccagctcaa

SEQ ID NO: 184381 - DNA, 20 bp, Artificial Sequence
  Synthetic oligonucleotide; GAG chr2 60460704 60460723 60460707 -
cgggcaggcccagctcaaaa

SEQ ID NO: 184382 - DNA, 20 bp, Artificial Sequence
  Synthetic oligonucleotide; AGG chr2 60460703 60460722 60460706 -
gggcaggcccagctcaaaag

SEQ ID NO: 184383 - DNA, 20 bp, Artificial Sequence
  Synthetic oligonucleotide; GGG chr2 60460702 60460721 60460705 -
ggcaggcccagctcaaaaga

SEQ ID NO: 184384 - DNA, 20 bp, Artificial Sequence
  Synthetic oligonucleotide; CAG chr2 60460699 60460718 60460702 -
aggcccagctcaaaagaggg

SEQ ID NO: 184385 - DNA, 20 bp, Artificial Sequence
  Synthetic oligonucleotide; CAG chr2 60460693 60460712 60460696 -
agctcaaaagagggcagacg

SEQ ID NO: 184386 - DNA, 20 bp, Artificial Sequence
  Synthetic oligonucleotide; GAG chr2 60460680 60460699 60460683 -
gcagacgcagcgacacttgt

SEQ ID NO: 184387 - DNA, 20 bp, Artificial Sequence
  Synthetic oligonucleotide; TGG chr2 60460672 60460691 60460675 -
agcgacacttgtgagtactg

SEQ ID NO: 184388 - DNA, 20 bp, Artificial Sequence
  Synthetic oligonucleotide; GGG chr2 60460671 60460690 60460674 -
gcgacacttgtgagtactgt

SEQ ID NO: 184389 - DNA, 20 bp, Artificial Sequence
  Synthetic oligonucleotide; AAG chr2 60460667 60460686 60460670 -
cacttgtgagtactgtggga

SEQ ID NO: 184390 - DNA, 20 bp, Artificial Sequence
  Synthetic oligonucleotide; AAG chr2 60460659 60460678 60460662 -
agtactgtgggaaagtcttc

SEQ ID NO: 184391 - DNA, 20 bp, Artificial Sequence
  Synthetic oligonucleotide; TAG chr2 60460651 60460670 60460654 -
gggaaagtcttcaagaactg

SEQ ID NO: 184392 - DNA, 20 bp, Artificial Sequence
  Synthetic oligonucleotide; CAG chr2 60460633 60460652 60460636 -
tgtagcaatctcactgtcca

SEQ ID NO: 184393 - DNA, 20 bp, Artificial Sequence
  Synthetic oligonucleotide; AGG chr2 60460632 60460651 60460635 -
gtagcaatctcactgtccac

SEQ ID NO: 184394 - DNA, 20 bp, Artificial Sequence
  Synthetic oligonucleotide; GAG chr2 60460630 60460649 60460633 -
agcaatctcactgtccacag

SEQ ID NO: 184395 - DNA, 20 bp, Artificial Sequence
  Synthetic oligonucleotide; AAG chr2 60460627 60460646 60460630 -
aatctcactgtccacaggag

SEQ ID NO: 184396 - DNA, 20 bp, Artificial Sequence
  Synthetic oligonucleotide; CGG chr2 60460619 60460638 60460622 -
tgtccacaggagaagccaca

SEQ ID NO: 184397 - DNA, 20 bp, Artificial Sequence
  Synthetic oligonucleotide; GGG chr2 60460618 60460637 60460621 -
gtccacaggagaagccacac

SEQ ID NO: 184398 - DNA, 20 bp, Artificial Sequence
  Synthetic oligonucleotide; AAG chr2 60460612 60460631 60460615 -
aggagaagccacacgggcga

SEQ ID NO: 184399 - DNA, 20 bp, Artificial Sequence
  Synthetic oligonucleotide; AGG chr2 60460611 60460630 60460614 -
ggagaagccacacgggcgaa

SEQ ID NO: 184400 - DNA, 20 bp, Artificial Sequence
  Synthetic oligonucleotide; GAG chr2 60460596 60460615 60460599 -
gcgaaaggccttataaatgc

SEQ ID NO: 184401 - DNA, 20 bp, Artificial Sequence
  Synthetic oligonucleotide; CAG chr2 60460572 60460591 60460575 -
tgtgcaactatgcctgtgcc

SEQ ID NO: 184402 - DNA, 20 bp, Artificial Sequence
  Synthetic oligonucleotide; GAG chr2 60460570 60460589 60460573 -
tgcaactatgcctgtgccca

SEQ ID NO: 184403 - DNA, 20 bp, Artificial Sequence
  Synthetic oligonucleotide; TAG chr2 60460567 60460586 60460570 -
aactatgcctgtgcccagag

SEQ ID NO: 184404 - DNA, 20 bp, Artificial Sequence
  Synthetic oligonucleotide; AAG chr2 60460563 60460582 60460566 -
atgcctgtgcccagagtagc

SEQ ID NO: 184405 - DNA, 20 bp, Artificial Sequence
  Synthetic oligonucleotide; CAG chr2 60460555 60460574 60460558 -
gcccagagtagcaagctcac

SEQ ID NO: 184406 - DNA, 20 bp, Artificial Sequence
  Synthetic oligonucleotide; AGG chr2 60460554 60460573 60460557 -
cccagagtagcaagctcacc

SEQ ID NO: 184407 - DNA, 20 bp, Artificial Sequence
  Synthetic oligonucleotide; TGG chr2 60460537 60460556 60460540 -
accaggcacatgaaaacgca

SEQ ID NO: 184408 - DNA, 20 bp, Artificial Sequence
  Synthetic oligonucleotide; CAG chr2 60460533 60460552 60460536 -
ggcacatgaaaacgcatggc

SEQ ID NO: 184409 - DNA, 20 bp, Artificial Sequence
  Synthetic oligonucleotide; AGG chr2 60460532 60460551 60460535 -
gcacatgaaaacgcatggcc

SEQ ID NO: 184410 - DNA, 20 bp, Artificial Sequence
  Synthetic oligonucleotide; TGG chr2 60460529 60460548 60460532 -
catgaaaacgcatggccagg

SEQ ID NO: 184411 - DNA, 20 bp, Artificial Sequence
  Synthetic oligonucleotide; GGG chr2 60460528 60460547 60460531 -
atgaaaacgcatggccaggt

SEQ ID NO: 184412 - DNA, 20 bp, Artificial Sequence
  Synthetic oligonucleotide; GGG chr2 60460527 60460546 60460530 -
tgaaaacgcatggccaggtg

SEQ ID NO: 184413 - DNA, 20 bp, Artificial Sequence
  Synthetic oligonucleotide; AAG chr2 60460524 60460543 60460527 -
aaacgcatggccaggtgggg

SEQ ID NO: 184414 - DNA, 20 bp, Artificial Sequence
  Synthetic oligonucleotide; AGG chr2 60460523 60460542 60460526 -
aacgcatggccaggtgggga

SEQ ID NO: 184415 - DNA, 20 bp, Artificial Sequence
  Synthetic oligonucleotide; AAG chr2 60460497 60460516 60460500 -
tttacaaatgtgaaatttgt

SEQ ID NO: 184416 - DNA, 20 bp, Artificial Sequence
  Synthetic oligonucleotide; TAG chr2 60460486 60460505 60460489 -
gaaatttgtaagatgccttt

SEQ ID NO: 184417 - DNA, 20 bp, Artificial Sequence
  Synthetic oligonucleotide; CAG chr2 60460477 60460496 60460480 -
aagatgccttttagcgtgta

SEQ ID NO: 184418 - DNA, 20 bp, Artificial Sequence
  Synthetic oligonucleotide; TGG chr2 60460469 60460488 60460472 -
ttttagcgtgtacagtaccc

SEQ ID NO: 184419 - DNA, 20 bp, Artificial Sequence
  Synthetic oligonucleotide; GAG chr2 60460467 60460486 60460470 -
ttagcgtgtacagtaccctg

SEQ ID NO: 184420 - DNA, 20 bp, Artificial Sequence
  Synthetic oligonucleotide; TGG chr2 60460449 60460468 60460452 -
tggagaaacacatgaaaaaa

SEQ ID NO: 184421 - DNA, 20 bp, Artificial Sequence
  Synthetic oligonucleotide; CAG chr2 60460444 60460463 60460447 -
aaacacatgaaaaaatggca

SEQ ID NO: 184422 - DNA, 20 bp, Artificial Sequence
  Synthetic oligonucleotide; GAG chr2 60460436 60460455 60460439 -
gaaaaaatggcacagtgatc

SEQ ID NO: 184423 - DNA, 20 bp, Artificial Sequence
  Synthetic oligonucleotide; TAG chr2 60460407 60460426 60460410 -
ataatgatataaaaactgaa

SEQ ID NO: 184424 - DNA, 20 bp, Artificial Sequence
  Synthetic oligonucleotide; GAG chr2 60460405 60460424 60460408 -
aatgatataaaaactgaata

SEQ ID NO: 184425 - DNA, 20 bp, Artificial Sequence
  Synthetic oligonucleotide; AGG chr2 60460404 60460423 60460407 -
atgatataaaaactgaatag

SEQ ID NO: 184426 - DNA, 20 bp, Artificial Sequence
  Synthetic oligonucleotide; CAG chr2 60460331 60460350 60460334 -
tccccttccccatcgccctc

SEQ ID NO: 184427 - DNA, 20 bp, Artificial Sequence
  Synthetic oligonucleotide; TAG chr2 60460316 60460335 60460319 -
ccctccagccccactccctg

SEQ ID NO: 184428 - DNA, 20 bp, Artificial Sequence
  Synthetic oligonucleotide; AGG chr2 60460315 60460334 60460318 -
cctccagccccactccctgt

SEQ ID NO: 184429 - DNA, 20 bp, Artificial Sequence
  Synthetic oligonucleotide; TAG chr2 60460303 60460322 60460306 -
ctccctgtaggatttttttc

SEQ ID NO: 184430 - DNA, 20 bp, Artificial Sequence
  Synthetic oligonucleotide; CAG chr2 60460268 60460287 60460271 -
taaacaaacaaacaaacaaa

SEQ ID NO: 184431 - DNA, 20 bp, Artificial Sequence
  Synthetic oligonucleotide; AAG chr2 60460265 60460284 60460268 -
acaaacaaacaaacaaacag

SEQ ID NO: 184432 - DNA, 20 bp, Artificial Sequence
  Synthetic oligonucleotide; AAG chr2 60460257 60460276 60460260 -
acaaacaaacagaagtaacg

SEQ ID NO: 184433 - DNA, 20 bp, Artificial Sequence
  Synthetic oligonucleotide; AAG chr2 60460252 60460271 60460255 -
caaacagaagtaacgaagct

SEQ ID NO: 184434 - DNA, 20 bp, Artificial Sequence
  Synthetic oligonucleotide; GAG chr2 60460244 60460263 60460247 -
agtaacgaagctaagaatat

SEQ ID NO: 184435 - DNA, 20 bp, Artificial Sequence
  Synthetic oligonucleotide; GAG chr2 60460242 60460261 60460245 -
taacgaagctaagaatatga

SEQ ID NO: 184436 - DNA, 20 bp, Artificial Sequence
  Synthetic oligonucleotide; CAG chr2 60460229 60460248 60460232 -
aatatgagagtgcttgtcac

SEQ ID NO: 184437 - DNA, 20 bp, Artificial Sequence
  Synthetic oligonucleotide; TGG chr2 60460133 60460152 60460136 -
gtttgaatgcatgatctgta

SEQ ID NO: 184438 - DNA, 20 bp, Artificial Sequence
  Synthetic oligonucleotide; GGG chr2 60460132 60460151 60460135 -
tttgaatgcatgatctgtat

SEQ ID NO: 184439 - DNA, 20 bp, Artificial Sequence
  Synthetic oligonucleotide; GGG chr2 60460131 60460150 60460134 -
ttgaatgcatgatctgtatg

SEQ ID NO: 184440 - DNA, 20 bp, Artificial Sequence
  Synthetic oligonucleotide; GAG chr2 60460100 60460119 60460103 -
ttgcattttacgcaaacttt

SEQ ID NO: 184441 - DNA, 20 bp, Artificial Sequence
  Synthetic oligonucleotide; TAG chr2 60460047 60460066 60460050 -
tgtatgtttttttttaaact

SEQ ID NO: 184442 - DNA, 20 bp, Artificial Sequence
  Synthetic oligonucleotide; CAG chr2 60460043 60460062 60460046 -
tgtttttttttaaacttaga

SEQ ID NO: 184443 - DNA, 20 bp, Artificial Sequence
  Synthetic oligonucleotide; TGG chr2 60460034 60460053 60460037 -
ttaaacttagacagcatgta

SEQ ID NO: 184444 - DNA, 20 bp, Artificial Sequence
  Synthetic oligonucleotide; TGG chr2 60460024 60460043 60460027 -
acagcatgtatggtatgtta

SEQ ID NO: 184445 - DNA, 20 bp, Artificial Sequence
  Synthetic oligonucleotide; GAG chr2 60459992 60460011 60459995 -
attgtccctaattcgttgct

SEQ ID NO: 184446 - DNA, 20 bp, Artificial Sequence
  Synthetic oligonucleotide; CAG chr2 60459971 60459990 60459974 -
agcaaacatgttgctgtttc

SEQ ID NO: 184447 - DNA, 20 bp, Artificial Sequence
  Synthetic oligonucleotide; GAG chr2 60459959 60459978 60459962 -
gctgtttccagttccgttct

SEQ ID NO: 184448 - DNA, 20 bp, Artificial Sequence
  Synthetic oligonucleotide; GAG chr2 60459957 60459976 60459960 -
tgtttccagttccgttctga

SEQ ID NO: 184449 - DNA, 20 bp, Artificial Sequence
  Synthetic oligonucleotide; AAG chr2 60459951 60459970 60459954 -
cagttccgttctgagagaaa

SEQ ID NO: 184450 - DNA, 20 bp, Artificial Sequence
  Synthetic oligonucleotide; GAG chr2 60459949 60459968 60459952 -
gttccgttctgagagaaaaa

SEQ ID NO: 184451 - DNA, 20 bp, Artificial Sequence
  Synthetic oligonucleotide; GAG chr2 60459947 60459966 60459950 -
tccgttctgagagaaaaaga

SEQ ID NO: 184452 - DNA, 20 bp, Artificial Sequence
  Synthetic oligonucleotide; GAG chr2 60459945 60459964 60459948 -
cgttctgagagaaaaagaga

SEQ ID NO: 184453 - DNA, 20 bp, Artificial Sequence
  Synthetic oligonucleotide; GAG chr2 60459943 60459962 60459946 -
ttctgagagaaaaagagaga

SEQ ID NO: 184454 - DNA, 20 bp, Artificial Sequence
  Synthetic oligonucleotide; GAG chr2 60459941 60459960 60459944 -
ctgagagaaaaagagagaga

SEQ ID NO: 184455 - DNA, 20 bp, Artificial Sequence
  Synthetic oligonucleotide; GAG chr2 60459939 60459958 60459942 -
gagagaaaaagagagagaga

SEQ ID NO: 184456 - DNA, 20 bp, Artificial Sequence
  Synthetic oligonucleotide; AAG chr2 60459933 60459952 60459936 -
aaaagagagagagagagaaa

SEQ ID NO: 184457 - DNA, 20 bp, Artificial Sequence
  Synthetic oligonucleotide; CAG chr2 60459894 60459913 60459897 -
tctgtaatacatatcatgta

SEQ ID NO: 184458 - DNA, 20 bp, Artificial Sequence
  Synthetic oligonucleotide; GAG chr2 60459875 60459894 60459878 -
acagttttattttataacgt

SEQ ID NO: 184459 - DNA, 20 bp, Artificial Sequence
  Synthetic oligonucleotide; AGG chr2 60459874 60459893 60459877 -
cagttttattttataacgtg

SEQ ID NO: 184460 - DNA, 20 bp, Artificial Sequence
  Synthetic oligonucleotide; GAG chr2 60459872 60459891 60459875 -
gttttattttataacgtgag

SEQ ID NO: 184461 - DNA, 20 bp, Artificial Sequence
  Synthetic oligonucleotide; AGG chr2 60459871 60459890 60459874 -
ttttattttataacgtgagg

SEQ ID NO: 184462 - DNA, 20 bp, Artificial Sequence
  Synthetic oligonucleotide; CAG chr2 60459863 60459882 60459866 -
tataacgtgaggaggaaaaa

SEQ ID NO: 184463 - DNA, 20 bp, Artificial Sequence
  Synthetic oligonucleotide; TGG chr2 60459856 60459875 60459859 -
tgaggaggaaaaacagtctt

SEQ ID NO: 184464 - DNA, 20 bp, Artificial Sequence
  Synthetic oligonucleotide; TAG chr2 60459841 60459860 60459844 -
gtctttggattaaccctcta

SEQ ID NO: 184465 - DNA, 20 bp, Artificial Sequence
  Synthetic oligonucleotide; CAG chr2 60459837 60459856 60459840 -
ttggattaaccctctataga

SEQ ID NO: 184466 - DNA, 20 bp, Artificial Sequence
  Synthetic oligonucleotide; TAG chr2 60459832 60459851 60459835 -
ttaaccctctatagacagaa

SEQ ID NO: 184467 - DNA, 20 bp, Artificial Sequence
  Synthetic oligonucleotide; TAG chr2 60459828 60459847 60459831 -
ccctctatagacagaataga

SEQ ID NO: 184468 - DNA, 20 bp, Artificial Sequence
  Synthetic oligonucleotide; GAG chr2 60459805 60459824 60459808 -
cactgaaaaaaaatctctat

SEQ ID NO: 184469 - DNA, 20 bp, Artificial Sequence
  Synthetic oligonucleotide; AAG chr2 60459785 60459804 60459788 -
gagctaaatgtctgtctcta

SEQ ID NO: 184470 - DNA, 20 bp, Artificial Sequence
  Synthetic oligonucleotide; AGG chr2 60459784 60459803 60459787 -
agctaaatgtctgtctctaa

SEQ ID NO: 184471 - DNA, 20 bp, Artificial Sequence
  Synthetic oligonucleotide; GGG chr2 60459783 60459802 60459786 -
gctaaatgtctgtctctaaa

SEQ ID NO: 184472 - DNA, 20 bp, Artificial Sequence
  Synthetic oligonucleotide; TGG chr2 60459766 60459785 60459769 -
aaagggttaaatgtatcaat

SEQ ID NO: 184473 - DNA, 20 bp, Artificial Sequence
  Synthetic oligonucleotide; AAG chr2 60459762 60459781 60459765 -
ggttaaatgtatcaattgga

SEQ ID NO: 184474 - DNA, 20 bp, Artificial Sequence
  Synthetic oligonucleotide; AGG chr2 60459761 60459780 60459764 -
gttaaatgtatcaattggaa

SEQ ID NO: 184475 - DNA, 20 bp, Artificial Sequence
  Synthetic oligonucleotide; AAG chr2 60459758 60459777 60459761 -
aaatgtatcaattggaaagg

SEQ ID NO: 184476 - DNA, 20 bp, Artificial Sequence
  Synthetic oligonucleotide; AAG chr2 60459751 60459770 60459754 -
tcaattggaaaggaagaaaa

SEQ ID NO: 184477 - DNA, 20 bp, Artificial Sequence
  Synthetic oligonucleotide; AGG chr2 60459750 60459769 60459753 -
caattggaaaggaagaaaaa

SEQ ID NO: 184478 - DNA, 20 bp, Artificial Sequence
  Synthetic oligonucleotide; CAG chr2 60459728 60459747 60459731 -
gccttgaattgacaaattaa

SEQ ID NO: 184479 - DNA, 20 bp, Artificial Sequence
  Synthetic oligonucleotide; CAG chr2 60459720 60459739 60459723 -
ttgacaaattaacagaaaaa

SEQ ID NO: 184480 - DNA, 20 bp, Artificial Sequence
  Synthetic oligonucleotide; AAG chr2 60459714 60459733 60459717 -
aattaacagaaaaacagaac

SEQ ID NO: 184481 - DNA, 20 bp, Artificial Sequence
  Synthetic oligonucleotide; TGG chr2 60459697 60459716 60459700 -
aacaagtttattctatcatt

SEQ ID NO: 184482 - DNA, 20 bp, Artificial Sequence
  Synthetic oligonucleotide; GAG chr2 60459683 60459702 60459686 -
atcatttggttttaaaatat

SEQ ID NO: 184483 - DNA, 20 bp, Artificial Sequence
  Synthetic oligonucleotide; TGG chr2 60459675 60459694 60459678 -
gttttaaaatatgagtgcct

SEQ ID NO: 184484 - DNA, 20 bp, Artificial Sequence
  Synthetic oligonucleotide; TGG chr2 60459652 60459671 60459655 -
atctattaaaaccacatcga

SEQ ID NO: 184485 - DNA, 20 bp, Artificial Sequence
  Synthetic oligonucleotide; TAG chr2 60459625 60459644 60459628 -
ttctacttgttataaacttg

SEQ ID NO: 184486 - DNA, 20 bp, Artificial Sequence
  Synthetic oligonucleotide; CAG chr2 60459615 60459634 60459618 -
tataaacttgtagcttaatt

SEQ ID NO: 184487 - DNA, 20 bp, Artificial Sequence
  Synthetic oligonucleotide; TGG chr2 60459609 60459628 60459612 -
cttgtagcttaattcagcat

SEQ ID NO: 184488 - DNA, 20 bp, Artificial Sequence
  Synthetic oligonucleotide; GGG chr2 60459608 60459627 60459611 -
ttgtagcttaattcagcatt

SEQ ID NO: 184489 - DNA, 20 bp, Artificial Sequence
  Synthetic oligonucleotide; GAG chr2 60459604 60459623 60459607 -
agcttaattcagcattgggt

SEQ ID NO: 184490 - DNA, 20 bp, Artificial Sequence
  Synthetic oligonucleotide; AGG chr2 60459603 60459622 60459606 -
gcttaattcagcattgggtg

SEQ ID NO: 184491 - DNA, 20 bp, Artificial Sequence
  Synthetic oligonucleotide; TAG chr2 60459590 60459609 60459593 -
ttgggtgaggtaataaacct

SEQ ID NO: 184492 - DNA, 20 bp, Artificial Sequence
  Synthetic oligonucleotide; AGG chr2 60459589 60459608 60459592 -
tgggtgaggtaataaacctt

SEQ ID NO: 184493 - DNA, 20 bp, Artificial Sequence
  Synthetic oligonucleotide; TAG chr2 60459583 60459602 60459586 -
aggtaataaaccttaggaac

SEQ ID NO: 184494 - DNA, 20 bp, Artificial Sequence
  Synthetic oligonucleotide; TGG chr2 60459548 60459567 60459551 -
tattgtatttctcacaacaa

SEQ ID NO: 184495 - DNA, 20 bp, Artificial Sequence
  Synthetic oligonucleotide; AAG chr2 60459536 60459555 60459539 -
cacaacaatggctacctaaa

SEQ ID NO: 184496 - DNA, 20 bp, Artificial Sequence
  Synthetic oligonucleotide; TAG chr2 60459517 60459536 60459520 -
aaagatgacccattatgtcc

SEQ ID NO: 184497 - DNA, 20 bp, Artificial Sequence
  Synthetic oligonucleotide; TAG chr2 60459495 60459514 60459498 -
gttaatcatcatttttcctt

SEQ ID NO: 184498 - DNA, 20 bp, Artificial Sequence
  Synthetic oligonucleotide; CAG chr2 60459463 60459482 60459466 -
ataaacaaaactgattatac

SEQ ID NO: 184499 - DNA, 20 bp, Artificial Sequence
  Synthetic oligonucleotide; AAG chr2 60459455 60459474 60459458 -
aactgattataccagtataa

SEQ ID NO: 184500 - DNA, 20 bp, Artificial Sequence
  Synthetic oligonucleotide; TGG chr2 60459440 60459459 60459443 -
tataaaagctactttgctcc

SEQ ID NO: 184501 - DNA, 20 bp, Artificial Sequence
  Synthetic oligonucleotide; GAG chr2 60459436 60459455 60459439 -
aaagctactttgctcctggt

SEQ ID NO: 184502 - DNA, 20 bp, Artificial Sequence
  Synthetic oligonucleotide; GAG chr2 60459434 60459453 60459437 -
agctactttgctcctggtga

SEQ ID NO: 184503 - DNA, 20 bp, Artificial Sequence
  Synthetic oligonucleotide; AAG chr2 60459426 60459445 60459429 -
tgctcctggtgagagcttaa

SEQ ID NO: 184504 - DNA, 20 bp, Artificial Sequence
  Synthetic oligonucleotide; TGG chr2 60459420 60459439 60459423 -
tggtgagagcttaaaagaaa

SEQ ID NO: 184505 - DNA, 20 bp, Artificial Sequence
  Synthetic oligonucleotide; GGG chr2 60459419 60459438 60459422 -
ggtgagagcttaaaagaaat

SEQ ID NO: 184506 - DNA, 20 bp, Artificial Sequence
  Synthetic oligonucleotide; AAG chr2 60459404 60459423 60459407 -
gaaatgggctgttttgccca

SEQ ID NO: 184507 - DNA, 20 bp, Artificial Sequence
  Synthetic oligonucleotide; AAG chr2 60459355 60459374 60459358 -
attgaatgtgtaatgtgcaa

SEQ ID NO: 184508 - DNA, 20 bp, Artificial Sequence
  Synthetic oligonucleotide; TGG chr2 60459349 60459368 60459352 -
tgtgtaatgtgcaaaagccc

SEQ ID NO: 184509 - DNA, 20 bp, Artificial Sequence
  Synthetic oligonucleotide; TAG chr2 60459329 60459348 60459332 -
tggaacgcaattaaatacac

SEQ ID NO: 184510 - DNA, 20 bp, Artificial Sequence
  Synthetic oligonucleotide; AAG chr2 60459325 60459344 60459328 -
acgcaattaaatacactagt

SEQ ID NO: 184511 - DNA, 20 bp, Artificial Sequence
  Synthetic oligonucleotide; AGG chr2 60459324 60459343 60459327 -
cgcaattaaatacactagta

SEQ ID NO: 184512 - DNA, 20 bp, Artificial Sequence
  Synthetic oligonucleotide; GAG chr2 60459322 60459341 60459325 -
caattaaatacactagtaag

SEQ ID NO: 184513 - DNA, 20 bp, Artificial Sequence
  Synthetic oligonucleotide; AAG chr2 60459308 60459327 60459311 -
agtaaggagttcattttatg

SEQ ID NO: 184514 - DNA, 20 bp, Artificial Sequence
  Synthetic oligonucleotide; TGG chr2 60459272 60459291 60459275 -
taatgtctttttaaaaatac

SEQ ID NO: 184515 - DNA, 20 bp, Artificial Sequence
  Synthetic oligonucleotide; AAG chr2 60459263 60459282 60459266 -
tttaaaaatactggcaccaa

SEQ ID NO: 184516 - DNA, 20 bp, Artificial Sequence
  Synthetic oligonucleotide; TAG chr2 60459257 60459276 60459260 -
aatactggcaccaaaagaaa

SEQ ID NO: 184517 - DNA, 20 bp, Artificial Sequence
  Synthetic oligonucleotide; CAG chr2 60459251 60459270 60459254 -
ggcaccaaaagaaatagatc

SEQ ID NO: 184518 - DNA, 20 bp, Artificial Sequence
  Synthetic oligonucleotide; TGG chr2 60459241 60459260 60459244 -
gaaatagatccagatctact

SEQ ID NO: 184519 - DNA, 20 bp, Artificial Sequence
  Synthetic oligonucleotide; AAG chr2 60459233 60459252 60459236 -
tccagatctacttggttgtc

SEQ ID NO: 184520 - DNA, 20 bp, Artificial Sequence
  Synthetic oligonucleotide; TGG chr2 60459230 60459249 60459233 -
agatctacttggttgtcaag

SEQ ID NO: 184521 - DNA, 20 bp, Artificial Sequence
  Synthetic oligonucleotide; AAG chr2 60459207 60459226 60459210 -
acaatcaaatgataaacttt

SEQ ID NO: 184522 - DNA, 20 bp, Artificial Sequence
  Synthetic oligonucleotide; AAG chr2 60459185 60459204 60459188 -
gaccttgtataccatattga

SEQ ID NO: 184523 - DNA, 20 bp, Artificial Sequence
  Synthetic oligonucleotide; AGG chr2 60459184 60459203 60459187 -
accttgtataccatattgaa

SEQ ID NO: 184524 - DNA, 20 bp, Artificial Sequence
  Synthetic oligonucleotide; AAG chr2 60459181 60459200 60459184 -
ttgtataccatattgaaagg

SEQ ID NO: 184525 - DNA, 20 bp, Artificial Sequence
  Synthetic oligonucleotide; GAG chr2 60459179 60459198 60459182 -
gtataccatattgaaaggaa

SEQ ID NO: 184526 - DNA, 20 bp, Artificial Sequence
  Synthetic oligonucleotide; AGG chr2 60459178 60459197 60459181 -
tataccatattgaaaggaag

SEQ ID NO: 184527 - DNA, 20 bp, Artificial Sequence
  Synthetic oligonucleotide; AAG chr2 60459167 60459186 60459170 -
gaaaggaagaggctgacaat

SEQ ID NO: 184528 - DNA, 20 bp, Artificial Sequence
  Synthetic oligonucleotide; AGG chr2 60459166 60459185 60459169 -
aaaggaagaggctgacaata

SEQ ID NO: 184529 - DNA, 20 bp, Artificial Sequence
  Synthetic oligonucleotide; CAG chr2 60459158 60459177 60459161 -
aggctgacaataaggtttga

SEQ ID NO: 184530 - DNA, 20 bp, Artificial Sequence
  Synthetic oligonucleotide; GAG chr2 60459156 60459175 60459159 -
gctgacaataaggtttgaca

SEQ ID NO: 184531 - DNA, 20 bp, Artificial Sequence
  Synthetic oligonucleotide; AGG chr2 60459155 60459174 60459158 -
ctgacaataaggtttgacag

SEQ ID NO: 184532 - DNA, 20 bp, Artificial Sequence
  Synthetic oligonucleotide; GGG chr2 60459154 60459173 60459157 -
tgacaataaggtttgacaga

SEQ ID NO: 184533 - DNA, 20 bp, Artificial Sequence
  Synthetic oligonucleotide; GGG chr2 60459153 60459172 60459156 -
gacaataaggtttgacagag

SEQ ID NO: 184534 - DNA, 20 bp, Artificial Sequence
  Synthetic oligonucleotide; CAG chr2 60459148 60459167 60459151 -
taaggtttgacagaggggaa

SEQ ID NO: 184535 - DNA, 20 bp, Artificial Sequence
  Synthetic oligonucleotide; AAG chr2 60459145 60459164 60459148 -
ggtttgacagaggggaacag

SEQ ID NO: 184536 - DNA, 20 bp, Artificial Sequence
  Synthetic oligonucleotide; TAG chr2 60459125 60459144 60459128 -
aagaaaataatatgatttat

SEQ ID NO: 184537 - DNA, 20 bp, Artificial Sequence
  Synthetic oligonucleotide; TGG chr2 60459115 60459134 60459118 -
tatgatttattagcacaacg

SEQ ID NO: 184538 - DNA, 20 bp, Artificial Sequence
  Synthetic oligonucleotide; TAG chr2 60459092 60459111 60459095 -
tactatttgccatttaaaac

SEQ ID NO: 184539 - DNA, 20 bp, Artificial Sequence
  Synthetic oligonucleotide; CAG chr2 60459087 60459106 60459090 -
tttgccatttaaaactagaa

SEQ ID NO: 184540 - DNA, 20 bp, Artificial Sequence
  Synthetic oligonucleotide; AGG chr2 60459086 60459105 60459089 -
ttgccatttaaaactagaac

SEQ ID NO: 184541 - DNA, 20 bp, Artificial Sequence
  Synthetic oligonucleotide; AAG chr2 60459078 60459097 60459081 -
taaaactagaacaggtatat

SEQ ID NO: 184542 - DNA, 20 bp, Artificial Sequence
  Synthetic oligonucleotide; AAG chr2 60459038 60459057 60459041 -
atgattaactatgaattctt

SEQ ID NO: 184543 - DNA, 20 bp, Artificial Sequence
  Synthetic oligonucleotide; AAG chr2 60459005 60459024 60459008 -
aaatgtgacattcttaaaaa

SEQ ID NO: 184544 - DNA, 20 bp, Artificial Sequence
  Synthetic oligonucleotide; AAG chr2 60459002 60459021 60459005 -
tgtgacattcttaaaaaaag

SEQ ID NO: 184545 - DNA, 20 bp, Artificial Sequence
  Synthetic oligonucleotide; GAG chr2 60459000 60459019 60459003 -
tgacattcttaaaaaaagaa

SEQ ID NO: 184546 - DNA, 20 bp, Artificial Sequence
  Synthetic oligonucleotide; AAG chr2 60458996 60459015 60458999 -
attcttaaaaaaagaagaga

SEQ ID NO: 184547 - DNA, 20 bp, Artificial Sequence
  Synthetic oligonucleotide; AAG chr2 60458987 60459006 60458990 -
aaaagaagagaaagaatttt

SEQ ID NO: 184548 - DNA, 20 bp, Artificial Sequence
  Synthetic oligonucleotide; GAG chr2 60458985 60459004 60458988 -
aagaagagaaagaattttaa

SEQ ID NO: 184549 - DNA, 20 bp, Artificial Sequence
  Synthetic oligonucleotide; TAG chr2 60458982 60459001 60458985 -
aagagaaagaattttaagag

SEQ ID NO: 184550 - DNA, 20 bp, Artificial Sequence
  Synthetic oligonucleotide; CAG chr2 60458979 60458998 60458982 -
agaaagaattttaagagtag

SEQ ID NO: 184551 - DNA, 20 bp, Artificial Sequence
  Synthetic oligonucleotide; AAG chr2 60458954 60458973 60458957 -
tatatgtctgtgctccctaa

SEQ ID NO: 184552 - DNA, 20 bp, Artificial Sequence
  Synthetic oligonucleotide; TGG chr2 60458904 60458923 60458907 -
gtgtgctatttgtgttaaca

SEQ ID NO: 184553 - DNA, 20 bp, Artificial Sequence
  Synthetic oligonucleotide; AAG chr2 60458901 60458920 60458904 -
tgctatttgtgttaacatgg

SEQ ID NO: 184554 - DNA, 20 bp, Artificial Sequence
  Synthetic oligonucleotide; GAG chr2 60458899 60458918 60458902 -
ctatttgtgttaacatggaa

SEQ ID NO: 184555 - DNA, 20 bp, Artificial Sequence
  Synthetic oligonucleotide; AGG chr2 60458898 60458917 60458901 -
tatttgtgttaacatggaag

SEQ ID NO: 184556 - DNA, 20 bp, Artificial Sequence
  Synthetic oligonucleotide; AAG chr2 60458850 60458869 60458853 -
ttaattttttcttttttatt

SEQ ID NO: 184557 - DNA, 20 bp, Artificial Sequence
  Synthetic oligonucleotide; TAG chr2 60458846 60458865 60458849 -
ttttttcttttttattaagc

SEQ ID NO: 184558 - DNA, 20 bp, Artificial Sequence
  Synthetic oligonucleotide; CAG chr2 60458834 60458853 60458837 -
tattaagctagcatctgccc

SEQ ID NO: 184559 - DNA, 20 bp, Artificial Sequence
  Synthetic oligonucleotide; TGG chr2 60458830 60458849 60458833 -
aagctagcatctgccccagt

SEQ ID NO: 184560 - DNA, 20 bp, Artificial Sequence
  Synthetic oligonucleotide; TAG chr2 60458819 60458838 60458822 -
tgccccagttggtgttcaaa

SEQ ID NO: 184561 - DNA, 20 bp, Artificial Sequence
  Synthetic oligonucleotide; CAG chr2 60458776 60458795 60458779 -
atctgtatcttttctctaat

SEQ ID NO: 184562 - DNA, 20 bp, Artificial Sequence
  Synthetic oligonucleotide; GAG chr2 60458774 60458793 60458777 -
ctgtatcttttctctaatca

SEQ ID NO: 184563 - DNA, 20 bp, Artificial Sequence
  Synthetic oligonucleotide; CAG chr2 60458768 60458787 60458771 -
cttttctctaatcagagata

SEQ ID NO: 184564 - DNA, 20 bp, Artificial Sequence
  Synthetic oligonucleotide; GAG chr2 60458766 60458785 60458769 -
tttctctaatcagagataca

SEQ ID NO: 184565 - DNA, 20 bp, Artificial Sequence
  Synthetic oligonucleotide; AGG chr2 60458765 60458784 60458768 -
ttctctaatcagagatacag

SEQ ID NO: 184566 - DNA, 20 bp, Artificial Sequence
  Synthetic oligonucleotide; GAG chr2 60458760 60458779 60458763 -
taatcagagatacagaggtt

SEQ ID NO: 184567 - DNA, 20 bp, Artificial Sequence
  Synthetic oligonucleotide; CAG chr2 60458740 60458759 60458743 -
gagtataaaataaacctgct

SEQ ID NO: 184568 - DNA, 20 bp, Artificial Sequence
  Synthetic oligonucleotide; TAG chr2 60458736 60458755 60458739 -
ataaaataaacctgctcaga

SEQ ID NO: 184569 - DNA, 20 bp, Artificial Sequence
  Synthetic oligonucleotide; AGG chr2 60458735 60458754 60458738 -
taaaataaacctgctcagat

SEQ ID NO: 184570 - DNA, 20 bp, Artificial Sequence
  Synthetic oligonucleotide; AAG chr2 60458726 60458745 60458729 -
cctgctcagataggacaatt

SEQ ID NO: 184571 - DNA, 20 bp, Artificial Sequence
  Synthetic oligonucleotide; CAG chr2 60458705 60458724 60458708 -
agtgcactgtacaattttcc

SEQ ID NO: 184572 - DNA, 20 bp, Artificial Sequence
  Synthetic oligonucleotide; CAG chr2 60458698 60458717 60458701 -
tgtacaattttcccagttta

SEQ ID NO: 184573 - DNA, 20 bp, Artificial Sequence
  Synthetic oligonucleotide; AGG chr2 60458697 60458716 60458700 -
gtacaattttcccagtttac

SEQ ID NO: 184574 - DNA, 20 bp, Artificial Sequence
  Synthetic oligonucleotide; AAG chr2 60458685 60458704 60458688 -
cagtttacaggtctatactt

SEQ ID NO: 184575 - DNA, 20 bp, Artificial Sequence
  Synthetic oligonucleotide; AGG chr2 60458684 60458703 60458687 -
agtttacaggtctatactta

SEQ ID NO: 184576 - DNA, 20 bp, Artificial Sequence
  Synthetic oligonucleotide; GGG chr2 60458683 60458702 60458686 -
gtttacaggtctatacttaa

SEQ ID NO: 184577 - DNA, 20 bp, Artificial Sequence
  Synthetic oligonucleotide; AAG chr2 60458678 60458697 60458681 -
caggtctatacttaagggaa

SEQ ID NO: 184578 - DNA, 20 bp, Artificial Sequence
  Synthetic oligonucleotide; AAG chr2 60458671 60458690 60458674 -
atacttaagggaaaagttgc

SEQ ID NO: 184579 - DNA, 20 bp, Artificial Sequence
  Synthetic oligonucleotide; GAG chr2 60458636 60458655 60458639 -
aaattgaacacaatctcatt

SEQ ID NO: 184580 - DNA, 20 bp, Artificial Sequence
  Synthetic oligonucleotide; AGG chr2 60458635 60458654 60458638 -
aattgaacacaatctcattg

SEQ ID NO: 184581 - DNA, 20 bp, Artificial Sequence
  Synthetic oligonucleotide; GAG chr2 60458633 60458652 60458636 -
ttgaacacaatctcattgag

SEQ ID NO: 184582 - DNA, 20 bp, Artificial Sequence
  Synthetic oligonucleotide; CAG chr2 60458596 60458615 60458599 -
taaaaaaaaaaaaactttgc

SEQ ID NO: 184583 - DNA, 20 bp, Artificial Sequence
  Synthetic oligonucleotide; GAG chr2 60458576 60458595 60458579 -
cagccatttacttgactatt

SEQ ID NO: 184584 - DNA, 20 bp, Artificial Sequence
  Synthetic oligonucleotide; TGG chr2 60458563 60458582 60458566 -
gactattgagcttacttact

SEQ ID NO: 184585 - DNA, 20 bp, Artificial Sequence
  Synthetic oligonucleotide; AAG chr2 60458548 60458567 60458551 -
ttacttggacgcaacattgc

SEQ ID NO: 184586 - DNA, 20 bp, Artificial Sequence
  Synthetic oligonucleotide; TGG chr2 60458536 60458555 60458539 -
aacattgcaagcgctgtgaa

SEQ ID NO: 184587 - DNA, 20 bp, Artificial Sequence
  Synthetic oligonucleotide; CAG chr2 60458530 60458549 60458533 -
gcaagcgctgtgaatggaaa

SEQ ID NO: 184588 - DNA, 20 bp, Artificial Sequence
  Synthetic oligonucleotide; TAG chr2 60458514 60458533 60458517 -
gaaacagaatacacttaaca

SEQ ID NO: 184589 - DNA, 20 bp, Artificial Sequence
  Synthetic oligonucleotide; CAG chr2 60458486 60458505 60458489 -
aatgattgctttcgcttcta

SEQ ID NO: 184590 - DNA, 20 bp, Artificial Sequence
  Synthetic oligonucleotide; AAG chr2 60458480 60458499 60458483 -
tgctttcgcttctacagtgc

SEQ ID NO: 184591 - DNA, 20 bp, Artificial Sequence
  Synthetic oligonucleotide; AGG chr2 60458479 60458498 60458482 -
gctttcgcttctacagtgca

SEQ ID NO: 184592 - DNA, 20 bp, Artificial Sequence
  Synthetic oligonucleotide; AAG chr2 60458440 60458459 60458443 -
cttttttaaatataaatgtt

SEQ ID NO: 184593 - DNA, 20 bp, Artificial Sequence
  Synthetic oligonucleotide; TAG chr2 60458404 60458423 60458407 -
aaaaaacacttcattatgtt

SEQ ID NO: 184594 - DNA, 20 bp, Artificial Sequence
  Synthetic oligonucleotide; AGG chr2 60458403 60458422 60458406 -
aaaaacacttcattatgttt

SEQ ID NO: 184595 - DNA, 20 bp, Artificial Sequence
  Synthetic oligonucleotide; GGG chr2 60458402 60458421 60458405 -
aaaacacttcattatgttta

SEQ ID NO: 184596 - DNA, 20 bp, Artificial Sequence
  Synthetic oligonucleotide; GGG chr2 60458401 60458420 60458404 -
aaacacttcattatgtttag

SEQ ID NO: 184597 - DNA, 20 bp, Artificial Sequence
  Synthetic oligonucleotide; GGG chr2 60458400 60458419 60458403 -
aacacttcattatgtttagg

SEQ ID NO: 184598 - DNA, 20 bp, Artificial Sequence
  Synthetic oligonucleotide; GGG chr2 60458399 60458418 60458402 -
acacttcattatgtttaggg

SEQ ID NO: 184599 - DNA, 20 bp, Artificial Sequence
  Synthetic oligonucleotide; TAG chr2 60458386 60458405 60458389 -
tttaggggggaactgcattt

SEQ ID NO: 184600 - DNA, 20 bp, Artificial Sequence
  Synthetic oligonucleotide; AGG chr2 60458385 60458404 60458388 -
ttaggggggaactgcatttt

SEQ ID NO: 184601 - DNA, 20 bp, Artificial Sequence
  Synthetic oligonucleotide; GGG chr2 60458384 60458403 60458387 -
taggggggaactgcatttta

SEQ ID NO: 184602 - DNA, 20 bp, Artificial Sequence
  Synthetic oligonucleotide; TGG chr2 60458370 60458389 60458373 -
attttagggttccattgtct

SEQ ID NO: 184603 - DNA, 20 bp, Artificial Sequence
  Synthetic oligonucleotide; TGG chr2 60458367 60458386 60458370 -
ttagggttccattgtcttgg

SEQ ID NO: 184604 - DNA, 20 bp, Artificial Sequence
  Synthetic oligonucleotide; AAG chr2 60458358 60458377 60458361 -
cattgtcttggtggtgttac

SEQ ID NO: 184605 - DNA, 20 bp, Artificial Sequence
  Synthetic oligonucleotide; TGG chr2 60458335 60458354 60458338 -
acttgttatccatttaaaaa

SEQ ID NO: 184606 - DNA, 20 bp, Artificial Sequence
  Synthetic oligonucleotide; TAG chr2 60458332 60458351 60458335 -
tgttatccatttaaaaatgg

SEQ ID NO: 184607 - DNA, 20 bp, Artificial Sequence
  Synthetic oligonucleotide; TGG chr2 60458329 60458348 60458332 -
tatccatttaaaaatggtag

SEQ ID NO: 184608 - DNA, 20 bp, Artificial Sequence
  Synthetic oligonucleotide; TGG chr2 60458313 60458332 60458316 -
gtagtggaaattctatgcct

SEQ ID NO: 184609 - DNA, 20 bp, Artificial Sequence
  Synthetic oligonucleotide; CAG chr2 60458295 60458314 60458298 -
cttggatacacaccgctctt

SEQ ID NO: 184610 - DNA, 20 bp, Artificial Sequence
  Synthetic oligonucleotide; AGG chr2 60458294 60458313 60458297 -
ttggatacacaccgctcttc

SEQ ID NO: 184611 - DNA, 20 bp, Artificial Sequence
  Synthetic oligonucleotide; TGG chr2 60458268 60458287 60458271 -
taaaaaaaaaaaacatacat

SEQ ID NO: 184612 - DNA, 20 bp, Artificial Sequence
  Synthetic oligonucleotide; GGG chr2 60458267 60458286 60458270 -
aaaaaaaaaaaacatacatt

SEQ ID NO: 184613 - DNA, 20 bp, Artificial Sequence
  Synthetic oligonucleotide; GGG chr2 60458266 60458285 60458269 -
aaaaaaaaaaacatacattg

SEQ ID NO: 184614 - DNA, 20 bp, Artificial Sequence
  Synthetic oligonucleotide; AAG chr2 60458262 60458281 60458265 -
aaaaaaacatacattgggga

SEQ ID NO: 184615 - DNA, 20 bp, Artificial Sequence
  Synthetic oligonucleotide; AGG chr2 60458261 60458280 60458264 -
aaaaaacatacattggggaa

SEQ ID NO: 184616 - DNA, 20 bp, Artificial Sequence
  Synthetic oligonucleotide; AAG chr2 60458255 60458274 60458258 -
catacattggggaaaggttt

SEQ ID NO: 184617 - DNA, 20 bp, Artificial Sequence
  Synthetic oligonucleotide; TAG chr2 60458246 60458265 60458249 -
gggaaaggtttaagattata

SEQ ID NO: 184618 - DNA, 20 bp, Artificial Sequence
  Synthetic oligonucleotide; TAG chr2 60458233 60458252 60458236 -
gattatatagtacttaaata

SEQ ID NO: 184619 - DNA, 20 bp, Artificial Sequence
  Synthetic oligonucleotide; AGG chr2 60458232 60458251 60458235 -
attatatagtacttaaatat

SEQ ID NO: 184620 - DNA, 20 bp, Artificial Sequence
  Synthetic oligonucleotide; TGG chr2 60458187 60458206 60458190 -
cctatgctaaaatacattta

SEQ ID NO: 184621 - DNA, 20 bp, Artificial Sequence
  Synthetic oligonucleotide; TAG chr2 60458167 60458186 60458170 -
tggtcttttttctgtatttc

SEQ ID NO: 184622 - DNA, 20 bp, Artificial Sequence
  Synthetic oligonucleotide; TGG chr2 60458162 60458181 60458165 -
ttttttctgtatttctagaa

SEQ ID NO: 184623 - DNA, 20 bp, Artificial Sequence
  Synthetic oligonucleotide; TAG chr2 60458138 60458157 60458141 -
atttgaattaaatgttcatc

SEQ ID NO: 184624 - DNA, 20 bp, Artificial Sequence
  Synthetic oligonucleotide; TAG chr2 60458132 60458151 60458135 -
attaaatgttcatctagtgt

SEQ ID NO: 184625 - DNA, 20 bp, Artificial Sequence
  Synthetic oligonucleotide; AGG chr2 60458131 60458150 60458134 -
ttaaatgttcatctagtgtt

SEQ ID NO: 184626 - DNA, 20 bp, Artificial Sequence
  Synthetic oligonucleotide; TAG chr2 60458123 60458142 60458126 -
tcatctagtgttaggcacta

SEQ ID NO: 184627 - DNA, 20 bp, Artificial Sequence
  Synthetic oligonucleotide; AAG chr2 60458109 60458128 60458112 -
gcactatagtatttatattg

SEQ ID NO: 184628 - DNA, 20 bp, Artificial Sequence
  Synthetic oligonucleotide; AAG chr2 60458074 60458093 60458077 -
actgttgcttgttctcttaa

SEQ ID NO: 184629 - DNA, 20 bp, Artificial Sequence
  Synthetic oligonucleotide; AGG chr2 60458073 60458092 60458076 -
ctgttgcttgttctcttaaa

SEQ ID NO: 184630 - DNA, 20 bp, Artificial Sequence
  Synthetic oligonucleotide; TGG chr2 60458053 60458072 60458056 -
aggtatcaatgtaccttttt

SEQ ID NO: 184631 - DNA, 20 bp, Artificial Sequence
  Synthetic oligonucleotide; TAG chr2 60458050 60458069 60458053 -
tatcaatgtaccttttttgg

SEQ ID NO: 184632 - DNA, 20 bp, Artificial Sequence
  Synthetic oligonucleotide; TGG chr2 60458047 60458066 60458050 -
caatgtaccttttttggtag

SEQ ID NO: 184633 - DNA, 20 bp, Artificial Sequence
  Synthetic oligonucleotide; AAG chr2 60458036 60458055 60458039 -
ttttggtagtggaaaaaaaa

SEQ ID NO: 184634 - DNA, 20 bp, Artificial Sequence
  Synthetic oligonucleotide; CAG chr2 60458032 60458051 60458035 -
ggtagtggaaaaaaaaaaga

SEQ ID NO: 184635 - DNA, 20 bp, Artificial Sequence
  Synthetic oligonucleotide; AGG chr2 60458031 60458050 60458034 -
gtagtggaaaaaaaaaagac

SEQ ID NO: 184636 - DNA, 20 bp, Artificial Sequence
  Synthetic oligonucleotide; CAG chr2 60458022 60458041 60458025 -
aaaaaaaagacaggctgcca

SEQ ID NO: 184637 - DNA, 20 bp, Artificial Sequence
  Synthetic oligonucleotide; TGG chr2 60458004 60458023 60458007 -
cacagtatatttttttaatt

SEQ ID NO: 184638 - DNA, 20 bp, Artificial Sequence
  Synthetic oligonucleotide; CAG chr2 60458001 60458020 60458004 -
agtatatttttttaatttgg

SEQ ID NO: 184639 - DNA, 20 bp, Artificial Sequence
  Synthetic oligonucleotide; AGG chr2 60458000 60458019 60458003 -
gtatatttttttaatttggc

SEQ ID NO: 184640 - DNA, 20 bp, Artificial Sequence
  Synthetic oligonucleotide; TAG chr2 60457991 60458010 60457994 -
tttaatttggcaggataata

SEQ ID NO: 184641 - DNA, 20 bp, Artificial Sequence
  Synthetic oligonucleotide; AAG chr2 60457955 60457974 60457958 -
tatgcttcaaaaaaaaaaaa

SEQ ID NO: 184642 - DNA, 20 bp, Artificial Sequence
  Synthetic oligonucleotide; GAG chr2 60457953 60457972 60457956 -
tgcttcaaaaaaaaaaaaaa

SEQ ID NO: 184643 - DNA, 20 bp, Artificial Sequence
  Synthetic oligonucleotide; GAG chr2 60457951 60457970 60457954 -
cttcaaaaaaaaaaaaaaga

SEQ ID NO: 184644 - DNA, 20 bp, Artificial Sequence
  Synthetic oligonucleotide; AAG chr2 60457940 60457959 60457943 -
aaaaaaagagagaaacaaaa

SEQ ID NO: 184645 - DNA, 20 bp, Artificial Sequence
  Synthetic oligonucleotide; CAG chr2 60457927 60457946 60457930 -
aacaaaaaagtgtgacatta

SEQ ID NO: 184646 - DNA, 20 bp, Artificial Sequence
  Synthetic oligonucleotide; GAG chr2 60457922 60457941 60457925 -
aaaagtgtgacattacagat

SEQ ID NO: 184647 - DNA, 20 bp, Artificial Sequence
  Synthetic oligonucleotide; AAG chr2 60457919 60457938 60457922 -
agtgtgacattacagatgag

SEQ ID NO: 184648 - DNA, 20 bp, Artificial Sequence
  Synthetic oligonucleotide; TGG chr2 60457908 60457927 60457911 -
acagatgagaagccatataa

SEQ ID NO: 184649 - DNA, 20 bp, Artificial Sequence
  Synthetic oligonucleotide; CGG chr2 60457905 60457924 60457908 -
gatgagaagccatataatgg

SEQ ID NO: 184650 - DNA, 20 bp, Artificial Sequence
  Synthetic oligonucleotide; TGG chr2 60457900 60457919 60457903 -
gaagccatataatggcggtt

SEQ ID NO: 184651 - DNA, 20 bp, Artificial Sequence
  Synthetic oligonucleotide; GGG chr2 60457899 60457918 60457902 -
aagccatataatggcggttt

SEQ ID NO: 184652 - DNA, 20 bp, Artificial Sequence
  Synthetic oligonucleotide; GGG chr2 60457898 60457917 60457901 -
agccatataatggcggtttg

SEQ ID NO: 184653 - DNA, 20 bp, Artificial Sequence
  Synthetic oligonucleotide; GGG chr2 60457897 60457916 60457900 -
gccatataatggcggtttgg

SEQ ID NO: 184654 - DNA, 20 bp, Artificial Sequence
  Synthetic oligonucleotide; GAG chr2 60457895 60457914 60457898 -
catataatggcggtttgggg

SEQ ID NO: 184655 - DNA, 20 bp, Artificial Sequence
  Synthetic oligonucleotide; TAG chr2 60457887 60457906 60457890 -
ggcggtttgggggagcctgc

SEQ ID NO: 184656 - DNA, 20 bp, Artificial Sequence
  Synthetic oligonucleotide; TGG chr2 60457875 60457894 60457878 -
gagcctgctagaatgtcaca

SEQ ID NO: 184657 - DNA, 20 bp, Artificial Sequence
  Synthetic oligonucleotide; TGG chr2 60457871 60457890 60457874 -
ctgctagaatgtcacatgga

SEQ ID NO: 184658 - DNA, 20 bp, Artificial Sequence
  Synthetic oligonucleotide; TAG chr2 60457862 60457881 60457865 -
tgtcacatggatggctgtca

SEQ ID NO: 184659 - DNA, 20 bp, Artificial Sequence
  Synthetic oligonucleotide; AGG chr2 60457861 60457880 60457864 -
gtcacatggatggctgtcat

SEQ ID NO: 184660 - DNA, 20 bp, Artificial Sequence
  Synthetic oligonucleotide; GGG chr2 60457860 60457879 60457863 -
tcacatggatggctgtcata

SEQ ID NO: 184661 - DNA, 20 bp, Artificial Sequence
  Synthetic oligonucleotide; GGG chr2 60457859 60457878 60457862 -
cacatggatggctgtcatag

SEQ ID NO: 184662 - DNA, 20 bp, Artificial Sequence
  Synthetic oligonucleotide; CAG chr2 60457809 60457828 60457812 -
tcctgctgccatactgtatg

SEQ ID NO: 184663 - DNA, 20 bp, Artificial Sequence
  Synthetic oligonucleotide; AAG chr2 60457800 60457819 60457803 -
catactgtatgcagtactgc

SEQ ID NO: 184664 - DNA, 20 bp, Artificial Sequence
  Synthetic oligonucleotide; TGG chr2 60457787 60457806 60457790 -
gtactgcaagctaataacgt

SEQ ID NO: 184665 - DNA, 20 bp, Artificial Sequence
  Synthetic oligonucleotide; TAG chr2 60457775 60457794 60457778 -
aataacgttggtttgttatg

SEQ ID NO: 184666 - DNA, 20 bp, Artificial Sequence
  Synthetic oligonucleotide; CAG chr2 60457734 60457753 60457737 -
ccttctatcaccctacattc

SEQ ID NO: 184667 - DNA, 20 bp, Artificial Sequence
  Synthetic oligonucleotide; CAG chr2 60457714 60457733 60457717 -
cagcatcttaccttcatatg

SEQ ID NO: 184668 - DNA, 20 bp, Artificial Sequence
  Synthetic oligonucleotide; AAG chr2 60457708 60457727 60457711 -
cttaccttcatatgcagtaa

SEQ ID NO: 184669 - DNA, 20 bp, Artificial Sequence
  Synthetic oligonucleotide; AAG chr2 60457704 60457723 60457707 -
ccttcatatgcagtaaaaga

SEQ ID NO: 184670 - DNA, 20 bp, Artificial Sequence
  Synthetic oligonucleotide; AAG chr2 60457700 60457719 60457703 -
catatgcagtaaaagaaaga

SEQ ID NO: 184671 - DNA, 20 bp, Artificial Sequence
  Synthetic oligonucleotide; AAG chr2 60457690 60457709 60457693 -
aaaagaaagaaagaaaaaaa

SEQ ID NO: 184672 - DNA, 20 bp, Artificial Sequence
  Synthetic oligonucleotide; AGG chr2 60457689 60457708 60457692 -
aaagaaagaaagaaaaaaaa

SEQ ID NO: 184673 - DNA, 20 bp, Artificial Sequence
  Synthetic oligonucleotide; CAG chr2 60457660 60457679 60457663 -
aaaaaaaaaccaatgttttg

SEQ ID NO: 184674 - DNA, 20 bp, Artificial Sequence
  Synthetic oligonucleotide; TGG chr2 60457633 60457652 60457636 -
tttcattgccaaaaactaaa

SEQ ID NO: 184675 - DNA, 20 bp, Artificial Sequence
  Synthetic oligonucleotide; TAG chr2 60457619 60457638 60457622 -
actaaatggtgctttatatt

SEQ ID NO: 184676 - DNA, 20 bp, Artificial Sequence
  Synthetic oligonucleotide; TGG chr2 60457614 60457633 60457617 -
atggtgctttatatttagat

SEQ ID NO: 184677 - DNA, 20 bp, Artificial Sequence
  Synthetic oligonucleotide; AAG chr2 60457610 60457629 60457613 -
tgctttatatttagattgga

SEQ ID NO: 184678 - DNA, 20 bp, Artificial Sequence
  Synthetic oligonucleotide; AAG chr2 60457594 60457613 60457597 -
tggaaagaatttcatatgca

SEQ ID NO: 184679 - DNA, 20 bp, Artificial Sequence
  Synthetic oligonucleotide; AAG chr2 60457584 60457603 60457587 -
ttcatatgcaaagcatatta

SEQ ID NO: 184680 - DNA, 20 bp, Artificial Sequence
  Synthetic oligonucleotide; GAG chr2 60457582 60457601 60457585 -
catatgcaaagcatattaaa

SEQ ID NO: 184681 - DNA, 20 bp, Artificial Sequence
  Synthetic oligonucleotide; AAG chr2 60457578 60457597 60457581 -
tgcaaagcatattaaagaga

SEQ ID NO: 184682 - DNA, 20 bp, Artificial Sequence
  Synthetic oligonucleotide; TAG chr2 60457568 60457587 60457571 -
attaaagagaaagcccgctt

SEQ ID NO: 184683 - DNA, 20 bp, Artificial Sequence
  Synthetic oligonucleotide; TGG chr2 60457547 60457566 60457550 -
agtcaatacttttttgtaaa

SEQ ID NO: 184684 - DNA, 20 bp, Artificial Sequence
  Synthetic oligonucleotide; CAG chr2 60457539 60457558 60457542 -
cttttttgtaaatggcaatg

SEQ ID NO: 184685 - DNA, 20 bp, Artificial Sequence
  Synthetic oligonucleotide; TGG chr2 60457523 60457542 60457526 -
aatgcagaatattttgttat

SEQ ID NO: 184686 - DNA, 20 bp, Artificial Sequence
  Synthetic oligonucleotide; AAG chr2 60457499 60457518 60457502 -
cttttctattcctgtaatga

SEQ ID NO: 184687 - DNA, 20 bp, Artificial Sequence
  Synthetic oligonucleotide; TGG chr2 60457461 60457480 60457464 -
tgaaattttatcttttacta

SEQ ID NO: 184688 - DNA, 20 bp, Artificial Sequence
  Synthetic oligonucleotide; GGG chr2 60457460 60457479 60457463 -
gaaattttatcttttactat

SEQ ID NO: 184689 - DNA, 20 bp, Artificial Sequence
  Synthetic oligonucleotide; GAG chr2 60457458 60457477 60457461 -
aattttatcttttactatgg

SEQ ID NO: 184690 - DNA, 20 bp, Artificial Sequence
  Synthetic oligonucleotide; CAG chr2 60457419 60457438 60457422 -
cttatgtgccctgttcaaaa

SEQ ID NO: 184691 - DNA, 20 bp, Artificial Sequence
  Synthetic oligonucleotide; GAG chr2 60457417 60457436 60457420 -
tatgtgccctgttcaaaaca

SEQ ID NO: 184692 - DNA, 20 bp, Artificial Sequence
  Synthetic oligonucleotide; AGG chr2 60457416 60457435 60457419 -
atgtgccctgttcaaaacag

SEQ ID NO: 184693 - DNA, 20 bp, Artificial Sequence
  Synthetic oligonucleotide; TAG chr2 60457364 60457383 60457367 -
tttttatttttttttttatt

SEQ ID NO: 184694 - DNA, 20 bp, Artificial Sequence
  Synthetic oligonucleotide; AAG chr2 60457354 60457373 60457357 -
tttttttatttagatgacca

SEQ ID NO: 184695 - DNA, 20 bp, Artificial Sequence
  Synthetic oligonucleotide; AGG chr2 60457353 60457372 60457356 -
ttttttatttagatgaccaa

SEQ ID NO: 184696 - DNA, 20 bp, Artificial Sequence
  Synthetic oligonucleotide; TGG chr2 60457339 60457358 60457342 -
gaccaaaggtcattacaacc

SEQ ID NO: 184697 - DNA, 20 bp, Artificial Sequence
  Synthetic oligonucleotide; TGG chr2 60457316 60457335 60457319 -
ctttttattgtatttgtttc

SEQ ID NO: 184698 - DNA, 20 bp, Artificial Sequence
  Synthetic oligonucleotide; AAG chr2 60457305 60457324 60457308 -
atttgtttctggtctttgtt

SEQ ID NO: 184699 - DNA, 20 bp, Artificial Sequence
  Synthetic oligonucleotide; TGG chr2 60457296 60457315 60457299 -
tggtctttgttaagttctat

SEQ ID NO: 184700 - DNA, 20 bp, Artificial Sequence
  Synthetic oligonucleotide; TGG chr2 60457270 60457289 60457273 -
aaccactgtctgtgtttttt

SEQ ID NO: 184701 - DNA, 20 bp, Artificial Sequence
  Synthetic oligonucleotide; CAG chr2 60457267 60457286 60457270 -
cactgtctgtgtttttttgg

SEQ ID NO: 184702 - DNA, 20 bp, Artificial Sequence
  Synthetic oligonucleotide; AAG chr2 60457201 60457220 60457204 -
tgaaaaaataaaaaaaatta

SEQ ID NO: 184703 - DNA, 20 bp, Artificial Sequence
  Synthetic oligonucleotide; AAG chr2 60457188 60457207 60457191 -
aaaattaaagtacacattgt

SEQ ID NO: 184704 - DNA, 20 bp, Artificial Sequence
  Synthetic oligonucleotide; AAG chr2 60457144 60457163 60457147 -
acactctgtaaattacttgc

SEQ ID NO: 184705 - DNA, 20 bp, Artificial Sequence
  Synthetic oligonucleotide; CAG chr2 60457134 60457153 60457137 -
aattacttgcaagaaaataa

SEQ ID NO: 184706 - DNA, 20 bp, Artificial Sequence
  Synthetic oligonucleotide; AGG chr2 60457133 60457152 60457136 -
attacttgcaagaaaataac

SEQ ID NO: 184707 - DNA, 20 bp, Artificial Sequence
  Synthetic oligonucleotide; AAG chr2 60457126 60457145 60457129 -
gcaagaaaataacaggtttt

SEQ ID NO: 184708 - DNA, 20 bp, Artificial Sequence
  Synthetic oligonucleotide; GAG chr2 60457124 60457143 60457127 -
aagaaaataacaggttttaa

SEQ ID NO: 184709 - DNA, 20 bp, Artificial Sequence
  Synthetic oligonucleotide; AAG chr2 60457121 60457140 60457124 -
aaaataacaggttttaagag

SEQ ID NO: 184710 - DNA, 20 bp, Artificial Sequence
  Synthetic oligonucleotide; AGG chr2 60457120 60457139 60457123 -
aaataacaggttttaagaga

SEQ ID NO: 184711 - DNA, 20 bp, Artificial Sequence
  Synthetic oligonucleotide; CAG chr2 60457116 60457135 60457119 -
aacaggttttaagagaaggc

SEQ ID NO: 184712 - DNA, 20 bp, Artificial Sequence
  Synthetic oligonucleotide; CAG chr2 60457112 60457131 60457115 -
ggttttaagagaaggccagt

SEQ ID NO: 184713 - DNA, 20 bp, Artificial Sequence
  Synthetic oligonucleotide; CAG chr2 60457102 60457121 60457105 -
gaaggccagtcagtcttttt

SEQ ID NO: 184714 - DNA, 20 bp, Artificial Sequence
  Synthetic oligonucleotide; AGG chr2 60457101 60457120 60457104 -
aaggccagtcagtctttttc

SEQ ID NO: 184715 - DNA, 20 bp, Artificial Sequence
  Synthetic oligonucleotide; TGG chr2 60457088 60457107 60457091 -
ctttttcaggattatttcta

SEQ ID NO: 184716 - DNA, 20 bp, Artificial Sequence
  Synthetic oligonucleotide; GGG chr2 60457087 60457106 60457090 -
tttttcaggattatttctat

SEQ ID NO: 184717 - DNA, 20 bp, Artificial Sequence
  Synthetic oligonucleotide; AAG chr2 60457058 60457077 60457061 -
gatgcgtgtattatacccta

SEQ ID NO: 184718 - DNA, 20 bp, Artificial Sequence
  Synthetic oligonucleotide; AGG chr2 60457057 60457076 60457060 -
atgcgtgtattataccctaa

SEQ ID NO: 184719 - DNA, 20 bp, Artificial Sequence
  Synthetic oligonucleotide; AAG chr2 60457048 60457067 60457051 -
ttataccctaaaggaacata

SEQ ID NO: 184720 - DNA, 20 bp, Artificial Sequence
  Synthetic oligonucleotide; TAG chr2 60457028 60457047 60457031 -
aagtacttactatattaaaa

SEQ ID NO: 184721 - DNA, 20 bp, Artificial Sequence
  Synthetic oligonucleotide; TGG chr2 60457010 60457029 60457013 -
aatagacatatctcaaaccc

SEQ ID NO: 184722 - DNA, 20 bp, Artificial Sequence
  Synthetic oligonucleotide; TAG chr2 60457004 60457023 60457007 -
catatctcaaaccctggaca

SEQ ID NO: 184723 - DNA, 20 bp, Artificial Sequence
  Synthetic oligonucleotide; AAG chr2 60456997 60457016 60457000 -
caaaccctggacatagtttt

SEQ ID NO: 184724 - DNA, 20 bp, Artificial Sequence
  Synthetic oligonucleotide; AGG chr2 60456996 60457015 60456999 -
aaaccctggacatagtttta

SEQ ID NO: 184725 - DNA, 20 bp, Artificial Sequence
  Synthetic oligonucleotide; CAG chr2 60456988 60457007 60456991 -
gacatagttttaaggctttc

SEQ ID NO: 184726 - DNA, 20 bp, Artificial Sequence
  Synthetic oligonucleotide; TAG chr2 60456983 60457002 60456986 -
agttttaaggctttccagtt

SEQ ID NO: 184727 - DNA, 20 bp, Artificial Sequence
  Synthetic oligonucleotide; TAG chr2 60456978 60456997 60456981 -
taaggctttccagtttagaa

SEQ ID NO: 184728 - DNA, 20 bp, Artificial Sequence
  Synthetic oligonucleotide; AAG chr2 60456970 60456989 60456973 -
tccagtttagaatagttttc

SEQ ID NO: 184729 - DNA, 20 bp, Artificial Sequence
  Synthetic oligonucleotide; TGG chr2 60456964 60456983 60456967 -
ttagaatagttttcaagaaa

SEQ ID NO: 184730 - DNA, 20 bp, Artificial Sequence
  Synthetic oligonucleotide; AAG chr2 60456961 60456980 60456964 -
gaatagttttcaagaaatgg

SEQ ID NO: 184731 - DNA, 20 bp, Artificial Sequence
  Synthetic oligonucleotide; AGG chr2 60456960 60456979 60456963 -
aatagttttcaagaaatgga

SEQ ID NO: 184732 - DNA, 20 bp, Artificial Sequence
  Synthetic oligonucleotide; CAG chr2 60456951 60456970 60456954 -
caagaaatggaaggtgtttt

SEQ ID NO: 184733 - DNA, 20 bp, Artificial Sequence
  Synthetic oligonucleotide; TAG chr2 60456920 60456939 60456923 -
taaaaacttactccatctct

SEQ ID NO: 184734 - DNA, 20 bp, Artificial Sequence
  Synthetic oligonucleotide; CAG chr2 60456917 60456936 60456920 -
aaacttactccatctcttag

SEQ ID NO: 184735 - DNA, 20 bp, Artificial Sequence
  Synthetic oligonucleotide; AAG chr2 60456898 60456917 60456901 -
gcagaaatccattcaaacat

SEQ ID NO: 184736 - DNA, 20 bp, Artificial Sequence
  Synthetic oligonucleotide; TGG chr2 60456882 60456901 60456885 -
acataagtgaaaaaacttgc

SEQ ID NO: 184737 - DNA, 20 bp, Artificial Sequence
  Synthetic oligonucleotide; TAG chr2 60456876 60456895 60456879 -
gtgaaaaaacttgctggtaa

SEQ ID NO: 184738 - DNA, 20 bp, Artificial Sequence
  Synthetic oligonucleotide; AAG chr2 60456823 60456842 60456826 -
ttgctgttcttgttgtctaa

SEQ ID NO: 184739 - DNA, 20 bp, Artificial Sequence
  Synthetic oligonucleotide; TAG chr2 60456788 60456807 60456791 -
ctcccatccttgctttatct

SEQ ID NO: 184740 - DNA, 20 bp, Artificial Sequence
  Synthetic oligonucleotide; AAG chr2 60456771 60456790 60456774 -
tcttagaacataatgtaaaa

SEQ ID NO: 184741 - DNA, 20 bp, Artificial Sequence
  Synthetic oligonucleotide; CAG chr2 60456751 60456770 60456754 -
aagatttttttaaaaaaaat

SEQ ID NO: 184742 - DNA, 20 bp, Artificial Sequence
  Synthetic oligonucleotide; TGG chr2 60456743 60456762 60456746 -
tttaaaaaaaatcagctctt

SEQ ID NO: 184743 - DNA, 20 bp, Artificial Sequence
  Synthetic oligonucleotide; AAG chr2 60456731 60456750 60456734 -
cagctctttggtttccatgt

SEQ ID NO: 184744 - DNA, 20 bp, Artificial Sequence
  Synthetic oligonucleotide; GAG chr2 60456729 60456748 60456732 -
gctctttggtttccatgtaa

SEQ ID NO: 184745 - DNA, 20 bp, Artificial Sequence
  Synthetic oligonucleotide; TGG chr2 60456681 60456700 60456684 -
acttttgaaatctaaaaatc

SEQ ID NO: 184746 - DNA, 20 bp, Artificial Sequence
  Synthetic oligonucleotide; AAG chr2 60456673 60456692 60456676 -
aatctaaaaatctggaaaca

SEQ ID NO: 184747 - DNA, 20 bp, Artificial Sequence
  Synthetic oligonucleotide; AGG chr2 60456672 60456691 60456675 -
atctaaaaatctggaaacaa

SEQ ID NO: 184748 - DNA, 20 bp, Artificial Sequence
  Synthetic oligonucleotide; CAG chr2 60456666 60456685 60456669 -
aaatctggaaacaaaggcat

SEQ ID NO: 184749 - DNA, 20 bp, Artificial Sequence
  Synthetic oligonucleotide; AGG chr2 60456665 60456684 60456668 -
aatctggaaacaaaggcatc

SEQ ID NO: 184750 - DNA, 20 bp, Artificial Sequence
  Synthetic oligonucleotide; AAG chr2 60456630 60456649 60456633 -
ttgttttgttttgtttaaaa

SEQ ID NO: 184751 - DNA, 20 bp, Artificial Sequence
  Synthetic oligonucleotide; GAG chr2 60456628 60456647 60456631 -
gttttgttttgtttaaaaaa

SEQ ID NO: 184752 - DNA, 20 bp, Artificial Sequence
  Synthetic oligonucleotide; AGG chr2 60456627 60456646 60456630 -
ttttgttttgtttaaaaaag

SEQ ID NO: 184753 - DNA, 20 bp, Artificial Sequence
  Synthetic oligonucleotide; GGG chr2 60456626 60456645 60456629 -
tttgttttgtttaaaaaaga

SEQ ID NO: 184754 - DNA, 20 bp, Artificial Sequence
  Synthetic oligonucleotide; GAG chr2 60456624 60456643 60456627 -
tgttttgtttaaaaaagagg

SEQ ID NO: 184755 - DNA, 20 bp, Artificial Sequence
  Synthetic oligonucleotide; AAG chr2 60456616 60456635 60456619 -
ttaaaaaagagggagaaaaa

SEQ ID NO: 184756 - DNA, 20 bp, Artificial Sequence
  Synthetic oligonucleotide; GAG chr2 60456614 60456633 60456617 -
aaaaaagagggagaaaaaaa

SEQ ID NO: 184757 - DNA, 20 bp, Artificial Sequence
  Synthetic oligonucleotide; GAG chr2 60456612 60456631 60456615 -
aaaagagggagaaaaaaaga

SEQ ID NO: 184758 - DNA, 20 bp, Artificial Sequence
  Synthetic oligonucleotide; GAG chr2 60456610 60456629 60456613 -
aagagggagaaaaaaagaga

SEQ ID NO: 184759 - DNA, 20 bp, Artificial Sequence
  Synthetic oligonucleotide; AAG chr2 60456603 60456622 60456606 -
agaaaaaaagagagagacga

SEQ ID NO: 184760 - DNA, 20 bp, Artificial Sequence
  Synthetic oligonucleotide; AAG chr2 60456598 60456617 60456601 -
aaaagagagagacgaaagaa

SEQ ID NO: 184761 - DNA, 20 bp, Artificial Sequence
  Synthetic oligonucleotide; AAG chr2 60456594 60456613 60456597 -
gagagagacgaaagaaaaga

SEQ ID NO: 184762 - DNA, 20 bp, Artificial Sequence
  Synthetic oligonucleotide; CAG chr2 60456591 60456610 60456594 -
agagacgaaagaaaagaaag

SEQ ID NO: 184763 - DNA, 20 bp, Artificial Sequence
  Synthetic oligonucleotide; TAG chr2 60456584 60456603 60456587 -
aaagaaaagaaagcagccac

SEQ ID NO: 184764 - DNA, 20 bp, Artificial Sequence
  Synthetic oligonucleotide; AGG chr2 60456583 60456602 60456586 -
aagaaaagaaagcagccact

SEQ ID NO: 184765 - DNA, 20 bp, Artificial Sequence
  Synthetic oligonucleotide; GGG chr2 60456582 60456601 60456585 -
agaaaagaaagcagccacta

SEQ ID NO: 184766 - DNA, 20 bp, Artificial Sequence
  Synthetic oligonucleotide; GGG chr2 60456581 60456600 60456584 -
gaaaagaaagcagccactag

SEQ ID NO: 184767 - DNA, 20 bp, Artificial Sequence
  Synthetic oligonucleotide; TAG chr2 60456576 60456595 60456579 -
gaaagcagccactaggggtg

SEQ ID NO: 184768 - DNA, 20 bp, Artificial Sequence
  Synthetic oligonucleotide; CAG chr2 60456572 60456591 60456575 -
gcagccactaggggtgtagc

SEQ ID NO: 184769 - DNA, 20 bp, Artificial Sequence
  Synthetic oligonucleotide; TAG chr2 60456566 60456585 60456569 -
actaggggtgtagccagaca

SEQ ID NO: 184770 - DNA, 20 bp, Artificial Sequence
  Synthetic oligonucleotide; TGG chr2 60456554 60456573 60456557 -
gccagacatagtgaaatctt

SEQ ID NO: 184771 - DNA, 20 bp, Artificial Sequence
  Synthetic oligonucleotide; CAG chr2 60456548 60456567 60456551 -
catagtgaaatctttggaat

SEQ ID NO: 184772 - DNA, 20 bp, Artificial Sequence
  Synthetic oligonucleotide; GAG chr2 60456532 60456551 60456535 -
gaatcagccactgatttcct

SEQ ID NO: 184773 - DNA, 20 bp, Artificial Sequence
  Synthetic oligonucleotide; TAG chr2 60456524 60456543 60456527 -
cactgatttcctgagatgca

SEQ ID NO: 184774 - DNA, 20 bp, Artificial Sequence
  Synthetic oligonucleotide; TGG chr2 60456521 60456540 60456524 -
tgatttcctgagatgcatag

SEQ ID NO: 184775 - DNA, 20 bp, Artificial Sequence
  Synthetic oligonucleotide; TGG chr2 60456509 60456528 60456512 -
atgcatagtggtttgccttg

SEQ ID NO: 184776 - DNA, 20 bp, Artificial Sequence
  Synthetic oligonucleotide; GAG chr2 60456502 60456521 60456505 -
gtggtttgccttgtggttct

SEQ ID NO: 184777 - DNA, 20 bp, Artificial Sequence
  Synthetic oligonucleotide; CAG chr2 60456495 60456514 60456498 -
gccttgtggttctgagatcc

SEQ ID NO: 184778 - DNA, 20 bp, Artificial Sequence
  Synthetic oligonucleotide; AGG chr2 60456494 60456513 60456497 -
ccttgtggttctgagatccc

SEQ ID NO: 184779 - DNA, 20 bp, Artificial Sequence
  Synthetic oligonucleotide; TAG chr2 60456486 60456505 60456489 -
ttctgagatcccaggaaccc

SEQ ID NO: 184780 - DNA, 20 bp, Artificial Sequence
  Synthetic oligonucleotide; CAG chr2 60456477 60456496 60456480 -
cccaggaaccctagatgcta

SEQ ID NO: 184781 - DNA, 20 bp, Artificial Sequence
  Synthetic oligonucleotide; TAG chr2 60456467 60456486 60456470 -
ctagatgctacagattactt

SEQ ID NO: 184782 - DNA, 20 bp, Artificial Sequence
  Synthetic oligonucleotide; AGG chr2 60456466 60456485 60456469 -
tagatgctacagattacttt

SEQ ID NO: 184783 - DNA, 20 bp, Artificial Sequence
  Synthetic oligonucleotide; TAG chr2 60456455 60456474 60456458 -
gattactttaggtgttttga

SEQ ID NO: 184784 - DNA, 20 bp, Artificial Sequence
  Synthetic oligonucleotide; AGG chr2 60456454 60456473 60456457 -
attactttaggtgttttgat

SEQ ID NO: 184785 - DNA, 20 bp, Artificial Sequence
  Synthetic oligonucleotide; GGG chr2 60456453 60456472 60456456 -
ttactttaggtgttttgata

SEQ ID NO: 184786 - DNA, 20 bp, Artificial Sequence
  Synthetic oligonucleotide; TGG chr2 60456444 60456463 60456447 -
gtgttttgatagggtcttcc

SEQ ID NO: 184787 - DNA, 20 bp, Artificial Sequence
  Synthetic oligonucleotide; CAG chr2 60456437 60456456 60456440 -
gatagggtcttcctggatga

SEQ ID NO: 184788 - DNA, 20 bp, Artificial Sequence
  Synthetic oligonucleotide; AAG chr2 60456429 60456448 60456432 -
cttcctggatgacagcaaat

SEQ ID NO: 184789 - DNA, 20 bp, Artificial Sequence
  Synthetic oligonucleotide; AGG chr2 60456428 60456447 60456431 -
ttcctggatgacagcaaata

SEQ ID NO: 184790 - DNA, 20 bp, Artificial Sequence
  Synthetic oligonucleotide; GGG chr2 60456427 60456446 60456430 -
tcctggatgacagcaaataa

SEQ ID NO: 184791 - DNA, 20 bp, Artificial Sequence
  Synthetic oligonucleotide; CGG chr2 60456424 60456443 60456427 -
tggatgacagcaaataaggg

SEQ ID NO: 184792 - DNA, 20 bp, Artificial Sequence
  Synthetic oligonucleotide; GGG chr2 60456423 60456442 60456426 -
ggatgacagcaaataagggc

SEQ ID NO: 184793 - DNA, 20 bp, Artificial Sequence
  Synthetic oligonucleotide; CAG chr2 60456396 60456415 60456399 -
cccttcaattatcttctgac

SEQ ID NO: 184794 - DNA, 20 bp, Artificial Sequence
  Synthetic oligonucleotide; CAG chr2 60456392 60456411 60456395 -
tcaattatcttctgaccagc

SEQ ID NO: 184795 - DNA, 20 bp, Artificial Sequence
  Synthetic oligonucleotide; TAG chr2 60456388 60456407 60456391 -
ttatcttctgaccagccagt

SEQ ID NO: 184796 - DNA, 20 bp, Artificial Sequence
  Synthetic oligonucleotide; AGG chr2 60456387 60456406 60456390 -
tatcttctgaccagccagtt

SEQ ID NO: 184797 - DNA, 20 bp, Artificial Sequence
  Synthetic oligonucleotide; TAG chr2 60456367 60456386 60456370 -
aggtctattttaaaaatcct

SEQ ID NO: 184798 - DNA, 20 bp, Artificial Sequence
  Synthetic oligonucleotide; CAG chr2 60456327 60456346 60456330 -
tttacaaatactgcatgttg

SEQ ID NO: 184799 - DNA, 20 bp, Artificial Sequence
  Synthetic oligonucleotide; CAG chr2 60456272 60456291 60456275 -
tgatatcgtgtccctgttcc

SEQ ID NO: 184800 - DNA, 20 bp, Artificial Sequence
  Synthetic oligonucleotide; TAG chr2 60456267 60456286 60456270 -
tcgtgtccctgttcccagtg

SEQ ID NO: 184801 - DNA, 20 bp, Artificial Sequence
  Synthetic oligonucleotide; AAG chr2 60456217 60456236 60456220 -
tttgtaaaaaaccaaaacaa

SEQ ID NO: 184802 - DNA, 20 bp, Artificial Sequence
  Synthetic oligonucleotide; TGG chr2 60456195 60456214 60456198 -
gccgttctgttgtcttcttg

SEQ ID NO: 184803 - DNA, 20 bp, Artificial Sequence
  Synthetic oligonucleotide; TAG chr2 60456192 60456211 60456195 -
gttctgttgtcttcttgtgg

SEQ ID NO: 184804 - DNA, 20 bp, Artificial Sequence
  Synthetic oligonucleotide; CAG chr2 60456175 60456194 60456178 -
tggtagcattttttgtcgct

SEQ ID NO: 184805 - DNA, 20 bp, Artificial Sequence
  Synthetic oligonucleotide; TAG chr2 60456161 60456180 60456164 -
gtcgctcagttcttatgccc

SEQ ID NO: 184806 - DNA, 20 bp, Artificial Sequence
  Synthetic oligonucleotide; GAG chr2 60456151 60456170 60456154 -
tcttatgccctagtgcctgt

SEQ ID NO: 184807 - DNA, 20 bp, Artificial Sequence
  Synthetic oligonucleotide; AGG chr2 60456150 60456169 60456153 -
cttatgccctagtgcctgtg

SEQ ID NO: 184808 - DNA, 20 bp, Artificial Sequence
  Synthetic oligonucleotide; TGG chr2 60456147 60456166 60456150 -
atgccctagtgcctgtgagg

SEQ ID NO: 184809 - DNA, 20 bp, Artificial Sequence
  Synthetic oligonucleotide; GAG chr2 60456119 60456138 60456122 -
tcatgtcatgccttttatct

SEQ ID NO: 184810 - DNA, 20 bp, Artificial Sequence
  Synthetic oligonucleotide; AGG chr2 60456118 60456137 60456121 -
catgtcatgccttttatctg

SEQ ID NO: 184811 - DNA, 20 bp, Artificial Sequence
  Synthetic oligonucleotide; AAG chr2 60456114 60456133 60456117 -
tcatgccttttatctgaggc

SEQ ID NO: 184812 - DNA, 20 bp, Artificial Sequence
  Synthetic oligonucleotide; TAG chr2 60456109 60456128 60456112 -
ccttttatctgaggcaagaa

SEQ ID NO: 184813 - DNA, 20 bp, Artificial Sequence
  Synthetic oligonucleotide; AAG chr2 60456093 60456112 60456096 -
agaatagttttatctttcta

SEQ ID NO: 184814 - DNA, 20 bp, Artificial Sequence
  Synthetic oligonucleotide; AAG chr2 60456086 60456105 60456089 -
ttttatctttctaaagtata

SEQ ID NO: 184815 - DNA, 20 bp, Artificial Sequence
  Synthetic oligonucleotide; AAG chr2 60456082 60456101 60456085 -
atctttctaaagtataaaga

SEQ ID NO: 184816 - DNA, 20 bp, Artificial Sequence
  Synthetic oligonucleotide; AAG chr2 60456064 60456083 60456067 -
gaaagtcaatgttttctgaa

SEQ ID NO: 184817 - DNA, 20 bp, Artificial Sequence
  Synthetic oligonucleotide; CAG chr2 60456060 60456079 60456063 -
gtcaatgttttctgaaaagc

SEQ ID NO: 184818 - DNA, 20 bp, Artificial Sequence
  Synthetic oligonucleotide; TGG chr2 60456055 60456074 60456058 -
tgttttctgaaaagccagtt

SEQ ID NO: 184819 - DNA, 20 bp, Artificial Sequence
  Synthetic oligonucleotide; GGG chr2 60456054 60456073 60456057 -
gttttctgaaaagccagttt

SEQ ID NO: 184820 - DNA, 20 bp, Artificial Sequence
  Synthetic oligonucleotide; TGG chr2 60456051 60456070 60456054 -
ttctgaaaagccagtttggg

SEQ ID NO: 184821 - DNA, 20 bp, Artificial Sequence
  Synthetic oligonucleotide; GGG chr2 60456050 60456069 60456053 -
tctgaaaagccagtttgggt

SEQ ID NO: 184822 - DNA, 20 bp, Artificial Sequence
  Synthetic oligonucleotide; AAG chr2 60456047 60456066 60456050 -
gaaaagccagtttgggtggg

SEQ ID NO: 184823 - DNA, 20 bp, Artificial Sequence
  Synthetic oligonucleotide; AGG chr2 60456046 60456065 60456049 -
aaaagccagtttgggtggga

SEQ ID NO: 184824 - DNA, 20 bp, Artificial Sequence
  Synthetic oligonucleotide; GAG chr2 60456044 60456063 60456047 -
aagccagtttgggtgggaag

SEQ ID NO: 184825 - DNA, 20 bp, Artificial Sequence
  Synthetic oligonucleotide; GAG chr2 60456042 60456061 60456045 -
gccagtttgggtgggaagga

SEQ ID NO: 184826 - DNA, 20 bp, Artificial Sequence
  Synthetic oligonucleotide; GAG chr2 60456040 60456059 60456043 -
cagtttgggtgggaaggaga

SEQ ID NO: 184827 - DNA, 20 bp, Artificial Sequence
  Synthetic oligonucleotide; TGG chr2 60456037 60456056 60456040 -
tttgggtgggaaggagagag

SEQ ID NO: 184828 - DNA, 20 bp, Artificial Sequence
  Synthetic oligonucleotide; GGG chr2 60456036 60456055 60456039 -
ttgggtgggaaggagagagt

SEQ ID NO: 184829 - DNA, 20 bp, Artificial Sequence
  Synthetic oligonucleotide; GGG chr2 60456035 60456054 60456038 -
tgggtgggaaggagagagtg

SEQ ID NO: 184830 - DNA, 20 bp, Artificial Sequence
  Synthetic oligonucleotide; TAG chr2 60456031 60456050 60456034 -
tgggaaggagagagtggggc

SEQ ID NO: 184831 - DNA, 20 bp, Artificial Sequence
  Synthetic oligonucleotide; GAG chr2 60456029 60456048 60456032 -
ggaaggagagagtggggcta

SEQ ID NO: 184832 - DNA, 20 bp, Artificial Sequence
  Synthetic oligonucleotide; AGG chr2 60456028 60456047 60456031 -
gaaggagagagtggggctag

SEQ ID NO: 184833 - DNA, 20 bp, Artificial Sequence
  Synthetic oligonucleotide; GAG chr2 60456017 60456036 60456020 -
tggggctagaggaatccact

SEQ ID NO: 184834 - DNA, 20 bp, Artificial Sequence
  Synthetic oligonucleotide; AAG chr2 60456013 60456032 60456016 -
gctagaggaatccactgaga

SEQ ID NO: 184835 - DNA, 20 bp, Artificial Sequence
  Synthetic oligonucleotide; AGG chr2 60456012 60456031 60456015 -
ctagaggaatccactgagaa

SEQ ID NO: 184836 - DNA, 20 bp, Artificial Sequence
  Synthetic oligonucleotide; TGG chr2 60456005 60456024 60456008 -
aatccactgagaaaggatgt

SEQ ID NO: 184837 - DNA, 20 bp, Artificial Sequence
  Synthetic oligonucleotide; GAG chr2 60456003 60456022 60456006 -
tccactgagaaaggatgttg

SEQ ID NO: 184838 - DNA, 20 bp, Artificial Sequence
  Synthetic oligonucleotide; TAG chr2 60455991 60456010 60455994 -
ggatgttggagaatattaca

SEQ ID NO: 184839 - DNA, 20 bp, Artificial Sequence
  Synthetic oligonucleotide; AGG chr2 60455990 60456009 60455993 -
gatgttggagaatattacat

SEQ ID NO: 184840 - DNA, 20 bp, Artificial Sequence
  Synthetic oligonucleotide; GAG chr2 60455988 60456007 60455991 -
tgttggagaatattacatag

SEQ ID NO: 184841 - DNA, 20 bp, Artificial Sequence
  Synthetic oligonucleotide; AGG chr2 60455987 60456006 60455990 -
gttggagaatattacatagg

SEQ ID NO: 184842 - DNA, 20 bp, Artificial Sequence
  Synthetic oligonucleotide; TGG chr2 60455984 60456003 60455987 -
ggagaatattacataggagg

SEQ ID NO: 184843 - DNA, 20 bp, Artificial Sequence
  Synthetic oligonucleotide; GGG chr2 60455983 60456002 60455986 -
gagaatattacataggaggt

SEQ ID NO: 184844 - DNA, 20 bp, Artificial Sequence
  Synthetic oligonucleotide; GGG chr2 60455982 60456001 60455985 -
agaatattacataggaggtg

SEQ ID NO: 184845 - DNA, 20 bp, Artificial Sequence
  Synthetic oligonucleotide; TGG chr2 60455979 60455998 60455982 -
atattacataggaggtgggg

SEQ ID NO: 184846 - DNA, 20 bp, Artificial Sequence
  Synthetic oligonucleotide; GGG chr2 60455978 60455997 60455981 -
tattacataggaggtggggt

SEQ ID NO: 184847 - DNA, 20 bp, Artificial Sequence
  Synthetic oligonucleotide; GGG chr2 60455977 60455996 60455980 -
attacataggaggtggggtg

SEQ ID NO: 184848 - DNA, 20 bp, Artificial Sequence
  Synthetic oligonucleotide; TGG chr2 60455974 60455993 60455977 -
acataggaggtggggtgggg

SEQ ID NO: 184849 - DNA, 20 bp, Artificial Sequence
  Synthetic oligonucleotide; GGG chr2 60455973 60455992 60455976 -
cataggaggtggggtggggt

SEQ ID NO: 184850 - DNA, 20 bp, Artificial Sequence
  Synthetic oligonucleotide; CGG chr2 60455966 60455985 60455969 -
ggtggggtggggtgggcgtg

SEQ ID NO: 184851 - DNA, 20 bp, Artificial Sequence
  Synthetic oligonucleotide; GAG chr2 60455957 60455976 60455960 -
gggtgggcgtgcggtacctt

SEQ ID NO: 184852 - DNA, 20 bp, Artificial Sequence
  Synthetic oligonucleotide; TAG chr2 60455931 60455950 60455934 -
ttgatgtttgtcactgaact

SEQ ID NO: 184853 - DNA, 20 bp, Artificial Sequence
  Synthetic oligonucleotide; AAG chr2 60455926 60455945 60455929 -
gtttgtcactgaacttagaa

SEQ ID NO: 184854 - DNA, 20 bp, Artificial Sequence
  Synthetic oligonucleotide; TGG chr2 60455906 60455925 60455909 -
aagatatactgtatgtgttt

SEQ ID NO: 184855 - DNA, 20 bp, Artificial Sequence
  Synthetic oligonucleotide; TAG chr2 60455901 60455920 60455904 -
atactgtatgtgttttggat

SEQ ID NO: 184856 - DNA, 20 bp, Artificial Sequence
  Synthetic oligonucleotide; AGG chr2 60455900 60455919 60455903 -
tactgtatgtgttttggatt

SEQ ID NO: 184857 - DNA, 20 bp, Artificial Sequence
  Synthetic oligonucleotide; AAG chr2 60455866 60455885 60455869 -
ctgaatccaaaatgctgctc

SEQ ID NO: 184858 - DNA, 20 bp, Artificial Sequence
  Synthetic oligonucleotide; CAG chr2 60455862 60455881 60455865 -
atccaaaatgctgctcaaga

SEQ ID NO: 184859 - DNA, 20 bp, Artificial Sequence
  Synthetic oligonucleotide; TAG chr2 60455858 60455877 60455861 -
aaaatgctgctcaagacaga

SEQ ID NO: 184860 - DNA, 20 bp, Artificial Sequence
  Synthetic oligonucleotide; CAG chr2 60455844 60455863 60455847 -
gacagatagaaataattccc

SEQ ID NO: 184861 - DNA, 20 bp, Artificial Sequence
  Synthetic oligonucleotide; CAG chr2 60455833 60455852 60455836 -
ataattccccagtgccatgc

SEQ ID NO: 184862 - DNA, 20 bp, Artificial Sequence
  Synthetic oligonucleotide; TAG chr2 60455827 60455846 60455830 -
ccccagtgccatgccagctt

SEQ ID NO: 184863 - DNA, 20 bp, Artificial Sequence
  Synthetic oligonucleotide; TGG chr2 60455821 60455840 60455824 -
tgccatgccagctttagatg

SEQ ID NO: 184864 - DNA, 20 bp, Artificial Sequence
  Synthetic oligonucleotide; TAG chr2 60455755 60455774 60455758 -
tgtccctattactcttttat

SEQ ID NO: 184865 - DNA, 20 bp, Artificial Sequence
  Synthetic oligonucleotide; AGG chr2 60455754 60455773 60455757 -
gtccctattactcttttatt

SEQ ID NO: 184866 - DNA, 20 bp, Artificial Sequence
  Synthetic oligonucleotide; GAG chr2 60455752 60455771 60455755 -
ccctattactcttttattag

SEQ ID NO: 184867 - DNA, 20 bp, Artificial Sequence
  Synthetic oligonucleotide; GAG chr2 60455745 60455764 60455748 -
actcttttattaggagctat

SEQ ID NO: 184868 - DNA, 20 bp, Artificial Sequence
  Synthetic oligonucleotide; TAG chr2 60455732 60455751 60455735 -
gagctatgagtgcaactgtg

SEQ ID NO: 184869 - DNA, 20 bp, Artificial Sequence
  Synthetic oligonucleotide; AGG chr2 60455731 60455750 60455734 -
agctatgagtgcaactgtgt

SEQ ID NO: 184870 - DNA, 20 bp, Artificial Sequence
  Synthetic oligonucleotide; CAG chr2 60455719 60455738 60455722 -
aactgtgtaggttttatata

SEQ ID NO: 184871 - DNA, 20 bp, Artificial Sequence
  Synthetic oligonucleotide; CAG chr2 60455699 60455718 60455702 -
cagtattcattttaatttct

SEQ ID NO: 184872 - DNA, 20 bp, Artificial Sequence
  Synthetic oligonucleotide; TAG chr2 60455683 60455702 60455686 -
ttctcagtatatgctgctct

SEQ ID NO: 184873 - DNA, 20 bp, Artificial Sequence
  Synthetic oligonucleotide; TAG chr2 60455674 60455693 60455677 -
tatgctgctcttagcgtaat

SEQ ID NO: 184874 - DNA, 20 bp, Artificial Sequence
  Synthetic oligonucleotide; AGG chr2 60455673 60455692 60455676 -
atgctgctcttagcgtaatt

SEQ ID NO: 184875 - DNA, 20 bp, Artificial Sequence
  Synthetic oligonucleotide; CAG chr2 60455657 60455676 60455660 -
aattaggttttgcatcctga

SEQ ID NO: 184876 - DNA, 20 bp, Artificial Sequence
  Synthetic oligonucleotide; CAG chr2 60455653 60455672 60455656 -
aggttttgcatcctgacaga

SEQ ID NO: 184877 - DNA, 20 bp, Artificial Sequence
  Synthetic oligonucleotide; TGG chr2 60455644 60455663 60455647 -
atcctgacagacagaattaa

SEQ ID NO: 184878 - DNA, 20 bp, Artificial Sequence
  Synthetic oligonucleotide; TGG chr2 60455641 60455660 60455644 -
ctgacagacagaattaatgg

SEQ ID NO: 184879 - DNA, 20 bp, Artificial Sequence
  Synthetic oligonucleotide; TGG chr2 60455600 60455619 60455603 -
ttcaaatttcttaaatcaaa

SEQ ID NO: 184880 - DNA, 20 bp, Artificial Sequence
  Synthetic oligonucleotide; GGG chr2 60455599 60455618 60455602 -
tcaaatttcttaaatcaaat

SEQ ID NO: 184881 - DNA, 20 bp, Artificial Sequence
  Synthetic oligonucleotide; GGG chr2 60455598 60455617 60455601 -
caaatttcttaaatcaaatg

SEQ ID NO: 184882 - DNA, 20 bp, Artificial Sequence
  Synthetic oligonucleotide; TGG chr2 60455593 60455612 60455596 -
ttcttaaatcaaatggggaa

SEQ ID NO: 184883 - DNA, 20 bp, Artificial Sequence
  Synthetic oligonucleotide; GGG chr2 60455592 60455611 60455595 -
tcttaaatcaaatggggaat

SEQ ID NO: 184884 - DNA, 20 bp, Artificial Sequence
  Synthetic oligonucleotide; GGG chr2 60455591 60455610 60455594 -
cttaaatcaaatggggaatg

SEQ ID NO: 184885 - DNA, 20 bp, Artificial Sequence
  Synthetic oligonucleotide; GAG chr2 60455589 60455608 60455592 -
taaatcaaatggggaatggg

SEQ ID NO: 184886 - DNA, 20 bp, Artificial Sequence
  Synthetic oligonucleotide; AGG chr2 60455588 60455607 60455591 -
aaatcaaatggggaatgggg

SEQ ID NO: 184887 - DNA, 20 bp, Artificial Sequence
  Synthetic oligonucleotide; GAG chr2 60455586 60455605 60455589 -
atcaaatggggaatggggag

SEQ ID NO: 184888 - DNA, 20 bp, Artificial Sequence
  Synthetic oligonucleotide; TGG chr2 60455573 60455592 60455576 -
tggggaggagtgcaaacatc

SEQ ID NO: 184889 - DNA, 20 bp, Artificial Sequence
  Synthetic oligonucleotide; CAG chr2 60455560 60455579 60455563 -
aaacatctggtgataaatca

SEQ ID NO: 184890 - DNA, 20 bp, Artificial Sequence
  Synthetic oligonucleotide; TGG chr2 60455540 60455559 60455543 -
cagattatgtttgatttaca

SEQ ID NO: 184891 - DNA, 20 bp, Artificial Sequence
  Synthetic oligonucleotide; AAG chr2 60455532 60455551 60455535 -
gtttgatttacatggtccca

SEQ ID NO: 184892 - DNA, 20 bp, Artificial Sequence
  Synthetic oligonucleotide; TGG chr2 60455515 60455534 60455518 -
ccaaagttaaataaatttac

SEQ ID NO: 184893 - DNA, 20 bp, Artificial Sequence
  Synthetic oligonucleotide; GGG chr2 60455514 60455533 60455517 -
caaagttaaataaatttact

SEQ ID NO: 184894 - DNA, 20 bp, Artificial Sequence
  Synthetic oligonucleotide; GAG chr2 60455512 60455531 60455515 -
aagttaaataaatttactgg

SEQ ID NO: 184895 - DNA, 20 bp, Artificial Sequence
  Synthetic oligonucleotide; TGG chr2 60455508 60455527 60455511 -
taaataaatttactgggaga

SEQ ID NO: 184896 - DNA, 20 bp, Artificial Sequence
  Synthetic oligonucleotide; GGG chr2 60455507 60455526 60455510 -
aaataaatttactgggagat

SEQ ID NO: 184897 - DNA, 20 bp, Artificial Sequence
  Synthetic oligonucleotide; CAG chr2 60455499 60455518 60455502 -
ttactgggagatgggttctt

SEQ ID NO: 184898 - DNA, 20 bp, Artificial Sequence
  Synthetic oligonucleotide; AGG chr2 60455498 60455517 60455501 -
tactgggagatgggttcttc

SEQ ID NO: 184899 - DNA, 20 bp, Artificial Sequence
  Synthetic oligonucleotide; TAG chr2 60455490 60455509 60455493 -
gatgggttcttcaggttact

SEQ ID NO: 184900 - DNA, 20 bp, Artificial Sequence
  Synthetic oligonucleotide; AAG chr2 60455445 60455464 60455448 -
ctgataaaatattatttctg

SEQ ID NO: 184901 - DNA, 20 bp, Artificial Sequence
  Synthetic oligonucleotide; TAG chr2 60455431 60455450 60455434 -
tttctgaagctgatgaacaa

SEQ ID NO: 184902 - DNA, 20 bp, Artificial Sequence
  Synthetic oligonucleotide; GAG chr2 60455422 60455441 60455425 -
ctgatgaacaatagaaacat

SEQ ID NO: 184903 - DNA, 20 bp, Artificial Sequence
  Synthetic oligonucleotide; TAG chr2 60455415 60455434 60455418 -
acaatagaaacatgagaacc

SEQ ID NO: 184904 - DNA, 20 bp, Artificial Sequence
  Synthetic oligonucleotide; CAG chr2 60455376 60455395 60455379 -
tataaatgatattttgtatc

SEQ ID NO: 184905 - DNA, 20 bp, Artificial Sequence
  Synthetic oligonucleotide; TAG chr2 60455325 60455344 60455328 -
aataacatgcacatttccaa

SEQ ID NO: 184906 - DNA, 20 bp, Artificial Sequence
  Synthetic oligonucleotide; AAG chr2 60455321 60455340 60455324 -
acatgcacatttccaatagt

SEQ ID NO: 184907 - DNA, 20 bp, Artificial Sequence
  Synthetic oligonucleotide; GAG chr2 60455290 60455309 60455293 -
atgatcttttttttttaaat

SEQ ID NO: 184908 - DNA, 20 bp, Artificial Sequence
  Synthetic oligonucleotide; AGG chr2 60455289 60455308 60455292 -
tgatcttttttttttaaatg

SEQ ID NO: 184909 - DNA, 20 bp, Artificial Sequence
  Synthetic oligonucleotide; AAG chr2 60455279 60455298 60455282 -
tttttaaatgaggaactact

SEQ ID NO: 184910 - DNA, 20 bp, Artificial Sequence
  Synthetic oligonucleotide; AAG chr2 60455251 60455270 60455254 -
taatgtctcttaaaatcctc

SEQ ID NO: 184911 - DNA, 20 bp, Artificial Sequence
  Synthetic oligonucleotide; AAG chr2 60455247 60455266 60455250 -
gtctcttaaaatcctcaagt

SEQ ID NO: 184912 - DNA, 20 bp, Artificial Sequence
  Synthetic oligonucleotide; CAG chr2 60455235 60455254 60455238 -
cctcaagtaagtttttgtaa

SEQ ID NO: 184913 - DNA, 20 bp, Artificial Sequence
  Synthetic oligonucleotide; AGG chr2 60455234 60455253 60455237 -
ctcaagtaagtttttgtaac

SEQ ID NO: 184914 - DNA, 20 bp, Artificial Sequence
  Synthetic oligonucleotide; TGG chr2 60455218 60455237 60455221 -
taacaggcttgacgtgctga

SEQ ID NO: 184915 - DNA, 20 bp, Artificial Sequence
  Synthetic oligonucleotide; GAG chr2 60455160 60455179 60455163 -
gttctttttaatcttcattt

SEQ ID NO: 184916 - DNA, 20 bp, Artificial Sequence
  Synthetic oligonucleotide; CAG chr2 60455143 60455162 60455146 -
tttgagaacaacttaataaa

SEQ ID NO: 184917 - DNA, 20 bp, Artificial Sequence
  Synthetic oligonucleotide; AGG chr2 60455142 60455161 60455145 -
ttgagaacaacttaataaac

SEQ ID NO: 184918 - DNA, 20 bp, Artificial Sequence
  Synthetic oligonucleotide; CAG chr2 60455116 60455135 60455119 -
accgcaaattctatttctca

SEQ ID NO: 184919 - DNA, 20 bp, Artificial Sequence
  Synthetic oligonucleotide; CAG chr2 60455104 60455123 60455107 -
atttctcacagattttaaac

SEQ ID NO: 184920 - DNA, 20 bp, Artificial Sequence
  Synthetic oligonucleotide; CAG chr2 60455092 60455111 60455095 -
ttttaaaccagaaactcttc

SEQ ID NO: 184921 - DNA, 20 bp, Artificial Sequence
  Synthetic oligonucleotide; TAG chr2 60455041 60455060 60455044 -
tttgctatcctctctttgtt

SEQ ID NO: 184922 - DNA, 20 bp, Artificial Sequence
  Synthetic oligonucleotide; AGG chr2 60455040 60455059 60455043 -
ttgctatcctctctttgttt

SEQ ID NO: 184923 - DNA, 20 bp, Artificial Sequence
  Synthetic oligonucleotide; AAG chr2 60455028 60455047 60455031 -
ctttgtttaggacctacaaa

SEQ ID NO: 184924 - DNA, 20 bp, Artificial Sequence
  Synthetic oligonucleotide; AGG chr2 60455027 60455046 60455030 -
tttgtttaggacctacaaaa

SEQ ID NO: 184925 - DNA, 20 bp, Artificial Sequence
  Synthetic oligonucleotide; TGG chr2 60455023 60455042 60455026 -
tttaggacctacaaaaaggc

SEQ ID NO: 184926 - DNA, 20 bp, Artificial Sequence
  Synthetic oligonucleotide; AAG chr2 60455005 60455024 60455008 -
gctggaaccaacacattaca

SEQ ID NO: 184927 - DNA, 20 bp, Artificial Sequence
  Synthetic oligonucleotide; AGG chr2 60455004 60455023 60455007 -
ctggaaccaacacattacaa

SEQ ID NO: 184928 - DNA, 20 bp, Artificial Sequence
  Synthetic oligonucleotide; AAG chr2 60454996 60455015 60454999 -
aacacattacaaaggttgct

SEQ ID NO: 184929 - DNA, 20 bp, Artificial Sequence
  Synthetic oligonucleotide; AAG chr2 60454993 60455012 60454996 -
acattacaaaggttgctaag

SEQ ID NO: 184930 - DNA, 20 bp, Artificial Sequence
  Synthetic oligonucleotide; GAG chr2 60454989 60455008 60454992 -
tacaaaggttgctaagaagt

SEQ ID NO: 184931 - DNA, 20 bp, Artificial Sequence
  Synthetic oligonucleotide; AGG chr2 60454988 60455007 60454991 -
acaaaggttgctaagaagtg

SEQ ID NO: 184932 - DNA, 20 bp, Artificial Sequence
  Synthetic oligonucleotide; CAG chr2 60454979 60454998 60454982 -
gctaagaagtgaggtgaaca

SEQ ID NO: 184933 - DNA, 20 bp, Artificial Sequence
  Synthetic oligonucleotide; TGG chr2 60454962 60454981 60454965 -
acacagttcttcatttgcac

SEQ ID NO: 184934 - DNA, 20 bp, Artificial Sequence
  Synthetic oligonucleotide; TGG chr2 60454956 60454975 60454959 -
ttcttcatttgcactggcca

SEQ ID NO: 184935 - DNA, 20 bp, Artificial Sequence
  Synthetic oligonucleotide; CAG chr2 60454953 60454972 60454956 -
ttcatttgcactggccatgg

SEQ ID NO: 184936 - DNA, 20 bp, Artificial Sequence
  Synthetic oligonucleotide; AAG chr2 60454949 60454968 60454952 -
tttgcactggccatggcaga

SEQ ID NO: 184937 - DNA, 20 bp, Artificial Sequence
  Synthetic oligonucleotide; AAG chr2 60454942 60454961 60454945 -
tggccatggcagaaagtgtg

SEQ ID NO: 184938 - DNA, 20 bp, Artificial Sequence
  Synthetic oligonucleotide; TAG chr2 60454939 60454958 60454942 -
ccatggcagaaagtgtgaag

SEQ ID NO: 184939 - DNA, 20 bp, Artificial Sequence
  Synthetic oligonucleotide; GAG chr2 60454934 60454953 60454937 -
gcagaaagtgtgaagtagtt

SEQ ID NO: 184940 - DNA, 20 bp, Artificial Sequence
  Synthetic oligonucleotide; CAG chr2 60454924 60454943 60454927 -
tgaagtagttgagtttttcc

SEQ ID NO: 184941 - DNA, 20 bp, Artificial Sequence
  Synthetic oligonucleotide; AGG chr2 60454923 60454942 60454926 -
gaagtagttgagtttttccc

SEQ ID NO: 184942 - DNA, 20 bp, Artificial Sequence
  Synthetic oligonucleotide; GGG chr2 60454922 60454941 60454925 -
aagtagttgagtttttccca

SEQ ID NO: 184943 - DNA, 20 bp, Artificial Sequence
  Synthetic oligonucleotide; TAG chr2 60454912 60454931 60454915 -
gtttttcccagggcattctg

SEQ ID NO: 184944 - DNA, 20 bp, Artificial Sequence
  Synthetic oligonucleotide; TAG chr2 60454906 60454925 60454909 -
cccagggcattctgtagata

SEQ ID NO: 184945 - DNA, 20 bp, Artificial Sequence
  Synthetic oligonucleotide; AAG chr2 60454867 60454886 60454870 -
accatttttgtatatgcaat

SEQ ID NO: 184946 - DNA, 20 bp, Artificial Sequence
  Synthetic oligonucleotide; TAG chr2 60454839 60454858 60454842 -
attgtatataatcataatgc

SEQ ID NO: 184947 - DNA, 20 bp, Artificial Sequence
  Synthetic oligonucleotide; AAG chr2 60454836 60454855 60454839 -
gtatataatcataatgctag

SEQ ID NO: 184948 - DNA, 20 bp, Artificial Sequence
  Synthetic oligonucleotide; GAG chr2 60454832 60454851 60454835 -
ataatcataatgctagaagt

SEQ ID NO: 184949 - DNA, 20 bp, Artificial Sequence
  Synthetic oligonucleotide; AAG chr2 60454822 60454841 60454825 -
tgctagaagtgagaacttga

SEQ ID NO: 184950 - DNA, 20 bp, Artificial Sequence
  Synthetic oligonucleotide; AGG chr2 60454821 60454840 60454824 -
gctagaagtgagaacttgaa

SEQ ID NO: 184951 - DNA, 20 bp, Artificial Sequence
  Synthetic oligonucleotide; AAG chr2 60454818 60454837 60454821 -
agaagtgagaacttgaaagg

SEQ ID NO: 184952 - DNA, 20 bp, Artificial Sequence
  Synthetic oligonucleotide; TGG chr2 60454815 60454834 60454818 -
agtgagaacttgaaaggaag

SEQ ID NO: 184953 - DNA, 20 bp, Artificial Sequence
  Synthetic oligonucleotide; CGG chr2 60454812 60454831 60454815 -
gagaacttgaaaggaagtgg

SEQ ID NO: 184954 - DNA, 20 bp, Artificial Sequence
  Synthetic oligonucleotide; GGG chr2 60454811 60454830 60454814 -
agaacttgaaaggaagtggc

SEQ ID NO: 184955 - DNA, 20 bp, Artificial Sequence
  Synthetic oligonucleotide; GAG chr2 60454809 60454828 60454812 -
aacttgaaaggaagtggcgg

SEQ ID NO: 184956 - DNA, 20 bp, Artificial Sequence
  Synthetic oligonucleotide; TGG chr2 60454805 60454824 60454808 -
tgaaaggaagtggcgggaga

SEQ ID NO: 184957 - DNA, 20 bp, Artificial Sequence
  Synthetic oligonucleotide; TAG chr2 60454800 60454819 60454803 -
ggaagtggcgggagatggct

SEQ ID NO: 184958 - DNA, 20 bp, Artificial Sequence
  Synthetic oligonucleotide; AGG chr2 60454799 60454818 60454802 -
gaagtggcgggagatggctt

SEQ ID NO: 184959 - DNA, 20 bp, Artificial Sequence
  Synthetic oligonucleotide; TGG chr2 60454784 60454803 60454787 -
ggcttaggtataattccaat

SEQ ID NO: 184960 - DNA, 20 bp, Artificial Sequence
  Synthetic oligonucleotide; GAG chr2 60454782 60454801 60454785 -
cttaggtataattccaattg

SEQ ID NO: 184961 - DNA, 20 bp, Artificial Sequence
  Synthetic oligonucleotide; AAG chr2 60454775 60454794 60454778 -
ataattccaattggagaaat

SEQ ID NO: 184962 - DNA, 20 bp, Artificial Sequence
  Synthetic oligonucleotide; AGG chr2 60454774 60454793 60454777 -
taattccaattggagaaata

SEQ ID NO: 184963 - DNA, 20 bp, Artificial Sequence
  Synthetic oligonucleotide; GAG chr2 60454767 60454786 60454770 -
aattggagaaataaggaaat

SEQ ID NO: 184964 - DNA, 20 bp, Artificial Sequence
  Synthetic oligonucleotide; AGG chr2 60454766 60454785 60454769 -
attggagaaataaggaaatg

SEQ ID NO: 184965 - DNA, 20 bp, Artificial Sequence
  Synthetic oligonucleotide; TGG chr2 60454763 60454782 60454766 -
ggagaaataaggaaatgagg

SEQ ID NO: 184966 - DNA, 20 bp, Artificial Sequence
  Synthetic oligonucleotide; CAG chr2 60454752 60454771 60454755 -
gaaatgaggtggtttattca

SEQ ID NO: 184967 - DNA, 20 bp, Artificial Sequence
  Synthetic oligonucleotide; CAG chr2 60454746 60454765 60454749 -
aggtggtttattcacagaca

SEQ ID NO: 184968 - DNA, 20 bp, Artificial Sequence
  Synthetic oligonucleotide; AAG chr2 60454735 60454754 60454738 -
tcacagacacagtttgctga

SEQ ID NO: 184969 - DNA, 20 bp, Artificial Sequence
  Synthetic oligonucleotide; AGG chr2 60454734 60454753 60454737 -
cacagacacagtttgctgaa

SEQ ID NO: 184970 - DNA, 20 bp, Artificial Sequence
  Synthetic oligonucleotide; TGG chr2 60454728 60454747 60454731 -
cacagtttgctgaaaggtac

SEQ ID NO: 184971 - DNA, 20 bp, Artificial Sequence
  Synthetic oligonucleotide; GGG chr2 60454727 60454746 60454730 -
acagtttgctgaaaggtact

SEQ ID NO: 184972 - DNA, 20 bp, Artificial Sequence
  Synthetic oligonucleotide; CGG chr2 60454717 60454736 60454720 -
gaaaggtactgggattattt

SEQ ID NO: 184973 - DNA, 20 bp, Artificial Sequence
  Synthetic oligonucleotide; GGG chr2 60454716 60454735 60454719 -
aaaggtactgggattatttc

SEQ ID NO: 184974 - DNA, 20 bp, Artificial Sequence
  Synthetic oligonucleotide; AAG chr2 60454703 60454722 60454706 -
ttatttcgggccttcctgaa

SEQ ID NO: 184975 - DNA, 20 bp, Artificial Sequence
  Synthetic oligonucleotide; AGG chr2 60454702 60454721 60454705 -
tatttcgggccttcctgaaa

SEQ ID NO: 184976 - DNA, 20 bp, Artificial Sequence
  Synthetic oligonucleotide; GAG chr2 60454700 60454719 60454703 -
tttcgggccttcctgaaaag

SEQ ID NO: 184977 - DNA, 20 bp, Artificial Sequence
  Synthetic oligonucleotide; GAG chr2 60454695 60454714 60454698 -
ggccttcctgaaaaggagtt

SEQ ID NO: 184978 - DNA, 20 bp, Artificial Sequence
  Synthetic oligonucleotide; AAG chr2 60454692 60454711 60454695 -
cttcctgaaaaggagttgag

SEQ ID NO: 184979 - DNA, 20 bp, Artificial Sequence
  Synthetic oligonucleotide; CAG chr2 60454686 60454705 60454689 -
gaaaaggagttgagaagcct

SEQ ID NO: 184980 - DNA, 20 bp, Artificial Sequence
  Synthetic oligonucleotide; AGG chr2 60454685 60454704 60454688 -
aaaaggagttgagaagcctc

SEQ ID NO: 184981 - DNA, 20 bp, Artificial Sequence
  Synthetic oligonucleotide; TAG chr2 60454663 60454682 60454666 -
gccccatcctctcctgcttg

SEQ ID NO: 184982 - DNA, 20 bp, Artificial Sequence
  Synthetic oligonucleotide; CAG chr2 60454649 60454668 60454652 -
tgcttgtagtactttgctca

SEQ ID NO: 184983 - DNA, 20 bp, Artificial Sequence
  Synthetic oligonucleotide; GAG chr2 60454647 60454666 60454650 -
cttgtagtactttgctcaca

SEQ ID NO: 184984 - DNA, 20 bp, Artificial Sequence
  Synthetic oligonucleotide; GAG chr2 60454641 60454660 60454644 -
gtactttgctcacagagact

SEQ ID NO: 184985 - DNA, 20 bp, Artificial Sequence
  Synthetic oligonucleotide; AGG chr2 60454640 60454659 60454643 -
tactttgctcacagagactg

SEQ ID NO: 184986 - DNA, 20 bp, Artificial Sequence
  Synthetic oligonucleotide; GGG chr2 60454639 60454658 60454642 -
actttgctcacagagactga

SEQ ID NO: 184987 - DNA, 20 bp, Artificial Sequence
  Synthetic oligonucleotide; GAG chr2 60454637 60454656 60454640 -
tttgctcacagagactgagg

SEQ ID NO: 184988 - DNA, 20 bp, Artificial Sequence
  Synthetic oligonucleotide; AGG chr2 60454636 60454655 60454639 -
ttgctcacagagactgaggg

SEQ ID NO: 184989 - DNA, 20 bp, Artificial Sequence
  Synthetic oligonucleotide; CAG chr2 60454628 60454647 60454631 -
agagactgagggaggaaata

SEQ ID NO: 184990 - DNA, 20 bp, Artificial Sequence
  Synthetic oligonucleotide; AAG chr2 60454611 60454630 60454614 -
atacagtgttttcttgtttt

SEQ ID NO: 184991 - DNA, 20 bp, Artificial Sequence
  Synthetic oligonucleotide; TGG chr2 60454513 60454532 60454516 -
ttctgttactccattgtccc

SEQ ID NO: 184992 - DNA, 20 bp, Artificial Sequence
  Synthetic oligonucleotide; GGG chr2 60454512 60454531 60454515 -
tctgttactccattgtccct

SEQ ID NO: 184993 - DNA, 20 bp, Artificial Sequence
  Synthetic oligonucleotide; TGG chr2 60454507 60454526 60454510 -
tactccattgtccctgggcc

SEQ ID NO: 184994 - DNA, 20 bp, Artificial Sequence
  Synthetic oligonucleotide; CAG chr2 60454498 60454517 60454501 -
gtccctgggcctggtgtgtt

SEQ ID NO: 184995 - DNA, 20 bp, Artificial Sequence
  Synthetic oligonucleotide; AGG chr2 60454497 60454516 60454500 -
tccctgggcctggtgtgttc

SEQ ID NO: 184996 - DNA, 20 bp, Artificial Sequence
  Synthetic oligonucleotide; CAG chr2 60454467 60454486 60454470 -
ccatcccattctcttttttt

SEQ ID NO: 184997 - DNA, 20 bp, Artificial Sequence
  Synthetic oligonucleotide; TGG chr2 60454439 60454458 60454442 -
ttcccataaaaaaaaaattg

SEQ ID NO: 184998 - DNA, 20 bp, Artificial Sequence
  Synthetic oligonucleotide; GGG chr2 60454438 60454457 60454441 -
tcccataaaaaaaaaattgt

SEQ ID NO: 184999 - DNA, 20 bp, Artificial Sequence
  Synthetic oligonucleotide; GAG chr2 60454421 60454440 60454424 -
tgtgggaactttgccgatat

SEQ ID NO: 185000 - DNA, 20 bp, Artificial Sequence
  Synthetic oligonucleotide; AGG chr2 60454420 60454439 60454423 -
gtgggaactttgccgatatg

SEQ ID NO: 185001 - DNA, 20 bp, Artificial Sequence
  Synthetic oligonucleotide; TGG chr2 60454416 60454435 60454419 -
gaactttgccgatatgagga

SEQ ID NO: 185002 - DNA, 20 bp, Artificial Sequence
  Synthetic oligonucleotide; GGG chr2 60454415 60454434 60454418 -
aactttgccgatatgaggat

SEQ ID NO: 185003 - DNA, 20 bp, Artificial Sequence
  Synthetic oligonucleotide; TGG chr2 60454410 60454429 60454413 -
tgccgatatgaggatgggat

SEQ ID NO: 185004 - DNA, 20 bp, Artificial Sequence
  Synthetic oligonucleotide; CAG chr2 60454407 60454426 60454410 -
cgatatgaggatgggattgg

SEQ ID NO: 185005 - DNA, 20 bp, Artificial Sequence
  Synthetic oligonucleotide; GAG chr2 60454405 60454424 60454408 -
atatgaggatgggattggca

SEQ ID NO: 185006 - DNA, 20 bp, Artificial Sequence
  Synthetic oligonucleotide; TGG chr2 60454387 60454406 60454390 -
cagagttctctcaacctgct

SEQ ID NO: 185007 - DNA, 20 bp, Artificial Sequence
  Synthetic oligonucleotide; AAG chr2 60454369 60454388 60454372 -
cttggaaaaatgtttcttaa

SEQ ID NO: 185008 - DNA, 20 bp, Artificial Sequence
  Synthetic oligonucleotide; AAG chr2 60454351 60454370 60454354 -
aaaagactgctaacttttaa

SEQ ID NO: 185009 - DNA, 20 bp, Artificial Sequence
  Synthetic oligonucleotide; AGG chr2 60454350 60454369 60454353 -
aaagactgctaacttttaaa

SEQ ID NO: 185010 - DNA, 20 bp, Artificial Sequence
  Synthetic oligonucleotide; GAG chr2 60454344 60454363 60454347 -
tgctaacttttaaaaggcat

SEQ ID NO: 185011 - DNA, 20 bp, Artificial Sequence
  Synthetic oligonucleotide; TAG chr2 60454336 60454355 60454339 -
tttaaaaggcatgagccatc

SEQ ID NO: 185012 - DNA, 20 bp, Artificial Sequence
  Synthetic oligonucleotide; CAG chr2 60454333 60454352 60454336 -
aaaaggcatgagccatctag

SEQ ID NO: 185013 - DNA, 20 bp, Artificial Sequence
  Synthetic oligonucleotide; TAG chr2 60454323 60454342 60454326 -
agccatctagcagattttcc

SEQ ID NO: 185014 - DNA, 20 bp, Artificial Sequence
  Synthetic oligonucleotide; AAG chr2 60454310 60454329 60454313 -
attttcctagttgtctccta

SEQ ID NO: 185015 - DNA, 20 bp, Artificial Sequence
  Synthetic oligonucleotide; TAG chr2 60454290 60454309 60454293 -
aagccctgcatatttcccaa

SEQ ID NO: 185016 - DNA, 20 bp, Artificial Sequence
  Synthetic oligonucleotide; TAG chr2 60454267 60454286 60454270 -
aaaataaacgaacccattgt

SEQ ID NO: 185017 - DNA, 20 bp, Artificial Sequence
  Synthetic oligonucleotide; GAG chr2 60454265 60454284 60454268 -
aataaacgaacccattgtta

SEQ ID NO: 185018 - DNA, 20 bp, Artificial Sequence
  Synthetic oligonucleotide; TGG chr2 60454259 60454278 60454262 -
cgaacccattgttagagaaa

SEQ ID NO: 185019 - DNA, 20 bp, Artificial Sequence
  Synthetic oligonucleotide; CAG chr2 60454252 60454271 60454255 -
attgttagagaaatggacat

SEQ ID NO: 185020 - DNA, 20 bp, Artificial Sequence
  Synthetic oligonucleotide; TAG chr2 60454243 60454262 60454246 -
gaaatggacatcagaacaca

SEQ ID NO: 185021 - DNA, 20 bp, Artificial Sequence
  Synthetic oligonucleotide; GAG chr2 60454241 60454260 60454244 -
aatggacatcagaacacata

SEQ ID NO: 185022 - DNA, 20 bp, Artificial Sequence
  Synthetic oligonucleotide; AGG chr2 60454240 60454259 60454243 -
atggacatcagaacacatag

SEQ ID NO: 185023 - DNA, 20 bp, Artificial Sequence
  Synthetic oligonucleotide; GGG chr2 60454239 60454258 60454242 -
tggacatcagaacacataga

SEQ ID NO: 185024 - DNA, 20 bp, Artificial Sequence
  Synthetic oligonucleotide; TGG chr2 60454233 60454252 60454236 -
tcagaacacatagagggaat

SEQ ID NO: 185025 - DNA, 20 bp, Artificial Sequence
  Synthetic oligonucleotide; TAG chr2 60454212 60454231 60454215 -
ggtatgatgtgtatttactc

SEQ ID NO: 185026 - DNA, 20 bp, Artificial Sequence
  Synthetic oligonucleotide; AGG chr2 60454211 60454230 60454214 -
gtatgatgtgtatttactct

SEQ ID NO: 185027 - DNA, 20 bp, Artificial Sequence
  Synthetic oligonucleotide; GGG chr2 60454210 60454229 60454213 -
tatgatgtgtatttactcta

SEQ ID NO: 185028 - DNA, 20 bp, Artificial Sequence
  Synthetic oligonucleotide; TAG chr2 60454201 60454220 60454204 -
tatttactctagggctgcta

SEQ ID NO: 185029 - DNA, 20 bp, Artificial Sequence
  Synthetic oligonucleotide; TGG chr2 60454188 60454207 60454191 -
gctgctatagctatgaactg

SEQ ID NO: 185030 - DNA, 20 bp, Artificial Sequence
  Synthetic oligonucleotide; TGG chr2 60454182 60454201 60454185 -
atagctatgaactgtggaca

SEQ ID NO: 185031 - DNA, 20 bp, Artificial Sequence
  Synthetic oligonucleotide; GGG chr2 60454181 60454200 60454184 -
tagctatgaactgtggacat

SEQ ID NO: 185032 - DNA, 20 bp, Artificial Sequence
  Synthetic oligonucleotide; CGG chr2 60454173 60454192 60454176 -
aactgtggacatgggttgtc

SEQ ID NO: 185033 - DNA, 20 bp, Artificial Sequence
  Synthetic oligonucleotide; TGG chr2 60454153 60454172 60454156 -
cggtctgcacttctgcttgc

SEQ ID NO: 185034 - DNA, 20 bp, Artificial Sequence
  Synthetic oligonucleotide; TAG chr2 60454134 60454153 60454137 -
ctggcatctcgttatcccat

SEQ ID NO: 185035 - DNA, 20 bp, Artificial Sequence
  Synthetic oligonucleotide; CAG chr2 60454108 60454127 60454111 -
gctgtttaatttactacata

SEQ ID NO: 185036 - DNA, 20 bp, Artificial Sequence
  Synthetic oligonucleotide; GAG chr2 60454102 60454121 60454105 -
taatttactacatacagcac

SEQ ID NO: 185037 - DNA, 20 bp, Artificial Sequence
  Synthetic oligonucleotide; AGG chr2 60454101 60454120 60454104 -
aatttactacatacagcacg

SEQ ID NO: 185038 - DNA, 20 bp, Artificial Sequence
  Synthetic oligonucleotide; CAG chr2 60454097 60454116 60454100 -
tactacatacagcacgaggc

SEQ ID NO: 185039 - DNA, 20 bp, Artificial Sequence
  Synthetic oligonucleotide; CAG chr2 60454089 60454108 60454092 -
acagcacgaggccagtgact

SEQ ID NO: 185040 - DNA, 20 bp, Artificial Sequence
  Synthetic oligonucleotide; TAG chr2 60454082 60454101 60454085 -
gaggccagtgactcagcctt

SEQ ID NO: 185041 - DNA, 20 bp, Artificial Sequence
  Synthetic oligonucleotide; AGG chr2 60454081 60454100 60454084 -
aggccagtgactcagccttt

SEQ ID NO: 185042 - DNA, 20 bp, Artificial Sequence
  Synthetic oligonucleotide; GGG chr2 60454080 60454099 60454083 -
ggccagtgactcagccttta

SEQ ID NO: 185043 - DNA, 20 bp, Artificial Sequence
  Synthetic oligonucleotide; GGG chr2 60454079 60454098 60454082 -
gccagtgactcagcctttag

SEQ ID NO: 185044 - DNA, 20 bp, Artificial Sequence
  Synthetic oligonucleotide; TGG chr2 60454074 60454093 60454077 -
tgactcagcctttaggggaa

SEQ ID NO: 185045 - DNA, 20 bp, Artificial Sequence
  Synthetic oligonucleotide; GGG chr2 60454073 60454092 60454076 -
gactcagcctttaggggaat

SEQ ID NO: 185046 - DNA, 20 bp, Artificial Sequence
  Synthetic oligonucleotide; GGG chr2 60454072 60454091 60454075 -
actcagcctttaggggaatg

SEQ ID NO: 185047 - DNA, 20 bp, Artificial Sequence
  Synthetic oligonucleotide; CAG chr2 60454027 60454046 60454030 -
ctttctctctctctatttcc

SEQ ID NO: 185048 - DNA, 20 bp, Artificial Sequence
  Synthetic oligonucleotide; CGG chr2 60454015 60454034 60454018 -
ctatttcccagcgtcatcta

SEQ ID NO: 185049 - DNA, 20 bp, Artificial Sequence
  Synthetic oligonucleotide; TGG chr2 60454009 60454028 60454012 -
cccagcgtcatctacggtca

SEQ ID NO: 185050 - DNA, 20 bp, Artificial Sequence
  Synthetic oligonucleotide; GGG chr2 60454008 60454027 60454011 -
ccagcgtcatctacggtcat

SEQ ID NO: 185051 - DNA, 20 bp, Artificial Sequence
  Synthetic oligonucleotide; TGG chr2 60453980 60453999 60453983 -
attaattcctcccttccaaa

SEQ ID NO: 185052 - DNA, 20 bp, Artificial Sequence
  Synthetic oligonucleotide; GGG chr2 60453979 60453998 60453982 -
ttaattcctcccttccaaat

SEQ ID NO: 185053 - DNA, 20 bp, Artificial Sequence
  Synthetic oligonucleotide; AAG chr2 60453975 60453994 60453978 -
ttcctcccttccaaatggga

SEQ ID NO: 185054 - DNA, 20 bp, Artificial Sequence
  Synthetic oligonucleotide; GAG chr2 60453973 60453992 60453976 -
cctcccttccaaatgggaaa

SEQ ID NO: 185055 - DNA, 20 bp, Artificial Sequence
  Synthetic oligonucleotide; CAG chr2 60453963 60453982 60453966 -
aaatgggaaagagaccaatc

SEQ ID NO: 185056 - DNA, 20 bp, Artificial Sequence
  Synthetic oligonucleotide; CGG chr2 60453954 60453973 60453957 -
agagaccaatccagttcaca

SEQ ID NO: 185057 - DNA, 20 bp, Artificial Sequence
  Synthetic oligonucleotide; GGG chr2 60453953 60453972 60453956 -
gagaccaatccagttcacac

SEQ ID NO: 185058 - DNA, 20 bp, Artificial Sequence
  Synthetic oligonucleotide; GAG chr2 60453939 60453958 60453942 -
tcacacgggtcattgtactt

SEQ ID NO: 185059 - DNA, 20 bp, Artificial Sequence
  Synthetic oligonucleotide; TGG chr2 60453926 60453945 60453929 -
tgtacttgagaacctaaact

SEQ ID NO: 185060 - DNA, 20 bp, Artificial Sequence
  Synthetic oligonucleotide; CAG chr2 60453916 60453935 60453919 -
aacctaaacttggctgaaca

SEQ ID NO: 185061 - DNA, 20 bp, Artificial Sequence
  Synthetic oligonucleotide; TGG chr2 60453908 60453927 60453911 -
cttggctgaacacagctcga

SEQ ID NO: 185062 - DNA, 20 bp, Artificial Sequence
  Synthetic oligonucleotide; AAG chr2 60453876 60453895 60453879 -
atacgtttttcctttctgta

SEQ ID NO: 185063 - DNA, 20 bp, Artificial Sequence
  Synthetic oligonucleotide; TGG chr2 60453873 60453892 60453876 -
cgtttttcctttctgtaaag

SEQ ID NO: 185064 - DNA, 20 bp, Artificial Sequence
  Synthetic oligonucleotide; AAG chr2 60453857 60453876 60453860 -
aaagtggcaaaaactatttc

SEQ ID NO: 185065 - DNA, 20 bp, Artificial Sequence
  Synthetic oligonucleotide; AGG chr2 60453856 60453875 60453859 -
aagtggcaaaaactatttca

SEQ ID NO: 185066 - DNA, 20 bp, Artificial Sequence
  Synthetic oligonucleotide; GGG chr2 60453855 60453874 60453858 -
agtggcaaaaactatttcaa

SEQ ID NO: 185067 - DNA, 20 bp, Artificial Sequence
  Synthetic oligonucleotide; GAG chr2 60453853 60453872 60453856 -
tggcaaaaactatttcaagg

SEQ ID NO: 185068 - DNA, 20 bp, Artificial Sequence
  Synthetic oligonucleotide; CAG chr2 60453841 60453860 60453844 -
tttcaagggagcacgtgtat

SEQ ID NO: 185069 - DNA, 20 bp, Artificial Sequence
  Synthetic oligonucleotide; TAG chr2 60453830 60453849 60453833 -
cacgtgtatcagatctttca

SEQ ID NO: 185070 - DNA, 20 bp, Artificial Sequence
  Synthetic oligonucleotide; AGG chr2 60453829 60453848 60453832 -
acgtgtatcagatctttcat

SEQ ID NO: 185071 - DNA, 20 bp, Artificial Sequence
  Synthetic oligonucleotide; GGG chr2 60453828 60453847 60453831 -
cgtgtatcagatctttcata

SEQ ID NO: 185072 - DNA, 20 bp, Artificial Sequence
  Synthetic oligonucleotide; TGG chr2 60453824 60453843 60453827 -
tatcagatctttcataggga

SEQ ID NO: 185073 - DNA, 20 bp, Artificial Sequence
  Synthetic oligonucleotide; TAG chr2 60453821 60453840 60453824 -
cagatctttcatagggatgg

SEQ ID NO: 185074 - DNA, 20 bp, Artificial Sequence
  Synthetic oligonucleotide; AAG chr2 60453816 60453835 60453819 -
ctttcatagggatggtagaa

SEQ ID NO: 185075 - DNA, 20 bp, Artificial Sequence
  Synthetic oligonucleotide; AGG chr2 60453815 60453834 60453818 -
tttcatagggatggtagaaa

SEQ ID NO: 185076 - DNA, 20 bp, Artificial Sequence
  Synthetic oligonucleotide; AAG chr2 60453806 60453825 60453809 -
gatggtagaaaaggcaaatt

SEQ ID NO: 185077 - DNA, 20 bp, Artificial Sequence
  Synthetic oligonucleotide; AAG chr2 60453793 60453812 60453796 -
gcaaattaagccatttcccc

SEQ ID NO: 185078 - DNA, 20 bp, Artificial Sequence
  Synthetic oligonucleotide; AAG chr2 60453781 60453800 60453784 -
atttccccaagtatcctcta

SEQ ID NO: 185079 - DNA, 20 bp, Artificial Sequence
  Synthetic oligonucleotide; CGG chr2 60453778 60453797 60453781 -
tccccaagtatcctctaaag

SEQ ID NO: 185080 - DNA, 20 bp, Artificial Sequence
  Synthetic oligonucleotide; GGG chr2 60453777 60453796 60453780 -
ccccaagtatcctctaaagc

SEQ ID NO: 185081 - DNA, 20 bp, Artificial Sequence
  Synthetic oligonucleotide; GAG chr2 60453775 60453794 60453778 -
ccaagtatcctctaaagcgg

SEQ ID NO: 185082 - DNA, 20 bp, Artificial Sequence
  Synthetic oligonucleotide; TAG chr2 60453760 60453779 60453763 -
agcgggagcccctaaaccca

SEQ ID NO: 185083 - DNA, 20 bp, Artificial Sequence
  Synthetic oligonucleotide; AGG chr2 60453759 60453778 60453762 -
gcgggagcccctaaacccat

SEQ ID NO: 185084 - DNA, 20 bp, Artificial Sequence
  Synthetic oligonucleotide; GGG chr2 60453758 60453777 60453761 -
cgggagcccctaaacccata

SEQ ID NO: 185085 - DNA, 20 bp, Artificial Sequence
  Synthetic oligonucleotide; GGG chr2 60453757 60453776 60453760 -
gggagcccctaaacccatag

SEQ ID NO: 185086 - DNA, 20 bp, Artificial Sequence
  Synthetic oligonucleotide; GGG chr2 60453756 60453775 60453759 -
ggagcccctaaacccatagg

SEQ ID NO: 185087 - DNA, 20 bp, Artificial Sequence
  Synthetic oligonucleotide; GGG chr2 60453755 60453774 60453758 -
gagcccctaaacccataggg

SEQ ID NO: 185088 - DNA, 20 bp, Artificial Sequence
  Synthetic oligonucleotide; TAG chr2 60453739 60453758 60453742 -
aggggggctgtgcttttaaa

SEQ ID NO: 185089 - DNA, 20 bp, Artificial Sequence
  Synthetic oligonucleotide; TGG chr2 60453727 60453746 60453730 -
cttttaaatagctgtgaacg

SEQ ID NO: 185090 - DNA, 20 bp, Artificial Sequence
  Synthetic oligonucleotide; TAG chr2 60453697 60453716 60453700 -
ccatgatatactttgtctat

SEQ ID NO: 185091 - DNA, 20 bp, Artificial Sequence
  Synthetic oligonucleotide; TGG chr2 60453683 60453702 60453686 -
gtctattagaatttgaatat

SEQ ID NO: 185092 - DNA, 20 bp, Artificial Sequence
  Synthetic oligonucleotide; TAG chr2 60453680 60453699 60453683 -
tattagaatttgaatattgg

SEQ ID NO: 185093 - DNA, 20 bp, Artificial Sequence
  Synthetic oligonucleotide; CAG chr2 60453677 60453696 60453680 -
tagaatttgaatattggtag

SEQ ID NO: 185094 - DNA, 20 bp, Artificial Sequence
  Synthetic oligonucleotide; AGG chr2 60453676 60453695 60453679 -
agaatttgaatattggtagc

SEQ ID NO: 185095 - DNA, 20 bp, Artificial Sequence
  Synthetic oligonucleotide; TGG chr2 60453672 60453691 60453675 -
tttgaatattggtagcaggt

SEQ ID NO: 185096 - DNA, 20 bp, Artificial Sequence
  Synthetic oligonucleotide; AAG chr2 60453665 60453684 60453668 -
attggtagcaggttggacga

SEQ ID NO: 185097 - DNA, 20 bp, Artificial Sequence
  Synthetic oligonucleotide; AGG chr2 60453664 60453683 60453667 -
ttggtagcaggttggacgaa

SEQ ID NO: 185098 - DNA, 20 bp, Artificial Sequence
  Synthetic oligonucleotide; GGG chr2 60453663 60453682 60453666 -
tggtagcaggttggacgaaa

SEQ ID NO: 185099 - DNA, 20 bp, Artificial Sequence
  Synthetic oligonucleotide; TGG chr2 60453654 60453673 60453657 -
gttggacgaaagggtttgat

SEQ ID NO: 185100 - DNA, 20 bp, Artificial Sequence
  Synthetic oligonucleotide; GGG chr2 60453653 60453672 60453656 -
ttggacgaaagggtttgatt

SEQ ID NO: 185101 - DNA, 20 bp, Artificial Sequence
  Synthetic oligonucleotide; GGG chr2 60453652 60453671 60453655 -
tggacgaaagggtttgattg

SEQ ID NO: 185102 - DNA, 20 bp, Artificial Sequence
  Synthetic oligonucleotide; CAG chr2 60453646 60453665 60453649 -
aaagggtttgattggggtat

SEQ ID NO: 185103 - DNA, 20 bp, Artificial Sequence
  Synthetic oligonucleotide; AAG chr2 60453640 60453659 60453643 -
tttgattggggtatcagcta

SEQ ID NO: 185104 - DNA, 20 bp, Artificial Sequence
  Synthetic oligonucleotide; AGG chr2 60453639 60453658 60453642 -
ttgattggggtatcagctaa

SEQ ID NO: 185105 - DNA, 20 bp, Artificial Sequence
  Synthetic oligonucleotide; GGG chr2 60453638 60453657 60453641 -
tgattggggtatcagctaaa

SEQ ID NO: 185106 - DNA, 20 bp, Artificial Sequence
  Synthetic oligonucleotide; GGG chr2 60453637 60453656 60453640 -
gattggggtatcagctaaag

SEQ ID NO: 185107 - DNA, 20 bp, Artificial Sequence
  Synthetic oligonucleotide; CAG chr2 60453625 60453644 60453628 -
agctaaaggggcctcgacga

SEQ ID NO: 185108 - DNA, 20 bp, Artificial Sequence
  Synthetic oligonucleotide; TAG chr2 60453617 60453636 60453620 -
gggcctcgacgacagtgact

SEQ ID NO: 185109 - DNA, 20 bp, Artificial Sequence
  Synthetic oligonucleotide; TGG chr2 60453611 60453630 60453614 -
cgacgacagtgacttagcgc

SEQ ID NO: 185110 - DNA, 20 bp, Artificial Sequence
  Synthetic oligonucleotide; TGG chr2 60453606 60453625 60453609 -
acagtgacttagcgctggac

SEQ ID NO: 185111 - DNA, 20 bp, Artificial Sequence
  Synthetic oligonucleotide; GGG chr2 60453605 60453624 60453608 -
cagtgacttagcgctggact

SEQ ID NO: 185112 - DNA, 20 bp, Artificial Sequence
  Synthetic oligonucleotide; TGG chr2 60453600 60453619 60453603 -
acttagcgctggactgggaa

SEQ ID NO: 185113 - DNA, 20 bp, Artificial Sequence
  Synthetic oligonucleotide; GGG chr2 60453599 60453618 60453602 -
cttagcgctggactgggaat

SEQ ID NO: 185114 - DNA, 20 bp, Artificial Sequence
  Synthetic oligonucleotide; CAG chr2 60453590 60453609 60453593 -
ggactgggaatgggattccc

SEQ ID NO: 185115 - DNA, 20 bp, Artificial Sequence
  Synthetic oligonucleotide; TGG chr2 60453579 60453598 60453582 -
gggattccccagaacccacc

SEQ ID NO: 185116 - DNA, 20 bp, Artificial Sequence
  Synthetic oligonucleotide; CAG chr2 60453573 60453592 60453576 -
ccccagaacccacctggacg

SEQ ID NO: 185117 - DNA, 20 bp, Artificial Sequence
  Synthetic oligonucleotide; CAG chr2 60453561 60453580 60453564 -
cctggacgcagcatgcccct

SEQ ID NO: 185118 - DNA, 20 bp, Artificial Sequence
  Synthetic oligonucleotide; CAG chr2 60453556 60453575 60453559 -
acgcagcatgcccctcagcc

SEQ ID NO: 185119 - DNA, 20 bp, Artificial Sequence
  Synthetic oligonucleotide; AGG chr2 60453555 60453574 60453558 -
cgcagcatgcccctcagccc

SEQ ID NO: 185120 - DNA, 20 bp, Artificial Sequence
  Synthetic oligonucleotide; CAG chr2 60453536 60453555 60453539 -
caggtctccgctgctctgct

SEQ ID NO: 185121 - DNA, 20 bp, Artificial Sequence
  Synthetic oligonucleotide; AGG chr2 60453535 60453554 60453538 -
aggtctccgctgctctgctc

SEQ ID NO: 185122 - DNA, 20 bp, Artificial Sequence
  Synthetic oligonucleotide; GGG chr2 60453534 60453553 60453537 -
ggtctccgctgctctgctca

SEQ ID NO: 185123 - DNA, 20 bp, Artificial Sequence
  Synthetic oligonucleotide; GGG chr2 60453533 60453552 60453536 -
gtctccgctgctctgctcag

SEQ ID NO: 185124 - DNA, 20 bp, Artificial Sequence
  Synthetic oligonucleotide; TGG chr2 60453530 60453549 60453533 -
tccgctgctctgctcagggg

SEQ ID NO: 185125 - DNA, 20 bp, Artificial Sequence
  Synthetic oligonucleotide; GGG chr2 60453529 60453548 60453532 -
ccgctgctctgctcaggggt

SEQ ID NO: 185126 - DNA, 20 bp, Artificial Sequence
  Synthetic oligonucleotide; GAG chr2 60453520 60453539 60453523 -
tgctcaggggtgggatgcgt

SEQ ID NO: 185127 - DNA, 20 bp, Artificial Sequence
  Synthetic oligonucleotide; GAG chr2 60453518 60453537 60453521 -
ctcaggggtgggatgcgtga

SEQ ID NO: 185128 - DNA, 20 bp, Artificial Sequence
  Synthetic oligonucleotide; CAG chr2 60453515 60453534 60453518 -
aggggtgggatgcgtgagag

SEQ ID NO: 185129 - DNA, 20 bp, Artificial Sequence
  Synthetic oligonucleotide; GAG chr2 60453510 60453529 60453513 -
tgggatgcgtgagagcagct

SEQ ID NO: 185130 - DNA, 20 bp, Artificial Sequence
  Synthetic oligonucleotide; CAG chr2 60453504 60453523 60453507 -
gcgtgagagcagctgagatc

SEQ ID NO: 185131 - DNA, 20 bp, Artificial Sequence
  Synthetic oligonucleotide; CGG chr2 60453497 60453516 60453500 -
agcagctgagatccagaccc

SEQ ID NO: 185132 - DNA, 20 bp, Artificial Sequence
  Synthetic oligonucleotide; GGG chr2 60453496 60453515 60453499 -
gcagctgagatccagacccc

SEQ ID NO: 185133 - DNA, 20 bp, Artificial Sequence
  Synthetic oligonucleotide; CGG chr2 60453486 60453505 60453489 -
tccagaccccgggcctcctg

SEQ ID NO: 185134 - DNA, 20 bp, Artificial Sequence
  Synthetic oligonucleotide; AAG chr2 60453479 60453498 60453482 -
cccgggcctcctgcggcgcc

SEQ ID NO: 185135 - DNA, 20 bp, Artificial Sequence
  Synthetic oligonucleotide; CAG chr2 60453475 60453494 60453478 -
ggcctcctgcggcgccaagt

SEQ ID NO: 185136 - DNA, 20 bp, Artificial Sequence
  Synthetic oligonucleotide; AGG chr2 60453474 60453493 60453477 -
gcctcctgcggcgccaagtc

SEQ ID NO: 185137 - DNA, 20 bp, Artificial Sequence
  Synthetic oligonucleotide; GGG chr2 60453473 60453492 60453476 -
cctcctgcggcgccaagtca

SEQ ID NO: 185138 - DNA, 20 bp, Artificial Sequence
  Synthetic oligonucleotide; GGG chr2 60453472 60453491 60453475 -
ctcctgcggcgccaagtcag

SEQ ID NO: 185139 - DNA, 20 bp, Artificial Sequence
  Synthetic oligonucleotide; GAG chr2 60453470 60453489 60453473 -
cctgcggcgccaagtcaggg

SEQ ID NO: 185140 - DNA, 20 bp, Artificial Sequence
  Synthetic oligonucleotide; GAG chr2 60453468 60453487 60453471 -
tgcggcgccaagtcagggga

SEQ ID NO: 185141 - DNA, 20 bp, Artificial Sequence
  Synthetic oligonucleotide; AGG chr2 60453467 60453486 60453470 -
gcggcgccaagtcaggggag

SEQ ID NO: 185142 - DNA, 20 bp, Artificial Sequence
  Synthetic oligonucleotide; GAG chr2 60453465 60453484 60453468 -
ggcgccaagtcaggggagag

SEQ ID NO: 185143 - DNA, 20 bp, Artificial Sequence
  Synthetic oligonucleotide; AGG chr2 60453464 60453483 60453467 -
gcgccaagtcaggggagagg

SEQ ID NO: 185144 - DNA, 20 bp, Artificial Sequence
  Synthetic oligonucleotide; CAG chr2 60453458 60453477 60453461 -
agtcaggggagaggaggccc

SEQ ID NO: 185145 - DNA, 20 bp, Artificial Sequence
  Synthetic oligonucleotide; AGG chr2 60453457 60453476 60453460 -
gtcaggggagaggaggcccc

SEQ ID NO: 185146 - DNA, 20 bp, Artificial Sequence
  Synthetic oligonucleotide; CGG chr2 60453445 60453464 60453448 -
gaggccccaggcccctgctt

SEQ ID NO: 185147 - DNA, 20 bp, Artificial Sequence
  Synthetic oligonucleotide; GGG chr2 60453444 60453463 60453447 -
aggccccaggcccctgcttc

SEQ ID NO: 185148 - DNA, 20 bp, Artificial Sequence
  Synthetic oligonucleotide; TGG chr2 60453435 60453454 60453438 -
gcccctgcttcgggtcgcca

SEQ ID NO: 185149 - DNA, 20 bp, Artificial Sequence
  Synthetic oligonucleotide; GAG chr2 60453428 60453447 60453431 -
cttcgggtcgccatggcaac

SEQ ID NO: 185150 - DNA, 20 bp, Artificial Sequence
  Synthetic oligonucleotide; AGG chr2 60453427 60453446 60453430 -
ttcgggtcgccatggcaacg

SEQ ID NO: 185151 - DNA, 20 bp, Artificial Sequence
  Synthetic oligonucleotide; TGG chr2 60453422 60453441 60453425 -
gtcgccatggcaacgaggcc

SEQ ID NO: 185152 - DNA, 20 bp, Artificial Sequence
  Synthetic oligonucleotide; CAG chr2 60453412 60453431 60453415 -
caacgaggcctggaatgcca

SEQ ID NO: 185153 - DNA, 20 bp, Artificial Sequence
  Synthetic oligonucleotide; TGG chr2 60453409 60453428 60453412 -
cgaggcctggaatgccacag

SEQ ID NO: 185154 - DNA, 20 bp, Artificial Sequence
  Synthetic oligonucleotide; TAG chr2 60453406 60453425 60453409 -
ggcctggaatgccacagtgg

SEQ ID NO: 185155 - DNA, 20 bp, Artificial Sequence
  Synthetic oligonucleotide; CGG chr2 60453393 60453412 60453396 -
acagtggtagccctcttcct

SEQ ID NO: 185156 - DNA, 20 bp, Artificial Sequence
  Synthetic oligonucleotide; CGG chr2 60453384 60453403 60453387 -
gccctcttcctcggcacatc

SEQ ID NO: 185157 - DNA, 20 bp, Artificial Sequence
  Synthetic oligonucleotide; CAG chr2 60453376 60453395 60453379 -
cctcggcacatccggactcc

SEQ ID NO: 185158 - DNA, 20 bp, Artificial Sequence
  Synthetic oligonucleotide; AAG chr2 60453361 60453380 60453364 -
actcccagttctgctgcttc

SEQ ID NO: 185159 - DNA, 20 bp, Artificial Sequence
  Synthetic oligonucleotide; CAG chr2 60453348 60453367 60453351 -
ctgcttcaagtcaatgtcca

SEQ ID NO: 185160 - DNA, 20 bp, Artificial Sequence
  Synthetic oligonucleotide; AAG chr2 60453344 60453363 60453347 -
ttcaagtcaatgtccacagc

SEQ ID NO: 185161 - DNA, 20 bp, Artificial Sequence
  Synthetic oligonucleotide; AGG chr2 60453343 60453362 60453346 -
tcaagtcaatgtccacagca

SEQ ID NO: 185162 - DNA, 20 bp, Artificial Sequence
  Synthetic oligonucleotide; GGG chr2 60453342 60453361 60453345 -
caagtcaatgtccacagcaa

SEQ ID NO: 185163 - DNA, 20 bp, Artificial Sequence
  Synthetic oligonucleotide; GAG chr2 60453340 60453359 60453343 -
agtcaatgtccacagcaagg

SEQ ID NO: 185164 - DNA, 20 bp, Artificial Sequence
  Synthetic oligonucleotide; AGG chr2 60453339 60453358 60453342 -
gtcaatgtccacagcaaggg

SEQ ID NO: 185165 - DNA, 20 bp, Artificial Sequence
  Synthetic oligonucleotide; CGG chr2 60453331 60453350 60453334 -
ccacagcaagggaggaaccc

SEQ ID NO: 185166 - DNA, 20 bp, Artificial Sequence
  Synthetic oligonucleotide; GAG chr2 60453329 60453348 60453332 -
acagcaagggaggaaccccg

SEQ ID NO: 185167 - DNA, 20 bp, Artificial Sequence
  Synthetic oligonucleotide; AGG chr2 60453328 60453347 60453331 -
cagcaagggaggaaccccgg

SEQ ID NO: 185168 - DNA, 20 bp, Artificial Sequence
  Synthetic oligonucleotide; AAG chr2 60453275 60453294 60453278 -
ttgccttcccccttccaaaa

SEQ ID NO: 185169 - DNA, 20 bp, Artificial Sequence
  Synthetic oligonucleotide; AAG chr2 60453270 60453289 60453273 -
ttcccccttccaaaaaagaa

SEQ ID NO: 185170 - DNA, 20 bp, Artificial Sequence
  Synthetic oligonucleotide; AAG chr2 60453251 60453270 60453254 -
aaagaaaactgcatgtttga

SEQ ID NO: 185171 - DNA, 20 bp, Artificial Sequence
  Synthetic oligonucleotide; CAG chr2 60453242 60453261 60453245 -
tgcatgtttgaaagaaacta

SEQ ID NO: 185172 - DNA, 20 bp, Artificial Sequence
  Synthetic oligonucleotide; AGG chr2 60453241 60453260 60453244 -
gcatgtttgaaagaaactac

SEQ ID NO: 185173 - DNA, 20 bp, Artificial Sequence
  Synthetic oligonucleotide; CAG chr2 60453238 60453257 60453241 -
tgtttgaaagaaactacagg

SEQ ID NO: 185174 - DNA, 20 bp, Artificial Sequence
  Synthetic oligonucleotide; TGG chr2 60453231 60453250 60453234 -
aagaaactacaggcagtttt

SEQ ID NO: 185175 - DNA, 20 bp, Artificial Sequence
  Synthetic oligonucleotide; GAG chr2 60453220 60453239 60453223 -
ggcagtttttggtgcaattt

SEQ ID NO: 185176 - DNA, 20 bp, Artificial Sequence
  Synthetic oligonucleotide; GAG chr2 60453218 60453237 60453221 -
cagtttttggtgcaatttga

SEQ ID NO: 185177 - DNA, 20 bp, Artificial Sequence
  Synthetic oligonucleotide; TGG chr2 60453206 60453225 60453209 -
caatttgagagcaactcttt

SEQ ID NO: 185178 - DNA, 20 bp, Artificial Sequence
  Synthetic oligonucleotide; GGG chr2 60453205 60453224 60453208 -
aatttgagagcaactctttt

SEQ ID NO: 185179 - DNA, 20 bp, Artificial Sequence
  Synthetic oligonucleotide; TGG chr2 60453199 60453218 60453202 -
agagcaactcttttgggttc

SEQ ID NO: 185180 - DNA, 20 bp, Artificial Sequence
  Synthetic oligonucleotide; CAG chr2 60453187 60453206 60453190 -
ttgggttctggttttctctt

SEQ ID NO: 185181 - DNA, 20 bp, Artificial Sequence
  Synthetic oligonucleotide; GAG chr2 60453185 60453204 60453188 -
gggttctggttttctcttca

SEQ ID NO: 185182 - DNA, 20 bp, Artificial Sequence
  Synthetic oligonucleotide; TGG chr2 60453158 60453177 60453161 -
gttcgcctcttgtaaatcat

SEQ ID NO: 185183 - DNA, 20 bp, Artificial Sequence
  Synthetic oligonucleotide; CAG chr2 60453099 60453118 60453102 -
tcgttgtgctgcttttacat

SEQ ID NO: 185184 - DNA, 20 bp, Artificial Sequence
  Synthetic oligonucleotide; GAG chr2 60453057 60453076 60453060 -
tataattttattattatttt

SEQ ID NO: 185185 - DNA, 20 bp, Artificial Sequence
  Synthetic oligonucleotide; AAG chr2 60453054 60453073 60453057 -
aattttattattattttgag

SEQ ID NO: 185186 - DNA, 20 bp, Artificial Sequence
  Synthetic oligonucleotide; AGG chr2 60453053 60453072 60453056 -
attttattattattttgaga

SEQ ID NO: 185187 - DNA, 20 bp, Artificial Sequence
  Synthetic oligonucleotide; AAG chr2 60453010 60453029 60453013 -
tctcccgctctcctcaacca

SEQ ID NO: 185188 - DNA, 20 bp, Artificial Sequence
  Synthetic oligonucleotide; AGG chr2 60453009 60453028 60453012 -
ctcccgctctcctcaaccaa

SEQ ID NO: 185189 - DNA, 20 bp, Artificial Sequence
  Synthetic oligonucleotide; AAG chr2 60452993 60453012 60452996 -
ccaaaggactgtttcttact

SEQ ID NO: 185190 - DNA, 20 bp, Artificial Sequence
  Synthetic oligonucleotide; CAG chr2 60452984 60453003 60452987 -
tgtttcttactaagttttct

SEQ ID NO: 185191 - DNA, 20 bp, Artificial Sequence
  Synthetic oligonucleotide; AAG chr2 60452977 60452996 60452980 -
tactaagttttctcagtcat

SEQ ID NO: 185192 - DNA, 20 bp, Artificial Sequence
  Synthetic oligonucleotide; AGG chr2 60452976 60452995 60452979 -
actaagttttctcagtcata

SEQ ID NO: 185193 - DNA, 20 bp, Artificial Sequence
  Synthetic oligonucleotide; GGG chr2 60452975 60452994 60452978 -
ctaagttttctcagtcataa

SEQ ID NO: 185194 - DNA, 20 bp, Artificial Sequence
  Synthetic oligonucleotide; AAG chr2 60452971 60452990 60452974 -
gttttctcagtcataagggc

SEQ ID NO: 185195 - DNA, 20 bp, Artificial Sequence
  Synthetic oligonucleotide; CAG chr2 60452958 60452977 60452961 -
taagggcaagtgtttccttc

SEQ ID NO: 185196 - DNA, 20 bp, Artificial Sequence
  Synthetic oligonucleotide; AGG chr2 60452957 60452976 60452960 -
aagggcaagtgtttccttcc

SEQ ID NO: 185197 - DNA, 20 bp, Artificial Sequence
  Synthetic oligonucleotide; GAG chr2 60452946 60452965 60452949 -
tttccttccaggtgtgtccc

SEQ ID NO: 185198 - DNA, 20 bp, Artificial Sequence
  Synthetic oligonucleotide; TAG chr2 60452938 60452957 60452941 -
caggtgtgtcccgagtttat

SEQ ID NO: 185199 - DNA, 20 bp, Artificial Sequence
  Synthetic oligonucleotide; AGG chr2 60452937 60452956 60452940 -
aggtgtgtcccgagtttatt

SEQ ID NO: 185200 - DNA, 20 bp, Artificial Sequence
  Synthetic oligonucleotide; TGG chr2 60452921 60452940 60452924 -
tattaggactatcatacaat

SEQ ID NO: 185201 - DNA, 20 bp, Artificial Sequence
  Synthetic oligonucleotide; GGG chr2 60452920 60452939 60452923 -
attaggactatcatacaatt

SEQ ID NO: 185202 - DNA, 20 bp, Artificial Sequence
  Synthetic oligonucleotide; CAG chr2 60452917 60452936 60452920 -
aggactatcatacaattggg

SEQ ID NO: 185203 - DNA, 20 bp, Artificial Sequence
  Synthetic oligonucleotide; AGG chr2 60452916 60452935 60452919 -
ggactatcatacaattgggc

SEQ ID NO: 185204 - DNA, 20 bp, Artificial Sequence
  Synthetic oligonucleotide; GGG chr2 60452915 60452934 60452918 -
gactatcatacaattgggca

SEQ ID NO: 185205 - DNA, 20 bp, Artificial Sequence
  Synthetic oligonucleotide; GGG chr2 60452914 60452933 60452917 -
actatcatacaattgggcag

SEQ ID NO: 185206 - DNA, 20 bp, Artificial Sequence
  Synthetic oligonucleotide; TGG chr2 60452911 60452930 60452914 -
atcatacaattgggcagggg

SEQ ID NO: 185207 - DNA, 20 bp, Artificial Sequence
  Synthetic oligonucleotide; GGG chr2 60452910 60452929 60452913 -
tcatacaattgggcaggggt

SEQ ID NO: 185208 - DNA, 20 bp, Artificial Sequence
  Synthetic oligonucleotide; GGG chr2 60452909 60452928 60452912 -
catacaattgggcaggggtg

SEQ ID NO: 185209 - DNA, 20 bp, Artificial Sequence
  Synthetic oligonucleotide; GGG chr2 60452908 60452927 60452911 -
atacaattgggcaggggtgg

SEQ ID NO: 185210 - DNA, 20 bp, Artificial Sequence
  Synthetic oligonucleotide; GGG chr2 60452907 60452926 60452910 -
tacaattgggcaggggtggg

SEQ ID NO: 185211 - DNA, 20 bp, Artificial Sequence
  Synthetic oligonucleotide; TGG chr2 60452901 60452920 60452904 -
tgggcaggggtggggggacc

SEQ ID NO: 185212 - DNA, 20 bp, Artificial Sequence
  Synthetic oligonucleotide; GGG chr2 60452900 60452919 60452903 -
gggcaggggtggggggacct

SEQ ID NO: 185213 - DNA, 20 bp, Artificial Sequence
  Synthetic oligonucleotide; TGG chr2 60452890 60452909 60452893 -
ggggggacctgggtcctcct

SEQ ID NO: 185214 - DNA, 20 bp, Artificial Sequence
  Synthetic oligonucleotide; GGG chr2 60452889 60452908 60452892 -
gggggacctgggtcctcctt

SEQ ID NO: 185215 - DNA, 20 bp, Artificial Sequence
  Synthetic oligonucleotide; GGG chr2 60452888 60452907 60452891 -
ggggacctgggtcctccttg

SEQ ID NO: 185216 - DNA, 20 bp, Artificial Sequence
  Synthetic oligonucleotide; GGG chr2 60452887 60452906 60452890 -
gggacctgggtcctccttgg

SEQ ID NO: 185217 - DNA, 20 bp, Artificial Sequence
  Synthetic oligonucleotide; GGG chr2 60452886 60452905 60452889 -
ggacctgggtcctccttggg

SEQ ID NO: 185218 - DNA, 20 bp, Artificial Sequence
  Synthetic oligonucleotide; CGG chr2 60452882 60452901 60452885 -
ctgggtcctccttgggggga

SEQ ID NO: 185219 - DNA, 20 bp, Artificial Sequence
  Synthetic oligonucleotide; AAG chr2 60452879 60452898 60452882 -
ggtcctccttggggggacgg

SEQ ID NO: 185220 - DNA, 20 bp, Artificial Sequence
  Synthetic oligonucleotide; AGG chr2 60452878 60452897 60452881 -
gtcctccttggggggacgga

SEQ ID NO: 185221 - DNA, 20 bp, Artificial Sequence
  Synthetic oligonucleotide; GGG chr2 60452877 60452896 60452880 -
tcctccttggggggacggaa

SEQ ID NO: 185222 - DNA, 20 bp, Artificial Sequence
  Synthetic oligonucleotide; GAG chr2 60452875 60452894 60452878 -
ctccttggggggacggaagg

SEQ ID NO: 185223 - DNA, 20 bp, Artificial Sequence
  Synthetic oligonucleotide; AGG chr2 60452874 60452893 60452877 -
tccttggggggacggaaggg

SEQ ID NO: 185224 - DNA, 20 bp, Artificial Sequence
  Synthetic oligonucleotide; GGG chr2 60452873 60452892 60452876 -
ccttggggggacggaaggga

SEQ ID NO: 185225 - DNA, 20 bp, Artificial Sequence
  Synthetic oligonucleotide; GAG chr2 60452871 60452890 60452874 -
ttggggggacggaagggagg

SEQ ID NO: 185226 - DNA, 20 bp, Artificial Sequence
  Synthetic oligonucleotide; AGG chr2 60452870 60452889 60452873 -
tggggggacggaagggaggg

SEQ ID NO: 185227 - DNA, 20 bp, Artificial Sequence
  Synthetic oligonucleotide; TGG chr2 60452865 60452884 60452868 -
ggacggaagggagggaggca

SEQ ID NO: 185228 - DNA, 20 bp, Artificial Sequence
  Synthetic oligonucleotide; GGG chr2 60452864 60452883 60452867 -
gacggaagggagggaggcat

SEQ ID NO: 185229 - DNA, 20 bp, Artificial Sequence
  Synthetic oligonucleotide; AAG chr2 60452861 60452880 60452864 -
ggaagggagggaggcatggg

SEQ ID NO: 185230 - DNA, 20 bp, Artificial Sequence
  Synthetic oligonucleotide; CAG chr2 60452852 60452871 60452855 -
ggaggcatgggaagacgact

SEQ ID NO: 185231 - DNA, 20 bp, Artificial Sequence
  Synthetic oligonucleotide; GAG chr2 60452850 60452869 60452853 -
aggcatgggaagacgactca

SEQ ID NO: 185232 - DNA, 20 bp, Artificial Sequence
  Synthetic oligonucleotide; AGG chr2 60452849 60452868 60452852 -
ggcatgggaagacgactcag

SEQ ID NO: 185233 - DNA, 20 bp, Artificial Sequence
  Synthetic oligonucleotide; CAG chr2 60452845 60452864 60452848 -
tgggaagacgactcagaggt

SEQ ID NO: 185234 - DNA, 20 bp, Artificial Sequence
  Synthetic oligonucleotide; GAG chr2 60452843 60452862 60452846 -
ggaagacgactcagaggtca

SEQ ID NO: 185235 - DNA, 20 bp, Artificial Sequence
  Synthetic oligonucleotide; TGG chr2 60452835 60452854 60452838 -
actcagaggtcagagatact

SEQ ID NO: 185236 - DNA, 20 bp, Artificial Sequence
  Synthetic oligonucleotide; GGG chr2 60452834 60452853 60452837 -
ctcagaggtcagagatactt

SEQ ID NO: 185237 - DNA, 20 bp, Artificial Sequence
  Synthetic oligonucleotide; GGG chr2 60452833 60452852 60452836 -
tcagaggtcagagatacttg

SEQ ID NO: 185238 - DNA, 20 bp, Artificial Sequence
  Synthetic oligonucleotide; GAG chr2 60452831 60452850 60452834 -
agaggtcagagatacttggg

SEQ ID NO: 185239 - DNA, 20 bp, Artificial Sequence
  Synthetic oligonucleotide; AGG chr2 60452830 60452849 60452833 -
gaggtcagagatacttgggg

SEQ ID NO: 185240 - DNA, 20 bp, Artificial Sequence
  Synthetic oligonucleotide; GGG chr2 60452829 60452848 60452832 -
aggtcagagatacttgggga

SEQ ID NO: 185241 - DNA, 20 bp, Artificial Sequence
  Synthetic oligonucleotide; GGG chr2 60452828 60452847 60452831 -
ggtcagagatacttggggag

SEQ ID NO: 185242 - DNA, 20 bp, Artificial Sequence
  Synthetic oligonucleotide; GAG chr2 60452826 60452845 60452829 -
tcagagatacttggggaggg

SEQ ID NO: 185243 - DNA, 20 bp, Artificial Sequence
  Synthetic oligonucleotide; AGG chr2 60452825 60452844 60452828 -
cagagatacttggggagggg

SEQ ID NO: 185244 - DNA, 20 bp, Artificial Sequence
  Synthetic oligonucleotide; GAG chr2 60452820 60452839 60452823 -
atacttggggaggggaggct

SEQ ID NO: 185245 - DNA, 20 bp, Artificial Sequence
  Synthetic oligonucleotide; AAG chr2 60452802 60452821 60452805 -
ctgagtttgaaatcatgctt

SEQ ID NO: 185246 - DNA, 20 bp, Artificial Sequence
  Synthetic oligonucleotide; CAG chr2 60452795 60452814 60452798 -
tgaaatcatgcttaagatgc

SEQ ID NO: 185247 - DNA, 20 bp, Artificial Sequence
  Synthetic oligonucleotide; TGG chr2 60452792 60452811 60452795 -
aatcatgcttaagatgccag

SEQ ID NO: 185248 - DNA, 20 bp, Artificial Sequence
  Synthetic oligonucleotide; TGG chr2 60452780 60452799 60452783 -
gatgccagtggctcgacctg

SEQ ID NO: 185249 - DNA, 20 bp, Artificial Sequence
  Synthetic oligonucleotide; TGG chr2 60452776 60452795 60452779 -
ccagtggctcgacctgtggt

SEQ ID NO: 185250 - DNA, 20 bp, Artificial Sequence
  Synthetic oligonucleotide; AAG chr2 60452770 60452789 60452773 -
gctcgacctgtggttggttt

SEQ ID NO: 185251 - DNA, 20 bp, Artificial Sequence
  Synthetic oligonucleotide; AAG chr2 60452753 60452772 60452756 -
tttaagttctaatttttaaa

SEQ ID NO: 185252 - DNA, 20 bp, Artificial Sequence
  Synthetic oligonucleotide; TAG chr2 60452749 60452768 60452752 -
agttctaatttttaaaaagc

SEQ ID NO: 185253 - DNA, 20 bp, Artificial Sequence
  Synthetic oligonucleotide; TAG chr2 60452745 60452764 60452748 -
ctaatttttaaaaagctagt

SEQ ID NO: 185254 - DNA, 20 bp, Artificial Sequence
  Synthetic oligonucleotide; GAG chr2 60452743 60452762 60452746 -
aatttttaaaaagctagtta

SEQ ID NO: 185255 - DNA, 20 bp, Artificial Sequence
  Synthetic oligonucleotide; CAG chr2 60452738 60452757 60452741 -
ttaaaaagctagttagagaa

SEQ ID NO: 185256 - DNA, 20 bp, Artificial Sequence
  Synthetic oligonucleotide; TGG chr2 60452727 60452746 60452730 -
gttagagaacagaaaatcat

SEQ ID NO: 185257 - DNA, 20 bp, Artificial Sequence
  Synthetic oligonucleotide; GGG chr2 60452726 60452745 60452729 -
ttagagaacagaaaatcatt

SEQ ID NO: 185258 - DNA, 20 bp, Artificial Sequence
  Synthetic oligonucleotide; AAG chr2 60452721 60452740 60452724 -
gaacagaaaatcattgggcc

SEQ ID NO: 185259 - DNA, 20 bp, Artificial Sequence
  Synthetic oligonucleotide; TAG chr2 60452670 60452689 60452673 -
ctctgtctccaacctctttc

SEQ ID NO: 185260 - DNA, 20 bp, Artificial Sequence
  Synthetic oligonucleotide; AGG chr2 60452669 60452688 60452672 -
tctgtctccaacctctttct

SEQ ID NO: 185261 - DNA, 20 bp, Artificial Sequence
  Synthetic oligonucleotide; CGG chr2 60452647 60452666 60452650 -
gttcttcacacacccccatt

SEQ ID NO: 185262 - DNA, 20 bp, Artificial Sequence
  Synthetic oligonucleotide; TAG chr2 60452642 60452661 60452645 -
tcacacacccccattcggcg

SEQ ID NO: 185263 - DNA, 20 bp, Artificial Sequence
  Synthetic oligonucleotide; CAG chr2 60452635 60452654 60452638 -
cccccattcggcgtagtacc

SEQ ID NO: 185264 - DNA, 20 bp, Artificial Sequence
  Synthetic oligonucleotide; GAG chr2 60452633 60452652 60452636 -
cccattcggcgtagtaccca

SEQ ID NO: 185265 - DNA, 20 bp, Artificial Sequence
  Synthetic oligonucleotide; GAG chr2 60452631 60452650 60452634 -
cattcggcgtagtacccaga

SEQ ID NO: 185266 - DNA, 20 bp, Artificial Sequence
  Synthetic oligonucleotide; AAG chr2 60452625 60452644 60452628 -
gcgtagtacccagagagctc

SEQ ID NO: 185267 - DNA, 20 bp, Artificial Sequence
  Synthetic oligonucleotide; TGG chr2 60452617 60452636 60452620 -
cccagagagctcaagatgtg

SEQ ID NO: 185268 - DNA, 20 bp, Artificial Sequence
  Synthetic oligonucleotide; CAG chr2 60452614 60452633 60452617 -
agagagctcaagatgtgtgg

SEQ ID NO: 185269 - DNA, 20 bp, Artificial Sequence
  Synthetic oligonucleotide; CGG chr2 60452607 60452626 60452610 -
tcaagatgtgtggcagtttt

SEQ ID NO: 185270 - DNA, 20 bp, Artificial Sequence
  Synthetic oligonucleotide; TGG chr2 60452603 60452622 60452606 -
gatgtgtggcagttttcgga

SEQ ID NO: 185271 - DNA, 20 bp, Artificial Sequence
  Synthetic oligonucleotide; AAG chr2 60452600 60452619 60452603 -
gtgtggcagttttcggatgg

SEQ ID NO: 185272 - DNA, 20 bp, Artificial Sequence
  Synthetic oligonucleotide; GAG chr2 60452594 60452613 60452597 -
cagttttcggatggaagctc

SEQ ID NO: 185273 - DNA, 20 bp, Artificial Sequence
  Synthetic oligonucleotide; GAG chr2 60452592 60452611 60452595 -
gttttcggatggaagctcga

SEQ ID NO: 185274 - DNA, 20 bp, Artificial Sequence
  Synthetic oligonucleotide; AAG chr2 60452584 60452603 60452587 -
atggaagctcgagagccctt

SEQ ID NO: 185275 - DNA, 20 bp, Artificial Sequence
  Synthetic oligonucleotide; GAG chr2 60452577 60452596 60452580 -
ctcgagagcccttaagttct

SEQ ID NO: 185276 - DNA, 20 bp, Artificial Sequence
  Synthetic oligonucleotide; AAG chr2 60452566 60452585 60452569 -
ttaagttctgagaaaatttg

SEQ ID NO: 185277 - DNA, 20 bp, Artificial Sequence
  Synthetic oligonucleotide; CAG chr2 60452559 60452578 60452562 -
ctgagaaaatttgaagcccc

SEQ ID NO: 185278 - DNA, 20 bp, Artificial Sequence
  Synthetic oligonucleotide; AGG chr2 60452558 60452577 60452561 -
tgagaaaatttgaagccccc

SEQ ID NO: 185279 - DNA, 20 bp, Artificial Sequence
  Synthetic oligonucleotide; GGG chr2 60452557 60452576 60452560 -
gagaaaatttgaagccccca

SEQ ID NO: 185280 - DNA, 20 bp, Artificial Sequence
  Synthetic oligonucleotide; GGG chr2 60452556 60452575 60452559 -
agaaaatttgaagcccccag

SEQ ID NO: 185281 - DNA, 20 bp, Artificial Sequence
  Synthetic oligonucleotide; TGG chr2 60452553 60452572 60452556 -
aaatttgaagcccccagggg

SEQ ID NO: 185282 - DNA, 20 bp, Artificial Sequence
  Synthetic oligonucleotide; GGG chr2 60452552 60452571 60452555 -
aatttgaagcccccaggggt

SEQ ID NO: 185283 - DNA, 20 bp, Artificial Sequence
  Synthetic oligonucleotide; GGG chr2 60452551 60452570 60452554 -
atttgaagcccccaggggtg

SEQ ID NO: 185284 - DNA, 20 bp, Artificial Sequence
  Synthetic oligonucleotide; TGG chr2 60452548 60452567 60452551 -
tgaagcccccaggggtgggg

SEQ ID NO: 185285 - DNA, 20 bp, Artificial Sequence
  Synthetic oligonucleotide; CAG chr2 60452533 60452552 60452536 -
tggggtggacgcgtgccgcc

SEQ ID NO: 185286 - DNA, 20 bp, Artificial Sequence
  Synthetic oligonucleotide; CAG chr2 60452523 60452542 60452526 -
gcgtgccgcccagtcgacgt

SEQ ID NO: 185287 - DNA, 20 bp, Artificial Sequence
  Synthetic oligonucleotide; TGG chr2 60452518 60452537 60452521 -
ccgcccagtcgacgtcagcg

SEQ ID NO: 185288 - DNA, 20 bp, Artificial Sequence
  Synthetic oligonucleotide; TAG chr2 60452502 60452521 60452505 -
agcgtggtctgtcatcctgc

SEQ ID NO: 185289 - DNA, 20 bp, Artificial Sequence
  Synthetic oligonucleotide; CAG chr2 60452482 60452501 60452485 -
tagtttgtgatgttttctga

SEQ ID NO: 185290 - DNA, 20 bp, Artificial Sequence
  Synthetic oligonucleotide; TAG chr2 60452479 60452498 60452482 -
tttgtgatgttttctgacag

SEQ ID NO: 185291 - DNA, 20 bp, Artificial Sequence
  Synthetic oligonucleotide; AAG chr2 60452471 60452490 60452474 -
gttttctgacagtagcctcc

SEQ ID NO: 185292 - DNA, 20 bp, Artificial Sequence
  Synthetic oligonucleotide; AAG chr2 60452468 60452487 60452471 -
ttctgacagtagcctccaag

SEQ ID NO: 185293 - DNA, 20 bp, Artificial Sequence
  Synthetic oligonucleotide; AAG chr2 60452455 60452474 60452458 -
ctccaagaagccgttgtgcg

SEQ ID NO: 185294 - DNA, 20 bp, Artificial Sequence
  Synthetic oligonucleotide; CAG chr2 60452451 60452470 60452454 -
aagaagccgttgtgcgaaga

SEQ ID NO: 185295 - DNA, 20 bp, Artificial Sequence
  Synthetic oligonucleotide; GAG chr2 60452449 60452468 60452452 -
gaagccgttgtgcgaagaca

SEQ ID NO: 185296 - DNA, 20 bp, Artificial Sequence
  Synthetic oligonucleotide; CAG chr2 60452441 60452460 60452444 -
tgtgcgaagacagagtcctg

SEQ ID NO: 185297 - DNA, 20 bp, Artificial Sequence
  Synthetic oligonucleotide; GAG chr2 60452439 60452458 60452442 -
tgcgaagacagagtcctgca

SEQ ID NO: 185298 - DNA, 20 bp, Artificial Sequence
  Synthetic oligonucleotide; CAG chr2 60452430 60452449 60452433 -
agagtcctgcagagtccttc

SEQ ID NO: 185299 - DNA, 20 bp, Artificial Sequence
  Synthetic oligonucleotide; TAG chr2 60452425 60452444 60452428 -
cctgcagagtccttccagcc

SEQ ID NO: 185300 - DNA, 20 bp, Artificial Sequence
  Synthetic oligonucleotide; AGG chr2 60452424 60452443 60452427 -
ctgcagagtccttccagcct

SEQ ID NO: 185301 - DNA, 20 bp, Artificial Sequence
  Synthetic oligonucleotide; CAG chr2 60452417 60452436 60452420 -
gtccttccagcctaggcctg

SEQ ID NO: 185302 - DNA, 20 bp, Artificial Sequence
  Synthetic oligonucleotide; AAG chr2 60452386 60452405 60452389 -
tatttatattttttaataaa

SEQ ID NO: 185303 - DNA, 20 bp, Artificial Sequence
  Synthetic oligonucleotide; CAG chr2 60452369 60452388 60452372 -
aaaaagtaaaaacaaaaaaa

SEQ ID NO: 185304 - DNA, 20 bp, Artificial Sequence
  Synthetic oligonucleotide; TGG chr2 60452358 60452377 60452361 -
acaaaaaaacagacccacat

SEQ ID NO: 185305 - DNA, 20 bp, Artificial Sequence
  Synthetic oligonucleotide; CAG chr2 60452353 60452372 60452356 -
aaaacagacccacattggaa

SEQ ID NO: 185306 - DNA, 20 bp, Artificial Sequence
  Synthetic oligonucleotide; CAG chr2 60452345 60452364 60452348 -
cccacattggaacagtgaat

SEQ ID NO: 185307 - DNA, 20 bp, Artificial Sequence
  Synthetic oligonucleotide; TAG chr2 60452337 60452356 60452340 -
ggaacagtgaatcagtccca

SEQ ID NO: 185308 - DNA, 20 bp, Artificial Sequence
  Synthetic oligonucleotide; GAG chr2 60452335 60452354 60452338 -
aacagtgaatcagtcccata

SEQ ID NO: 185309 - DNA, 20 bp, Artificial Sequence
  Synthetic oligonucleotide; GAG chr2 60452333 60452352 60452336 -
cagtgaatcagtcccataga

SEQ ID NO: 185310 - DNA, 20 bp, Artificial Sequence
  Synthetic oligonucleotide; AGG chr2 60452332 60452351 60452335 -
agtgaatcagtcccatagag

SEQ ID NO: 185311 - DNA, 20 bp, Artificial Sequence
  Synthetic oligonucleotide; GGG chr2 60452331 60452350 60452334 -
gtgaatcagtcccatagaga

SEQ ID NO: 185312 - DNA, 20 bp, Artificial Sequence
  Synthetic oligonucleotide; TGG chr2 60452324 60452343 60452327 -
agtcccatagagagggcccg

SEQ ID NO: 185313 - DNA, 20 bp, Artificial Sequence
  Synthetic oligonucleotide; GAG chr2 60452307 60452326 60452310 -
ccgtggaccatcgctgtcat

SEQ ID NO: 185314 - DNA, 20 bp, Artificial Sequence
  Synthetic oligonucleotide; TGG chr2 60452296 60452315 60452299 -
cgctgtcatgagtgatgccc

SEQ ID NO: 185315 - DNA, 20 bp, Artificial Sequence
  Synthetic oligonucleotide; CAG chr2 60452281 60452300 60452284 -
tgccctggcccttctgaaac

SEQ ID NO: 185316 - DNA, 20 bp, Artificial Sequence
  Synthetic oligonucleotide; TGG chr2 60452257 60452276 60452260 -
caacctaattacctgtattg

SEQ ID NO: 185317 - DNA, 20 bp, Artificial Sequence
  Synthetic oligonucleotide; GAG chr2 60452244 60452263 60452247 -
tgtattgtggaaatgcgcat

SEQ ID NO: 185318 - DNA, 20 bp, Artificial Sequence
  Synthetic oligonucleotide; AAG chr2 60452198 60452217 60452201 -
attctatgttgtcttttaaa

SEQ ID NO: 185319 - DNA, 20 bp, Artificial Sequence
  Synthetic oligonucleotide; TGG chr2 60452168 60452187 60452171 -
aacattgacacaataaatgt

SEQ ID NO: 185320 - DNA, 20 bp, Artificial Sequence
  Synthetic oligonucleotide; GAG chr2 60452166 60452185 60452169 -
cattgacacaataaatgttg

SEQ ID NO: 185321 - DNA, 20 bp, Artificial Sequence
  Synthetic oligonucleotide; TAG chr2 60452160 60452179 60452163 -
cacaataaatgttggagctt

SEQ ID NO: 185322 - DNA, 20 bp, Artificial Sequence
  Synthetic oligonucleotide; AGG chr2 60452159 60452178 60452162 -
acaataaatgttggagcttt

SEQ ID NO: 185323 - DNA, 20 bp, Artificial Sequence
  Synthetic oligonucleotide; TGG chr2 60452156 60452175 60452159 -
ataaatgttggagctttagg

SEQ ID NO: 185324 - DNA, 20 bp, Artificial Sequence
  Synthetic oligonucleotide; AAG chr2 60452121 60452140 60452124 -
ctttaatttttaatgcttat

SEQ ID NO: 185325 - DNA, 20 bp, Artificial Sequence
  Synthetic oligonucleotide; GAG chr2 60452113 60452132 60452116 -
tttaatgcttataagacaat

SEQ ID NO: 185326 - DNA, 20 bp, Artificial Sequence
  Synthetic oligonucleotide; AGG chr2 60452112 60452131 60452115 -
ttaatgcttataagacaatg

SEQ ID NO: 185327 - DNA, 20 bp, Artificial Sequence
  Synthetic oligonucleotide; CAG chr2 60452073 60452092 60452076 -
acttctgtacctgtttccta

SEQ ID NO: 185328 - DNA, 20 bp, Artificial Sequence
  Synthetic oligonucleotide; CGG chr2 60452062 60452081 60452065 -
tgtttcctacagacacccat

SEQ ID NO: 185329 - DNA, 20 bp, Artificial Sequence
  Synthetic oligonucleotide; GGG chr2 60452061 60452080 60452064 -
gtttcctacagacacccatc

SEQ ID NO: 185330 - DNA, 20 bp, Artificial Sequence
  Synthetic oligonucleotide; TGG chr2 60452058 60452077 60452061 -
tcctacagacacccatcggg

SEQ ID NO: 185331 - DNA, 20 bp, Artificial Sequence
  Synthetic oligonucleotide; GGG chr2 60452057 60452076 60452060 -
cctacagacacccatcgggt

SEQ ID NO: 185332 - DNA, 20 bp, Artificial Sequence
  Synthetic oligonucleotide; TAG chr2 60452054 60452073 60452057 -
acagacacccatcgggtggg

SEQ ID NO: 185333 - DNA, 20 bp, Artificial Sequence
  Synthetic oligonucleotide; AGG chr2 60452053 60452072 60452056 -
cagacacccatcgggtgggt

SEQ ID NO: 185334 - DNA, 20 bp, Artificial Sequence
  Synthetic oligonucleotide; GAG chr2 60452051 60452070 60452054 -
gacacccatcgggtgggtag

SEQ ID NO: 185335 - DNA, 20 bp, Artificial Sequence
  Synthetic oligonucleotide; AGG chr2 60452050 60452069 60452053 -
acacccatcgggtgggtagg

SEQ ID NO: 185336 - DNA, 20 bp, Artificial Sequence
  Synthetic oligonucleotide; CAG chr2 60452045 60452064 60452048 -
catcgggtgggtaggaggaa

SEQ ID NO: 185337 - DNA, 20 bp, Artificial Sequence
  Synthetic oligonucleotide; GAG chr2 60452038 60452057 60452041 -
tgggtaggaggaacagattt

SEQ ID NO: 185338 - DNA, 20 bp, Artificial Sequence
  Synthetic oligonucleotide; TGG chr2 60452032 60452051 60452035 -
ggaggaacagatttgagaaa

SEQ ID NO: 185339 - DNA, 20 bp, Artificial Sequence
  Synthetic oligonucleotide; GGG chr2 60452031 60452050 60452034 -
gaggaacagatttgagaaat

SEQ ID NO: 185340 - DNA, 20 bp, Artificial Sequence
  Synthetic oligonucleotide; CAG chr2 60452028 60452047 60452031 -
gaacagatttgagaaatggg

SEQ ID NO: 185341 - DNA, 20 bp, Artificial Sequence
  Synthetic oligonucleotide; AGG chr2 60452027 60452046 60452030 -
aacagatttgagaaatgggc

SEQ ID NO: 185342 - DNA, 20 bp, Artificial Sequence
  Synthetic oligonucleotide; GAG chr2 60452025 60452044 60452028 -
cagatttgagaaatgggcag

SEQ ID NO: 185343 - DNA, 20 bp, Artificial Sequence
  Synthetic oligonucleotide; TAG chr2 60452019 60452038 60452022 -
tgagaaatgggcaggagatg

SEQ ID NO: 185344 - DNA, 20 bp, Artificial Sequence
  Synthetic oligonucleotide; AGG chr2 60452018 60452037 60452021 -
gagaaatgggcaggagatgt

SEQ ID NO: 185345 - DNA, 20 bp, Artificial Sequence
  Synthetic oligonucleotide; GAG chr2 60452016 60452035 60452019 -
gaaatgggcaggagatgtag

SEQ ID NO: 185346 - DNA, 20 bp, Artificial Sequence
  Synthetic oligonucleotide; AGG chr2 60452015 60452034 60452018 -
aaatgggcaggagatgtagg

SEQ ID NO: 185347 - DNA, 20 bp, Artificial Sequence
  Synthetic oligonucleotide; GGG chr2 60452014 60452033 60452017 -
aatgggcaggagatgtagga

SEQ ID NO: 185348 - DNA, 20 bp, Artificial Sequence
  Synthetic oligonucleotide; GGG chr2 60452013 60452032 60452016 -
atgggcaggagatgtaggag

SEQ ID NO: 185349 - DNA, 20 bp, Artificial Sequence
  Synthetic oligonucleotide; TAG chr2 60452007 60452026 60452010 -
aggagatgtaggaggggaac

SEQ ID NO: 185350 - DNA, 20 bp, Artificial Sequence
  Synthetic oligonucleotide; AGG chr2 60452006 60452025 60452009 -
ggagatgtaggaggggaact

SEQ ID NO: 185351 - DNA, 20 bp, Artificial Sequence
  Synthetic oligonucleotide; CAG chr2 60451992 60452011 60451995 -
ggaactaggttaccgcttat

SEQ ID NO: 185352 - DNA, 20 bp, Artificial Sequence
  Synthetic oligonucleotide; TGG chr2 60451988 60452007 60451991 -
ctaggttaccgcttatcaga

SEQ ID NO: 185353 - DNA, 20 bp, Artificial Sequence
  Synthetic oligonucleotide; AAG chr2 60451974 60451993 60451977 -
atcagatggcataaattttc

SEQ ID NO: 185354 - DNA, 20 bp, Artificial Sequence
  Synthetic oligonucleotide; AGG chr2 60451973 60451992 60451976 -
tcagatggcataaattttca

SEQ ID NO: 185355 - DNA, 20 bp, Artificial Sequence
  Synthetic oligonucleotide; GAG chr2 60451971 60451990 60451974 -
agatggcataaattttcaag

SEQ ID NO: 185356 - DNA, 20 bp, Artificial Sequence
  Synthetic oligonucleotide; TGG chr2 60451951 60451970 60451954 -
gagaatcaaaatgcaaaact

SEQ ID NO: 185357 - DNA, 20 bp, Artificial Sequence
  Synthetic oligonucleotide; GGG chr2 60451950 60451969 60451953 -
agaatcaaaatgcaaaactt

SEQ ID NO: 185358 - DNA, 20 bp, Artificial Sequence
  Synthetic oligonucleotide; TAG chr2 60451938 60451957 60451941 -
caaaacttgggaataaatca

SEQ ID NO: 185359 - DNA, 20 bp, Artificial Sequence
  Synthetic oligonucleotide; TAG chr2 60451918 60451937 60451921 -
tagcaatatcataattaatg

SEQ ID NO: 185360 - DNA, 20 bp, Artificial Sequence
  Synthetic oligonucleotide; TAG chr2 60451915 60451934 60451918 -
caatatcataattaatgtag

SEQ ID NO: 185361 - DNA, 20 bp, Artificial Sequence
  Synthetic oligonucleotide; AAG chr2 60451888 60451907 60451891 -
attgctgtttattaatgctg

SEQ ID NO: 185362 - DNA, 20 bp, Artificial Sequence
  Synthetic oligonucleotide; TGG chr2 60451883 60451902 60451886 -
tgtttattaatgctgaagtg

SEQ ID NO: 185363 - DNA, 20 bp, Artificial Sequence
  Synthetic oligonucleotide; TGG chr2 60451828 60451847 60451831 -
ccattaaataatgcataata

SEQ ID NO: 185364 - DNA, 20 bp, Artificial Sequence
  Synthetic oligonucleotide; TGG chr2 60451792 60451811 60451795 -
gtttttcaaatatatgcttt

SEQ ID NO: 185365 - DNA, 20 bp, Artificial Sequence
  Synthetic oligonucleotide; TGG chr2 60451789 60451808 60451792 -
tttcaaatatatgcttttgg

SEQ ID NO: 185366 - DNA, 20 bp, Artificial Sequence
  Synthetic oligonucleotide; CAG chr2 60451778 60451797 60451781 -
tgcttttggtggctaccatg

SEQ ID NO: 185367 - DNA, 20 bp, Artificial Sequence
  Synthetic oligonucleotide; AGG chr2 60451777 60451796 60451780 -
gcttttggtggctaccatgc

SEQ ID NO: 185368 - DNA, 20 bp, Artificial Sequence
  Synthetic oligonucleotide; TAG chr2 60451753 60451772 60451756 -
tttgaatttgtcttttaatt

SEQ ID NO: 185369 - DNA, 20 bp, Artificial Sequence
  Synthetic oligonucleotide; TAG chr2 60451748 60451767 60451751 -
atttgtcttttaatttagct

SEQ ID NO: 185370 - DNA, 20 bp, Artificial Sequence
  Synthetic oligonucleotide; AGG chr2 60451747 60451766 60451750 -
tttgtcttttaatttagctt

SEQ ID NO: 185371 - DNA, 20 bp, Artificial Sequence
  Synthetic oligonucleotide; AAG chr2 60451743 60451762 60451746 -
tcttttaatttagcttagga

SEQ ID NO: 185372 - DNA, 20 bp, Artificial Sequence
  Synthetic oligonucleotide; TGG chr2 60451732 60451751 60451735 -
agcttaggaaagaacatcac

SEQ ID NO: 185373 - DNA, 20 bp, Artificial Sequence
  Synthetic oligonucleotide; GGG chr2 60451731 60451750 60451734 -
gcttaggaaagaacatcact

SEQ ID NO: 185374 - DNA, 20 bp, Artificial Sequence
  Synthetic oligonucleotide; GAG chr2 60451727 60451746 60451730 -
aggaaagaacatcactgggc

SEQ ID NO: 185375 - DNA, 20 bp, Artificial Sequence
  Synthetic oligonucleotide; CGG chr2 60451724 60451743 60451727 -
aaagaacatcactgggcgag

SEQ ID NO: 185376 - DNA, 20 bp, Artificial Sequence
  Synthetic oligonucleotide; AAG chr2 60451712 60451731 60451715 -
tgggcgagcggtaaatccta

SEQ ID NO: 185377 - DNA, 20 bp, Artificial Sequence
  Synthetic oligonucleotide; AAG chr2 60451709 60451728 60451712 -
gcgagcggtaaatcctaaag

SEQ ID NO: 185378 - DNA, 20 bp, Artificial Sequence
  Synthetic oligonucleotide; AGG chr2 60451708 60451727 60451711 -
cgagcggtaaatcctaaaga

SEQ ID NO: 185379 - DNA, 20 bp, Artificial Sequence
  Synthetic oligonucleotide; CAG chr2 60451695 60451714 60451698 -
ctaaagaaggtgataaatgt

SEQ ID NO: 185380 - DNA, 20 bp, Artificial Sequence
  Synthetic oligonucleotide; TAG chr2 60451692 60451711 60451695 -
aagaaggtgataaatgtcag

SEQ ID NO: 185381 - DNA, 20 bp, Artificial Sequence
  Synthetic oligonucleotide; TAG chr2 60451666 60451685 60451669 -
cttattaaatattctaattt

SEQ ID NO: 185382 - DNA, 20 bp, Artificial Sequence
  Synthetic oligonucleotide; AGG chr2 60451665 60451684 60451668 -
ttattaaatattctaatttt

SEQ ID NO: 185383 - DNA, 20 bp, Artificial Sequence
  Synthetic oligonucleotide; CAG chr2 60451650 60451669 60451653 -
attttaggttcccaaacctt

SEQ ID NO: 185384 - DNA, 20 bp, Artificial Sequence
  Synthetic oligonucleotide; AGG chr2 60451649 60451668 60451652 -
ttttaggttcccaaaccttc

SEQ ID NO: 185385 - DNA, 20 bp, Artificial Sequence
  Synthetic oligonucleotide; CAG chr2 60451631 60451650 60451634 -
tcaggaaatatatcttaatg

SEQ ID NO: 185386 - DNA, 20 bp, Artificial Sequence
  Synthetic oligonucleotide; TAG chr2 60451606 60451625 60451609 -
aaacaaacataaaacttctt

SEQ ID NO: 185387 - DNA, 20 bp, Artificial Sequence
  Synthetic oligonucleotide; CAG chr2 60451594 60451613 60451597 -
aacttctttagtacttacat

SEQ ID NO: 185388 - DNA, 20 bp, Artificial Sequence
  Synthetic oligonucleotide; AGG chr2 60451593 60451612 60451596 -
acttctttagtacttacatc

SEQ ID NO: 185389 - DNA, 20 bp, Artificial Sequence
  Synthetic oligonucleotide; TGG chr2 60451585 60451604 60451588 -
agtacttacatcaggaaatt

SEQ ID NO: 185390 - DNA, 20 bp, Artificial Sequence
  Synthetic oligonucleotide; GGG chr2 60451584 60451603 60451587 -
gtacttacatcaggaaattt

SEQ ID NO: 185391 - DNA, 20 bp, Artificial Sequence
  Synthetic oligonucleotide; GGG chr2 60451583 60451602 60451586 -
tacttacatcaggaaatttg

SEQ ID NO: 185392 - DNA, 20 bp, Artificial Sequence
  Synthetic oligonucleotide; CAG chr2 60451580 60451599 60451583 -
ttacatcaggaaatttgggg

SEQ ID NO: 185393 - DNA, 20 bp, Artificial Sequence
  Synthetic oligonucleotide; TAG chr2 60451573 60451592 60451576 -
aggaaatttggggcagattt

SEQ ID NO: 185394 - DNA, 20 bp, Artificial Sequence
  Synthetic oligonucleotide; GAG chr2 60451571 60451590 60451574 -
gaaatttggggcagatttta

SEQ ID NO: 185395 - DNA, 20 bp, Artificial Sequence
  Synthetic oligonucleotide; AGG chr2 60451570 60451589 60451573 -
aaatttggggcagattttag

SEQ ID NO: 185396 - DNA, 20 bp, Artificial Sequence
  Synthetic oligonucleotide; GGG chr2 60451569 60451588 60451572 -
aatttggggcagattttaga

SEQ ID NO: 185397 - DNA, 20 bp, Artificial Sequence
  Synthetic oligonucleotide; GGG chr2 60451568 60451587 60451571 -
atttggggcagattttagag

SEQ ID NO: 185398 - DNA, 20 bp, Artificial Sequence
  Synthetic oligonucleotide; GGG chr2 60451567 60451586 60451570 -
tttggggcagattttagagg

SEQ ID NO: 185399 - DNA, 20 bp, Artificial Sequence
  Synthetic oligonucleotide; GGG chr2 60451566 60451585 60451569 -
ttggggcagattttagaggg

SEQ ID NO: 185400 - DNA, 20 bp, Artificial Sequence
  Synthetic oligonucleotide; TAG chr2 60451557 60451576 60451560 -
attttagaggggggaaatta

SEQ ID NO: 185401 - DNA, 20 bp, Artificial Sequence
  Synthetic oligonucleotide; AGG chr2 60451556 60451575 60451559 -
ttttagaggggggaaattat

SEQ ID NO: 185402 - DNA, 20 bp, Artificial Sequence
  Synthetic oligonucleotide; GAG chr2 60451554 60451573 60451557 -
ttagaggggggaaattatag

SEQ ID NO: 185403 - DNA, 20 bp, Artificial Sequence
  Synthetic oligonucleotide; AGG chr2 60451553 60451572 60451556 -
tagaggggggaaattatagg

SEQ ID NO: 185404 - DNA, 20 bp, Artificial Sequence
  Synthetic oligonucleotide; AAG chr2 60451549 60451568 60451552 -
ggggggaaattataggagga

SEQ ID NO: 185405 - DNA, 20 bp, Artificial Sequence
  Synthetic oligonucleotide; AAG chr2 60451546 60451565 60451549 -
gggaaattataggaggaaag

SEQ ID NO: 185406 - DNA, 20 bp, Artificial Sequence
  Synthetic oligonucleotide; CAG chr2 60451536 60451555 60451539 -
aggaggaaagaagttcacat

SEQ ID NO: 185407 - DNA, 20 bp, Artificial Sequence
  Synthetic oligonucleotide; CAG chr2 60451531 60451550 60451534 -
gaaagaagttcacatcagaa

SEQ ID NO: 185408 - DNA, 20 bp, Artificial Sequence
  Synthetic oligonucleotide; CAG chr2 60451521 60451540 60451524 -
cacatcagaacagacaatca

SEQ ID NO: 185409 - DNA, 20 bp, Artificial Sequence
  Synthetic oligonucleotide; TAG chr2 60451503 60451522 60451506 -
cacagcaatgctctattcct

SEQ ID NO: 185410 - DNA, 20 bp, Artificial Sequence
  Synthetic oligonucleotide; TAG chr2 60451496 60451515 60451499 -
atgctctattccttagaaat

SEQ ID NO: 185411 - DNA, 20 bp, Artificial Sequence
  Synthetic oligonucleotide; AAG chr2 60451483 60451502 60451486 -
tagaaattagtgccacaaat

SEQ ID NO: 185412 - DNA, 20 bp, Artificial Sequence
  Synthetic oligonucleotide; CAG chr2 60451467 60451486 60451470 -
aaataagttacatctacaaa

SEQ ID NO: 185413 - DNA, 20 bp, Artificial Sequence
  Synthetic oligonucleotide; AGG chr2 60451466 60451485 60451469 -
aataagttacatctacaaac

SEQ ID NO: 185414 - DNA, 20 bp, Artificial Sequence
  Synthetic oligonucleotide; TGG chr2 60451463 60451482 60451466 -
aagttacatctacaaacagg

SEQ ID NO: 185415 - DNA, 20 bp, Artificial Sequence
  Synthetic oligonucleotide; TGG chr2 60451447 60451466 60451450 -
caggtggtaaaaattctttc

SEQ ID NO: 185416 - DNA, 20 bp, Artificial Sequence
  Synthetic oligonucleotide; CAG chr2 60451442 60451461 60451445 -
ggtaaaaattctttctggcc

SEQ ID NO: 185417 - DNA, 20 bp, Artificial Sequence
  Synthetic oligonucleotide; CAG chr2 60451429 60451448 60451432 -
tctggcccagttaatttgca

SEQ ID NO: 185418 - DNA, 20 bp, Artificial Sequence
  Synthetic oligonucleotide; CAG chr2 60451417 60451436 60451420 -
aatttgcacagaacttttct

SEQ ID NO: 185419 - DNA, 20 bp, Artificial Sequence
  Synthetic oligonucleotide; TGG chr2 60451412 60451431 60451415 -
gcacagaacttttctcagtt

SEQ ID NO: 185420 - DNA, 20 bp, Artificial Sequence
  Synthetic oligonucleotide; TGG chr2 60451395 60451414 60451398 -
gtttggtattttttactgct

SEQ ID NO: 185421 - DNA, 20 bp, Artificial Sequence
  Synthetic oligonucleotide; GAG chr2 60451393 60451412 60451396 -
ttggtattttttactgcttg

SEQ ID NO: 185422 - DNA, 20 bp, Artificial Sequence
  Synthetic oligonucleotide; CAG chr2 60451387 60451406 60451390 -
ttttttactgcttggagatc

SEQ ID NO: 185423 - DNA, 20 bp, Artificial Sequence
  Synthetic oligonucleotide; AAG chr2 60451384 60451403 60451387 -
tttactgcttggagatccag

SEQ ID NO: 185424 - DNA, 20 bp, Artificial Sequence
  Synthetic oligonucleotide; GAG chr2 60451382 60451401 60451385 -
tactgcttggagatccagaa

SEQ ID NO: 185425 - DNA, 20 bp, Artificial Sequence
  Synthetic oligonucleotide; TAG chr2 60451376 60451395 60451379 -
ttggagatccagaagagaat

SEQ ID NO: 185426 - DNA, 20 bp, Artificial Sequence
  Synthetic oligonucleotide; TAG chr2 60451365 60451384 60451368 -
gaagagaattagaaacaaca

SEQ ID NO: 185427 - DNA, 20 bp, Artificial Sequence
  Synthetic oligonucleotide; TAG chr2 60451352 60451371 60451355 -
aacaacatagcaaattaaaa

SEQ ID NO: 185428 - DNA, 20 bp, Artificial Sequence
  Synthetic oligonucleotide; AGG chr2 60451351 60451370 60451354 -
acaacatagcaaattaaaat

SEQ ID NO: 185429 - DNA, 20 bp, Artificial Sequence
  Synthetic oligonucleotide; TAG chr2 60451337 60451356 60451340 -
taaaataggtttgtcaataa

SEQ ID NO: 185430 - DNA, 20 bp, Artificial Sequence
  Synthetic oligonucleotide; GAG chr2 60451335 60451354 60451338 -
aaataggtttgtcaataata

SEQ ID NO: 185431 - DNA, 20 bp, Artificial Sequence
  Synthetic oligonucleotide; CAG chr2 60451330 60451349 60451333 -
ggtttgtcaataatagagct

SEQ ID NO: 185432 - DNA, 20 bp, Artificial Sequence
  Synthetic oligonucleotide; TAG chr2 60451313 60451332 60451316 -
gctcagacacctgtgtgctg

SEQ ID NO: 185433 - DNA, 20 bp, Artificial Sequence
  Synthetic oligonucleotide; CAG chr2 60451301 60451320 60451304 -
gtgtgctgtagattcacata

SEQ ID NO: 185434 - DNA, 20 bp, Artificial Sequence
  Synthetic oligonucleotide; AGG chr2 60451300 60451319 60451303 -
tgtgctgtagattcacatac

SEQ ID NO: 185435 - DNA, 20 bp, Artificial Sequence
  Synthetic oligonucleotide; AAG chr2 60451287 60451306 60451290 -
cacatacaggccgtgaacct

SEQ ID NO: 185436 - DNA, 20 bp, Artificial Sequence
  Synthetic oligonucleotide; TGG chr2 60451284 60451303 60451287 -
atacaggccgtgaacctaag

SEQ ID NO: 185437 - DNA, 20 bp, Artificial Sequence
  Synthetic oligonucleotide; GGG chr2 60451283 60451302 60451286 -
tacaggccgtgaacctaagt

SEQ ID NO: 185438 - DNA, 20 bp, Artificial Sequence
  Synthetic oligonucleotide; GGG chr2 60451282 60451301 60451285 -
acaggccgtgaacctaagtg

SEQ ID NO: 185439 - DNA, 20 bp, Artificial Sequence
  Synthetic oligonucleotide; TGG chr2 60451257 60451276 60451260 -
aatcctacctatccaccttc

SEQ ID NO: 185440 - DNA, 20 bp, Artificial Sequence
  Synthetic oligonucleotide; TAG chr2 60451253 60451272 60451256 -
ctacctatccaccttctggc

SEQ ID NO: 185441 - DNA, 20 bp, Artificial Sequence
  Synthetic oligonucleotide; TAG chr2 60451244 60451263 60451247 -
caccttctggctagattacc

SEQ ID NO: 185442 - DNA, 20 bp, Artificial Sequence
  Synthetic oligonucleotide; TAG chr2 60451239 60451258 60451242 -
tctggctagattacctagct

SEQ ID NO: 185443 - DNA, 20 bp, Artificial Sequence
  Synthetic oligonucleotide; AAG chr2 60451232 60451251 60451235 -
agattacctagcttagtgaa

SEQ ID NO: 185444 - DNA, 20 bp, Artificial Sequence
  Synthetic oligonucleotide; TAG chr2 60451228 60451247 60451231 -
tacctagcttagtgaaaaga

SEQ ID NO: 185445 - DNA, 20 bp, Artificial Sequence
  Synthetic oligonucleotide; TGG chr2 60451216 60451235 60451219 -
tgaaaagatagccaaataat

SEQ ID NO: 185446 - DNA, 20 bp, Artificial Sequence
  Synthetic oligonucleotide; CAG chr2 60451167 60451186 60451170 -
taataaataatgactgtcta

SEQ ID NO: 185447 - DNA, 20 bp, Artificial Sequence
  Synthetic oligonucleotide; TAG chr2 60451164 60451183 60451167 -
taaataatgactgtctacag

SEQ ID NO: 185448 - DNA, 20 bp, Artificial Sequence
  Synthetic oligonucleotide; CAG chr2 60451140 60451159 60451143 -
gaactaccttatactgtata

SEQ ID NO: 185449 - DNA, 20 bp, Artificial Sequence
  Synthetic oligonucleotide; TGG chr2 60451106 60451125 60451109 -
gcattatttcacctgctctc

SEQ ID NO: 185450 - DNA, 20 bp, Artificial Sequence
  Synthetic oligonucleotide; GGG chr2 60451105 60451124 60451108 -
cattatttcacctgctctct

SEQ ID NO: 185451 - DNA, 20 bp, Artificial Sequence
  Synthetic oligonucleotide; CAG chr2 60451101 60451120 60451104 -
atttcacctgctctctggga

SEQ ID NO: 185452 - DNA, 20 bp, Artificial Sequence
  Synthetic oligonucleotide; TGG chr2 60451078 60451097 60451081 -
atctcacgacttctacttta

SEQ ID NO: 185453 - DNA, 20 bp, Artificial Sequence
  Synthetic oligonucleotide; GAG chr2 60451076 60451095 60451079 -
ctcacgacttctactttatg

SEQ ID NO: 185454 - DNA, 20 bp, Artificial Sequence
  Synthetic oligonucleotide; AGG chr2 60451075 60451094 60451078 -
tcacgacttctactttatgg

SEQ ID NO: 185455 - DNA, 20 bp, Artificial Sequence
  Synthetic oligonucleotide; TGG chr2 60451072 60451091 60451075 -
cgacttctactttatggagg

SEQ ID NO: 185456 - DNA, 20 bp, Artificial Sequence
  Synthetic oligonucleotide; GAG chr2 60451070 60451089 60451073 -
acttctactttatggaggtg

SEQ ID NO: 185457 - DNA, 20 bp, Artificial Sequence
  Synthetic oligonucleotide; GAG chr2 60451064 60451083 60451067 -
actttatggaggtggagatt

SEQ ID NO: 185458 - DNA, 20 bp, Artificial Sequence
  Synthetic oligonucleotide; AGG chr2 60451063 60451082 60451066 -
ctttatggaggtggagattg

SEQ ID NO: 185459 - DNA, 20 bp, Artificial Sequence
  Synthetic oligonucleotide; AAG chr2 60451054 60451073 60451057 -
ggtggagattgaggcttacc

SEQ ID NO: 185460 - DNA, 20 bp, Artificial Sequence
  Synthetic oligonucleotide; AGG chr2 60451053 60451072 60451056 -
gtggagattgaggcttacca

SEQ ID NO: 185461 - DNA, 20 bp, Artificial Sequence
  Synthetic oligonucleotide; AAG chr2 60451048 60451067 60451051 -
gattgaggcttaccaaggtt

SEQ ID NO: 185462 - DNA, 20 bp, Artificial Sequence
  Synthetic oligonucleotide; AGG chr2 60451047 60451066 60451050 -
attgaggcttaccaaggtta

SEQ ID NO: 185463 - DNA, 20 bp, Artificial Sequence
  Synthetic oligonucleotide; GGG chr2 60451046 60451065 60451049 -
ttgaggcttaccaaggttaa

SEQ ID NO: 185464 - DNA, 20 bp, Artificial Sequence
  Synthetic oligonucleotide; CAG chr2 60451038 60451057 60451041 -
taccaaggttaagggcttgc

SEQ ID NO: 185465 - DNA, 20 bp, Artificial Sequence
  Synthetic oligonucleotide; GAG chr2 60451036 60451055 60451039 -
ccaaggttaagggcttgcca

SEQ ID NO: 185466 - DNA, 20 bp, Artificial Sequence
  Synthetic oligonucleotide; AGG chr2 60451035 60451054 60451038 -
caaggttaagggcttgccag

SEQ ID NO: 185467 - DNA, 20 bp, Artificial Sequence
  Synthetic oligonucleotide; CAG chr2 60451026 60451045 60451029 -
gggcttgccagaggccacat

SEQ ID NO: 185468 - DNA, 20 bp, Artificial Sequence
  Synthetic oligonucleotide; AAG chr2 60451022 60451041 60451025 -
ttgccagaggccacatcagt

SEQ ID NO: 185469 - DNA, 20 bp, Artificial Sequence
  Synthetic oligonucleotide; GAG chr2 60451020 60451039 60451023 -
gccagaggccacatcagtaa

SEQ ID NO: 185470 - DNA, 20 bp, Artificial Sequence
  Synthetic oligonucleotide; GAG chr2 60451018 60451037 60451021 -
cagaggccacatcagtaaga

SEQ ID NO: 185471 - DNA, 20 bp, Artificial Sequence
  Synthetic oligonucleotide; AAG chr2 60451014 60451033 60451017 -
ggccacatcagtaagagaga

SEQ ID NO: 185472 - DNA, 20 bp, Artificial Sequence
  Synthetic oligonucleotide; CAG chr2 60451011 60451030 60451014 -
cacatcagtaagagagaaag

SEQ ID NO: 185473 - DNA, 20 bp, Artificial Sequence
  Synthetic oligonucleotide; GAG chr2 60451009 60451028 60451012 -
catcagtaagagagaaagca

SEQ ID NO: 185474 - DNA, 20 bp, Artificial Sequence
  Synthetic oligonucleotide; AAG chr2 60451006 60451025 60451009 -
cagtaagagagaaagcagag

SEQ ID NO: 185475 - DNA, 20 bp, Artificial Sequence
  Synthetic oligonucleotide; CAG chr2 60451002 60451021 60451005 -
aagagagaaagcagagaagc

SEQ ID NO: 185476 - DNA, 20 bp, Artificial Sequence
  Synthetic oligonucleotide; AGG chr2 60451001 60451020 60451004 -
agagagaaagcagagaagcc

SEQ ID NO: 185477 - DNA, 20 bp, Artificial Sequence
  Synthetic oligonucleotide; TGG chr2 60450993 60451012 60450996 -
agcagagaagccaggttttc

SEQ ID NO: 185478 - DNA, 20 bp, Artificial Sequence
  Synthetic oligonucleotide; CAG chr2 60450981 60451000 60450984 -
aggttttctggtttcttgtc

SEQ ID NO: 185479 - DNA, 20 bp, Artificial Sequence
  Synthetic oligonucleotide; GAG chr2 60450979 60450998 60450982 -
gttttctggtttcttgtcca

SEQ ID NO: 185480 - DNA, 20 bp, Artificial Sequence
  Synthetic oligonucleotide; AAG chr2 60450945 60450964 60450948 -
aaactctgtttaactgatca

SEQ ID NO: 185481 - DNA, 20 bp, Artificial Sequence
  Synthetic oligonucleotide; AGG chr2 60450944 60450963 60450947 -
aactctgtttaactgatcaa

SEQ ID NO: 185482 - DNA, 20 bp, Artificial Sequence
  Synthetic oligonucleotide; GGG chr2 60450943 60450962 60450946 -
actctgtttaactgatcaaa

SEQ ID NO: 185483 - DNA, 20 bp, Artificial Sequence
  Synthetic oligonucleotide; GAG chr2 60450941 60450960 60450944 -
tctgtttaactgatcaaagg

SEQ ID NO: 185484 - DNA, 20 bp, Artificial Sequence
  Synthetic oligonucleotide; TAG chr2 60450923 60450942 60450926 -
gggagtatcttttcctgtgt

SEQ ID NO: 185485 - DNA, 20 bp, Artificial Sequence
  Synthetic oligonucleotide; AAG chr2 60450915 60450934 60450918 -
cttttcctgtgttagcacat

SEQ ID NO: 185486 - DNA, 20 bp, Artificial Sequence
  Synthetic oligonucleotide; CAG chr2 60450899 60450918 60450902 -
acataagtcataaatgttca

SEQ ID NO: 185487 - DNA, 20 bp, Artificial Sequence
  Synthetic oligonucleotide; TGG chr2 60450885 60450904 60450888 -
tgttcacagacacacacatg

SEQ ID NO: 185488 - DNA, 20 bp, Artificial Sequence
  Synthetic oligonucleotide; CAG chr2 60450872 60450891 60450875 -
acacatgtggcttacacata

SEQ ID NO: 185489 - DNA, 20 bp, Artificial Sequence
  Synthetic oligonucleotide; CAG chr2 60450866 60450885 60450869 -
gtggcttacacatacagacc

SEQ ID NO: 185490 - DNA, 20 bp, Artificial Sequence
  Synthetic oligonucleotide; AGG chr2 60450865 60450884 60450868 -
tggcttacacatacagaccc

SEQ ID NO: 185491 - DNA, 20 bp, Artificial Sequence
  Synthetic oligonucleotide; TGG chr2 60450861 60450880 60450864 -
ttacacatacagacccagga

SEQ ID NO: 185492 - DNA, 20 bp, Artificial Sequence
  Synthetic oligonucleotide; TGG chr2 60450854 60450873 60450857 -
tacagacccaggatggcctt

SEQ ID NO: 185493 - DNA, 20 bp, Artificial Sequence
  Synthetic oligonucleotide; AAG chr2 60450849 60450868 60450852 -
acccaggatggcctttggta

SEQ ID NO: 185494 - DNA, 20 bp, Artificial Sequence
  Synthetic oligonucleotide; AGG chr2 60450848 60450867 60450851 -
cccaggatggcctttggtaa

SEQ ID NO: 185495 - DNA, 20 bp, Artificial Sequence
  Synthetic oligonucleotide; CAG chr2 60450841 60450860 60450844 -
tggcctttggtaaaggcatg

SEQ ID NO: 185496 - DNA, 20 bp, Artificial Sequence
  Synthetic oligonucleotide; GAG chr2 60450839 60450858 60450842 -
gcctttggtaaaggcatgca

SEQ ID NO: 185497 - DNA, 20 bp, Artificial Sequence
  Synthetic oligonucleotide; CAG chr2 60450819 60450838 60450822 -
gagttgcctcttcctaccaa

SEQ ID NO: 185498 - DNA, 20 bp, Artificial Sequence
  Synthetic oligonucleotide; GAG chr2 60450805 60450824 60450808 -
taccaacagatgtgtgcact

SEQ ID NO: 185499 - DNA, 20 bp, Artificial Sequence
  Synthetic oligonucleotide; AAG chr2 60450801 60450820 60450804 -
aacagatgtgtgcactgaga

SEQ ID NO: 185500 - DNA, 20 bp, Artificial Sequence
  Synthetic oligonucleotide; AGG chr2 60450800 60450819 60450803 -
acagatgtgtgcactgagaa

SEQ ID NO: 185501 - DNA, 20 bp, Artificial Sequence
  Synthetic oligonucleotide; GGG chr2 60450799 60450818 60450802 -
cagatgtgtgcactgagaaa

SEQ ID NO: 185502 - DNA, 20 bp, Artificial Sequence
  Synthetic oligonucleotide; GAG chr2 60450797 60450816 60450800 -
gatgtgtgcactgagaaagg

SEQ ID NO: 185503 - DNA, 20 bp, Artificial Sequence
  Synthetic oligonucleotide; AGG chr2 60450796 60450815 60450799 -
atgtgtgcactgagaaaggg

SEQ ID NO: 185504 - DNA, 20 bp, Artificial Sequence
  Synthetic oligonucleotide; CAG chr2 60450790 60450809 60450793 -
gcactgagaaagggaggttg

SEQ ID NO: 185505 - DNA, 20 bp, Artificial Sequence
  Synthetic oligonucleotide; TGG chr2 60450762 60450781 60450765 -
ttgccatcacctttcccctg

SEQ ID NO: 185506 - DNA, 20 bp, Artificial Sequence
  Synthetic oligonucleotide; GAG chr2 60450729 60450748 60450732 -
acaaataaccctgattgcac

SEQ ID NO: 185507 - DNA, 20 bp, Artificial Sequence
  Synthetic oligonucleotide; TGG chr2 60450726 60450745 60450729 -
aataaccctgattgcacgag

SEQ ID NO: 185508 - DNA, 20 bp, Artificial Sequence
  Synthetic oligonucleotide; TAG chr2 60450700 60450719 60450703 -
gtttgtgacttcctatcaat

SEQ ID NO: 185509 - DNA, 20 bp, Artificial Sequence
  Synthetic oligonucleotide; TGG chr2 60450696 60450715 60450699 -
gtgacttcctatcaattagt

SEQ ID NO: 185510 - DNA, 20 bp, Artificial Sequence
  Synthetic oligonucleotide; GGG chr2 60450695 60450714 60450698 -
tgacttcctatcaattagtt

SEQ ID NO: 185511 - DNA, 20 bp, Artificial Sequence
  Synthetic oligonucleotide; CAG chr2 60450687 60450706 60450690 -
tatcaattagttgggacttc

SEQ ID NO: 185512 - DNA, 20 bp, Artificial Sequence
  Synthetic oligonucleotide; AAG chr2 60450682 60450701 60450685 -
attagttgggacttccagac

SEQ ID NO: 185513 - DNA, 20 bp, Artificial Sequence
  Synthetic oligonucleotide; AAG chr2 60450679 60450698 60450682 -
agttgggacttccagacaag

SEQ ID NO: 185514 - DNA, 20 bp, Artificial Sequence
  Synthetic oligonucleotide; AAG chr2 60450666 60450685 60450669 -
agacaagaagttatttcata

SEQ ID NO: 185515 - DNA, 20 bp, Artificial Sequence
  Synthetic oligonucleotide; AAG chr2 60450617 60450636 60450620 -
cctatgtgttgctgaaacat

SEQ ID NO: 185516 - DNA, 20 bp, Artificial Sequence
  Synthetic oligonucleotide; TAG chr2 60450609 60450628 60450612 -
ttgctgaaacataagaccat

SEQ ID NO: 185517 - DNA, 20 bp, Artificial Sequence
  Synthetic oligonucleotide; AGG chr2 60450608 60450627 60450611 -
tgctgaaacataagaccatt

SEQ ID NO: 185518 - DNA, 20 bp, Artificial Sequence
  Synthetic oligonucleotide; GGG chr2 60450607 60450626 60450610 -
gctgaaacataagaccatta

SEQ ID NO: 185519 - DNA, 20 bp, Artificial Sequence
  Synthetic oligonucleotide; TGG chr2 60450595 60450614 60450598 -
gaccattagggtttctgtga

SEQ ID NO: 185520 - DNA, 20 bp, Artificial Sequence
  Synthetic oligonucleotide; TAG chr2 60450555 60450574 60450558 -
ctgaactccttgctgatgcc

SEQ ID NO: 185521 - DNA, 20 bp, Artificial Sequence
  Synthetic oligonucleotide; AAG chr2 60450551 60450570 60450554 -
actccttgctgatgcctaga

SEQ ID NO: 185522 - DNA, 20 bp, Artificial Sequence
  Synthetic oligonucleotide; GAG chr2 60450549 60450568 60450552 -
tccttgctgatgcctagaaa

SEQ ID NO: 185523 - DNA, 20 bp, Artificial Sequence
  Synthetic oligonucleotide; AAG chr2 60450532 60450551 60450535 -
aaagagtgacaccacttcca

SEQ ID NO: 185524 - DNA, 20 bp, Artificial Sequence
  Synthetic oligonucleotide; AGG chr2 60450531 60450550 60450534 -
aagagtgacaccacttccaa

SEQ ID NO: 185525 - DNA, 20 bp, Artificial Sequence
  Synthetic oligonucleotide; GGG chr2 60450530 60450549 60450533 -
agagtgacaccacttccaaa

SEQ ID NO: 185526 - DNA, 20 bp, Artificial Sequence
  Synthetic oligonucleotide; GAG chr2 60450528 60450547 60450531 -
agtgacaccacttccaaagg

SEQ ID NO: 185527 - DNA, 20 bp, Artificial Sequence
  Synthetic oligonucleotide; AGG chr2 60450527 60450546 60450530 -
gtgacaccacttccaaaggg

SEQ ID NO: 185528 - DNA, 20 bp, Artificial Sequence
  Synthetic oligonucleotide; CAG chr2 60450523 60450542 60450526 -
caccacttccaaagggaggc

SEQ ID NO: 185529 - DNA, 20 bp, Artificial Sequence
  Synthetic oligonucleotide; TGG chr2 60450503 60450522 60450506 -
cagaactgaaacaacaatcc

SEQ ID NO: 185530 - DNA, 20 bp, Artificial Sequence
  Synthetic oligonucleotide; GGG chr2 60450502 60450521 60450505 -
agaactgaaacaacaatcct

SEQ ID NO: 185531 - DNA, 20 bp, Artificial Sequence
  Synthetic oligonucleotide; GAG chr2 60450495 60450514 60450498 -
aaacaacaatcctgggtctt

SEQ ID NO: 185532 - DNA, 20 bp, Artificial Sequence
  Synthetic oligonucleotide; AAG chr2 60450490 60450509 60450493 -
acaatcctgggtcttgagac

SEQ ID NO: 185533 - DNA, 20 bp, Artificial Sequence
  Synthetic oligonucleotide; CAG chr2 60450485 60450504 60450488 -
cctgggtcttgagacaagtt

SEQ ID NO: 185534 - DNA, 20 bp, Artificial Sequence
  Synthetic oligonucleotide; TGG chr2 60450466 60450485 60450469 -
tcagcctttgtaactgcact

SEQ ID NO: 185535 - DNA, 20 bp, Artificial Sequence
  Synthetic oligonucleotide; TGG chr2 60450463 60450482 60450466 -
gcctttgtaactgcacttgg

SEQ ID NO: 185536 - DNA, 20 bp, Artificial Sequence
  Synthetic oligonucleotide; TGG chr2 60450442 60450461 60450445 -
ggtcactacactttcatttc

SEQ ID NO: 185537 - DNA, 20 bp, Artificial Sequence
  Synthetic oligonucleotide; CAG chr2 60450402 60450421 60450405 -
actttttatatatttcttct

SEQ ID NO: 185538 - DNA, 20 bp, Artificial Sequence
  Synthetic oligonucleotide; GAG chr2 60450400 60450419 60450403 -
tttttatatatttcttctca

SEQ ID NO: 185539 - DNA, 20 bp, Artificial Sequence
  Synthetic oligonucleotide; CAG chr2 60450396 60450415 60450399 -
tatatatttcttctcagagt

SEQ ID NO: 185540 - DNA, 20 bp, Artificial Sequence
  Synthetic oligonucleotide; AAG chr2 60450384 60450403 60450387 -
ctcagagtcagtttgtaaat

SEQ ID NO: 185541 - DNA, 20 bp, Artificial Sequence
  Synthetic oligonucleotide; TGG chr2 60450381 60450400 60450384 -
agagtcagtttgtaaataag

SEQ ID NO: 185542 - DNA, 20 bp, Artificial Sequence
  Synthetic oligonucleotide; AAG chr2 60450368 60450387 60450371 -
aaataagtggatatctctaa

SEQ ID NO: 185543 - DNA, 20 bp, Artificial Sequence
  Synthetic oligonucleotide; TGG chr2 60450365 60450384 60450368 -
taagtggatatctctaaaag

SEQ ID NO: 185544 - DNA, 20 bp, Artificial Sequence
  Synthetic oligonucleotide; GGG chr2 60450364 60450383 60450367 -
aagtggatatctctaaaagt

SEQ ID NO: 185545 - DNA, 20 bp, Artificial Sequence
  Synthetic oligonucleotide; AAG chr2 60450355 60450374 60450358 -
tctctaaaagtgggattttt

SEQ ID NO: 185546 - DNA, 20 bp, Artificial Sequence
  Synthetic oligonucleotide; AGG chr2 60450354 60450373 60450357 -
ctctaaaagtgggattttta

SEQ ID NO: 185547 - DNA, 20 bp, Artificial Sequence
  Synthetic oligonucleotide; GGG chr2 60450353 60450372 60450356 -
tctaaaagtgggatttttaa

SEQ ID NO: 185548 - DNA, 20 bp, Artificial Sequence
  Synthetic oligonucleotide; GGG chr2 60450352 60450371 60450355 -
ctaaaagtgggatttttaag

SEQ ID NO: 185549 - DNA, 20 bp, Artificial Sequence
  Synthetic oligonucleotide; AAG chr2 60450348 60450367 60450351 -
aagtgggatttttaaggggc

SEQ ID NO: 185550 - DNA, 20 bp, Artificial Sequence
  Synthetic oligonucleotide; GAG chr2 60450346 60450365 60450349 -
gtgggatttttaaggggcaa

SEQ ID NO: 185551 - DNA, 20 bp, Artificial Sequence
  Synthetic oligonucleotide; AGG chr2 60450345 60450364 60450348 -
tgggatttttaaggggcaag

SEQ ID NO: 185552 - DNA, 20 bp, Artificial Sequence
  Synthetic oligonucleotide; CAG chr2 60450338 60450357 60450341 -
tttaaggggcaagaggataa

SEQ ID NO: 185553 - DNA, 20 bp, Artificial Sequence
  Synthetic oligonucleotide; AAG chr2 60450335 60450354 60450338 -
aaggggcaagaggataacag

SEQ ID NO: 185554 - DNA, 20 bp, Artificial Sequence
  Synthetic oligonucleotide; TGG chr2 60450332 60450351 60450335 -
gggcaagaggataacagaag

SEQ ID NO: 185555 - DNA, 20 bp, Artificial Sequence
  Synthetic oligonucleotide; AAG chr2 60450326 60450345 60450329 -
gaggataacagaagtggata

SEQ ID NO: 185556 - DNA, 20 bp, Artificial Sequence
  Synthetic oligonucleotide; AGG chr2 60450325 60450344 60450328 -
aggataacagaagtggataa

SEQ ID NO: 185557 - DNA, 20 bp, Artificial Sequence
  Synthetic oligonucleotide; TGG chr2 60450299 60450318 60450302 -
ttgttttatcctcttcactg

SEQ ID NO: 185558 - DNA, 20 bp, Artificial Sequence
  Synthetic oligonucleotide; GAG chr2 60450297 60450316 60450300 -
gttttatcctcttcactgtg

SEQ ID NO: 185559 - DNA, 20 bp, Artificial Sequence
  Synthetic oligonucleotide; AAG chr2 60450294 60450313 60450297 -
ttatcctcttcactgtggag

SEQ ID NO: 185560 - DNA, 20 bp, Artificial Sequence
  Synthetic oligonucleotide; CAG chr2 60450274 60450293 60450277 -
aagaaccccctcaaaacaaa

SEQ ID NO: 185561 - DNA, 20 bp, Artificial Sequence
  Synthetic oligonucleotide; AAG chr2 60450265 60450284 60450268 -
ctcaaaacaaacagaacaaa

SEQ ID NO: 185562 - DNA, 20 bp, Artificial Sequence
  Synthetic oligonucleotide; TGG chr2 60450248 60450267 60450251 -
aaaaagactgtcttttccca

SEQ ID NO: 185563 - DNA, 20 bp, Artificial Sequence
  Synthetic oligonucleotide; AAG chr2 60450239 60450258 60450242 -
gtcttttcccatggctttta

SEQ ID NO: 185564 - DNA, 20 bp, Artificial Sequence
  Synthetic oligonucleotide; AAG chr2 60450232 60450251 60450235 -
cccatggcttttaaagttga

SEQ ID NO: 185565 - DNA, 20 bp, Artificial Sequence
  Synthetic oligonucleotide; CAG chr2 60450211 60450230 60450214 -
agacaacaaaaatttattta

SEQ ID NO: 185566 - DNA, 20 bp, Artificial Sequence
  Synthetic oligonucleotide; TAG chr2 60450201 60450220 60450204 -
aatttatttacagaatttat

SEQ ID NO: 185567 - DNA, 20 bp, Artificial Sequence
  Synthetic oligonucleotide; AGG chr2 60450200 60450219 60450203 -
atttatttacagaatttatt

SEQ ID NO: 185568 - DNA, 20 bp, Artificial Sequence
  Synthetic oligonucleotide; CGG chr2 60450194 60450213 60450197 -
ttacagaatttattaggaaa

SEQ ID NO: 185569 - DNA, 20 bp, Artificial Sequence
  Synthetic oligonucleotide; TAG chr2 60450183 60450202 60450186 -
attaggaaacggtattgtgt

SEQ ID NO: 185570 - DNA, 20 bp, Artificial Sequence
  Synthetic oligonucleotide; AGG chr2 60450182 60450201 60450185 -
ttaggaaacggtattgtgtt

SEQ ID NO: 185571 - DNA, 20 bp, Artificial Sequence
  Synthetic oligonucleotide; GGG chr2 60450181 60450200 60450184 -
taggaaacggtattgtgtta

SEQ ID NO: 185572 - DNA, 20 bp, Artificial Sequence
  Synthetic oligonucleotide; TAG chr2 60450177 60450196 60450180 -
aaacggtattgtgttagggc

SEQ ID NO: 185573 - DNA, 20 bp, Artificial Sequence
  Synthetic oligonucleotide; AAG chr2 60450146 60450165 60450149 -
tttttttttttttttttttt

SEQ ID NO: 185574 - DNA, 20 bp, Artificial Sequence
  Synthetic oligonucleotide; CAG chr2 60450142 60450161 60450145 -
ttttttttttttttttaaga

SEQ ID NO: 185575 - DNA, 20 bp, Artificial Sequence
  Synthetic oligonucleotide; CAG chr2 60450122 60450141 60450125 -
cagaatctcgctctgtcacc

SEQ ID NO: 185576 - DNA, 20 bp, Artificial Sequence
  Synthetic oligonucleotide; AGG chr2 60450121 60450140 60450124 -
agaatctcgctctgtcaccc

SEQ ID NO: 185577 - DNA, 20 bp, Artificial Sequence
  Synthetic oligonucleotide; TGG chr2 60450117 60450136 60450120 -
tctcgctctgtcacccaggc

SEQ ID NO: 185578 - DNA, 20 bp, Artificial Sequence
  Synthetic oligonucleotide; GAG chr2 60450115 60450134 60450118 -
tcgctctgtcacccaggctg

SEQ ID NO: 185579 - DNA, 20 bp, Artificial Sequence
  Synthetic oligonucleotide; CAG chr2 60450110 60450129 60450113 -
ctgtcacccaggctggagtg

SEQ ID NO: 185580 - DNA, 20 bp, Artificial Sequence
  Synthetic oligonucleotide; TGG chr2 60450107 60450126 60450110 -
tcacccaggctggagtgcag

SEQ ID NO: 185581 - DNA, 20 bp, Artificial Sequence
  Synthetic oligonucleotide; AAG chr2 60450103 60450122 60450106 -
ccaggctggagtgcagtggc

SEQ ID NO: 185582 - DNA, 20 bp, Artificial Sequence
  Synthetic oligonucleotide; AGG chr2 60450102 60450121 60450105 -
caggctggagtgcagtggca

SEQ ID NO: 185583 - DNA, 20 bp, Artificial Sequence
  Synthetic oligonucleotide; CAG chr2 60450096 60450115 60450099 -
ggagtgcagtggcaaggact

SEQ ID NO: 185584 - DNA, 20 bp, Artificial Sequence
  Synthetic oligonucleotide; TGG chr2 60450072 60450091 60450075 -
tcaccacaacctccgcctac

SEQ ID NO: 185585 - DNA, 20 bp, Artificial Sequence
  Synthetic oligonucleotide; GGG chr2 60450071 60450090 60450074 -
caccacaacctccgcctact

SEQ ID NO: 185586 - DNA, 20 bp, Artificial Sequence
  Synthetic oligonucleotide; AAG chr2 60450065 60450084 60450068 -
aacctccgcctactgggttc

SEQ ID NO: 185587 - DNA, 20 bp, Artificial Sequence
  Synthetic oligonucleotide; AGG chr2 60450064 60450083 60450067 -
acctccgcctactgggttca

SEQ ID NO: 185588 - DNA, 20 bp, Artificial Sequence
  Synthetic oligonucleotide; GGG chr2 60450063 60450082 60450066 -
cctccgcctactgggttcaa

SEQ ID NO: 185589 - DNA, 20 bp, Artificial Sequence
  Synthetic oligonucleotide; CAG chr2 60450048 60450067 60450051 -
ttcaagggatcctcctgcct

SEQ ID NO: 185590 - DNA, 20 bp, Artificial Sequence
  Synthetic oligonucleotide; AAG chr2 60450039 60450058 60450042 -
tcctcctgcctcagcttccc

SEQ ID NO: 185591 - DNA, 20 bp, Artificial Sequence
  Synthetic oligonucleotide; TAG chr2 60450036 60450055 60450039 -
tcctgcctcagcttcccaag

SEQ ID NO: 185592 - DNA, 20 bp, Artificial Sequence
  Synthetic oligonucleotide; TGG chr2 60450032 60450051 60450035 -
gcctcagcttcccaagtagc

SEQ ID NO: 185593 - DNA, 20 bp, Artificial Sequence
  Synthetic oligonucleotide; GGG chr2 60450031 60450050 60450034 -
cctcagcttcccaagtagct

SEQ ID NO: 185594 - DNA, 20 bp, Artificial Sequence
  Synthetic oligonucleotide; CAG chr2 60450024 60450043 60450027 -
ttcccaagtagctgggacta

SEQ ID NO: 185595 - DNA, 20 bp, Artificial Sequence
  Synthetic oligonucleotide; AGG chr2 60450023 60450042 60450026 -
tcccaagtagctgggactac

SEQ ID NO: 185596 - DNA, 20 bp, Artificial Sequence
  Synthetic oligonucleotide; CAG chr2 60450004 60450023 60450007 -
caggcacgcgccaccacgcc

SEQ ID NO: 185597 - DNA, 20 bp, Artificial Sequence
  Synthetic oligonucleotide; TAG chr2 60449982 60450001 60449985 -
gctaatattttttgtatttt

SEQ ID NO: 185598 - DNA, 20 bp, Artificial Sequence
  Synthetic oligonucleotide; TAG chr2 60449979 60449998 60449982 -
aatattttttgtatttttag

SEQ ID NO: 185599 - DNA, 20 bp, Artificial Sequence
  Synthetic oligonucleotide; CGG chr2 60449973 60449992 60449976 -
ttttgtatttttagtagata

SEQ ID NO: 185600 - DNA, 20 bp, Artificial Sequence
  Synthetic oligonucleotide; TAG chr2 60449957 60449976 60449960 -
gatacggcgtttcaccgtgt

SEQ ID NO: 185601 - DNA, 20 bp, Artificial Sequence
  Synthetic oligonucleotide; CAG chr2 60449953 60449972 60449956 -
cggcgtttcaccgtgttagc

SEQ ID NO: 185602 - DNA, 20 bp, Artificial Sequence
  Synthetic oligonucleotide; AGG chr2 60449952 60449971 60449955 -
ggcgtttcaccgtgttagcc

SEQ ID NO: 185603 - DNA, 20 bp, Artificial Sequence
  Synthetic oligonucleotide; TGG chr2 60449948 60449967 60449951 -
tttcaccgtgttagccagga

SEQ ID NO: 185604 - DNA, 20 bp, Artificial Sequence
  Synthetic oligonucleotide; TAG chr2 60449913 60449932 60449916 -
gatctcgtgatccaccctcc

SEQ ID NO: 185605 - DNA, 20 bp, Artificial Sequence
  Synthetic oligonucleotide; AGG chr2 60449912 60449931 60449915 -
atctcgtgatccaccctcct

SEQ ID NO: 185606 - DNA, 20 bp, Artificial Sequence
  Synthetic oligonucleotide; TAG chr2 60449902 60449921 60449905 -
ccaccctcctaggcctccca

SEQ ID NO: 185607 - DNA, 20 bp, Artificial Sequence
  Synthetic oligonucleotide; TGG chr2 60449896 60449915 60449899 -
tcctaggcctcccatagtgc

SEQ ID NO: 185608 - DNA, 20 bp, Artificial Sequence
  Synthetic oligonucleotide; GGG chr2 60449895 60449914 60449898 -
cctaggcctcccatagtgct

SEQ ID NO: 185609 - DNA, 20 bp, Artificial Sequence
  Synthetic oligonucleotide; TAG chr2 60449890 60449909 60449893 -
gcctcccatagtgctgggat

SEQ ID NO: 185610 - DNA, 20 bp, Artificial Sequence
  Synthetic oligonucleotide; GAG chr2 60449888 60449907 60449891 -
ctcccatagtgctgggatta

SEQ ID NO: 185611 - DNA, 20 bp, Artificial Sequence
  Synthetic oligonucleotide; AGG chr2 60449887 60449906 60449890 -
tcccatagtgctgggattag

SEQ ID NO: 185612 - DNA, 20 bp, Artificial Sequence
  Synthetic oligonucleotide; TGG chr2 60449867 60449886 60449870 -
aggcattgcactacctcacc

SEQ ID NO: 185613 - DNA, 20 bp, Artificial Sequence
  Synthetic oligonucleotide; TAG chr2 60449862 60449881 60449865 -
ttgcactacctcacctggcc

SEQ ID NO: 185614 - DNA, 20 bp, Artificial Sequence
  Synthetic oligonucleotide; AGG chr2 60449861 60449880 60449864 -
tgcactacctcacctggcct

SEQ ID NO: 185615 - DNA, 20 bp, Artificial Sequence
  Synthetic oligonucleotide; GGG chr2 60449860 60449879 60449863 -
gcactacctcacctggccta

SEQ ID NO: 185616 - DNA, 20 bp, Artificial Sequence
  Synthetic oligonucleotide; TAG chr2 60449856 60449875 60449859 -
tacctcacctggcctagggc

SEQ ID NO: 185617 - DNA, 20 bp, Artificial Sequence
  Synthetic oligonucleotide; AAG chr2 60449835 60449854 60449838 -
agacttttgaaaccccatac

SEQ ID NO: 185618 - DNA, 20 bp, Artificial Sequence
  Synthetic oligonucleotide; TGG chr2 60449822 60449841 60449825 -
cccatacaagattgacaatt

SEQ ID NO: 185619 - DNA, 20 bp, Artificial Sequence
  Synthetic oligonucleotide; GGG chr2 60449821 60449840 60449824 -
ccatacaagattgacaattt

SEQ ID NO: 185620 - DNA, 20 bp, Artificial Sequence
  Synthetic oligonucleotide; AAG chr2 60449818 60449837 60449821 -
tacaagattgacaatttggg

SEQ ID NO: 185621 - DNA, 20 bp, Artificial Sequence
  Synthetic oligonucleotide; GAG chr2 60449798 60449817 60449801 -
aagacatctctctgtgtgat

SEQ ID NO: 185622 - DNA, 20 bp, Artificial Sequence
  Synthetic oligonucleotide; AAG chr2 60449793 60449812 60449796 -
atctctctgtgtgatgagtc

SEQ ID NO: 185623 - DNA, 20 bp, Artificial Sequence
  Synthetic oligonucleotide; TGG chr2 60449786 60449805 60449789 -
tgtgtgatgagtcaagatca

SEQ ID NO: 185624 - DNA, 20 bp, Artificial Sequence
  Synthetic oligonucleotide; TGG chr2 60449772 60449791 60449775 -
agatcatggttatccatgaa

SEQ ID NO: 185625 - DNA, 20 bp, Artificial Sequence
  Synthetic oligonucleotide; CAG chr2 60449769 60449788 60449772 -
tcatggttatccatgaatgg

SEQ ID NO: 185626 - DNA, 20 bp, Artificial Sequence
  Synthetic oligonucleotide; AAG chr2 60449766 60449785 60449769 -
tggttatccatgaatggcag

SEQ ID NO: 185627 - DNA, 20 bp, Artificial Sequence
  Synthetic oligonucleotide; CAG chr2 60449763 60449782 60449766 -
ttatccatgaatggcagaag

SEQ ID NO: 185628 - DNA, 20 bp, Artificial Sequence
  Synthetic oligonucleotide; AGG chr2 60449762 60449781 60449765 -
tatccatgaatggcagaagc

SEQ ID NO: 185629 - DNA, 20 bp, Artificial Sequence
  Synthetic oligonucleotide; GGG chr2 60449761 60449780 60449764 -
atccatgaatggcagaagca

SEQ ID NO: 185630 - DNA, 20 bp, Artificial Sequence
  Synthetic oligonucleotide; AAG chr2 60449758 60449777 60449761 -
catgaatggcagaagcaggg

SEQ ID NO: 185631 - DNA, 20 bp, Artificial Sequence
  Synthetic oligonucleotide; GAG chr2 60449756 60449775 60449759 -
tgaatggcagaagcagggaa

SEQ ID NO: 185632 - DNA, 20 bp, Artificial Sequence
  Synthetic oligonucleotide; AGG chr2 60449755 60449774 60449758 -
gaatggcagaagcagggaag

SEQ ID NO: 185633 - DNA, 20 bp, Artificial Sequence
  Synthetic oligonucleotide; CAG chr2 60449739 60449758 60449742 -
gaagaggctcacaaatctgc

SEQ ID NO: 185634 - DNA, 20 bp, Artificial Sequence
  Synthetic oligonucleotide; AGG chr2 60449738 60449757 60449741 -
aagaggctcacaaatctgcc

SEQ ID NO: 185635 - DNA, 20 bp, Artificial Sequence
  Synthetic oligonucleotide; GGG chr2 60449737 60449756 60449740 -
agaggctcacaaatctgcca

SEQ ID NO: 185636 - DNA, 20 bp, Artificial Sequence
  Synthetic oligonucleotide; GGG chr2 60449736 60449755 60449739 -
gaggctcacaaatctgccag

SEQ ID NO: 185637 - DNA, 20 bp, Artificial Sequence
  Synthetic oligonucleotide; CAG chr2 60449713 60449732 60449716 -
ttctcactgtgtcctctctg

SEQ ID NO: 185638 - DNA, 20 bp, Artificial Sequence
  Synthetic oligonucleotide; GAG chr2 60449711 60449730 60449714 -
ctcactgtgtcctctctgca

SEQ ID NO: 185639 - DNA, 20 bp, Artificial Sequence
  Synthetic oligonucleotide; TGG chr2 60449708 60449727 60449711 -
actgtgtcctctctgcagag

SEQ ID NO: 185640 - DNA, 20 bp, Artificial Sequence
  Synthetic oligonucleotide; CAG chr2 60449700 60449719 60449703 -
ctctctgcagagtggaactt

SEQ ID NO: 185641 - DNA, 20 bp, Artificial Sequence
  Synthetic oligonucleotide; CAG chr2 60449693 60449712 60449696 -
cagagtggaacttcagattg

SEQ ID NO: 185642 - DNA, 20 bp, Artificial Sequence
  Synthetic oligonucleotide; GAG chr2 60449691 60449710 60449694 -
gagtggaacttcagattgca

SEQ ID NO: 185643 - DNA, 20 bp, Artificial Sequence
  Synthetic oligonucleotide; GAG chr2 60449689 60449708 60449692 -
gtggaacttcagattgcaga

SEQ ID NO: 185644 - DNA, 20 bp, Artificial Sequence
  Synthetic oligonucleotide; TGG chr2 60449680 60449699 60449683 -
cagattgcagagagataaat

SEQ ID NO: 185645 - DNA, 20 bp, Artificial Sequence
  Synthetic oligonucleotide; GAG chr2 60449666 60449685 60449669 -
ataaattggttgcctgacat

SEQ ID NO: 185646 - DNA, 20 bp, Artificial Sequence
  Synthetic oligonucleotide; CAG chr2 60449661 60449680 60449664 -
ttggttgcctgacatgagca

SEQ ID NO: 185647 - DNA, 20 bp, Artificial Sequence
  Synthetic oligonucleotide; TAG chr2 60449656 60449675 60449659 -
tgcctgacatgagcacagac

SEQ ID NO: 185648 - DNA, 20 bp, Artificial Sequence
  Synthetic oligonucleotide; GAG chr2 60449654 60449673 60449657 -
cctgacatgagcacagacta

SEQ ID NO: 185649 - DNA, 20 bp, Artificial Sequence
  Synthetic oligonucleotide; AGG chr2 60449653 60449672 60449656 -
ctgacatgagcacagactag

SEQ ID NO: 185650 - DNA, 20 bp, Artificial Sequence
  Synthetic oligonucleotide; CAG chr2 60449649 60449668 60449652 -
catgagcacagactagagga

SEQ ID NO: 185651 - DNA, 20 bp, Artificial Sequence
  Synthetic oligonucleotide; GAG chr2 60449647 60449666 60449650 -
tgagcacagactagaggaca

SEQ ID NO: 185652 - DNA, 20 bp, Artificial Sequence
  Synthetic oligonucleotide; CAG chr2 60449641 60449660 60449644 -
cagactagaggacagagtcc

SEQ ID NO: 185653 - DNA, 20 bp, Artificial Sequence
  Synthetic oligonucleotide; TGG chr2 60449633 60449652 60449636 -
aggacagagtcccagccact

SEQ ID NO: 185654 - DNA, 20 bp, Artificial Sequence
  Synthetic oligonucleotide; TGG chr2 60449629 60449648 60449632 -
cagagtcccagccacttgga

SEQ ID NO: 185655 - DNA, 20 bp, Artificial Sequence
  Synthetic oligonucleotide; GAG chr2 60449627 60449646 60449630 -
gagtcccagccacttggatg

SEQ ID NO: 185656 - DNA, 20 bp, Artificial Sequence
  Synthetic oligonucleotide; AGG chr2 60449626 60449645 60449629 -
agtcccagccacttggatgg

SEQ ID NO: 185657 - DNA, 20 bp, Artificial Sequence
  Synthetic oligonucleotide; GAG chr2 60449624 60449643 60449627 -
tcccagccacttggatggag

SEQ ID NO: 185658 - DNA, 20 bp, Artificial Sequence
  Synthetic oligonucleotide; CAG chr2 60449613 60449632 60449616 -
tggatggaggagaccaaata

SEQ ID NO: 185659 - DNA, 20 bp, Artificial Sequence
  Synthetic oligonucleotide; AGG chr2 60449612 60449631 60449615 -
ggatggaggagaccaaatac

SEQ ID NO: 185660 - DNA, 20 bp, Artificial Sequence
  Synthetic oligonucleotide; GGG chr2 60449611 60449630 60449614 -
gatggaggagaccaaataca

SEQ ID NO: 185661 - DNA, 20 bp, Artificial Sequence
  Synthetic oligonucleotide; AAG chr2 60449590 60449609 60449593 -
ggcattgtttttactttccc

SEQ ID NO: 185662 - DNA, 20 bp, Artificial Sequence
  Synthetic oligonucleotide; TGG chr2 60449580 60449599 60449583 -
ttactttcccaagccttttg

SEQ ID NO: 185663 - DNA, 20 bp, Artificial Sequence
  Synthetic oligonucleotide; GGG chr2 60449579 60449598 60449582 -
tactttcccaagccttttgt

SEQ ID NO: 185664 - DNA, 20 bp, Artificial Sequence
  Synthetic oligonucleotide; CAG chr2 60449571 60449590 60449574 -
caagccttttgtgggctgtt

SEQ ID NO: 185665 - DNA, 20 bp, Artificial Sequence
  Synthetic oligonucleotide; GAG chr2 60449517 60449536 60449520 -
ttattattattattattgtt

SEQ ID NO: 185666 - DNA, 20 bp, Artificial Sequence
  Synthetic oligonucleotide; TGG chr2 60449513 60449532 60449516 -
tattattattattgttgaga

SEQ ID NO: 185667 - DNA, 20 bp, Artificial Sequence
  Synthetic oligonucleotide; GAG chr2 60449511 60449530 60449514 -
ttattattattgttgagatg

SEQ ID NO: 185668 - DNA, 20 bp, Artificial Sequence
  Synthetic oligonucleotide; CAG chr2 60449493 60449512 60449496 -
tggagtctcactctattgcc

SEQ ID NO: 185669 - DNA, 20 bp, Artificial Sequence
  Synthetic oligonucleotide; AGG chr2 60449492 60449511 60449495 -
ggagtctcactctattgccc

SEQ ID NO: 185670 - DNA, 20 bp, Artificial Sequence
  Synthetic oligonucleotide; TGG chr2 60449488 60449507 60449491 -
tctcactctattgcccaggc

SEQ ID NO: 185671 - DNA, 20 bp, Artificial Sequence
  Synthetic oligonucleotide; GAG chr2 60449486 60449505 60449489 -
tcactctattgcccaggctg

SEQ ID NO: 185672 - DNA, 20 bp, Artificial Sequence
  Synthetic oligonucleotide; TGG chr2 60449478 60449497 60449481 -
ttgcccaggctggagtgcaa

SEQ ID NO: 185673 - DNA, 20 bp, Artificial Sequence
  Synthetic oligonucleotide; TGG chr2 60449467 60449486 60449470 -
ggagtgcaatggcacgatct

SEQ ID NO: 185674 - DNA, 20 bp, Artificial Sequence
  Synthetic oligonucleotide; CGG chr2 60449443 60449462 60449446 -
tcactgcaacctctacctcc

SEQ ID NO: 185675 - DNA, 20 bp, Artificial Sequence
  Synthetic oligonucleotide; GGG chr2 60449442 60449461 60449445 -
cactgcaacctctacctccc

SEQ ID NO: 185676 - DNA, 20 bp, Artificial Sequence
  Synthetic oligonucleotide; AAG chr2 60449436 60449455 60449439 -
aacctctacctcccgggttc

SEQ ID NO: 185677 - DNA, 20 bp, Artificial Sequence
  Synthetic oligonucleotide; TGG chr2 60449433 60449452 60449436 -
ctctacctcccgggttcaag

SEQ ID NO: 185678 - DNA, 20 bp, Artificial Sequence
  Synthetic oligonucleotide; CAG chr2 60449419 60449438 60449422 -
ttcaagtggttctcctgcct

SEQ ID NO: 185679 - DNA, 20 bp, Artificial Sequence
  Synthetic oligonucleotide; GAG chr2 60449410 60449429 60449413 -
ttctcctgcctcagcctcct

SEQ ID NO: 185680 - DNA, 20 bp, Artificial Sequence
  Synthetic oligonucleotide; TGG chr2 60449407 60449426 60449410 -
tcctgcctcagcctcctgag

SEQ ID NO: 185681 - DNA, 20 bp, Artificial Sequence
  Synthetic oligonucleotide; TGG chr2 60449403 60449422 60449406 -
gcctcagcctcctgagtggc

SEQ ID NO: 185682 - DNA, 20 bp, Artificial Sequence
  Synthetic oligonucleotide; GGG chr2 60449402 60449421 60449405 -
cctcagcctcctgagtggct

SEQ ID NO: 185683 - DNA, 20 bp, Artificial Sequence
  Synthetic oligonucleotide; CAG chr2 60449395 60449414 60449398 -
ctcctgagtggctgggatta

SEQ ID NO: 185684 - DNA, 20 bp, Artificial Sequence
  Synthetic oligonucleotide; AGG chr2 60449394 60449413 60449397 -
tcctgagtggctgggattac

SEQ ID NO: 185685 - DNA, 20 bp, Artificial Sequence
  Synthetic oligonucleotide; TGG chr2 60449380 60449399 60449383 -
gattacaggtgcgtaccacc

SEQ ID NO: 185686 - DNA, 20 bp, Artificial Sequence
  Synthetic oligonucleotide; TAG chr2 60449361 60449380 60449364 -
ctggctaatttttgtatttt

SEQ ID NO: 185687 - DNA, 20 bp, Artificial Sequence
  Synthetic oligonucleotide; TAG chr2 60449358 60449377 60449361 -
gctaatttttgtatttttag

SEQ ID NO: 185688 - DNA, 20 bp, Artificial Sequence
  Synthetic oligonucleotide; GAG chr2 60449356 60449375 60449359 -
taatttttgtatttttagta

SEQ ID NO: 185689 - DNA, 20 bp, Artificial Sequence
  Synthetic oligonucleotide; CGG chr2 60449352 60449371 60449355 -
ttttgtatttttagtagaga

SEQ ID NO: 185690 - DNA, 20 bp, Artificial Sequence
  Synthetic oligonucleotide; GGG chr2 60449351 60449370 60449354 -
tttgtatttttagtagagac

SEQ ID NO: 185691 - DNA, 20 bp, Artificial Sequence
  Synthetic oligonucleotide; GGG chr2 60449350 60449369 60449353 -
ttgtatttttagtagagacg

SEQ ID NO: 185692 - DNA, 20 bp, Artificial Sequence
  Synthetic oligonucleotide; TGG chr2 60449336 60449355 60449339 -
gagacggggtttcaccatgt

SEQ ID NO: 185693 - DNA, 20 bp, Artificial Sequence
  Synthetic oligonucleotide; CAG chr2 60449332 60449351 60449335 -
cggggtttcaccatgttggt

SEQ ID NO: 185694 - DNA, 20 bp, Artificial Sequence
  Synthetic oligonucleotide; AGG chr2 60449331 60449350 60449334 -
ggggtttcaccatgttggtc

SEQ ID NO: 185695 - DNA, 20 bp, Artificial Sequence
  Synthetic oligonucleotide; TGG chr2 60449327 60449346 60449330 -
tttcaccatgttggtcaggc

SEQ ID NO: 185696 - DNA, 20 bp, Artificial Sequence
  Synthetic oligonucleotide; GAG chr2 60449304 60449323 60449307 -
tctcgaactcctgacctcat

SEQ ID NO: 185697 - DNA, 20 bp, Artificial Sequence
  Synthetic oligonucleotide; CGG chr2 60449291 60449310 60449294 -
acctcatgagccacctgcct

SEQ ID NO: 185698 - DNA, 20 bp, Artificial Sequence
  Synthetic oligonucleotide; AAG chr2 60449281 60449300 60449284 -
ccacctgcctcggcctccca

SEQ ID NO: 185699 - DNA, 20 bp, Artificial Sequence
  Synthetic oligonucleotide; TGG chr2 60449275 60449294 60449278 -
gcctcggcctcccaaagtgc

SEQ ID NO: 185700 - DNA, 20 bp, Artificial Sequence
  Synthetic oligonucleotide; GGG chr2 60449274 60449293 60449277 -
cctcggcctcccaaagtgct

SEQ ID NO: 185701 - DNA, 20 bp, Artificial Sequence
  Synthetic oligonucleotide; CAG chr2 60449267 60449286 60449270 -
ctcccaaagtgctgggatta

SEQ ID NO: 185702 - DNA, 20 bp, Artificial Sequence
  Synthetic oligonucleotide; AGG chr2 60449266 60449285 60449269 -
tcccaaagtgctgggattac

SEQ ID NO: 185703 - DNA, 20 bp, Artificial Sequence
  Synthetic oligonucleotide; AAG chr2 60449260 60449279 60449263 -
agtgctgggattacaggtgt

SEQ ID NO: 185704 - DNA, 20 bp, Artificial Sequence
  Synthetic oligonucleotide; CGG chr2 60449247 60449266 60449250 -
caggtgtaagccaccgcgcc

SEQ ID NO: 185705 - DNA, 20 bp, Artificial Sequence
  Synthetic oligonucleotide; CAG chr2 60449243 60449262 60449246 -
tgtaagccaccgcgcccgga

SEQ ID NO: 185706 - DNA, 20 bp, Artificial Sequence
  Synthetic oligonucleotide; AAG chr2 60449221 60449240 60449224 -
gattattacactgtataaaa

SEQ ID NO: 185707 - DNA, 20 bp, Artificial Sequence
  Synthetic oligonucleotide; AGG chr2 60449220 60449239 60449223 -
attattacactgtataaaaa

SEQ ID NO: 185708 - DNA, 20 bp, Artificial Sequence
  Synthetic oligonucleotide; TAG chr2 60449212 60449231 60449215 -
actgtataaaaaaggtctgt

SEQ ID NO: 185709 - DNA, 20 bp, Artificial Sequence
  Synthetic oligonucleotide; TGG chr2 60449206 60449225 60449209 -
taaaaaaggtctgttagaat

SEQ ID NO: 185710 - DNA, 20 bp, Artificial Sequence
  Synthetic oligonucleotide; GGG chr2 60449205 60449224 60449208 -
aaaaaaggtctgttagaatt

SEQ ID NO: 185711 - DNA, 20 bp, Artificial Sequence
  Synthetic oligonucleotide; GGG chr2 60449204 60449223 60449207 -
aaaaaggtctgttagaattg

SEQ ID NO: 185712 - DNA, 20 bp, Artificial Sequence
  Synthetic oligonucleotide; TGG chr2 60449194 60449213 60449197 -
gttagaattggggtccatga

SEQ ID NO: 185713 - DNA, 20 bp, Artificial Sequence
  Synthetic oligonucleotide; GGG chr2 60449193 60449212 60449196 -
ttagaattggggtccatgat

SEQ ID NO: 185714 - DNA, 20 bp, Artificial Sequence
  Synthetic oligonucleotide; GAG chr2 60449191 60449210 60449194 -
agaattggggtccatgatgg

SEQ ID NO: 185715 - DNA, 20 bp, Artificial Sequence
  Synthetic oligonucleotide; GAG chr2 60449189 60449208 60449192 -
aattggggtccatgatggga

SEQ ID NO: 185716 - DNA, 20 bp, Artificial Sequence
  Synthetic oligonucleotide; AAG chr2 60449185 60449204 60449188 -
ggggtccatgatgggagaga

SEQ ID NO: 185717 - DNA, 20 bp, Artificial Sequence
  Synthetic oligonucleotide; AAG chr2 60449175 60449194 60449178 -
atgggagagaaagacactca

SEQ ID NO: 185718 - DNA, 20 bp, Artificial Sequence
  Synthetic oligonucleotide; CAG chr2 60449166 60449185 60449169 -
aaagacactcaaagcccctg

SEQ ID NO: 185719 - DNA, 20 bp, Artificial Sequence
  Synthetic oligonucleotide; CAG chr2 60449159 60449178 60449162 -
ctcaaagcccctgcagcacc

SEQ ID NO: 185720 - DNA, 20 bp, Artificial Sequence
  Synthetic oligonucleotide; CAG chr2 60449152 60449171 60449155 -
cccctgcagcacccagcatc

SEQ ID NO: 185721 - DNA, 20 bp, Artificial Sequence
  Synthetic oligonucleotide; CAG chr2 60449137 60449156 60449140 -
gcatccagcatgttgaatat

SEQ ID NO: 185722 - DNA, 20 bp, Artificial Sequence
  Synthetic oligonucleotide; GAG chr2 60449127 60449146 60449130 -
tgttgaatatcagcctgttt

SEQ ID NO: 185723 - DNA, 20 bp, Artificial Sequence
  Synthetic oligonucleotide; CAG chr2 60449105 60449124 60449108 -
gaaataattgtttcaaaaac

SEQ ID NO: 185724 - DNA, 20 bp, Artificial Sequence
  Synthetic oligonucleotide; AAG chr2 60449092 60449111 60449095 -
caaaaaccagtgatcattta

SEQ ID NO: 185725 - DNA, 20 bp, Artificial Sequence
  Synthetic oligonucleotide; TAG chr2 60449081 60449100 60449084 -
gatcatttaaagaaaactct

SEQ ID NO: 185726 - DNA, 20 bp, Artificial Sequence
  Synthetic oligonucleotide; AGG chr2 60449080 60449099 60449083 -
atcatttaaagaaaactctt

SEQ ID NO: 185727 - DNA, 20 bp, Artificial Sequence
  Synthetic oligonucleotide; AAG chr2 60449076 60449095 60449079 -
tttaaagaaaactcttaggc

SEQ ID NO: 185728 - DNA, 20 bp, Artificial Sequence
  Synthetic oligonucleotide; AGG chr2 60449075 60449094 60449078 -
ttaaagaaaactcttaggca

SEQ ID NO: 185729 - DNA, 20 bp, Artificial Sequence
  Synthetic oligonucleotide; GAG chr2 60449073 60449092 60449076 -
aaagaaaactcttaggcaag

SEQ ID NO: 185730 - DNA, 20 bp, Artificial Sequence
  Synthetic oligonucleotide; TGG chr2 60449062 60449081 60449065 -
ttaggcaaggagtgcaatct

SEQ ID NO: 185731 - DNA, 20 bp, Artificial Sequence
  Synthetic oligonucleotide; GAG chr2 60449051 60449070 60449054 -
gtgcaatcttggaatctgct

SEQ ID NO: 185732 - DNA, 20 bp, Artificial Sequence
  Synthetic oligonucleotide; AGG chr2 60449050 60449069 60449053 -
tgcaatcttggaatctgctg

SEQ ID NO: 185733 - DNA, 20 bp, Artificial Sequence
  Synthetic oligonucleotide; GAG chr2 60449040 60449059 60449043 -
gaatctgctgaggtctaact

SEQ ID NO: 185734 - DNA, 20 bp, Artificial Sequence
  Synthetic oligonucleotide; TGG chr2 60449025 60449044 60449028 -
taactgagtgccccaaacct

SEQ ID NO: 185735 - DNA, 20 bp, Artificial Sequence
  Synthetic oligonucleotide; CAG chr2 60449022 60449041 60449025 -
ctgagtgccccaaaccttgg

SEQ ID NO: 185736 - DNA, 20 bp, Artificial Sequence
  Synthetic oligonucleotide; TGG chr2 60449010 60449029 60449013 -
aaccttggcagcatattttc

SEQ ID NO: 185737 - DNA, 20 bp, Artificial Sequence
  Synthetic oligonucleotide; GGG chr2 60449009 60449028 60449012 -
accttggcagcatattttct

SEQ ID NO: 185738 - DNA, 20 bp, Artificial Sequence
  Synthetic oligonucleotide; TGG chr2 60448996 60449015 60448999 -
attttctgggcacttttgct

SEQ ID NO: 185739 - DNA, 20 bp, Artificial Sequence
  Synthetic oligonucleotide; GAG chr2 60448994 60449013 60448997 -
tttctgggcacttttgcttg

SEQ ID NO: 185740 - DNA, 20 bp, Artificial Sequence
  Synthetic oligonucleotide; AAG chr2 60448986 60449005 60448989 -
cacttttgcttggagtttcc

SEQ ID NO: 185741 - DNA, 20 bp, Artificial Sequence
  Synthetic oligonucleotide; GAG chr2 60448984 60449003 60448987 -
cttttgcttggagtttccaa

SEQ ID NO: 185742 - DNA, 20 bp, Artificial Sequence
  Synthetic oligonucleotide; CAG chr2 60448977 60448996 60448980 -
ttggagtttccaagagcatt

SEQ ID NO: 185743 - DNA, 20 bp, Artificial Sequence
  Synthetic oligonucleotide; AAG chr2 60448965 60448984 60448968 -
agagcattcagattaaaacc

SEQ ID NO: 185744 - DNA, 20 bp, Artificial Sequence
  Synthetic oligonucleotide; AAG chr2 60448956 60448975 60448959 -
agattaaaaccaagcccttc

SEQ ID NO: 185745 - DNA, 20 bp, Artificial Sequence
  Synthetic oligonucleotide; TGG chr2 60448953 60448972 60448956 -
ttaaaaccaagcccttcaag

SEQ ID NO: 185746 - DNA, 20 bp, Artificial Sequence
  Synthetic oligonucleotide; CAG chr2 60448949 60448968 60448952 -
aaccaagcccttcaagtggt

SEQ ID NO: 185747 - DNA, 20 bp, Artificial Sequence
  Synthetic oligonucleotide; AGG chr2 60448948 60448967 60448951 -
accaagcccttcaagtggtc

SEQ ID NO: 185748 - DNA, 20 bp, Artificial Sequence
  Synthetic oligonucleotide; CAG chr2 60448936 60448955 60448939 -
aagtggtcaggaatatcttt

SEQ ID NO: 185749 - DNA, 20 bp, Artificial Sequence
  Synthetic oligonucleotide; AGG chr2 60448935 60448954 60448938 -
agtggtcaggaatatctttc

SEQ ID NO: 185750 - DNA, 20 bp, Artificial Sequence
  Synthetic oligonucleotide; TAG chr2 60448895 60448914 60448898 -
tgatttttttttttttttga

SEQ ID NO: 185751 - DNA, 20 bp, Artificial Sequence
  Synthetic oligonucleotide; GAG chr2 60448891 60448910 60448894 -
ttttttttttttttgatagt

SEQ ID NO: 185752 - DNA, 20 bp, Artificial Sequence
  Synthetic oligonucleotide; AGG chr2 60448890 60448909 60448893 -
tttttttttttttgatagtg

SEQ ID NO: 185753 - DNA, 20 bp, Artificial Sequence
  Synthetic oligonucleotide; AAG chr2 60448875 60448894 60448878 -
tagtgaggttaacattgacg

SEQ ID NO: 185754 - DNA, 20 bp, Artificial Sequence
  Synthetic oligonucleotide; TGG chr2 60448871 60448890 60448874 -
gaggttaacattgacgaaga

SEQ ID NO: 185755 - DNA, 20 bp, Artificial Sequence
  Synthetic oligonucleotide; CAG chr2 60448813 60448832 60448816 -
ataattcttattttataaat

SEQ ID NO: 185756 - DNA, 20 bp, Artificial Sequence
  Synthetic oligonucleotide; CGG chr2 60448804 60448823 60448807 -
attttataaatcagtgtccc

SEQ ID NO: 185757 - DNA, 20 bp, Artificial Sequence
  Synthetic oligonucleotide; AAG chr2 60448801 60448820 60448804 -
ttataaatcagtgtccccgg

SEQ ID NO: 185758 - DNA, 20 bp, Artificial Sequence
  Synthetic oligonucleotide; TAG chr2 60448795 60448814 60448798 -
atcagtgtccccggaagtaa

SEQ ID NO: 185759 - DNA, 20 bp, Artificial Sequence
  Synthetic oligonucleotide; TAG chr2 60448792 60448811 60448795 -
agtgtccccggaagtaatag

SEQ ID NO: 185760 - DNA, 20 bp, Artificial Sequence
  Synthetic oligonucleotide; AGG chr2 60448791 60448810 60448794 -
gtgtccccggaagtaatagt

SEQ ID NO: 185761 - DNA, 20 bp, Artificial Sequence
  Synthetic oligonucleotide; TAG chr2 60448786 60448805 60448789 -
cccggaagtaatagtaggat

SEQ ID NO: 185762 - DNA, 20 bp, Artificial Sequence
  Synthetic oligonucleotide; TGG chr2 60448781 60448800 60448784 -
aagtaatagtaggattagaa

SEQ ID NO: 185763 - DNA, 20 bp, Artificial Sequence
  Synthetic oligonucleotide; AAG chr2 60448778 60448797 60448781 -
taatagtaggattagaatgg

SEQ ID NO: 185764 - DNA, 20 bp, Artificial Sequence
  Synthetic oligonucleotide; TAG chr2 60448768 60448787 60448771 -
attagaatggaagtattttg

SEQ ID NO: 185765 - DNA, 20 bp, Artificial Sequence
  Synthetic oligonucleotide; AGG chr2 60448767 60448786 60448770 -
ttagaatggaagtattttgt

SEQ ID NO: 185766 - DNA, 20 bp, Artificial Sequence
  Synthetic oligonucleotide; TGG chr2 60448760 60448779 60448763 -
ggaagtattttgtaggctgt

SEQ ID NO: 185767 - DNA, 20 bp, Artificial Sequence
  Synthetic oligonucleotide; CAG chr2 60448746 60448765 60448749 -
ggctgttggttctgttctta

SEQ ID NO: 185768 - DNA, 20 bp, Artificial Sequence
  Synthetic oligonucleotide; TAG chr2 60448734 60448753 60448737 -
tgttcttacagtatgccaca

SEQ ID NO: 185769 - DNA, 20 bp, Artificial Sequence
  Synthetic oligonucleotide; TGG chr2 60448718 60448737 60448721 -
cacatagctttgactccttt

SEQ ID NO: 185770 - DNA, 20 bp, Artificial Sequence
  Synthetic oligonucleotide; GAG chr2 60448716 60448735 60448719 -
catagctttgactccttttg

SEQ ID NO: 185771 - DNA, 20 bp, Artificial Sequence
  Synthetic oligonucleotide; TAG chr2 60448711 60448730 60448714 -
ctttgactccttttggagta

SEQ ID NO: 185772 - DNA, 20 bp, Artificial Sequence
  Synthetic oligonucleotide; AAG chr2 60448704 60448723 60448707 -
tccttttggagtatagtgtg

SEQ ID NO: 185773 - DNA, 20 bp, Artificial Sequence
  Synthetic oligonucleotide; AGG chr2 60448703 60448722 60448706 -
ccttttggagtatagtgtga

SEQ ID NO: 185774 - DNA, 20 bp, Artificial Sequence
  Synthetic oligonucleotide; AAG chr2 60448700 60448719 60448703 -
tttggagtatagtgtgaagg

SEQ ID NO: 185775 - DNA, 20 bp, Artificial Sequence
  Synthetic oligonucleotide; CAG chr2 60448697 60448716 60448700 -
ggagtatagtgtgaaggaag

SEQ ID NO: 185776 - DNA, 20 bp, Artificial Sequence
  Synthetic oligonucleotide; GAG chr2 60448690 60448709 60448693 -
agtgtgaaggaagcagattt

SEQ ID NO: 185777 - DNA, 20 bp, Artificial Sequence
  Synthetic oligonucleotide; AGG chr2 60448689 60448708 60448692 -
gtgtgaaggaagcagatttg

SEQ ID NO: 185778 - DNA, 20 bp, Artificial Sequence
  Synthetic oligonucleotide; GAG chr2 60448680 60448699 60448683 -
aagcagatttgaggaatttt

SEQ ID NO: 185779 - DNA, 20 bp, Artificial Sequence
  Synthetic oligonucleotide; TGG chr2 60448675 60448694 60448678 -
gatttgaggaattttgagtc

SEQ ID NO: 185780 - DNA, 20 bp, Artificial Sequence
  Synthetic oligonucleotide; TGG chr2 60448672 60448691 60448675 -
ttgaggaattttgagtctgg

SEQ ID NO: 185781 - DNA, 20 bp, Artificial Sequence
  Synthetic oligonucleotide; AAG chr2 60448669 60448688 60448672 -
aggaattttgagtctggtgg

SEQ ID NO: 185782 - DNA, 20 bp, Artificial Sequence
  Synthetic oligonucleotide; TGG chr2 60448654 60448673 60448657 -
ggtggaagttccaaaataac

SEQ ID NO: 185783 - DNA, 20 bp, Artificial Sequence
  Synthetic oligonucleotide; AAG chr2 60448645 60448664 60448648 -
tccaaaataactggtgatgc

SEQ ID NO: 185784 - DNA, 20 bp, Artificial Sequence
  Synthetic oligonucleotide; AAG chr2 60448626 60448645 60448629 -
caagcacaccttccttcttc

SEQ ID NO: 185785 - DNA, 20 bp, Artificial Sequence
  Synthetic oligonucleotide; GAG chr2 60448624 60448643 60448627 -
agcacaccttccttcttcaa

SEQ ID NO: 185786 - DNA, 20 bp, Artificial Sequence
  Synthetic oligonucleotide; GAG chr2 60448613 60448632 60448616 -
cttcttcaagagttcatctt

SEQ ID NO: 185787 - DNA, 20 bp, Artificial Sequence
  Synthetic oligonucleotide; CAG chr2 60448602 60448621 60448605 -
gttcatcttgagttcctaac

SEQ ID NO: 185788 - DNA, 20 bp, Artificial Sequence
  Synthetic oligonucleotide; CAG chr2 60448599 60448618 60448602 -
catcttgagttcctaaccag

SEQ ID NO: 185789 - DNA, 20 bp, Artificial Sequence
  Synthetic oligonucleotide; GAG chr2 60448597 60448616 60448600 -
tcttgagttcctaaccagca

SEQ ID NO: 185790 - DNA, 20 bp, Artificial Sequence
  Synthetic oligonucleotide; TAG chr2 60448562 60448581 60448565 -
atttctttcctctgactgcc

SEQ ID NO: 185791 - DNA, 20 bp, Artificial Sequence
  Synthetic oligonucleotide; AGG chr2 60448561 60448580 60448564 -
tttctttcctctgactgcct

SEQ ID NO: 185792 - DNA, 20 bp, Artificial Sequence
  Synthetic oligonucleotide; GAG chr2 60448559 60448578 60448562 -
tctttcctctgactgcctag

SEQ ID NO: 185793 - DNA, 20 bp, Artificial Sequence
  Synthetic oligonucleotide; GAG chr2 60448557 60448576 60448560 -
tttcctctgactgcctagga

SEQ ID NO: 185794 - DNA, 20 bp, Artificial Sequence
  Synthetic oligonucleotide; CAG chr2 60448553 60448572 60448556 -
ctctgactgcctaggagaga

SEQ ID NO: 185795 - DNA, 20 bp, Artificial Sequence
  Synthetic oligonucleotide; CAG chr2 60448543 60448562 60448546 -
ctaggagagacagtactctt

SEQ ID NO: 185796 - DNA, 20 bp, Artificial Sequence
  Synthetic oligonucleotide; TGG chr2 60448528 60448547 60448531 -
ctcttcagtttgcattcccc

SEQ ID NO: 185797 - DNA, 20 bp, Artificial Sequence
  Synthetic oligonucleotide; GAG chr2 60448526 60448545 60448529 -
cttcagtttgcattcccctg

SEQ ID NO: 185798 - DNA, 20 bp, Artificial Sequence
  Synthetic oligonucleotide; AAG chr2 60448516 60448535 60448519 -
cattcccctggagttacatt

SEQ ID NO: 185799 - DNA, 20 bp, Artificial Sequence
  Synthetic oligonucleotide; TGG chr2 60448510 60448529 60448513 -
cctggagttacattaagtca

SEQ ID NO: 185800 - DNA, 20 bp, Artificial Sequence
  Synthetic oligonucleotide; CAG chr2 60448494 60448513 60448497 -
gtcatggaacttctcacttc

SEQ ID NO: 185801 - DNA, 20 bp, Artificial Sequence
  Synthetic oligonucleotide; CAG chr2 60448484 60448503 60448487 -
ttctcacttccagtaaaatc

SEQ ID NO: 185802 - DNA, 20 bp, Artificial Sequence
  Synthetic oligonucleotide; AAG chr2 60448481 60448500 60448484 -
tcacttccagtaaaatccag

SEQ ID NO: 185803 - DNA, 20 bp, Artificial Sequence
  Synthetic oligonucleotide; CAG chr2 60448478 60448497 60448481 -
cttccagtaaaatccagaag

SEQ ID NO: 185804 - DNA, 20 bp, Artificial Sequence
  Synthetic oligonucleotide; TAG chr2 60448454 60448473 60448457 -
cattgtctgtttttctatct

SEQ ID NO: 185805 - DNA, 20 bp, Artificial Sequence
  Synthetic oligonucleotide; TAG chr2 60448444 60448463 60448447 -
ttttctatcttagtttaaat

SEQ ID NO: 185806 - DNA, 20 bp, Artificial Sequence
  Synthetic oligonucleotide; AGG chr2 60448443 60448462 60448446 -
tttctatcttagtttaaatt

SEQ ID NO: 185807 - DNA, 20 bp, Artificial Sequence
  Synthetic oligonucleotide; TGG chr2 60448420 60448439 60448423 -
atatcttattacgaaccaca

SEQ ID NO: 185808 - DNA, 20 bp, Artificial Sequence
  Synthetic oligonucleotide; CAG chr2 60448382 60448401 60448385 -
tgtattttaaaaaatgctcc

SEQ ID NO: 185809 - DNA, 20 bp, Artificial Sequence
  Synthetic oligonucleotide; AGG chr2 60448381 60448400 60448384 -
gtattttaaaaaatgctccc

SEQ ID NO: 185810 - DNA, 20 bp, Artificial Sequence
  Synthetic oligonucleotide; AAG chr2 60448378 60448397 60448381 -
ttttaaaaaatgctcccagg

SEQ ID NO: 185811 - DNA, 20 bp, Artificial Sequence
  Synthetic oligonucleotide; AAG chr2 60448370 60448389 60448373 -
aatgctcccaggaagtactt

SEQ ID NO: 185812 - DNA, 20 bp, Artificial Sequence
  Synthetic oligonucleotide; TAG chr2 60448362 60448381 60448365 -
caggaagtacttaagcttta

SEQ ID NO: 185813 - DNA, 20 bp, Artificial Sequence
  Synthetic oligonucleotide; TAG chr2 60448340 60448359 60448343 -
gaatacttttatatacatga

SEQ ID NO: 185814 - DNA, 20 bp, Artificial Sequence
  Synthetic oligonucleotide; TAG chr2 60448309 60448328 60448312 -
ttccttgtgattctataaat

SEQ ID NO: 185815 - DNA, 20 bp, Artificial Sequence
  Synthetic oligonucleotide; AAG chr2 60448304 60448323 60448307 -
tgtgattctataaattagat

SEQ ID NO: 185816 - DNA, 20 bp, Artificial Sequence
  Synthetic oligonucleotide; AAG chr2 60448299 60448318 60448302 -
ttctataaattagataagaa

SEQ ID NO: 185817 - DNA, 20 bp, Artificial Sequence
  Synthetic oligonucleotide; TAG chr2 60448294 60448313 60448297 -
taaattagataagaaaagaa

SEQ ID NO: 185818 - DNA, 20 bp, Artificial Sequence
  Synthetic oligonucleotide; AAG chr2 60448287 60448306 60448290 -
gataagaaaagaatagactg

SEQ ID NO: 185819 - DNA, 20 bp, Artificial Sequence
  Synthetic oligonucleotide; AAG chr2 60448280 60448299 60448283 -
aaagaatagactgaagttga

SEQ ID NO: 185820 - DNA, 20 bp, Artificial Sequence
  Synthetic oligonucleotide; AGG chr2 60448279 60448298 60448282 -
aagaatagactgaagttgaa

SEQ ID NO: 185821 - DNA, 20 bp, Artificial Sequence
  Synthetic oligonucleotide; TAG chr2 60448271 60448290 60448274 -
actgaagttgaaaggaatcc

SEQ ID NO: 185822 - DNA, 20 bp, Artificial Sequence
  Synthetic oligonucleotide; TAG chr2 60448255 60448274 60448258 -
atcctagtaatcactcattt

SEQ ID NO: 185823 - DNA, 20 bp, Artificial Sequence
  Synthetic oligonucleotide; GAG chr2 60448253 60448272 60448256 -
cctagtaatcactcatttta

SEQ ID NO: 185824 - DNA, 20 bp, Artificial Sequence
  Synthetic oligonucleotide; CAG chr2 60448248 60448267 60448251 -
taatcactcattttagagat

SEQ ID NO: 185825 - DNA, 20 bp, Artificial Sequence
  Synthetic oligonucleotide; AAG chr2 60448239 60448258 60448242 -
attttagagatcagaataat

SEQ ID NO: 185826 - DNA, 20 bp, Artificial Sequence
  Synthetic oligonucleotide; AGG chr2 60448238 60448257 60448241 -
ttttagagatcagaataata

SEQ ID NO: 185827 - DNA, 20 bp, Artificial Sequence
  Synthetic oligonucleotide; GGG chr2 60448237 60448256 60448240 -
tttagagatcagaataataa

SEQ ID NO: 185828 - DNA, 20 bp, Artificial Sequence
  Synthetic oligonucleotide; AAG chr2 60448230 60448249 60448233 -
atcagaataataagggccca

SEQ ID NO: 185829 - DNA, 20 bp, Artificial Sequence
  Synthetic oligonucleotide; AAG chr2 60448224 60448243 60448227 -
ataataagggcccaaagatt

SEQ ID NO: 185830 - DNA, 20 bp, Artificial Sequence
  Synthetic oligonucleotide; AAG chr2 60448219 60448238 60448222 -
aagggcccaaagattaagtg

SEQ ID NO: 185831 - DNA, 20 bp, Artificial Sequence
  Synthetic oligonucleotide; AAG chr2 60448211 60448230 60448214 -
aaagattaagtgaagtacct

SEQ ID NO: 185832 - DNA, 20 bp, Artificial Sequence
  Synthetic oligonucleotide; CAG chr2 60448204 60448223 60448207 -
aagtgaagtacctaagatca

SEQ ID NO: 185833 - DNA, 20 bp, Artificial Sequence
  Synthetic oligonucleotide; TAG chr2 60448185 60448204 60448188 -
acagtgtgaaaaaaacatca

SEQ ID NO: 185834 - DNA, 20 bp, Artificial Sequence
  Synthetic oligonucleotide; AAG chr2 60448180 60448199 60448183 -
gtgaaaaaaacatcatagcc

SEQ ID NO: 185835 - DNA, 20 bp, Artificial Sequence
  Synthetic oligonucleotide; ATGAGT chr2 60448237 60448256 60448253 +
ttattattctgatctctaaa

SEQ ID NO: 185836 - DNA, 20 bp, Artificial Sequence
  Synthetic oligonucleotide; TAGGAT chr2 60448249 60448268 60448265 +
tctctaaaatgagtgattac

SEQ ID NO: 185837 - DNA, 20 bp, Artificial Sequence
  Synthetic oligonucleotide; TAGAAT chr2 60448294 60448313 60448310 +
ttcttttcttatctaattta

SEQ ID NO: 185838 - DNA, 20 bp, Artificial Sequence
  Synthetic oligonucleotide; CTGGAT chr2 60448461 60448480 60448477 +
aaaacagacaatgactgctt

SEQ ID NO: 185839 - DNA, 20 bp, Artificial Sequence
  Synthetic oligonucleotide; GGGAAT chr2 60448509 60448528 60448525 +
atgacttaatgtaactccag

SEQ ID NO: 185840 - DNA, 20 bp, Artificial Sequence
  Synthetic oligonucleotide; AAGAGT chr2 60448523 60448542 60448539 +
ctccaggggaatgcaaactg

SEQ ID NO: 185841 - DNA, 20 bp, Artificial Sequence
  Synthetic oligonucleotide; AGGAGT chr2 60448700 60448719 60448716 +
ccttcacactatactccaaa

SEQ ID NO: 185842 - DNA, 20 bp, Artificial Sequence
  Synthetic oligonucleotide; AAGAAT chr2 60448804 60448823 60448820 +
gggacactgatttataaaat

SEQ ID NO: 185843 - DNA, 20 bp, Artificial Sequence
  Synthetic oligonucleotide; AAGAAT chr2 60448818 60448837 60448834 +
taaaataagaattataaaat

SEQ ID NO: 185844 - DNA, 20 bp, Artificial Sequence
  Synthetic oligonucleotide; AGGAAT chr2 60448834 60448853 60448850 +
aaataagaatttttaaaaat

SEQ ID NO: 185845 - DNA, 20 bp, Artificial Sequence
  Synthetic oligonucleotide; CTGAAT chr2 60448954 60448973 60448970 +
ttgaagggcttggttttaat

SEQ ID NO: 185846 - DNA, 20 bp, Artificial Sequence
  Synthetic oligonucleotide; AAGAGT chr2 60449060 60449079 60449076 +
caagattgcactccttgcct

SEQ ID NO: 185847 - DNA, 20 bp, Artificial Sequence
  Synthetic oligonucleotide; CTGGAT chr2 60449129 60449148 60449145 +
acaggctgatattcaacatg

SEQ ID NO: 185848 - DNA, 20 bp, Artificial Sequence
  Synthetic oligonucleotide; CTGGGT chr2 60449136 60449155 60449152 +
gatattcaacatgctggatg

SEQ ID NO: 185849 - DNA, 20 bp, Artificial Sequence
  Synthetic oligonucleotide; TTGAGT chr2 60449154 60449173 60449170 +
tgctgggtgctgcaggggct

SEQ ID NO: 185850 - DNA, 20 bp, Artificial Sequence
  Synthetic oligonucleotide; AGGAGT chr2 60449292 60449311 60449308 +
ggcaggtggctcatgaggtc

SEQ ID NO: 185851 - DNA, 20 bp, Artificial Sequence
  Synthetic oligonucleotide; TAGAGT chr2 60449478 60449497 60449494 +
ttgcactccagcctgggcaa

SEQ ID NO: 185852 - DNA, 20 bp, Artificial Sequence
  Synthetic oligonucleotide; ATGGAT chr2 60449755 60449774 60449771 +
cttccctgcttctgccattc

SEQ ID NO: 185853 - DNA, 20 bp, Artificial Sequence
  Synthetic oligonucleotide; TGGGGT chr2 60449818 60449837 60449834 +
cccaaattgtcaatcttgta

SEQ ID NO: 185854 - DNA, 20 bp, Artificial Sequence
  Synthetic oligonucleotide; GAGGGT chr2 60449894 60449913 60449910 +
cagcactatgggaggcctag

SEQ ID NO: 185855 - DNA, 20 bp, Artificial Sequence
  Synthetic oligonucleotide; GTGGAT chr2 60449898 60449917 60449914 +
actatgggaggcctaggagg

SEQ ID NO: 185856 - DNA, 20 bp, Artificial Sequence
  Synthetic oligonucleotide; GAGGAT chr2 60450034 60450053 60450050 +
tacttgggaagctgaggcag

SEQ ID NO: 185857 - DNA, 20 bp, Artificial Sequence
  Synthetic oligonucleotide; CTGAGT chr2 60450073 60450092 60450089 +
taggcggaggttgtggtgag

SEQ ID NO: 185858 - DNA, 20 bp, Artificial Sequence
  Synthetic oligonucleotide; CTGGGT chr2 60450099 60450118 60450115 +
ccttgccactgcactccagc

SEQ ID NO: 185859 - DNA, 20 bp, Artificial Sequence
  Synthetic oligonucleotide; GGGGGT chr2 60450264 60450283 60450280 +
ttttgttctgtttgttttga

SEQ ID NO: 185860 - DNA, 20 bp, Artificial Sequence
  Synthetic oligonucleotide; GAGGAT chr2 60450286 60450305 60450302 +
gggttcttctccacagtgaa

SEQ ID NO: 185861 - DNA, 20 bp, Artificial Sequence
  Synthetic oligonucleotide; GGGGGT chr2 60450402 60450421 60450418 +
agaagaaatatataaaaagt

SEQ ID NO: 185862 - DNA, 20 bp, Artificial Sequence
  Synthetic oligonucleotide; CAGGAT chr2 60450481 60450500 60450497 +
gctgaacttgtctcaagacc

SEQ ID NO: 185863 - DNA, 20 bp, Artificial Sequence
  Synthetic oligonucleotide; AGGAGT chr2 60450545 60450564 60450561 +
actctttctaggcatcagca

SEQ ID NO: 185864 - DNA, 20 bp, Artificial Sequence
  Synthetic oligonucleotide; GAGGGT chr2 60450635 60450654 60450651 +
ggcagagcatggggcaggga

SEQ ID NO: 185865 - DNA, 20 bp, Artificial Sequence
  Synthetic oligonucleotide; CAGGGT chr2 60450716 60450735 60450732 +
aaacaggccactcgtgcaat

SEQ ID NO: 185866 - DNA, 20 bp, Artificial Sequence
  Synthetic oligonucleotide; CTGGGT chr2 60450843 60450862 60450859 +
tgcctttaccaaaggccatc

SEQ ID NO: 185867 - DNA, 20 bp, Artificial Sequence
  Synthetic oligonucleotide; CAGAGT chr2 60450937 60450956 60450953 +
actccctttgatcagttaaa

SEQ ID NO: 185868 - DNA, 20 bp, Artificial Sequence
  Synthetic oligonucleotide; ATGAAT chr2 60451166 60451185 60451182 +
gtagacagtcattatttatt

SEQ ID NO: 185869 - DNA, 20 bp, Artificial Sequence
  Synthetic oligonucleotide; GTGGAT chr2 60451241 60451260 60451257 +
ctaggtaatctagccagaag

SEQ ID NO: 185870 - DNA, 20 bp, Artificial Sequence
  Synthetic oligonucleotide; TAGGAT chr2 60451250 60451269 60451266 +
ctagccagaaggtggatagg

SEQ ID NO: 185871 - DNA, 20 bp, Artificial Sequence
  Synthetic oligonucleotide; GTGAAT chr2 60451284 60451303 60451300 +
cttaggttcacggcctgtat

SEQ ID NO: 185872 - DNA, 20 bp, Artificial Sequence
  Synthetic oligonucleotide; CTGGAT chr2 60451364 60451383 60451380 +
atgttgtttctaattctctt

SEQ ID NO: 185873 - DNA, 20 bp, Artificial Sequence
  Synthetic oligonucleotide; AAGAAT chr2 60451429 60451448 60451445 +
tgcaaattaactgggccaga

SEQ ID NO: 185874 - DNA, 20 bp, Artificial Sequence
  Synthetic oligonucleotide; AGGAAT chr2 60451483 60451502 60451499 +
atttgtggcactaatttcta

SEQ ID NO: 185875 - DNA, 20 bp, Artificial Sequence
  Synthetic oligonucleotide; TAGAAT chr2 60451650 60451669 60451666 +
aaggtttgggaacctaaaat

SEQ ID NO: 185876 - DNA, 20 bp, Artificial Sequence
  Synthetic oligonucleotide; TAGGAT chr2 60451692 60451711 60451708 +
ctgacatttatcaccttctt

SEQ ID NO: 185877 - DNA, 20 bp, Artificial Sequence
  Synthetic oligonucleotide; CAGGAT chr2 60451791 60451810 60451807 +
aaaagcatatatttgaaaaa

SEQ ID NO: 185878 - DNA, 20 bp, Artificial Sequence
  Synthetic oligonucleotide; ATGGGT chr2 60452042 60452061 60452058 +
ctgttcctcctacccacccg

SEQ ID NO: 185879 - DNA, 20 bp, Artificial Sequence
  Synthetic oligonucleotide; TAGAAT chr2 60452192 60452211 60452208 +
acactttttaaaagacaaca

SEQ ID NO: 185880 - DNA, 20 bp, Artificial Sequence
  Synthetic oligonucleotide; AGGGGT chr2 60452209 60452228 60452225 +
acatagaatgtatagaaaca

SEQ ID NO: 185881 - DNA, 20 bp, Artificial Sequence
  Synthetic oligonucleotide; GTGGGT chr2 60452340 60452359 60452356 +
gactgattcactgttccaat

SEQ ID NO: 185882 - DNA, 20 bp, Artificial Sequence
  Synthetic oligonucleotide; CAGGAT chr2 60452483 60452502 60452499 +
cagaaaacatcacaaactag

SEQ ID NO: 185883 - DNA, 20 bp, Artificial Sequence
  Synthetic oligonucleotide; CTGGGT chr2 60452612 60452631 60452628 +
tgccacacatcttgagctct

SEQ ID NO: 185884 - DNA, 20 bp, Artificial Sequence
  Synthetic oligonucleotide; CCGAAT chr2 60452624 60452643 60452640 +
tgagctctctgggtactacg

SEQ ID NO: 185885 - DNA, 20 bp, Artificial Sequence
  Synthetic oligonucleotide; GGGGGT chr2 60452630 60452649 60452646 +
ctctgggtactacgccgaat

SEQ ID NO: 185886 - DNA, 20 bp, Artificial Sequence
  Synthetic oligonucleotide; CTGAGT chr2 60452829 60452848 60452845 +
tccccaagtatctctgacct

SEQ ID NO: 185887 - DNA, 20 bp, Artificial Sequence
  Synthetic oligonucleotide; AAGAGT chr2 60453187 60453206 60453203 +
aagagaaaaccagaacccaa

SEQ ID NO: 185888 - DNA, 20 bp, Artificial Sequence
  Synthetic oligonucleotide; GGGAGT chr2 60453290 60453309 60453306 +
ggcaatggtgaagggaagaa

SEQ ID NO: 185889 - DNA, 20 bp, Artificial Sequence
  Synthetic oligonucleotide; CGGGGT chr2 60453309 60453328 60453325 +
agggagtggttattttcctc

SEQ ID NO: 185890 - DNA, 20 bp, Artificial Sequence
  Synthetic oligonucleotide; GGGAGT chr2 60453355 60453374 60453371 +
tgacttgaagcagcagaact

SEQ ID NO: 185891 - DNA, 20 bp, Artificial Sequence
  Synthetic oligonucleotide; CCGGAT chr2 60453361 60453380 60453377 +
gaagcagcagaactgggagt

SEQ ID NO: 185892 - DNA, 20 bp, Artificial Sequence
  Synthetic oligonucleotide; CGGGGT chr2 60453475 60453494 60453491 +
acttggcgccgcaggaggcc

SEQ ID NO: 185893 - DNA, 20 bp, Artificial Sequence
  Synthetic oligonucleotide; CTGGAT chr2 60453481 60453500 60453497 +
cgccgcaggaggcccggggt

SEQ ID NO: 185894 - DNA, 20 bp, Artificial Sequence
  Synthetic oligonucleotide; GTGGGT chr2 60453560 60453579 60453576 +
gaggggcatgctgcgtccag

SEQ ID NO: 185895 - DNA, 20 bp, Artificial Sequence
  Synthetic oligonucleotide; GGGAAT chr2 60453570 60453589 60453586 +
ctgcgtccaggtgggttctg

SEQ ID NO: 185896 - DNA, 20 bp, Artificial Sequence
  Synthetic oligonucleotide; ATGGGT chr2 60453739 60453758 60453755 +
tttaaaagcacagcccccct

SEQ ID NO: 185897 - DNA, 20 bp, Artificial Sequence
  Synthetic oligonucleotide; GAGGAT chr2 60453763 60453782 60453779 +
gtttaggggctcccgcttta

SEQ ID NO: 185898 - DNA, 20 bp, Artificial Sequence
  Synthetic oligonucleotide; TTGGAT chr2 60453876 60453895 60453892 +
tacagaaaggaaaaacgtat

SEQ ID NO: 185899 - DNA, 20 bp, Artificial Sequence
  Synthetic oligonucleotide; CTGGAT chr2 60453940 60453959 60453956 +
agtacaatgacccgtgtgaa

SEQ ID NO: 185900 - DNA, 20 bp, Artificial Sequence
  Synthetic oligonucleotide; AGGAAT chr2 60453970 60453989 60453986 +
ctctttcccatttggaaggg

SEQ ID NO: 185901 - DNA, 20 bp, Artificial Sequence
  Synthetic oligonucleotide; CTGAGT chr2 60454066 60454085 60454082 +
cagccccattcccctaaagg

SEQ ID NO: 185902 - DNA, 20 bp, Artificial Sequence
  Synthetic oligonucleotide; TGGGAT chr2 60454115 60454134 60454131 +
taaattaaacagcgggctaa

SEQ ID NO: 185903 - DNA, 20 bp, Artificial Sequence
  Synthetic oligonucleotide; TAGAGT chr2 60454190 60454209 60454206 +
gttcatagctatagcagccc

SEQ ID NO: 185904 - DNA, 20 bp, Artificial Sequence
  Synthetic oligonucleotide; ATGGGT chr2 60454250 60454269 60454266 +
tgatgtccatttctctaaca

SEQ ID NO: 185905 - DNA, 20 bp, Artificial Sequence
  Synthetic oligonucleotide; GAGAAT chr2 60454454 60454473 60454470 +
gggaagttgtctgaaaaaaa

SEQ ID NO: 185906 - DNA, 20 bp, Artificial Sequence
  Synthetic oligonucleotide; TGGGAT chr2 60454459 60454478 60454475 +
gttgtctgaaaaaaagagaa

SEQ ID NO: 185907 - DNA, 20 bp, Artificial Sequence
  Synthetic oligonucleotide; ATGGGT chr2 60454463 60454482 60454479 +
tctgaaaaaaagagaatggg

SEQ ID NO: 185908 - DNA, 20 bp, Artificial Sequence
  Synthetic oligonucleotide; TGGAGT chr2 60454500 60454519 60454516 +
cacaccaggcccagggacaa

SEQ ID NO: 185909 - DNA, 20 bp, Artificial Sequence
  Synthetic oligonucleotide; CAGAAT chr2 60454508 60454527 60454524 +
gcccagggacaatggagtaa

SEQ ID NO: 185910 - DNA, 20 bp, Artificial Sequence
  Synthetic oligonucleotide; GAGGAT chr2 60454652 60454671 60454668 +
gcaaagtactacaagcagga

SEQ ID NO: 185911 - DNA, 20 bp, Artificial Sequence
  Synthetic oligonucleotide; GTGAAT chr2 60454731 60454750 60454747 +
cctttcagcaaactgtgtct

SEQ ID NO: 185912 - DNA, 20 bp, Artificial Sequence
  Synthetic oligonucleotide; TGGAAT chr2 60454766 60454785 60454782 +
catttccttatttctccaat

SEQ ID NO: 185913 - DNA, 20 bp, Artificial Sequence
  Synthetic oligonucleotide; CAGAAT chr2 60454892 60454911 60454908 +
aataaacagttctatatcta

SEQ ID NO: 185914 - DNA, 20 bp, Artificial Sequence
  Synthetic oligonucleotide; GAGGAT chr2 60455029 60455048 60455045 +
ttgtaggtcctaaacaaaga

SEQ ID NO: 185915 - DNA, 20 bp, Artificial Sequence
  Synthetic oligonucleotide; ATGGGT chr2 60455040 60455059 60455056 +
aaacaaagagaggatagcaa

SEQ ID NO: 185916 - DNA, 20 bp, Artificial Sequence
  Synthetic oligonucleotide; AAGAGT chr2 60455073 60455092 60455089 +
ggaggtaatataggcactgg

SEQ ID NO: 185917 - DNA, 20 bp, Artificial Sequence
  Synthetic oligonucleotide; TAGAAT chr2 60455103 60455122 60455119 +
ggtttaaaatctgtgagaaa

SEQ ID NO: 185918 - DNA, 20 bp, Artificial Sequence
  Synthetic oligonucleotide; GAGGAT chr2 60455231 60455250 60455247 +
cctgttacaaaaacttactt

SEQ ID NO: 185919 - DNA, 20 bp, Artificial Sequence
  Synthetic oligonucleotide; ATGAAT chr2 60455288 60455307 60455304 +
tcatttaaaaaaaaaagatc

SEQ ID NO: 185920 - DNA, 20 bp, Artificial Sequence
  Synthetic oligonucleotide; TAGAGT chr2 60455346 60455365 60455362 +
tatattaagattttaaattt

SEQ ID NO: 185921 - DNA, 20 bp, Artificial Sequence
  Synthetic oligonucleotide; CTGGAT chr2 60455353 60455372 60455369 +
agattttaaattttagagtt

SEQ ID NO: 185922 - DNA, 20 bp, Artificial Sequence
  Synthetic oligonucleotide; CAGGAT chr2 60455638 60455657 60455654 +
ccaccattaattctgtctgt

SEQ ID NO: 185923 - DNA, 20 bp, Artificial Sequence
  Synthetic oligonucleotide; ATGAAT chr2 60455689 60455708 60455705 +
gcatatactgagaaattaaa

SEQ ID NO: 185924 - DNA, 20 bp, Artificial Sequence
  Synthetic oligonucleotide; AAGAGT chr2 60455739 60455758 60455755 +
gcactcatagctcctaataa

SEQ ID NO: 185925 - DNA, 20 bp, Artificial Sequence
  Synthetic oligonucleotide; TAGGGT chr2 60455779 60455798 60455795 +
gaggttttatggacatttaa

SEQ ID NO: 185926 - DNA, 20 bp, Artificial Sequence
  Synthetic oligonucleotide; TGGAGT chr2 60455784 60455803 60455800 +
tttatggacatttaataggg

SEQ ID NO: 185927 - DNA, 20 bp, Artificial Sequence
  Synthetic oligonucleotide; GGGAAT chr2 60455824 60455843 60455840 +
ctaaagctggcatggcactg

SEQ ID NO: 185928 - DNA, 20 bp, Artificial Sequence
  Synthetic oligonucleotide; TTGGAT chr2 60455856 60455875 60455872 +
tatctgtcttgagcagcatt

SEQ ID NO: 185929 - DNA, 20 bp, Artificial Sequence
  Synthetic oligonucleotide; GTGGAT chr2 60455998 60456017 60456014 +
ttctccaacatcctttctca

SEQ ID NO: 185930 - DNA, 20 bp, Artificial Sequence
  Synthetic oligonucleotide; AAGGAT chr2 60456346 60456365 60456362 +
aagtgacaacacagatttct

SEQ ID NO: 185931 - DNA, 20 bp, Artificial Sequence
  Synthetic oligonucleotide; AAGGGT chr2 60456391 60456410 60456407 +
ggctggtcagaagataattg

SEQ ID NO: 185932 - DNA, 20 bp, Artificial Sequence
  Synthetic oligonucleotide; TAGGGT chr2 60456464 60456483 60456480 +
ctaaagtaatctgtagcatc

SEQ ID NO: 185933 - DNA, 20 bp, Artificial Sequence
  Synthetic oligonucleotide; TGGGAT chr2 60456473 60456492 60456489 +
tctgtagcatctagggttcc

SEQ ID NO: 185934 - DNA, 20 bp, Artificial Sequence
  Synthetic oligonucleotide; TGGGGT chr2 60456680 60456699 60456696 +
agatttttagatttcaaaag

SEQ ID NO: 185935 - DNA, 20 bp, Artificial Sequence
  Synthetic oligonucleotide; AAGGAT chr2 60456777 60456796 60456793 +
attatgttctaagataaagc

SEQ ID NO: 185936 - DNA, 20 bp, Artificial Sequence
  Synthetic oligonucleotide; GAGAAT chr2 60456785 60456804 60456801 +
ctaagataaagcaaggatgg

SEQ ID NO: 185937 - DNA, 20 bp, Artificial Sequence
  Synthetic oligonucleotide; TTGAAT chr2 60456882 60456901 60456898 +
gcaagttttttcacttatgt

SEQ ID NO: 185938 - DNA, 20 bp, Artificial Sequence
  Synthetic oligonucleotide; ATGGAT chr2 60456886 60456905 60456902 +
gttttttcacttatgtttga

SEQ ID NO: 185939 - DNA, 20 bp, Artificial Sequence
  Synthetic oligonucleotide; TGGAGT chr2 60456905 60456924 60456921 +
aatggatttctgctaagaga

SEQ ID NO: 185940 - DNA, 20 bp, Artificial Sequence
  Synthetic oligonucleotide; CAGGGT chr2 60456988 60457007 60457004 +
gaaagccttaaaactatgtc

SEQ ID NO: 185941 - DNA, 20 bp, Artificial Sequence
  Synthetic oligonucleotide; TAGGGT chr2 60457038 60457057 60457054 +
gtaagtactttatgttcctt

SEQ ID NO: 185942 - DNA, 20 bp, Artificial Sequence
  Synthetic oligonucleotide; CAGAAT chr2 60457057 60457076 60457073 +
ttagggtataatacacgcat

SEQ ID NO: 185943 - DNA, 20 bp, Artificial Sequence
  Synthetic oligonucleotide; CAGAGT chr2 60457136 60457155 60457152 +
attttcttgcaagtaattta

SEQ ID NO: 185944 - DNA, 20 bp, Artificial Sequence
  Synthetic oligonucleotide; ATGGGT chr2 60457214 60457233 60457230 +
tttttcaataaagggacaaa

SEQ ID NO: 185945 - DNA, 20 bp, Artificial Sequence
  Synthetic oligonucleotide; AGGAAT chr2 60457486 60457505 60457502 +
cgacaaacagctttcattac

SEQ ID NO: 185946 - DNA, 20 bp, Artificial Sequence
  Synthetic oligonucleotide; TGGAAT chr2 60457712 60457731 60457728 +
tgcatatgaaggtaagatgc

SEQ ID NO: 185947 - DNA, 20 bp, Artificial Sequence
  Synthetic oligonucleotide; TAGGGT chr2 60457719 60457738 60457735 +
gaaggtaagatgctggaatg

SEQ ID NO: 185948 - DNA, 20 bp, Artificial Sequence
  Synthetic oligonucleotide; AAGGAT chr2 60457822 60457841 60457838 +
agcaggaaaaaggaacaaaa

SEQ ID NO: 185949 - DNA, 20 bp, Artificial Sequence
  Synthetic oligonucleotide; AGGAAT chr2 60458184 60458203 60458200 +
ccataaatgtattttagcat

SEQ ID NO: 185950 - DNA, 20 bp, Artificial Sequence
  Synthetic oligonucleotide; ATGAGT chr2 60458194 60458213 60458210 +
attttagcataggaatcaac

SEQ ID NO: 185951 - DNA, 20 bp, Artificial Sequence
  Synthetic oligonucleotide; TAGAAT chr2 60458298 60458317 60458314 +
agcggtgtgtatccaaggca

SEQ ID NO: 185952 - DNA, 20 bp, Artificial Sequence
  Synthetic oligonucleotide; ATGGAT chr2 60458322 60458341 60458338 +
atttccactaccatttttaa

SEQ ID NO: 185953 - DNA, 20 bp, Artificial Sequence
  Synthetic oligonucleotide; CAGAGT chr2 60458784 60458803 60458800 +
aaagatacagatatcacagg

SEQ ID NO: 185954 - DNA, 20 bp, Artificial Sequence
  Synthetic oligonucleotide; ATGAAT chr2 60458869 60458888 60458885 +
aaaaaataaaaataaaaaca

SEQ ID NO: 185955 - DNA, 20 bp, Artificial Sequence
  Synthetic oligonucleotide; AAGAAT chr2 60458990 60459009 60459006 +
attctttctcttcttttttt

SEQ ID NO: 185956 - DNA, 20 bp, Artificial Sequence
  Synthetic oligonucleotide; AAGAAT chr2 60459018 60459037 60459034 +
cacatttaaatgcaagtctt

SEQ ID NO: 185957 - DNA, 20 bp, Artificial Sequence
  Synthetic oligonucleotide; CTGGAT chr2 60459228 60459247 60459244 +
cacttgacaaccaagtagat

SEQ ID NO: 185958 - DNA, 20 bp, Artificial Sequence
  Synthetic oligonucleotide; ATGGGT chr2 60459504 60459523 60459520 +
tgatgattaactaggacata

SEQ ID NO: 185959 - DNA, 20 bp, Artificial Sequence
  Synthetic oligonucleotide; TAGAAT chr2 60459548 60459567 60459564 +
ttgttgtgagaaatacaata

SEQ ID NO: 185960 - DNA, 20 bp, Artificial Sequence
  Synthetic oligonucleotide; CTGAAT chr2 60459592 60459611 60459608 +
gtttattacctcacccaatg

SEQ ID NO: 185961 - DNA, 20 bp, Artificial Sequence
  Synthetic oligonucleotide; TAGAAT chr2 60459682 60459701 60459698 +
catattttaaaaccaaatga

SEQ ID NO: 185962 - DNA, 20 bp, Artificial Sequence
  Synthetic oligonucleotide; GAGGGT chr2 60459823 60459842 60459839 +
tgctatctattctgtctata

SEQ ID NO: 185963 - DNA, 20 bp, Artificial Sequence
  Synthetic oligonucleotide; CAGAAT chr2 60459890 60459909 60459906 +
actgtacatgatatgtatta

SEQ ID NO: 185964 - DNA, 20 bp, Artificial Sequence
  Synthetic oligonucleotide; ACGAAT chr2 60459976 60459995 60459992 +
agcaacatgtttgctcagca

SEQ ID NO: 185965 - DNA, 20 bp, Artificial Sequence
  Synthetic oligonucleotide; GGGAGT chr2 60460298 60460317 60460314 +
gactagaaaaaaatcctaca

SEQ ID NO: 185966 - DNA, 20 bp, Artificial Sequence
  Synthetic oligonucleotide; GGGAGT chr2 60460327 60460346 60460343 +
gctggagggcgatggggaag

SEQ ID NO: 185967 - DNA, 20 bp, Artificial Sequence
  Synthetic oligonucleotide; GGGGGT chr2 60460342 60460361 60460358 +
ggaaggggagtggtgaaaaa

SEQ ID NO: 185968 - DNA, 20 bp, Artificial Sequence
  Synthetic oligonucleotide; GGGAGT chr2 60460355 60460374 60460371 +
tgaaaaagggggtgtcaggt

SEQ ID NO: 185969 - DNA, 20 bp, Artificial Sequence
  Synthetic oligonucleotide; AGGGGT chr2 60460366 60460385 60460382 +
gtgtcaggtgggagtgaggg

SEQ ID NO: 185970 - DNA, 20 bp, Artificial Sequence
  Synthetic oligonucleotide; CAGGGT chr2 60460447 60460466 60460463 +
cattttttcatgtgtttctc

SEQ ID NO: 185971 - DNA, 20 bp, Artificial Sequence
  Synthetic oligonucleotide; AGGAGT chr2 60460818 60460837 60460834 +
gcgcaaactcccgttctccg

SEQ ID NO: 185972 - DNA, 20 bp, Artificial Sequence
  Synthetic oligonucleotide; TGGAGT chr2 60460854 60460873 60460870 +
ggaggcaaaaggcgattgtc

SEQ ID NO: 185973 - DNA, 20 bp, Artificial Sequence
  Synthetic oligonucleotide; AGGGAT chr2 60460875 60460894 60460891 +
ggagtctccgaagctaagga

SEQ ID NO: 185974 - DNA, 20 bp, Artificial Sequence
  Synthetic oligonucleotide; GCGAGT chr2 60460920 60460939 60460936 +
cgcgtagccggcgagccact

SEQ ID NO: 185975 - DNA, 20 bp, Artificial Sequence
  Synthetic oligonucleotide; CCGAGT chr2 60461124 60461143 60461140 +
gcggtccgactcgccggcca

SEQ ID NO: 185976 - DNA, 20 bp, Artificial Sequence
  Synthetic oligonucleotide; CGGGAT chr2 60461452 60461471 60461468 +
tcctcctcgtccccgttctc

SEQ ID NO: 185977 - DNA, 20 bp, Artificial Sequence
  Synthetic oligonucleotide; TGGGGT chr2 60461463 60461482 60461479 +
cccgttctccgggatcaggt

SEQ ID NO: 185978 - DNA, 20 bp, Artificial Sequence
  Synthetic oligonucleotide; CCGGGT chr2 60461540 60461559 60461556 +
tgcccaccaagtcgctggtg

SEQ ID NO: 185979 - DNA, 20 bp, Artificial Sequence
  Synthetic oligonucleotide; CTGGGT chr2 60461644 60461663 60461660 +
tggcgcttcagcttgctggc

SEQ ID NO: 185980 - DNA, 20 bp, Artificial Sequence
  Synthetic oligonucleotide; GCGGAT chr2 60461795 60461814 60461811 +
ggggctgggagggaggaggg

SEQ ID NO: 185981 - DNA, 20 bp, Artificial Sequence
  Synthetic oligonucleotide; TGGAAT chr2 60461852 60461871 60461868 +
agggcggcttgctacctggc

SEQ ID NO: 185982 - DNA, 20 bp, Artificial Sequence
  Synthetic oligonucleotide; TTGGAT chr2 60461976 60461995 60461992 +
ggcgggaggctccatagcca

SEQ ID NO: 185983 - DNA, 20 bp, Artificial Sequence
  Synthetic oligonucleotide; TCGGGT chr2 60462009 60462028 60462025 +
cagcaccctgtcaaaggcac

SEQ ID NO: 185984 - DNA, 20 bp, Artificial Sequence
  Synthetic oligonucleotide; ATGGGT chr2 60462016 60462035 60462032 +
ctgtcaaaggcactcgggtg

SEQ ID NO: 185985 - DNA, 20 bp, Artificial Sequence
  Synthetic oligonucleotide; GGGGGT chr2 60462063 60462082 60462079 +
ccccaggcgctctatgcggt

SEQ ID NO: 185986 - DNA, 20 bp, Artificial Sequence
  Synthetic oligonucleotide; GGGAGT chr2 60462103 60462122 60462119 +
ggtggtggactaaacagggg

SEQ ID NO: 185987 - DNA, 20 bp, Artificial Sequence
  Synthetic oligonucleotide; GTGGGT chr2 60462107 60462126 60462123 +
gtggactaaacaggggggga

SEQ ID NO: 185988 - DNA, 20 bp, Artificial Sequence
  Synthetic oligonucleotide; AGGGGT chr2 60462180 60462199 60462196 +
tggtattcttagcaggttaa

SEQ ID NO: 185989 - DNA, 20 bp, Artificial Sequence
  Synthetic oligonucleotide; ATGAAT chr2 60462199 60462218 60462215 +
aaggggttattgtctgcaat

SEQ ID NO: 185990 - DNA, 20 bp, Artificial Sequence
  Synthetic oligonucleotide; AGGGAT chr2 60462250 60462269 60462266 +
cattctgcacctagtcctga

SEQ ID NO: 185991 - DNA, 20 bp, Artificial Sequence
  Synthetic oligonucleotide; CGGGGT chr2 60462265 60462284 60462281 +
cctgaagggataccaacccg

SEQ ID NO: 185992 - DNA, 20 bp, Artificial Sequence
  Synthetic oligonucleotide; ATGAGT chr2 60462313 60462332 60462329 +
tctaagtagattcttaatcc

SEQ ID NO: 185993 - DNA, 20 bp, Artificial Sequence
  Synthetic oligonucleotide; GTGAAT chr2 60462353 60462372 60462369 +
gcaagagaaaccatgcactg

SEQ ID NO: 185994 - DNA, 20 bp, Artificial Sequence
  Synthetic oligonucleotide; ATGGGT chr2 60462563 60462582 60462579 +
tgtgcctggcacgtctgagc

SEQ ID NO: 185995 - DNA, 20 bp, Artificial Sequence
  Synthetic oligonucleotide; GAGGAT chr2 60462672 60462691 60462688 +
atcctgaccagttctggctt

SEQ ID NO: 185996 - DNA, 20 bp, Artificial Sequence
  Synthetic oligonucleotide; CTGGGT chr2 60462863 60462882 60462879 +
tcccagctttctattccccc

SEQ ID NO: 185997 - DNA, 20 bp, Artificial Sequence
  Synthetic oligonucleotide; GAGGGT chr2 60463014 60463033 60463030 +
tgttgatattgttaaaatga

SEQ ID NO: 185998 - DNA, 20 bp, Artificial Sequence
  Synthetic oligonucleotide; GAGGAT chr2 60463079 60463098 60463095 +
tctcacaccccagactgtgg

SEQ ID NO: 185999 - DNA, 20 bp, Artificial Sequence
  Synthetic oligonucleotide; GTGAGT chr2 60463087 60463106 60463103 +
cccagactgtgggaggatca

SEQ ID NO: 186000 - DNA, 20 bp, Artificial Sequence
  Synthetic oligonucleotide; AAGAAT chr2 60463142 60463161 60463158 +
ggacgtccatttttatctca

SEQ ID NO: 186001 - DNA, 20 bp, Artificial Sequence
  Synthetic oligonucleotide; ACGGAT chr2 60463186 60463205 60463202 +
aaaaacttcattcagattta

SEQ ID NO: 186002 - DNA, 20 bp, Artificial Sequence
  Synthetic oligonucleotide; AGGAGT chr2 60463210 60463229 60463226 +
ataggctgtatccaatcttt

SEQ ID NO: 186003 - DNA, 20 bp, Artificial Sequence
  Synthetic oligonucleotide; AGGAGT chr2 60463256 60463275 60463272 +
gcaagtctggaaaagttagg

SEQ ID NO: 186004 - DNA, 20 bp, Artificial Sequence
  Synthetic oligonucleotide; AAGAGT chr2 60463555 60463574 60463571 +
tcccttgctgaaaagaaccc

SEQ ID NO: 186005 - DNA, 20 bp, Artificial Sequence
  Synthetic oligonucleotide; TGGAAT chr2 60463676 60463695 60463692 +
acattaaatatatatatata

SEQ ID NO: 186006 - DNA, 20 bp, Artificial Sequence
  Synthetic oligonucleotide; GAGGAT chr2 60463749 60463768 60463765 +
agtaatggtagccaaaggac

SEQ ID NO: 186007 - DNA, 20 bp, Artificial Sequence
  Synthetic oligonucleotide; AAGAGT chr2 60463852 60463871 60463868 +
tcttttaaaagaagggctgc

SEQ ID NO: 186008 - DNA, 20 bp, Artificial Sequence
  Synthetic oligonucleotide; AAGAGT chr2 60463932 60463951 60463948 +
aaaaatctaccagggaggtt

SEQ ID NO: 186009 - DNA, 20 bp, Artificial Sequence
  Synthetic oligonucleotide; GAGAAT chr2 60463938 60463957 60463954 +
ctaccagggaggttaagagt

SEQ ID NO: 186010 - DNA, 20 bp, Artificial Sequence
  Synthetic oligonucleotide; AGGAAT chr2 60463945 60463964 60463961 +
ggaggttaagagtgagaatg

SEQ ID NO: 186011 - DNA, 20 bp, Artificial Sequence
  Synthetic oligonucleotide; CAGGGT chr2 60464000 60464019 60464016 +
aagtcagaaagaaaagccgg

SEQ ID NO: 186012 - DNA, 20 bp, Artificial Sequence
  Synthetic oligonucleotide; CTGGGT chr2 60464144 60464163 60464160 +
ccactcaatatatctcactc

SEQ ID NO: 186013 - DNA, 20 bp, Artificial Sequence
  Synthetic oligonucleotide; TTGGGT chr2 60464369 60464388 60464385 +
tgttgttgttgaacaataac

SEQ ID NO: 186014 - DNA, 20 bp, Artificial Sequence
  Synthetic oligonucleotide; CTGGGT chr2 60464454 60464473 60464470 +
tccttgtcctccctagatct

SEQ ID NO: 186015 - DNA, 20 bp, Artificial Sequence
  Synthetic oligonucleotide; CTGAGT chr2 60464488 60464507 60464504 +
ttcctatttagcctgacgat

SEQ ID NO: 186016 - DNA, 20 bp, Artificial Sequence
  Synthetic oligonucleotide; ATGAAT chr2 60464640 60464659 60464656 +
gtgctggtttcacatgtgcc

SEQ ID NO: 186017 - DNA, 20 bp, Artificial Sequence
  Synthetic oligonucleotide; AAGGAT chr2 60464693 60464712 60464709 +
gtggcatacagcactacatc

SEQ ID NO: 186018 - DNA, 20 bp, Artificial Sequence
  Synthetic oligonucleotide; TGGAAT chr2 60465245 60465264 60465261 +
ctttgatgatttagaaagac

SEQ ID NO: 186019 - DNA, 20 bp, Artificial Sequence
  Synthetic oligonucleotide; GGGGAT chr2 60465373 60465392 60465389 +
gagcctcattgggcatttac

SEQ ID NO: 186020 - DNA, 20 bp, Artificial Sequence
  Synthetic oligonucleotide; AAGGGT chr2 60465441 60465460 60465457 +
ataggaacttgagacatcaa

SEQ ID NO: 186021 - DNA, 20 bp, Artificial Sequence
  Synthetic oligonucleotide; AGGAAT chr2 60465506 60465525 60465522 +
tttcattttactttatggga

SEQ ID NO: 186022 - DNA, 20 bp, Artificial Sequence
  Synthetic oligonucleotide; TGGGAT chr2 60465633 60465652 60465649 +
tatccactagattgtaactc

SEQ ID NO: 186023 - DNA, 20 bp, Artificial Sequence
  Synthetic oligonucleotide; CTGAGT chr2 60465654 60465673 60465670 +
gggatagtcatttgatttct

SEQ ID NO: 186024 - DNA, 20 bp, Artificial Sequence
  Synthetic oligonucleotide; TGGAAT chr2 60465662 60465681 60465678 +
catttgatttctctgagtct

SEQ ID NO: 186025 - DNA, 20 bp, Artificial Sequence
  Synthetic oligonucleotide; AAGAAT chr2 60465704 60465723 60465720 +
agcataaaaacagtacctgt

SEQ ID NO: 186026 - DNA, 20 bp, Artificial Sequence
  Synthetic oligonucleotide; TCGAAT chr2 60465764 60465783 60465780 +
gccctctgtaaactatcagg

SEQ ID NO: 186027 - DNA, 20 bp, Artificial Sequence
  Synthetic oligonucleotide; GTGAAT chr2 60465770 60465789 60465786 +
tgtaaactatcaggtcgaat

SEQ ID NO: 186028 - DNA, 20 bp, Artificial Sequence
  Synthetic oligonucleotide; GTGAGT chr2 60465776 60465795 60465792 +
ctatcaggtcgaatgtgaat

SEQ ID NO: 186029 - DNA, 20 bp, Artificial Sequence
  Synthetic oligonucleotide; AGGGGT chr2 60465795 60465814 60465811 +
tgtgagttttcattactacc

SEQ ID NO: 186030 - DNA, 20 bp, Artificial Sequence
  Synthetic oligonucleotide; GAGGGT chr2 60465812 60465831 60465828 +
accaggggtgattaattact

SEQ ID NO: 186031 - DNA, 20 bp, Artificial Sequence
  Synthetic oligonucleotide; AGGGGT chr2 60465913 60465932 60465929 +
ggaggctctagttaaagagc

SEQ ID NO: 186032 - DNA, 20 bp, Artificial Sequence
  Synthetic oligonucleotide; CAGAGT chr2 60465932 60465951 60465948 +
caggggtgactggcacacag

SEQ ID NO: 186033 - DNA, 20 bp, Artificial Sequence
  Synthetic oligonucleotide; TGGAAT chr2 60465997 60466016 60466013 +
agcaggttaatgccgccaag

SEQ ID NO: 186034 - DNA, 20 bp, Artificial Sequence
  Synthetic oligonucleotide; AGGGGT chr2 60466145 60466164 60466161 +
gtgggaaggtgggagaggac

SEQ ID NO: 186035 - DNA, 20 bp, Artificial Sequence
  Synthetic oligonucleotide; TAGGAT chr2 60466564 60466583 60466580 +
cacaataactctttgttacc

SEQ ID NO: 186036 - DNA, 20 bp, Artificial Sequence
  Synthetic oligonucleotide; AGGAGT chr2 60466575 60466594 60466591 +
tttgttacctaggattacct

SEQ ID NO: 186037 - DNA, 20 bp, Artificial Sequence
  Synthetic oligonucleotide; TTGAAT chr2 60466603 60466622 60466619 +
acaaaaataaacaactggct

SEQ ID NO: 186038 - DNA, 20 bp, Artificial Sequence
  Synthetic oligonucleotide; CAGGGT chr2 60466616 60466635 60466632 +
actggctttgaatctggtct

SEQ ID NO: 186039 - DNA, 20 bp, Artificial Sequence
  Synthetic oligonucleotide; ATGGGT chr2 60466654 60466673 60466670 +
cttcagataccatttacaag

SEQ ID NO: 186040 - DNA, 20 bp, Artificial Sequence
  Synthetic oligonucleotide; TAGGGT chr2 60466855 60466874 60466871 +
tgaacctgcttttttgtgtt

SEQ ID NO: 186041 - DNA, 20 bp, Artificial Sequence
  Synthetic oligonucleotide; TGGAAT chr2 60466860 60466879 60466876 +
ctgcttttttgtgtttaggg

SEQ ID NO: 186042 - DNA, 20 bp, Artificial Sequence
  Synthetic oligonucleotide; ATGAAT chr2 60468223 60468242 60468239 +
agtcaaaattatgtgtgggc

SEQ ID NO: 186043 - DNA, 20 bp, Artificial Sequence
  Synthetic oligonucleotide; AGGAAT chr2 60468270 60468289 60468286 +
aatacacatgtaaatacata

SEQ ID NO: 186044 - DNA, 20 bp, Artificial Sequence
  Synthetic oligonucleotide; TGGAAT chr2 60468282 60468301 60468298 +
aatacataaggaatatgcat

SEQ ID NO: 186045 - DNA, 20 bp, Artificial Sequence
  Synthetic oligonucleotide; TGGAAT chr2 60468293 60468312 60468309 +
aatatgcattggaataactc

SEQ ID NO: 186046 - DNA, 20 bp, Artificial Sequence
  Synthetic oligonucleotide; AGGAGT chr2 60468382 60468401 60468398 +
aaagtcctaaatgaggccac

SEQ ID NO: 186047 - DNA, 20 bp, Artificial Sequence
  Synthetic oligonucleotide; GTGAAT chr2 60468386 60468405 60468402 +
tcctaaatgaggccacagga

SEQ ID NO: 186048 - DNA, 20 bp, Artificial Sequence
  Synthetic oligonucleotide; AGGGAT chr2 60468478 60468497 60468494 +
accctggggagaagacccac

SEQ ID NO: 186049 - DNA, 20 bp, Artificial Sequence
  Synthetic oligonucleotide; CTGAGT chr2 60468550 60468569 60468566 +
gggaagaagtccctctgggg

SEQ ID NO: 186050 - DNA, 20 bp, Artificial Sequence
  Synthetic oligonucleotide; TGGAGT chr2 60468555 60468574 60468571 +
gaagtccctctggggctgag

SEQ ID NO: 186051 - DNA, 20 bp, Artificial Sequence
  Synthetic oligonucleotide; GTGAGT chr2 60468577 60468596 60468593 +
gagtggggagcggctgccaa

SEQ ID NO: 186052 - DNA, 20 bp, Artificial Sequence
  Synthetic oligonucleotide; TGGAAT chr2 60468585 60468604 60468601 +
agcggctgccaagtgagtaa

SEQ ID NO: 186053 - DNA, 20 bp, Artificial Sequence
  Synthetic oligonucleotide; GGGGAT chr2 60468752 60468771 60468768 +
tctgcactcatcccaggcgt

SEQ ID NO: 186054 - DNA, 20 bp, Artificial Sequence
  Synthetic oligonucleotide; CAGGAT chr2 60468872 60468891 60468888 +
acaacgtgcatcataaacca

SEQ ID NO: 186055 - DNA, 20 bp, Artificial Sequence
  Synthetic oligonucleotide; AAGAGT chr2 60468965 60468984 60468981 +
cccaaggcctgaaacaaaag

SEQ ID NO: 186056 - DNA, 20 bp, Artificial Sequence
  Synthetic oligonucleotide; GTGAGT chr2 60468972 60468991 60468988 +
cctgaaacaaaagaagagtg

SEQ ID NO: 186057 - DNA, 20 bp, Artificial Sequence
  Synthetic oligonucleotide; CAGAGT chr2 60468985 60469004 60469001 +
aagagtggtgagttatttcc

SEQ ID NO: 186058 - DNA, 20 bp, Artificial Sequence
  Synthetic oligonucleotide; AAGGGT chr2 60469032 60469051 60469048 +
ggtctttttgacaaaagtga

SEQ ID NO: 186059 - DNA, 20 bp, Artificial Sequence
  Synthetic oligonucleotide; GTGGGT chr2 60469156 60469175 60469172 +
aggggaaaactggtaatatt

SEQ ID NO: 186060 - DNA, 20 bp, Artificial Sequence
  Synthetic oligonucleotide; GGGGAT chr2 60469177 60469196 60469193 +
tgggtagcctggaaacatgg

SEQ ID NO: 186061 - DNA, 20 bp, Artificial Sequence
  Synthetic oligonucleotide; ATGAGT chr2 60469266 60469285 60469282 +
aagcaaaatgctgataggaa

SEQ ID NO: 186062 - DNA, 20 bp, Artificial Sequence
  Synthetic oligonucleotide; GTGAAT chr2 60469278 60469297 60469294 +
gataggaaatgagtagattt

SEQ ID NO: 186063 - DNA, 20 bp, Artificial Sequence
  Synthetic oligonucleotide; CAGAGT chr2 60469298 60469317 60469314 +
gtgaatcgttttttatggga

SEQ ID NO: 186064 - DNA, 20 bp, Artificial Sequence
  Synthetic oligonucleotide; TAGAAT chr2 60469416 60469435 60469432 +
gactgagctgggccatactc

SEQ ID NO: 186065 - DNA, 20 bp, Artificial Sequence
  Synthetic oligonucleotide; TGGGGT chr2 60469495 60469514 60469511 +
gaagataaagattagacttc

SEQ ID NO: 186066 - DNA, 20 bp, Artificial Sequence
  Synthetic oligonucleotide; ATGAAT chr2 60469643 60469662 60469659 +
tgacttctcacactaataaa

SEQ ID NO: 186067 - DNA, 20 bp, Artificial Sequence
  Synthetic oligonucleotide; GGGGAT chr2 60469719 60469738 60469735 +
aaatttggtttgtgcaatct

SEQ ID NO: 186068 - DNA, 20 bp, Artificial Sequence
  Synthetic oligonucleotide; GAGGAT chr2 60469811 60469830 60469827 +
gtccatcttgagacagactg

SEQ ID NO: 186069 - DNA, 20 bp, Artificial Sequence
  Synthetic oligonucleotide; TGGAGT chr2 60469854 60469873 60469870 +
ctctgtgtgttctagaggtt

SEQ ID NO: 186070 - DNA, 20 bp, Artificial Sequence
  Synthetic oligonucleotide; TAGGAT chr2 60469974 60469993 60469990 +
gaagtgttgttgttgtactc

SEQ ID NO: 186071 - DNA, 20 bp, Artificial Sequence
  Synthetic oligonucleotide; GTGGGT chr2 60470083 60470102 60470099 +
ttcctttcgcaaggagcctg

SEQ ID NO: 186072 - DNA, 20 bp, Artificial Sequence
  Synthetic oligonucleotide; GTGAAT chr2 60470316 60470335 60470332 +
catttgactgtttacgtcaa

SEQ ID NO: 186073 - DNA, 20 bp, Artificial Sequence
  Synthetic oligonucleotide; GAGAGT chr2 60470323 60470342 60470339 +
ctgtttacgtcaagtgaatt

SEQ ID NO: 186074 - DNA, 20 bp, Artificial Sequence
  Synthetic oligonucleotide; GAGAAT chr2 60470381 60470400 60470397 +
tatttttcaatgagaaatct

SEQ ID NO: 186075 - DNA, 20 bp, Artificial Sequence
  Synthetic oligonucleotide; TTGGAT chr2 60470511 60470530 60470527 +
agcataaacgcaacaggtac

SEQ ID NO: 186076 - DNA, 20 bp, Artificial Sequence
  Synthetic oligonucleotide; GGGAGT chr2 60470526 60470545 60470542 +
ggtacttggatccttgtatg

SEQ ID NO: 186077 - DNA, 20 bp, Artificial Sequence
  Synthetic oligonucleotide; ATGAAT chr2 60470645 60470664 60470661 +
atccatgcctagcccctcgc

SEQ ID NO: 186078 - DNA, 20 bp, Artificial Sequence
  Synthetic oligonucleotide; TAGAAT chr2 60470932 60470951 60470948 +
attaaccacaatgtgaagat

SEQ ID NO: 186079 - DNA, 20 bp, Artificial Sequence
  Synthetic oligonucleotide; GGGAAT chr2 60470972 60470991 60470988 +
ctgatccagtggtctttcct

SEQ ID NO: 186080 - DNA, 20 bp, Artificial Sequence
  Synthetic oligonucleotide; GAGGGT chr2 60471077 60471096 60471093 +
agtacttaaccgtcttgggg

SEQ ID NO: 186081 - DNA, 20 bp, Artificial Sequence
  Synthetic oligonucleotide; CAGAAT chr2 60471226 60471245 60471242 +
ctctacctctgcttcccctg

SEQ ID NO: 186082 - DNA, 20 bp, Artificial Sequence
  Synthetic oligonucleotide; GAGGGT chr2 60471336 60471355 60471352 +
catttatcttccttcaggaa

SEQ ID NO: 186083 - DNA, 20 bp, Artificial Sequence
  Synthetic oligonucleotide; GTGGGT chr2 60471697 60471716 60471713 +
ctctggttgctggctaggaa

SEQ ID NO: 186084 - DNA, 20 bp, Artificial Sequence
  Synthetic oligonucleotide; GGGAGT chr2 60471797 60471816 60471813 +
acccccgatcagcatcacct

SEQ ID NO: 186085 - DNA, 20 bp, Artificial Sequence
  Synthetic oligonucleotide; CTGAAT chr2 60471843 60471862 60471859 +
tgggcaccacctcagactta

SEQ ID NO: 186086 - DNA, 20 bp, Artificial Sequence
  Synthetic oligonucleotide; GAGGGT chr2 60471857 60471876 60471873 +
gacttactgaatcagaaatt

SEQ ID NO: 186087 - DNA, 20 bp, Artificial Sequence
  Synthetic oligonucleotide; TTGAAT chr2 60471882 60471901 60471898 +
tggggaagcagccttctatg

SEQ ID NO: 186088 - DNA, 20 bp, Artificial Sequence
  Synthetic oligonucleotide; CTGAAT chr2 60471921 60471940 60471937 +
gattctcatgcacactcaag

SEQ ID NO: 186089 - DNA, 20 bp, Artificial Sequence
  Synthetic oligonucleotide; TAGGGT chr2 60471941 60471960 60471957 +
ctgaatcagcactgctgtct

SEQ ID NO: 186090 - DNA, 20 bp, Artificial Sequence
  Synthetic oligonucleotide; GGGAAT chr2 60472076 60472095 60472092 +
tcaaaaacaaattaagctta

SEQ ID NO: 186091 - DNA, 20 bp, Artificial Sequence
  Synthetic oligonucleotide; AAGGAT chr2 60472086 60472105 60472102 +
attaagcttagggaatccct

SEQ ID NO: 186092 - DNA, 20 bp, Artificial Sequence
  Synthetic oligonucleotide; CTGAAT chr2 60472503 60472522 60472519 +
gttgcaaagtttccttatgg

SEQ ID NO: 186093 - DNA, 20 bp, Artificial Sequence
  Synthetic oligonucleotide; GGGAAT chr2 60472563 60472582 60472579 +
taaaaaatatgcagcaaact

SEQ ID NO: 186094 - DNA, 20 bp, Artificial Sequence
  Synthetic oligonucleotide; TTGGGT chr2 60472618 60472637 60472634 +
actttacatttctacatata

SEQ ID NO: 186095 - DNA, 20 bp, Artificial Sequence
  Synthetic oligonucleotide; TGGGAT chr2 60472655 60472674 60472671 +
acaaagagctctaagcccag

SEQ ID NO: 186096 - DNA, 20 bp, Artificial Sequence
  Synthetic oligonucleotide; TGGAAT chr2 60472666 60472685 60472682 +
taagcccagtgggatgttcc

SEQ ID NO: 186097 - DNA, 20 bp, Artificial Sequence
  Synthetic oligonucleotide; CTGGGT chr2 60472763 60472782 60472779 +
tttgtttctgaaactaatca

SEQ ID NO: 186098 - DNA, 20 bp, Artificial Sequence
  Synthetic oligonucleotide; AGGAGT chr2 60472926 60472945 60472942 +
aaaaccacaggactctccac

SEQ ID NO: 186099 - DNA, 20 bp, Artificial Sequence
  Synthetic oligonucleotide; GTGAGT chr2 60473140 60473159 60473156 +
gtgttcatgtgtgtgtatat

SEQ ID NO: 186100 - DNA, 20 bp, Artificial Sequence
  Synthetic oligonucleotide; GTGAAT chr2 60473172 60473191 60473188 +
atatgtgtctgtgtacgtgt

SEQ ID NO: 186101 - DNA, 20 bp, Artificial Sequence
  Synthetic oligonucleotide; TGGAAT chr2 60473274 60473293 60473290 +
agcagtagagctgtcccacg

SEQ ID NO: 186102 - DNA, 20 bp, Artificial Sequence
  Synthetic oligonucleotide; CTGGGT chr2 60473318 60473337 60473334 +
gtgaccccctttctttcacc

SEQ ID NO: 186103 - DNA, 20 bp, Artificial Sequence
  Synthetic oligonucleotide; GAGAAT chr2 60473333 60473352 60473349 +
tcaccctgggtcttcaaaaa

SEQ ID NO: 186104 - DNA, 20 bp, Artificial Sequence
  Synthetic oligonucleotide; ATGGAT chr2 60473337 60473356 60473353 +
cctgggtcttcaaaaagaga

SEQ ID NO: 186105 - DNA, 20 bp, Artificial Sequence
  Synthetic oligonucleotide; AGGGGT chr2 60473358 60473377 60473374 +
tggatgacactatgatgagg

SEQ ID NO: 186106 - DNA, 20 bp, Artificial Sequence
  Synthetic oligonucleotide; CTGAAT chr2 60473522 60473541 60473538 +
tgaaggaacccattccagtt

SEQ ID NO: 186107 - DNA, 20 bp, Artificial Sequence
  Synthetic oligonucleotide; CAGAGT chr2 60473696 60473715 60473712 +
acttagattctctgacttat

SEQ ID NO: 186108 - DNA, 20 bp, Artificial Sequence
  Synthetic oligonucleotide; TTGAGT chr2 60473734 60473753 60473750 +
acattagctatgcctgtgac

SEQ ID NO: 186109 - DNA, 20 bp, Artificial Sequence
  Synthetic oligonucleotide; TAGAAT chr2 60473971 60473990 60473987 +
taattatagacactacaata

SEQ ID NO: 186110 - DNA, 20 bp, Artificial Sequence
  Synthetic oligonucleotide; AAGAGT chr2 60474132 60474151 60474148 +
ggttactaacttcacctttt

SEQ ID NO: 186111 - DNA, 20 bp, Artificial Sequence
  Synthetic oligonucleotide; TTGAAT chr2 60474404 60474423 60474420 +
aaatccttcatttcaaaagg

SEQ ID NO: 186112 - DNA, 20 bp, Artificial Sequence
  Synthetic oligonucleotide; TAGGAT chr2 60474409 60474428 60474425 +
cttcatttcaaaaggttgaa

SEQ ID NO: 186113 - DNA, 20 bp, Artificial Sequence
  Synthetic oligonucleotide; AAGAAT chr2 60474427 60474446 60474443 +
aataggatggtacttaaaaa

SEQ ID NO: 186114 - DNA, 20 bp, Artificial Sequence
  Synthetic oligonucleotide; TAGGGT chr2 60474449 60474468 60474465 +
gaattccagctggttaaatt

SEQ ID NO: 186115 - DNA, 20 bp, Artificial Sequence
  Synthetic oligonucleotide; GTGAAT chr2 60474518 60474537 60474534 +
caaagtattttcacttgatc

SEQ ID NO: 186116 - DNA, 20 bp, Artificial Sequence
  Synthetic oligonucleotide; TAGAAT chr2 60474559 60474578 60474575 +
tacactttaagcttttgcct

SEQ ID NO: 186117 - DNA, 20 bp, Artificial Sequence
  Synthetic oligonucleotide; CAGGAT chr2 60474679 60474698 60474695 +
ctatgcaaaatgtgtgttcc

SEQ ID NO: 186118 - DNA, 20 bp, Artificial Sequence
  Synthetic oligonucleotide; CCGAGT chr2 60474752 60474771 60474768 +
attcattcaacaaatattta

SEQ ID NO: 186119 - DNA, 20 bp, Artificial Sequence
  Synthetic oligonucleotide; ATGAGT chr2 60475002 60475021 60475018 +
tttgggaaagaggaaaactt

SEQ ID NO: 186120 - DNA, 20 bp, Artificial Sequence
  Synthetic oligonucleotide; AAGGAT chr2 60475029 60475048 60475045 +
aaacctggagagccaagaga

SEQ ID NO: 186121 - DNA, 20 bp, Artificial Sequence
  Synthetic oligonucleotide; CAGAGT chr2 60475098 60475117 60475114 +
agcaaagcccaaggtgggca

SEQ ID NO: 186122 - DNA, 20 bp, Artificial Sequence
  Synthetic oligonucleotide; GAGGAT chr2 60475172 60475191 60475188 +
gattcatccagttgacagcg

SEQ ID NO: 186123 - DNA, 20 bp, Artificial Sequence
  Synthetic oligonucleotide; ATGAAT chr2 60475354 60475373 60475370 +
ctcaattgtttcttccccca

SEQ ID NO: 186124 - DNA, 20 bp, Artificial Sequence
  Synthetic oligonucleotide; GTGGGT chr2 60475360 60475379 60475376 +
tgtttcttcccccaatgaat

SEQ ID NO: 186125 - DNA, 20 bp, Artificial Sequence
  Synthetic oligonucleotide; CTGAGT chr2 60475402 60475421 60475418 +
atttactatgttttattcct

SEQ ID NO: 186126 - DNA, 20 bp, Artificial Sequence
  Synthetic oligonucleotide; GAGGAT chr2 60475642 60475661 60475658 +
cttcttttcaaagccatggg

SEQ ID NO: 186127 - DNA, 20 bp, Artificial Sequence
  Synthetic oligonucleotide; AGGGGT chr2 60475648 60475667 60475664 +
ttcaaagccatggggaggat

SEQ ID NO: 186128 - DNA, 20 bp, Artificial Sequence
  Synthetic oligonucleotide; CTGAGT chr2 60475669 60475688 60475685 +
ggggtgcccttactcctgct

SEQ ID NO: 186129 - DNA, 20 bp, Artificial Sequence
  Synthetic oligonucleotide; GAGGAT chr2 60475683 60475702 60475699 +
cctgctctgagtcctcagct

SEQ ID NO: 186130 - DNA, 20 bp, Artificial Sequence
  Synthetic oligonucleotide; AGGGGT chr2 60475717 60475736 60475733 +
tgtgtagtgggggcaggggg

SEQ ID NO: 186131 - DNA, 20 bp, Artificial Sequence
  Synthetic oligonucleotide; CCGGAT chr2 60475816 60475835 60475832 +
attcccactgccaccactcc

SEQ ID NO: 186132 - DNA, 20 bp, Artificial Sequence
  Synthetic oligonucleotide; TTGAAT chr2 60475936 60475955 60475952 +
tcaccagctgtttcgtgact

SEQ ID NO: 186133 - DNA, 20 bp, Artificial Sequence
  Synthetic oligonucleotide; CTGGAT chr2 60475991 60476010 60476007 +
ccatctttaaaaggagaaga

SEQ ID NO: 186134 - DNA, 20 bp, Artificial Sequence
  Synthetic oligonucleotide; TGGGGT chr2 60476001 60476020 60476017 +
aaggagaagactggattaga

SEQ ID NO: 186135 - DNA, 20 bp, Artificial Sequence
  Synthetic oligonucleotide; CAGGAT chr2 60476092 60476111 60476108 +
aggccgtgctagaagctggc

SEQ ID NO: 186136 - DNA, 20 bp, Artificial Sequence
  Synthetic oligonucleotide; CTGGAT chr2 60476124 60476143 60476140 +
gttcccctcatgaccttgac

SEQ ID NO: 186137 - DNA, 20 bp, Artificial Sequence
  Synthetic oligonucleotide; GAGAGT chr2 60476146 60476165 60476162 +
ggatgaggagggccttatag

SEQ ID NO: 186138 - DNA, 20 bp, Artificial Sequence
  Synthetic oligonucleotide; GAGAGT chr2 60476192 60476211 60476208 +
caggctaatccttaggctta

SEQ ID NO: 186139 - DNA, 20 bp, Artificial Sequence
  Synthetic oligonucleotide; ATGGAT chr2 60476208 60476227 60476224 +
cttagagagtgagcctgatg

SEQ ID NO: 186140 - DNA, 20 bp, Artificial Sequence
  Synthetic oligonucleotide; GGGAGT chr2 60476459 60476478 60476475 +
cacacaggactctaagaaaa

SEQ ID NO: 186141 - DNA, 20 bp, Artificial Sequence
  Synthetic oligonucleotide; GAGGGT chr2 60476547 60476566 60476563 +
caccacaccccatcagcatg

SEQ ID NO: 186142 - DNA, 20 bp, Artificial Sequence
  Synthetic oligonucleotide; ATGAAT chr2 60476574 60476593 60476590 +
cttggaaagccatgtgtaaa

SEQ ID NO: 186143 - DNA, 20 bp, Artificial Sequence
  Synthetic oligonucleotide; CCGAAT chr2 60476982 60477001 60476998 +
cctgaacatatttctgtcac

SEQ ID NO: 186144 - DNA, 20 bp, Artificial Sequence
  Synthetic oligonucleotide; AAGGAT chr2 60477056 60477075 60477072 +
cccactcgagaaatgaagaa

SEQ ID NO: 186145 - DNA, 20 bp, Artificial Sequence
  Synthetic oligonucleotide; ATGGAT chr2 60477199 60477218 60477215 +
agaggcatggggctgtgaag

SEQ ID NO: 186146 - DNA, 20 bp, Artificial Sequence
  Synthetic oligonucleotide; GAGAAT chr2 60477210 60477229 60477226 +
gctgtgaagatggatgcgat

SEQ ID NO: 186147 - DNA, 20 bp, Artificial Sequence
  Synthetic oligonucleotide; TAGAAT chr2 60477405 60477424 60477421 +
gatcggtcttgagaaaatac

SEQ ID NO: 186148 - DNA, 20 bp, Artificial Sequence
  Synthetic oligonucleotide; ATGGGT chr2 60477430 60477449 60477446 +
taagctaaagaaaaccaaac

SEQ ID NO: 186149 - DNA, 20 bp, Artificial Sequence
  Synthetic oligonucleotide; AGGGAT chr2 60477450 60477469 60477466 +
atgggtggaggggcaagggg

SEQ ID NO: 186150 - DNA, 20 bp, Artificial Sequence
  Synthetic oligonucleotide; ATGGGT chr2 60477485 60477504 60477501 +
agaaatgcctaatgtagatg

SEQ ID NO: 186151 - DNA, 20 bp, Artificial Sequence
  Synthetic oligonucleotide; TAGAGT chr2 60477570 60477589 60477586 +
tgcacatgtatcccagaact

SEQ ID NO: 186152 - DNA, 20 bp, Artificial Sequence
  Synthetic oligonucleotide; GGGAGT chr2 60477694 60477713 60477710 +
agtggtgctgtgagagacaa

SEQ ID NO: 186153 - DNA, 20 bp, Artificial Sequence
  Synthetic oligonucleotide; TGGAGT chr2 60477990 60478009 60478006 +
tctcactctgttgcccaggc

SEQ ID NO: 186154 - DNA, 20 bp, Artificial Sequence
  Synthetic oligonucleotide; CCGAGT chr2 60478034 60478053 60478050 +
ctcactgcaacctccgcctc

SEQ ID NO: 186155 - DNA, 20 bp, Artificial Sequence
  Synthetic oligonucleotide; TGGGAT chr2 60478133 60478152 60478149 +
ttttgtattttttgtagaga

SEQ ID NO: 186156 - DNA, 20 bp, Artificial Sequence
  Synthetic oligonucleotide; CTGGGT chr2 60478157 60478176 60478173 +
atctcaccatgttgcccagg

SEQ ID NO: 186157 - DNA, 20 bp, Artificial Sequence
  Synthetic oligonucleotide; TGGAAT chr2 60478223 60478242 60478239 +
ctgccccaacagtcgccctg

SEQ ID NO: 186158 - DNA, 20 bp, Artificial Sequence
  Synthetic oligonucleotide; TTGAGT chr2 60478445 60478464 60478461 +
cacttgcctttctggcacta

SEQ ID NO: 186159 - DNA, 20 bp, Artificial Sequence
  Synthetic oligonucleotide; CAGAAT chr2 60478556 60478575 60478572 +
aaccagaactggccattctc

SEQ ID NO: 186160 - DNA, 20 bp, Artificial Sequence
  Synthetic oligonucleotide; AGGAAT chr2 60478681 60478700 60478697 +
tcaggctctaacatttcttc

SEQ ID NO: 186161 - DNA, 20 bp, Artificial Sequence
  Synthetic oligonucleotide; CTGAAT chr2 60478719 60478738 60478735 +
ccctctcgcctgaggtgagg

SEQ ID NO: 186162 - DNA, 20 bp, Artificial Sequence
  Synthetic oligonucleotide; AAGAGT chr2 60479024 60479043 60479040 +
ataccactgaccaatctgga

SEQ ID NO: 186163 - DNA, 20 bp, Artificial Sequence
  Synthetic oligonucleotide; TGGGGT chr2 60479097 60479116 60479113 +
gagcagcctcagtccagcca

SEQ ID NO: 186164 - DNA, 20 bp, Artificial Sequence
  Synthetic oligonucleotide; ATGAGT chr2 60479150 60479169 60479166 +
actaattctgctgattccat

SEQ ID NO: 186165 - DNA, 20 bp, Artificial Sequence
  Synthetic oligonucleotide; TTGAGT chr2 60479326 60479345 60479342 +
cccggagaccattttttgtt

SEQ ID NO: 186166 - DNA, 20 bp, Artificial Sequence
  Synthetic oligonucleotide; AAGAAT chr2 60479451 60479470 60479467 +
caggtctactaggaacagga

SEQ ID NO: 186167 - DNA, 20 bp, Artificial Sequence
  Synthetic oligonucleotide; CTGGGT chr2 60479522 60479541 60479538 +
agggcctcaaccttctactg

SEQ ID NO: 186168 - DNA, 20 bp, Artificial Sequence
  Synthetic oligonucleotide; GAGAGT chr2 60479596 60479615 60479612 +
tcaaaccctgtcaggcggtg

SEQ ID NO: 186169 - DNA, 20 bp, Artificial Sequence
  Synthetic oligonucleotide; AAGAGT chr2 60479714 60479733 60479730 +
tatcaatgtaattcaaggca

SEQ ID NO: 186170 - DNA, 20 bp, Artificial Sequence
  Synthetic oligonucleotide; AAGGGT chr2 60479721 60479740 60479737 +
gtaattcaaggcaaagagtc

SEQ ID NO: 186171 - DNA, 20 bp, Artificial Sequence
  Synthetic oligonucleotide; GGGGGT chr2 60480128 60480147 60480144 +
cagcgaggaggggggaaggt

SEQ ID NO: 186172 - DNA, 20 bp, Artificial Sequence
  Synthetic oligonucleotide; AAGGAT chr2 60480199 60480218 60480215 +
aggtaacacaaaggcctgta

SEQ ID NO: 186173 - DNA, 20 bp, Artificial Sequence
  Synthetic oligonucleotide; CTGGAT chr2 60480244 60480263 60480260 +
ggctctccactccatttctc

SEQ ID NO: 186174 - DNA, 20 bp, Artificial Sequence
  Synthetic oligonucleotide; TAGGAT chr2 60480390 60480409 60480406 +
agagcccctcaataaataat

SEQ ID NO: 186175 - DNA, 20 bp, Artificial Sequence
  Synthetic oligonucleotide; CTGGGT chr2 60480531 60480550 60480547 +
attcactaaccaaggagcct

SEQ ID NO: 186176 - DNA, 20 bp, Artificial Sequence
  Synthetic oligonucleotide; GAGGAT chr2 60480553 60480572 60480569 +
gggtcagccttgacccagga

SEQ ID NO: 186177 - DNA, 20 bp, Artificial Sequence
  Synthetic oligonucleotide; GCGGAT chr2 60480710 60480729 60480726 +
acacagttaaaagagctaca

SEQ ID NO: 186178 - DNA, 20 bp, Artificial Sequence
  Synthetic oligonucleotide; GTGAAT chr2 60480739 60480758 60480755 +
aaatttccttaagtcttctg

SEQ ID NO: 186179 - DNA, 20 bp, Artificial Sequence
  Synthetic oligonucleotide; CTGGGT chr2 60480762 60480781 60480778 +
aattggtctcaattactagt

SEQ ID NO: 186180 - DNA, 20 bp, Artificial Sequence
  Synthetic oligonucleotide; TTGAAT chr2 60480888 60480907 60480904 +
acagtgtgaagtacctccgc

SEQ ID NO: 186181 - DNA, 20 bp, Artificial Sequence
  Synthetic oligonucleotide; TGGAAT chr2 60481187 60481206 60481203 +
cccaaaactgggaagggccc

SEQ ID NO: 186182 - DNA, 20 bp, Artificial Sequence
  Synthetic oligonucleotide; TGGGAT chr2 60481192 60481211 60481208 +
aactgggaagggccctggaa

SEQ ID NO: 186183 - DNA, 20 bp, Artificial Sequence
  Synthetic oligonucleotide; AGGGAT chr2 60481311 60481330 60481327 +
cttgaaaacaaaaatgaagc

SEQ ID NO: 186184 - DNA, 20 bp, Artificial Sequence
  Synthetic oligonucleotide; AGGAGT chr2 60481453 60481472 60481469 +
aagcacatacacatgctctc

SEQ ID NO: 186185 - DNA, 20 bp, Artificial Sequence
  Synthetic oligonucleotide; GAGGGT chr2 60481461 60481480 60481477 +
acacatgctctcaggagtca

SEQ ID NO: 186186 - DNA, 20 bp, Artificial Sequence
  Synthetic oligonucleotide; AGGGAT chr2 60481523 60481542 60481539 +
gctggcaggtgaaggaggac

SEQ ID NO: 186187 - DNA, 20 bp, Artificial Sequence
  Synthetic oligonucleotide; GTGAAT chr2 60481612 60481631 60481628 +
cttctccatttccatggctc

SEQ ID NO: 186188 - DNA, 20 bp, Artificial Sequence
  Synthetic oligonucleotide; TGGAAT chr2 60481806 60481825 60481822 +
ttttgaccatcacagtgtcc

SEQ ID NO: 186189 - DNA, 20 bp, Artificial Sequence
  Synthetic oligonucleotide; GTGAAT chr2 60481835 60481854 60481851 +
ctcagcatgctctctgggaa

SEQ ID NO: 186190 - DNA, 20 bp, Artificial Sequence
  Synthetic oligonucleotide; GTGAAT chr2 60481848 60481867 60481864 +
ctgggaagtgaattgggaaa

SEQ ID NO: 186191 - DNA, 20 bp, Artificial Sequence
  Synthetic oligonucleotide; AGGGGT chr2 60481973 60481992 60481989 +
tagtcctgctgtcaaaagaa

SEQ ID NO: 186192 - DNA, 20 bp, Artificial Sequence
  Synthetic oligonucleotide; GCGGGT chr2 60482086 60482105 60482102 +
agaggcagacctgttaaggg

SEQ ID NO: 186193 - DNA, 20 bp, Artificial Sequence
  Synthetic oligonucleotide; GAGAGT chr2 60482147 60482166 60482163 +
atctctcatgattctatctt

SEQ ID NO: 186194 - DNA, 20 bp, Artificial Sequence
  Synthetic oligonucleotide; TGGAGT chr2 60482163 60482182 60482179 +
tcttgagagtttagtttggt

SEQ ID NO: 186195 - DNA, 20 bp, Artificial Sequence
  Synthetic oligonucleotide; TTGAGT chr2 60482176 60482195 60482192 +
gtttggttggagtttagttt

SEQ ID NO: 186196 - DNA, 20 bp, Artificial Sequence
  Synthetic oligonucleotide; TCGGGT chr2 60482189 60482208 60482205 +
ttagtttttgagttttttgt

SEQ ID NO: 186197 - DNA, 20 bp, Artificial Sequence
  Synthetic oligonucleotide; GAGGGT chr2 60482270 60482289 60482286 +
gttcacggagcggacagaag

SEQ ID NO: 186198 - DNA, 20 bp, Artificial Sequence
  Synthetic oligonucleotide; GAGAAT chr2 60482326 60482345 60482342 +
ctgatacatggagcagagcc

SEQ ID NO: 186199 - DNA, 20 bp, Artificial Sequence
  Synthetic oligonucleotide; CAGAGT chr2 60482431 60482450 60482447 +
gttcctgggcaccaggcata

SEQ ID NO: 186200 - DNA, 20 bp, Artificial Sequence
  Synthetic oligonucleotide; CAGGAT chr2 60482470 60482489 60482486 +
gtgacaactttgccacaaat

SEQ ID NO: 186201 - DNA, 20 bp, Artificial Sequence
  Synthetic oligonucleotide; AAGAAT chr2 60482503 60482522 60482519 +
ttaaatccacaggaagcaag

SEQ ID NO: 186202 - DNA, 20 bp, Artificial Sequence
  Synthetic oligonucleotide; ATGAAT chr2 60482538 60482557 60482554 +
gcttatttatagatttgcag

SEQ ID NO: 186203 - DNA, 20 bp, Artificial Sequence
  Synthetic oligonucleotide; CTGGAT chr2 60482757 60482776 60482773 +
tagtaccacactacatttaa

SEQ ID NO: 186204 - DNA, 20 bp, Artificial Sequence
  Synthetic oligonucleotide; TAGAAT chr2 60482796 60482815 60482812 +
ttatacagtgccttgctttc

SEQ ID NO: 186205 - DNA, 20 bp, Artificial Sequence
  Synthetic oligonucleotide; CAGAGT chr2 60482872 60482891 60482888 +
attgcagcaataattgatag

SEQ ID NO: 186206 - DNA, 20 bp, Artificial Sequence
  Synthetic oligonucleotide; CAGAGT chr2 60482901 60482920 60482917 +
gctggaagatcattgattgg

SEQ ID NO: 186207 - DNA, 20 bp, Artificial Sequence
  Synthetic oligonucleotide; AAGAAT chr2 60483060 60483079 60483076 +
tactttgcgagatgtttgag

SEQ ID NO: 186208 - DNA, 20 bp, Artificial Sequence
  Synthetic oligonucleotide; ATGAAT chr2 60483093 60483112 60483109 +
tgtgatttatattatttccc

SEQ ID NO: 186209 - DNA, 20 bp, Artificial Sequence
  Synthetic oligonucleotide; AAGGAT chr2 60483105 60483124 60483121 +
tatttcccatgaataactgc

SEQ ID NO: 186210 - DNA, 20 bp, Artificial Sequence
  Synthetic oligonucleotide; GTGGGT chr2 60483114 60483133 60483130 +
tgaataactgcaaggatagt

SEQ ID NO: 186211 - DNA, 20 bp, Artificial Sequence
  Synthetic oligonucleotide; GAGAAT chr2 60483128 60483147 60483144 +
gatagtgtgggtagttggag

SEQ ID NO: 186212 - DNA, 20 bp, Artificial Sequence
  Synthetic oligonucleotide; CAGGGT chr2 60483198 60483217 60483214 +
gaacaatgctagccaacaat

SEQ ID NO: 186213 - DNA, 20 bp, Artificial Sequence
  Synthetic oligonucleotide; TGGAAT chr2 60483571 60483590 60483587 +
gttcaacaactcagaccctg

SEQ ID NO: 186214 - DNA, 20 bp, Artificial Sequence
  Synthetic oligonucleotide; GAGGAT chr2 60483604 60483623 60483620 +
ttgtcagaaataactcaaga

SEQ ID NO: 186215 - DNA, 20 bp, Artificial Sequence
  Synthetic oligonucleotide; ATGAAT chr2 60483632 60483651 60483648 +
tcgtccccaggaaacatcaa

SEQ ID NO: 186216 - DNA, 20 bp, Artificial Sequence
  Synthetic oligonucleotide; GTGGAT chr2 60483658 60483677 60483674 +
gagctggcatattagcagac

SEQ ID NO: 186217 - DNA, 20 bp, Artificial Sequence
  Synthetic oligonucleotide; CTGGAT chr2 60483697 60483716 60483713 +
atctaaaacagaagatgtat

SEQ ID NO: 186218 - DNA, 20 bp, Artificial Sequence
  Synthetic oligonucleotide; AAGAAT chr2 60483723 60483742 60483739 +
gcttcagcagacaacaaagg

SEQ ID NO: 186219 - DNA, 20 bp, Artificial Sequence
  Synthetic oligonucleotide; CTGGGT chr2 60483736 60483755 60483752 +
acaaaggaagaatttgggga

SEQ ID NO: 186220 - DNA, 20 bp, Artificial Sequence
  Synthetic oligonucleotide; GAGGAT chr2 60483769 60483788 60483785 +
ctcgcccaaagcactagaag

SEQ ID NO: 186221 - DNA, 20 bp, Artificial Sequence
  Synthetic oligonucleotide; ATGAGT chr2 60483907 60483926 60483923 +
ttgaaactgaaccattataa

SEQ ID NO: 186222 - DNA, 20 bp, Artificial Sequence
  Synthetic oligonucleotide; AGGGGT chr2 60483991 60484010 60484007 +
tgtgacacttaccgcgtatg

SEQ ID NO: 186223 - DNA, 20 bp, Artificial Sequence
  Synthetic oligonucleotide; TTGGGT chr2 60484118 60484137 60484134 +
tgcttcgtctgtgacagttg

SEQ ID NO: 186224 - DNA, 20 bp, Artificial Sequence
  Synthetic oligonucleotide; CAGGGT chr2 60484142 60484161 60484158 +
gttgcccttctaggagctgg

SEQ ID NO: 186225 - DNA, 20 bp, Artificial Sequence
  Synthetic oligonucleotide; TCGAAT chr2 60484288 60484307 60484304 +
cacattcagctgaaaatagc

SEQ ID NO: 186226 - DNA, 20 bp, Artificial Sequence
  Synthetic oligonucleotide; TGGGGT chr2 60484421 60484440 60484437 +
tctctttagtcctcaacaac

SEQ ID NO: 186227 - DNA, 20 bp, Artificial Sequence
  Synthetic oligonucleotide; CCGGGT chr2 60484485 60484504 60484501 +
aagtaggttttacagataaa

SEQ ID NO: 186228 - DNA, 20 bp, Artificial Sequence
  Synthetic oligonucleotide; GGGAAT chr2 60484655 60484674 60484671 +
tgttttttcttaagagaagg

SEQ ID NO: 186229 - DNA, 20 bp, Artificial Sequence
  Synthetic oligonucleotide; GGGAAT chr2 60484779 60484798 60484795 +
agtataaaacctcaaattat

SEQ ID NO: 186230 - DNA, 20 bp, Artificial Sequence
  Synthetic oligonucleotide; GGGGGT chr2 60484823 60484842 60484839 +
cattatggaacatatgtgct

SEQ ID NO: 186231 - DNA, 20 bp, Artificial Sequence
  Synthetic oligonucleotide; AGGGGT chr2 60484845 60484864 60484861 +
gggtctggggagatgggaga

SEQ ID NO: 186232 - DNA, 20 bp, Artificial Sequence
  Synthetic oligonucleotide; CAGAGT chr2 60485177 60485196 60485193 +
tgcaaataaatgcagtcatc

SEQ ID NO: 186233 - DNA, 20 bp, Artificial Sequence
  Synthetic oligonucleotide; TGGAGT chr2 60485201 60485220 60485217 +
gtgtaatggaagtctggcct

SEQ ID NO: 186234 - DNA, 20 bp, Artificial Sequence
  Synthetic oligonucleotide; TGGGAT chr2 60485227 60485246 60485243 +
tactggcttatgaaatgcaa

SEQ ID NO: 186235 - DNA, 20 bp, Artificial Sequence
  Synthetic oligonucleotide; TGGGGT chr2 60485237 60485256 60485253 +
tgaaatgcaatgggatgagg

SEQ ID NO: 186236 - DNA, 20 bp, Artificial Sequence
  Synthetic oligonucleotide; TAGGGT chr2 60485282 60485301 60485298 +
tgaacggcacagtgaccagg

SEQ ID NO: 186237 - DNA, 20 bp, Artificial Sequence
  Synthetic oligonucleotide; AAGAAT chr2 60485307 60485326 60485323 +
tggagcaaggccactccagc

SEQ ID NO: 186238 - DNA, 20 bp, Artificial Sequence
  Synthetic oligonucleotide; AAGGAT chr2 60485316 60485335 60485332 +
gccactccagcaagaatgcc

SEQ ID NO: 186239 - DNA, 20 bp, Artificial Sequence
  Synthetic oligonucleotide; GTGGGT chr2 60485330 60485349 60485346 +
aatgccaaggatagcctgca

SEQ ID NO: 186240 - DNA, 20 bp, Artificial Sequence
  Synthetic oligonucleotide; AGGAAT chr2 60485413 60485432 60485429 +
ggctagcagatgctagtccc

SEQ ID NO: 186241 - DNA, 20 bp, Artificial Sequence
  Synthetic oligonucleotide; CTGAAT chr2 60485602 60485621 60485618 +
catccaacgtcacgaagctg

SEQ ID NO: 186242 - DNA, 20 bp, Artificial Sequence
  Synthetic oligonucleotide; TGGGGT chr2 60485667 60485686 60485683 +
agaaacaacgcttgctattc

SEQ ID NO: 186243 - DNA, 20 bp, Artificial Sequence
  Synthetic oligonucleotide; ATGGAT chr2 60485832 60485851 60485848 +
cagaagtagcccttcaccag

SEQ ID NO: 186244 - DNA, 20 bp, Artificial Sequence
  Synthetic oligonucleotide; AGGAAT chr2 60485907 60485926 60485923 +
cattttcaacaagaaggctg

SEQ ID NO: 186245 - DNA, 20 bp, Artificial Sequence
  Synthetic oligonucleotide; AGGGAT chr2 60486019 60486038 60486035 +
aaaatctttttagtatgttt

SEQ ID NO: 186246 - DNA, 20 bp, Artificial Sequence
  Synthetic oligonucleotide; AAGAGT chr2 60486077 60486096 60486093 +
ccttgttctatcagcaggtc

SEQ ID NO: 186247 - DNA, 20 bp, Artificial Sequence
  Synthetic oligonucleotide; ATGGAT chr2 60486116 60486135 60486132 +
aagctgttctccattctgaa

SEQ ID NO: 186248 - DNA, 20 bp, Artificial Sequence
  Synthetic oligonucleotide; GGGGAT chr2 60486171 60486190 60486187 +
atcctagggagactggtact

SEQ ID NO: 186249 - DNA, 20 bp, Artificial Sequence
  Synthetic oligonucleotide; CAGGGT chr2 60486179 60486198 60486195 +
gagactggtactggggattt

SEQ ID NO: 186250 - DNA, 20 bp, Artificial Sequence
  Synthetic oligonucleotide; GTGGGT chr2 60486194 60486213 60486210 +
gatttcagggtccttgttct

SEQ ID NO: 186251 - DNA, 20 bp, Artificial Sequence
  Synthetic oligonucleotide; GAGAAT chr2 60486219 60486238 60486235 +
tggaccatggctcctttcca

SEQ ID NO: 186252 - DNA, 20 bp, Artificial Sequence
  Synthetic oligonucleotide; ACGGAT chr2 60486345 60486364 60486361 +
ttctcacacaatgagaaaga

SEQ ID NO: 186253 - DNA, 20 bp, Artificial Sequence
  Synthetic oligonucleotide; AAGAGT chr2 60486362 60486381 60486378 +
agaacggatagccaaattct

SEQ ID NO: 186254 - DNA, 20 bp, Artificial Sequence
  Synthetic oligonucleotide; ATGAAT chr2 60486585 60486604 60486601 +
tgagatcctctggctttgag

SEQ ID NO: 186255 - DNA, 20 bp, Artificial Sequence
  Synthetic oligonucleotide; ATGGAT chr2 60486614 60486633 60486630 +
gcacagaaatgagcagcatg

SEQ ID NO: 186256 - DNA, 20 bp, Artificial Sequence
  Synthetic oligonucleotide; CAGGAT chr2 60486666 60486685 60486682 +
tgaacatgccaactcaacat

SEQ ID NO: 186257 - DNA, 20 bp, Artificial Sequence
  Synthetic oligonucleotide; CAGAGT chr2 60486740 60486759 60486756 +
acagaggtattacagtgtga

SEQ ID NO: 186258 - DNA, 20 bp, Artificial Sequence
  Synthetic oligonucleotide; GAGAAT chr2 60486761 60486780 60486777 +
agagtctgagcccacagtct

SEQ ID NO: 186259 - DNA, 20 bp, Artificial Sequence
  Synthetic oligonucleotide; GCGAAT chr2 60486821 60486840 60486837 +
aacaccctgggaagactact

SEQ ID NO: 186260 - DNA, 20 bp, Artificial Sequence
  Synthetic oligonucleotide; TGGAAT chr2 60486903 60486922 60486919 +
cttttccctgctaacagaaa

SEQ ID NO: 186261 - DNA, 20 bp, Artificial Sequence
  Synthetic oligonucleotide; CAGAAT chr2 60486949 60486968 60486965 +
ttttaagattactattctat

SEQ ID NO: 186262 - DNA, 20 bp, Artificial Sequence
  Synthetic oligonucleotide; GTGAGT chr2 60487044 60487063 60487060 +
atttaggagcgctagacaca

SEQ ID NO: 186263 - DNA, 20 bp, Artificial Sequence
  Synthetic oligonucleotide; AAGGAT chr2 60487093 60487112 60487109 +
tgccacaaggcaggaagggg

SEQ ID NO: 186264 - DNA, 20 bp, Artificial Sequence
  Synthetic oligonucleotide; AAGAGT chr2 60487185 60487204 60487201 +
attttgcctttaatcaatga

SEQ ID NO: 186265 - DNA, 20 bp, Artificial Sequence
  Synthetic oligonucleotide; GAGAGT chr2 60487333 60487352 60487349 +
accccacaatgccacacacc

SEQ ID NO: 186266 - DNA, 20 bp, Artificial Sequence
  Synthetic oligonucleotide; TGGGAT chr2 60487444 60487463 60487460 +
aaatgtagattatcttccct

SEQ ID NO: 186267 - DNA, 20 bp, Artificial Sequence
  Synthetic oligonucleotide; ATGAAT chr2 60487505 60487524 60487521 +
tcaacattagatatttaaaa

SEQ ID NO: 186268 - DNA, 20 bp, Artificial Sequence
  Synthetic oligonucleotide; GCGGAT chr2 60487599 60487618 60487615 +
ggcatgaaaaagaaggctta

SEQ ID NO: 186269 - DNA, 20 bp, Artificial Sequence
  Synthetic oligonucleotide; GAGGGT chr2 60487652 60487671 60487668 +
caaccacaccagcctttaac

SEQ ID NO: 186270 - DNA, 20 bp, Artificial Sequence
  Synthetic oligonucleotide; CAGAAT chr2 60487698 60487717 60487714 +
actcccttatttatgagcag

SEQ ID NO: 186271 - DNA, 20 bp, Artificial Sequence
  Synthetic oligonucleotide; CTGGAT chr2 60487815 60487834 60487831 +
atgaacctttaatgggaaat

SEQ ID NO: 186272 - DNA, 20 bp, Artificial Sequence
  Synthetic oligonucleotide; AAGAAT chr2 60487821 60487840 60487837 +
ctttaatgggaaatctggat

SEQ ID NO: 186273 - DNA, 20 bp, Artificial Sequence
  Synthetic oligonucleotide; TAGAAT chr2 60487949 60487968 60487965 +
tgacttggttttcccaactc

SEQ ID NO: 186274 - DNA, 20 bp, Artificial Sequence
  Synthetic oligonucleotide; CTGGGT chr2 60488043 60488062 60488059 +
tctgtgctattacttttgac

SEQ ID NO: 186275 - DNA, 20 bp, Artificial Sequence
  Synthetic oligonucleotide; AAGAGT chr2 60488112 60488131 60488128 +
aaacatttaaattatcctgg

SEQ ID NO: 186276 - DNA, 20 bp, Artificial Sequence
  Synthetic oligonucleotide; AAGAGT chr2 60488137 60488156 60488153 +
tttgtctcacgggctgttca

SEQ ID NO: 186277 - DNA, 20 bp, Artificial Sequence
  Synthetic oligonucleotide; AGGAGT chr2 60488170 60488189 60488186 +
cctttccttctaggaacatg

SEQ ID NO: 186278 - DNA, 20 bp, Artificial Sequence
  Synthetic oligonucleotide; GTGAAT chr2 60488174 60488193 60488190 +
tccttctaggaacatgagga

SEQ ID NO: 186279 - DNA, 20 bp, Artificial Sequence
  Synthetic oligonucleotide; CTGAGT chr2 60488212 60488231 60488228 +
tcaaagcctgtaaaagatac

SEQ ID NO: 186280 - DNA, 20 bp, Artificial Sequence
  Synthetic oligonucleotide; AAGAAT chr2 60488244 60488263 60488260 +
tttaactgaacaatgtctcc

SEQ ID NO: 186281 - DNA, 20 bp, Artificial Sequence
  Synthetic oligonucleotide; GGGAAT chr2 60488293 60488312 60488309 +
gaccgtctctttggtgcagt

SEQ ID NO: 186282 - DNA, 20 bp, Artificial Sequence
  Synthetic oligonucleotide; CAGGAT chr2 60488405 60488424 60488421 +
ataataggacaatgccataa

SEQ ID NO: 186283 - DNA, 20 bp, Artificial Sequence
  Synthetic oligonucleotide; GGGAAT chr2 60488598 60488617 60488614 +
aaatacttactgtactgcag

SEQ ID NO: 186284 - DNA, 20 bp, Artificial Sequence
  Synthetic oligonucleotide; TGGAGT chr2 60488761 60488780 60488777 +
tttgttttttgtttctgagg

SEQ ID NO: 186285 - DNA, 20 bp, Artificial Sequence
  Synthetic oligonucleotide; TGGAGT chr2 60488787 60488806 60488803 +
ttcgctcttgttgcccgggc

SEQ ID NO: 186286 - DNA, 20 bp, Artificial Sequence
  Synthetic oligonucleotide; CCGGGT chr2 60488831 60488850 60488847 +
ctcaccgcaatctccgcctc

SEQ ID NO: 186287 - DNA, 20 bp, Artificial Sequence
  Synthetic oligonucleotide; TGGGAT chr2 60488872 60488891 60488888 +
gcctcagcctcccaagtagc

SEQ ID NO: 186288 - DNA, 20 bp, Artificial Sequence
  Synthetic oligonucleotide; CGGGGT chr2 60488928 60488947 60488944 +
ttctgtatttttggtagaga

SEQ ID NO: 186289 - DNA, 20 bp, Artificial Sequence
  Synthetic oligonucleotide; TGGGAT chr2 60489007 60489026 60489023 +
acctcagcctcccaaagtgc

SEQ ID NO: 186290 - DNA, 20 bp, Artificial Sequence
  Synthetic oligonucleotide; AAGGGT chr2 60489115 60489134 60489131 +
aggtggtcaaaatgtttcta

SEQ ID NO: 186291 - DNA, 20 bp, Artificial Sequence
  Synthetic oligonucleotide; TAGAGT chr2 60489149 60489168 60489165 +
ccccaattaaactgttgctt

SEQ ID NO: 186292 - DNA, 20 bp, Artificial Sequence
  Synthetic oligonucleotide; TGGGGT chr2 60489229 60489248 60489245 +
aacactagcccacatgccaa

SEQ ID NO: 186293 - DNA, 20 bp, Artificial Sequence
  Synthetic oligonucleotide; CAGGAT chr2 60489468 60489487 60489484 +
aaaatagctgcctcatcatc

SEQ ID NO: 186294 - DNA, 20 bp, Artificial Sequence
  Synthetic oligonucleotide; CTGAGT chr2 60489554 60489573 60489570 +
acctatctcaaaagaaaatt

SEQ ID NO: 186295 - DNA, 20 bp, Artificial Sequence
  Synthetic oligonucleotide; CTGGGT chr2 60489643 60489662 60489659 +
tctttcccctctaggacact

SEQ ID NO: 186296 - DNA, 20 bp, Artificial Sequence
  Synthetic oligonucleotide; AGGGAT chr2 60489836 60489855 60489852 +
cactattaaagagagatcac

SEQ ID NO: 186297 - DNA, 20 bp, Artificial Sequence
  Synthetic oligonucleotide; ATGAAT chr2 60489842 60489861 60489858 +
taaagagagatcacagggat

SEQ ID NO: 186298 - DNA, 20 bp, Artificial Sequence
  Synthetic oligonucleotide; CTGAGT chr2 60489918 60489937 60489934 +
catgaaacaccatccatgcc

SEQ ID NO: 186299 - DNA, 20 bp, Artificial Sequence
  Synthetic oligonucleotide; ATGGAT chr2 60489932 60489951 60489948 +
catgccctgagtatcccaac

SEQ ID NO: 186300 - DNA, 20 bp, Artificial Sequence
  Synthetic oligonucleotide; AAGGGT chr2 60490202 60490221 60490218 +
acaggggagaactcggcatg

SEQ ID NO: 186301 - DNA, 20 bp, Artificial Sequence
  Synthetic oligonucleotide; GAGAAT chr2 60490214 60490233 60490230 +
tcggcatgaagggtataaca

SEQ ID NO: 186302 - DNA, 20 bp, Artificial Sequence
  Synthetic oligonucleotide; CAGAGT chr2 60490245 60490264 60490261 +
caactcatccaccccctttg

SEQ ID NO: 186303 - DNA, 20 bp, Artificial Sequence
  Synthetic oligonucleotide; CAGAGT chr2 60490293 60490312 60490309 +
tgctgcctttgtcttctgat

SEQ ID NO: 186304 - DNA, 20 bp, Artificial Sequence
  Synthetic oligonucleotide; TAGGAT chr2 60490323 60490342 60490339 +
cagcagccctctgtgatcta

SEQ ID NO: 186305 - DNA, 20 bp, Artificial Sequence
  Synthetic oligonucleotide; TGGAAT chr2 60490493 60490512 60490509 +
cttcttcttctcttacctcc

SEQ ID NO: 186306 - DNA, 20 bp, Artificial Sequence
  Synthetic oligonucleotide; AAGAAT chr2 60490551 60490570 60490567 +
tacctagtcaccttagcaag

SEQ ID NO: 186307 - DNA, 20 bp, Artificial Sequence
  Synthetic oligonucleotide; ATGAGT chr2 60490677 60490696 60490693 +
attaatttcatgtgttccca

SEQ ID NO: 186308 - DNA, 20 bp, Artificial Sequence
  Synthetic oligonucleotide; AGGAAT chr2 60490771 60490790 60490787 +
acatgatattcatatattct

SEQ ID NO: 186309 - DNA, 20 bp, Artificial Sequence
  Synthetic oligonucleotide; ATGAAT chr2 60490972 60490991 60490988 +
tatgctacacaaagattagc

SEQ ID NO: 186310 - DNA, 20 bp, Artificial Sequence
  Synthetic oligonucleotide; CAGAGT chr2 60491074 60491093 60491090 +
gccaggttggtaaagtctga

SEQ ID NO: 186311 - DNA, 20 bp, Artificial Sequence
  Synthetic oligonucleotide; GAGGAT chr2 60491426 60491445 60491442 +
actttgggaggccggggcag

SEQ ID NO: 186312 - DNA, 20 bp, Artificial Sequence
  Synthetic oligonucleotide; AGGAGT chr2 60491443 60491462 60491459 +
caggaggatcacctgaggtc

SEQ ID NO: 186313 - DNA, 20 bp, Artificial Sequence
  Synthetic oligonucleotide; AAGAGT chr2 60491633 60491652 60491649 +
tgcattccagcccgggcaac

SEQ ID NO: 186314 - DNA, 20 bp, Artificial Sequence
  Synthetic oligonucleotide; GGGAAT chr2 60491943 60491962 60491959 +
aaataccttggaaattgaga

SEQ ID NO: 186315 - DNA, 20 bp, Artificial Sequence
  Synthetic oligonucleotide; ATGGAT chr2 60491961 60491980 60491977 +
gagggaatctggagaggaag

SEQ ID NO: 186316 - DNA, 20 bp, Artificial Sequence
  Synthetic oligonucleotide; AGGAAT chr2 60491995 60492014 60492011 +
aacaaaaaccctcactttac

SEQ ID NO: 186317 - DNA, 20 bp, Artificial Sequence
  Synthetic oligonucleotide; ATGAAT chr2 60492056 60492075 60492072 +
cttaaggagaagacatactg

SEQ ID NO: 186318 - DNA, 20 bp, Artificial Sequence
  Synthetic oligonucleotide; CTGAGT chr2 60492066 60492085 60492082 +
agacatactgatgaataaga

SEQ ID NO: 186319 - DNA, 20 bp, Artificial Sequence
  Synthetic oligonucleotide; GAGGAT chr2 60492130 60492149 60492146 +
actttgggaggtcaaggcag

SEQ ID NO: 186320 - DNA, 20 bp, Artificial Sequence
  Synthetic oligonucleotide; AGGAGT chr2 60492147 60492166 60492163 +
caggaggatcactggagccc

SEQ ID NO: 186321 - DNA, 20 bp, Artificial Sequence
  Synthetic oligonucleotide; CAGGAT chr2 60492255 60492274 60492271 +
tactcaggaggctgaggtga

SEQ ID NO: 186322 - DNA, 20 bp, Artificial Sequence
  Synthetic oligonucleotide; TAGAAT chr2 60492395 60492414 60492411 +
caactaattgggctaatgtt

SEQ ID NO: 186323 - DNA, 20 bp, Artificial Sequence
  Synthetic oligonucleotide; TTGGGT chr2 60492432 60492451 60492448 +
tagggaagaaaaaaacttag

SEQ ID NO: 186324 - DNA, 20 bp, Artificial Sequence
  Synthetic oligonucleotide; TGGAAT chr2 60492470 60492489 60492486 +
ttttactttttgaagcctgc

SEQ ID NO: 186325 - DNA, 20 bp, Artificial Sequence
  Synthetic oligonucleotide; GTGGAT chr2 60492568 60492587 60492584 +
acccaaatgctctgcttatg

SEQ ID NO: 186326 - DNA, 20 bp, Artificial Sequence
  Synthetic oligonucleotide; CAGAAT chr2 60492649 60492668 60492665 +
taccaacttctataaaatct

SEQ ID NO: 186327 - DNA, 20 bp, Artificial Sequence
  Synthetic oligonucleotide; TAGAGT chr2 60492711 60492730 60492727 +
gtgctaccctgaaagacggc

SEQ ID NO: 186328 - DNA, 20 bp, Artificial Sequence
  Synthetic oligonucleotide; GTGGGT chr2 60492772 60492791 60492788 +
gacttggttccactccagtg

SEQ ID NO: 186329 - DNA, 20 bp, Artificial Sequence
  Synthetic oligonucleotide; TTGGAT chr2 60492854 60492873 60492870 +
cattcattttaagtgtacag

SEQ ID NO: 186330 - DNA, 20 bp, Artificial Sequence
  Synthetic oligonucleotide; GAGAAT chr2 60493027 60493046 60493043 +
ccacctaccaccacagtgtt

SEQ ID NO: 186331 - DNA, 20 bp, Artificial Sequence
  Synthetic oligonucleotide; TAGAAT chr2 60493035 60493054 60493051 +
caccacagtgttgagaattc

SEQ ID NO: 186332 - DNA, 20 bp, Artificial Sequence
  Synthetic oligonucleotide; CAGGAT chr2 60493061 60493080 60493077 +
ttgttacaaatggactcata

SEQ ID NO: 186333 - DNA, 20 bp, Artificial Sequence
  Synthetic oligonucleotide; CAGAAT chr2 60493099 60493118 60493115 +
gtttaatttcttccacagag

SEQ ID NO: 186334 - DNA, 20 bp, Artificial Sequence
  Synthetic oligonucleotide; TGGGAT chr2 60493110 60493129 60493126 +
tccacagagcagaatgattc

SEQ ID NO: 186335 - DNA, 20 bp, Artificial Sequence
  Synthetic oligonucleotide; TGGAGT chr2 60493128 60493147 60493144 +
tctgggattcatccatggtg

SEQ ID NO: 186336 - DNA, 20 bp, Artificial Sequence
  Synthetic oligonucleotide; TTGAGT chr2 60493159 60493178 60493175 +
actctttcattcttctactg

SEQ ID NO: 186337 - DNA, 20 bp, Artificial Sequence
  Synthetic oligonucleotide; GTGGGT chr2 60493212 60493231 60493228 +
ttcaacctattggttgccat

SEQ ID NO: 186338 - DNA, 20 bp, Artificial Sequence
  Synthetic oligonucleotide; AGGAAT chr2 60493279 60493298 60493295 +
cactgtgtagatgtgtttat

SEQ ID NO: 186339 - DNA, 20 bp, Artificial Sequence
  Synthetic oligonucleotide; TTGAGT chr2 60493344 60493363 60493360 +
tcgagaacacagaaaaggtt

SEQ ID NO: 186340 - DNA, 20 bp, Artificial Sequence
  Synthetic oligonucleotide; TTGAGT chr2 60493350 60493369 60493366 +
acacagaaaaggttttgagt

SEQ ID NO: 186341 - DNA, 20 bp, Artificial Sequence
  Synthetic oligonucleotide; GAGAGT chr2 60493413 60493432 60493429 +
ccctcccaccccattccctg

SEQ ID NO: 186342 - DNA, 20 bp, Artificial Sequence
  Synthetic oligonucleotide; CCGAAT chr2 60493480 60493499 60493496 +
ctaccaaatgtcatcctatt

SEQ ID NO: 186343 - DNA, 20 bp, Artificial Sequence
  Synthetic oligonucleotide; TTGAAT chr2 60493556 60493575 60493572 +
ttcttaaaatgggcattcat

SEQ ID NO: 186344 - DNA, 20 bp, Artificial Sequence
  Synthetic oligonucleotide; CTGGGT chr2 60493582 60493601 60493598 +
caggccaaataaattggact

SEQ ID NO: 186345 - DNA, 20 bp, Artificial Sequence
  Synthetic oligonucleotide; CGGAGT chr2 60493612 60493631 60493628 +
gataacttaagtgtggtgtt

SEQ ID NO: 186346 - DNA, 20 bp, Artificial Sequence
  Synthetic oligonucleotide; GAGAGT chr2 60493677 60493696 60493693 +
cctcccccattagcagcatg

SEQ ID NO: 186347 - DNA, 20 bp, Artificial Sequence
  Synthetic oligonucleotide; GGGGAT chr2 60493866 60493885 60493882 +
gcttggccatggcagggctg

SEQ ID NO: 186348 - DNA, 20 bp, Artificial Sequence
  Synthetic oligonucleotide; CTGAGT chr2 60493933 60493952 60493949 +
ggcctccagtgggaccagag

SEQ ID NO: 186349 - DNA, 20 bp, Artificial Sequence
  Synthetic oligonucleotide; GGGAGT chr2 60493979 60493998 60493995 +
gctgattaaaggaaggtacg

SEQ ID NO: 186350 - DNA, 20 bp, Artificial Sequence
  Synthetic oligonucleotide; ATGGGT chr2 60494103 60494122 60494119 +
cagagagaaagtgaagcccc

SEQ ID NO: 186351 - DNA, 20 bp, Artificial Sequence
  Synthetic oligonucleotide; AAGAGT chr2 60494194 60494213 60494210 +
ttgagctacacaggctaagc

SEQ ID NO: 186352 - DNA, 20 bp, Artificial Sequence
  Synthetic oligonucleotide; GAGGGT chr2 60494204 60494223 60494220 +
caggctaagcaagagtgaga

SEQ ID NO: 186353 - DNA, 20 bp, Artificial Sequence
  Synthetic oligonucleotide; GAGAGT chr2 60494230 60494249 60494246 +
gatgctgacaggccacatgg

SEQ ID NO: 186354 - DNA, 20 bp, Artificial Sequence
  Synthetic oligonucleotide; GGGAGT chr2 60494258 60494277 60494274 +
gaagacgtgggctgggagct

SEQ ID NO: 186355 - DNA, 20 bp, Artificial Sequence
  Synthetic oligonucleotide; CTGGGT chr2 60494335 60494354 60494351 +
gtcacctccccactctggac

SEQ ID NO: 186356 - DNA, 20 bp, Artificial Sequence
  Synthetic oligonucleotide; GGGAGT chr2 60494425 60494444 60494441 +
tatgcaatttttgccaagat

SEQ ID NO: 186357 - DNA, 20 bp, Artificial Sequence
  Synthetic oligonucleotide; AAGAGT chr2 60494441 60494460 60494457 +
agatgggagtatggggagag

SEQ ID NO: 186358 - DNA, 20 bp, Artificial Sequence
  Synthetic oligonucleotide; TGGAAT chr2 60494623 60494642 60494639 +
ccaaatgttctttcttcagc

SEQ ID NO: 186359 - DNA, 20 bp, Artificial Sequence
  Synthetic oligonucleotide; AGGAAT chr2 60494655 60494674 60494671 +
tatggactcatccgtaaaat

SEQ ID NO: 186360 - DNA, 20 bp, Artificial Sequence
  Synthetic oligonucleotide; TAGGGT chr2 60494680 60494699 60494696 +
taataatagtatatgcttca

SEQ ID NO: 186361 - DNA, 20 bp, Artificial Sequence
  Synthetic oligonucleotide; ATGAGT chr2 60494701 60494720 60494717 +
agggtttgtatgaaaataaa

SEQ ID NO: 186362 - DNA, 20 bp, Artificial Sequence
  Synthetic oligonucleotide; CAGAGT chr2 60494730 60494749 60494746 +
tatttgtaaagttcctagag

SEQ ID NO: 186363 - DNA, 20 bp, Artificial Sequence
  Synthetic oligonucleotide; TTGGGT chr2 60494835 60494854 60494851 +
ccctttccccaattcctagt

SEQ ID NO: 186364 - DNA, 20 bp, Artificial Sequence
  Synthetic oligonucleotide; AAGAAT chr2 60494875 60494894 60494891 +
aaagggagaggaaaaaggaa

SEQ ID NO: 186365 - DNA, 20 bp, Artificial Sequence
  Synthetic oligonucleotide; ATGGAT chr2 60494960 60494979 60494976 +
ctgataggtgcctatatgtg

SEQ ID NO: 186366 - DNA, 20 bp, Artificial Sequence
  Synthetic oligonucleotide; ATGGGT chr2 60494964 60494983 60494980 +
taggtgcctatatgtgatgg

SEQ ID NO: 186367 - DNA, 20 bp, Artificial Sequence
  Synthetic oligonucleotide; GAGAGT chr2 60495011 60495030 60495027 +
atggacaattatgaggaggg

SEQ ID NO: 186368 - DNA, 20 bp, Artificial Sequence
  Synthetic oligonucleotide; GGGAGT chr2 60495052 60495071 60495068 +
ttcacctcctttacaatttt

SEQ ID NO: 186369 - DNA, 20 bp, Artificial Sequence
  Synthetic oligonucleotide; AAGAGT chr2 60495314 60495333 60495330 +
gaccctggtgtgttatgtct

SEQ ID NO: 186370 - DNA, 20 bp, Artificial Sequence
  Synthetic oligonucleotide; TGGAAT chr2 60495372 60495391 60495388 +
tacctgtatggactttgcac

SEQ ID NO: 186371 - DNA, 20 bp, Artificial Sequence
  Synthetic oligonucleotide; AGGAAT chr2 60495492 60495511 60495508 +
ctagctgccttccttatcac

SEQ ID NO: 186372 - DNA, 20 bp, Artificial Sequence
  Synthetic oligonucleotide; CAGAGT chr2 60495522 60495541 60495538 +
cccaaggtccatcagtacct

SEQ ID NO: 186373 - DNA, 20 bp, Artificial Sequence
  Synthetic oligonucleotide; CAGGGT chr2 60495583 60495602 60495599 +
ggcacagtcaggctgttttc

SEQ ID NO: 186374 - DNA, 20 bp, Artificial Sequence
  Synthetic oligonucleotide; TGGGGT chr2 60495588 60495607 60495604 +
agtcaggctgttttccaggg

SEQ ID NO: 186375 - DNA, 20 bp, Artificial Sequence
  Synthetic oligonucleotide; GAGAGT chr2 60495673 60495692 60495689 +
tgttgtgatccctgtggttt

SEQ ID NO: 186376 - DNA, 20 bp, Artificial Sequence
  Synthetic oligonucleotide; GAGAGT chr2 60495901 60495920 60495917 +
aatggtgctgtcatttttct

SEQ ID NO: 186377 - DNA, 20 bp, Artificial Sequence
  Synthetic oligonucleotide; AAGGGT chr2 60495918 60495937 60495934 +
tctgagagtctctaaattac

SEQ ID NO: 186378 - DNA, 20 bp, Artificial Sequence
  Synthetic oligonucleotide; AGGGAT chr2 60496007 60496026 60496023 +
gaacaaacaaaccaaagaga

SEQ ID NO: 186379 - DNA, 20 bp, Artificial Sequence
  Synthetic oligonucleotide; TAGGAT chr2 60496060 60496079 60496076 +
tcaattgataatgaaggctt

SEQ ID NO: 186380 - DNA, 20 bp, Artificial Sequence
  Synthetic oligonucleotide; ATGGAT chr2 60496109 60496128 60496125 +
gcaatgcacctgtgcaggaa

SEQ ID NO: 186381 - DNA, 20 bp, Artificial Sequence
  Synthetic oligonucleotide; GGGAAT chr2 60496125 60496144 60496141 +
ggaaatggattacggaaaca

SEQ ID NO: 186382 - DNA, 20 bp, Artificial Sequence
  Synthetic oligonucleotide; CAGAAT chr2 60496225 60496244 60496241 +
ggaagtccaatacacgttta

SEQ ID NO: 186383 - DNA, 20 bp, Artificial Sequence
  Synthetic oligonucleotide; CAGGGT chr2 60496273 60496292 60496289 +
aggctaccacagatggggga

SEQ ID NO: 186384 - DNA, 20 bp, Artificial Sequence
  Synthetic oligonucleotide; GGGAGT chr2 60496279 60496298 60496295 +
ccacagatgggggacagggt

SEQ ID NO: 186385 - DNA, 20 bp, Artificial Sequence
  Synthetic oligonucleotide; AGGGAT chr2 60496316 60496335 60496332 +
gtggtgttactgaggggcaa

SEQ ID NO: 186386 - DNA, 20 bp, Artificial Sequence
  Synthetic oligonucleotide; GTGAGT chr2 60496464 60496483 60496480 +
gctctggacacacagcaaaa

SEQ ID NO: 186387 - DNA, 20 bp, Artificial Sequence
  Synthetic oligonucleotide; CAGAGT chr2 60496471 60496490 60496487 +
acacacagcaaaagtgagtt

SEQ ID NO: 186388 - DNA, 20 bp, Artificial Sequence
  Synthetic oligonucleotide; GAGGAT chr2 60496505 60496524 60496521 +
gcaggaaagagggaagagag

SEQ ID NO: 186389 - DNA, 20 bp, Artificial Sequence
  Synthetic oligonucleotide; AAGGAT chr2 60496546 60496565 60496562 +
ctttgctgcaggttcaaggc

SEQ ID NO: 186390 - DNA, 20 bp, Artificial Sequence
  Synthetic oligonucleotide; GTGAGT chr2 60496583 60496602 60496599 +
accccttctggaagagcctg

SEQ ID NO: 186391 - DNA, 20 bp, Artificial Sequence
  Synthetic oligonucleotide; TGGAAT chr2 60496667 60496686 60496683 +
gcaggggcctgggccattta

SEQ ID NO: 186392 - DNA, 20 bp, Artificial Sequence
  Synthetic oligonucleotide; GTGAGT chr2 60496748 60496767 60496764 +
ttcccactctaggttccact

SEQ ID NO: 186393 - DNA, 20 bp, Artificial Sequence
  Synthetic oligonucleotide; AGGAGT chr2 60496790 60496809 60496806 +
tctctcactatgctcccaag

SEQ ID NO: 186394 - DNA, 20 bp, Artificial Sequence
  Synthetic oligonucleotide; CTGGAT chr2 60496828 60496847 60496844 +
ccttcctcaaatctccctca

SEQ ID NO: 186395 - DNA, 20 bp, Artificial Sequence
  Synthetic oligonucleotide; CTGAAT chr2 60496868 60496887 60496884 +
cctgaaaagcagcatgcaaa

SEQ ID NO: 186396 - DNA, 20 bp, Artificial Sequence
  Synthetic oligonucleotide; ATGAGT chr2 60496917 60496936 60496933 +
cccatggacagtcataagag

SEQ ID NO: 186397 - DNA, 20 bp, Artificial Sequence
  Synthetic oligonucleotide; CTGGAT chr2 60496974 60496993 60496990 +
acgattacttcacgataaat

SEQ ID NO: 186398 - DNA, 20 bp, Artificial Sequence
  Synthetic oligonucleotide; TTGAGT chr2 60497040 60497059 60497056 +
tctctactcctcccccagtg

SEQ ID NO: 186399 - DNA, 20 bp, Artificial Sequence
  Synthetic oligonucleotide; GGGAGT chr2 60497051 60497070 60497067 +
cccccagtgttgagtggaca

SEQ ID NO: 186400 - DNA, 20 bp, Artificial Sequence
  Synthetic oligonucleotide; AGGAAT chr2 60497232 60497251 60497248 +
tagagaaacattccattgaa

SEQ ID NO: 186401 - DNA, 20 bp, Artificial Sequence
  Synthetic oligonucleotide; CAGAAT chr2 60497330 60497349 60497346 +
tttgatcaagtcagattttt

SEQ ID NO: 186402 - DNA, 20 bp, Artificial Sequence
  Synthetic oligonucleotide; ATGAAT chr2 60497336 60497355 60497352 +
caagtcagatttttcagaat

SEQ ID NO: 186403 - DNA, 20 bp, Artificial Sequence
  Synthetic oligonucleotide; AAGGAT chr2 60497417 60497436 60497433 +
agccctcaggttagcaggcc

SEQ ID NO: 186404 - DNA, 20 bp, Artificial Sequence
  Synthetic oligonucleotide; GAGAGT chr2 60497427 60497446 60497443 +
ttagcaggccaaggatatat

SEQ ID NO: 186405 - DNA, 20 bp, Artificial Sequence
  Synthetic oligonucleotide; CTGAAT chr2 60497463 60497482 60497479 +
ctagacttaaactgccgctc

SEQ ID NO: 186406 - DNA, 20 bp, Artificial Sequence
  Synthetic oligonucleotide; TTGAAT chr2 60497468 60497487 60497484 +
cttaaactgccgctcctgaa

SEQ ID NO: 186407 - DNA, 20 bp, Artificial Sequence
  Synthetic oligonucleotide; AGGAAT chr2 60497514 60497533 60497530 +
gattcatggcccctaacatc

SEQ ID NO: 186408 - DNA, 20 bp, Artificial Sequence
  Synthetic oligonucleotide; CTGGAT chr2 60497631 60497650 60497647 +
aataataataatagcttcca

SEQ ID NO: 186409 - DNA, 20 bp, Artificial Sequence
  Synthetic oligonucleotide; AAGGAT chr2 60497826 60497845 60497842 +
tccagtagagaaatgatcaa

SEQ ID NO: 186410 - DNA, 20 bp, Artificial Sequence
  Synthetic oligonucleotide; CAGGAT chr2 60497869 60497888 60497885 +
atgaaaccaagcttcctctg

SEQ ID NO: 186411 - DNA, 20 bp, Artificial Sequence
  Synthetic oligonucleotide; GAGGAT chr2 60497928 60497947 60497944 +
gacccaccgcttcattggcc

SEQ ID NO: 186412 - DNA, 20 bp, Artificial Sequence
  Synthetic oligonucleotide; CAGGGT chr2 60497948 60497967 60497964 +
gaggatgaccccataaaggt

SEQ ID NO: 186413 - DNA, 20 bp, Artificial Sequence
  Synthetic oligonucleotide; AGGGGT chr2 60498037 60498056 60498053 +
cctggcagaccctcaagagc

SEQ ID NO: 186414 - DNA, 20 bp, Artificial Sequence
  Synthetic oligonucleotide; TGGGGT chr2 60498079 60498098 60498095 +
gacatcactcttagcagggc

SEQ ID NO: 186415 - DNA, 20 bp, Artificial Sequence
  Synthetic oligonucleotide; GTGAGT chr2 60498083 60498102 60498099 +
tcactcttagcagggctggg

SEQ ID NO: 186416 - DNA, 20 bp, Artificial Sequence
  Synthetic oligonucleotide; GAGAAT chr2 60498100 60498119 60498116 +
ggggtgagtcaaaagtctgg

SEQ ID NO: 186417 - DNA, 20 bp, Artificial Sequence
  Synthetic oligonucleotide; GGGGAT chr2 60498117 60498136 60498133 +
tgggagaatggaggtgtgga

SEQ ID NO: 186418 - DNA, 20 bp, Artificial Sequence
  Synthetic oligonucleotide; CTGGGT chr2 60498125 60498144 60498141 +
tggaggtgtggaggggataa

SEQ ID NO: 186419 - DNA, 20 bp, Artificial Sequence
  Synthetic oligonucleotide; ACGGGT chr2 60498162 60498181 60498178 +
caggaagggcctctatgtag

SEQ ID NO: 186420 - DNA, 20 bp, Artificial Sequence
  Synthetic oligonucleotide; AGGGGT chr2 60498402 60498421 60498418 +
acccaggctgggctggacag

SEQ ID NO: 186421 - DNA, 20 bp, Artificial Sequence
  Synthetic oligonucleotide; CAGGGT chr2 60498420 60498439 60498436 +
agaggggtcccacaagatca

SEQ ID NO: 186422 - DNA, 20 bp, Artificial Sequence
  Synthetic oligonucleotide; TAGAAT chr2 60498520 60498539 60498536 +
cccatacccacttcccttcc

SEQ ID NO: 186423 - DNA, 20 bp, Artificial Sequence
  Synthetic oligonucleotide; ATGGAT chr2 60498802 60498821 60498818 +
ggcttaaggaagcctctctg

SEQ ID NO: 186424 - DNA, 20 bp, Artificial Sequence
  Synthetic oligonucleotide; TTGAAT chr2 60498839 60498858 60498855 +
tatgtaccttatacatacat

SEQ ID NO: 186425 - DNA, 20 bp, Artificial Sequence
  Synthetic oligonucleotide; GTGGGT chr2 60498933 60498952 60498949 +
acaggaagcaggtggtggtg

SEQ ID NO: 186426 - DNA, 20 bp, Artificial Sequence
  Synthetic oligonucleotide; AAGAAT chr2 60499028 60499047 60499044 +
ccacacaggcatccaaaggg

SEQ ID NO: 186427 - DNA, 20 bp, Artificial Sequence
  Synthetic oligonucleotide; GCGAGT chr2 60499217 60499236 60499233 +
gcaagacagccatgtgcaag

SEQ ID NO: 186428 - DNA, 20 bp, Artificial Sequence
  Synthetic oligonucleotide; GTGGAT chr2 60499221 60499240 60499237 +
gacagccatgtgcaaggcga

SEQ ID NO: 186429 - DNA, 20 bp, Artificial Sequence
  Synthetic oligonucleotide; AGGGGT chr2 60499257 60499276 60499273 +
cgtcactcccacagagctgc

SEQ ID NO: 186430 - DNA, 20 bp, Artificial Sequence
  Synthetic oligonucleotide; TAGAGT chr2 60499524 60499543 60499540 +
gactcatgtgtagctgactt

SEQ ID NO: 186431 - DNA, 20 bp, Artificial Sequence
  Synthetic oligonucleotide; AGGGGT chr2 60499676 60499695 60499692 +
catgaagctccccggaccaa

SEQ ID NO: 186432 - DNA, 20 bp, Artificial Sequence
  Synthetic oligonucleotide; TTGAGT chr2 60499710 60499729 60499726 +
ctgaaggaaaccgctcaacc

SEQ ID NO: 186433 - DNA, 20 bp, Artificial Sequence
  Synthetic oligonucleotide; TAGGGT chr2 60500130 60500149 60500146 +
ttgccctgggcactgagggc

SEQ ID NO: 186434 - DNA, 20 bp, Artificial Sequence
  Synthetic oligonucleotide; CTGGAT chr2 60500159 60500178 60500175 +
cagaggcctgcggctgtgcc

SEQ ID NO: 186435 - DNA, 20 bp, Artificial Sequence
  Synthetic oligonucleotide; GAGAGT chr2 60500230 60500249 60500246 +
tgtgtgagagcggtggtctt

SEQ ID NO: 186436 - DNA, 20 bp, Artificial Sequence
  Synthetic oligonucleotide; AGGGAT chr2 60500283 60500302 60500299 +
ggaggggacagggggcaggt

SEQ ID NO: 186437 - DNA, 20 bp, Artificial Sequence
  Synthetic oligonucleotide; AAGAAT chr2 60500513 60500532 60500529 +
cccctgagaaaaaatggcag

SEQ ID NO: 186438 - DNA, 20 bp, Artificial Sequence
  Synthetic oligonucleotide; TGGAAT chr2 60500540 60500559 60500556 +
gaagggactacgtgtattga

SEQ ID NO: 186439 - DNA, 20 bp, Artificial Sequence
  Synthetic oligonucleotide; CAGGGT chr2 60500581 60500600 60500597 +
cacttcccaactcctcagga

SEQ ID NO: 186440 - DNA, 20 bp, Artificial Sequence
  Synthetic oligonucleotide; GTGGAT chr2 60500721 60500740 60500737 +
gcacctcacttcaagccttg

SEQ ID NO: 186441 - DNA, 20 bp, Artificial Sequence
  Synthetic oligonucleotide; CTGGAT chr2 60500768 60500787 60500784 +
tcccaagttagacagatgag

SEQ ID NO: 186442 - DNA, 20 bp, Artificial Sequence
  Synthetic oligonucleotide; TGGGGT chr2 60500886 60500905 60500902 +
atgacattgtatggccaacc

SEQ ID NO: 186443 - DNA, 20 bp, Artificial Sequence
  Synthetic oligonucleotide; AAGAGT chr2 60500911 60500930 60500927 +
ttgctgatggaactagttaa

SEQ ID NO: 186444 - DNA, 20 bp, Artificial Sequence
  Synthetic oligonucleotide; CTGGGT chr2 60500936 60500955 60500952 +
tgtctgtgaagcaagcctag

SEQ ID NO: 186445 - DNA, 20 bp, Artificial Sequence
  Synthetic oligonucleotide; CTGGGT chr2 60500958 60500977 60500974 +
gggtgggcttgcaagcattt

SEQ ID NO: 186446 - DNA, 20 bp, Artificial Sequence
  Synthetic oligonucleotide; TGGAAT chr2 60501248 60501267 60501264 +
tgctacttgccagaacaaaa

SEQ ID NO: 186447 - DNA, 20 bp, Artificial Sequence
  Synthetic oligonucleotide; TCGGGT chr2 60501426 60501445 60501442 +
cctggtttgtaagttctctt

SEQ ID NO: 186448 - DNA, 20 bp, Artificial Sequence
  Synthetic oligonucleotide; CTGAGT chr2 60501438 60501457 60501454 +
gttctctttcgggtgcttcc

SEQ ID NO: 186449 - DNA, 20 bp, Artificial Sequence
  Synthetic oligonucleotide; CAGAGT chr2 60501511 60501530 60501527 +
ttttttttttttttttgaga

SEQ ID NO: 186450 - DNA, 20 bp, Artificial Sequence
  Synthetic oligonucleotide; TGGGGT chr2 60501537 60501556 60501553 +
ttcgctcttgttgcccaggc

SEQ ID NO: 186451 - DNA, 20 bp, Artificial Sequence
  Synthetic oligonucleotide; CTGGGT chr2 60501578 60501597 60501594 +
cggctcaccacctctgcctc

SEQ ID NO: 186452 - DNA, 20 bp, Artificial Sequence
  Synthetic oligonucleotide; CTGAGT chr2 60501610 60501629 60501626 +
aattctcctccctcagcctc

SEQ ID NO: 186453 - DNA, 20 bp, Artificial Sequence
  Synthetic oligonucleotide; TGGGAT chr2 60501619 60501638 60501635 +
ccctcagcctcctgagtagc

SEQ ID NO: 186454 - DNA, 20 bp, Artificial Sequence
  Synthetic oligonucleotide; TGGAAT chr2 60501753 60501772 60501769 +
acctcggcctcccaaagtgc

SEQ ID NO: 186455 - DNA, 20 bp, Artificial Sequence
  Synthetic oligonucleotide; GTGAAT chr2 60501932 60501951 60501948 +
ttattctaattattttacta

SEQ ID NO: 186456 - DNA, 20 bp, Artificial Sequence
  Synthetic oligonucleotide; TGGAAT chr2 60501940 60501959 60501956 +
attattttactagtgaatta

SEQ ID NO: 186457 - DNA, 20 bp, Artificial Sequence
  Synthetic oligonucleotide; CAGAAT chr2 60502128 60502147 60502144 +
acaatgcaactcaagactat

SEQ ID NO: 186458 - DNA, 20 bp, Artificial Sequence
  Synthetic oligonucleotide; ATGAAT chr2 60502137 60502156 60502153 +
ctcaagactatcagaatgat

SEQ ID NO: 186459 - DNA, 20 bp, Artificial Sequence
  Synthetic oligonucleotide; ATGGAT chr2 60502244 60502263 60502260 +
aaagctggtgaaacaaaatg

SEQ ID NO: 186460 - DNA, 20 bp, Artificial Sequence
  Synthetic oligonucleotide; GGGAGT chr2 60502276 60502295 60502292 +
tttgctgagctccaaagtca

SEQ ID NO: 186461 - DNA, 20 bp, Artificial Sequence
  Synthetic oligonucleotide; CAGAAT chr2 60502392 60502411 60502408 +
gcctaataaaactgcacaga

SEQ ID NO: 186462 - DNA, 20 bp, Artificial Sequence
  Synthetic oligonucleotide; AAGAGT chr2 60502418 60502437 60502434 +
aacttcttcatcagattcag

SEQ ID NO: 186463 - DNA, 20 bp, Artificial Sequence
  Synthetic oligonucleotide; GGGGGT chr2 60502428 60502447 60502444 +
tcagattcagaagagtagca

SEQ ID NO: 186464 - DNA, 20 bp, Artificial Sequence
  Synthetic oligonucleotide; TGGGAT chr2 60502488 60502507 60502504 +
acactttgtacatacaattc

SEQ ID NO: 186465 - DNA, 20 bp, Artificial Sequence
  Synthetic oligonucleotide; ATGAAT chr2 60502598 60502617 60502614 +
atgctttctaatattaaaat

SEQ ID NO: 186466 - DNA, 20 bp, Artificial Sequence
  Synthetic oligonucleotide; GAGAAT chr2 60502833 60502852 60502849 +
gggaggtacttaatctctaa

SEQ ID NO: 186467 - DNA, 20 bp, Artificial Sequence
  Synthetic oligonucleotide; TCGAGT chr2 60502845 60502864 60502861 +
atctctaagagaatcaagtc

SEQ ID NO: 186468 - DNA, 20 bp, Artificial Sequence
  Synthetic oligonucleotide; GTGGGT chr2 60502849 60502868 60502865 +
ctaagagaatcaagtctcga

SEQ ID NO: 186469 - DNA, 20 bp, Artificial Sequence
  Synthetic oligonucleotide; AGGAGT chr2 60502870 60502889 60502886 +
tgggtaaaatgagctgggga

SEQ ID NO: 186470 - DNA, 20 bp, Artificial Sequence
  Synthetic oligonucleotide; GGGGAT chr2 60502988 60503007 60503004 +
ttaaggcctgggctgtctag

SEQ ID NO: 186471 - DNA, 20 bp, Artificial Sequence
  Synthetic oligonucleotide; CGGAAT chr2 60503042 60503061 60503058 +
gtctgtcatcttaatacaca

SEQ ID NO: 186472 - DNA, 20 bp, Artificial Sequence
  Synthetic oligonucleotide; AGGAAT chr2 60503121 60503140 60503137 +
tttgtcctggcaatgggagc

SEQ ID NO: 186473 - DNA, 20 bp, Artificial Sequence
  Synthetic oligonucleotide; ATGAGT chr2 60503125 60503144 60503141 +
tcctggcaatgggagcagga

SEQ ID NO: 186474 - DNA, 20 bp, Artificial Sequence
  Synthetic oligonucleotide; CAGAAT chr2 60503242 60503261 60503258 +
gctctgaccaggtggaaagc

SEQ ID NO: 186475 - DNA, 20 bp, Artificial Sequence
  Synthetic oligonucleotide; TGGGGT chr2 60503247 60503266 60503263 +
gaccaggtggaaagccagaa

SEQ ID NO: 186476 - DNA, 20 bp, Artificial Sequence
  Synthetic oligonucleotide; CTGAGT chr2 60503540 60503559 60503556 +
ataatgtgtggcgctcaggt

SEQ ID NO: 186477 - DNA, 20 bp, Artificial Sequence
  Synthetic oligonucleotide; CTGGAT chr2 60503788 60503807 60503804 +
ccactgcaagggacaatatt

SEQ ID NO: 186478 - DNA, 20 bp, Artificial Sequence
  Synthetic oligonucleotide; GGGAAT chr2 60503947 60503966 60503963 +
aaggaacgagggggcagaga

SEQ ID NO: 186479 - DNA, 20 bp, Artificial Sequence
  Synthetic oligonucleotide; CTGAGT chr2 60503961 60503980 60503977 +
cagagagggaatgaaagaca

SEQ ID NO: 186480 - DNA, 20 bp, Artificial Sequence
  Synthetic oligonucleotide; AAGAGT chr2 60504054 60504073 60504070 +
ggcacattctgagaactctg

SEQ ID NO: 186481 - DNA, 20 bp, Artificial Sequence
  Synthetic oligonucleotide; CAGGAT chr2 60504245 60504264 60504261 +
gctgcctaccggcacgcatg

SEQ ID NO: 186482 - DNA, 20 bp, Artificial Sequence
  Synthetic oligonucleotide; CTGGGT chr2 60504274 60504293 60504290 +
tgatgaagatgcagtacctt

SEQ ID NO: 186483 - DNA, 20 bp, Artificial Sequence
  Synthetic oligonucleotide; CTGGGT chr2 60504284 60504303 60504300 +
gcagtaccttctgggtctgc

SEQ ID NO: 186484 - DNA, 20 bp, Artificial Sequence
  Synthetic oligonucleotide; CTGAAT chr2 60504367 60504386 60504383 +
aggcagaggaggccacctat

SEQ ID NO: 186485 - DNA, 20 bp, Artificial Sequence
  Synthetic oligonucleotide; TAGGAT chr2 60504375 60504394 60504391 +
gaggccacctatctgaatgc

SEQ ID NO: 186486 - DNA, 20 bp, Artificial Sequence
  Synthetic oligonucleotide; AGGAAT chr2 60504427 60504446 60504443 +
ccagcctgctctcccaaaga

SEQ ID NO: 186487 - DNA, 20 bp, Artificial Sequence
  Synthetic oligonucleotide; CAGAAT chr2 60504559 60504578 60504575 +
ccaaggcaaaaagcaaatag

SEQ ID NO: 186488 - DNA, 20 bp, Artificial Sequence
  Synthetic oligonucleotide; ATGAGT chr2 60504563 60504582 60504579 +
ggcaaaaagcaaatagcaga

SEQ ID NO: 186489 - DNA, 20 bp, Artificial Sequence
  Synthetic oligonucleotide; TGGAAT chr2 60504753 60504772 60504769 +
cttgaaattatatagagagg

SEQ ID NO: 186490 - DNA, 20 bp, Artificial Sequence
  Synthetic oligonucleotide; TGGGGT chr2 60504945 60504964 60504961 +
gtgtgcaggctgtggaagcg

SEQ ID NO: 186491 - DNA, 20 bp, Artificial Sequence
  Synthetic oligonucleotide; AGGAGT chr2 60504966 60504985 60504982 +
ggggtggacccagaagtata

SEQ ID NO: 186492 - DNA, 20 bp, Artificial Sequence
  Synthetic oligonucleotide; CTGGAT chr2 60504973 60504992 60504989 +
acccagaagtataaggagtt

SEQ ID NO: 186493 - DNA, 20 bp, Artificial Sequence
  Synthetic oligonucleotide; CAGAAT chr2 60504979 60504998 60504995 +
aagtataaggagttctggat

SEQ ID NO: 186494 - DNA, 20 bp, Artificial Sequence
  Synthetic oligonucleotide; CAGGGT chr2 60505070 60505089 60505086 +
ccctttctcctgcctcttca

SEQ ID NO: 186495 - DNA, 20 bp, Artificial Sequence
  Synthetic oligonucleotide; GTGAGT chr2 60505086 60505105 60505102 +
ttcacagggttactcatgag

SEQ ID NO: 186496 - DNA, 20 bp, Artificial Sequence
  Synthetic oligonucleotide; AGGGAT chr2 60505185 60505204 60505201 +
cagcacaatggacattcgaa

SEQ ID NO: 186497 - DNA, 20 bp, Artificial Sequence
  Synthetic oligonucleotide; GAGGAT chr2 60505222 60505241 60505238 +
ttcataagccaaaaaagcta

SEQ ID NO: 186498 - DNA, 20 bp, Artificial Sequence
  Synthetic oligonucleotide; ACGGAT chr2 60505245 60505264 60505261 +
gatcggagagaaaagaaggg

SEQ ID NO: 186499 - DNA, 20 bp, Artificial Sequence
  Synthetic oligonucleotide; AAGGGT chr2 60505267 60505286 60505283 +
ggatactcagaaacggcttc

SEQ ID NO: 186500 - DNA, 20 bp, Artificial Sequence
  Synthetic oligonucleotide; CCGAGT chr2 60505422 60505441 60505438 +
atcactcatcaggtagtcag

SEQ ID NO: 186501 - DNA, 20 bp, Artificial Sequence
  Synthetic oligonucleotide; GCGGGT chr2 60505474 60505493 60505490 +
tgcatccacacagggaacaa

SEQ ID NO: 186502 - DNA, 20 bp, Artificial Sequence
  Synthetic oligonucleotide; GAGAGT chr2 60505638 60505657 60505654 +
tcttcaggctgccagagcaa

SEQ ID NO: 186503 - DNA, 20 bp, Artificial Sequence
  Synthetic oligonucleotide; GAGGGT chr2 60505717 60505736 60505733 +
cagctggccactctgtgacg

SEQ ID NO: 186504 - DNA, 20 bp, Artificial Sequence
  Synthetic oligonucleotide; GTGGGT chr2 60505721 60505740 60505737 +
tggccactctgtgacggagg

SEQ ID NO: 186505 - DNA, 20 bp, Artificial Sequence
  Synthetic oligonucleotide; CTGGGT chr2 60505738 60505757 60505754 +
agggtgggtaacctctctac

SEQ ID NO: 186506 - DNA, 20 bp, Artificial Sequence
  Synthetic oligonucleotide; TAGAAT chr2 60505753 60505772 60505769 +
tctacctgggtctatcattt

SEQ ID NO: 186507 - DNA, 20 bp, Artificial Sequence
  Synthetic oligonucleotide; CAGGGT chr2 60505980 60505999 60505996 +
ataacccaaatagggctttg

SEQ ID NO: 186508 - DNA, 20 bp, Artificial Sequence
  Synthetic oligonucleotide; CCGGGT chr2 60506013 60506032 60506029 +
accacactaggctttgcagc

SEQ ID NO: 186509 - DNA, 20 bp, Artificial Sequence
  Synthetic oligonucleotide; GTGAAT chr2 60506043 60506062 60506059 +
ccagatggtgcgagaagata

SEQ ID NO: 186510 - DNA, 20 bp, Artificial Sequence
  Synthetic oligonucleotide; AGGGAT chr2 60506061 60506080 60506077 +
tagtgaatcactcataggca

SEQ ID NO: 186511 - DNA, 20 bp, Artificial Sequence
  Synthetic oligonucleotide; AAGAGT chr2 60506269 60506288 60506285 +
aattctctctgcatcagagg

SEQ ID NO: 186512 - DNA, 20 bp, Artificial Sequence
  Synthetic oligonucleotide; ATGGGT chr2 60506420 60506439 60506436 +
gagctggctcaggacgccac

SEQ ID NO: 186513 - DNA, 20 bp, Artificial Sequence
  Synthetic oligonucleotide; CTGAGT chr2 60506527 60506546 60506543 +
agccggccccagctggcatg

SEQ ID NO: 186514 - DNA, 20 bp, Artificial Sequence
  Synthetic oligonucleotide; ATGGGT chr2 60506772 60506791 60506788 +
tataatgctgagatttatac

SEQ ID NO: 186515 - DNA, 20 bp, Artificial Sequence
  Synthetic oligonucleotide; TGGGAT chr2 60506883 60506902 60506899 +
tggcattatctaatttaact

SEQ ID NO: 186516 - DNA, 20 bp, Artificial Sequence
  Synthetic oligonucleotide; AAGGAT chr2 60507136 60507155 60507152 +
atcccaacagacagagggcc

SEQ ID NO: 186517 - DNA, 20 bp, Artificial Sequence
  Synthetic oligonucleotide; CAGAAT chr2 60507162 60507181 60507178 +
taaatgctcttctagctctg

SEQ ID NO: 186518 - DNA, 20 bp, Artificial Sequence
  Synthetic oligonucleotide; TGGAGT chr2 60507514 60507533 60507530 +
ttttacattttcagatgttt

SEQ ID NO: 186519 - DNA, 20 bp, Artificial Sequence
  Synthetic oligonucleotide; CAGAGT chr2 60507593 60507612 60507609 +
ttcaacagctcactgcataa

SEQ ID NO: 186520 - DNA, 20 bp, Artificial Sequence
  Synthetic oligonucleotide; GCGGGT chr2 60507733 60507752 60507749 +
caaacagcacaagacagaaa

SEQ ID NO: 186521 - DNA, 20 bp, Artificial Sequence
  Synthetic oligonucleotide; TGGGGT chr2 60507738 60507757 60507754 +
agcacaagacagaaagcggg

SEQ ID NO: 186522 - DNA, 20 bp, Artificial Sequence
  Synthetic oligonucleotide; ACGGGT chr2 60507752 60507771 60507768 +
agcgggtggggtggggggcg

SEQ ID NO: 186523 - DNA, 20 bp, Artificial Sequence
  Synthetic oligonucleotide; TGGGAT chr2 60507857 60507876 60507873 +
taacaaaggacagcatacta

SEQ ID NO: 186524 - DNA, 20 bp, Artificial Sequence
  Synthetic oligonucleotide; ATGGAT chr2 60507870 60507889 60507886 +
catactatgggataattact

SEQ ID NO: 186525 - DNA, 20 bp, Artificial Sequence
  Synthetic oligonucleotide; TGGGGT chr2 60507986 60508005 60508002 +
gtcttcggtgttggttccta

SEQ ID NO: 186526 - DNA, 20 bp, Artificial Sequence
  Synthetic oligonucleotide; ACGGAT chr2 60507993 60508012 60508009 +
gtgttggttcctatggggtt

SEQ ID NO: 186527 - DNA, 20 bp, Artificial Sequence
  Synthetic oligonucleotide; CTGGGT chr2 60508309 60508328 60508325 +
agaggagacagagaagcttc

SEQ ID NO: 186528 - DNA, 20 bp, Artificial Sequence
  Synthetic oligonucleotide; CAGAAT chr2 60508318 60508337 60508334 +
agagaagcttcctgggtgtg

SEQ ID NO: 186529 - DNA, 20 bp, Artificial Sequence
  Synthetic oligonucleotide; CCGGGT chr2 60508374 60508393 60508390 +
cacaggagcaagcactgcag

SEQ ID NO: 186530 - DNA, 20 bp, Artificial Sequence
  Synthetic oligonucleotide; CTGAGT chr2 60508382 60508401 60508398 +
caagcactgcagccgggtcc

SEQ ID NO: 186531 - DNA, 20 bp, Artificial Sequence
  Synthetic oligonucleotide; GGGGGT chr2 60508406 60508425 60508422 +
gtctgacttttacccaaaca

SEQ ID NO: 186532 - DNA, 20 bp, Artificial Sequence
  Synthetic oligonucleotide; AGGAAT chr2 60508461 60508480 60508477 +
gcacattacctagttggcaa

SEQ ID NO: 186533 - DNA, 20 bp, Artificial Sequence
  Synthetic oligonucleotide; TGGAAT chr2 60508482 60508501 60508498 +
ggaatgcaactgggaggttc

SEQ ID NO: 186534 - DNA, 20 bp, Artificial Sequence
  Synthetic oligonucleotide; CGGGAT chr2 60508546 60508565 60508562 +
aagaggactttgctttcctc

SEQ ID NO: 186535 - DNA, 20 bp, Artificial Sequence
  Synthetic oligonucleotide; GAGAAT chr2 60508628 60508647 60508644 +
ccaaagagaagcgttgctag

SEQ ID NO: 186536 - DNA, 20 bp, Artificial Sequence
  Synthetic oligonucleotide; GGGAAT chr2 60508699 60508718 60508715 +
cgctcagctacaggggccgt

SEQ ID NO: 186537 - DNA, 20 bp, Artificial Sequence
  Synthetic oligonucleotide; GAGGGT chr2 60508729 60508748 60508745 +
ggaggcctgtgcatttccct

SEQ ID NO: 186538 - DNA, 20 bp, Artificial Sequence
  Synthetic oligonucleotide; TTGGGT chr2 60508796 60508815 60508812 +
actcttctctgagctccccc

SEQ ID NO: 186539 - DNA, 20 bp, Artificial Sequence
  Synthetic oligonucleotide; AAGAGT chr2 60508817 60508836 60508833 +
tgggttacctatgattccag

SEQ ID NO: 186540 - DNA, 20 bp, Artificial Sequence
  Synthetic oligonucleotide; AGGGAT chr2 60508887 60508906 60508903 +
gaaacctaaggcctaccttg

SEQ ID NO: 186541 - DNA, 20 bp, Artificial Sequence
  Synthetic oligonucleotide; TTGAAT chr2 60508933 60508952 60508949 +
actgctacttaaggtgtctt

SEQ ID NO: 186542 - DNA, 20 bp, Artificial Sequence
  Synthetic oligonucleotide; TTGGAT chr2 60509189 60509208 60509205 +
tggtctcagctttggctggc

SEQ ID NO: 186543 - DNA, 20 bp, Artificial Sequence
  Synthetic oligonucleotide; GAGGAT chr2 60509200 60509219 60509216 +
ttggctggcttggatgttat

SEQ ID NO: 186544 - DNA, 20 bp, Artificial Sequence
  Synthetic oligonucleotide; AAGAAT chr2 60509209 60509228 60509225 +
ttggatgttatgaggattcc

SEQ ID NO: 186545 - DNA, 20 bp, Artificial Sequence
  Synthetic oligonucleotide; ACGGAT chr2 60509336 60509355 60509352 +
aacctgtggaaaagaggaca

SEQ ID NO: 186546 - DNA, 20 bp, Artificial Sequence
  Synthetic oligonucleotide; GAGAGT chr2 60509448 60509467 60509464 +
agcacaagacacgtggcagt

SEQ ID NO: 186547 - DNA, 20 bp, Artificial Sequence
  Synthetic oligonucleotide; CTGGAT chr2 60509588 60509607 60509604 +
aagaaacaaagcgcatcttt

SEQ ID NO: 186548 - DNA, 20 bp, Artificial Sequence
  Synthetic oligonucleotide; TGGGGT chr2 60509934 60509953 60509950 +
agtcaccgagccacacattt

SEQ ID NO: 186549 - DNA, 20 bp, Artificial Sequence
  Synthetic oligonucleotide; CAGAAT chr2 60510021 60510040 60510037 +
ttttcccttcgaagtatgtc

SEQ ID NO: 186550 - DNA, 20 bp, Artificial Sequence
  Synthetic oligonucleotide; TTGAGT chr2 60510121 60510140 60510137 +
tctgcctcactttcccatgc

SEQ ID NO: 186551 - DNA, 20 bp, Artificial Sequence
  Synthetic oligonucleotide; TGGAGT chr2 60510203 60510222 60510219 +
ccagtggcttccatctccct

SEQ ID NO: 186552 - DNA, 20 bp, Artificial Sequence
  Synthetic oligonucleotide; GGGGGT chr2 60510590 60510609 60510606 +
tgtctctccccagctagaaa

SEQ ID NO: 186553 - DNA, 20 bp, Artificial Sequence
  Synthetic oligonucleotide; GGGAGT chr2 60510608 60510627 60510624 +
aagggggtgccacaagagca

SEQ ID NO: 186554 - DNA, 20 bp, Artificial Sequence
  Synthetic oligonucleotide; ATGAAT chr2 60510688 60510707 60510704 +
ttcaaaatatttgttgaaaa

SEQ ID NO: 186555 - DNA, 20 bp, Artificial Sequence
  Synthetic oligonucleotide; ATGAGT chr2 60510692 60510711 60510708 +
aaatatttgttgaaaaatga

SEQ ID NO: 186556 - DNA, 20 bp, Artificial Sequence
  Synthetic oligonucleotide; TTGGAT chr2 60510786 60510805 60510802 +
aacctgggggcactttagct

SEQ ID NO: 186557 - DNA, 20 bp, Artificial Sequence
  Synthetic oligonucleotide; TTGGGT chr2 60510793 60510812 60510809 +
gggcactttagctttggatc

SEQ ID NO: 186558 - DNA, 20 bp, Artificial Sequence
  Synthetic oligonucleotide; AGGGGT chr2 60510872 60510891 60510888 +
ttgcattataatgtaaatgg

SEQ ID NO: 186559 - DNA, 20 bp, Artificial Sequence
  Synthetic oligonucleotide; CAGAGT chr2 60511007 60511026 60511023 +
gccaaccaccagcagttcct

SEQ ID NO: 186560 - DNA, 20 bp, Artificial Sequence
  Synthetic oligonucleotide; CGGGAT chr2 60511245 60511264 60511261 +
atcccttctacctgagagcc

SEQ ID NO: 186561 - DNA, 20 bp, Artificial Sequence
  Synthetic oligonucleotide; GTGAAT chr2 60511303 60511322 60511319 +
cctagcatacaatttgacag

SEQ ID NO: 186562 - DNA, 20 bp, Artificial Sequence
  Synthetic oligonucleotide; CTGAAT chr2 60511343 60511362 60511359 +
aggcaataacaaggagaagt

SEQ ID NO: 186563 - DNA, 20 bp, Artificial Sequence
  Synthetic oligonucleotide; GGGAGT chr2 60511771 60511790 60511787 +
tgtaagacactaaggggcag

SEQ ID NO: 186564 - DNA, 20 bp, Artificial Sequence
  Synthetic oligonucleotide; AAGGGT chr2 60511822 60511841 60511838 +
cactctgtttctatgaaggc

SEQ ID NO: 186565 - DNA, 20 bp, Artificial Sequence
  Synthetic oligonucleotide; ATGAAT chr2 60512041 60512060 60512057 +
agtgtcacagtcactccaaa

SEQ ID NO: 186566 - DNA, 20 bp, Artificial Sequence
  Synthetic oligonucleotide; CAGAAT chr2 60512269 60512288 60512285 +
cgatgcgctgatgtggaact

SEQ ID NO: 186567 - DNA, 20 bp, Artificial Sequence
  Synthetic oligonucleotide; CTGGGT chr2 60512312 60512331 60512328 +
ggctgagctgtgctaggtaa

SEQ ID NO: 186568 - DNA, 20 bp, Artificial Sequence
  Synthetic oligonucleotide; AAGGAT chr2 60512395 60512414 60512411 +
acatcttgctctcaggtata

SEQ ID NO: 186569 - DNA, 20 bp, Artificial Sequence
  Synthetic oligonucleotide; GAGGAT chr2 60512468 60512487 60512484 +
tgagaaaggcagctttgaga

SEQ ID NO: 186570 - DNA, 20 bp, Artificial Sequence
  Synthetic oligonucleotide; GAGAGT chr2 60512526 60512545 60512542 +
acctatcacaatgctctgca

SEQ ID NO: 186571 - DNA, 20 bp, Artificial Sequence
  Synthetic oligonucleotide; ATGAGT chr2 60512781 60512800 60512797 +
tctcttttagtgtctcaagt

SEQ ID NO: 186572 - DNA, 20 bp, Artificial Sequence
  Synthetic oligonucleotide; ACGGAT chr2 60512798 60512817 60512814 +
agtatgagtcacctctgatg

SEQ ID NO: 186573 - DNA, 20 bp, Artificial Sequence
  Synthetic oligonucleotide; ATGAAT chr2 60512846 60512865 60512862 +
acaatacacacctaaagtaa

SEQ ID NO: 186574 - DNA, 20 bp, Artificial Sequence
  Synthetic oligonucleotide; AGGAGT chr2 60512907 60512926 60512923 +
tttggaggagacacagagaa

SEQ ID NO: 186575 - DNA, 20 bp, Artificial Sequence
  Synthetic oligonucleotide; ACGAGT chr2 60512977 60512996 60512993 +
aacacacagagcaacagctg

SEQ ID NO: 186576 - DNA, 20 bp, Artificial Sequence
  Synthetic oligonucleotide; AGGGAT chr2 60513071 60513090 60513087 +
caccatttgaggagaggttc

SEQ ID NO: 186577 - DNA, 20 bp, Artificial Sequence
  Synthetic oligonucleotide; ATGGAT chr2 60513106 60513125 60513122 +
tcaccaccccactgaaatcc

SEQ ID NO: 186578 - DNA, 20 bp, Artificial Sequence
  Synthetic oligonucleotide; AGGGGT chr2 60513125 60513144 60513141 +
catggatagtctagcctgtg

SEQ ID NO: 186579 - DNA, 20 bp, Artificial Sequence
  Synthetic oligonucleotide; GGGGGT chr2 60513132 60513151 60513148 +
agtctagcctgtgaggggtt

SEQ ID NO: 186580 - DNA, 20 bp, Artificial Sequence
  Synthetic oligonucleotide; CAGAGT chr2 60513180 60513199 60513196 +
atctttgagcggctcttccc

SEQ ID NO: 186581 - DNA, 20 bp, Artificial Sequence
  Synthetic oligonucleotide; CAGGAT chr2 60513186 60513205 60513202 +
gagcggctcttccccagagt

SEQ ID NO: 186582 - DNA, 20 bp, Artificial Sequence
  Synthetic oligonucleotide; AGGAAT chr2 60513293 60513312 60513309 +
tatgagacaaggaggggaca

SEQ ID NO: 186583 - DNA, 20 bp, Artificial Sequence
  Synthetic oligonucleotide; AGGAGT chr2 60513307 60513326 60513323 +
gggacaaggaatttagtccc

SEQ ID NO: 186584 - DNA, 20 bp, Artificial Sequence
  Synthetic oligonucleotide; AGGAGT chr2 60513322 60513341 60513338 +
gtcccaggagtggcactaga

SEQ ID NO: 186585 - DNA, 20 bp, Artificial Sequence
  Synthetic oligonucleotide; CCGGGT chr2 60513352 60513371 60513368 +
gctccctcaggagccatctg

SEQ ID NO: 186586 - DNA, 20 bp, Artificial Sequence
  Synthetic oligonucleotide; GTGGGT chr2 60513464 60513483 60513480 +
tgggaacccctttggcaggt

SEQ ID NO: 186587 - DNA, 20 bp, Artificial Sequence
  Synthetic oligonucleotide; TTGGGT chr2 60513471 60513490 60513487 +
ccctttggcaggtgtgggtg

SEQ ID NO: 186588 - DNA, 20 bp, Artificial Sequence
  Synthetic oligonucleotide; CTGGAT chr2 60513537 60513556 60513553 +
agcaaatcttcatgtcctgt

SEQ ID NO: 186589 - DNA, 20 bp, Artificial Sequence
  Synthetic oligonucleotide; CTGAAT chr2 60513567 60513586 60513583 +
ccagtcctgccctctctctt

SEQ ID NO: 186590 - DNA, 20 bp, Artificial Sequence
  Synthetic oligonucleotide; ATGAAT chr2 60513633 60513652 60513649 +
ccactcacacgctaaagtaa

SEQ ID NO: 186591 - DNA, 20 bp, Artificial Sequence
  Synthetic oligonucleotide; CTGAGT chr2 60513728 60513747 60513744 +
cactctctgggaaaatagaa

SEQ ID NO: 186592 - DNA, 20 bp, Artificial Sequence
  Synthetic oligonucleotide; CTGGGT chr2 60513757 60513776 60513773 +
agctctagcactgggcacag

SEQ ID NO: 186593 - DNA, 20 bp, Artificial Sequence
  Synthetic oligonucleotide; AAGGGT chr2 60513774 60513793 60513790 +
cagctgggtcagcacctacg

SEQ ID NO: 186594 - DNA, 20 bp, Artificial Sequence
  Synthetic oligonucleotide; CTGGAT chr2 60513909 60513928 60513925 +
cttgtggtgagcaaaactcc

SEQ ID NO: 186595 - DNA, 20 bp, Artificial Sequence
  Synthetic oligonucleotide; TTGAGT chr2 60513914 60513933 60513930 +
ggtgagcaaaactccctgga

SEQ ID NO: 186596 - DNA, 20 bp, Artificial Sequence
  Synthetic oligonucleotide; CTGGAT chr2 60513926 60513945 60513942 +
tccctggattgagtcgagac

SEQ ID NO: 186597 - DNA, 20 bp, Artificial Sequence
  Synthetic oligonucleotide; TTGAAT chr2 60513947 60513966 60513963 +
tggattctagttccactact

SEQ ID NO: 186598 - DNA, 20 bp, Artificial Sequence
  Synthetic oligonucleotide; TGGGAT chr2 60514259 60514278 60514275 +
aggaacaccccggccactgg

SEQ ID NO: 186599 - DNA, 20 bp, Artificial Sequence
  Synthetic oligonucleotide; TAGAAT chr2 60514344 60514363 60514360 +
gagaacaagccatctgaaaa

SEQ ID NO: 186600 - DNA, 20 bp, Artificial Sequence
  Synthetic oligonucleotide; GTGGGT chr2 60514410 60514429 60514426 +
attttgggaggccgaggcgt

SEQ ID NO: 186601 - DNA, 20 bp, Artificial Sequence
  Synthetic oligonucleotide; AGGAGT chr2 60514427 60514446 60514443 +
cgtgtgggtcacctgaggtc

SEQ ID NO: 186602 - DNA, 20 bp, Artificial Sequence
  Synthetic oligonucleotide; GAGAAT chr2 60514556 60514575 60514572 +
tacttgggaggctgaggcag

SEQ ID NO: 186603 - DNA, 20 bp, Artificial Sequence
  Synthetic oligonucleotide; TTGGGT chr2 60514668 60514687 60514684 +
aaaaaaaaaaaaaaattaaa

SEQ ID NO: 186604 - DNA, 20 bp, Artificial Sequence
  Synthetic oligonucleotide; GGGAGT chr2 60514676 60514695 60514692 +
aaaaaaattaaattgggtgg

SEQ ID NO: 186605 - DNA, 20 bp, Artificial Sequence
  Synthetic oligonucleotide; CAGAGT chr2 60514698 60514717 60514714 +
gagtttcttaggaaaaaaat

SEQ ID NO: 186606 - DNA, 20 bp, Artificial Sequence
  Synthetic oligonucleotide; AAGGGT chr2 60514750 60514769 60514766 +
ctgtctttacaacacaatga

SEQ ID NO: 186607 - DNA, 20 bp, Artificial Sequence
  Synthetic oligonucleotide; GTGAAT chr2 60514774 60514793 60514790 +
gtaaggcaccataagaggct

SEQ ID NO: 186608 - DNA, 20 bp, Artificial Sequence
  Synthetic oligonucleotide; GAGGAT chr2 60514793 60514812 60514809 +
tgtgaattccattgataaga

SEQ ID NO: 186609 - DNA, 20 bp, Artificial Sequence
  Synthetic oligonucleotide; GAGAAT chr2 60514890 60514909 60514906 +
aagagagacagagagagaga

SEQ ID NO: 186610 - DNA, 20 bp, Artificial Sequence
  Synthetic oligonucleotide; CAGAAT chr2 60515008 60515027 60515024 +
gacaggctctagcttgtttc

SEQ ID NO: 186611 - DNA, 20 bp, Artificial Sequence
  Synthetic oligonucleotide; AAGGAT chr2 60515075 60515094 60515091 +
ccaaagtgttgcccagacct

SEQ ID NO: 186612 - DNA, 20 bp, Artificial Sequence
  Synthetic oligonucleotide; CAGAAT chr2 60515129 60515148 60515145 +
tggcttccaggtgagcgaga

SEQ ID NO: 186613 - DNA, 20 bp, Artificial Sequence
  Synthetic oligonucleotide; CAGAGT chr2 60515142 60515161 60515158 +
agcgagacagaatctgcaag

SEQ ID NO: 186614 - DNA, 20 bp, Artificial Sequence
  Synthetic oligonucleotide; TGGGGT chr2 60515162 60515181 60515178 +
cagagttcactgcttgacca

SEQ ID NO: 186615 - DNA, 20 bp, Artificial Sequence
  Synthetic oligonucleotide; GGGGAT chr2 60515289 60515308 60515305 +
ccttccctggacagggagct

SEQ ID NO: 186616 - DNA, 20 bp, Artificial Sequence
  Synthetic oligonucleotide; GTGAAT chr2 60515471 60515490 60515487 +
aaatacacccacgagccaat

SEQ ID NO: 186617 - DNA, 20 bp, Artificial Sequence
  Synthetic oligonucleotide; CAGAGT chr2 60515503 60515522 60515519 +
gatccccttttaactaatcc

SEQ ID NO: 186618 - DNA, 20 bp, Artificial Sequence
  Synthetic oligonucleotide; CAGAGT chr2 60515541 60515560 60515557 +
aaagaaagccaagttgctga

SEQ ID NO: 186619 - DNA, 20 bp, Artificial Sequence
  Synthetic oligonucleotide; GTGGGT chr2 60515695 60515714 60515711 +
caggcagggagaaagtggtg

SEQ ID NO: 186620 - DNA, 20 bp, Artificial Sequence
  Synthetic oligonucleotide; GTGAGT chr2 60515714 60515733 60515730 +
ggtgggtggcggacagagat

SEQ ID NO: 186621 - DNA, 20 bp, Artificial Sequence
  Synthetic oligonucleotide; GGGGAT chr2 60515839 60515858 60515855 +
ccactgtgaggtcttactgt

SEQ ID NO: 186622 - DNA, 20 bp, Artificial Sequence
  Synthetic oligonucleotide; CCGAGT chr2 60515847 60515866 60515863 +
aggtcttactgtggggatta

SEQ ID NO: 186623 - DNA, 20 bp, Artificial Sequence
  Synthetic oligonucleotide; GGGAAT chr2 60515911 60515930 60515927 +
attcgagaaagatccaataa

SEQ ID NO: 186624 - DNA, 20 bp, Artificial Sequence
  Synthetic oligonucleotide; AGGGGT chr2 60515950 60515969 60515966 +
cgctgggccaacacccacgg

SEQ ID NO: 186625 - DNA, 20 bp, Artificial Sequence
  Synthetic oligonucleotide; TGGAAT chr2 60515958 60515977 60515974 +
caacacccacggaggggtcc

SEQ ID NO: 186626 - DNA, 20 bp, Artificial Sequence
  Synthetic oligonucleotide; TGGAGT chr2 60515974 60515993 60515990 +
gtcctggaatacaaataccc

SEQ ID NO: 186627 - DNA, 20 bp, Artificial Sequence
  Synthetic oligonucleotide; CTGGGT chr2 60516031 60516050 60516047 +
tcaattatgtcttcattgaa

SEQ ID NO: 186628 - DNA, 20 bp, Artificial Sequence
  Synthetic oligonucleotide; AGGGAT chr2 60516053 60516072 60516069 +
gggttatgaaaaagggaagc

SEQ ID NO: 186629 - DNA, 20 bp, Artificial Sequence
  Synthetic oligonucleotide; TTGGGT chr2 60516107 60516126 60516123 +
tgtgatgactcatgccagct

SEQ ID NO: 186630 - DNA, 20 bp, Artificial Sequence
  Synthetic oligonucleotide; GGGAAT chr2 60516320 60516339 60516336 +
cttggctctgctggctcaca

SEQ ID NO: 186631 - DNA, 20 bp, Artificial Sequence
  Synthetic oligonucleotide; AGGAGT chr2 60516566 60516585 60516582 +
gaagtcagggaactcgtgtc

SEQ ID NO: 186632 - DNA, 20 bp, Artificial Sequence
  Synthetic oligonucleotide; TGGGAT chr2 60516614 60516633 60516630 +
caaggacagagaggggcacc

SEQ ID NO: 186633 - DNA, 20 bp, Artificial Sequence
  Synthetic oligonucleotide; GGGAGT chr2 60516646 60516665 60516662 +
aatgtggcatcaggacaact

SEQ ID NO: 186634 - DNA, 20 bp, Artificial Sequence
  Synthetic oligonucleotide; ATGAGT chr2 60516719 60516738 60516735 +
tagtggacaccaagctgagc

SEQ ID NO: 186635 - DNA, 20 bp, Artificial Sequence
  Synthetic oligonucleotide; AAGAGT chr2 60516766 60516785 60516782 +
taaaaaagcaagcaggacat

SEQ ID NO: 186636 - DNA, 20 bp, Artificial Sequence
  Synthetic oligonucleotide; AAGAAT chr2 60516787 60516806 60516803 +
agagtgcagacataagacta

SEQ ID NO: 186637 - DNA, 20 bp, Artificial Sequence
  Synthetic oligonucleotide; TTGAGT chr2 60516847 60516866 60516863 +
tgtagttatcagactaatgt

SEQ ID NO: 186638 - DNA, 20 bp, Artificial Sequence
  Synthetic oligonucleotide; ATGGGT chr2 60516903 60516922 60516919 +
gagaggcatagaaacaataa

SEQ ID NO: 186639 - DNA, 20 bp, Artificial Sequence
  Synthetic oligonucleotide; ATGAGT chr2 60516926 60516945 60516942 +
ggttacaagataatagatcc

SEQ ID NO: 186640 - DNA, 20 bp, Artificial Sequence
  Synthetic oligonucleotide; GAGAAT chr2 60516973 60516992 60516989 +
tttaggaagaagaagtggcg

SEQ ID NO: 186641 - DNA, 20 bp, Artificial Sequence
  Synthetic oligonucleotide; TGGAAT chr2 60516978 60516997 60516994 +
gaagaagaagtggcggagaa

SEQ ID NO: 186642 - DNA, 20 bp, Artificial Sequence
  Synthetic oligonucleotide; AAGAAT chr2 60516985 60517004 60517001 +
aagtggcggagaatggaatg

SEQ ID NO: 186643 - DNA, 20 bp, Artificial Sequence
  Synthetic oligonucleotide; TGGAAT chr2 60517045 60517064 60517061 +
atgagatactttgtcgtctc

SEQ ID NO: 186644 - DNA, 20 bp, Artificial Sequence
  Synthetic oligonucleotide; ATGGGT chr2 60517060 60517079 60517076 +
gtctctggaatgaagaggaa

SEQ ID NO: 186645 - DNA, 20 bp, Artificial Sequence
  Synthetic oligonucleotide; AGGGAT chr2 60517081 60517100 60517097 +
tgggtttaaaatgaagcata

SEQ ID NO: 186646 - DNA, 20 bp, Artificial Sequence
  Synthetic oligonucleotide; AAGGAT chr2 60517104 60517123 60517120 +
gatcgaaggtagacaaaagg

SEQ ID NO: 186647 - DNA, 20 bp, Artificial Sequence
  Synthetic oligonucleotide; TAGGGT chr2 60517145 60517164 60517161 +
ggtgtctttaaaaatagaac

SEQ ID NO: 186648 - DNA, 20 bp, Artificial Sequence
  Synthetic oligonucleotide; GAGGGT chr2 60517201 60517220 60517217 +
ggagggccatctgcccctga

SEQ ID NO: 186649 - DNA, 20 bp, Artificial Sequence
  Synthetic oligonucleotide; CTGAAT chr2 60517257 60517276 60517273 +
actccattatctccagttat

SEQ ID NO: 186650 - DNA, 20 bp, Artificial Sequence
  Synthetic oligonucleotide; TTGGGT chr2 60517439 60517458 60517455 +
ctctgcaacagcacaggtga

SEQ ID NO: 186651 - DNA, 20 bp, Artificial Sequence
  Synthetic oligonucleotide; TTGGGT chr2 60517459 60517478 60517475 +
ttgggtggtggttttgttgc

SEQ ID NO: 186652 - DNA, 20 bp, Artificial Sequence
  Synthetic oligonucleotide; GTGGGT chr2 60517564 60517583 60517580 +
cagccatcaccgataaaagc

SEQ ID NO: 186653 - DNA, 20 bp, Artificial Sequence
  Synthetic oligonucleotide; AGGAAT chr2 60517654 60517673 60517670 +
tgcgattggtacagtcagcc

SEQ ID NO: 186654 - DNA, 20 bp, Artificial Sequence
  Synthetic oligonucleotide; CAGGGT chr2 60517765 60517784 60517781 +
ctttctcatctgtaaaatga

SEQ ID NO: 186655 - DNA, 20 bp, Artificial Sequence
  Synthetic oligonucleotide; AGGAGT chr2 60518062 60518081 60518078 +
agggaagattgcttgaagct

SEQ ID NO: 186656 - DNA, 20 bp, Artificial Sequence
  Synthetic oligonucleotide; AGGAGT chr2 60518282 60518301 60518298 +
acataaaacatcatagataa

SEQ ID NO: 186657 - DNA, 20 bp, Artificial Sequence
  Synthetic oligonucleotide; CAGGAT chr2 60518290 60518309 60518306 +
catcatagataaaggagtca

SEQ ID NO: 186658 - DNA, 20 bp, Artificial Sequence
  Synthetic oligonucleotide; GAGAAT chr2 60518348 60518367 60518364 +
cctgtcatgaagcagactca

SEQ ID NO: 186659 - DNA, 20 bp, Artificial Sequence
  Synthetic oligonucleotide; CAGGAT chr2 60518415 60518434 60518431 +
tgtctgcgatagagcagatt

SEQ ID NO: 186660 - DNA, 20 bp, Artificial Sequence
  Synthetic oligonucleotide; ATGAAT chr2 60518462 60518481 60518478 +
caactcacctgcatttaaat

SEQ ID NO: 186661 - DNA, 20 bp, Artificial Sequence
  Synthetic oligonucleotide; AAGAGT chr2 60518469 60518488 60518485 +
cctgcatttaaatatgaata

SEQ ID NO: 186662 - DNA, 20 bp, Artificial Sequence
  Synthetic oligonucleotide; GTGAAT chr2 60518523 60518542 60518539 +
catgggagggcatcgcacat

SEQ ID NO: 186663 - DNA, 20 bp, Artificial Sequence
  Synthetic oligonucleotide; GAGAAT chr2 60518588 60518607 60518604 +
ggaagcattgctctagatct

SEQ ID NO: 186664 - DNA, 20 bp, Artificial Sequence
  Synthetic oligonucleotide; AAGAGT chr2 60518653 60518672 60518669 +
cccagcagagaacgttgaga

SEQ ID NO: 186665 - DNA, 20 bp, Artificial Sequence
  Synthetic oligonucleotide; CAGAGT chr2 60518679 60518698 60518695 +
tttaagagcctactcatcat

SEQ ID NO: 186666 - DNA, 20 bp, Artificial Sequence
  Synthetic oligonucleotide; CAGAAT chr2 60518702 60518721 60518718 +
agttcacttaaaagtccatc

SEQ ID NO: 186667 - DNA, 20 bp, Artificial Sequence
  Synthetic oligonucleotide; TGGGAT chr2 60518715 60518734 60518731 +
gtccatccagaatcagaacg

SEQ ID NO: 186668 - DNA, 20 bp, Artificial Sequence
  Synthetic oligonucleotide; TGGGGT chr2 60518720 60518739 60518736 +
tccagaatcagaacgtggga

SEQ ID NO: 186669 - DNA, 20 bp, Artificial Sequence
  Synthetic oligonucleotide; GTGGAT chr2 60518753 60518772 60518769 +
ggcattcctgggggccgggc

SEQ ID NO: 186670 - DNA, 20 bp, Artificial Sequence
  Synthetic oligonucleotide; CTGGAT chr2 60518798 60518817 60518814 +
ctgttcaagttcaggtcaag

SEQ ID NO: 186671 - DNA, 20 bp, Artificial Sequence
  Synthetic oligonucleotide; GTGGGT chr2 60518911 60518930 60518927 +
ctgacattctgtcattcaag

SEQ ID NO: 186672 - DNA, 20 bp, Artificial Sequence
  Synthetic oligonucleotide; GAGAGT chr2 60518968 60518987 60518984 +
cctacaatccacagcaaaag

SEQ ID NO: 186673 - DNA, 20 bp, Artificial Sequence
  Synthetic oligonucleotide; TGGGAT chr2 60519034 60519053 60519050 +
tgagagaaaatggacagaag

SEQ ID NO: 186674 - DNA, 20 bp, Artificial Sequence
  Synthetic oligonucleotide; GGGAGT chr2 60519068 60519087 60519084 +
cctgataccagcaggaaaca

SEQ ID NO: 186675 - DNA, 20 bp, Artificial Sequence
  Synthetic oligonucleotide; ATGGGT chr2 60519217 60519236 60519233 +
ggactatgcatgctctgtct

SEQ ID NO: 186676 - DNA, 20 bp, Artificial Sequence
  Synthetic oligonucleotide; ATGGGT chr2 60519451 60519470 60519467 +
tctataacctgtaaggagag

SEQ ID NO: 186677 - DNA, 20 bp, Artificial Sequence
  Synthetic oligonucleotide; TGGAAT chr2 60519655 60519674 60519671 +
gaaagtgaggctggaaccac

SEQ ID NO: 186678 - DNA, 20 bp, Artificial Sequence
  Synthetic oligonucleotide; AGGAAT chr2 60519719 60519738 60519735 +
cagctgggagccactggttt

SEQ ID NO: 186679 - DNA, 20 bp, Artificial Sequence
  Synthetic oligonucleotide; AGGAAT chr2 60519869 60519888 60519885 +
catttgccaatccataactc

SEQ ID NO: 186680 - DNA, 20 bp, Artificial Sequence
  Synthetic oligonucleotide; TTGGAT chr2 60519887 60519906 60519903 +
tcaggaattcatggctatgc

SEQ ID NO: 186681 - DNA, 20 bp, Artificial Sequence
  Synthetic oligonucleotide; TGGAGT chr2 60519908 60519927 60519924 +
tggataattctctctagact

SEQ ID NO: 186682 - DNA, 20 bp, Artificial Sequence
  Synthetic oligonucleotide; GAGAAT chr2 60519956 60519975 60519972 +
ttctcccctctctctggcag

SEQ ID NO: 186683 - DNA, 20 bp, Artificial Sequence
  Synthetic oligonucleotide; TAGAAT chr2 60520112 60520131 60520128 +
attcagaaagccaaagataa

SEQ ID NO: 186684 - DNA, 20 bp, Artificial Sequence
  Synthetic oligonucleotide; AGGAAT chr2 60520150 60520169 60520166 +
gcaaggtatattgattaggt

SEQ ID NO: 186685 - DNA, 20 bp, Artificial Sequence
  Synthetic oligonucleotide; AGGAGT chr2 60520183 60520202 60520199 +
aattgcaaaattatttatgc

SEQ ID NO: 186686 - DNA, 20 bp, Artificial Sequence
  Synthetic oligonucleotide; ATGGGT chr2 60520220 60520239 60520236 +
cctcaaaagttcccaggcaa

SEQ ID NO: 186687 - DNA, 20 bp, Artificial Sequence
  Synthetic oligonucleotide; GTGAAT chr2 60520317 60520336 60520333 +
tttttttcaagacatgaggt

SEQ ID NO: 186688 - DNA, 20 bp, Artificial Sequence
  Synthetic oligonucleotide; TTGGAT chr2 60520338 60520357 60520354 +
tgaatgatgcaaaacagtat

SEQ ID NO: 186689 - DNA, 20 bp, Artificial Sequence
  Synthetic oligonucleotide; CTGAAT chr2 60520351 60520370 60520367 +
acagtatttggatatgtaaa

SEQ ID NO: 186690 - DNA, 20 bp, Artificial Sequence
  Synthetic oligonucleotide; GTGAGT chr2 60520382 60520401 60520398 +
gcataatgcattactaatca

SEQ ID NO: 186691 - DNA, 20 bp, Artificial Sequence
  Synthetic oligonucleotide; TGGAGT chr2 60520396 60520415 60520412 +
taatcagtgagtataaattc

SEQ ID NO: 186692 - DNA, 20 bp, Artificial Sequence
  Synthetic oligonucleotide; TGGGAT chr2 60520476 60520495 60520492 +
taaagagcatcacccttcgg

SEQ ID NO: 186693 - DNA, 20 bp, Artificial Sequence
  Synthetic oligonucleotide; CAGAGT chr2 60520541 60520560 60520557 +
agaaggagaaattatcctca

SEQ ID NO: 186694 - DNA, 20 bp, Artificial Sequence
  Synthetic oligonucleotide; GAGAGT chr2 60520657 60520676 60520673 +
acaaccacagaagcaccaag

SEQ ID NO: 186695 - DNA, 20 bp, Artificial Sequence
  Synthetic oligonucleotide; CGGAAT chr2 60520724 60520743 60520740 +
caccccatgttggtcgccta

SEQ ID NO: 186696 - DNA, 20 bp, Artificial Sequence
  Synthetic oligonucleotide; AGGAAT chr2 60520734 60520753 60520750 +
tggtcgcctacggaatctac

SEQ ID NO: 186697 - DNA, 20 bp, Artificial Sequence
  Synthetic oligonucleotide; GTGGGT chr2 60520824 60520843 60520840 +
accacccatgcccttctcca

SEQ ID NO: 186698 - DNA, 20 bp, Artificial Sequence
  Synthetic oligonucleotide; AGGGAT chr2 60520999 60521018 60521015 +
tgtctaaacactttttggaa

SEQ ID NO: 186699 - DNA, 20 bp, Artificial Sequence
  Synthetic oligonucleotide; GAGGGT chr2 60521119 60521138 60521135 +
acacactcacacaaatcctt

SEQ ID NO: 186700 - DNA, 20 bp, Artificial Sequence
  Synthetic oligonucleotide; CTGAGT chr2 60521264 60521283 60521280 +
aaagcgccactctcagataa

SEQ ID NO: 186701 - DNA, 20 bp, Artificial Sequence
  Synthetic oligonucleotide; CTGGGT chr2 60521355 60521374 60521371 +
acccgggcctgggcctgggc

SEQ ID NO: 186702 - DNA, 20 bp, Artificial Sequence
  Synthetic oligonucleotide; GGGAAT chr2 60521363 60521382 60521379 +
ctgggcctgggcctgggtct

SEQ ID NO: 186703 - DNA, 20 bp, Artificial Sequence
  Synthetic oligonucleotide; GAGAGT chr2 60521650 60521669 60521666 +
ttctttgtccccttctttct

SEQ ID NO: 186704 - DNA, 20 bp, Artificial Sequence
  Synthetic oligonucleotide; AGGGAT chr2 60521871 60521890 60521887 +
ctcatgcactgaaaaagaca

SEQ ID NO: 186705 - DNA, 20 bp, Artificial Sequence
  Synthetic oligonucleotide; GAGAAT chr2 60521891 60521910 60521907 +
agggatctctgttcttccag

SEQ ID NO: 186706 - DNA, 20 bp, Artificial Sequence
  Synthetic oligonucleotide; GAGAAT chr2 60522128 60522147 60522144 +
tcaaatactacaaaagtaga

SEQ ID NO: 186707 - DNA, 20 bp, Artificial Sequence
  Synthetic oligonucleotide; GGGAGT chr2 60522399 60522418 60522415 +
agtcccgtattaccaaatag

SEQ ID NO: 186708 - DNA, 20 bp, Artificial Sequence
  Synthetic oligonucleotide; CTGGGT chr2 60522435 60522454 60522451 +
tcagaaatacttctttccat

SEQ ID NO: 186709 - DNA, 20 bp, Artificial Sequence
  Synthetic oligonucleotide; GAGGAT chr2 60522450 60522469 60522466 +
tccatctgggtcatgttttg

SEQ ID NO: 186710 - DNA, 20 bp, Artificial Sequence
  Synthetic oligonucleotide; GAGAAT chr2 60522501 60522520 60522517 +
agctgccaagaaaagcttca

SEQ ID NO: 186711 - DNA, 20 bp, Artificial Sequence
  Synthetic oligonucleotide; CTGAAT chr2 60522594 60522613 60522610 +
gtcctttgccctgttcaggg

SEQ ID NO: 186712 - DNA, 20 bp, Artificial Sequence
  Synthetic oligonucleotide; GAGAGT chr2 60522609 60522628 60522625 +
cagggctgaatgcaccctct

SEQ ID NO: 186713 - DNA, 20 bp, Artificial Sequence
  Synthetic oligonucleotide; CTGAGT chr2 60522654 60522673 60522670 +
catcgactgccccacaggcc

SEQ ID NO: 186714 - DNA, 20 bp, Artificial Sequence
  Synthetic oligonucleotide; TGGAAT chr2 60522729 60522748 60522745 +
gcactcccagtgttcagaac

SEQ ID NO: 186715 - DNA, 20 bp, Artificial Sequence
  Synthetic oligonucleotide; CAGAAT chr2 60522777 60522796 60522793 +
ttctcctggacggttctgca

SEQ ID NO: 186716 - DNA, 20 bp, Artificial Sequence
  Synthetic oligonucleotide; TTGGAT chr2 60522801 60522820 60522817 +
attcattcacagagcatgtc

SEQ ID NO: 186717 - DNA, 20 bp, Artificial Sequence
  Synthetic oligonucleotide; ATGGGT chr2 60522841 60522860 60522857 +
atatgtcagttatgttccaa

SEQ ID NO: 186718 - DNA, 20 bp, Artificial Sequence
  Synthetic oligonucleotide; CAGGAT chr2 60522894 60522913 60522910 +
gagcaaatactatttttaga

SEQ ID NO: 186719 - DNA, 20 bp, Artificial Sequence
  Synthetic oligonucleotide; GTGGGT chr2 60523028 60523047 60523044 +
ccgttttctctgtagactct

SEQ ID NO: 186720 - DNA, 20 bp, Artificial Sequence
  Synthetic oligonucleotide; CAGGAT chr2 60523060 60523079 60523076 +
ttgttggacttaatatcttt

SEQ ID NO: 186721 - DNA, 20 bp, Artificial Sequence
  Synthetic oligonucleotide; AAGAAT chr2 60523205 60523224 60523221 +
cacgtgttgcaacctagaga

SEQ ID NO: 186722 - DNA, 20 bp, Artificial Sequence
  Synthetic oligonucleotide; CAGGAT chr2 60523261 60523280 60523277 +
acaaaggacagcctgccatc

SEQ ID NO: 186723 - DNA, 20 bp, Artificial Sequence
  Synthetic oligonucleotide; ATGGAT chr2 60523400 60523419 60523416 +
tgatgaaaagtggtttctac

SEQ ID NO: 186724 - DNA, 20 bp, Artificial Sequence
  Synthetic oligonucleotide; TGGAAT chr2 60523435 60523454 60523451 +
aaacttctatattgatttga

SEQ ID NO: 186725 - DNA, 20 bp, Artificial Sequence
  Synthetic oligonucleotide; GTGAAT chr2 60523445 60523464 60523461 +
attgatttgatggaatcatg

SEQ ID NO: 186726 - DNA, 20 bp, Artificial Sequence
  Synthetic oligonucleotide; GGGGAT chr2 60523627 60523646 60523643 +
atgacagtgttgatgtgttt

SEQ ID NO: 186727 - DNA, 20 bp, Artificial Sequence
  Synthetic oligonucleotide; AAGAGT chr2 60523649 60523668 60523665 +
ggatttttttttttttcaaa

SEQ ID NO: 186728 - DNA, 20 bp, Artificial Sequence
  Synthetic oligonucleotide; ATGAAT chr2 60523775 60523794 60523791 +
acaggagctcaatcaagtaa

SEQ ID NO: 186729 - DNA, 20 bp, Artificial Sequence
  Synthetic oligonucleotide; AAGAAT chr2 60523832 60523851 60523848 +
cttaactagcccaaacgttc

SEQ ID NO: 186730 - DNA, 20 bp, Artificial Sequence
  Synthetic oligonucleotide; AGGGGT chr2 60523996 60524015 60524012 +
ataaatacctctccattatc

SEQ ID NO: 186731 - DNA, 20 bp, Artificial Sequence
  Synthetic oligonucleotide; GAGGGT chr2 60524051 60524070 60524067 +
aggaactagtgtgaaaactg

SEQ ID NO: 186732 - DNA, 20 bp, Artificial Sequence
  Synthetic oligonucleotide; CTGAAT chr2 60524281 60524300 60524297 +
tgaaatcctaaacttcatgt

SEQ ID NO: 186733 - DNA, 20 bp, Artificial Sequence
  Synthetic oligonucleotide; ATGAAT chr2 60524313 60524332 60524329 +
ttttgtcacctatctctggc

SEQ ID NO: 186734 - DNA, 20 bp, Artificial Sequence
  Synthetic oligonucleotide; TTGGGT chr2 60524405 60524424 60524421 +
attcggcctgttatttgctt

SEQ ID NO: 186735 - DNA, 20 bp, Artificial Sequence
  Synthetic oligonucleotide; TTGGGT chr2 60524410 60524429 60524426 +
gcctgttatttgcttttggg

SEQ ID NO: 186736 - DNA, 20 bp, Artificial Sequence
  Synthetic oligonucleotide; AAGAGT chr2 60524639 60524658 60524655 +
ttattgaagctatagatctc

SEQ ID NO: 186737 - DNA, 20 bp, Artificial Sequence
  Synthetic oligonucleotide; TGGGAT chr2 60524708 60524727 60524724 +
tgccccttactctgagcaca

SEQ ID NO: 186738 - DNA, 20 bp, Artificial Sequence
  Synthetic oligonucleotide; AAGGAT chr2 60524746 60524765 60524762 +
ttttagatcatcattatcca

SEQ ID NO: 186739 - DNA, 20 bp, Artificial Sequence
  Synthetic oligonucleotide; TTGAAT chr2 60524756 60524775 60524772 +
tcattatccaaaggataact

SEQ ID NO: 186740 - DNA, 20 bp, Artificial Sequence
  Synthetic oligonucleotide; ATGGAT chr2 60524893 60524912 60524909 +
gtaaacaccaagtttaaaaa

SEQ ID NO: 186741 - DNA, 20 bp, Artificial Sequence
  Synthetic oligonucleotide; ATGAAT chr2 60524947 60524966 60524963 +
catatgcttttacctacatg

SEQ ID NO: 186742 - DNA, 20 bp, Artificial Sequence
  Synthetic oligonucleotide; GAGAGT chr2 60525004 60525023 60525020 +
gtcttcaacactaacagagg

SEQ ID NO: 186743 - DNA, 20 bp, Artificial Sequence
  Synthetic oligonucleotide; TCGGAT chr2 60525028 60525047 60525044 +
gttcttctaaacatgttgca

SEQ ID NO: 186744 - DNA, 20 bp, Artificial Sequence
  Synthetic oligonucleotide; CTGAAT chr2 60525136 60525155 60525152 +
gaggaaggaggaaaatatca

SEQ ID NO: 186745 - DNA, 20 bp, Artificial Sequence
  Synthetic oligonucleotide; TTGAAT chr2 60525154 60525173 60525170 +
cactgaattcagtcagttaa

SEQ ID NO: 186746 - DNA, 20 bp, Artificial Sequence
  Synthetic oligonucleotide; TTGAAT chr2 60525177 60525196 60525193 +
aatttaaaatacctggttgt

SEQ ID NO: 186747 - DNA, 20 bp, Artificial Sequence
  Synthetic oligonucleotide; TGGAGT chr2 60525276 60525295 60525292 +
aaaatacacattacattctt

SEQ ID NO: 186748 - DNA, 20 bp, Artificial Sequence
  Synthetic oligonucleotide; GTGAAT chr2 60525346 60525365 60525362 +
ttataaggctggaaacttct

SEQ ID NO: 186749 - DNA, 20 bp, Artificial Sequence
  Synthetic oligonucleotide; GGGAAT chr2 60525425 60525444 60525441 +
tgcctttaagctttctgttg

SEQ ID NO: 186750 - DNA, 20 bp, Artificial Sequence
  Synthetic oligonucleotide; ACGAAT chr2 60525432 60525451 60525448 +
aagctttctgttggggaatc

SEQ ID NO: 186751 - DNA, 20 bp, Artificial Sequence
  Synthetic oligonucleotide; AAGGGT chr2 60525705 60525724 60525721 +
atctcacagcatgatacaat

SEQ ID NO: 186752 - DNA, 20 bp, Artificial Sequence
  Synthetic oligonucleotide; AAGGGT chr2 60525859 60525878 60525875 +
tttctccatggctttcacag

SEQ ID NO: 186753 - DNA, 20 bp, Artificial Sequence
  Synthetic oligonucleotide; GAGGAT chr2 60526005 60526024 60526021 +
gatactgttattttctggta

SEQ ID NO: 186754 - DNA, 20 bp, Artificial Sequence
  Synthetic oligonucleotide; AAGAAT chr2 60526030 60526049 60526046 +
tggcagcagggctgggaaaa

SEQ ID NO: 186755 - DNA, 20 bp, Artificial Sequence
  Synthetic oligonucleotide; CAGAAT chr2 60526179 60526198 60526195 +
actggtgatttgatcaaatt

SEQ ID NO: 186756 - DNA, 20 bp, Artificial Sequence
  Synthetic oligonucleotide; TGGGAT chr2 60526194 60526213 60526210 +
aaattcagaatcccatattt

SEQ ID NO: 186757 - DNA, 20 bp, Artificial Sequence
  Synthetic oligonucleotide; AAGGAT chr2 60526283 60526302 60526299 +
taaatagttttcatctttaa

SEQ ID NO: 186758 - DNA, 20 bp, Artificial Sequence
  Synthetic oligonucleotide; AAGGGT chr2 60526466 60526485 60526482 +
tcgcagacagcagtgctcaa

SEQ ID NO: 186759 - DNA, 20 bp, Artificial Sequence
  Synthetic oligonucleotide; TCGGGT chr2 60526490 60526509 60526506 +
gtccgcaaaataaaaatgtg

SEQ ID NO: 186760 - DNA, 20 bp, Artificial Sequence
  Synthetic oligonucleotide; ATGGGT chr2 60526502 60526521 60526518 +
aaaatgtgtcgggtaattaa

SEQ ID NO: 186761 - DNA, 20 bp, Artificial Sequence
  Synthetic oligonucleotide; TCGGAT chr2 60526623 60526642 60526639 +
gatggtttataggcctcctc

SEQ ID NO: 186762 - DNA, 20 bp, Artificial Sequence
  Synthetic oligonucleotide; GAGGGT chr2 60526673 60526692 60526689 +
gtgcagtgtgtctatgtcag

SEQ ID NO: 186763 - DNA, 20 bp, Artificial Sequence
  Synthetic oligonucleotide; AAGGGT chr2 60527086 60527105 60527102 +
acatccaggcacttggcctg

SEQ ID NO: 186764 - DNA, 20 bp, Artificial Sequence
  Synthetic oligonucleotide; GGGGGT chr2 60527230 60527249 60527246 +
agggaagagaaggaaaacta

SEQ ID NO: 186765 - DNA, 20 bp, Artificial Sequence
  Synthetic oligonucleotide; AAGGGT chr2 60527254 60527273 60527270 +
gtgcgagcgagggaaataag

SEQ ID NO: 186766 - DNA, 20 bp, Artificial Sequence
  Synthetic oligonucleotide; CAGGGT chr2 60527346 60527365 60527362 +
aaaactaagagcttctcttc

SEQ ID NO: 186767 - DNA, 20 bp, Artificial Sequence
  Synthetic oligonucleotide; AAGGGT chr2 60527382 60527401 60527398 +
aaccactacactcttgaccc

SEQ ID NO: 186768 - DNA, 20 bp, Artificial Sequence
  Synthetic oligonucleotide; AGGGGT chr2 60527417 60527436 60527433 +
caatgaagagggccaagaga

SEQ ID NO: 186769 - DNA, 20 bp, Artificial Sequence
  Synthetic oligonucleotide; CAGAGT chr2 60527473 60527492 60527489 +
aggacgtccatgccccggga

SEQ ID NO: 186770 - DNA, 20 bp, Artificial Sequence
  Synthetic oligonucleotide; ATGGAT chr2 60527516 60527535 60527532 +
ctttggagctcttgacccac

SEQ ID NO: 186771 - DNA, 20 bp, Artificial Sequence
  Synthetic oligonucleotide; CTGGAT chr2 60527565 60527584 60527581 +
cctcaaactcagaagacaac

SEQ ID NO: 186772 - DNA, 20 bp, Artificial Sequence
  Synthetic oligonucleotide; ATGGAT chr2 60527592 60527611 60527608 +
tgaccgacaacttctttgtg

SEQ ID NO: 186773 - DNA, 20 bp, Artificial Sequence
  Synthetic oligonucleotide; AAGGAT chr2 60527788 60527807 60527804 +
tgttagcctggccaatttga

SEQ ID NO: 186774 - DNA, 20 bp, Artificial Sequence
  Synthetic oligonucleotide; GAGAAT chr2 60527795 60527814 60527811 +
ctggccaatttgaaaggatg

SEQ ID NO: 186775 - DNA, 20 bp, Artificial Sequence
  Synthetic oligonucleotide; TGGAAT chr2 60527826 60527845 60527842 +
aaaacagtaacatttggttt

SEQ ID NO: 186776 - DNA, 20 bp, Artificial Sequence
  Synthetic oligonucleotide; TGGAGT chr2 60527904 60527923 60527920 +
aatagcgtcagggcagcctg

SEQ ID NO: 186777 - DNA, 20 bp, Artificial Sequence
  Synthetic oligonucleotide; GCGGAT chr2 60527962 60527981 60527978 +
tgcctctggggaagccacat

SEQ ID NO: 186778 - DNA, 20 bp, Artificial Sequence
  Synthetic oligonucleotide; CAGGAT chr2 60528416 60528435 60528432 +
ggaaatgactacttgcaaag

SEQ ID NO: 186779 - DNA, 20 bp, Artificial Sequence
  Synthetic oligonucleotide; GAGGGT chr2 60528625 60528644 60528641 +
aacgtactgaagaggtagca

SEQ ID NO: 186780 - DNA, 20 bp, Artificial Sequence
  Synthetic oligonucleotide; AAGGAT chr2 60528646 60528665 60528662 +
agggtggcggccgcaggcca

SEQ ID NO: 186781 - DNA, 20 bp, Artificial Sequence
  Synthetic oligonucleotide; GGGAGT chr2 60528730 60528749 60528746 +
ctctaccaaatgaggctaat

SEQ ID NO: 186782 - DNA, 20 bp, Artificial Sequence
  Synthetic oligonucleotide; TGGGAT chr2 60528757 60528776 60528773 +
tttcctttccgaggttgttg

SEQ ID NO: 186783 - DNA, 20 bp, Artificial Sequence
  Synthetic oligonucleotide; TGGAAT chr2 60528762 60528781 60528778 +
tttccgaggttgttgtggga

SEQ ID NO: 186784 - DNA, 20 bp, Artificial Sequence
  Synthetic oligonucleotide; GCGAGT chr2 60528829 60528848 60528845 +
ctggaggtgcagcccccgga

SEQ ID NO: 186785 - DNA, 20 bp, Artificial Sequence
  Synthetic oligonucleotide; TTGAGT chr2 60528891 60528910 60528907 +
actctatgaggtaagggacc

SEQ ID NO: 186786 - DNA, 20 bp, Artificial Sequence
  Synthetic oligonucleotide; CAGAGT chr2 60528975 60528994 60528991 +
gtaacatagaaatctgaacc

SEQ ID NO: 186787 - DNA, 20 bp, Artificial Sequence
  Synthetic oligonucleotide; ATGAGT chr2 60529198 60529217 60529214 +
ggagcacacagttccaagcc

SEQ ID NO: 186788 - DNA, 20 bp, Artificial Sequence
  Synthetic oligonucleotide; TAGGAT chr2 60529285 60529304 60529301 +
agcgcccccacatgctctca

SEQ ID NO: 186789 - DNA, 20 bp, Artificial Sequence
  Synthetic oligonucleotide; GGGAAT chr2 60529359 60529378 60529375 +
attgaggaagcggaggctta

SEQ ID NO: 186790 - DNA, 20 bp, Artificial Sequence
  Synthetic oligonucleotide; CTGAGT chr2 60529581 60529600 60529597 +
gactgcctctaagggcttgg

SEQ ID NO: 186791 - DNA, 20 bp, Artificial Sequence
  Synthetic oligonucleotide; TGGGAT chr2 60529616 60529635 60529632 +
ggagcgggggcaggtatcca

SEQ ID NO: 186792 - DNA, 20 bp, Artificial Sequence
  Synthetic oligonucleotide; GTGAAT chr2 60529799 60529818 60529815 +
ggaaaaatattttttattgt

SEQ ID NO: 186793 - DNA, 20 bp, Artificial Sequence
  Synthetic oligonucleotide; TGGGAT chr2 60529856 60529875 60529872 +
aagccctggtgtcccctagg

SEQ ID NO: 186794 - DNA, 20 bp, Artificial Sequence
  Synthetic oligonucleotide; TGGGAT chr2 60530015 60530034 60530031 +
taaaaatgtcaggaagttat

SEQ ID NO: 186795 - DNA, 20 bp, Artificial Sequence
  Synthetic oligonucleotide; ATGAAT chr2 60530049 60530068 60530065 +
ctgcttgccaacattcatat

SEQ ID NO: 186796 - DNA, 20 bp, Artificial Sequence
  Synthetic oligonucleotide; ATGGGT chr2 60530135 60530154 60530151 +
aacaaaacaagcccaaacac

SEQ ID NO: 186797 - DNA, 20 bp, Artificial Sequence
  Synthetic oligonucleotide; CTGGGT chr2 60530153 60530172 60530169 +
acatgggtttgccatcggtc

SEQ ID NO: 186798 - DNA, 20 bp, Artificial Sequence
  Synthetic oligonucleotide; AAGAGT chr2 60530329 60530348 60530345 +
atttaaaaaaaaaaaaaaaa

SEQ ID NO: 186799 - DNA, 20 bp, Artificial Sequence
  Synthetic oligonucleotide; TCGGGT chr2 60530449 60530468 60530465 +
aaacccttcccatctggccc

SEQ ID NO: 186800 - DNA, 20 bp, Artificial Sequence
  Synthetic oligonucleotide; CTGAGT chr2 60530817 60530836 60530833 +
cccacctcccactacccctc

SEQ ID NO: 186801 - DNA, 20 bp, Artificial Sequence
  Synthetic oligonucleotide; GAGAGT chr2 60531001 60531020 60531017 +
ctggctacaccatggccagg

SEQ ID NO: 186802 - DNA, 20 bp, Artificial Sequence
  Synthetic oligonucleotide; CAGAAT chr2 60531250 60531269 60531266 +
cacaaatcccgttggaccca

SEQ ID NO: 186803 - DNA, 20 bp, Artificial Sequence
  Synthetic oligonucleotide; AAGAAT chr2 60531333 60531352 60531349 +
ccccctcctttgcgttctgc

SEQ ID NO: 186804 - DNA, 20 bp, Artificial Sequence
  Synthetic oligonucleotide; GTGAGT chr2 60531346 60531365 60531362 +
gttctgcaagaatattttaa

SEQ ID NO: 186805 - DNA, 20 bp, Artificial Sequence
  Synthetic oligonucleotide; CGGAAT chr2 60531424 60531443 60531440 +
cacactttttacaaccagta

SEQ ID NO: 186806 - DNA, 20 bp, Artificial Sequence
  Synthetic oligonucleotide; CAGGGT chr2 60531721 60531740 60531737 +
gctgaccccagtacccaagg

SEQ ID NO: 186807 - DNA, 20 bp, Artificial Sequence
  Synthetic oligonucleotide; CTGGGT chr2 60531928 60531947 60531944 +
gactagggcaccatgagcat

SEQ ID NO: 186808 - DNA, 20 bp, Artificial Sequence
  Synthetic oligonucleotide; CGGAAT chr2 60531941 60531960 60531957 +
tgagcatctgggttaaggct

SEQ ID NO: 186809 - DNA, 20 bp, Artificial Sequence
  Synthetic oligonucleotide; TCGAAT chr2 60532092 60532111 60532108 +
ccaacacacccaccgcacaa

SEQ ID NO: 186810 - DNA, 20 bp, Artificial Sequence
  Synthetic oligonucleotide; GAGAAT chr2 60532173 60532192 60532189 +
acagaagttcttcaaatttt

SEQ ID NO: 186811 - DNA, 20 bp, Artificial Sequence
  Synthetic oligonucleotide; TTGGGT chr2 60532304 60532323 60532320 +
tggttgttgctttttggttt

SEQ ID NO: 186812 - DNA, 20 bp, Artificial Sequence
  Synthetic oligonucleotide; CTGGGT chr2 60532460 60532479 60532476 +
aagacagcttctgggccact

SEQ ID NO: 186813 - DNA, 20 bp, Artificial Sequence
  Synthetic oligonucleotide; GTGAAT chr2 60532536 60532555 60532552 +
gatttacagaaccttggtat

SEQ ID NO: 186814 - DNA, 20 bp, Artificial Sequence
  Synthetic oligonucleotide; AAGGAT chr2 60532589 60532608 60532605 +
aaaagaaaattccttggcat

SEQ ID NO: 186815 - DNA, 20 bp, Artificial Sequence
  Synthetic oligonucleotide; ATGGAT chr2 60532672 60532691 60532688 +
aaacagtttgccacagtgag

SEQ ID NO: 186816 - DNA, 20 bp, Artificial Sequence
  Synthetic oligonucleotide; TTGGAT chr2 60532769 60532788 60532785 +
gatttaaagcattaactggt

SEQ ID NO: 186817 - DNA, 20 bp, Artificial Sequence
  Synthetic oligonucleotide; TAGAAT chr2 60532929 60532948 60532945 +
tactttttatttacttcctg

SEQ ID NO: 186818 - DNA, 20 bp, Artificial Sequence
  Synthetic oligonucleotide; CTGGGT chr2 60532986 60533005 60533002 +
ccattatataacaatctacc

SEQ ID NO: 186819 - DNA, 20 bp, Artificial Sequence
  Synthetic oligonucleotide; TAGAAT chr2 60533014 60533033 60533030 +
actagattatgccaatctat

SEQ ID NO: 186820 - DNA, 20 bp, Artificial Sequence
  Synthetic oligonucleotide; CAGAGT chr2 60533100 60533119 60533116 +
aatgtaaagtgttattatag

SEQ ID NO: 186821 - DNA, 20 bp, Artificial Sequence
  Synthetic oligonucleotide; CTGGAT chr2 60533228 60533247 60533244 +
aaaccgacatggcaaaactc

SEQ ID NO: 186822 - DNA, 20 bp, Artificial Sequence
  Synthetic oligonucleotide; CTGAAT chr2 60533237 60533256 60533253 +
tggcaaaactcctggataga

SEQ ID NO: 186823 - DNA, 20 bp, Artificial Sequence
  Synthetic oligonucleotide; TAGGAT chr2 60533285 60533304 60533301 +
ttgtttactttttaccttgt

SEQ ID NO: 186824 - DNA, 20 bp, Artificial Sequence
  Synthetic oligonucleotide; AGGAAT chr2 60533338 60533357 60533354 +
agagaggagagaaagagaga

SEQ ID NO: 186825 - DNA, 20 bp, Artificial Sequence
  Synthetic oligonucleotide; GGGGGT chr2 60533347 60533366 60533363 +
agaaagagagaaggaatgaa

SEQ ID NO: 186826 - DNA, 20 bp, Artificial Sequence
  Synthetic oligonucleotide; CCGGGT chr2 60533480 60533499 60533496 +
ttgttttgttttcttaaata

SEQ ID NO: 186827 - DNA, 20 bp, Artificial Sequence
  Synthetic oligonucleotide; CTGAAT chr2 60533489 60533508 60533505 +
tttcttaaataccgggtcag

SEQ ID NO: 186828 - DNA, 20 bp, Artificial Sequence
  Synthetic oligonucleotide; TGGAAT chr2 60533630 60533649 60533646 +
caagaaaatgatagtgcgtg

SEQ ID NO: 186829 - DNA, 20 bp, Artificial Sequence
  Synthetic oligonucleotide; CAGAAT chr2 60533687 60533706 60533703 +
ggctgtgaagtcggagaggg

SEQ ID NO: 186830 - DNA, 20 bp, Artificial Sequence
  Synthetic oligonucleotide; CTGGAT chr2 60533720 60533739 60533736 +
cacacacaaataaaaagccc

SEQ ID NO: 186831 - DNA, 20 bp, Artificial Sequence
  Synthetic oligonucleotide; CTGGAT chr2 60533796 60533815 60533812 +
cttaataatttatttgtgtt

SEQ ID NO: 186832 - DNA, 20 bp, Artificial Sequence
  Synthetic oligonucleotide; CTGAAT chr2 60533814 60533833 60533830 +
ttctggatactgtttcccag

SEQ ID NO: 186833 - DNA, 20 bp, Artificial Sequence
  Synthetic oligonucleotide; ATGGAT chr2 60533858 60533877 60533874 +
aagcatgcttttagcatggt

SEQ ID NO: 186834 - DNA, 20 bp, Artificial Sequence
  Synthetic oligonucleotide; CAGAAT chr2 60533981 60534000 60533997 +
cattaaacattcgttttaat

SEQ ID NO: 186835 - DNA, 20 bp, Artificial Sequence
  Synthetic oligonucleotide; CAGGAT chr2 60534204 60534223 60534220 +
agcccagggagcctggagac

SEQ ID NO: 186836 - DNA, 20 bp, Artificial Sequence
  Synthetic oligonucleotide; CTGAAT chr2 60534256 60534275 60534272 +
attgtagctcagagcagcag

SEQ ID NO: 186837 - DNA, 20 bp, Artificial Sequence
  Synthetic oligonucleotide; AAGAGT chr2 60534290 60534309 60534306 +
ttacttgatctaaaagataa

SEQ ID NO: 186838 - DNA, 20 bp, Artificial Sequence
  Synthetic oligonucleotide; ACGGAT chr2 60534631 60534650 60534647 +
gtacttaacgttaaaagaaa

SEQ ID NO: 186839 - DNA, 20 bp, Artificial Sequence
  Synthetic oligonucleotide; AGGAGT chr2 60534826 60534845 60534842 +
tatgcaaattacattaatga

SEQ ID NO: 186840 - DNA, 20 bp, Artificial Sequence
  Synthetic oligonucleotide; AAGAAT chr2 60534947 60534966 60534963 +
ttttgcaagattgaaaatct

SEQ ID NO: 186841 - DNA, 20 bp, Artificial Sequence
  Synthetic oligonucleotide; CCGAAT chr2 60535022 60535041 60535038 +
acaggccagcctgatgtgca

SEQ ID NO: 186842 - DNA, 20 bp, Artificial Sequence
  Synthetic oligonucleotide; TAGAAT chr2 60535095 60535114 60535111 +
tggaaggacctaatggtcat

SEQ ID NO: 186843 - DNA, 20 bp, Artificial Sequence
  Synthetic oligonucleotide; AAGGGT chr2 60535236 60535255 60535252 +
taagattcatccaaaaagca

SEQ ID NO: 186844 - DNA, 20 bp, Artificial Sequence
  Synthetic oligonucleotide; CAGAGT chr2 60535448 60535467 60535464 +
gtaatttatcaaaaacagcc

SEQ ID NO: 186845 - DNA, 20 bp, Artificial Sequence
  Synthetic oligonucleotide; ACGAGT chr2 60535499 60535518 60535515 +
ctccaacagaacagattaac

SEQ ID NO: 186846 - DNA, 20 bp, Artificial Sequence
  Synthetic oligonucleotide; TGGAGT chr2 60535596 60535615 60535612 +
aaacagctttttcattggct

SEQ ID NO: 186847 - DNA, 20 bp, Artificial Sequence
  Synthetic oligonucleotide; AGGAGT chr2 60535694 60535713 60535710 +
caaggtctggtttacttctg

SEQ ID NO: 186848 - DNA, 20 bp, Artificial Sequence
  Synthetic oligonucleotide; ACGGGT chr2 60535773 60535792 60535789 +
ccgcatttaatccatggtga

SEQ ID NO: 186849 - DNA, 20 bp, Artificial Sequence
  Synthetic oligonucleotide; GAGAGT chr2 60535850 60535869 60535866 +
ccatcccaccccagttatta

SEQ ID NO: 186850 - DNA, 20 bp, Artificial Sequence
  Synthetic oligonucleotide; CTGGAT chr2 60535867 60535886 60535883 +
ttagagagtatcgtgggaac

SEQ ID NO: 186851 - DNA, 20 bp, Artificial Sequence
  Synthetic oligonucleotide; AAGAAT chr2 60535902 60535921 60535918 +
ttccaattactagtctggag

SEQ ID NO: 186852 - DNA, 20 bp, Artificial Sequence
  Synthetic oligonucleotide; TTGAAT chr2 60535915 60535934 60535931 +
tctggagaagaatcctttgc

SEQ ID NO: 186853 - DNA, 20 bp, Artificial Sequence
  Synthetic oligonucleotide; CAGAAT chr2 60535969 60535988 60535985 +
catttaaaaaattctagtga

SEQ ID NO: 186854 - DNA, 20 bp, Artificial Sequence
  Synthetic oligonucleotide; GAGAAT chr2 60536080 60536099 60536096 +
gctggtgtgcaagtcagact

SEQ ID NO: 186855 - DNA, 20 bp, Artificial Sequence
  Synthetic oligonucleotide; GGGGAT chr2 60536153 60536172 60536169 +
acccaaaagctctctgctgt

SEQ ID NO: 186856 - DNA, 20 bp, Artificial Sequence
  Synthetic oligonucleotide; AAGAAT chr2 60536178 60536197 60536194 +
tttcatttgaactgctatcg

SEQ ID NO: 186857 - DNA, 20 bp, Artificial Sequence
  Synthetic oligonucleotide; TAGAGT chr2 60536245 60536264 60536261 +
cccagcctcagactttctcc

SEQ ID NO: 186858 - DNA, 20 bp, Artificial Sequence
  Synthetic oligonucleotide; GTGGAT chr2 60536267 60536286 60536283 +
gagttgatcttaccggaaat

SEQ ID NO: 186859 - DNA, 20 bp, Artificial Sequence
  Synthetic oligonucleotide; AAGGAT chr2 60536391 60536410 60536407 +
acattttaacatttattaga

SEQ ID NO: 186860 - DNA, 20 bp, Artificial Sequence
  Synthetic oligonucleotide; TAGGAT chr2 60536396 60536415 60536412 +
ttaacatttattagaaagga

SEQ ID NO: 186861 - DNA, 20 bp, Artificial Sequence
  Synthetic oligonucleotide; ATGAGT chr2 60536495 60536514 60536511 +
tgacactaatgttactctac

SEQ ID NO: 186862 - DNA, 20 bp, Artificial Sequence
  Synthetic oligonucleotide; TAGAGT chr2 60536500 60536519 60536516 +
ctaatgttactctacatgag

SEQ ID NO: 186863 - DNA, 20 bp, Artificial Sequence
  Synthetic oligonucleotide; GAGGGT chr2 60536511 60536530 60536527 +
ctacatgagtagagttcaat

SEQ ID NO: 186864 - DNA, 20 bp, Artificial Sequence
  Synthetic oligonucleotide; TGGGAT chr2 60536522 60536541 60536538 +
gagttcaatgagggttgata

SEQ ID NO: 186865 - DNA, 20 bp, Artificial Sequence
  Synthetic oligonucleotide; CAGAAT chr2 60536542 60536561 60536558 +
tgggatgtgacagggcaaat

SEQ ID NO: 186866 - DNA, 20 bp, Artificial Sequence
  Synthetic oligonucleotide; TGGAAT chr2 60536707 60536726 60536723 +
aatcacatcagaaagtaaag

SEQ ID NO: 186867 - DNA, 20 bp, Artificial Sequence
  Synthetic oligonucleotide; CTGAAT chr2 60536897 60536916 60536913 +
acaatgcctgctgtcagcag

SEQ ID NO: 186868 - DNA, 20 bp, Artificial Sequence
  Synthetic oligonucleotide; AGGAAT chr2 60536914 60536933 60536930 +
cagctgaattatttttatac

SEQ ID NO: 186869 - DNA, 20 bp, Artificial Sequence
  Synthetic oligonucleotide; TAGAAT chr2 60536984 60537003 60537000 +
ttaagcaatccacttgtatg

SEQ ID NO: 186870 - DNA, 20 bp, Artificial Sequence
  Synthetic oligonucleotide; AAGAGT chr2 60537107 60537126 60537123 +
gcagttgttttcaaagatcc

SEQ ID NO: 186871 - DNA, 20 bp, Artificial Sequence
  Synthetic oligonucleotide; CAGAAT chr2 60537121 60537140 60537137 +
agatccaagagtatctttat

SEQ ID NO: 186872 - DNA, 20 bp, Artificial Sequence
  Synthetic oligonucleotide; AGGAAT chr2 60537260 60537279 60537276 +
atgttcagttttaaatgtaa

SEQ ID NO: 186873 - DNA, 20 bp, Artificial Sequence
  Synthetic oligonucleotide; TAGGGT chr2 60537282 60537301 60537298 +
gaataatttttttaaaatat

SEQ ID NO: 186874 - DNA, 20 bp, Artificial Sequence
  Synthetic oligonucleotide; AAGGAT chr2 60537357 60537376 60537373 +
ttgttttaactggaaactga

SEQ ID NO: 186875 - DNA, 20 bp, Artificial Sequence
  Synthetic oligonucleotide; GGGAGT chr2 60537371 60537390 60537387 +
aactgaaaggatcggggcag

SEQ ID NO: 186876 - DNA, 20 bp, Artificial Sequence
  Synthetic oligonucleotide; GGGAGT chr2 60537384 60537403 60537400 +
ggggcaggggagttaaaatg

SEQ ID NO: 186877 - DNA, 20 bp, Artificial Sequence
  Synthetic oligonucleotide; AGGGGT chr2 60537403 60537422 60537419 +
ggggagtaaatggttcactg

SEQ ID NO: 186878 - DNA, 20 bp, Artificial Sequence
  Synthetic oligonucleotide; TTGAGT chr2 60537450 60537469 60537466 +
tcataaaatcatggtatacc

SEQ ID NO: 186879 - DNA, 20 bp, Artificial Sequence
  Synthetic oligonucleotide; GAGAAT chr2 60537464 60537483 60537480 +
tataccttgagttggtgaag

SEQ ID NO: 186880 - DNA, 20 bp, Artificial Sequence
  Synthetic oligonucleotide; AGGGAT chr2 60537525 60537544 60537541 +
gtttttgtttgaggaggtgc

SEQ ID NO: 186881 - DNA, 20 bp, Artificial Sequence
  Synthetic oligonucleotide; AAGAAT chr2 60537605 60537624 60537621 +
agtgctttgtgctccaacat

SEQ ID NO: 186882 - DNA, 20 bp, Artificial Sequence
  Synthetic oligonucleotide; ATGAAT chr2 60537703 60537722 60537719 +
attaagaaaatgaacaactg

SEQ ID NO: 186883 - DNA, 20 bp, Artificial Sequence
  Synthetic oligonucleotide; GGGAGT chr2 60537867 60537886 60537883 +
attccattctttattttaat

SEQ ID NO: 186884 - DNA, 20 bp, Artificial Sequence
  Synthetic oligonucleotide; GTGGAT chr2 60537882 60537901 60537898 +
ttaatgggagtttttaatca

SEQ ID NO: 186885 - DNA, 20 bp, Artificial Sequence
  Synthetic oligonucleotide; GAGAAT chr2 60537954 60537973 60537970 +
ttggcaatgctaacaacagt

SEQ ID NO: 186886 - DNA, 20 bp, Artificial Sequence
  Synthetic oligonucleotide; GTGAGT chr2 60537977 60537996 60537993 +
aatacaaacaaaaactcatt

SEQ ID NO: 186887 - DNA, 20 bp, Artificial Sequence
  Synthetic oligonucleotide; GGGAAT chr2 60538038 60538057 60538054 +
acctgctccaggttcccact

SEQ ID NO: 186888 - DNA, 20 bp, Artificial Sequence
  Synthetic oligonucleotide; CTGAAT chr2 60538068 60538087 60538084 +
tggcagagactgattcagtt

SEQ ID NO: 186889 - DNA, 20 bp, Artificial Sequence
  Synthetic oligonucleotide; AAGGGT chr2 60538099 60538118 60538115 +
gctgccagccctatctggaa

SEQ ID NO: 186890 - DNA, 20 bp, Artificial Sequence
  Synthetic oligonucleotide; CAGGGT chr2 60538370 60538389 60538386 +
gatccactcacatcagtctc

SEQ ID NO: 186891 - DNA, 20 bp, Artificial Sequence
  Synthetic oligonucleotide; GTGGAT chr2 60538493 60538512 60538509 +
tatttttctttatacgtttt

SEQ ID NO: 186892 - DNA, 20 bp, Artificial Sequence
  Synthetic oligonucleotide; TGGAAT chr2 60538612 60538631 60538628 +
ataatggtgaaatattttaa

SEQ ID NO: 186893 - DNA, 20 bp, Artificial Sequence
  Synthetic oligonucleotide; CTGAAT chr2 60538693 60538712 60538709 +
agatcagtactagatttaaa

SEQ ID NO: 186894 - DNA, 20 bp, Artificial Sequence
  Synthetic oligonucleotide; AGGGGT chr2 60538776 60538795 60538792 +
tgtgtgtgtaatggggaaag

SEQ ID NO: 186895 - DNA, 20 bp, Artificial Sequence
  Synthetic oligonucleotide; GTGAAT chr2 60538961 60538980 60538977 +
catgcaaaaaaattctggtg

SEQ ID NO: 186896 - DNA, 20 bp, Artificial Sequence
  Synthetic oligonucleotide; CAGAGT chr2 60538977 60538996 60538993 +
ggtggtgaattgggaggtgg

SEQ ID NO: 186897 - DNA, 20 bp, Artificial Sequence
  Synthetic oligonucleotide; AAGGAT chr2 60539008 60539027 60539024 +
agacaactccaagagaagaa

SEQ ID NO: 186898 - DNA, 20 bp, Artificial Sequence
  Synthetic oligonucleotide; AAGAAT chr2 60539048 60539067 60539064 +
gctatagatcaaaggagaac

SEQ ID NO: 186899 - DNA, 20 bp, Artificial Sequence
  Synthetic oligonucleotide; TGGGAT chr2 60539319 60539338 60539335 +
gaagctcacctattccctgc

SEQ ID NO: 186900 - DNA, 20 bp, Artificial Sequence
  Synthetic oligonucleotide; CAGAAT chr2 60539391 60539410 60539407 +
aacctaactcaatgccattg

SEQ ID NO: 186901 - DNA, 20 bp, Artificial Sequence
  Synthetic oligonucleotide; ACGAAT chr2 60539398 60539417 60539414 +
ctcaatgccattgcagaatg

SEQ ID NO: 186902 - DNA, 20 bp, Artificial Sequence
  Synthetic oligonucleotide; GGGAGT chr2 60539483 60539502 60539499 +
aaatgttttaaaaatgcata

SEQ ID NO: 186903 - DNA, 20 bp, Artificial Sequence
  Synthetic oligonucleotide; TGGAAT chr2 60539537 60539556 60539553 +
aaattccaatgaacccaata

SEQ ID NO: 186904 - DNA, 20 bp, Artificial Sequence
  Synthetic oligonucleotide; TTGAGT chr2 60539597 60539616 60539613 +
tgatgtttactggcttcaaa

SEQ ID NO: 186905 - DNA, 20 bp, Artificial Sequence
  Synthetic oligonucleotide; AAGAAT chr2 60539701 60539720 60539717 +
ggagcacatgtagagagcta

SEQ ID NO: 186906 - DNA, 20 bp, Artificial Sequence
  Synthetic oligonucleotide; AAGGAT chr2 60539894 60539913 60539910 +
gtaaaggggagaagctgttt

SEQ ID NO: 186907 - DNA, 20 bp, Artificial Sequence
  Synthetic oligonucleotide; TAGAAT chr2 60540108 60540127 60540124 +
gttaaaagtgggctctaagt

SEQ ID NO: 186908 - DNA, 20 bp, Artificial Sequence
  Synthetic oligonucleotide; CTGGGT chr2 60540245 60540264 60540261 +
aaaagtggcaaggtgccagg

SEQ ID NO: 186909 - DNA, 20 bp, Artificial Sequence
  Synthetic oligonucleotide; TGGGGT chr2 60540320 60540339 60540336 +
tgtaaaaacagacttgggct

SEQ ID NO: 186910 - DNA, 20 bp, Artificial Sequence
  Synthetic oligonucleotide; AAGGGT chr2 60540357 60540376 60540373 +
aatgacttctttgtgcaata

SEQ ID NO: 186911 - DNA, 20 bp, Artificial Sequence
  Synthetic oligonucleotide; TAGGAT chr2 60540587 60540606 60540603 +
aaatctaaaaaatgtttccc

SEQ ID NO: 186912 - DNA, 20 bp, Artificial Sequence
  Synthetic oligonucleotide; AGGAAT chr2 60540890 60540909 60540906 +
gcacaacttgcaacacaaca

SEQ ID NO: 186913 - DNA, 20 bp, Artificial Sequence
  Synthetic oligonucleotide; TGGGGT chr2 60540895 60540914 60540911 +
acttgcaacacaacaaggaa

SEQ ID NO: 186914 - DNA, 20 bp, Artificial Sequence
  Synthetic oligonucleotide; CAGAAT chr2 60541006 60541025 60541022 +
tttgtttttttaagctttca

SEQ ID NO: 186915 - DNA, 20 bp, Artificial Sequence
  Synthetic oligonucleotide; GTGAAT chr2 60541064 60541083 60541080 +
cctctgctcctgttcttgaa

SEQ ID NO: 186916 - DNA, 20 bp, Artificial Sequence
  Synthetic oligonucleotide; CAGGAT chr2 60541162 60541181 60541178 +
cacaatctccacatcacaca

SEQ ID NO: 186917 - DNA, 20 bp, Artificial Sequence
  Synthetic oligonucleotide; AAGGGT chr2 60541257 60541276 60541273 +
catcttttctgtgtcaccac

SEQ ID NO: 186918 - DNA, 20 bp, Artificial Sequence
  Synthetic oligonucleotide; TGGGAT chr2 60541279 60541298 60541295 +
gggtaatgtctgaagaagtt

SEQ ID NO: 186919 - DNA, 20 bp, Artificial Sequence
  Synthetic oligonucleotide; TAGGAT chr2 60541288 60541307 60541304 +
ctgaagaagtttgggatctt

SEQ ID NO: 186920 - DNA, 20 bp, Artificial Sequence
  Synthetic oligonucleotide; AAGAGT chr2 60541475 60541494 60541491 +
tatttacaatttgtcttaga

SEQ ID NO: 186921 - DNA, 20 bp, Artificial Sequence
  Synthetic oligonucleotide; TTGGAT chr2 60541595 60541614 60541611 +
agtttcatgaacattagtct

SEQ ID NO: 186922 - DNA, 20 bp, Artificial Sequence
  Synthetic oligonucleotide; CTGGAT chr2 60541671 60541690 60541687 +
aaaacaatattctctactct

SEQ ID NO: 186923 - DNA, 20 bp, Artificial Sequence
  Synthetic oligonucleotide; CAGAAT chr2 60541786 60541805 60541802 +
agaagtcagtcgtttttatt

SEQ ID NO: 186924 - DNA, 20 bp, Artificial Sequence
  Synthetic oligonucleotide; GAGAAT chr2 60541912 60541931 60541928 +
cagttcagtctgagctagga

SEQ ID NO: 186925 - DNA, 20 bp, Artificial Sequence
  Synthetic oligonucleotide; CAGAAT chr2 60541918 60541937 60541934 +
agtctgagctaggagagaat

SEQ ID NO: 186926 - DNA, 20 bp, Artificial Sequence
  Synthetic oligonucleotide; ATGGAT chr2 60541922 60541941 60541938 +
tgagctaggagagaatcaga

SEQ ID NO: 186927 - DNA, 20 bp, Artificial Sequence
  Synthetic oligonucleotide; TTGAAT chr2 60542017 60542036 60542033 +
catgctaatgtatttccatt

SEQ ID NO: 186928 - DNA, 20 bp, Artificial Sequence
  Synthetic oligonucleotide; TAGAGT chr2 60542041 60542060 60542057 +
attactatatctcccttctt

SEQ ID NO: 186929 - DNA, 20 bp, Artificial Sequence
  Synthetic oligonucleotide; TGGGAT chr2 60542302 60542321 60542318 +
aaacctcaaatctgacatga

SEQ ID NO: 186930 - DNA, 20 bp, Artificial Sequence
  Synthetic oligonucleotide; TTGGGT chr2 60542313 60542332 60542329 +
ctgacatgatgggataatgt

SEQ ID NO: 186931 - DNA, 20 bp, Artificial Sequence
  Synthetic oligonucleotide; ATGAAT chr2 60542362 60542381 60542378 +
ttcacattcagtaatcttcc

SEQ ID NO: 186932 - DNA, 20 bp, Artificial Sequence
  Synthetic oligonucleotide; GAGGGT chr2 60542470 60542489 60542486 +
gtcaaaggctgctgatatct

SEQ ID NO: 186933 - DNA, 20 bp, Artificial Sequence
  Synthetic oligonucleotide; GTGGAT chr2 60542474 60542493 60542490 +
aaggctgctgatatctgagg

SEQ ID NO: 186934 - DNA, 20 bp, Artificial Sequence
  Synthetic oligonucleotide; ATGGAT chr2 60542564 60542583 60542580 +
atactacttcaatgatctca

SEQ ID NO: 186935 - DNA, 20 bp, Artificial Sequence
  Synthetic oligonucleotide; TTGAAT chr2 60542587 60542606 60542603 +
gatcacaatcacacaatatt

SEQ ID NO: 186936 - DNA, 20 bp, Artificial Sequence
  Synthetic oligonucleotide; GTGGAT chr2 60542654 60542673 60542670 +
tgtacagctcatatgtgtac

SEQ ID NO: 186937 - DNA, 20 bp, Artificial Sequence
  Synthetic oligonucleotide; AAGAAT chr2 60542699 60542718 60542715 +
ccatctattcaccaggtaaa

SEQ ID NO: 186938 - DNA, 20 bp, Artificial Sequence
  Synthetic oligonucleotide; GTGGAT chr2 60542782 60542801 60542798 +
actttgggaggccaagccag

SEQ ID NO: 186939 - DNA, 20 bp, Artificial Sequence
  Synthetic oligonucleotide; AGGAGT chr2 60542799 60542818 60542815 +
caggtggatcacctgaggtc

SEQ ID NO: 186940 - DNA, 20 bp, Artificial Sequence
  Synthetic oligonucleotide; GAGAAT chr2 60542918 60542937 60542934 +
tacttgggaggctgaggcag

SEQ ID NO: 186941 - DNA, 20 bp, Artificial Sequence
  Synthetic oligonucleotide; CTGAGT chr2 60543050 60543069 60543066 +
aaaactcagcttggagaggc

SEQ ID NO: 186942 - DNA, 20 bp, Artificial Sequence
  Synthetic oligonucleotide; CCGAAT chr2 60543124 60543143 60543140 +
tattctcctatctgaaagtc

SEQ ID NO: 186943 - DNA, 20 bp, Artificial Sequence
  Synthetic oligonucleotide; CTGAAT chr2 60543387 60543406 60543403 +
tgacacaattcaaatatcta

SEQ ID NO: 186944 - DNA, 20 bp, Artificial Sequence
  Synthetic oligonucleotide; TGGAAT chr2 60543440 60543459 60543456 +
cataaaaagaaaagcagact

SEQ ID NO: 186945 - DNA, 20 bp, Artificial Sequence
  Synthetic oligonucleotide; GGGGGT chr2 60543475 60543494 60543491 +
gtgctttagagaaatgggct

SEQ ID NO: 186946 - DNA, 20 bp, Artificial Sequence
  Synthetic oligonucleotide; CGGAAT chr2 60543537 60543556 60543553 +
gcacctgagggccagagcgt

SEQ ID NO: 186947 - DNA, 20 bp, Artificial Sequence
  Synthetic oligonucleotide; TAGAAT chr2 60543556 60543575 60543572 +
tcggaatttatgtgcaatgg

SEQ ID NO: 186948 - DNA, 20 bp, Artificial Sequence
  Synthetic oligonucleotide; GTGAAT chr2 60543598 60543617 60543614 +
gaaactcttaattcattact

SEQ ID NO: 186949 - DNA, 20 bp, Artificial Sequence
  Synthetic oligonucleotide; CAGGGT chr2 60543678 60543697 60543694 +
tatttatgttcagccagttc

SEQ ID NO: 186950 - DNA, 20 bp, Artificial Sequence
  Synthetic oligonucleotide; CTGGGT chr2 60543757 60543776 60543773 +
gcacgaaaggtttacctcac

SEQ ID NO: 186951 - DNA, 20 bp, Artificial Sequence
  Synthetic oligonucleotide; TTGAAT chr2 60543785 60543804 60543801 +
cagcacttgttgtgcgccca

SEQ ID NO: 186952 - DNA, 20 bp, Artificial Sequence
  Synthetic oligonucleotide; GGGAGT chr2 60543946 60543965 60543962 +
acagaacctttagacaacca

SEQ ID NO: 186953 - DNA, 20 bp, Artificial Sequence
  Synthetic oligonucleotide; CAGAAT chr2 60544067 60544086 60544083 +
ctcctctaaatacagaggca

SEQ ID NO: 186954 - DNA, 20 bp, Artificial Sequence
  Synthetic oligonucleotide; CTGAAT chr2 60544095 60544114 60544111 +
ttgagctggttaatctaaga

SEQ ID NO: 186955 - DNA, 20 bp, Artificial Sequence
  Synthetic oligonucleotide; TTGGAT chr2 60544247 60544266 60544263 +
tttggtgatttagcaaggct

SEQ ID NO: 186956 - DNA, 20 bp, Artificial Sequence
  Synthetic oligonucleotide; GGGGGT chr2 60544375 60544394 60544391 +
gtcattcccacatcctgctg

SEQ ID NO: 186957 - DNA, 20 bp, Artificial Sequence
  Synthetic oligonucleotide; GTGGAT chr2 60544426 60544445 60544442 +
tgtcacataaggtaaatgtg

SEQ ID NO: 186958 - DNA, 20 bp, Artificial Sequence
  Synthetic oligonucleotide; CTGAGT chr2 60544501 60544520 60544517 +
tttcactaaagggaaagtat

SEQ ID NO: 186959 - DNA, 20 bp, Artificial Sequence
  Synthetic oligonucleotide; GTGAAT chr2 60544673 60544692 60544689 +
ggtcggagagacaagttcca

SEQ ID NO: 186960 - DNA, 20 bp, Artificial Sequence
  Synthetic oligonucleotide; CTGGGT chr2 60544737 60544756 60544753 +
aacctcttgcctttcgggag

SEQ ID NO: 186961 - DNA, 20 bp, Artificial Sequence
  Synthetic oligonucleotide; CAGAAT chr2 60544797 60544816 60544813 +
gcatggcatgtctgtcatca

SEQ ID NO: 186962 - DNA, 20 bp, Artificial Sequence
  Synthetic oligonucleotide; GAGGGT chr2 60544846 60544865 60544862 +
gctcaagcaaaaaatgtttt

SEQ ID NO: 186963 - DNA, 20 bp, Artificial Sequence
  Synthetic oligonucleotide; GGGAAT chr2 60544886 60544905 60544902 +
actgtttatcacttagagaa

SEQ ID NO: 186964 - DNA, 20 bp, Artificial Sequence
  Synthetic oligonucleotide; TTGAAT chr2 60544995 60545014 60545011 +
aaccaaaggagggagggctg

SEQ ID NO: 186965 - DNA, 20 bp, Artificial Sequence
  Synthetic oligonucleotide; TGGAGT chr2 60545054 60545073 60545070 +
ttgtgttatagcagaaacag

SEQ ID NO: 186966 - DNA, 20 bp, Artificial Sequence
  Synthetic oligonucleotide; AAGGGT chr2 60545077 60545096 60545093 +
agtctggactggacatttgt

SEQ ID NO: 186967 - DNA, 20 bp, Artificial Sequence
  Synthetic oligonucleotide; TCGAGT chr2 60545256 60545275 60545272 +
ccaacatgcccttaaacttt

SEQ ID NO: 186968 - DNA, 20 bp, Artificial Sequence
  Synthetic oligonucleotide; ATGGAT chr2 60545402 60545421 60545418 +
catccgggctgacagccaat

SEQ ID NO: 186969 - DNA, 20 bp, Artificial Sequence
  Synthetic oligonucleotide; CTGAGT chr2 60545530 60545549 60545546 +
aggaggcctggccagatgtt

SEQ ID NO: 186970 - DNA, 20 bp, Artificial Sequence
  Synthetic oligonucleotide; GGGGAT chr2 60545666 60545685 60545682 +
atacttcaaaatgagaaggt

SEQ ID NO: 186971 - DNA, 20 bp, Artificial Sequence
  Synthetic oligonucleotide; TAGAGT chr2 60545845 60545864 60545861 +
ggctgtcatggacagtcaca

SEQ ID NO: 186972 - DNA, 20 bp, Artificial Sequence
  Synthetic oligonucleotide; CTGGAT chr2 60546024 60546043 60546040 +
tcgtcatcctctggcgtgac

SEQ ID NO: 186973 - DNA, 20 bp, Artificial Sequence
  Synthetic oligonucleotide; CGGGAT chr2 60546041 60546060 60546057 +
gacctggatgccaacctcca

SEQ ID NO: 186974 - DNA, 20 bp, Artificial Sequence
  Synthetic oligonucleotide; TTGGAT chr2 60546046 60546065 60546062 +
ggatgccaacctccacggga

SEQ ID NO: 186975 - DNA, 20 bp, Artificial Sequence
  Synthetic oligonucleotide; AAGAAT chr2 60546153 60546172 60546169 +
cgtttgtgctcgataaaaat

SEQ ID NO: 186976 - DNA, 20 bp, Artificial Sequence
  Synthetic oligonucleotide; AAGAAT chr2 60546258 60546277 60546274 +
tggtctggttcatcatctgt

SEQ ID NO: 186977 - DNA, 20 bp, Artificial Sequence
  Synthetic oligonucleotide; TAGAGT chr2 60546311 60546330 60546327 +
agaaacaaaagcacaattat

SEQ ID NO: 186978 - DNA, 20 bp, Artificial Sequence
  Synthetic oligonucleotide; AAGGAT chr2 60546437 60546456 60546453 +
tgtgagcatacaaaaagtac

SEQ ID NO: 186979 - DNA, 20 bp, Artificial Sequence
  Synthetic oligonucleotide; AAGAAT chr2 60546601 60546620 60546617 +
gtctggtttgtaagtttaga

SEQ ID NO: 186980 - DNA, 20 bp, Artificial Sequence
  Synthetic oligonucleotide; GTGGAT chr2 60546684 60546703 60546700 +
aaaactggttaaaaaaaaaa

SEQ ID NO: 186981 - DNA, 20 bp, Artificial Sequence
  Synthetic oligonucleotide; AAGAAT chr2 60546742 60546761 60546758 +
ccaagttgtccattgtgcca

SEQ ID NO: 186982 - DNA, 20 bp, Artificial Sequence
  Synthetic oligonucleotide; GTGAAT chr2 60546758 60546777 60546774 +
gccaaagaatgaaaggagag

SEQ ID NO: 186983 - DNA, 20 bp, Artificial Sequence
  Synthetic oligonucleotide; GTGAAT chr2 60546785 60546804 60546801 +
aacacacacaccctttgtgt

SEQ ID NO: 186984 - DNA, 20 bp, Artificial Sequence
  Synthetic oligonucleotide; ACGGAT chr2 60546908 60546927 60546924 +
cgactgcatgcacctatgaa

SEQ ID NO: 186985 - DNA, 20 bp, Artificial Sequence
  Synthetic oligonucleotide; TGGGAT chr2 60547042 60547061 60547058 +
tctcagacacattagctaaa

SEQ ID NO: 186986 - DNA, 20 bp, Artificial Sequence
  Synthetic oligonucleotide; TTGAGT chr2 60547052 60547071 60547068 +
attagctaaatgggatactt

SEQ ID NO: 186987 - DNA, 20 bp, Artificial Sequence
  Synthetic oligonucleotide; TGGAAT chr2 60547105 60547124 60547121 +
tttttttttattctgagaaa

SEQ ID NO: 186988 - DNA, 20 bp, Artificial Sequence
  Synthetic oligonucleotide; CAGAAT chr2 60547164 60547183 60547180 +
ggcatctatgatataaaaat

SEQ ID NO: 186989 - DNA, 20 bp, Artificial Sequence
  Synthetic oligonucleotide; CTGAAT chr2 60547264 60547283 60547280 +
tgtcaaagtggactaatttt

SEQ ID NO: 186990 - DNA, 20 bp, Artificial Sequence
  Synthetic oligonucleotide; GCGGAT chr2 60547320 60547339 60547336 +
ttctgcacacataatcacca

SEQ ID NO: 186991 - DNA, 20 bp, Artificial Sequence
  Synthetic oligonucleotide; GAGAGT chr2 60547446 60547465 60547462 +
taagcttccaaaggggaaaa

SEQ ID NO: 186992 - DNA, 20 bp, Artificial Sequence
  Synthetic oligonucleotide; CAGGAT chr2 60547527 60547546 60547543 +
atcacaaaatacaaaacatc

SEQ ID NO: 186993 - DNA, 20 bp, Artificial Sequence
  Synthetic oligonucleotide; GAGAAT chr2 60547643 60547662 60547659 +
ttaatgaacttaaagccaca

SEQ ID NO: 186994 - DNA, 20 bp, Artificial Sequence
  Synthetic oligonucleotide; TTGAGT chr2 60547667 60547686 60547683 +
atcaaaaaatagattttaat

SEQ ID NO: 186995 - DNA, 20 bp, Artificial Sequence
  Synthetic oligonucleotide; TAGAAT chr2 60547674 60547693 60547690 +
aatagattttaatttgagtg

SEQ ID NO: 186996 - DNA, 20 bp, Artificial Sequence
  Synthetic oligonucleotide; CTGAAT chr2 60547751 60547770 60547767 +
ttatttcaaccctacccagg

SEQ ID NO: 186997 - DNA, 20 bp, Artificial Sequence
  Synthetic oligonucleotide; TGGAGT chr2 60547773 60547792 60547789 +
gaatattgagggggaagatc

SEQ ID NO: 186998 - DNA, 20 bp, Artificial Sequence
  Synthetic oligonucleotide; AGGAAT chr2 60547904 60547923 60547920 +
atttaacataaggtcaccac

SEQ ID NO: 186999 - DNA, 20 bp, Artificial Sequence
  Synthetic oligonucleotide; CAGAAT chr2 60547993 60548012 60548009 +
tactggccaaaagataaata

SEQ ID NO: 187000 - DNA, 20 bp, Artificial Sequence
  Synthetic oligonucleotide; AGGAAT chr2 60548101 60548120 60548117 +
gcttccattttgaccaagtg

SEQ ID NO: 187001 - DNA, 20 bp, Artificial Sequence
  Synthetic oligonucleotide; CTGAAT chr2 60548138 60548157 60548154 +
tctcaaaatattcctgttgt

SEQ ID NO: 187002 - DNA, 20 bp, Artificial Sequence
  Synthetic oligonucleotide; AAGGAT chr2 60548145 60548164 60548161 +
atattcctgttgtctgaatt

SEQ ID NO: 187003 - DNA, 20 bp, Artificial Sequence
  Synthetic oligonucleotide; GGGAAT chr2 60548357 60548376 60548373 +
tctgacacatttctaaaagt

SEQ ID NO: 187004 - DNA, 20 bp, Artificial Sequence
  Synthetic oligonucleotide; AAGAAT chr2 60548654 60548673 60548670 +
gtaaattattgctaattaac

SEQ ID NO: 187005 - DNA, 20 bp, Artificial Sequence
  Synthetic oligonucleotide; GGGAGT chr2 60549043 60549062 60549059 +
taaactccggctacaaagca

SEQ ID NO: 187006 - DNA, 20 bp, Artificial Sequence
  Synthetic oligonucleotide; GGGAGT chr2 60549066 60549085 60549082 +
agtcctcgattgaagtggaa

SEQ ID NO: 187007 - DNA, 20 bp, Artificial Sequence
  Synthetic oligonucleotide; GCGAAT chr2 60549097 60549116 60549113 +
aataatcataataattagcc

SEQ ID NO: 187008 - DNA, 20 bp, Artificial Sequence
  Synthetic oligonucleotide; AAGAAT chr2 60549228 60549247 60549244 +
tcctctctgtgtagttgcaa

SEQ ID NO: 187009 - DNA, 20 bp, Artificial Sequence
  Synthetic oligonucleotide; CAGGGT chr2 60549378 60549397 60549394 +
cttctccttgattgtcttaa

SEQ ID NO: 187010 - DNA, 20 bp, Artificial Sequence
  Synthetic oligonucleotide; AAGGGT chr2 60549475 60549494 60549491 +
cccggggcaggggccccggc

SEQ ID NO: 187011 - DNA, 20 bp, Artificial Sequence
  Synthetic oligonucleotide; CGGGGT chr2 60549683 60549702 60549699 +
cagctcggccagctcggccg

SEQ ID NO: 187012 - DNA, 20 bp, Artificial Sequence
  Synthetic oligonucleotide; GCGGGT chr2 60549792 60549811 60549808 +
tctccgcacacacctcaagc

SEQ ID NO: 187013 - DNA, 20 bp, Artificial Sequence
  Synthetic oligonucleotide; GGGGAT chr2 60549842 60549861 60549858 +
agcttacactttttactttg

SEQ ID NO: 187014 - DNA, 20 bp, Artificial Sequence
  Synthetic oligonucleotide; CTGGGT chr2 60549882 60549901 60549898 +
ttcccccgcaattctgggca

SEQ ID NO: 187015 - DNA, 20 bp, Artificial Sequence
  Synthetic oligonucleotide; GGGGGT chr2 60549995 60550014 60550011 +
ccgagctccgaggcgagagg

SEQ ID NO: 187016 - DNA, 20 bp, Artificial Sequence
  Synthetic oligonucleotide; GGGGGT chr2 60550060 60550079 60550076 +
ccgaggtctgtgctttgcat

SEQ ID NO: 187017 - DNA, 20 bp, Artificial Sequence
  Synthetic oligonucleotide; GGGGGT chr2 60550068 60550087 60550084 +
tgtgctttgcatgggggtga

SEQ ID NO: 187018 - DNA, 20 bp, Artificial Sequence
  Synthetic oligonucleotide; GGGGGT chr2 60550250 60550269 60550266 +
gctggtctcagctcgcgcac

SEQ ID NO: 187019 - DNA, 20 bp, Artificial Sequence
  Synthetic oligonucleotide; CGGGGT chr2 60550334 60550353 60550350 +
aaatgaagaacaaagacata

SEQ ID NO: 187020 - DNA, 20 bp, Artificial Sequence
  Synthetic oligonucleotide; GGGAAT chr2 60550355 60550374 60550371 +
ggggtgatgggggagagaaa

SEQ ID NO: 187021 - DNA, 20 bp, Artificial Sequence
  Synthetic oligonucleotide; GAGAAT chr2 60550420 60550439 60550436 +
aagctcgttcctccccggac

SEQ ID NO: 187022 - DNA, 20 bp, Artificial Sequence
  Synthetic oligonucleotide; CCGAAT chr2 60550506 60550525 60550522 +
cttgttctgcctcctagcga

SEQ ID NO: 187023 - DNA, 20 bp, Artificial Sequence
  Synthetic oligonucleotide; GGGGGT chr2 60550548 60550567 60550564 +
atagcagaggcggggggcgg

SEQ ID NO: 187024 - DNA, 20 bp, Artificial Sequence
  Synthetic oligonucleotide; CGGGAT chr2 60550566 60550585 60550582 +
gggggggtggtactgaggac

SEQ ID NO: 187025 - DNA, 20 bp, Artificial Sequence
  Synthetic oligonucleotide; GGGGGT chr2 60550669 60550688 60550685 +
ttaaccccgggacaggagga

SEQ ID NO: 187026 - DNA, 20 bp, Artificial Sequence
  Synthetic oligonucleotide; TAGAGT chr2 60550691 60550710 60550707 +
gggtactaaccctcccagcc

SEQ ID NO: 187027 - DNA, 20 bp, Artificial Sequence
  Synthetic oligonucleotide; AGGGGT chr2 60550722 60550741 60550738 +
aagatggacccaggagggag

SEQ ID NO: 187028 - DNA, 20 bp, Artificial Sequence
  Synthetic oligonucleotide; CCGAGT chr2 60550809 60550828 60550825 +
cgaagaagggcctgactttc

SEQ ID NO: 187029 - DNA, 20 bp, Artificial Sequence
  Synthetic oligonucleotide; GGGAGT chr2 60550910 60550929 60550926 +
tccgcatccggcgcggccgg

SEQ ID NO: 187030 - DNA, 20 bp, Artificial Sequence
  Synthetic oligonucleotide; AGGGAT chr2 60550941 60550960 60550957 +
gcgggggagagcggcgaggg

SEQ ID NO: 187031 - DNA, 20 bp, Artificial Sequence
  Synthetic oligonucleotide; GGGGGT chr2 60550951 60550970 60550967 +
gcggcgagggagggatgcga

SEQ ID NO: 187032 - DNA, 20 bp, Artificial Sequence
  Synthetic oligonucleotide; CGGGGT chr2 60550984 60551003 60551000 +
gggagggccgcgcaacgtgc

SEQ ID NO: 187033 - DNA, 20 bp, Artificial Sequence
  Synthetic oligonucleotide; AAGAAT chr2 60551133 60551152 60551149 +
ctgcatcaaaaatttaaagt

SEQ ID NO: 187034 - DNA, 20 bp, Artificial Sequence
  Synthetic oligonucleotide; TTGAGT chr2 60551145 60551164 60551161 +
tttaaagtaagaatcataaa

SEQ ID NO: 187035 - DNA, 20 bp, Artificial Sequence
  Synthetic oligonucleotide; GGGAAT chr2 60551156 60551175 60551172 +
aatcataaattgagtagggg

SEQ ID NO: 187036 - DNA, 20 bp, Artificial Sequence
  Synthetic oligonucleotide; AAGGGT chr2 60551325 60551344 60551341 +
ggggaagagggcaagaccca

SEQ ID NO: 187037 - DNA, 20 bp, Artificial Sequence
  Synthetic oligonucleotide; CGGGGT chr2 60551339 60551358 60551355 +
gacccaaagggtgaagtgct

SEQ ID NO: 187038 - DNA, 20 bp, Artificial Sequence
  Synthetic oligonucleotide; CAGGAT chr2 60551347 60551366 60551363 +
gggtgaagtgctcggggtcc

SEQ ID NO: 187039 - DNA, 20 bp, Artificial Sequence
  Synthetic oligonucleotide; CGGGGT chr2 60551466 60551485 60551482 +
ggactggtgaccagaccggg

SEQ ID NO: 187040 - DNA, 20 bp, Artificial Sequence
  Synthetic oligonucleotide; GGGGGT chr2 60551473 60551492 60551489 +
tgaccagaccgggcggggtg

SEQ ID NO: 187041 - DNA, 20 bp, Artificial Sequence
  Synthetic oligonucleotide; CCGAGT chr2 60551621 60551640 60551637 +
aataaaaatgctttgcaaag

SEQ ID NO: 187042 - DNA, 20 bp, Artificial Sequence
  Synthetic oligonucleotide; GCGGGT chr2 60551748 60551767 60551764 +
gtggcctgccgccgtgcctg

SEQ ID NO: 187043 - DNA, 20 bp, Artificial Sequence
  Synthetic oligonucleotide; CCGGGT chr2 60551766 60551785 60551782 +
tggcgggtgggcgccgggcg

SEQ ID NO: 187044 - DNA, 20 bp, Artificial Sequence
  Synthetic oligonucleotide; GGGAGT chr2 60552002 60552021 60552018 +
tccaaaaaatagtaagagga

SEQ ID NO: 187045 - DNA, 20 bp, Artificial Sequence
  Synthetic oligonucleotide; AGGGGT chr2 60552054 60552073 60552070 +
cgccctaagtttgcaactga

SEQ ID NO: 187046 - DNA, 20 bp, Artificial Sequence
  Synthetic oligonucleotide; GAGGGT chr2 60552069 60552088 60552085 +
actgaaggggtttgggggaa

SEQ ID NO: 187047 - DNA, 20 bp, Artificial Sequence
  Synthetic oligonucleotide; GGGAGT chr2 60552132 60552151 60552148 +
ttttgcaggggggctggtgg

SEQ ID NO: 187048 - DNA, 20 bp, Artificial Sequence
  Synthetic oligonucleotide; AAGGGT chr2 60552160 60552179 60552176 +
aagagaaggccgtcacagaa

SEQ ID NO: 187049 - DNA, 20 bp, Artificial Sequence
  Synthetic oligonucleotide; GGGGAT chr2 60552628 60552647 60552644 +
tgccactttctcactattgt

SEQ ID NO: 187050 - DNA, 20 bp, Artificial Sequence
  Synthetic oligonucleotide; GGGAAT chr2 60552710 60552729 60552726 +
gtctcacctcttttctcccc

SEQ ID NO: 187051 - DNA, 20 bp, Artificial Sequence
  Synthetic oligonucleotide; GTGAGT chr2 60552766 60552785 60552782 +
tacccccccattttcttacg

SEQ ID NO: 187052 - DNA, 20 bp, Artificial Sequence
  Synthetic oligonucleotide; GTGAGT chr2 60552820 60552839 60552836 +
tcccacccccaggtttgcat

SEQ ID NO: 187053 - DNA, 20 bp, Artificial Sequence
  Synthetic oligonucleotide; GGGAGT chr2 60552878 60552897 60552894 +
caaaactggcggggcggggg

SEQ ID NO: 187054 - DNA, 20 bp, Artificial Sequence
  Synthetic oligonucleotide; TGGAAT chr2 60552883 60552902 60552899 +
ctggcggggcggggggggag

SEQ ID NO: 187055 - DNA, 20 bp, Artificial Sequence
  Synthetic oligonucleotide; AGGAGT chr2 60552942 60552961 60552958 +
ggcggaaaggaggaaagagg

SEQ ID NO: 187056 - DNA, 20 bp, Artificial Sequence
  Synthetic oligonucleotide; TGGGAT chr2 60553023 60553042 60553039 +
tacacggcaatggttccaga

SEQ ID NO: 187057 - DNA, 20 bp, Artificial Sequence
  Synthetic oligonucleotide; GAGGGT chr2 60553029 60553048 60553045 +
gcaatggttccagatgggat

SEQ ID NO: 187058 - DNA, 20 bp, Artificial Sequence
  Synthetic oligonucleotide; TTGGGT chr2 60553183 60553202 60553199 +
aataattattattactatta

SEQ ID NO: 187059 - DNA, 20 bp, Artificial Sequence
  Synthetic oligonucleotide; GAGAAT chr2 60553198 60553217 60553214 +
tattattgggttacttacgc

SEQ ID NO: 187060 - DNA, 20 bp, Artificial Sequence
  Synthetic oligonucleotide; TGGGGT chr2 60553222 60553241 60553238 +
attcccgtttgcttaagtgc

SEQ ID NO: 187061 - DNA, 20 bp, Artificial Sequence
  Synthetic oligonucleotide; CCGGGT chr2 60553327 60553346 60553343 +
ctcggttcacatcgggagag

SEQ ID NO: 187062 - DNA, 20 bp, Artificial Sequence
  Synthetic oligonucleotide; ATGAAT chr2 60553425 60553444 60553441 +
acaaagatggcgcagggaag

SEQ ID NO: 187063 - DNA, 20 bp, Artificial Sequence
  Synthetic oligonucleotide; AGGAGT chr2 60553613 60553632 60553629 +
tccctgcgaacttgaacgtc

SEQ ID NO: 187064 - DNA, 20 bp, Artificial Sequence
  Synthetic oligonucleotide; CTGGAT chr2 60553619 60553638 60553635 +
cgaacttgaacgtcaggagt

SEQ ID NO: 187065 - DNA, 20 bp, Artificial Sequence
  Synthetic oligonucleotide; AGGGGT chr2 60553907 60553926 60553923 +
gcgtggccgggagagaagaa

SEQ ID NO: 187066 - DNA, 20 bp, Artificial Sequence
  Synthetic oligonucleotide; AGGGGT chr2 60553916 60553935 60553932 +
ggagagaagaaaggggtggc

SEQ ID NO: 187067 - DNA, 20 bp, Artificial Sequence
  Synthetic oligonucleotide; AAGGGT chr2 60553929 60553948 60553945 +
gggtggcaggggtgggagga

SEQ ID NO: 187068 - DNA, 20 bp, Artificial Sequence
  Synthetic oligonucleotide; GAGAGT chr2 60554021 60554040 60554037 +
aaaaaagaaaaaaatagagc

SEQ ID NO: 187069 - DNA, 20 bp, Artificial Sequence
  Synthetic oligonucleotide; TAGAGT chr2 60554081 60554100 60554097 +
gcgggcggagggaagccagg

SEQ ID NO: 187070 - DNA, 20 bp, Artificial Sequence
  Synthetic oligonucleotide; CGGAAT chr2 60554324 60554343 60554340 +
ggagggagcgcacggcaacg

SEQ ID NO: 187071 - DNA, 20 bp, Artificial Sequence
  Synthetic oligonucleotide; GCGGGT chr2 60554351 60554370 60554367 +
cagcctaagtttggagggct

SEQ ID NO: 187072 - DNA, 20 bp, Artificial Sequence
  Synthetic oligonucleotide; GGGAAT chr2 60554474 60554493 60554490 +
ccaaggccgagccagggacc

SEQ ID NO: 187073 - DNA, 20 bp, Artificial Sequence
  Synthetic oligonucleotide; CTGGGT chr2 60554500 60554519 60554516 +
ctgagcgccccgccaagcga

SEQ ID NO: 187074 - DNA, 20 bp, Artificial Sequence
  Synthetic oligonucleotide; CTGAAT chr2 60554506 60554525 60554522 +
gccccgccaagcgactgggt

SEQ ID NO: 187075 - DNA, 20 bp, Artificial Sequence
  Synthetic oligonucleotide; CCGAGT chr2 60554525 60554544 60554541 +
tctgaatgcaactgaaagcg

SEQ ID NO: 187076 - DNA, 20 bp, Artificial Sequence
  Synthetic oligonucleotide; AAGGGT chr2 60554542 60554561 60554558 +
gcgccgagtccccggctcct

SEQ ID NO: 187077 - DNA, 20 bp, Artificial Sequence
  Synthetic oligonucleotide; AGGAAT chr2 60554565 60554584 60554581 +
ggtcgcagaaagagagcccg

SEQ ID NO: 187078 - DNA, 20 bp, Artificial Sequence
  Synthetic oligonucleotide; CAGAGT chr2 60554585 60554604 60554601 +
aggaataaagaacgaggagc

SEQ ID NO: 187079 - DNA, 20 bp, Artificial Sequence
  Synthetic oligonucleotide; GGGAGT chr2 60554685 60554704 60554701 +
gacaaagcgcgggcagtccc

SEQ ID NO: 187080 - DNA, 20 bp, Artificial Sequence
  Synthetic oligonucleotide; GGGAAT chr2 60554701 60554720 60554717 +
tcccgggagtcccagtccct

SEQ ID NO: 187081 - DNA, 20 bp, Artificial Sequence
  Synthetic oligonucleotide; CCGGGT chr2 60554737 60554756 60554753 +
cgccgcgggaggtccccgag

SEQ ID NO: 187082 - DNA, 20 bp, Artificial Sequence
  Synthetic oligonucleotide; AGGGAT chr2 60554794 60554813 60554810 +
gagcaactgcaaaagcacag

SEQ ID NO: 187083 - DNA, 20 bp, Artificial Sequence
  Synthetic oligonucleotide; GGGAAT chr2 60554868 60554887 60554884 +
tacccagggaaagagaaaat

SEQ ID NO: 187084 - DNA, 20 bp, Artificial Sequence
  Synthetic oligonucleotide; TCGGGT chr2 60554934 60554953 60554950 +
acggtggtgagatgaccgcc

SEQ ID NO: 187085 - DNA, 20 bp, Artificial Sequence
  Synthetic oligonucleotide; TGGGAT chr2 60555130 60555149 60555146 +
aagcgggcttcactctggcg

SEQ ID NO: 187086 - DNA, 20 bp, Artificial Sequence
  Synthetic oligonucleotide; AGGAGT chr2 60555316 60555335 60555332 +
agtccgattccaaatctgga

SEQ ID NO: 187087 - DNA, 20 bp, Artificial Sequence
  Synthetic oligonucleotide; GAGAAT chr2 60555333 60555352 60555349 +
ggaaggagttggggggagag

SEQ ID NO: 187088 - DNA, 20 bp, Artificial Sequence
  Synthetic oligonucleotide; GAGGGT chr2 60555363 60555382 60555379 +
tcaggtccaagggaggtgcg

SEQ ID NO: 187089 - DNA, 20 bp, Artificial Sequence
  Synthetic oligonucleotide; CAGGGT chr2 60555370 60555389 60555386 +
caagggaggtgcggagggtg

SEQ ID NO: 187090 - DNA, 20 bp, Artificial Sequence
  Synthetic oligonucleotide; ACGGGT chr2 60555380 60555399 60555396 +
gcggagggtgcagggtggag

SEQ ID NO: 187091 - DNA, 20 bp, Artificial Sequence
  Synthetic oligonucleotide; GTGGAT chr2 60555416 60555435 60555432 +
cgcgagaccctgagctgcag

SEQ ID NO: 187092 - DNA, 20 bp, Artificial Sequence
  Synthetic oligonucleotide; GTGAGT chr2 60555426 60555445 60555442 +
tgagctgcaggtggatatgt

SEQ ID NO: 187093 - DNA, 20 bp, Artificial Sequence
  Synthetic oligonucleotide; AAGGGT chr2 60555515 60555534 60555531 +
tcatccccctcttcagtcta

SEQ ID NO: 187094 - DNA, 20 bp, Artificial Sequence
  Synthetic oligonucleotide; TGGGAT chr2 60555772 60555791 60555788 +
gagagagatgtgggctgtac

SEQ ID NO: 187095 - DNA, 20 bp, Artificial Sequence
  Synthetic oligonucleotide; GAGGAT chr2 60555858 60555877 60555874 +
aaattctgtttaagaagcgg

SEQ ID NO: 187096 - DNA, 20 bp, Artificial Sequence
  Synthetic oligonucleotide; CTGAGT chr2 60555916 60555935 60555932 +
gacaccatttccccttttca

SEQ ID NO: 187097 - DNA, 20 bp, Artificial Sequence
  Synthetic oligonucleotide; TGGAGT chr2 60555986 60556005 60556002 +
ttgtcttgttaaaccagcct

SEQ ID NO: 187098 - DNA, 20 bp, Artificial Sequence
  Synthetic oligonucleotide; AAGAAT chr2 60555998 60556017 60556014 +
accagccttggagtcaccaa

SEQ ID NO: 187099 - DNA, 20 bp, Artificial Sequence
  Synthetic oligonucleotide; GGGGGT chr2 60556013 60556032 60556029 +
accaaaagaatgtcttcttg

SEQ ID NO: 187100 - DNA, 20 bp, Artificial Sequence
  Synthetic oligonucleotide; TTGAAT chr2 60556176 60556195 60556192 +
cagaaccaagcttttcagat

SEQ ID NO: 187101 - DNA, 20 bp, Artificial Sequence
  Synthetic oligonucleotide; GCGAGT chr2 60556234 60556253 60556250 +
tagagaagatatataaatga

SEQ ID NO: 187102 - DNA, 20 bp, Artificial Sequence
  Synthetic oligonucleotide; GTGAGT chr2 60556238 60556257 60556254 +
gaagatatataaatgagcga

SEQ ID NO: 187103 - DNA, 20 bp, Artificial Sequence
  Synthetic oligonucleotide; CGGGGT chr2 60556301 60556320 60556317 +
atggtgtgtataaagctttt

SEQ ID NO: 187104 - DNA, 20 bp, Artificial Sequence
  Synthetic oligonucleotide; CTGAAT chr2 60556376 60556395 60556392 +
ggttcacatttaacagtctt

SEQ ID NO: 187105 - DNA, 20 bp, Artificial Sequence
  Synthetic oligonucleotide; TAGGGT chr2 60556447 60556466 60556450 -
gccacagatagcagccctga

SEQ ID NO: 187106 - DNA, 20 bp, Artificial Sequence
  Synthetic oligonucleotide; ATGAAT chr2 60556412 60556431 60556415 -
agagcgcacacaattgtgta

SEQ ID NO: 187107 - DNA, 20 bp, Artificial Sequence
  Synthetic oligonucleotide; ACGGGT chr2 60556217 60556236 60556220 -
ctatagatggacttttatgg

SEQ ID NO: 187108 - DNA, 20 bp, Artificial Sequence
  Synthetic oligonucleotide; AAGAAT chr2 60556175 60556194 60556178 -
tctgaaaagcttggttctga

SEQ ID NO: 187109 - DNA, 20 bp, Artificial Sequence
  Synthetic oligonucleotide; TGGAAT chr2 60555972 60555991 60555975 -
agacaaaaagcagactgtgg

SEQ ID NO: 187110 - DNA, 20 bp, Artificial Sequence
  Synthetic oligonucleotide; GTGAAT chr2 60555888 60555907 60555891 -
gctacagagcttaacttcta

SEQ ID NO: 187111 - DNA, 20 bp, Artificial Sequence
  Synthetic oligonucleotide; CAGAAT chr2 60555866 60555885 60555869 -
gaatcctcccgcttcttaaa

SEQ ID NO: 187112 - DNA, 20 bp, Artificial Sequence
  Synthetic oligonucleotide; AGGGGT chr2 60555737 60555756 60555740 -
aacctccttttcttccttag

SEQ ID NO: 187113 - DNA, 20 bp, Artificial Sequence
  Synthetic oligonucleotide; AGGAAT chr2 60555658 60555677 60555661 -
aaactttactaagacgaaac

SEQ ID NO: 187114 - DNA, 20 bp, Artificial Sequence
  Synthetic oligonucleotide; CGGGAT chr2 60555627 60555646 60555630 -
gccgcttgccggcagggctg

SEQ ID NO: 187115 - DNA, 20 bp, Artificial Sequence
  Synthetic oligonucleotide; ATGGGT chr2 60555623 60555642 60555626 -
cttgccggcagggctgcggg

SEQ ID NO: 187116 - DNA, 20 bp, Artificial Sequence
  Synthetic oligonucleotide; CCGGGT chr2 60555568 60555587 60555571 -
aaaacaataaagccccccca

SEQ ID NO: 187117 - DNA, 20 bp, Artificial Sequence
  Synthetic oligonucleotide; GTGGGT chr2 60555564 60555583 60555567 -
caataaagcccccccaccgg

SEQ ID NO: 187118 - DNA, 20 bp, Artificial Sequence
  Synthetic oligonucleotide; GTGAGT chr2 60555560 60555579 60555563 -
aaagcccccccaccgggtgg

SEQ ID NO: 187119 - DNA, 20 bp, Artificial Sequence
  Synthetic oligonucleotide; GGGGAT chr2 60555523 60555542 60555526 -
acaccctttagactgaagag

SEQ ID NO: 187120 - DNA, 20 bp, Artificial Sequence
  Synthetic oligonucleotide; GGGGGT chr2 60555509 60555528 60555512 -
gaagagggggatgagaagac

SEQ ID NO: 187121 - DNA, 20 bp, Artificial Sequence
  Synthetic oligonucleotide; CAGGGT chr2 60555428 60555447 60555431 -
acacatatccacctgcagct

SEQ ID NO: 187122 - DNA, 20 bp, Artificial Sequence
  Synthetic oligonucleotide; CTGAGT chr2 60555367 60555386 60555370 -
cctccgcacctcccttggac

SEQ ID NO: 187123 - DNA, 20 bp, Artificial Sequence
  Synthetic oligonucleotide; TGGAAT chr2 60555328 60555347 60555331 -
cccccaactccttccagatt

SEQ ID NO: 187124 - DNA, 20 bp, Artificial Sequence
  Synthetic oligonucleotide; CAGAGT chr2 60555285 60555304 60555288 -
ggcggcggcggcggcggctg

SEQ ID NO: 187125 - DNA, 20 bp, Artificial Sequence
  Synthetic oligonucleotide; CTGAAT chr2 60555218 60555237 60555221 -
gggactttacaggcacgttt

SEQ ID NO: 187126 - DNA, 20 bp, Artificial Sequence
  Synthetic oligonucleotide; GGGGGT chr2 60555196 60555215 60555199 -
gaataaactttccaatcgca

SEQ ID NO: 187127 - DNA, 20 bp, Artificial Sequence
  Synthetic oligonucleotide; CAGAGT chr2 60555147 60555166 60555150 -
aaactgaaagtatcccacgc

SEQ ID NO: 187128 - DNA, 20 bp, Artificial Sequence
  Synthetic oligonucleotide; CAGGGT chr2 60555081 60555100 60555084 -
gcgtgtgtgcattaaagaga

SEQ ID NO: 187129 - DNA, 20 bp, Artificial Sequence
  Synthetic oligonucleotide; CTGGGT chr2 60555005 60555024 60555008 -
cgagagggggctgctggctc

SEQ ID NO: 187130 - DNA, 20 bp, Artificial Sequence
  Synthetic oligonucleotide; CTGGGT chr2 60554875 60554894 60554878 -
cattcccattttctctttcc

SEQ ID NO: 187131 - DNA, 20 bp, Artificial Sequence
  Synthetic oligonucleotide; TGGAGT chr2 60554794 60554813 60554797 -
ctgtgcttttgcagttgctc

SEQ ID NO: 187132 - DNA, 20 bp, Artificial Sequence
  Synthetic oligonucleotide; GGGGGT chr2 60554784 60554803 60554787 -
gcagttgctctggagtggga

SEQ ID NO: 187133 - DNA, 20 bp, Artificial Sequence
  Synthetic oligonucleotide; CTGGAT chr2 60554354 60554373 60554357 -
cgcagccctccaaacttagg

SEQ ID NO: 187134 - DNA, 20 bp, Artificial Sequence
  Synthetic oligonucleotide; TCGGGT chr2 60554272 60554291 60554275 -
tggaggctcagctctcaact

SEQ ID NO: 187135 - DNA, 20 bp, Artificial Sequence
  Synthetic oligonucleotide; GTGGGT chr2 60554142 60554161 60554145 -
ggcggcggcggggaggggaa

SEQ ID NO: 187136 - DNA, 20 bp, Artificial Sequence
  Synthetic oligonucleotide; GAGGGT chr2 60554124 60554143 60554127 -
aagtgggtgtgcgtacggag

SEQ ID NO: 187137 - DNA, 20 bp, Artificial Sequence
  Synthetic oligonucleotide; TTGAAT chr2 60554023 60554042 60554026 -
tcgctctatttttttctttt

SEQ ID NO: 187138 - DNA, 20 bp, Artificial Sequence
  Synthetic oligonucleotide; TAGAGT chr2 60554005 60554024 60554008 -
ttttgaataatctttcattt

SEQ ID NO: 187139 - DNA, 20 bp, Artificial Sequence
  Synthetic oligonucleotide; TTGGAT chr2 60553408 60553427 60553411 -
tgtattatttctaatttatt

SEQ ID NO: 187140 - DNA, 20 bp, Artificial Sequence
  Synthetic oligonucleotide; TGGAGT chr2 60553372 60553391 60553375 -
actgatgaagatattttctc

SEQ ID NO: 187141 - DNA, 20 bp, Artificial Sequence
  Synthetic oligonucleotide; GGGAAT chr2 60553228 60553247 60553231 -
accccagcacttaagcaaac

SEQ ID NO: 187142 - DNA, 20 bp, Artificial Sequence
  Synthetic oligonucleotide; AGGGGT chr2 60553135 60553154 60553138 -
agcaaaagcgagggggagag

SEQ ID NO: 187143 - DNA, 20 bp, Artificial Sequence
  Synthetic oligonucleotide; GAGAGT chr2 60553089 60553108 60553092 -
ttttcacgagaaaaacctcc

SEQ ID NO: 187144 - DNA, 20 bp, Artificial Sequence
  Synthetic oligonucleotide; AGGAAT chr2 60552921 60552940 60552924 -
ctttatttctcttttcgaaa

SEQ ID NO: 187145 - DNA, 20 bp, Artificial Sequence
  Synthetic oligonucleotide; GGGGGT chr2 60552830 60552849 60552833 -
aacaactcacatgcaaacct

SEQ ID NO: 187146 - DNA, 20 bp, Artificial Sequence
  Synthetic oligonucleotide; GGGGGT chr2 60552773 60552792 60552776 -
cactcaccgtaagaaaatgg

SEQ ID NO: 187147 - DNA, 20 bp, Artificial Sequence
  Synthetic oligonucleotide; GGGAGT chr2 60552762 60552781 60552765 -
agaaaatgggggggtaggga

SEQ ID NO: 187148 - DNA, 20 bp, Artificial Sequence
  Synthetic oligonucleotide; GTGAGT chr2 60552758 60552777 60552761 -
aatgggggggtagggaggga

SEQ ID NO: 187149 - DNA, 20 bp, Artificial Sequence
  Synthetic oligonucleotide; CTGAGT chr2 60552603 60552622 60552606 -
gaaaggggcccccggcgctc

SEQ ID NO: 187150 - DNA, 20 bp, Artificial Sequence
  Synthetic oligonucleotide; CGGAGT chr2 60552594 60552613 60552597 -
ccccggcgctcctgagtccg

SEQ ID NO: 187151 - DNA, 20 bp, Artificial Sequence
  Synthetic oligonucleotide; GTGGGT chr2 60552498 60552517 60552501 -
gccttttgttccggccagag

SEQ ID NO: 187152 - DNA, 20 bp, Artificial Sequence
  Synthetic oligonucleotide; CTGGGT chr2 60552342 60552361 60552345 -
ggagcccggactgctgcctc

SEQ ID NO: 187153 - DNA, 20 bp, Artificial Sequence
  Synthetic oligonucleotide; GAGAAT chr2 60552234 60552253 60552237 -
aaataaataaaacaaggcaa

SEQ ID NO: 187154 - DNA, 20 bp, Artificial Sequence
  Synthetic oligonucleotide; GTGGAT chr2 60551981 60552000 60551984 -
gattttcaaaaaaagtggaa

SEQ ID NO: 187155 - DNA, 20 bp, Artificial Sequence
  Synthetic oligonucleotide; CTGAAT chr2 60551952 60551971 60551955 -
gattgggaaaaatctcgtgt

SEQ ID NO: 187156 - DNA, 20 bp, Artificial Sequence
  Synthetic oligonucleotide; CCGGAT chr2 60551803 60551822 60551806 -
cgccgcgccccagcccagcc

SEQ ID NO: 187157 - DNA, 20 bp, Artificial Sequence
  Synthetic oligonucleotide; CTGGGT chr2 60551656 60551675 60551659 -
ctcccagactgcgaaatcgg

SEQ ID NO: 187158 - DNA, 20 bp, Artificial Sequence
  Synthetic oligonucleotide; CTGGGT chr2 60551572 60551591 60551575 -
cgcctcccctcccctccgcc

SEQ ID NO: 187159 - DNA, 20 bp, Artificial Sequence
  Synthetic oligonucleotide; CGGGGT chr2 60551434 60551453 60551437 -
agcacgactaggccaggtgg

SEQ ID NO: 187160 - DNA, 20 bp, Artificial Sequence
  Synthetic oligonucleotide; TTGAGT chr2 60551399 60551418 60551402 -
agggcaggggagaagtgtgt

SEQ ID NO: 187161 - DNA, 20 bp, Artificial Sequence
  Synthetic oligonucleotide; CTGGAT chr2 60551377 60551396 60551380 -
gagtgtgcattttaagggcg

SEQ ID NO: 187162 - DNA, 20 bp, Artificial Sequence
  Synthetic oligonucleotide; TTGGGT chr2 60551346 60551365 60551349 -
gaccccgagcacttcaccct

SEQ ID NO: 187163 - DNA, 20 bp, Artificial Sequence
  Synthetic oligonucleotide; GTGAGT chr2 60551300 60551319 60551303 -
tggcttggtctgaggttctt

SEQ ID NO: 187164 - DNA, 20 bp, Artificial Sequence
  Synthetic oligonucleotide; AGGGGT chr2 60551093 60551112 60551096 -
ttggttctgtgtttttttaa

SEQ ID NO: 187165 - DNA, 20 bp, Artificial Sequence
  Synthetic oligonucleotide; GGGGGT chr2 60551080 60551099 60551083 -
tttttaaaggggtggtggtg

SEQ ID NO: 187166 - DNA, 20 bp, Artificial Sequence
  Synthetic oligonucleotide; GGGAAT chr2 60551067 60551086 60551070 -
ggtggtggggggtgcgcaca

SEQ ID NO: 187167 - DNA, 20 bp, Artificial Sequence
  Synthetic oligonucleotide; CCGGAT chr2 60550921 60550940 60550924 -
ccccaactcccccggccgcg

SEQ ID NO: 187168 - DNA, 20 bp, Artificial Sequence
  Synthetic oligonucleotide; GCGGAT chr2 60550915 60550934 60550918 -
ctcccccggccgcgccggat

SEQ ID NO: 187169 - DNA, 20 bp, Artificial Sequence
  Synthetic oligonucleotide; AAGGAT chr2 60550808 60550827 60550811 -
aaagtcaggcccttcttcgg

SEQ ID NO: 187170 - DNA, 20 bp, Artificial Sequence
  Synthetic oligonucleotide; CTGGGT chr2 60550735 60550754 60550738 -
ccctcgtacccctctccctc

SEQ ID NO: 187171 - DNA, 20 bp, Artificial Sequence
  Synthetic oligonucleotide; GAGGGT chr2 60550705 60550724 60550708 -
cttgggacactctaggctgg

SEQ ID NO: 187172 - DNA, 20 bp, Artificial Sequence
  Synthetic oligonucleotide; CGGGGT chr2 60550678 60550697 60550681 -
agtaccccctcctcctgtcc

SEQ ID NO: 187173 - DNA, 20 bp, Artificial Sequence
  Synthetic oligonucleotide; GGGGGT chr2 60550654 60550673 60550657 -
gttaaagggccagtttggga

SEQ ID NO: 187174 - DNA, 20 bp, Artificial Sequence
  Synthetic oligonucleotide; CTGGGT chr2 60550618 60550637 60550621 -
cttctttctgtcctcatttt

SEQ ID NO: 187175 - DNA, 20 bp, Artificial Sequence
  Synthetic oligonucleotide; CTGAAT chr2 60550543 60550562 60550546 -
ccccgcctctgctatgtggg

SEQ ID NO: 187176 - DNA, 20 bp, Artificial Sequence
  Synthetic oligonucleotide; GAGGGT chr2 60550417 60550436 60550420 -
cggggaggaacgagctttgc

SEQ ID NO: 187177 - DNA, 20 bp, Artificial Sequence
  Synthetic oligonucleotide; GGGGGT chr2 60550411 60550430 60550414 -
ggaacgagctttgcgagggt

SEQ ID NO: 187178 - DNA, 20 bp, Artificial Sequence
  Synthetic oligonucleotide; CAGAAT chr2 60550385 60550404 60550388 -
ggggggaaagaacggttagg

SEQ ID NO: 187179 - DNA, 20 bp, Artificial Sequence
  Synthetic oligonucleotide; GGGAGT chr2 60550179 60550198 60550182 -
atttttggtagggaggaacc

SEQ ID NO: 187180 - DNA, 20 bp, Artificial Sequence
  Synthetic oligonucleotide; GGGGAT chr2 60550139 60550158 60550142 -
ttcggggcatggccgaagag

SEQ ID NO: 187181 - DNA, 20 bp, Artificial Sequence
  Synthetic oligonucleotide; CGGAAT chr2 60549998 60550017 60550001 -
ccccctctcgcctcggagct

SEQ ID NO: 187182 - DNA, 20 bp, Artificial Sequence
  Synthetic oligonucleotide; ATGAAT chr2 60549936 60549955 60549939 -
ggcaggcagcgtcattaata

SEQ ID NO: 187183 - DNA, 20 bp, Artificial Sequence
  Synthetic oligonucleotide; CAGAAT chr2 60549898 60549917 60549901 -
cgccgcgcacacccagtgcc

SEQ ID NO: 187184 - DNA, 20 bp, Artificial Sequence
  Synthetic oligonucleotide; CAGAAT chr2 60549834 60549853 60549837 -
aaagtgtaagcttgtggaca

SEQ ID NO: 187185 - DNA, 20 bp, Artificial Sequence
  Synthetic oligonucleotide; ATGAAT chr2 60549830 60549849 60549833 -
tgtaagcttgtggacacaga

SEQ ID NO: 187186 - DNA, 20 bp, Artificial Sequence
  Synthetic oligonucleotide; CCGGGT chr2 60549766 60549785 60549769 -
gactgcaccaggttaaccag

SEQ ID NO: 187187 - DNA, 20 bp, Artificial Sequence
  Synthetic oligonucleotide; CAGAGT chr2 60549539 60549558 60549542 -
acgctgctcgctttgtgcct

SEQ ID NO: 187188 - DNA, 20 bp, Artificial Sequence
  Synthetic oligonucleotide; CTGAAT chr2 60549432 60549451 60549435 -
tgtttctttgcttttcctct

SEQ ID NO: 187189 - DNA, 20 bp, Artificial Sequence
  Synthetic oligonucleotide; AAGGAT chr2 60549280 60549299 60549283 -
tccttaccaacatttcctat

SEQ ID NO: 187190 - DNA, 20 bp, Artificial Sequence
  Synthetic oligonucleotide; GAGAAT chr2 60549127 60549146 60549130 -
tttcttcctcccctcgtaga

SEQ ID NO: 187191 - DNA, 20 bp, Artificial Sequence
  Synthetic oligonucleotide; CGGAGT chr2 60549052 60549071 60549055 -
aggactccctgctttgtagc

SEQ ID NO: 187192 - DNA, 20 bp, Artificial Sequence
  Synthetic oligonucleotide; GAGGAT chr2 60549005 60549024 60549008 -
ttggtattgttggggcgaag

SEQ ID NO: 187193 - DNA, 20 bp, Artificial Sequence
  Synthetic oligonucleotide; TGGAGT chr2 60549000 60549019 60549003 -
attgttggggcgaaggagga

SEQ ID NO: 187194 - DNA, 20 bp, Artificial Sequence
  Synthetic oligonucleotide; TTGAAT chr2 60548995 60549014 60548998 -
tggggcgaaggaggatggag

SEQ ID NO: 187195 - DNA, 20 bp, Artificial Sequence
  Synthetic oligonucleotide; GGGGGT chr2 60548982 60549001 60548985 -
gatggagttgaattgaggga

SEQ ID NO: 187196 - DNA, 20 bp, Artificial Sequence
  Synthetic oligonucleotide; GAGGGT chr2 60548968 60548987 60548971 -
gagggagggggtaaatggct

SEQ ID NO: 187197 - DNA, 20 bp, Artificial Sequence
  Synthetic oligonucleotide; GGGAAT chr2 60548941 60548960 60548944 -
aggaaggtttttagggaaag

SEQ ID NO: 187198 - DNA, 20 bp, Artificial Sequence
  Synthetic oligonucleotide; GAGAAT chr2 60548839 60548858 60548842 -
aaatcagtagactacaccat

SEQ ID NO: 187199 - DNA, 20 bp, Artificial Sequence
  Synthetic oligonucleotide; TAGAAT chr2 60548689 60548708 60548692 -
gttaaacgtatttcatacat

SEQ ID NO: 187200 - DNA, 20 bp, Artificial Sequence
  Synthetic oligonucleotide; CTGAAT chr2 60548527 60548546 60548530 -
ggaggtgtaatcagcaacct

SEQ ID NO: 187201 - DNA, 20 bp, Artificial Sequence
  Synthetic oligonucleotide; GAGAAT chr2 60548412 60548431 60548415 -
tttaactatttgatacctag

SEQ ID NO: 187202 - DNA, 20 bp, Artificial Sequence
  Synthetic oligonucleotide; AAGAAT chr2 60548333 60548352 60548336 -
gggaacaaaaaaaaaaaaaa

SEQ ID NO: 187203 - DNA, 20 bp, Artificial Sequence
  Synthetic oligonucleotide; AGGAAT chr2 60548153 60548172 60548156 -
aaatccttaattcagacaac

SEQ ID NO: 187204 - DNA, 20 bp, Artificial Sequence
  Synthetic oligonucleotide; GAGAAT chr2 60548142 60548161 60548145 -
tcagacaacaggaatatttt

SEQ ID NO: 187205 - DNA, 20 bp, Artificial Sequence
  Synthetic oligonucleotide; ATGAGT chr2 60548138 60548157 60548141 -
acaacaggaatattttgaga

SEQ ID NO: 187206 - DNA, 20 bp, Artificial Sequence
  Synthetic oligonucleotide; AAGAAT chr2 60548090 60548109 60548093 -
aatggaagcaaatgtaagag

SEQ ID NO: 187207 - DNA, 20 bp, Artificial Sequence
  Synthetic oligonucleotide; AGGAAT chr2 60547947 60547966 60547950 -
actttactgtctttattagt

SEQ ID NO: 187208 - DNA, 20 bp, Artificial Sequence
  Synthetic oligonucleotide; AGGAGT chr2 60547900 60547919 60547903 -
tgaccttatgttaaattagg

SEQ ID NO: 187209 - DNA, 20 bp, Artificial Sequence
  Synthetic oligonucleotide; GGGAGT chr2 60547806 60547825 60547809 -
ttatttcacctagcacatct

SEQ ID NO: 187210 - DNA, 20 bp, Artificial Sequence
  Synthetic oligonucleotide; CTGGGT chr2 60547770 60547789 60547773 -
cttccccctcaatattcagc

SEQ ID NO: 187211 - DNA, 20 bp, Artificial Sequence
  Synthetic oligonucleotide; TAGGGT chr2 60547765 60547784 60547768 -
ccctcaatattcagcctggg

SEQ ID NO: 187212 - DNA, 20 bp, Artificial Sequence
  Synthetic oligonucleotide; CTGAGT chr2 60547744 60547763 60547747 -
agggttgaaataaatttaac

SEQ ID NO: 187213 - DNA, 20 bp, Artificial Sequence
  Synthetic oligonucleotide; CTGGAT chr2 60547735 60547754 60547738 -
ataaatttaacctgagttca

SEQ ID NO: 187214 - DNA, 20 bp, Artificial Sequence
  Synthetic oligonucleotide; CTGGAT chr2 60547550 60547569 60547553 -
ttttattaactggcagcatc

SEQ ID NO: 187215 - DNA, 20 bp, Artificial Sequence
  Synthetic oligonucleotide; TGGAGT chr2 60547416 60547435 60547419 -
gaagctggtaaagtagatgc

SEQ ID NO: 187216 - DNA, 20 bp, Artificial Sequence
  Synthetic oligonucleotide; TAGAAT chr2 60547146 60547165 60547149 -
ccaccaagtgcaaacatgtt

SEQ ID NO: 187217 - DNA, 20 bp, Artificial Sequence
  Synthetic oligonucleotide; CAGAAT chr2 60547120 60547139 60547123 -
attataggcattccatttct

SEQ ID NO: 187218 - DNA, 20 bp, Artificial Sequence
  Synthetic oligonucleotide; GAGAGT chr2 60546996 60547015 60546999 -
tttgattttgtggcactgct

SEQ ID NO: 187219 - DNA, 20 bp, Artificial Sequence
  Synthetic oligonucleotide; GTGAAT chr2 60546966 60546985 60546969 -
gcagaaaggtttttggcagt

SEQ ID NO: 187220 - DNA, 20 bp, Artificial Sequence
  Synthetic oligonucleotide; AGGAGT chr2 60546823 60546842 60546826 -
gaagccatgtctgtttactt

SEQ ID NO: 187221 - DNA, 20 bp, Artificial Sequence
  Synthetic oligonucleotide; AAGGGT chr2 60546800 60546819 60546803 -
agtatatacattcacacaca

SEQ ID NO: 187222 - DNA, 20 bp, Artificial Sequence
  Synthetic oligonucleotide; GTGGGT chr2 60546589 60546608 60546592 -
aaccagacacatttgttgct

SEQ ID NO: 187223 - DNA, 20 bp, Artificial Sequence
  Synthetic oligonucleotide; ATGGGT chr2 60546577 60546596 60546580 -
ttgttgctgtgggtgtgtgc

SEQ ID NO: 187224 - DNA, 20 bp, Artificial Sequence
  Synthetic oligonucleotide; TGGAGT chr2 60546549 60546568 60546552 -
atgtgtgtgtgtgtgttctc

SEQ ID NO: 187225 - DNA, 20 bp, Artificial Sequence
  Synthetic oligonucleotide; CTGGGT chr2 60546433 60546452 60546436 -
tttttgtatgctcacatttt

SEQ ID NO: 187226 - DNA, 20 bp, Artificial Sequence
  Synthetic oligonucleotide; TGGGAT chr2 60546388 60546407 60546391 -
aaacactttacatgatgtgg

SEQ ID NO: 187227 - DNA, 20 bp, Artificial Sequence
  Synthetic oligonucleotide; TGGGGT chr2 60546378 60546397 60546381 -
catgatgtggtgggatggca

SEQ ID NO: 187228 - DNA, 20 bp, Artificial Sequence
  Synthetic oligonucleotide; GGGGAT chr2 60546236 60546255 60546239 -
gcccgttgggagctccagaa

SEQ ID NO: 187229 - DNA, 20 bp, Artificial Sequence
  Synthetic oligonucleotide; GTGGAT chr2 60546116 60546135 60546119 -
gcctctgcttagaaaaagct

SEQ ID NO: 187230 - DNA, 20 bp, Artificial Sequence
  Synthetic oligonucleotide; GAGGAT chr2 60546035 60546054 60546038 -
ttggcatccaggtcacgcca

SEQ ID NO: 187231 - DNA, 20 bp, Artificial Sequence
  Synthetic oligonucleotide; AGGAAT chr2 60546003 60546022 60546006 -
tgtttatcaacgtcatctag

SEQ ID NO: 187232 - DNA, 20 bp, Artificial Sequence
  Synthetic oligonucleotide; AGGAGT chr2 60545897 60545916 60545900 -
ggtgctgtagccaagcagta

SEQ ID NO: 187233 - DNA, 20 bp, Artificial Sequence
  Synthetic oligonucleotide; CTGAAT chr2 60545775 60545794 60545778 -
aataaatattttccacctca

SEQ ID NO: 187234 - DNA, 20 bp, Artificial Sequence
  Synthetic oligonucleotide; CAGGAT chr2 60545759 60545778 60545762 -
ctcactgaatcagatgtagg

SEQ ID NO: 187235 - DNA, 20 bp, Artificial Sequence
  Synthetic oligonucleotide; CTGGAT chr2 60545727 60545746 60545730 -
acacatcagacaccttctct

SEQ ID NO: 187236 - DNA, 20 bp, Artificial Sequence
  Synthetic oligonucleotide; TTGGAT chr2 60545712 60545731 60545715 -
tctctctggatctgtcgatt

SEQ ID NO: 187237 - DNA, 20 bp, Artificial Sequence
  Synthetic oligonucleotide; AGGGGT chr2 60545529 60545548 60545532 -
acatctggccaggcctcctt

SEQ ID NO: 187238 - DNA, 20 bp, Artificial Sequence
  Synthetic oligonucleotide; TAGAGT chr2 60545495 60545514 60545498 -
ttctcaaggcttccctgaag

SEQ ID NO: 187239 - DNA, 20 bp, Artificial Sequence
  Synthetic oligonucleotide; CAGGGT chr2 60545482 60545501 60545485 -
cctgaagtagagtgggctgg

SEQ ID NO: 187240 - DNA, 20 bp, Artificial Sequence
  Synthetic oligonucleotide; AAGAGT chr2 60545460 60545479 60545463 -
gggtagttggaggtggtgga

SEQ ID NO: 187241 - DNA, 20 bp, Artificial Sequence
  Synthetic oligonucleotide; TTGGAT chr2 60545432 60545451 60545435 -
actgagcttcagggctagcc

SEQ ID NO: 187242 - DNA, 20 bp, Artificial Sequence
  Synthetic oligonucleotide; CCGGAT chr2 60545409 60545428 60545412 -
gatccatattggctgtcagc

SEQ ID NO: 187243 - DNA, 20 bp, Artificial Sequence
  Synthetic oligonucleotide; TGGGAT chr2 60545375 60545394 60545378 -
aattaaacacagccccgtgg

SEQ ID NO: 187244 - DNA, 20 bp, Artificial Sequence
  Synthetic oligonucleotide; CAGAGT chr2 60545323 60545342 60545326 -
ccattttcgactggccaggc

SEQ ID NO: 187245 - DNA, 20 bp, Artificial Sequence
  Synthetic oligonucleotide; GTGGGT chr2 60544968 60544987 60544971 -
gcagggaggcagctaggtgt

SEQ ID NO: 187246 - DNA, 20 bp, Artificial Sequence
  Synthetic oligonucleotide; AGGAAT chr2 60544941 60544960 60544944 -
tctcggcagctcaagggaaa

SEQ ID NO: 187247 - DNA, 20 bp, Artificial Sequence
  Synthetic oligonucleotide; GTGGAT chr2 60544791 60544810 60544794 -
cagacatgccatgcctgttg

SEQ ID NO: 187248 - DNA, 20 bp, Artificial Sequence
  Synthetic oligonucleotide; ATGAAT chr2 60544707 60544726 60544710 -
taggaaaggtagtgcatatc

SEQ ID NO: 187249 - DNA, 20 bp, Artificial Sequence
  Synthetic oligonucleotide; GGGGAT chr2 60544629 60544648 60544632 -
taataggtcagtggtctaga

SEQ ID NO: 187250 - DNA, 20 bp, Artificial Sequence
  Synthetic oligonucleotide; TAGAAT chr2 60544592 60544611 60544595 -
ttatttctcctctccccctc

SEQ ID NO: 187251 - DNA, 20 bp, Artificial Sequence
  Synthetic oligonucleotide; TGGAGT chr2 60544469 60544488 60544472 -
tgctagggaagctgcatttg

SEQ ID NO: 187252 - DNA, 20 bp, Artificial Sequence
  Synthetic oligonucleotide; TTGAAT chr2 60544456 60544475 60544459 -
gcatttgtggagtgtatttc

SEQ ID NO: 187253 - DNA, 20 bp, Artificial Sequence
  Synthetic oligonucleotide; CAGGAT chr2 60544392 60544411 60544395 -
ttatctcccctaccccccag

SEQ ID NO: 187254 - DNA, 20 bp, Artificial Sequence
  Synthetic oligonucleotide; GGGAAT chr2 60544384 60544403 60544387 -
cctaccccccagcaggatgt

SEQ ID NO: 187255 - DNA, 20 bp, Artificial Sequence
  Synthetic oligonucleotide; GGGGAT chr2 60544294 60544313 60544297 -
tgaagcaagagcaggcggaa

SEQ ID NO: 187256 - DNA, 20 bp, Artificial Sequence
  Synthetic oligonucleotide; TGGAGT chr2 60544245 60544264 60544248 -
ccttgctaaatcaccaaata

SEQ ID NO: 187257 - DNA, 20 bp, Artificial Sequence
  Synthetic oligonucleotide; AAGAAT chr2 60544163 60544182 60544166 -
aaacacagtgtctgtcaagc

SEQ ID NO: 187258 - DNA, 20 bp, Artificial Sequence
  Synthetic oligonucleotide; AGGAAT chr2 60544069 60544088 60544072 -
tgtgcctctgtatttagagg

SEQ ID NO: 187259 - DNA, 20 bp, Artificial Sequence
  Synthetic oligonucleotide; GTGAAT chr2 60544009 60544028 60544012 -
agacttttactgctatagtt

SEQ ID NO: 187260 - DNA, 20 bp, Artificial Sequence
  Synthetic oligonucleotide; ATGAAT chr2 60543757 60543776 60543760 -
gtgaggtaaacctttcgtgc

SEQ ID NO: 187261 - DNA, 20 bp, Artificial Sequence
  Synthetic oligonucleotide; TAGAAT chr2 60543644 60543663 60543647 -
caaagtgagatgtcagtaac

SEQ ID NO: 187262 - DNA, 20 bp, Artificial Sequence
  Synthetic oligonucleotide; ATGAAT chr2 60543614 60543633 60543617 -
acttctcataattcacagta

SEQ ID NO: 187263 - DNA, 20 bp, Artificial Sequence
  Synthetic oligonucleotide; AAGAGT chr2 60543607 60543626 60543610 -
ataattcacagtaatgaatt

SEQ ID NO: 187264 - DNA, 20 bp, Artificial Sequence
  Synthetic oligonucleotide; TTGAAT chr2 60543400 60543419 60543403 -
agtaatcattcagtagatat

SEQ ID NO: 187265 - DNA, 20 bp, Artificial Sequence
  Synthetic oligonucleotide; ATGAAT chr2 60543338 60543357 60543341 -
ttaaggaaagagatatattg

SEQ ID NO: 187266 - DNA, 20 bp, Artificial Sequence
  Synthetic oligonucleotide; AAGAAT chr2 60543326 60543345 60543329 -
atatattgatgaatctctag

SEQ ID NO: 187267 - DNA, 20 bp, Artificial Sequence
  Synthetic oligonucleotide; CTGGGT chr2 60543281 60543300 60543284 -
aaggtagtcatttaagcgtg

SEQ ID NO: 187268 - DNA, 20 bp, Artificial Sequence
  Synthetic oligonucleotide; TTGGAT chr2 60543247 60543266 60543250 -
ctttattaaagtgatgtaag

SEQ ID NO: 187269 - DNA, 20 bp, Artificial Sequence
  Synthetic oligonucleotide; TTGAGT chr2 60543241 60543260 60543244 -
taaagtgatgtaagttggat

SEQ ID NO: 187270 - DNA, 20 bp, Artificial Sequence
  Synthetic oligonucleotide; AAGAAT chr2 60543199 60543218 60543202 -
ctattttataggcaggaagc

SEQ ID NO: 187271 - DNA, 20 bp, Artificial Sequence
  Synthetic oligonucleotide; TAGAAT chr2 60543154 60543173 60543157 -
ttcctaagataaataaagct

SEQ ID NO: 187272 - DNA, 20 bp, Artificial Sequence
  Synthetic oligonucleotide; GAGAAT chr2 60543131 60543150 60543134 -
aattcgggactttcagatag

SEQ ID NO: 187273 - DNA, 20 bp, Artificial Sequence
  Synthetic oligonucleotide; CAGAGT chr2 60543121 60543140 60543124 -
tttcagataggagaataagg

SEQ ID NO: 187274 - DNA, 20 bp, Artificial Sequence
  Synthetic oligonucleotide; TTGAGT chr2 60543105 60543124 60543108 -
aaggcagagttctttaaatc

SEQ ID NO: 187275 - DNA, 20 bp, Artificial Sequence
  Synthetic oligonucleotide; CTGAGT chr2 60543059 60543078 60543062 -
tgtactcaggcctctccaag

SEQ ID NO: 187276 - DNA, 20 bp, Artificial Sequence
  Synthetic oligonucleotide; CAGAGT chr2 60543027 60543046 60543030 -
tttttttttttttttttaga

SEQ ID NO: 187277 - DNA, 20 bp, Artificial Sequence
  Synthetic oligonucleotide; TGGAGT chr2 60543001 60543020 60543004 -
tttgctcttgttgcccaggc

SEQ ID NO: 187278 - DNA, 20 bp, Artificial Sequence
  Synthetic oligonucleotide; TGGGAT chr2 60542916 60542935 60542919 -
gcctcagcctcccaagtagc

SEQ ID NO: 187279 - DNA, 20 bp, Artificial Sequence
  Synthetic oligonucleotide; CAGGGT chr2 60542859 60542878 60542862 -
ttttgtattttcagtagagg

SEQ ID NO: 187280 - DNA, 20 bp, Artificial Sequence
  Synthetic oligonucleotide; TGGGAT chr2 60542780 60542799 60542783 -
ggcttggcctcccaaagtgc

SEQ ID NO: 187281 - DNA, 20 bp, Artificial Sequence
  Synthetic oligonucleotide; CTGAGT chr2 60542743 60542762 60542746 -
gcgaccgcacctggcccaaa

SEQ ID NO: 187282 - DNA, 20 bp, Artificial Sequence
  Synthetic oligonucleotide; GAGGAT chr2 60542729 60542748 60542732 -
cccaaactgagtatttttta

SEQ ID NO: 187283 - DNA, 20 bp, Artificial Sequence
  Synthetic oligonucleotide; GTGAAT chr2 60542711 60542730 60542714 -
tagaggattctttttacctg

SEQ ID NO: 187284 - DNA, 20 bp, Artificial Sequence
  Synthetic oligonucleotide; ATGGGT chr2 60542703 60542722 60542706 -
tctttttacctggtgaatag

SEQ ID NO: 187285 - DNA, 20 bp, Artificial Sequence
  Synthetic oligonucleotide; GGGAAT chr2 60542554 60542573 60542557 -
gaagtagtattaatttagct

SEQ ID NO: 187286 - DNA, 20 bp, Artificial Sequence
  Synthetic oligonucleotide; AGGGGT chr2 60542450 60542469 60542453 -
ttgcagtcagagctttcaat

SEQ ID NO: 187287 - DNA, 20 bp, Artificial Sequence
  Synthetic oligonucleotide; CTGAAT chr2 60542373 60542392 60542376 -
gaaatattcatggaagatta

SEQ ID NO: 187288 - DNA, 20 bp, Artificial Sequence
  Synthetic oligonucleotide; AGGAAT chr2 60542287 60542306 60542290 -
ggttttggcttattgcacat

SEQ ID NO: 187289 - DNA, 20 bp, Artificial Sequence
  Synthetic oligonucleotide; CAGGGT chr2 60542134 60542153 60542137 -
atgaacatagacatttatat

SEQ ID NO: 187290 - DNA, 20 bp, Artificial Sequence
  Synthetic oligonucleotide; CAGAAT chr2 60541984 60542003 60541987 -
atcaaatacaatatgctttt

SEQ ID NO: 187291 - DNA, 20 bp, Artificial Sequence
  Synthetic oligonucleotide; GAGGAT chr2 60541912 60541931 60541915 -
tcctagctcagactgaactg

SEQ ID NO: 187292 - DNA, 20 bp, Artificial Sequence
  Synthetic oligonucleotide; CTGAAT chr2 60541809 60541828 60541812 -
ttctctttatttatgtgatt

SEQ ID NO: 187293 - DNA, 20 bp, Artificial Sequence
  Synthetic oligonucleotide; GTGAAT chr2 60541783 60541802 60541786 -
aaaaacgactgacttctgaa

SEQ ID NO: 187294 - DNA, 20 bp, Artificial Sequence
  Synthetic oligonucleotide; GAGAGT chr2 60541692 60541711 60541695 -
ttacttaccttcaaaatcca

SEQ ID NO: 187295 - DNA, 20 bp, Artificial Sequence
  Synthetic oligonucleotide; GAGAAT chr2 60541685 60541704 60541688 -
ccttcaaaatccagagagta

SEQ ID NO: 187296 - DNA, 20 bp, Artificial Sequence
  Synthetic oligonucleotide; TAGGAT chr2 60541659 60541678 60541662 -
attgttttctaataagtacc

SEQ ID NO: 187297 - DNA, 20 bp, Artificial Sequence
  Synthetic oligonucleotide; GGGAGT chr2 60541595 60541614 60541598 -
agactaatgttcatgaaact

SEQ ID NO: 187298 - DNA, 20 bp, Artificial Sequence
  Synthetic oligonucleotide; TTGGAT chr2 60541534 60541553 60541537 -
aaaggttgtgaactggcagc

SEQ ID NO: 187299 - DNA, 20 bp, Artificial Sequence
  Synthetic oligonucleotide; GAGAAT chr2 60541216 60541235 60541219 -
tcttttataaataatgtttt

SEQ ID NO: 187300 - DNA, 20 bp, Artificial Sequence
  Synthetic oligonucleotide; AAGGAT chr2 60540880 60540899 60540883 -
caagttgtgcctttactata

SEQ ID NO: 187301 - DNA, 20 bp, Artificial Sequence
  Synthetic oligonucleotide; GTGAAT chr2 60540844 60540863 60540847 -
ttttgcacacctttctctta

SEQ ID NO: 187302 - DNA, 20 bp, Artificial Sequence
  Synthetic oligonucleotide; CTGGGT chr2 60540795 60540814 60540798 -
acatgggctggaaaatgcaa

SEQ ID NO: 187303 - DNA, 20 bp, Artificial Sequence
  Synthetic oligonucleotide; CAGGGT chr2 60540774 60540793 60540777 -
tgggtgtagaaacgtgcagg

SEQ ID NO: 187304 - DNA, 20 bp, Artificial Sequence
  Synthetic oligonucleotide; GCGAGT chr2 60540737 60540756 60540740 -
accttcagctcagggaggag

SEQ ID NO: 187305 - DNA, 20 bp, Artificial Sequence
  Synthetic oligonucleotide; TTGGAT chr2 60540732 60540751 60540735 -
cagctcagggaggaggcgag

SEQ ID NO: 187306 - DNA, 20 bp, Artificial Sequence
  Synthetic oligonucleotide; TAGAGT chr2 60540707 60540726 60540710 -
tgcttattaatggcatcttt

SEQ ID NO: 187307 - DNA, 20 bp, Artificial Sequence
  Synthetic oligonucleotide; GGGAGT chr2 60540649 60540668 60540652 -
ccatgtagtttggctaatgt

SEQ ID NO: 187308 - DNA, 20 bp, Artificial Sequence
  Synthetic oligonucleotide; TGGGGT chr2 60540636 60540655 60540639 -
ctaatgtgggagtactaaat

SEQ ID NO: 187309 - DNA, 20 bp, Artificial Sequence
  Synthetic oligonucleotide; GAGAAT chr2 60540555 60540574 60540558 -
aatgaaaatgtttaataaag

SEQ ID NO: 187310 - DNA, 20 bp, Artificial Sequence
  Synthetic oligonucleotide; GTGAAT chr2 60540547 60540566 60540550 -
tgtttaataaaggagaatag

SEQ ID NO: 187311 - DNA, 20 bp, Artificial Sequence
  Synthetic oligonucleotide; CTGGAT chr2 60540422 60540441 60540425 -
gatgcaccaagattgcgtca

SEQ ID NO: 187312 - DNA, 20 bp, Artificial Sequence
  Synthetic oligonucleotide; TTGGGT chr2 60540186 60540205 60540189 -
tctgcttgttcagatttcat

SEQ ID NO: 187313 - DNA, 20 bp, Artificial Sequence
  Synthetic oligonucleotide; AAGGAT chr2 60540151 60540170 60540154 -
gtcagcagtgttgttatttc

SEQ ID NO: 187314 - DNA, 20 bp, Artificial Sequence
  Synthetic oligonucleotide; TTGGAT chr2 60540068 60540087 60540071 -
tttttatgttatgtatcaat

SEQ ID NO: 187315 - DNA, 20 bp, Artificial Sequence
  Synthetic oligonucleotide; ATGGAT chr2 60540018 60540037 60540021 -
tgttcagactatataattta

SEQ ID NO: 187316 - DNA, 20 bp, Artificial Sequence
  Synthetic oligonucleotide; CAGGGT chr2 60539891 60539910 60539894 -
cagcttctcccctttacgac

SEQ ID NO: 187317 - DNA, 20 bp, Artificial Sequence
  Synthetic oligonucleotide; TGGAGT chr2 60539784 60539803 60539787 -
acgaaccatattattgctac

SEQ ID NO: 187318 - DNA, 20 bp, Artificial Sequence
  Synthetic oligonucleotide; AAGAAT chr2 60539731 60539750 60539734 -
ggaaatgtaacctgacaaat

SEQ ID NO: 187319 - DNA, 20 bp, Artificial Sequence
  Synthetic oligonucleotide; TTGGGT chr2 60539555 60539574 60539558 -
aaaatgtaacttattccata

SEQ ID NO: 187320 - DNA, 20 bp, Artificial Sequence
  Synthetic oligonucleotide; TGGAAT chr2 60539545 60539564 60539548 -
ttattccatattgggttcat

SEQ ID NO: 187321 - DNA, 20 bp, Artificial Sequence
  Synthetic oligonucleotide; CAGGGT chr2 60539458 60539477 60539461 -
aaggcttttgctgttcttag

SEQ ID NO: 187322 - DNA, 20 bp, Artificial Sequence
  Synthetic oligonucleotide; TGGGGT chr2 60539444 60539463 60539447 -
tcttagcagggttagtaact

SEQ ID NO: 187323 - DNA, 20 bp, Artificial Sequence
  Synthetic oligonucleotide; TTGAGT chr2 60539403 60539422 60539406 -
ttcgtcattctgcaatggca

SEQ ID NO: 187324 - DNA, 20 bp, Artificial Sequence
  Synthetic oligonucleotide; AAGGAT chr2 60539383 60539402 60539386 -
ttgagttaggttggcaaggg

SEQ ID NO: 187325 - DNA, 20 bp, Artificial Sequence
  Synthetic oligonucleotide; GGGGGT chr2 60539367 60539386 60539370 -
agggaaggatttgaggcatg

SEQ ID NO: 187326 - DNA, 20 bp, Artificial Sequence
  Synthetic oligonucleotide; GGGAAT chr2 60539336 60539355 60539339 -
ggtcacttctgatcccagca

SEQ ID NO: 187327 - DNA, 20 bp, Artificial Sequence
  Synthetic oligonucleotide; TGGAAT chr2 60539222 60539241 60539225 -
tgccctgtcagatgcggagc

SEQ ID NO: 187328 - DNA, 20 bp, Artificial Sequence
  Synthetic oligonucleotide; GGGAAT chr2 60539147 60539166 60539150 -
cttaatatgcagctagtctg

SEQ ID NO: 187329 - DNA, 20 bp, Artificial Sequence
  Synthetic oligonucleotide; TGGAGT chr2 60539019 60539038 60539022 -
acatcatccttttcttctct

SEQ ID NO: 187330 - DNA, 20 bp, Artificial Sequence
  Synthetic oligonucleotide; CAGAAT chr2 60538978 60538997 60538981 -
gccacctcccaattcaccac

SEQ ID NO: 187331 - DNA, 20 bp, Artificial Sequence
  Synthetic oligonucleotide; TTGAAT chr2 60538907 60538926 60538910 -
atatggttaattacaggcgt

SEQ ID NO: 187332 - DNA, 20 bp, Artificial Sequence
  Synthetic oligonucleotide; GGGAGT chr2 60538838 60538857 60538841 -
aagtatgtgatttgaacaaa

SEQ ID NO: 187333 - DNA, 20 bp, Artificial Sequence
  Synthetic oligonucleotide; TGGAAT chr2 60538642 60538661 60538645 -
tttaaaaaacaactttcaac

SEQ ID NO: 187334 - DNA, 20 bp, Artificial Sequence
  Synthetic oligonucleotide; TTGAGT chr2 60538608 60538627 60538611 -
aatatttcaccattatattt

SEQ ID NO: 187335 - DNA, 20 bp, Artificial Sequence
  Synthetic oligonucleotide; CAGAAT chr2 60538553 60538572 60538556 -
tttataatgtgttcctttaa

SEQ ID NO: 187336 - DNA, 20 bp, Artificial Sequence
  Synthetic oligonucleotide; GCGAAT chr2 60538445 60538464 60538448 -
aaataagctgctaagaactg

SEQ ID NO: 187337 - DNA, 20 bp, Artificial Sequence
  Synthetic oligonucleotide; GTGAGT chr2 60538381 60538400 60538384 -
ggttcaccctggagactgat

SEQ ID NO: 187338 - DNA, 20 bp, Artificial Sequence
  Synthetic oligonucleotide; GTGGAT chr2 60538377 60538396 60538380 -
caccctggagactgatgtga

SEQ ID NO: 187339 - DNA, 20 bp, Artificial Sequence
  Synthetic oligonucleotide; CAGAGT chr2 60538214 60538233 60538217 -
tagataaaataccaagttct

SEQ ID NO: 187340 - DNA, 20 bp, Artificial Sequence
  Synthetic oligonucleotide; CTGAAT chr2 60538086 60538105 60538089 -
tggcagcatgttattcagaa

SEQ ID NO: 187341 - DNA, 20 bp, Artificial Sequence
  Synthetic oligonucleotide; GAGAAT chr2 60538068 60538087 60538071 -
aactgaatcagtctctgcca

SEQ ID NO: 187342 - DNA, 20 bp, Artificial Sequence
  Synthetic oligonucleotide; GGGGAT chr2 60538027 60538046 60538030 -
ggagcaggtatgttgatgaa

SEQ ID NO: 187343 - DNA, 20 bp, Artificial Sequence
  Synthetic oligonucleotide; ATGAGT chr2 60537996 60538015 60537999 -
gggacctttggtcactcaca

SEQ ID NO: 187344 - DNA, 20 bp, Artificial Sequence
  Synthetic oligonucleotide; GCGAAT chr2 60537912 60537931 60537915 -
gattttagttttagatagag

SEQ ID NO: 187345 - DNA, 20 bp, Artificial Sequence
  Synthetic oligonucleotide; AAGAAT chr2 60537878 60537897 60537881 -
taaaaactcccattaaaata

SEQ ID NO: 187346 - DNA, 20 bp, Artificial Sequence
  Synthetic oligonucleotide; TGGAAT chr2 60537873 60537892 60537876 -
actcccattaaaataaagaa

SEQ ID NO: 187347 - DNA, 20 bp, Artificial Sequence
  Synthetic oligonucleotide; AAGGGT chr2 60537852 60537871 60537855 -
ggaattattgtgaaacctgc

SEQ ID NO: 187348 - DNA, 20 bp, Artificial Sequence
  Synthetic oligonucleotide; TTGGAT chr2 60537635 60537654 60537638 -
ttagggaaataaagtgtagc

SEQ ID NO: 187349 - DNA, 20 bp, Artificial Sequence
  Synthetic oligonucleotide; TAGAGT chr2 60537572 60537591 60537575 -
gttcctgtacattttaaata

SEQ ID NO: 187350 - DNA, 20 bp, Artificial Sequence
  Synthetic oligonucleotide; GTGAGT chr2 60537327 60537346 60537330 -
aatgttaaatcttaaatctc

SEQ ID NO: 187351 - DNA, 20 bp, Artificial Sequence
  Synthetic oligonucleotide; AAGAAT chr2 60537251 60537270 60537254 -
aaactgaacattggctactg

SEQ ID NO: 187352 - DNA, 20 bp, Artificial Sequence
  Synthetic oligonucleotide; TTGGAT chr2 60537129 60537148 60537132 -
taattctgataaagatactc

SEQ ID NO: 187353 - DNA, 20 bp, Artificial Sequence
  Synthetic oligonucleotide; GTGGAT chr2 60536997 60537016 60537000 -
aaatcttattctacatacaa

SEQ ID NO: 187354 - DNA, 20 bp, Artificial Sequence
  Synthetic oligonucleotide; CTGGGT chr2 60536865 60536884 60536868 -
cttttgtgcttgtcccagct

SEQ ID NO: 187355 - DNA, 20 bp, Artificial Sequence
  Synthetic oligonucleotide; AGGAAT chr2 60536760 60536779 60536763 -
tataggtattgtatttaaag

SEQ ID NO: 187356 - DNA, 20 bp, Artificial Sequence
  Synthetic oligonucleotide; GGGGGT chr2 60536691 60536710 60536694 -
gattgcggtgttgccagcag

SEQ ID NO: 187357 - DNA, 20 bp, Artificial Sequence
  Synthetic oligonucleotide; TAGAGT chr2 60536514 60536533 60536517 -
ctcattgaactctactcatg

SEQ ID NO: 187358 - DNA, 20 bp, Artificial Sequence
  Synthetic oligonucleotide; CGGAAT chr2 60536493 60536512 60536496 -
agagtaacattagtgtcaaa

SEQ ID NO: 187359 - DNA, 20 bp, Artificial Sequence
  Synthetic oligonucleotide; GTGGAT chr2 60536449 60536468 60536452 -
tgtggctcatacagatggtt

SEQ ID NO: 187360 - DNA, 20 bp, Artificial Sequence
  Synthetic oligonucleotide; GTGGGT chr2 60536443 60536462 60536446 -
tcatacagatggttgtggat

SEQ ID NO: 187361 - DNA, 20 bp, Artificial Sequence
  Synthetic oligonucleotide; AAGGAT chr2 60536369 60536388 60536372 -
cacatttctgagcagggccc

SEQ ID NO: 187362 - DNA, 20 bp, Artificial Sequence
  Synthetic oligonucleotide; GAGAGT chr2 60536361 60536380 60536364 -
tgagcagggcccaaggataa

SEQ ID NO: 187363 - DNA, 20 bp, Artificial Sequence
  Synthetic oligonucleotide; GGGGGT chr2 60536345 60536364 60536348 -
ataagagagttaagaaatca

SEQ ID NO: 187364 - DNA, 20 bp, Artificial Sequence
  Synthetic oligonucleotide; AAGGGT chr2 60536231 60536250 60536234 -
gctgggggagagagggggag

SEQ ID NO: 187365 - DNA, 20 bp, Artificial Sequence
  Synthetic oligonucleotide; TGGAAT chr2 60536210 60536229 60536213 -
agggtgcggagagaggttct

SEQ ID NO: 187366 - DNA, 20 bp, Artificial Sequence
  Synthetic oligonucleotide; TTGGGT chr2 60536159 60536178 60536162 -
atccccacagcagagagctt

SEQ ID NO: 187367 - DNA, 20 bp, Artificial Sequence
  Synthetic oligonucleotide; CTGGGT chr2 60536044 60536063 60536047 -
atatactttcttgctttcac

SEQ ID NO: 187368 - DNA, 20 bp, Artificial Sequence
  Synthetic oligonucleotide; TGGGGT chr2 60536029 60536048 60536032 -
ttcacctgggttggagaggt

SEQ ID NO: 187369 - DNA, 20 bp, Artificial Sequence
  Synthetic oligonucleotide; AGGAGT chr2 60536010 60536029 60536013 -
ttggggttgggaggaagagg

SEQ ID NO: 187370 - DNA, 20 bp, Artificial Sequence
  Synthetic oligonucleotide; GGGAAT chr2 60535999 60536018 60536002 -
aggaagaggaggagttcatt

SEQ ID NO: 187371 - DNA, 20 bp, Artificial Sequence
  Synthetic oligonucleotide; TAGAAT chr2 60535985 60536004 60535988 -
ttcattgggaattctgtcac

SEQ ID NO: 187372 - DNA, 20 bp, Artificial Sequence
  Synthetic oligonucleotide; GTGAGT chr2 60535951 60535970 60535954 -
tgtcaggaggttagcaaggt

SEQ ID NO: 187373 - DNA, 20 bp, Artificial Sequence
  Synthetic oligonucleotide; AAGGAT chr2 60535932 60535951 60535935 -
tgtgagttagcattcaagca

SEQ ID NO: 187374 - DNA, 20 bp, Artificial Sequence
  Synthetic oligonucleotide; TGGGGT chr2 60535863 60535882 60535866 -
ccacgatactctctaataac

SEQ ID NO: 187375 - DNA, 20 bp, Artificial Sequence
  Synthetic oligonucleotide; TGGGAT chr2 60535858 60535877 60535861 -
atactctctaataactgggg

SEQ ID NO: 187376 - DNA, 20 bp, Artificial Sequence
  Synthetic oligonucleotide; GTGGGT chr2 60535845 60535864 60535848 -
actggggtgggatggtggtg

SEQ ID NO: 187377 - DNA, 20 bp, Artificial Sequence
  Synthetic oligonucleotide; CTGAAT chr2 60535824 60535843 60535827 -
tgggtggacaccacaacttt

SEQ ID NO: 187378 - DNA, 20 bp, Artificial Sequence
  Synthetic oligonucleotide; ATGGAT chr2 60535788 60535807 60535791 -
gtctgcatgacccgttcacc

SEQ ID NO: 187379 - DNA, 20 bp, Artificial Sequence
  Synthetic oligonucleotide; CCGAAT chr2 60535767 60535786 60535770 -
tggattaaatgcggctggtg

SEQ ID NO: 187380 - DNA, 20 bp, Artificial Sequence
  Synthetic oligonucleotide; CAGGAT chr2 60535730 60535749 60535733 -
gaaaggcaaatctcaagcaa

SEQ ID NO: 187381 - DNA, 20 bp, Artificial Sequence
  Synthetic oligonucleotide; GTGGAT chr2 60535586 60535605 60535589 -
aaagctgtttttataccaca

SEQ ID NO: 187382 - DNA, 20 bp, Artificial Sequence
  Synthetic oligonucleotide; AAGGGT chr2 60535537 60535556 60535540 -
agggggaaaaggctttttgg

SEQ ID NO: 187383 - DNA, 20 bp, Artificial Sequence
  Synthetic oligonucleotide; TTGGAT chr2 60535250 60535269 60535253 -
gaagaaaaaccctttgcttt

SEQ ID NO: 187384 - DNA, 20 bp, Artificial Sequence
  Synthetic oligonucleotide; ATGAAT chr2 60535246 60535265 60535249 -
aaaaaccctttgctttttgg

SEQ ID NO: 187385 - DNA, 20 bp, Artificial Sequence
  Synthetic oligonucleotide; TTGAAT chr2 60535214 60535233 60535217 -
gataatttgctaaagctcat

SEQ ID NO: 187386 - DNA, 20 bp, Artificial Sequence
  Synthetic oligonucleotide; ATGAAT chr2 60535169 60535188 60535172 -
ttcaaaggctaaattgcttt

SEQ ID NO: 187387 - DNA, 20 bp, Artificial Sequence
  Synthetic oligonucleotide; GCGAAT chr2 60535089 60535108 60535092 -
attaggtccttccagtaatt

SEQ ID NO: 187388 - DNA, 20 bp, Artificial Sequence
  Synthetic oligonucleotide; GTGAAT chr2 60534705 60534724 60534708 -
ttcttgccaagtttccttta

SEQ ID NO: 187389 - DNA, 20 bp, Artificial Sequence
  Synthetic oligonucleotide; AGGAAT chr2 60534697 60534716 60534700 -
aagtttcctttagtgaattg

SEQ ID NO: 187390 - DNA, 20 bp, Artificial Sequence
  Synthetic oligonucleotide; TTGAGT chr2 60534678 60534697 60534681 -
gaggaattagaagtctaacc

SEQ ID NO: 187391 - DNA, 20 bp, Artificial Sequence
  Synthetic oligonucleotide; CTGGGT chr2 60534329 60534348 60534332 -
ggcacctaaaggacttgggc

SEQ ID NO: 187392 - DNA, 20 bp, Artificial Sequence
  Synthetic oligonucleotide; ACGAGT chr2 60534182 60534201 60534185 -
cagtgtctccctcaaggtac

SEQ ID NO: 187393 - DNA, 20 bp, Artificial Sequence
  Synthetic oligonucleotide; TTGAAT chr2 60534097 60534116 60534100 -
tttggtgtttgcctttgctg

SEQ ID NO: 187394 - DNA, 20 bp, Artificial Sequence
  Synthetic oligonucleotide; ATGAGT chr2 60534055 60534074 60534058 -
ttgatgttcatctttggttt

SEQ ID NO: 187395 - DNA, 20 bp, Artificial Sequence
  Synthetic oligonucleotide; CAGAAT chr2 60534031 60534050 60534034 -
gtttatcactggttaacaag

SEQ ID NO: 187396 - DNA, 20 bp, Artificial Sequence
  Synthetic oligonucleotide; ACGAAT chr2 60533995 60534014 60533998 -
taactgatattctgattaaa

SEQ ID NO: 187397 - DNA, 20 bp, Artificial Sequence
  Synthetic oligonucleotide; TGGGGT chr2 60533763 60533782 60533766 -
taggcagtaagatgaactga

SEQ ID NO: 187398 - DNA, 20 bp, Artificial Sequence
  Synthetic oligonucleotide; ATGGAT chr2 60533596 60533615 60533599 -
ctaagatatgatgaaatcta

SEQ ID NO: 187399 - DNA, 20 bp, Artificial Sequence
  Synthetic oligonucleotide; CTGAGT chr2 60533540 60533559 60533543 -
tcttcatactttatgtgggg

SEQ ID NO: 187400 - DNA, 20 bp, Artificial Sequence
  Synthetic oligonucleotide; AGGGGT chr2 60533521 60533540 60533524 -
gctgagtgggcagtggagaa

SEQ ID NO: 187401 - DNA, 20 bp, Artificial Sequence
  Synthetic oligonucleotide; GTGGAT chr2 60533440 60533459 60533443 -
ctgcttcagtcgcgttggct

SEQ ID NO: 187402 - DNA, 20 bp, Artificial Sequence
  Synthetic oligonucleotide; AGGGAT chr2 60533315 60533334 60533318 -
tcccccaaactttacaagaa

SEQ ID NO: 187403 - DNA, 20 bp, Artificial Sequence
  Synthetic oligonucleotide; AGGAGT chr2 60533250 60533269 60533253 -
ccttattattcagtctatcc

SEQ ID NO: 187404 - DNA, 20 bp, Artificial Sequence
  Synthetic oligonucleotide; AGGAAT chr2 60533217 60533236 60533220 -
tgtcggtttatttaacttcc

SEQ ID NO: 187405 - DNA, 20 bp, Artificial Sequence
  Synthetic oligonucleotide; TAGAGT chr2 60533165 60533184 60533168 -
agcaagaaagattacagtat

SEQ ID NO: 187406 - DNA, 20 bp, Artificial Sequence
  Synthetic oligonucleotide; TGGAGT chr2 60533055 60533074 60533058 -
actggaaacttctgcttata

SEQ ID NO: 187407 - DNA, 20 bp, Artificial Sequence
  Synthetic oligonucleotide; CAGGGT chr2 60533009 60533028 60533012 -
ttggcataatctagtgtacc

SEQ ID NO: 187408 - DNA, 20 bp, Artificial Sequence
  Synthetic oligonucleotide; TAGAAT chr2 60532928 60532947 60532931 -
aggaagtaaataaaaagtat

SEQ ID NO: 187409 - DNA, 20 bp, Artificial Sequence
  Synthetic oligonucleotide; GGGAAT chr2 60532826 60532845 60532829 -
cttttgaaaatgtattttca

SEQ ID NO: 187410 - DNA, 20 bp, Artificial Sequence
  Synthetic oligonucleotide; GGGAGT chr2 60532729 60532748 60532732 -
tgtttttcgaagtacttaaa

SEQ ID NO: 187411 - DNA, 20 bp, Artificial Sequence
  Synthetic oligonucleotide; AGGGGT chr2 60532721 60532740 60532724 -
gaagtacttaaagggagtgg

SEQ ID NO: 187412 - DNA, 20 bp, Artificial Sequence
  Synthetic oligonucleotide; GTGAAT chr2 60532702 60532721 60532705 -
gaggggtagaaagcatataa

SEQ ID NO: 187413 - DNA, 20 bp, Artificial Sequence
  Synthetic oligonucleotide; AGGAAT chr2 60532603 60532622 60532606 -
gcaaacatatccttatgcca

SEQ ID NO: 187414 - DNA, 20 bp, Artificial Sequence
  Synthetic oligonucleotide; GAGAGT chr2 60532523 60532542 60532526 -
gtaaatcagtaaaccaggca

SEQ ID NO: 187415 - DNA, 20 bp, Artificial Sequence
  Synthetic oligonucleotide; CAGAGT chr2 60532483 60532502 60532486 -
ggaaaccaaatcataatacc

SEQ ID NO: 187416 - DNA, 20 bp, Artificial Sequence
  Synthetic oligonucleotide; CAGAAT chr2 60532360 60532379 60532363 -
ttttaaaaaactggaaatga

SEQ ID NO: 187417 - DNA, 20 bp, Artificial Sequence
  Synthetic oligonucleotide; GGGGGT chr2 60532166 60532185 60532169 -
gaagaacttctgtgattact

SEQ ID NO: 187418 - DNA, 20 bp, Artificial Sequence
  Synthetic oligonucleotide; GTGGGT chr2 60532105 60532124 60532108 -
taattagattcgattgtgcg

SEQ ID NO: 187419 - DNA, 20 bp, Artificial Sequence
  Synthetic oligonucleotide; TTGGAT chr2 60532096 60532115 60532099 -
tcgattgtgcggtgggtgtg

SEQ ID NO: 187420 - DNA, 20 bp, Artificial Sequence
  Synthetic oligonucleotide; GGGAGT chr2 60532069 60532088 60532072 -
tggggggaggggcagaggca

SEQ ID NO: 187421 - DNA, 20 bp, Artificial Sequence
  Synthetic oligonucleotide; TGGGGT chr2 60532061 60532080 60532064 -
ggggcagaggcagggagtgc

SEQ ID NO: 187422 - DNA, 20 bp, Artificial Sequence
  Synthetic oligonucleotide; CTGAGT chr2 60532044 60532063 60532047 -
tgctggggtgaggcgtgagg

SEQ ID NO: 187423 - DNA, 20 bp, Artificial Sequence
  Synthetic oligonucleotide; CAGGAT chr2 60531971 60531990 60531974 -
ggcagcttccaacgctggtg

SEQ ID NO: 187424 - DNA, 20 bp, Artificial Sequence
  Synthetic oligonucleotide; TTGAGT chr2 60531928 60531947 60531931 -
atgctcatggtgccctagtc

SEQ ID NO: 187425 - DNA, 20 bp, Artificial Sequence
  Synthetic oligonucleotide; CTGGGT chr2 60531895 60531914 60531898 -
ttaggtgggcttatttccca

SEQ ID NO: 187426 - DNA, 20 bp, Artificial Sequence
  Synthetic oligonucleotide; GGGGAT chr2 60531886 60531905 60531889 -
cttatttcccactgggtctg

SEQ ID NO: 187427 - DNA, 20 bp, Artificial Sequence
  Synthetic oligonucleotide; CAGGGT chr2 60531860 60531879 60531863 -
ttcatttgtcctttgagggg

SEQ ID NO: 187428 - DNA, 20 bp, Artificial Sequence
  Synthetic oligonucleotide; GAGGGT chr2 60531823 60531842 60531826 -
gaacagctgcggccggcaga

SEQ ID NO: 187429 - DNA, 20 bp, Artificial Sequence
  Synthetic oligonucleotide; GTGGGT chr2 60531794 60531813 60531797 -
taggaagagggaagcagcct

SEQ ID NO: 187430 - DNA, 20 bp, Artificial Sequence
  Synthetic oligonucleotide; CTGAAT chr2 60531765 60531784 60531768 -
ttcccgaccacatggaaagg

SEQ ID NO: 187431 - DNA, 20 bp, Artificial Sequence
  Synthetic oligonucleotide; TTGGGT chr2 60531739 60531758 60531742 -
aagacgttatggaccctgcc

SEQ ID NO: 187432 - DNA, 20 bp, Artificial Sequence
  Synthetic oligonucleotide; TGGGGT chr2 60531731 60531750 60531734 -
atggaccctgccttgggtac

SEQ ID NO: 187433 - DNA, 20 bp, Artificial Sequence
  Synthetic oligonucleotide; TTGAGT chr2 60531662 60531681 60531665 -
ggcactgccaaaacacgctc

SEQ ID NO: 187434 - DNA, 20 bp, Artificial Sequence
  Synthetic oligonucleotide; CTGAGT chr2 60531638 60531657 60531641 -
gtttaatggtagtggttggt

SEQ ID NO: 187435 - DNA, 20 bp, Artificial Sequence
  Synthetic oligonucleotide; ATGAAT chr2 60531553 60531572 60531556 -
aaaagccctggccaaggctt

SEQ ID NO: 187436 - DNA, 20 bp, Artificial Sequence
  Synthetic oligonucleotide; CAGGGT chr2 60531405 60531424 60531408 -
gcttgcatttaattgcaagt

SEQ ID NO: 187437 - DNA, 20 bp, Artificial Sequence
  Synthetic oligonucleotide; ATGGAT chr2 60531393 60531412 60531396 -
ttgcaagtcagggtaaatta

SEQ ID NO: 187438 - DNA, 20 bp, Artificial Sequence
  Synthetic oligonucleotide; GAGGGT chr2 60531289 60531308 60531292 -
ctggtttagtgttagtgtga

SEQ ID NO: 187439 - DNA, 20 bp, Artificial Sequence
  Synthetic oligonucleotide; GTGGGT chr2 60531271 60531290 60531274 -
gagagggtcgaaaagattct

SEQ ID NO: 187440 - DNA, 20 bp, Artificial Sequence
  Synthetic oligonucleotide; CGGGAT chr2 60531261 60531280 60531264 -
aaaagattctgtgggtccaa

SEQ ID NO: 187441 - DNA, 20 bp, Artificial Sequence
  Synthetic oligonucleotide; CGGAGT chr2 60531198 60531217 60531201 -
gggaggagaaaaacctggac

SEQ ID NO: 187442 - DNA, 20 bp, Artificial Sequence
  Synthetic oligonucleotide; TAGGGT chr2 60531193 60531212 60531196 -
gagaaaaacctggaccggag

SEQ ID NO: 187443 - DNA, 20 bp, Artificial Sequence
  Synthetic oligonucleotide; CAGAAT chr2 60530987 60531006 60530990 -
agccagactggtttagcaga

SEQ ID NO: 187444 - DNA, 20 bp, Artificial Sequence
  Synthetic oligonucleotide; AGGGGT chr2 60530965 60530984 60530968 -
gaatgatagattgttttgtc

SEQ ID NO: 187445 - DNA, 20 bp, Artificial Sequence
  Synthetic oligonucleotide; CAGGGT chr2 60530957 60530976 60530960 -
gattgttttgtcaggggtcc

SEQ ID NO: 187446 - DNA, 20 bp, Artificial Sequence
  Synthetic oligonucleotide; TTGAAT chr2 60530921 60530940 60530924 -
cttgaagcactttgtttatc

SEQ ID NO: 187447 - DNA, 20 bp, Artificial Sequence
  Synthetic oligonucleotide; AGGGGT chr2 60530836 60530855 60530839 -
gagaacagagaagactcagg

SEQ ID NO: 187448 - DNA, 20 bp, Artificial Sequence
  Synthetic oligonucleotide; GCGGGT chr2 60530535 60530554 60530538 -
ccagtcttttggctacatat

SEQ ID NO: 187449 - DNA, 20 bp, Artificial Sequence
  Synthetic oligonucleotide; AAGGGT chr2 60530457 60530476 60530460 -
taacccgagggccagatggg

SEQ ID NO: 187450 - DNA, 20 bp, Artificial Sequence
  Synthetic oligonucleotide; TGGGGT chr2 60530408 60530427 60530411 -
tgtgagagctcgtggtgcag

SEQ ID NO: 187451 - DNA, 20 bp, Artificial Sequence
  Synthetic oligonucleotide; GTGAAT chr2 60530300 60530319 60530303 -
ttaacttgttggaagggcct

SEQ ID NO: 187452 - DNA, 20 bp, Artificial Sequence
  Synthetic oligonucleotide; AGGGGT chr2 60530230 60530249 60530233 -
aggaaggctcaagaaaggcc

SEQ ID NO: 187453 - DNA, 20 bp, Artificial Sequence
  Synthetic oligonucleotide; ATGAAT chr2 60530067 60530086 60530070 -
gtgacattatgcattcatat

SEQ ID NO: 187454 - DNA, 20 bp, Artificial Sequence
  Synthetic oligonucleotide; AGGAGT chr2 60530051 60530070 60530054 -
atatatgaatgttggcaagc

SEQ ID NO: 187455 - DNA, 20 bp, Artificial Sequence
  Synthetic oligonucleotide; TTGAAT chr2 60529966 60529985 60529969 -
tgccacaagtggcgaagtaa

SEQ ID NO: 187456 - DNA, 20 bp, Artificial Sequence
  Synthetic oligonucleotide; CTGGGT chr2 60529895 60529914 60529898 -
aggagctgctggggctaaag

SEQ ID NO: 187457 - DNA, 20 bp, Artificial Sequence
  Synthetic oligonucleotide; TAGAAT chr2 60529886 60529905 60529889 -
tggggctaaagctgggttca

SEQ ID NO: 187458 - DNA, 20 bp, Artificial Sequence
  Synthetic oligonucleotide; CAGGAT chr2 60529707 60529726 60529710 -
gctaggcctcataagggagg

SEQ ID NO: 187459 - DNA, 20 bp, Artificial Sequence
  Synthetic oligonucleotide; CTGGGT chr2 60529650 60529669 60529653 -
ctgggaaaatttgggggcct

SEQ ID NO: 187460 - DNA, 20 bp, Artificial Sequence
  Synthetic oligonucleotide; ATGGAT chr2 60529637 60529656 60529640 -
ggggcctctgggtttatccc

SEQ ID NO: 187461 - DNA, 20 bp, Artificial Sequence
  Synthetic oligonucleotide; GAGGGT chr2 60529436 60529455 60529439 -
gaaataaaatggtttaggct

SEQ ID NO: 187462 - DNA, 20 bp, Artificial Sequence
  Synthetic oligonucleotide; GAGAAT chr2 60529347 60529366 60529350 -
tcctcaatctgtaaagtggg

SEQ ID NO: 187463 - DNA, 20 bp, Artificial Sequence
  Synthetic oligonucleotide; TGGGGT chr2 60529198 60529217 60529201 -
ggcttggaactgtgtgctcc

SEQ ID NO: 187464 - DNA, 20 bp, Artificial Sequence
  Synthetic oligonucleotide; TGGGGT chr2 60529171 60529190 60529174 -
tcaaagtagttcccccatta

SEQ ID NO: 187465 - DNA, 20 bp, Artificial Sequence
  Synthetic oligonucleotide; TGGGAT chr2 60529157 60529176 60529160 -
ccattatggggtgagcaggt

SEQ ID NO: 187466 - DNA, 20 bp, Artificial Sequence
  Synthetic oligonucleotide; GGGGGT chr2 60529131 60529150 60529134 -
gagagaagagcagggcaggt

SEQ ID NO: 187467 - DNA, 20 bp, Artificial Sequence
  Synthetic oligonucleotide; CAGGGT chr2 60529115 60529134 60529118 -
aggtgggggtctaaagagct

SEQ ID NO: 187468 - DNA, 20 bp, Artificial Sequence
  Synthetic oligonucleotide; GTGGGT chr2 60529080 60529099 60529083 -
tttctggtggcagctccctc

SEQ ID NO: 187469 - DNA, 20 bp, Artificial Sequence
  Synthetic oligonucleotide; GGGAGT chr2 60529074 60529093 60529077 -
gtggcagctccctcgtgggt

SEQ ID NO: 187470 - DNA, 20 bp, Artificial Sequence
  Synthetic oligonucleotide; CTGGGT chr2 60529020 60529039 60529023 -
tacgagaggcttgtgcctgc

SEQ ID NO: 187471 - DNA, 20 bp, Artificial Sequence
  Synthetic oligonucleotide; CTGGGT chr2 60528998 60529017 60529001 -
gggtgtgtgacacagttact

SEQ ID NO: 187472 - DNA, 20 bp, Artificial Sequence
  Synthetic oligonucleotide; GAGAGT chr2 60528961 60528980 60528964 -
tgttactgctagctggttgg

SEQ ID NO: 187473 - DNA, 20 bp, Artificial Sequence
  Synthetic oligonucleotide; GGGAAT chr2 60528951 60528970 60528954 -
agctggttgggagagtctga

SEQ ID NO: 187474 - DNA, 20 bp, Artificial Sequence
  Synthetic oligonucleotide; TAGAGT chr2 60528897 60528916 60528900 -
actcaaggtcccttacctca

SEQ ID NO: 187475 - DNA, 20 bp, Artificial Sequence
  Synthetic oligonucleotide; CAGAAT chr2 60528832 60528851 60528835 -
cgctccgggggctgcacctc

SEQ ID NO: 187476 - DNA, 20 bp, Artificial Sequence
  Synthetic oligonucleotide; TGGGGT chr2 60528722 60528741 60528725 -
catttggtagaggaggaaat

SEQ ID NO: 187477 - DNA, 20 bp, Artificial Sequence
  Synthetic oligonucleotide; AAGGGT chr2 60528711 60528730 60528714 -
ggaggaaattggggttcatc

SEQ ID NO: 187478 - DNA, 20 bp, Artificial Sequence
  Synthetic oligonucleotide; GAGGGT chr2 60528691 60528710 60528694 -
aagggttaaatgacttccct

SEQ ID NO: 187479 - DNA, 20 bp, Artificial Sequence
  Synthetic oligonucleotide; ATGGGT chr2 60528555 60528574 60528558 -
gctggacagttgtccctccc

SEQ ID NO: 187480 - DNA, 20 bp, Artificial Sequence
  Synthetic oligonucleotide; AAGAAT chr2 60528514 60528533 60528517 -
ttcaatcttctgggaaagag

SEQ ID NO: 187481 - DNA, 20 bp, Artificial Sequence
  Synthetic oligonucleotide; AGGAAT chr2 60528446 60528465 60528449 -
ttgggaaaagttgcaatgta

SEQ ID NO: 187482 - DNA, 20 bp, Artificial Sequence
  Synthetic oligonucleotide; CAGAAT chr2 60528407 60528426 60528410 -
tagtcatttccccatctgtc

SEQ ID NO: 187483 - DNA, 20 bp, Artificial Sequence
  Synthetic oligonucleotide; GAGGGT chr2 60528385 60528404 60528388 -
gaatgagcctgaaatcaagt

SEQ ID NO: 187484 - DNA, 20 bp, Artificial Sequence
  Synthetic oligonucleotide; CTGAAT chr2 60528315 60528334 60528318 -
ggtcaggagactgcagtggg

SEQ ID NO: 187485 - DNA, 20 bp, Artificial Sequence
  Synthetic oligonucleotide; TCGGAT chr2 60528227 60528246 60528230 -
gtctctgtggcatttacttc

SEQ ID NO: 187486 - DNA, 20 bp, Artificial Sequence
  Synthetic oligonucleotide; GAGAAT chr2 60528202 60528221 60528205 -
tcgtaccttcaaaggctggg

SEQ ID NO: 187487 - DNA, 20 bp, Artificial Sequence
  Synthetic oligonucleotide; CAGAAT chr2 60528196 60528215 60528199 -
cttcaaaggctggggagaat

SEQ ID NO: 187488 - DNA, 20 bp, Artificial Sequence
  Synthetic oligonucleotide; CTGAGT chr2 60528172 60528191 60528175 -
attatacagggagggagaga

SEQ ID NO: 187489 - DNA, 20 bp, Artificial Sequence
  Synthetic oligonucleotide; GTGAGT chr2 60528166 60528185 60528169 -
cagggagggagagactgagt

SEQ ID NO: 187490 - DNA, 20 bp, Artificial Sequence
  Synthetic oligonucleotide; GTGAGT chr2 60528162 60528181 60528165 -
gagggagagactgagtgtga

SEQ ID NO: 187491 - DNA, 20 bp, Artificial Sequence
  Synthetic oligonucleotide; ATGGGT chr2 60528128 60528147 60528131 -
cagtggtgtttcttaggacg

SEQ ID NO: 187492 - DNA, 20 bp, Artificial Sequence
  Synthetic oligonucleotide; GGGGGT chr2 60528118 60528137 60528121 -
tcttaggacgatgggttctg

SEQ ID NO: 187493 - DNA, 20 bp, Artificial Sequence
  Synthetic oligonucleotide; TTGAAT chr2 60528021 60528040 60528024 -
ctggaaacttgagggaagtt

SEQ ID NO: 187494 - DNA, 20 bp, Artificial Sequence
  Synthetic oligonucleotide; ATGGAT chr2 60527868 60527887 60527871 -
agacctgaggttcgttgcag

SEQ ID NO: 187495 - DNA, 20 bp, Artificial Sequence
  Synthetic oligonucleotide; GAGAAT chr2 60527774 60527793 60527777 -
ctaacatagacctccactga

SEQ ID NO: 187496 - DNA, 20 bp, Artificial Sequence
  Synthetic oligonucleotide; CAGAAT chr2 60527766 60527785 60527769 -
gacctccactgagagaattt

SEQ ID NO: 187497 - DNA, 20 bp, Artificial Sequence
  Synthetic oligonucleotide; AGGAGT chr2 60527714 60527733 60527717 -
tcatgcggaggccccgtggg

SEQ ID NO: 187498 - DNA, 20 bp, Artificial Sequence
  Synthetic oligonucleotide; AAGAGT chr2 60527706 60527725 60527709 -
aggccccgtgggaggagtgg

SEQ ID NO: 187499 - DNA, 20 bp, Artificial Sequence
  Synthetic oligonucleotide; GCGAGT chr2 60527686 60527705 60527689 -
aagagttggcctcagcactg

SEQ ID NO: 187500 - DNA, 20 bp, Artificial Sequence
  Synthetic oligonucleotide; TCGGAT chr2 60527679 60527698 60527682 -
ggcctcagcactggcgagta

SEQ ID NO: 187501 - DNA, 20 bp, Artificial Sequence
  Synthetic oligonucleotide; CTGAGT chr2 60527577 60527596 60527580 -
ggtcacatccaggttgtctt

SEQ ID NO: 187502 - DNA, 20 bp, Artificial Sequence
  Synthetic oligonucleotide; TGGGAT chr2 60527565 60527584 60527568 -
gttgtcttctgagtttgagg

SEQ ID NO: 187503 - DNA, 20 bp, Artificial Sequence
  Synthetic oligonucleotide; GAGAAT chr2 60527546 60527565 60527549 -
gtgggatggaggtggctgct

SEQ ID NO: 187504 - DNA, 20 bp, Artificial Sequence
  Synthetic oligonucleotide; GTGGGT chr2 60527536 60527555 60527539 -
ggtggctgctgagaatccat

SEQ ID NO: 187505 - DNA, 20 bp, Artificial Sequence
  Synthetic oligonucleotide; TTGGGT chr2 60527404 60527423 60527407 -
ttcattgtctctacataccc

SEQ ID NO: 187506 - DNA, 20 bp, Artificial Sequence
  Synthetic oligonucleotide; AAGAGT chr2 60527397 60527416 60527400 -
tctctacatacccttgggtc

SEQ ID NO: 187507 - DNA, 20 bp, Artificial Sequence
  Synthetic oligonucleotide; CTGGGT chr2 60527341 60527360 60527344 -
gaagctcttagttttatttg

SEQ ID NO: 187508 - DNA, 20 bp, Artificial Sequence
  Synthetic oligonucleotide; CTGGAT chr2 60527094 60527113 60527097 -
tgacccttcaggccaagtgc

SEQ ID NO: 187509 - DNA, 20 bp, Artificial Sequence
  Synthetic oligonucleotide; TCGAAT chr2 60527067 60527086 60527070 -
tggcaaagctacaataaata

SEQ ID NO: 187510 - DNA, 20 bp, Artificial Sequence
  Synthetic oligonucleotide; TTGGAT chr2 60526986 60527005 60526989 -
gtggactggttaagaggctg

SEQ ID NO: 187511 - DNA, 20 bp, Artificial Sequence
  Synthetic oligonucleotide; CCGGGT chr2 60526977 60526996 60526980 -
ttaagaggctgttggatgag

SEQ ID NO: 187512 - DNA, 20 bp, Artificial Sequence
  Synthetic oligonucleotide; AAGAAT chr2 60526872 60526891 60526875 -
tgctaagtagttccccgctt

SEQ ID NO: 187513 - DNA, 20 bp, Artificial Sequence
  Synthetic oligonucleotide; GGGAGT chr2 60526840 60526859 60526843 -
gctgggcagagattagcgca

SEQ ID NO: 187514 - DNA, 20 bp, Artificial Sequence
  Synthetic oligonucleotide; ATGAAT chr2 60526821 60526840 60526824 -
agggagttgtgtgtgtcaca

SEQ ID NO: 187515 - DNA, 20 bp, Artificial Sequence
  Synthetic oligonucleotide; GGGGGT chr2 60526460 60526479 60526463 -
actgctgtctgcgatgcaga

SEQ ID NO: 187516 - DNA, 20 bp, Artificial Sequence
  Synthetic oligonucleotide; AAGGAT chr2 60526397 60526416 60526400 -
tgtacacttcccaaatggta

SEQ ID NO: 187517 - DNA, 20 bp, Artificial Sequence
  Synthetic oligonucleotide; TGGGAT chr2 60526209 60526228 60526212 -
gaacacatcatcccaaaata

SEQ ID NO: 187518 - DNA, 20 bp, Artificial Sequence
  Synthetic oligonucleotide; CTGAAT chr2 60526202 60526221 60526205 -
tcatcccaaaatatgggatt

SEQ ID NO: 187519 - DNA, 20 bp, Artificial Sequence
  Synthetic oligonucleotide; CTGAAT chr2 60526177 60526196 60526180 -
tttgatcaaatcaccagttt

SEQ ID NO: 187520 - DNA, 20 bp, Artificial Sequence
  Synthetic oligonucleotide; CAGGGT chr2 60526143 60526162 60526146 -
atctagattttgcagaagtt

SEQ ID NO: 187521 - DNA, 20 bp, Artificial Sequence
  Synthetic oligonucleotide; ACGAAT chr2 60525942 60525961 60525945 -
actatttttgattaccaaac

SEQ ID NO: 187522 - DNA, 20 bp, Artificial Sequence
  Synthetic oligonucleotide; CTGGGT chr2 60525741 60525760 60525744 -
tgatctgaaaaccaggacac

SEQ ID NO: 187523 - DNA, 20 bp, Artificial Sequence
  Synthetic oligonucleotide; CTGGGT chr2 60525636 60525655 60525639 -
ggtaaaatagatagtttgga

SEQ ID NO: 187524 - DNA, 20 bp, Artificial Sequence
  Synthetic oligonucleotide; GTGGGT chr2 60525632 60525651 60525635 -
aaatagatagtttggactgg

SEQ ID NO: 187525 - DNA, 20 bp, Artificial Sequence
  Synthetic oligonucleotide; TGGAAT chr2 60525559 60525578 60525562 -
gttttctccctgctattttt

SEQ ID NO: 187526 - DNA, 20 bp, Artificial Sequence
  Synthetic oligonucleotide; CTGAAT chr2 60525546 60525565 60525549 -
tattttttggaatctagttg

SEQ ID NO: 187527 - DNA, 20 bp, Artificial Sequence
  Synthetic oligonucleotide; CAGAAT chr2 60525519 60525538 60525522 -
gggctcacctgcaaagacag

SEQ ID NO: 187528 - DNA, 20 bp, Artificial Sequence
  Synthetic oligonucleotide; TTGGAT chr2 60525462 60525481 60525465 -
gctatggtggagattaaggc

SEQ ID NO: 187529 - DNA, 20 bp, Artificial Sequence
  Synthetic oligonucleotide; TGGAAT chr2 60525385 60525404 60525388 -
aaaattgaagtgcagtataa

SEQ ID NO: 187530 - DNA, 20 bp, Artificial Sequence
  Synthetic oligonucleotide; AAGAAT chr2 60525296 60525315 60525299 -
gttttttttgaaaaactcca

SEQ ID NO: 187531 - DNA, 20 bp, Artificial Sequence
  Synthetic oligonucleotide; TTGAAT chr2 60525207 60525226 60525210 -
cgtttttgaaaaagaaatag

SEQ ID NO: 187532 - DNA, 20 bp, Artificial Sequence
  Synthetic oligonucleotide; CTGAAT chr2 60525166 60525185 60525169 -
ttttaaattcaattaactga

SEQ ID NO: 187533 - DNA, 20 bp, Artificial Sequence
  Synthetic oligonucleotide; CTGAGT chr2 60525093 60525112 60525096 -
atggacatagcctacatatg

SEQ ID NO: 187534 - DNA, 20 bp, Artificial Sequence
  Synthetic oligonucleotide; TGGAGT chr2 60525084 60525103 60525087 -
gcctacatatgctgagtccc

SEQ ID NO: 187535 - DNA, 20 bp, Artificial Sequence
  Synthetic oligonucleotide; AGGAAT chr2 60525077 60525096 60525080 -
tatgctgagtccctggagtt

SEQ ID NO: 187536 - DNA, 20 bp, Artificial Sequence
  Synthetic oligonucleotide; ACGGAT chr2 60524879 60524898 60524882 -
gtttaccattggcttttagc

SEQ ID NO: 187537 - DNA, 20 bp, Artificial Sequence
  Synthetic oligonucleotide; TTGAAT chr2 60524827 60524846 60524830 -
aataccatttatatgtggca

SEQ ID NO: 187538 - DNA, 20 bp, Artificial Sequence
  Synthetic oligonucleotide; TTGGAT chr2 60524767 60524786 60524770 -
agggcattcaaagttatcct

SEQ ID NO: 187539 - DNA, 20 bp, Artificial Sequence
  Synthetic oligonucleotide; CAGAGT chr2 60524722 60524741 60524725 -
cttttattatcccatgtgct

SEQ ID NO: 187540 - DNA, 20 bp, Artificial Sequence
  Synthetic oligonucleotide; ATGAAT chr2 60524707 60524726 60524710 -
gtgctcagagtaaggggcaa

SEQ ID NO: 187541 - DNA, 20 bp, Artificial Sequence
  Synthetic oligonucleotide; GGGGAT chr2 60524593 60524612 60524596 -
tctttaatttataatgtttt

SEQ ID NO: 187542 - DNA, 20 bp, Artificial Sequence
  Synthetic oligonucleotide; CCGAAT chr2 60524411 60524430 60524414 -
acccaaaagcaaataacagg

SEQ ID NO: 187543 - DNA, 20 bp, Artificial Sequence
  Synthetic oligonucleotide; ATGAAT chr2 60524407 60524426 60524410 -
aaaagcaaataacaggccga

SEQ ID NO: 187544 - DNA, 20 bp, Artificial Sequence
  Synthetic oligonucleotide; TAGGAT chr2 60524291 60524310 60524294 -
atgtattcagacatgaagtt

SEQ ID NO: 187545 - DNA, 20 bp, Artificial Sequence
  Synthetic oligonucleotide; GCGGAT chr2 60524096 60524115 60524099 -
attttgtttgcgaaatggga

SEQ ID NO: 187546 - DNA, 20 bp, Artificial Sequence
  Synthetic oligonucleotide; CGGAGT chr2 60524045 60524064 60524048 -
tcacactagttcctgtggtc

SEQ ID NO: 187547 - DNA, 20 bp, Artificial Sequence
  Synthetic oligonucleotide; TGGGAT chr2 60523947 60523966 60523950 -
tctctggctgaagtttaaga

SEQ ID NO: 187548 - DNA, 20 bp, Artificial Sequence
  Synthetic oligonucleotide; TAGGGT chr2 60523885 60523904 60523888 -
tttggcttaaataaattatt

SEQ ID NO: 187549 - DNA, 20 bp, Artificial Sequence
  Synthetic oligonucleotide; ATGAAT chr2 60523730 60523749 60523733 -
ttctcaagttttgcctggca

SEQ ID NO: 187550 - DNA, 20 bp, Artificial Sequence
  Synthetic oligonucleotide; TGGAGT chr2 60523712 60523731 60523715 -
caatgaatgattttgcttac

SEQ ID NO: 187551 - DNA, 20 bp, Artificial Sequence
  Synthetic oligonucleotide; ATGAAT chr2 60523543 60523562 60523546 -
atacatacgtatatgcatgt

SEQ ID NO: 187552 - DNA, 20 bp, Artificial Sequence
  Synthetic oligonucleotide; GAGAAT chr2 60523492 60523511 60523495 -
tgtgtagaaagggagagaga

SEQ ID NO: 187553 - DNA, 20 bp, Artificial Sequence
  Synthetic oligonucleotide; TAGAAT chr2 60523475 60523494 60523478 -
agagagaataggaaagtctt

SEQ ID NO: 187554 - DNA, 20 bp, Artificial Sequence
  Synthetic oligonucleotide; CTGGAT chr2 60523338 60523357 60523341 -
agtctgttgttcacatagcg

SEQ ID NO: 187555 - DNA, 20 bp, Artificial Sequence
  Synthetic oligonucleotide; GAGGAT chr2 60523331 60523350 60523334 -
tgttcacatagcgctggatt

SEQ ID NO: 187556 - DNA, 20 bp, Artificial Sequence
  Synthetic oligonucleotide; AGGAAT chr2 60523291 60523310 60523294 -
taggagcaacagtcccaagc

SEQ ID NO: 187557 - DNA, 20 bp, Artificial Sequence
  Synthetic oligonucleotide; CTGGAT chr2 60523284 60523303 60523287 -
aacagtcccaagcaggaatc

SEQ ID NO: 187558 - DNA, 20 bp, Artificial Sequence
  Synthetic oligonucleotide; CTGAGT chr2 60523254 60523273 60523257 -
ggctgtcctttgtgcctccc

SEQ ID NO: 187559 - DNA, 20 bp, Artificial Sequence
  Synthetic oligonucleotide; ATGAGT chr2 60523171 60523190 60523174 -
cccttctttacggttctgcc

SEQ ID NO: 187560 - DNA, 20 bp, Artificial Sequence
  Synthetic oligonucleotide; CAGAGT chr2 60523049 60523068 60523052 -
gtccaacaagcttttaccca

SEQ ID NO: 187561 - DNA, 20 bp, Artificial Sequence
  Synthetic oligonucleotide; GTGAAT chr2 60522811 60522830 60522814 -
gtatatccaagacatgctct

SEQ ID NO: 187562 - DNA, 20 bp, Artificial Sequence
  Synthetic oligonucleotide; ATGAAT chr2 60522807 60522826 60522810 -
atccaagacatgctctgtga

SEQ ID NO: 187563 - DNA, 20 bp, Artificial Sequence
  Synthetic oligonucleotide; ATGAAT chr2 60522759 60522778 60522762 -
aacactttcttccaagacaa

SEQ ID NO: 187564 - DNA, 20 bp, Artificial Sequence
  Synthetic oligonucleotide; GGGAGT chr2 60522737 60522756 60522740 -
gaattccagttctgaacact

SEQ ID NO: 187565 - DNA, 20 bp, Artificial Sequence
  Synthetic oligonucleotide; TCGGAT chr2 60522720 60522739 60522723 -
actgggagtgcacctgcttg

SEQ ID NO: 187566 - DNA, 20 bp, Artificial Sequence
  Synthetic oligonucleotide; GGGAGT chr2 60522693 60522712 60522696 -
tggtgatgggccacatggtg

SEQ ID NO: 187567 - DNA, 20 bp, Artificial Sequence
  Synthetic oligonucleotide; GAGGGT chr2 60522628 60522647 60522631 -
gactgtcacagagactctca

SEQ ID NO: 187568 - DNA, 20 bp, Artificial Sequence
  Synthetic oligonucleotide; GAGAGT chr2 60522536 60522555 60522539 -
tttacacaaggcccttttta

SEQ ID NO: 187569 - DNA, 20 bp, Artificial Sequence
  Synthetic oligonucleotide; AGGGAT chr2 60522480 60522499 60522483 -
cagtcttgaacctcactgga

SEQ ID NO: 187570 - DNA, 20 bp, Artificial Sequence
  Synthetic oligonucleotide; CTGAGT chr2 60522439 60522458 60522442 -
ccagatggaaagaagtattt

SEQ ID NO: 187571 - DNA, 20 bp, Artificial Sequence
  Synthetic oligonucleotide; ACGAGT chr2 60522334 60522353 60522337 -
ttgtatttaaaagaaaaaaa

SEQ ID NO: 187572 - DNA, 20 bp, Artificial Sequence
  Synthetic oligonucleotide; TGGGAT chr2 60522273 60522292 60522276 -
tgatgaaatgatatgacgtc

SEQ ID NO: 187573 - DNA, 20 bp, Artificial Sequence
  Synthetic oligonucleotide; TAGGGT chr2 60522234 60522253 60522237 -
aaaatgggctagggaggcga

SEQ ID NO: 187574 - DNA, 20 bp, Artificial Sequence
  Synthetic oligonucleotide; AAGAAT chr2 60522218 60522237 60522221 -
gcgatagggttacagaagac

SEQ ID NO: 187575 - DNA, 20 bp, Artificial Sequence
  Synthetic oligonucleotide; AAGGGT chr2 60522049 60522068 60522052 -
gtcggtgttgtttcttcacc

SEQ ID NO: 187576 - DNA, 20 bp, Artificial Sequence
  Synthetic oligonucleotide; AGGGGT chr2 60521955 60521974 60521958 -
atctgggaagttcattgtga

SEQ ID NO: 187577 - DNA, 20 bp, Artificial Sequence
  Synthetic oligonucleotide; AAGGGT chr2 60521944 60521963 60521947 -
tcattgtgaaggggtcattt

SEQ ID NO: 187578 - DNA, 20 bp, Artificial Sequence
  Synthetic oligonucleotide; CAGAGT chr2 60521870 60521889 60521873 -
gtctttttcagtgcatgagg

SEQ ID NO: 187579 - DNA, 20 bp, Artificial Sequence
  Synthetic oligonucleotide; TTGAGT chr2 60521848 60521867 60521851 -
gagtcagatgtggcgtttgc

SEQ ID NO: 187580 - DNA, 20 bp, Artificial Sequence
  Synthetic oligonucleotide; GAGGGT chr2 60521812 60521831 60521815 -
gtgcctctgtgcctcgtggt

SEQ ID NO: 187581 - DNA, 20 bp, Artificial Sequence
  Synthetic oligonucleotide; AAGGGT chr2 60521644 60521663 60521647 -
aaggggacaaagaacacgtc

SEQ ID NO: 187582 - DNA, 20 bp, Artificial Sequence
  Synthetic oligonucleotide; CAGAGT chr2 60521582 60521601 60521585 -
agatggaagatgaaagggag

SEQ ID NO: 187583 - DNA, 20 bp, Artificial Sequence
  Synthetic oligonucleotide; GGGAAT chr2 60521555 60521574 60521558 -
gcaattgcagagctggaaag

SEQ ID NO: 187584 - DNA, 20 bp, Artificial Sequence
  Synthetic oligonucleotide; CCGGGT chr2 60521361 60521380 60521364 -
acccaggcccaggcccaggc

SEQ ID NO: 187585 - DNA, 20 bp, Artificial Sequence
  Synthetic oligonucleotide; GAGAGT chr2 60521278 60521297 60521281 -
caagtgtcactcagttatct

SEQ ID NO: 187586 - DNA, 20 bp, Artificial Sequence
  Synthetic oligonucleotide; TTGGGT chr2 60521239 60521258 60521242 -
gccatctaagtgcctgatac

SEQ ID NO: 187587 - DNA, 20 bp, Artificial Sequence
  Synthetic oligonucleotide; AAGGAT chr2 60521139 60521158 60521142 -
aaatgtaacctggcaccctc

SEQ ID NO: 187588 - DNA, 20 bp, Artificial Sequence
  Synthetic oligonucleotide; GTGAGT chr2 60521129 60521148 60521132 -
tggcaccctcaaggatttgt

SEQ ID NO: 187589 - DNA, 20 bp, Artificial Sequence
  Synthetic oligonucleotide; GTGAGT chr2 60521105 60521124 60521108 -
gtgtgtgtgtgtgtgtgtgt

SEQ ID NO: 187590 - DNA, 20 bp, Artificial Sequence
  Synthetic oligonucleotide; CTGGGT chr2 60520970 60520989 60520973 -
ccagacttggttttatcatg

SEQ ID NO: 187591 - DNA, 20 bp, Artificial Sequence
  Synthetic oligonucleotide; TGGAAT chr2 60520942 60520961 60520945 -
acaaaggttgtgtacagagc

SEQ ID NO: 187592 - DNA, 20 bp, Artificial Sequence
  Synthetic oligonucleotide; ATGGGT chr2 60520833 60520852 60520836 -
ggaacccactggagaagggc

SEQ ID NO: 187593 - DNA, 20 bp, Artificial Sequence
  Synthetic oligonucleotide; ATGGGT chr2 60520798 60520817 60520801 -
ttcggttggtggctgatctg

SEQ ID NO: 187594 - DNA, 20 bp, Artificial Sequence
  Synthetic oligonucleotide; CAGAAT chr2 60520784 60520803 60520787 -
gatctgatgggtggtatagg

SEQ ID NO: 187595 - DNA, 20 bp, Artificial Sequence
  Synthetic oligonucleotide; TGGGGT chr2 60520731 60520750 60520734 -
gattccgtaggcgaccaaca

SEQ ID NO: 187596 - DNA, 20 bp, Artificial Sequence
  Synthetic oligonucleotide; GGGGGT chr2 60520725 60520744 60520728 -
gtaggcgaccaacatggggt

SEQ ID NO: 187597 - DNA, 20 bp, Artificial Sequence
  Synthetic oligonucleotide; ATGAAT chr2 60520653 60520672 60520656 -
gtgcttctgtggttgtgcct

SEQ ID NO: 187598 - DNA, 20 bp, Artificial Sequence
  Synthetic oligonucleotide; TTGAGT chr2 60520624 60520643 60520627 -
ggaccttatgcctcatagtg

SEQ ID NO: 187599 - DNA, 20 bp, Artificial Sequence
  Synthetic oligonucleotide; GAGGAT chr2 60520560 60520579 60520563 -
ttttcctcagaaaactctgt

SEQ ID NO: 187600 - DNA, 20 bp, Artificial Sequence
  Synthetic oligonucleotide; CGGAAT chr2 60520535 60520554 60520538 -
taatttctccttcttataaa

SEQ ID NO: 187601 - DNA, 20 bp, Artificial Sequence
  Synthetic oligonucleotide; GCGAAT chr2 60520529 60520548 60520532 -
ctccttcttataaacggaat

SEQ ID NO: 187602 - DNA, 20 bp, Artificial Sequence
  Synthetic oligonucleotide; AAGGGT chr2 60520493 60520512 60520496 -
atgtgtacattatcccaccg

SEQ ID NO: 187603 - DNA, 20 bp, Artificial Sequence
  Synthetic oligonucleotide; CAGAAT chr2 60520418 60520437 60520421 -
gatttcaggtcctcagactc

SEQ ID NO: 187604 - DNA, 20 bp, Artificial Sequence
  Synthetic oligonucleotide; AAGAGT chr2 60520280 60520299 60520283 -
aaaataaacaaaacctgcag

SEQ ID NO: 187605 - DNA, 20 bp, Artificial Sequence
  Synthetic oligonucleotide; AAGGGT chr2 60520267 60520286 60520270 -
cctgcagaagagtttattgt

SEQ ID NO: 187606 - DNA, 20 bp, Artificial Sequence
  Synthetic oligonucleotide; CTGAAT chr2 60520118 60520137 60520121 -
attctattatctttggcttt

SEQ ID NO: 187607 - DNA, 20 bp, Artificial Sequence
  Synthetic oligonucleotide; CCGAAT chr2 60520027 60520046 60520030 -
ggcataaatgaaaatttagg

SEQ ID NO: 187608 - DNA, 20 bp, Artificial Sequence
  Synthetic oligonucleotide; GAGGAT chr2 60520013 60520032 60520016 -
tttaggccgaattatttgaa

SEQ ID NO: 187609 - DNA, 20 bp, Artificial Sequence
  Synthetic oligonucleotide; GAGAAT chr2 60519961 60519980 60519964 -
ttctcctgccagagagaggg

SEQ ID NO: 187610 - DNA, 20 bp, Artificial Sequence
  Synthetic oligonucleotide; GAGAAT chr2 60519920 60519939 60519923 -
tttaacactccaagtctaga

SEQ ID NO: 187611 - DNA, 20 bp, Artificial Sequence
  Synthetic oligonucleotide; ATGAAT chr2 60519899 60519918 60519902 -
agaattatccaagcatagcc

SEQ ID NO: 187612 - DNA, 20 bp, Artificial Sequence
  Synthetic oligonucleotide; CTGAGT chr2 60519891 60519910 60519894 -
ccaagcatagccatgaattc

SEQ ID NO: 187613 - DNA, 20 bp, Artificial Sequence
  Synthetic oligonucleotide; ATGGAT chr2 60519884 60519903 60519887 -
tagccatgaattcctgagtt

SEQ ID NO: 187614 - DNA, 20 bp, Artificial Sequence
  Synthetic oligonucleotide; CTGAGT chr2 60519836 60519855 60519839 -
aaacgatctctttgtcttca

SEQ ID NO: 187615 - DNA, 20 bp, Artificial Sequence
  Synthetic oligonucleotide; TGGAGT chr2 60519818 60519837 60519821 -
cactgagttttctttgtcat

SEQ ID NO: 187616 - DNA, 20 bp, Artificial Sequence
  Synthetic oligonucleotide; GAGAAT chr2 60519805 60519824 60519808 -
ttgtcattggagtaatttag

SEQ ID NO: 187617 - DNA, 20 bp, Artificial Sequence
  Synthetic oligonucleotide; CAGGAT chr2 60519798 60519817 60519801 -
tggagtaatttaggagaata

SEQ ID NO: 187618 - DNA, 20 bp, Artificial Sequence
  Synthetic oligonucleotide; CTGAAT chr2 60519775 60519794 60519778 -
gatgtgactgggagcccttt

SEQ ID NO: 187619 - DNA, 20 bp, Artificial Sequence
  Synthetic oligonucleotide; GTGAAT chr2 60519749 60519768 60519752 -
aagcacagtcccatgcccac

SEQ ID NO: 187620 - DNA, 20 bp, Artificial Sequence
  Synthetic oligonucleotide; ATGAGT chr2 60519512 60519531 60519515 -
ccttattttttctctgcagc

SEQ ID NO: 187621 - DNA, 20 bp, Artificial Sequence
  Synthetic oligonucleotide; TAGAAT chr2 60519283 60519302 60519286 -
gtctctcaatatggaggtta

SEQ ID NO: 187622 - DNA, 20 bp, Artificial Sequence
  Synthetic oligonucleotide; AGGGGT chr2 60519154 60519173 60519157 -
ttgtagcgcctgtatttgaa

SEQ ID NO: 187623 - DNA, 20 bp, Artificial Sequence
  Synthetic oligonucleotide; CAGGAT chr2 60519072 60519091 60519075 -
tccctgtttcctgctggtat

SEQ ID NO: 187624 - DNA, 20 bp, Artificial Sequence
  Synthetic oligonucleotide; AAGAGT chr2 60519035 60519054 60519038 -
acttctgtccattttctctc

SEQ ID NO: 187625 - DNA, 20 bp, Artificial Sequence
  Synthetic oligonucleotide; GTGGAT chr2 60518980 60518999 60518983 -
gaaggaactctccttttgct

SEQ ID NO: 187626 - DNA, 20 bp, Artificial Sequence
  Synthetic oligonucleotide; TTGAAT chr2 60518930 60518949 60518933 -
ctgtggcttcaggacccacc

SEQ ID NO: 187627 - DNA, 20 bp, Artificial Sequence
  Synthetic oligonucleotide; CAGAAT chr2 60518922 60518941 60518925 -
tcaggacccaccttgaatga

SEQ ID NO: 187628 - DNA, 20 bp, Artificial Sequence
  Synthetic oligonucleotide; GTGGAT chr2 60518837 60518856 60518840 -
tgcccatcgagcaacaccat

SEQ ID NO: 187629 - DNA, 20 bp, Artificial Sequence
  Synthetic oligonucleotide; ATGAGT chr2 60518792 60518811 60518795 -
ctgaacttgaacagtaattg

SEQ ID NO: 187630 - DNA, 20 bp, Artificial Sequence
  Synthetic oligonucleotide; AGGAAT chr2 60518762 60518781 60518765 -
aaaatccacgcccggccccc

SEQ ID NO: 187631 - DNA, 20 bp, Artificial Sequence
  Synthetic oligonucleotide; CTGGAT chr2 60518725 60518744 60518728 -
ccccatcccacgttctgatt

SEQ ID NO: 187632 - DNA, 20 bp, Artificial Sequence
  Synthetic oligonucleotide; ATGAGT chr2 60518696 60518715 60518699 -
cttttaagtgaactctgatg

SEQ ID NO: 187633 - DNA, 20 bp, Artificial Sequence
  Synthetic oligonucleotide; CTGGGT chr2 60518658 60518677 60518661 -
ctctttctcaacgttctctg

SEQ ID NO: 187634 - DNA, 20 bp, Artificial Sequence
  Synthetic oligonucleotide; GTGAGT chr2 60518470 60518489 60518473 -
ttattcatatttaaatgcag

SEQ ID NO: 187635 - DNA, 20 bp, Artificial Sequence
  Synthetic oligonucleotide; TGGAAT chr2 60518464 60518483 60518467 -
atatttaaatgcaggtgagt

SEQ ID NO: 187636 - DNA, 20 bp, Artificial Sequence
  Synthetic oligonucleotide; CTGAAT chr2 60518438 60518457 60518441 -
gtcatcttacaggcataatc

SEQ ID NO: 187637 - DNA, 20 bp, Artificial Sequence
  Synthetic oligonucleotide; CTGAGT chr2 60518369 60518388 60518372 -
ctaagtagtagccaaattct

SEQ ID NO: 187638 - DNA, 20 bp, Artificial Sequence
  Synthetic oligonucleotide; GGGAAT chr2 60518253 60518272 60518256 -
gctcagcagatgttgacaga

SEQ ID NO: 187639 - DNA, 20 bp, Artificial Sequence
  Synthetic oligonucleotide; CAGGGT chr2 60518122 60518141 60518125 -
tattaagctttttgtagaga

SEQ ID NO: 187640 - DNA, 20 bp, Artificial Sequence
  Synthetic oligonucleotide; TTGGGT chr2 60517959 60517978 60517962 -
ttttctctcctcccctaaaa

SEQ ID NO: 187641 - DNA, 20 bp, Artificial Sequence
  Synthetic oligonucleotide; TAGAGT chr2 60517951 60517970 60517954 -
cctcccctaaaattgggttt

SEQ ID NO: 187642 - DNA, 20 bp, Artificial Sequence
  Synthetic oligonucleotide; AAGAGT chr2 60517921 60517940 60517924 -
ttcttgttcctctagtcgac

SEQ ID NO: 187643 - DNA, 20 bp, Artificial Sequence
  Synthetic oligonucleotide; AGGAAT chr2 60517910 60517929 60517913 -
ctagtcgacaagagtttctg

SEQ ID NO: 187644 - DNA, 20 bp, Artificial Sequence
  Synthetic oligonucleotide; GTGAAT chr2 60517848 60517867 60517851 -
ttccttcgtggaaagccaaa

SEQ ID NO: 187645 - DNA, 20 bp, Artificial Sequence
  Synthetic oligonucleotide; GGGAGT chr2 60517751 60517770 60517754 -
agaaaggttgaggctaagag

SEQ ID NO: 187646 - DNA, 20 bp, Artificial Sequence
  Synthetic oligonucleotide; GTGAGT chr2 60517747 60517766 60517750 -
aggttgaggctaagagggga

SEQ ID NO: 187647 - DNA, 20 bp, Artificial Sequence
  Synthetic oligonucleotide; CAGAGT chr2 60517739 60517758 60517742 -
gctaagaggggagtgagtgc

SEQ ID NO: 187648 - DNA, 20 bp, Artificial Sequence
  Synthetic oligonucleotide; TGGAAT chr2 60517566 60517585 60517569 -
acgcttttatcggtgatggc

SEQ ID NO: 187649 - DNA, 20 bp, Artificial Sequence
  Synthetic oligonucleotide; GAGAAT chr2 60517442 60517461 60517445 -
caatcacctgtgctgttgca

SEQ ID NO: 187650 - DNA, 20 bp, Artificial Sequence
  Synthetic oligonucleotide; TGGGGT chr2 60517325 60517344 60517328 -
ctcccaaagtgtggcccttc

SEQ ID NO: 187651 - DNA, 20 bp, Artificial Sequence
  Synthetic oligonucleotide; GGGAAT chr2 60517303 60517322 60517306 -
gggtttacatggtgtgccca

SEQ ID NO: 187652 - DNA, 20 bp, Artificial Sequence
  Synthetic oligonucleotide; TGGAGT chr2 60517263 60517282 60517266 -
attcagataactggagataa

SEQ ID NO: 187653 - DNA, 20 bp, Artificial Sequence
  Synthetic oligonucleotide; TGGAGT chr2 60517254 60517273 60517257 -
actggagataatggagtaga

SEQ ID NO: 187654 - DNA, 20 bp, Artificial Sequence
  Synthetic oligonucleotide; TGGGGT chr2 60517248 60517267 60517251 -
gataatggagtagatggagt

SEQ ID NO: 187655 - DNA, 20 bp, Artificial Sequence
  Synthetic oligonucleotide; CAGAAT chr2 60517202 60517221 60517205 -
ctcaggggcagatggccctc

SEQ ID NO: 187656 - DNA, 20 bp, Artificial Sequence
  Synthetic oligonucleotide; ATGGAT chr2 60516948 60516967 60516951 -
tctttcctgaacctgaactc

SEQ ID NO: 187657 - DNA, 20 bp, Artificial Sequence
  Synthetic oligonucleotide; TAGAAT chr2 60516901 60516920 60516904 -
attgtttctatgcctctctt

SEQ ID NO: 187658 - DNA, 20 bp, Artificial Sequence
  Synthetic oligonucleotide; CAGAGT chr2 60516849 60516868 60516852 -
aaacattagtctgataacta

SEQ ID NO: 187659 - DNA, 20 bp, Artificial Sequence
  Synthetic oligonucleotide; AGGAAT chr2 60516720 60516739 60516723 -
tgctcagcttggtgtccact

SEQ ID NO: 187660 - DNA, 20 bp, Artificial Sequence
  Synthetic oligonucleotide; ACGAGT chr2 60516583 60516602 60516586 -
cttagctctccactcctgac

SEQ ID NO: 187661 - DNA, 20 bp, Artificial Sequence
  Synthetic oligonucleotide; CCGGAT chr2 60516554 60516573 60516557 -
ctgacttcctctccacttcc

SEQ ID NO: 187662 - DNA, 20 bp, Artificial Sequence
  Synthetic oligonucleotide; GTGAGT chr2 60516544 60516563 60516547 -
ctccacttccccggatgacg

SEQ ID NO: 187663 - DNA, 20 bp, Artificial Sequence
  Synthetic oligonucleotide; GTGAGT chr2 60516460 60516479 60516463 -
catggaggctgagaaatata

SEQ ID NO: 187664 - DNA, 20 bp, Artificial Sequence
  Synthetic oligonucleotide; TTGAGT chr2 60516314 60516333 60516317 -
ccagcagagccaagtctttt

SEQ ID NO: 187665 - DNA, 20 bp, Artificial Sequence
  Synthetic oligonucleotide; AGGAGT chr2 60516281 60516300 60516284 -
aaaacctgtgttttaataat

SEQ ID NO: 187666 - DNA, 20 bp, Artificial Sequence
  Synthetic oligonucleotide; GTGGGT chr2 60516277 60516296 60516280 -
cctgtgttttaataatagga

SEQ ID NO: 187667 - DNA, 20 bp, Artificial Sequence
  Synthetic oligonucleotide; TGGGGT chr2 60516209 60516228 60516212 -
agcacatcttttctgtgtgc

SEQ ID NO: 187668 - DNA, 20 bp, Artificial Sequence
  Synthetic oligonucleotide; GTGAGT chr2 60516189 60516208 60516192 -
tggggtgaggagaggtgaca

SEQ ID NO: 187669 - DNA, 20 bp, Artificial Sequence
  Synthetic oligonucleotide; TAGGAT chr2 60516180 60516199 60516183 -
gagaggtgacagtgagtgtg

SEQ ID NO: 187670 - DNA, 20 bp, Artificial Sequence
  Synthetic oligonucleotide; ATGAGT chr2 60516120 60516139 60516123 -
ttagagcacccaaagctggc

SEQ ID NO: 187671 - DNA, 20 bp, Artificial Sequence
  Synthetic oligonucleotide; CAGGGT chr2 60515996 60516015 60515999 -
ggccaccgcccttcagactc

SEQ ID NO: 187672 - DNA, 20 bp, Artificial Sequence
  Synthetic oligonucleotide; GTGGGT chr2 60515968 60515987 60515971 -
ttgtattccaggacccctcc

SEQ ID NO: 187673 - DNA, 20 bp, Artificial Sequence
  Synthetic oligonucleotide; GAGAAT chr2 60515943 60515962 60515946 -
tgttggcccagcggtgccca

SEQ ID NO: 187674 - DNA, 20 bp, Artificial Sequence
  Synthetic oligonucleotide; TTGGAT chr2 60515928 60515947 60515931 -
gcccagagaatattccctta

SEQ ID NO: 187675 - DNA, 20 bp, Artificial Sequence
  Synthetic oligonucleotide; TCGAAT chr2 60515917 60515936 60515920 -
attcccttattggatctttc

SEQ ID NO: 187676 - DNA, 20 bp, Artificial Sequence
  Synthetic oligonucleotide; GTGGGT chr2 60515843 60515862 60515846 -
ccccacagtaagacctcaca

SEQ ID NO: 187677 - DNA, 20 bp, Artificial Sequence
  Synthetic oligonucleotide; TTGAGT chr2 60515838 60515857 60515841 -
cagtaagacctcacagtggg

SEQ ID NO: 187678 - DNA, 20 bp, Artificial Sequence
  Synthetic oligonucleotide; TTGGGT chr2 60515787 60515806 60515790 -
gaaatggggaagctggaaag

SEQ ID NO: 187679 - DNA, 20 bp, Artificial Sequence
  Synthetic oligonucleotide; AAGAGT chr2 60515777 60515796 60515780 -
agctggaaagttgggtgatc

SEQ ID NO: 187680 - DNA, 20 bp, Artificial Sequence
  Synthetic oligonucleotide; CTGGGT chr2 60515665 60515684 60515668 -
gctgtgtttcagagaggtag

SEQ ID NO: 187681 - DNA, 20 bp, Artificial Sequence
  Synthetic oligonucleotide; TGGGAT chr2 60515525 60515544 60515528 -
ctttggaggaggtgtcactc

SEQ ID NO: 187682 - DNA, 20 bp, Artificial Sequence
  Synthetic oligonucleotide; GGGGAT chr2 60515510 60515529 60515513 -
cactctgggattagttaaaa

SEQ ID NO: 187683 - DNA, 20 bp, Artificial Sequence
  Synthetic oligonucleotide; GTGGGT chr2 60515483 60515502 60515486 -
agtggtattcacattggctc

SEQ ID NO: 187684 - DNA, 20 bp, Artificial Sequence
  Synthetic oligonucleotide; AGGAGT chr2 60515439 60515458 60515442 -
attataaccttttggagggc

SEQ ID NO: 187685 - DNA, 20 bp, Artificial Sequence
  Synthetic oligonucleotide; TTGAAT chr2 60515323 60515342 60515326 -
gaacagagaaagaccgggct

SEQ ID NO: 187686 - DNA, 20 bp, Artificial Sequence
  Synthetic oligonucleotide; ATGGAT chr2 60515319 60515338 60515322 -
agagaaagaccgggctttga

SEQ ID NO: 187687 - DNA, 20 bp, Artificial Sequence
  Synthetic oligonucleotide; TGGGGT chr2 60515225 60515244 60515228 -
aagtgaaaaagtgaaagtgc

SEQ ID NO: 187688 - DNA, 20 bp, Artificial Sequence
  Synthetic oligonucleotide; TGGGAT chr2 60515219 60515238 60515222 -
aaaagtgaaagtgctggggt

SEQ ID NO: 187689 - DNA, 20 bp, Artificial Sequence
  Synthetic oligonucleotide; GAGGAT chr2 60515105 60515124 60515108 -
tggggaaggagcacgtgggg

SEQ ID NO: 187690 - DNA, 20 bp, Artificial Sequence
  Synthetic oligonucleotide; TGGAGT chr2 60515078 60515097 60515081 -
cttaggtctgggcaacactt

SEQ ID NO: 187691 - DNA, 20 bp, Artificial Sequence
  Synthetic oligonucleotide; GGGGGT chr2 60515070 60515089 60515073 -
tgggcaacactttggagtta

SEQ ID NO: 187692 - DNA, 20 bp, Artificial Sequence
  Synthetic oligonucleotide; CTGAGT chr2 60514990 60515009 60514993 -
tctcaccagagggagaacgg

SEQ ID NO: 187693 - DNA, 20 bp, Artificial Sequence
  Synthetic oligonucleotide; TTGGGT chr2 60514957 60514976 60514960 -
ggactggggcctgctttcct

SEQ ID NO: 187694 - DNA, 20 bp, Artificial Sequence
  Synthetic oligonucleotide; TTGGAT chr2 60514936 60514955 60514939 -
tgggtggctttgactggctc

SEQ ID NO: 187695 - DNA, 20 bp, Artificial Sequence
  Synthetic oligonucleotide; ATGAGT chr2 60514932 60514951 60514935 -
tggctttgactggctcttgg

SEQ ID NO: 187696 - DNA, 20 bp, Artificial Sequence
  Synthetic oligonucleotide; TTGAGT chr2 60514831 60514850 60514834 -
gtatgcaagacctttgatat

SEQ ID NO: 187697 - DNA, 20 bp, Artificial Sequence
  Synthetic oligonucleotide; TGGAAT chr2 60514804 60514823 60514807 -
gggaaatcctctcttatcaa

SEQ ID NO: 187698 - DNA, 20 bp, Artificial Sequence
  Synthetic oligonucleotide; TGGAGT chr2 60514664 60514683 60514667 -
atttttttttttttttgaga

SEQ ID NO: 187699 - DNA, 20 bp, Artificial Sequence
  Synthetic oligonucleotide; TGGAGT chr2 60514639 60514658 60514642 -
tctcgctctgtcgcccaggc

SEQ ID NO: 187700 - DNA, 20 bp, Artificial Sequence
  Synthetic oligonucleotide; TGGGAT chr2 60514554 60514573 60514557 -
gcctcagcctcccaagtagc

SEQ ID NO: 187701 - DNA, 20 bp, Artificial Sequence
  Synthetic oligonucleotide; TGGGGT chr2 60514487 60514506 60514490 -
tttttttttttaagtagaga

SEQ ID NO: 187702 - DNA, 20 bp, Artificial Sequence
  Synthetic oligonucleotide; ATGGGT chr2 60514322 60514341 60514325 -
agtcttgggactgcccagaa

SEQ ID NO: 187703 - DNA, 20 bp, Artificial Sequence
  Synthetic oligonucleotide; CGGGGT chr2 60514271 60514290 60514274 -
actgcgatcccaccagtggc

SEQ ID NO: 187704 - DNA, 20 bp, Artificial Sequence
  Synthetic oligonucleotide; GAGAGT chr2 60514143 60514162 60514146 -
tccagcctggaagcctctca

SEQ ID NO: 187705 - DNA, 20 bp, Artificial Sequence
  Synthetic oligonucleotide; CAGAGT chr2 60514073 60514092 60514076 -
aggagatggctggtgtggct

SEQ ID NO: 187706 - DNA, 20 bp, Artificial Sequence
  Synthetic oligonucleotide; GAGGAT chr2 60514000 60514019 60514003 -
cctcaagtctgtccttctct

SEQ ID NO: 187707 - DNA, 20 bp, Artificial Sequence
  Synthetic oligonucleotide; GAGAAT chr2 60513977 60513996 60513980 -
gatttaggactgtgaaccta

SEQ ID NO: 187708 - DNA, 20 bp, Artificial Sequence
  Synthetic oligonucleotide; TAGAAT chr2 60513956 60513975 60513959 -
agaattcaaagtagtggaac

SEQ ID NO: 187709 - DNA, 20 bp, Artificial Sequence
  Synthetic oligonucleotide; GGGAGT chr2 60513930 60513949 60513933 -
ccaggtctcgactcaatcca

SEQ ID NO: 187710 - DNA, 20 bp, Artificial Sequence
  Synthetic oligonucleotide; GAGAAT chr2 60513866 60513885 60513869 -
aggtgcctgtctggaaggca

SEQ ID NO: 187711 - DNA, 20 bp, Artificial Sequence
  Synthetic oligonucleotide; GAGAGT chr2 60513841 60513860 60513844 -
tctctggcttgttgagaaga

SEQ ID NO: 187712 - DNA, 20 bp, Artificial Sequence
  Synthetic oligonucleotide; GAGAGT chr2 60513735 60513754 60513738 -
gactcagttctattttccca

SEQ ID NO: 187713 - DNA, 20 bp, Artificial Sequence
  Synthetic oligonucleotide; AGGGAT chr2 60513685 60513704 60513688 -
ttcttttttcagtcctgatc

SEQ ID NO: 187714 - DNA, 20 bp, Artificial Sequence
  Synthetic oligonucleotide; ATGAGT chr2 60513681 60513700 60513684 -
tttttcagtcctgatcaggg

SEQ ID NO: 187715 - DNA, 20 bp, Artificial Sequence
  Synthetic oligonucleotide; TTGGGT chr2 60513667 60513686 60513670 -
tcagggatgagtccgtgctg

SEQ ID NO: 187716 - DNA, 20 bp, Artificial Sequence
  Synthetic oligonucleotide; GTGAGT chr2 60513641 60513660 60513644 -
ttattcatttactttagcgt

SEQ ID NO: 187717 - DNA, 20 bp, Artificial Sequence
  Synthetic oligonucleotide; ATGGAT chr2 60513629 60513648 60513632 -
tttagcgtgtgagtggggag

SEQ ID NO: 187718 - DNA, 20 bp, Artificial Sequence
  Synthetic oligonucleotide; AAGGGT chr2 60513605 60513624 60513608 -
attaggcagcaggcccttgg

SEQ ID NO: 187719 - DNA, 20 bp, Artificial Sequence
  Synthetic oligonucleotide; AGGAGT chr2 60513518 60513537 60513521 -
tccacaaagagagaagcagc

SEQ ID NO: 187720 - DNA, 20 bp, Artificial Sequence
  Synthetic oligonucleotide; AGGGGT chr2 60513475 60513494 60513478 -
ccaacacccacacctgccaa

SEQ ID NO: 187721 - DNA, 20 bp, Artificial Sequence
  Synthetic oligonucleotide; TGGGGT chr2 60513464 60513483 60513467 -
acctgccaaaggggttccca

SEQ ID NO: 187722 - DNA, 20 bp, Artificial Sequence
  Synthetic oligonucleotide; GGGGAT chr2 60513447 60513466 60513450 -
ccatggggtggctggcttga

SEQ ID NO: 187723 - DNA, 20 bp, Artificial Sequence
  Synthetic oligonucleotide; TGGAGT chr2 60513259 60513278 60513262 -
gccgtgtcagctgcagagac

SEQ ID NO: 187724 - DNA, 20 bp, Artificial Sequence
  Synthetic oligonucleotide; GGGGAT chr2 60513241 60513260 60513244 -
actggagtccggggcatgat

SEQ ID NO: 187725 - DNA, 20 bp, Artificial Sequence
  Synthetic oligonucleotide; GAGAGT chr2 60513219 60513238 60513222 -
ggatgtacctgaaacctagt

SEQ ID NO: 187726 - DNA, 20 bp, Artificial Sequence
  Synthetic oligonucleotide; ATGGAT chr2 60513128 60513147 60513131 -
cctcacaggctagactatcc

SEQ ID NO: 187727 - DNA, 20 bp, Artificial Sequence
  Synthetic oligonucleotide; TGGGGT chr2 60513117 60513136 60513120 -
agactatccatggatttcag

SEQ ID NO: 187728 - DNA, 20 bp, Artificial Sequence
  Synthetic oligonucleotide; GTGAGT chr2 60513110 60513129 60513113 -
ccatggatttcagtggggtg

SEQ ID NO: 187729 - DNA, 20 bp, Artificial Sequence
  Synthetic oligonucleotide; GGGGGT chr2 60513063 60513082 60513066 -
cctcaaatggtgactgttct

SEQ ID NO: 187730 - DNA, 20 bp, Artificial Sequence
  Synthetic oligonucleotide; GGGGGT chr2 60513038 60513057 60513041 -
tcctttctctgcctttctca

SEQ ID NO: 187731 - DNA, 20 bp, Artificial Sequence
  Synthetic oligonucleotide; ATGGAT chr2 60512908 60512927 60512911 -
tttctctgtgtctcctccaa

SEQ ID NO: 187732 - DNA, 20 bp, Artificial Sequence
  Synthetic oligonucleotide; GTGGGT chr2 60512897 60512916 60512900 -
ctcctccaaatggatgccat

SEQ ID NO: 187733 - DNA, 20 bp, Artificial Sequence
  Synthetic oligonucleotide; TTGGGT chr2 60512880 60512899 60512883 -
catgtgggtgggcaaagtgg

SEQ ID NO: 187734 - DNA, 20 bp, Artificial Sequence
  Synthetic oligonucleotide; GAGAAT chr2 60512785 60512804 60512788 -
tcatacttgagacactaaaa

SEQ ID NO: 187735 - DNA, 20 bp, Artificial Sequence
  Synthetic oligonucleotide; AGGGAT chr2 60512721 60512740 60512724 -
gaaccaacttcaagtaacgt

SEQ ID NO: 187736 - DNA, 20 bp, Artificial Sequence
  Synthetic oligonucleotide; TGGAGT chr2 60512667 60512686 60512670 -
ctccaattagatatgcaaaa

SEQ ID NO: 187737 - DNA, 20 bp, Artificial Sequence
  Synthetic oligonucleotide; TTGGAT chr2 60512571 60512590 60512574 -
tcactttttacaatttagca

SEQ ID NO: 187738 - DNA, 20 bp, Artificial Sequence
  Synthetic oligonucleotide; CTGGGT chr2 60512525 60512544 60512528 -
gcagagcattgtgataggtt

SEQ ID NO: 187739 - DNA, 20 bp, Artificial Sequence
  Synthetic oligonucleotide; GCGAGT chr2 60512460 60512479 60512463 -
ctgcctttctcatttgagag

SEQ ID NO: 187740 - DNA, 20 bp, Artificial Sequence
  Synthetic oligonucleotide; ATGAAT chr2 60512302 60512321 60512305 -
cagctcagccacaagcccaa

SEQ ID NO: 187741 - DNA, 20 bp, Artificial Sequence
  Synthetic oligonucleotide; CTGAGT chr2 60512292 60512311 60512295 -
acaagcccaaatgaatgatt

SEQ ID NO: 187742 - DNA, 20 bp, Artificial Sequence
  Synthetic oligonucleotide; AGGGGT chr2 60512171 60512190 60512174 -
ttcctctctgactgctctcc

SEQ ID NO: 187743 - DNA, 20 bp, Artificial Sequence
  Synthetic oligonucleotide; AGGGGT chr2 60512156 60512175 60512159 -
tctccaggggtggtgagcac

SEQ ID NO: 187744 - DNA, 20 bp, Artificial Sequence
  Synthetic oligonucleotide; TTGAAT chr2 60512103 60512122 60512106 -
tccttagccttccaagttgt

SEQ ID NO: 187745 - DNA, 20 bp, Artificial Sequence
  Synthetic oligonucleotide; TGGAGT chr2 60512059 60512078 60512062 -
ggctgcacacatattcattt

SEQ ID NO: 187746 - DNA, 20 bp, Artificial Sequence
  Synthetic oligonucleotide; GAGGAT chr2 60511944 60511963 60511947 -
ttgaacacctacattgctgg

SEQ ID NO: 187747 - DNA, 20 bp, Artificial Sequence
  Synthetic oligonucleotide; GAGAGT chr2 60511930 60511949 60511933 -
tgctgggaggataccttagt

SEQ ID NO: 187748 - DNA, 20 bp, Artificial Sequence
  Synthetic oligonucleotide; CAGAGT chr2 60511829 60511848 60511832 -
aacccttgccttcatagaaa

SEQ ID NO: 187749 - DNA, 20 bp, Artificial Sequence
  Synthetic oligonucleotide; AAGAAT chr2 60511808 60511827 60511811 -
agagtgttgaaagcttggag

SEQ ID NO: 187750 - DNA, 20 bp, Artificial Sequence
  Synthetic oligonucleotide; CTGAGT chr2 60511696 60511715 60511699 -
tggcttggaaaatacgttga

SEQ ID NO: 187751 - DNA, 20 bp, Artificial Sequence
  Synthetic oligonucleotide; TAGAGT chr2 60511625 60511644 60511628 -
tcattaatagtgcagttatg

SEQ ID NO: 187752 - DNA, 20 bp, Artificial Sequence
  Synthetic oligonucleotide; TTGAGT chr2 60511611 60511630 60511614 -
gttatgtagagtgtagctct

SEQ ID NO: 187753 - DNA, 20 bp, Artificial Sequence
  Synthetic oligonucleotide; TTGAAT chr2 60511597 60511616 60511600 -
agctctttgagtcttcagtt

SEQ ID NO: 187754 - DNA, 20 bp, Artificial Sequence
  Synthetic oligonucleotide; ATGAAT chr2 60511459 60511478 60511462 -
cattagcactttatgtctgc

SEQ ID NO: 187755 - DNA, 20 bp, Artificial Sequence
  Synthetic oligonucleotide; AAGAGT chr2 60511422 60511441 60511425 -
gtgttttattggtaacggaa

SEQ ID NO: 187756 - DNA, 20 bp, Artificial Sequence
  Synthetic oligonucleotide; TGGAGT chr2 60511417 60511436 60511420 -
ttattggtaacggaaaagag

SEQ ID NO: 187757 - DNA, 20 bp, Artificial Sequence
  Synthetic oligonucleotide; TAGAAT chr2 60511407 60511426 60511410 -
cggaaaagagtggagtcaca

SEQ ID NO: 187758 - DNA, 20 bp, Artificial Sequence
  Synthetic oligonucleotide; GCGAGT chr2 60511382 60511401 60511385 -
tgacattacttcccaaattg

SEQ ID NO: 187759 - DNA, 20 bp, Artificial Sequence
  Synthetic oligonucleotide; TAGGGT chr2 60511307 60511326 60511310 -
tcacctgtcaaattgtatgc

SEQ ID NO: 187760 - DNA, 20 bp, Artificial Sequence
  Synthetic oligonucleotide; AAGGGT chr2 60511297 60511316 60511300 -
aattgtatgctagggtggga

SEQ ID NO: 187761 - DNA, 20 bp, Artificial Sequence
  Synthetic oligonucleotide; AGGGAT chr2 60511251 60511270 60511254 -
atcccgggctctcaggtaga

SEQ ID NO: 187762 - DNA, 20 bp, Artificial Sequence
  Synthetic oligonucleotide; GAGAAT chr2 60511184 60511203 60511187 -
gtgcccctgccaggaggagg

SEQ ID NO: 187763 - DNA, 20 bp, Artificial Sequence
  Synthetic oligonucleotide; AAGAAT chr2 60511170 60511189 60511173 -
aggagggagaatctgaaagc

SEQ ID NO: 187764 - DNA, 20 bp, Artificial Sequence
  Synthetic oligonucleotide; GAGAGT chr2 60511159 60511178 60511162 -
tctgaaagcaagaatggagg

SEQ ID NO: 187765 - DNA, 20 bp, Artificial Sequence
  Synthetic oligonucleotide; TGGGAT chr2 60511136 60511155 60511139 -
agtaatgccgtggaggcagc

SEQ ID NO: 187766 - DNA, 20 bp, Artificial Sequence
  Synthetic oligonucleotide; TTGGAT chr2 60511101 60511120 60511104 -
gccagtgcccctgcacagta

SEQ ID NO: 187767 - DNA, 20 bp, Artificial Sequence
  Synthetic oligonucleotide; ATGAGT chr2 60511095 60511114 60511098 -
gcccctgcacagtattggat

SEQ ID NO: 187768 - DNA, 20 bp, Artificial Sequence
  Synthetic oligonucleotide; AAGGGT chr2 60510921 60510940 60510924 -
ggttttaactggctcctgtc

SEQ ID NO: 187769 - DNA, 20 bp, Artificial Sequence
  Synthetic oligonucleotide; GTGGGT chr2 60510860 60510879 60510863 -
taatgcaaaagctcttccct

SEQ ID NO: 187770 - DNA, 20 bp, Artificial Sequence
  Synthetic oligonucleotide; TGGAAT chr2 60510834 60510853 60510837 -
ctcagggcctgtggggaaaa

SEQ ID NO: 187771 - DNA, 20 bp, Artificial Sequence
  Synthetic oligonucleotide; TTGAGT chr2 60510756 60510775 60510759 -
acagttttatagatatggca

SEQ ID NO: 187772 - DNA, 20 bp, Artificial Sequence
  Synthetic oligonucleotide; TGGAAT chr2 60510735 60510754 60510738 -
tgagtggcctcctggcagtt

SEQ ID NO: 187773 - DNA, 20 bp, Artificial Sequence
  Synthetic oligonucleotide; GTGAAT chr2 60510570 60510589 60510573 -
gaagatgcaccaataaatat

SEQ ID NO: 187774 - DNA, 20 bp, Artificial Sequence
  Synthetic oligonucleotide; AGGGGT chr2 60510509 60510528 60510512 -
acgaaaataaggtggggaag

SEQ ID NO: 187775 - DNA, 20 bp, Artificial Sequence
  Synthetic oligonucleotide; AGGGGT chr2 60510502 60510521 60510505 -
taaggtggggaagaggggta

SEQ ID NO: 187776 - DNA, 20 bp, Artificial Sequence
  Synthetic oligonucleotide; TAGGAT chr2 60510474 60510493 60510477 -
atggtgaccaggcttttaaa

SEQ ID NO: 187777 - DNA, 20 bp, Artificial Sequence
  Synthetic oligonucleotide; GAGAAT chr2 60510411 60510430 60510414 -
gaggtgaggaagttggccat

SEQ ID NO: 187778 - DNA, 20 bp, Artificial Sequence
  Synthetic oligonucleotide; AAGAGT chr2 60510385 60510404 60510388 -
tttgagaagatggttccagg

SEQ ID NO: 187779 - DNA, 20 bp, Artificial Sequence
  Synthetic oligonucleotide; CAGAGT chr2 60510311 60510330 60510314 -
ggagcaaggggccctgaggt

SEQ ID NO: 187780 - DNA, 20 bp, Artificial Sequence
  Synthetic oligonucleotide; AAGAGT chr2 60510302 60510321 60510305 -
ggccctgaggtcagagtgga

SEQ ID NO: 187781 - DNA, 20 bp, Artificial Sequence
  Synthetic oligonucleotide; AGGGAT chr2 60510246 60510265 60510249 -
ctccttgaaggacgtagagc

SEQ ID NO: 187782 - DNA, 20 bp, Artificial Sequence
  Synthetic oligonucleotide; AGGAGT chr2 60510203 60510222 60510206 -
agggagatggaagccactgg

SEQ ID NO: 187783 - DNA, 20 bp, Artificial Sequence
  Synthetic oligonucleotide; GAGAGT chr2 60510173 60510192 60510176 -
tcatatgacttgcgcttcca

SEQ ID NO: 187784 - DNA, 20 bp, Artificial Sequence
  Synthetic oligonucleotide; CAGGGT chr2 60510077 60510096 60510080 -
caagtgatggtggcgtggac

SEQ ID NO: 187785 - DNA, 20 bp, Artificial Sequence
  Synthetic oligonucleotide; CTGGAT chr2 60510051 60510070 60510054 -
ggtggggacgtgagaagggg

SEQ ID NO: 187786 - DNA, 20 bp, Artificial Sequence
  Synthetic oligonucleotide; CAGGAT chr2 60510017 60510036 60510020 -
tacttcgaagggaaaaccgg

SEQ ID NO: 187787 - DNA, 20 bp, Artificial Sequence
  Synthetic oligonucleotide; TGGGAT chr2 60510000 60510019 60510003 -
cggcaggatttgctgactgg

SEQ ID NO: 187788 - DNA, 20 bp, Artificial Sequence
  Synthetic oligonucleotide; ATGGGT chr2 60509996 60510015 60509999 -
aggatttgctgactggtggg

SEQ ID NO: 187789 - DNA, 20 bp, Artificial Sequence
  Synthetic oligonucleotide; AGGAGT chr2 60509974 60509993 60509977 -
gggttgtatgaaaggaaggg

SEQ ID NO: 187790 - DNA, 20 bp, Artificial Sequence
  Synthetic oligonucleotide; GAGAAT chr2 60509932 60509951 60509935 -
atgtgtggctcggtgactgg

SEQ ID NO: 187791 - DNA, 20 bp, Artificial Sequence
  Synthetic oligonucleotide; TAGAAT chr2 60509927 60509946 60509930 -
tggctcggtgactgggagaa

SEQ ID NO: 187792 - DNA, 20 bp, Artificial Sequence
  Synthetic oligonucleotide; TGGGAT chr2 60509911 60509930 60509914 -
agaatagaattgctgtttat

SEQ ID NO: 187793 - DNA, 20 bp, Artificial Sequence
  Synthetic oligonucleotide; GAGGAT chr2 60509878 60509897 60509881 -
aaaggctgtggaggtgctca

SEQ ID NO: 187794 - DNA, 20 bp, Artificial Sequence
  Synthetic oligonucleotide; ATGGGT chr2 60509874 60509893 60509877 -
gctgtggaggtgctcagagg

SEQ ID NO: 187795 - DNA, 20 bp, Artificial Sequence
  Synthetic oligonucleotide; GTGGAT chr2 60509834 60509853 60509837 -
ttcaccacttcaggacttca

SEQ ID NO: 187796 - DNA, 20 bp, Artificial Sequence
  Synthetic oligonucleotide; GAGAGT chr2 60509788 60509807 60509791 -
aggaagatcgtgaggggaaa

SEQ ID NO: 187797 - DNA, 20 bp, Artificial Sequence
  Synthetic oligonucleotide; TCGAGT chr2 60509719 60509738 60509722 -
tatagctgagatgatttaag

SEQ ID NO: 187798 - DNA, 20 bp, Artificial Sequence
  Synthetic oligonucleotide; AGGAAT chr2 60509516 60509535 60509519 -
gctgttaattggtgatattt

SEQ ID NO: 187799 - DNA, 20 bp, Artificial Sequence
  Synthetic oligonucleotide; ATGGGT chr2 60509512 60509531 60509515 -
ttaattggtgatatttagga

SEQ ID NO: 187800 - DNA, 20 bp, Artificial Sequence
  Synthetic oligonucleotide; TGGAAT chr2 60509379 60509398 60509382 -
tccacggttagcccctggct

SEQ ID NO: 187801 - DNA, 20 bp, Artificial Sequence
  Synthetic oligonucleotide; GAGAGT chr2 60509270 60509289 60509273 -
agagcctttttccttgaaag

SEQ ID NO: 187802 - DNA, 20 bp, Artificial Sequence
  Synthetic oligonucleotide; TGGAAT chr2 60509230 60509249 60509233 -
tggaaaagtaaaaaaattct

SEQ ID NO: 187803 - DNA, 20 bp, Artificial Sequence
  Synthetic oligonucleotide; GGGGGT chr2 60509177 60509196 60509180 -
tgagaccaagtaaattattg

SEQ ID NO: 187804 - DNA, 20 bp, Artificial Sequence
  Synthetic oligonucleotide; CTGAAT chr2 60509158 60509177 60509161 -
ggggggtaatttgcaagggc

SEQ ID NO: 187805 - DNA, 20 bp, Artificial Sequence
  Synthetic oligonucleotide; TTGAAT chr2 60509124 60509143 60509127 -
ttgctttcttgtttctcagc

SEQ ID NO: 187806 - DNA, 20 bp, Artificial Sequence
  Synthetic oligonucleotide; CGGAGT chr2 60509094 60509113 60509097 -
agaccagaagcctgtgattt

SEQ ID NO: 187807 - DNA, 20 bp, Artificial Sequence
  Synthetic oligonucleotide; AAGAGT chr2 60509076 60509095 60509079 -
ttcggagtctgatgagaaat

SEQ ID NO: 187808 - DNA, 20 bp, Artificial Sequence
  Synthetic oligonucleotide; CAGGAT chr2 60508963 60508982 60508966 -
taggagagctccttggtcct

SEQ ID NO: 187809 - DNA, 20 bp, Artificial Sequence
  Synthetic oligonucleotide; GTGGGT chr2 60508935 60508954 60508938 -
aaaagacaccttaagtagca

SEQ ID NO: 187810 - DNA, 20 bp, Artificial Sequence
  Synthetic oligonucleotide; TGGAAT chr2 60508836 60508855 60508839 -
acatgtagaacaaactcttc

SEQ ID NO: 187811 - DNA, 20 bp, Artificial Sequence
  Synthetic oligonucleotide; AAGAGT chr2 60508802 60508821 60508805 -
acccaagggggagctcagag

SEQ ID NO: 187812 - DNA, 20 bp, Artificial Sequence
  Synthetic oligonucleotide; AGGGAT chr2 60508460 60508479 60508463 -
tgccaactaggtaatgtgct

SEQ ID NO: 187813 - DNA, 20 bp, Artificial Sequence
  Synthetic oligonucleotide; TTGGGT chr2 60508423 60508442 60508426 -
agcaactggcaaccccctgt

SEQ ID NO: 187814 - DNA, 20 bp, Artificial Sequence
  Synthetic oligonucleotide; GGGAGT chr2 60508365 60508384 60508368 -
ttgctcctgtggcccctgca

SEQ ID NO: 187815 - DNA, 20 bp, Artificial Sequence
  Synthetic oligonucleotide; TGGGGT chr2 60508353 60508372 60508356 -
cccctgcagggagtgtggcc

SEQ ID NO: 187816 - DNA, 20 bp, Artificial Sequence
  Synthetic oligonucleotide; GTGGAT chr2 60508274 60508293 60508277 -
ccctgtgtcctgaaccaagt

SEQ ID NO: 187817 - DNA, 20 bp, Artificial Sequence
  Synthetic oligonucleotide; ATGAGT chr2 60508270 60508289 60508273 -
gtgtcctgaaccaagtgtgg

SEQ ID NO: 187818 - DNA, 20 bp, Artificial Sequence
  Synthetic oligonucleotide; GGGGGT chr2 60508211 60508230 60508214 -
tgttgttgttgttgttgttt

SEQ ID NO: 187819 - DNA, 20 bp, Artificial Sequence
  Synthetic oligonucleotide; GGGGGT chr2 60508205 60508224 60508208 -
tgttgttgttgtttgggggt

SEQ ID NO: 187820 - DNA, 20 bp, Artificial Sequence
  Synthetic oligonucleotide; CAGAAT chr2 60508181 60508200 60508184 -
gtagacagtgctgggcctgt

SEQ ID NO: 187821 - DNA, 20 bp, Artificial Sequence
  Synthetic oligonucleotide; ATGAAT chr2 60508156 60508175 60508159 -
ttttaggttggttctttgag

SEQ ID NO: 187822 - DNA, 20 bp, Artificial Sequence
  Synthetic oligonucleotide; GAGAAT chr2 60508084 60508103 60508087 -
cagtaagcaccatgacatga

SEQ ID NO: 187823 - DNA, 20 bp, Artificial Sequence
  Synthetic oligonucleotide; GTGAAT chr2 60507939 60507958 60507942 -
gcgtgtgtaatatgtctttt

SEQ ID NO: 187824 - DNA, 20 bp, Artificial Sequence
  Synthetic oligonucleotide; TTGGAT chr2 60507849 60507868 60507852 -
tgtcctttgttacaggagca

SEQ ID NO: 187825 - DNA, 20 bp, Artificial Sequence
  Synthetic oligonucleotide; TGGGAT chr2 60507142 60507161 60507145 -
atccttggccctctgtctgt

SEQ ID NO: 187826 - DNA, 20 bp, Artificial Sequence
  Synthetic oligonucleotide; TAGAGT chr2 60507072 60507091 60507075 -
cagtatttcagaacaaaaat

SEQ ID NO: 187827 - DNA, 20 bp, Artificial Sequence
  Synthetic oligonucleotide; TTGAGT chr2 60507056 60507075 60507059 -
aaattagagttagttcataa

SEQ ID NO: 187828 - DNA, 20 bp, Artificial Sequence
  Synthetic oligonucleotide; CAGGGT chr2 60506946 60506965 60506949 -
tcatcacatgccttaccagt

SEQ ID NO: 187829 - DNA, 20 bp, Artificial Sequence
  Synthetic oligonucleotide; TTGGAT chr2 60506913 60506932 60506916 -
ggcacatgcttttcaatagt

SEQ ID NO: 187830 - DNA, 20 bp, Artificial Sequence
  Synthetic oligonucleotide; TTGAAT chr2 60506858 60506877 60506861 -
tagcaatttaattacattaa

SEQ ID NO: 187831 - DNA, 20 bp, Artificial Sequence
  Synthetic oligonucleotide; ATGGAT chr2 60506744 60506763 60506747 -
ttgaggttgctgacagaaaa

SEQ ID NO: 187832 - DNA, 20 bp, Artificial Sequence
  Synthetic oligonucleotide; GTGGGT chr2 60506590 60506609 60506593 -
gcagccatgcacaaaggcac

SEQ ID NO: 187833 - DNA, 20 bp, Artificial Sequence
  Synthetic oligonucleotide; GAGGGT chr2 60506476 60506495 60506479 -
gtgaggtctttgtcaccttg

SEQ ID NO: 187834 - DNA, 20 bp, Artificial Sequence
  Synthetic oligonucleotide; TCGGGT chr2 60506454 60506473 60506457 -
gggtctgaggactggtgcgc

SEQ ID NO: 187835 - DNA, 20 bp, Artificial Sequence
  Synthetic oligonucleotide; CTGGAT chr2 60506416 60506435 60506419 -
cgtcctgagccagctctgtc

SEQ ID NO: 187836 - DNA, 20 bp, Artificial Sequence
  Synthetic oligonucleotide; AGGGGT chr2 60506384 60506403 60506387 -
aacactgtctgaagttttcc

SEQ ID NO: 187837 - DNA, 20 bp, Artificial Sequence
  Synthetic oligonucleotide; CAGAAT chr2 60506369 60506388 60506372 -
tttccaggggtttgacagac

SEQ ID NO: 187838 - DNA, 20 bp, Artificial Sequence
  Synthetic oligonucleotide; GAGAAT chr2 60506276 60506295 60506279 -
gactcttcctctgatgcaga

SEQ ID NO: 187839 - DNA, 20 bp, Artificial Sequence
  Synthetic oligonucleotide; GGGAGT chr2 60506213 60506232 60506216 -
tccatgccctcagagaaagt

SEQ ID NO: 187840 - DNA, 20 bp, Artificial Sequence
  Synthetic oligonucleotide; GTGGGT chr2 60506135 60506154 60506138 -
acctctctgtgatttctatg

SEQ ID NO: 187841 - DNA, 20 bp, Artificial Sequence
  Synthetic oligonucleotide; AAGGAT chr2 60506125 60506144 60506128 -
gatttctatggtgggtgtca

SEQ ID NO: 187842 - DNA, 20 bp, Artificial Sequence
  Synthetic oligonucleotide; GGGGAT chr2 60506109 60506128 60506112 -
gtcaaaggatggctgggaaa

SEQ ID NO: 187843 - DNA, 20 bp, Artificial Sequence
  Synthetic oligonucleotide; ATGAGT chr2 60506076 60506095 60506079 -
tgtgctaacatcccttgcct

SEQ ID NO: 187844 - DNA, 20 bp, Artificial Sequence
  Synthetic oligonucleotide; TTGGGT chr2 60505989 60506008 60505992 -
cataccctgcaaagccctat

SEQ ID NO: 187845 - DNA, 20 bp, Artificial Sequence
  Synthetic oligonucleotide; CTGGGT chr2 60505913 60505932 60505916 -
aggtggggctgctattgctt

SEQ ID NO: 187846 - DNA, 20 bp, Artificial Sequence
  Synthetic oligonucleotide; CGGGAT chr2 60505902 60505921 60505905 -
ctattgcttctgggtattta

SEQ ID NO: 187847 - DNA, 20 bp, Artificial Sequence
  Synthetic oligonucleotide; AGGGAT chr2 60505866 60505885 60505869 -
ctgcccaccgttgttttggg

SEQ ID NO: 187848 - DNA, 20 bp, Artificial Sequence
  Synthetic oligonucleotide; TAGAGT chr2 60505844 60505863 60505847 -
ggatttccccctccctcagg

SEQ ID NO: 187849 - DNA, 20 bp, Artificial Sequence
  Synthetic oligonucleotide; AAGAGT chr2 60505801 60505820 60505804 -
gtaattggcccttcccattt

SEQ ID NO: 187850 - DNA, 20 bp, Artificial Sequence
  Synthetic oligonucleotide; ACGAAT chr2 60505790 60505809 60505793 -
ttcccatttaagagtcagcc

SEQ ID NO: 187851 - DNA, 20 bp, Artificial Sequence
  Synthetic oligonucleotide; CAGAGT chr2 60505732 60505751 60505735 -
aggttacccaccctccgtca

SEQ ID NO: 187852 - DNA, 20 bp, Artificial Sequence
  Synthetic oligonucleotide; GGGAAT chr2 60505696 60505715 60505699 -
gtcccctgcttccgggaggt

SEQ ID NO: 187853 - DNA, 20 bp, Artificial Sequence
  Synthetic oligonucleotide; AGGGGT chr2 60505682 60505701 60505685 -
ggaggtgggaatgcatgtgg

SEQ ID NO: 187854 - DNA, 20 bp, Artificial Sequence
  Synthetic oligonucleotide; CTGGGT chr2 60505561 60505580 60505564 -
atttgagggagagaggccca

SEQ ID NO: 187855 - DNA, 20 bp, Artificial Sequence
  Synthetic oligonucleotide; GTGGAT chr2 60505483 60505502 60505486 -
agcacccgcttgttccctgt

SEQ ID NO: 187856 - DNA, 20 bp, Artificial Sequence
  Synthetic oligonucleotide; ATGAGT chr2 60505431 60505450 60505434 -
ctcactcggctgactacctg

SEQ ID NO: 187857 - DNA, 20 bp, Artificial Sequence
  Synthetic oligonucleotide; AAGAAT chr2 60505314 60505333 60505317 -
aggcatttggaacaatctgg

SEQ ID NO: 187858 - DNA, 20 bp, Artificial Sequence
  Synthetic oligonucleotide; TGGGGT chr2 60505309 60505328 60505312 -
tttggaacaatctggaagaa

SEQ ID NO: 187859 - DNA, 20 bp, Artificial Sequence
  Synthetic oligonucleotide; CTGAGT chr2 60505277 60505296 60505280 -
ggacacccttgaagccgttt

SEQ ID NO: 187860 - DNA, 20 bp, Artificial Sequence
  Synthetic oligonucleotide; TCGAAT chr2 60505204 60505223 60505207 -
aaaaattgggcccatccctt

SEQ ID NO: 187861 - DNA, 20 bp, Artificial Sequence
  Synthetic oligonucleotide; GAGGAT chr2 60505177 60505196 60505180 -
tccattgtgctgttagtaat

SEQ ID NO: 187862 - DNA, 20 bp, Artificial Sequence
  Synthetic oligonucleotide; ACGGAT chr2 60505171 60505190 60505174 -
gtgctgttagtaatgaggat

SEQ ID NO: 187863 - DNA, 20 bp, Artificial Sequence
  Synthetic oligonucleotide; TTGAGT chr2 60505148 60505167 60505151 -
gataaaatcacatttttttt

SEQ ID NO: 187864 - DNA, 20 bp, Artificial Sequence
  Synthetic oligonucleotide; AGGAGT chr2 60505132 60505151 60505135 -
ttttttgagtaagccctttg

SEQ ID NO: 187865 - DNA, 20 bp, Artificial Sequence
  Synthetic oligonucleotide; ATGAGT chr2 60505103 60505122 60505106 -
gtcaaattgagactcacctc

SEQ ID NO: 187866 - DNA, 20 bp, Artificial Sequence
  Synthetic oligonucleotide; AAGGGT chr2 60505075 60505094 60505078 -
ccctgtgaagaggcaggaga

SEQ ID NO: 187867 - DNA, 20 bp, Artificial Sequence
  Synthetic oligonucleotide; AGGGGT chr2 60505020 60505039 60505023 -
gtctggtctcatgcagccgc

SEQ ID NO: 187868 - DNA, 20 bp, Artificial Sequence
  Synthetic oligonucleotide; AGGGAT chr2 60505009 60505028 60505012 -
tgcagccgcaggggtagact

SEQ ID NO: 187869 - DNA, 20 bp, Artificial Sequence
  Synthetic oligonucleotide; CTGGGT chr2 60504979 60504998 60504982 -
atccagaactccttatactt

SEQ ID NO: 187870 - DNA, 20 bp, Artificial Sequence
  Synthetic oligonucleotide; CAGGGT chr2 60504946 60504965 60504949 -
acgcttccacagcctgcaca

SEQ ID NO: 187871 - DNA, 20 bp, Artificial Sequence
  Synthetic oligonucleotide; AGGAAT chr2 60504830 60504849 60504833 -
tggtaggggaggcatgtgat

SEQ ID NO: 187872 - DNA, 20 bp, Artificial Sequence
  Synthetic oligonucleotide; CAGAGT chr2 60504610 60504629 60504613 -
gggcttgggggagacagaga

SEQ ID NO: 187873 - DNA, 20 bp, Artificial Sequence
  Synthetic oligonucleotide; CTGGGT chr2 60504547 60504566 60504550 -
tgccttggagattatttttt

SEQ ID NO: 187874 - DNA, 20 bp, Artificial Sequence
  Synthetic oligonucleotide; GTGGGT chr2 60504362 60504381 60504365 -
tggcctcctctgccttttca

SEQ ID NO: 187875 - DNA, 20 bp, Artificial Sequence
  Synthetic oligonucleotide; CTGGGT chr2 60504349 60504368 60504352 -
cttttcagtgggtggctggg

SEQ ID NO: 187876 - DNA, 20 bp, Artificial Sequence
  Synthetic oligonucleotide; AAGGGT chr2 60504318 60504337 60504321 -
cttgcagtgactaagaaagg

SEQ ID NO: 187877 - DNA, 20 bp, Artificial Sequence
  Synthetic oligonucleotide; TGGAAT chr2 60504240 60504259 60504243 -
gtgccggtaggcagcagttc

SEQ ID NO: 187878 - DNA, 20 bp, Artificial Sequence
  Synthetic oligonucleotide; GGGAGT chr2 60504157 60504176 60504160 -
gagcatctctgttctgtttg

SEQ ID NO: 187879 - DNA, 20 bp, Artificial Sequence
  Synthetic oligonucleotide; GTGAGT chr2 60504137 60504156 60504140 -
gggagtcctgccaggcaagt

SEQ ID NO: 187880 - DNA, 20 bp, Artificial Sequence
  Synthetic oligonucleotide; CTGAGT chr2 60504089 60504108 60504092 -
tgtcatgggggcagtgtcgg

SEQ ID NO: 187881 - DNA, 20 bp, Artificial Sequence
  Synthetic oligonucleotide; CAGAGT chr2 60504074 60504093 60504077 -
gtcggctgagtggtactctt

SEQ ID NO: 187882 - DNA, 20 bp, Artificial Sequence
  Synthetic oligonucleotide; CAGAAT chr2 60504065 60504084 60504068 -
gtggtactcttcagagttct

SEQ ID NO: 187883 - DNA, 20 bp, Artificial Sequence
  Synthetic oligonucleotide; TGGGGT chr2 60504015 60504034 60504018 -
tccagcaggcttctagcaga

SEQ ID NO: 187884 - DNA, 20 bp, Artificial Sequence
  Synthetic oligonucleotide; CTGGGT chr2 60504004 60504023 60504007 -
tctagcagatggggttttgg

SEQ ID NO: 187885 - DNA, 20 bp, Artificial Sequence
  Synthetic oligonucleotide; TAGAAT chr2 60503919 60503938 60503922 -
ttcttgctttcttttttttc

SEQ ID NO: 187886 - DNA, 20 bp, Artificial Sequence
  Synthetic oligonucleotide; ATGAAT chr2 60503875 60503894 60503878 -
ccaattttcaggaggtttag

SEQ ID NO: 187887 - DNA, 20 bp, Artificial Sequence
  Synthetic oligonucleotide; GTGAAT chr2 60503869 60503888 60503872 -
ttcaggaggtttagatgaat

SEQ ID NO: 187888 - DNA, 20 bp, Artificial Sequence
  Synthetic oligonucleotide; CAGAAT chr2 60503811 60503830 60503814 -
taaagctctgacaaaagatc

SEQ ID NO: 187889 - DNA, 20 bp, Artificial Sequence
  Synthetic oligonucleotide; TAGGGT chr2 60503784 60503803 60503787 -
ttgtcccttgcagtgggctt

SEQ ID NO: 187890 - DNA, 20 bp, Artificial Sequence
  Synthetic oligonucleotide; GCGGGT chr2 60503752 60503771 60503755 -
ttggctcctaaatcttctag

SEQ ID NO: 187891 - DNA, 20 bp, Artificial Sequence
  Synthetic oligonucleotide; GAGGGT chr2 60503694 60503713 60503697 -
tggcagctataggtttccag

SEQ ID NO: 187892 - DNA, 20 bp, Artificial Sequence
  Synthetic oligonucleotide; CTGGGT chr2 60503675 60503694 60503678 -
ggagggtgaacaagggccat

SEQ ID NO: 187893 - DNA, 20 bp, Artificial Sequence
  Synthetic oligonucleotide; CTGGGT chr2 60503647 60503666 60503650 -
ttgctgagggcttctcagtc

SEQ ID NO: 187894 - DNA, 20 bp, Artificial Sequence
  Synthetic oligonucleotide; CTGGGT chr2 60503633 60503652 60503636 -
tcagtcctgggtaggaactg

SEQ ID NO: 187895 - DNA, 20 bp, Artificial Sequence
  Synthetic oligonucleotide; ATGGAT chr2 60503518 60503537 60503521 -
tcccagatttgggcaatcta

SEQ ID NO: 187896 - DNA, 20 bp, Artificial Sequence
  Synthetic oligonucleotide; GAGGGT chr2 60503506 60503525 60503509 -
gcaatctaatggataggagg

SEQ ID NO: 187897 - DNA, 20 bp, Artificial Sequence
  Synthetic oligonucleotide; GTGAAT chr2 60503488 60503507 60503491 -
gggagggttatgccccatct

SEQ ID NO: 187898 - DNA, 20 bp, Artificial Sequence
  Synthetic oligonucleotide; GAGGGT chr2 60503472 60503491 60503475 -
atctgtgaataggtggagga

SEQ ID NO: 187899 - DNA, 20 bp, Artificial Sequence
  Synthetic oligonucleotide; TGGAAT chr2 60503397 60503416 60503400 -
ccagggacatgtctggctcc

SEQ ID NO: 187900 - DNA, 20 bp, Artificial Sequence
  Synthetic oligonucleotide; GTGGGT chr2 60503375 60503394 60503378 -
gaatgcctgtccaggctgcg

SEQ ID NO: 187901 - DNA, 20 bp, Artificial Sequence
  Synthetic oligonucleotide; ATGGGT chr2 60503366 60503385 60503369 -
tccaggctgcggtgggtggc

SEQ ID NO: 187902 - DNA, 20 bp, Artificial Sequence
  Synthetic oligonucleotide; AAGGGT chr2 60503360 60503379 60503363 -
ctgcggtgggtggcatgggt

SEQ ID NO: 187903 - DNA, 20 bp, Artificial Sequence
  Synthetic oligonucleotide; TTGGGT chr2 60503290 60503309 60503293 -
agccacctgccttttctgtc

SEQ ID NO: 187904 - DNA, 20 bp, Artificial Sequence
  Synthetic oligonucleotide; CAGAAT chr2 60503230 60503249 60503233 -
gtcagagcctcctgaggctg

SEQ ID NO: 187905 - DNA, 20 bp, Artificial Sequence
  Synthetic oligonucleotide; AAGGGT chr2 60503209 60503228 60503212 -
agaatggggctaacatgatc

SEQ ID NO: 187906 - DNA, 20 bp, Artificial Sequence
  Synthetic oligonucleotide; AGGAGT chr2 60503178 60503197 60503181 -
ggcttctccatcttgggact

SEQ ID NO: 187907 - DNA, 20 bp, Artificial Sequence
  Synthetic oligonucleotide; CAGAGT chr2 60503119 60503138 60503122 -
tcccattgccaggacaaatg

SEQ ID NO: 187908 - DNA, 20 bp, Artificial Sequence
  Synthetic oligonucleotide; GTGGAT chr2 60503115 60503134 60503118 -
attgccaggacaaatgcaga

SEQ ID NO: 187909 - DNA, 20 bp, Artificial Sequence
  Synthetic oligonucleotide; CTGGGT chr2 60503109 60503128 60503112 -
aggacaaatgcagagtggat

SEQ ID NO: 187910 - DNA, 20 bp, Artificial Sequence
  Synthetic oligonucleotide; CTGGGT chr2 60502818 60502837 60502821 -
ctcccctggtcacatagttt

SEQ ID NO: 187911 - DNA, 20 bp, Artificial Sequence
  Synthetic oligonucleotide; TAGAAT chr2 60502804 60502823 60502807 -
tagtttctgggtgacaggac

SEQ ID NO: 187912 - DNA, 20 bp, Artificial Sequence
  Synthetic oligonucleotide; TTGAGT chr2 60502778 60502797 60502781 -
ttatttcttttgatcaccaa

SEQ ID NO: 187913 - DNA, 20 bp, Artificial Sequence
  Synthetic oligonucleotide; AAGAGT chr2 60502669 60502688 60502672 -
atcaagaacattacaacaca

SEQ ID NO: 187914 - DNA, 20 bp, Artificial Sequence
  Synthetic oligonucleotide; TGGGAT chr2 60502599 60502618 60502602 -
tattttaatattagaaagca

SEQ ID NO: 187915 - DNA, 20 bp, Artificial Sequence
  Synthetic oligonucleotide; TTGGGT chr2 60502594 60502613 60502597 -
taatattagaaagcatggga

SEQ ID NO: 187916 - DNA, 20 bp, Artificial Sequence
  Synthetic oligonucleotide; TTGGAT chr2 60502575 60502594 60502578 -
attgggtgtgaacactgctt

SEQ ID NO: 187917 - DNA, 20 bp, Artificial Sequence
  Synthetic oligonucleotide; CAGAAT chr2 60502510 60502529 60502513 -
aggagcaatacctgagatcc

SEQ ID NO: 187918 - DNA, 20 bp, Artificial Sequence
  Synthetic oligonucleotide; CTGAAT chr2 60502438 60502457 60502441 -
agaaaccccctgctactctt

SEQ ID NO: 187919 - DNA, 20 bp, Artificial Sequence
  Synthetic oligonucleotide; CAGAAT chr2 60502354 60502373 60502357 -
tttatttttccgtttgctca

SEQ ID NO: 187920 - DNA, 20 bp, Artificial Sequence
  Synthetic oligonucleotide; CAGGAT chr2 60502237 60502256 60502240 -
tttcaccagcttttacaaag

SEQ ID NO: 187921 - DNA, 20 bp, Artificial Sequence
  Synthetic oligonucleotide; TTGAGT chr2 60502142 60502161 60502145 -
ttcatatcattctgatagtc

SEQ ID NO: 187922 - DNA, 20 bp, Artificial Sequence
  Synthetic oligonucleotide; TGGAGT chr2 60502074 60502093 60502077 -
ctggtggtacagcttctctg

SEQ ID NO: 187923 - DNA, 20 bp, Artificial Sequence
  Synthetic oligonucleotide; TAGAAT chr2 60501940 60501959 60501943 -
taattcactagtaaaataat

SEQ ID NO: 187924 - DNA, 20 bp, Artificial Sequence
  Synthetic oligonucleotide; TGGAAT chr2 60501922 60501941 60501925 -
attagaataaaaggctgttt

SEQ ID NO: 187925 - DNA, 20 bp, Artificial Sequence
  Synthetic oligonucleotide; CAGAAT chr2 60501885 60501904 60501888 -
gaggggctgatataacttct

SEQ ID NO: 187926 - DNA, 20 bp, Artificial Sequence
  Synthetic oligonucleotide; GTGGGT chr2 60501755 60501774 60501758 -
cagcactttgggaggccgag

SEQ ID NO: 187927 - DNA, 20 bp, Artificial Sequence
  Synthetic oligonucleotide; AAGAGT chr2 60501734 60501753 60501737 -
tgggtagatcacctgaggtc

SEQ ID NO: 187928 - DNA, 20 bp, Artificial Sequence
  Synthetic oligonucleotide; GAGAAT chr2 60501617 60501636 60501620 -
tactcaggaggctgagggag

SEQ ID NO: 187929 - DNA, 20 bp, Artificial Sequence
  Synthetic oligonucleotide; AAGAGT chr2 60501395 60501414 60501398 -
gaagtgattaatcatattac

SEQ ID NO: 187930 - DNA, 20 bp, Artificial Sequence
  Synthetic oligonucleotide; GGGAAT chr2 60501287 60501306 60501290 -
ctgtgagctccttgagggca

SEQ ID NO: 187931 - DNA, 20 bp, Artificial Sequence
  Synthetic oligonucleotide; ATGAAT chr2 60501231 60501250 60501234 -
gcactacaggtttggaccaa

SEQ ID NO: 187932 - DNA, 20 bp, Artificial Sequence
  Synthetic oligonucleotide; TTGAAT chr2 60501211 60501230 60501214 -
atgaattaaattggctgcca

SEQ ID NO: 187933 - DNA, 20 bp, Artificial Sequence
  Synthetic oligonucleotide; CAGAAT chr2 60501200 60501219 60501203 -
tggctgccattgaatcaaag

SEQ ID NO: 187934 - DNA, 20 bp, Artificial Sequence
  Synthetic oligonucleotide; TTGGAT chr2 60501152 60501171 60501155 -
taatataaataagtgcaaaa

SEQ ID NO: 187935 - DNA, 20 bp, Artificial Sequence
  Synthetic oligonucleotide; CTGAGT chr2 60501054 60501073 60501057 -
tcctgtggagacctctgttg

SEQ ID NO: 187936 - DNA, 20 bp, Artificial Sequence
  Synthetic oligonucleotide; GTGAGT chr2 60501050 60501069 60501053 -
gtggagacctctgttgctga

SEQ ID NO: 187937 - DNA, 20 bp, Artificial Sequence
  Synthetic oligonucleotide; CAGGGT chr2 60501019 60501038 60501022 -
atgaggtcggctgagcagtt

SEQ ID NO: 187938 - DNA, 20 bp, Artificial Sequence
  Synthetic oligonucleotide; GAGGAT chr2 60500996 60501015 60500999 -
ggttctcccattttacagag

SEQ ID NO: 187939 - DNA, 20 bp, Artificial Sequence
  Synthetic oligonucleotide; AAGGAT chr2 60500798 60500817 60500801 -
caggaaattggtggtagatg

SEQ ID NO: 187940 - DNA, 20 bp, Artificial Sequence
  Synthetic oligonucleotide; CTGAGT chr2 60500766 60500785 60500769 -
catctgtctaacttgggagc

SEQ ID NO: 187941 - DNA, 20 bp, Artificial Sequence
  Synthetic oligonucleotide; GTGAGT chr2 60500714 60500733 60500717 -
tgaagtgaggtgccccgact

SEQ ID NO: 187942 - DNA, 20 bp, Artificial Sequence
  Synthetic oligonucleotide; GAGGGT chr2 60500649 60500668 60500652 -
gtcttataccttaactggtg

SEQ ID NO: 187943 - DNA, 20 bp, Artificial Sequence
  Synthetic oligonucleotide; AGGAGT chr2 60500596 60500615 60500599 -
tagctctgaaccctgtcctg

SEQ ID NO: 187944 - DNA, 20 bp, Artificial Sequence
  Synthetic oligonucleotide; TGGGGT chr2 60500581 60500600 60500584 -
tcctgaggagttgggaagtg

SEQ ID NO: 187945 - DNA, 20 bp, Artificial Sequence
  Synthetic oligonucleotide; TTGGGT chr2 60500492 60500511 60500495 -
tctccttccttccctggctc

SEQ ID NO: 187946 - DNA, 20 bp, Artificial Sequence
  Synthetic oligonucleotide; TGGGAT chr2 60500457 60500476 60500460 -
gctctgatgtaagttcctgc

SEQ ID NO: 187947 - DNA, 20 bp, Artificial Sequence
  Synthetic oligonucleotide; AAGAGT chr2 60500015 60500034 60500018 -
acaggagacaaacaccagct

SEQ ID NO: 187948 - DNA, 20 bp, Artificial Sequence
  Synthetic oligonucleotide; TGGGGT chr2 60499995 60500014 60499998 -
aagagtaaacagcctggcag

SEQ ID NO: 187949 - DNA, 20 bp, Artificial Sequence
  Synthetic oligonucleotide; GTGAGT chr2 60499991 60500010 60499994 -
gtaaacagcctggcagtggg

SEQ ID NO: 187950 - DNA, 20 bp, Artificial Sequence
  Synthetic oligonucleotide; CCGAAT chr2 60499920 60499939 60499923 -
caggtcggtggctgctctct

SEQ ID NO: 187951 - DNA, 20 bp, Artificial Sequence
  Synthetic oligonucleotide; ATGGAT chr2 60499851 60499870 60499854 -
gggcttgaggtctggtgctt

SEQ ID NO: 187952 - DNA, 20 bp, Artificial Sequence
  Synthetic oligonucleotide; CAGAGT chr2 60499822 60499841 60499825 -
gaggaagagaagacagatgg

SEQ ID NO: 187953 - DNA, 20 bp, Artificial Sequence
  Synthetic oligonucleotide; TGGGGT chr2 60499651 60499670 60499654 -
gggcctcactgacacctgca

SEQ ID NO: 187954 - DNA, 20 bp, Artificial Sequence
  Synthetic oligonucleotide; AGGGGT chr2 60499630 60499649 60499633 -
ggggttggtggggaggtatg

SEQ ID NO: 187955 - DNA, 20 bp, Artificial Sequence
  Synthetic oligonucleotide; AGGGGT chr2 60499621 60499640 60499624 -
ggggaggtatgaggggttgg

SEQ ID NO: 187956 - DNA, 20 bp, Artificial Sequence
  Synthetic oligonucleotide; ATGAGT chr2 60499531 60499550 60499534 -
gactctaaagtcagctacac

SEQ ID NO: 187957 - DNA, 20 bp, Artificial Sequence
  Synthetic oligonucleotide; AGGAGT chr2 60499406 60499425 60499409 -
tgggaagaaatatcacttag

SEQ ID NO: 187958 - DNA, 20 bp, Artificial Sequence
  Synthetic oligonucleotide; CAGAAT chr2 60499398 60499417 60499401 -
aatatcacttagaggagtta

SEQ ID NO: 187959 - DNA, 20 bp, Artificial Sequence
  Synthetic oligonucleotide; AGGAGT chr2 60499378 60499397 60499381 -
cagaatgtgcaacctttccc

SEQ ID NO: 187960 - DNA, 20 bp, Artificial Sequence
  Synthetic oligonucleotide; AGGAAT chr2 60499361 60499380 60499364 -
cccaggagtattgctcctga

SEQ ID NO: 187961 - DNA, 20 bp, Artificial Sequence
  Synthetic oligonucleotide; AAGGGT chr2 60499310 60499329 60499313 -
cctccagcactgtggcccag

SEQ ID NO: 187962 - DNA, 20 bp, Artificial Sequence
  Synthetic oligonucleotide; GGGAGT chr2 60499267 60499286 60499270 -
tcacacccctgcagctctgt

SEQ ID NO: 187963 - DNA, 20 bp, Artificial Sequence
  Synthetic oligonucleotide; CTGAAT chr2 60499125 60499144 60499128 -
gataatggcagcccagaaac

SEQ ID NO: 187964 - DNA, 20 bp, Artificial Sequence
  Synthetic oligonucleotide; TAGGGT chr2 60499103 60499122 60499106 -
gaatactggggaacacattg

SEQ ID NO: 187965 - DNA, 20 bp, Artificial Sequence
  Synthetic oligonucleotide; TTGGAT chr2 60499044 60499063 60499047 -
tagctgtagcattcttccct

SEQ ID NO: 187966 - DNA, 20 bp, Artificial Sequence
  Synthetic oligonucleotide; CAGAAT chr2 60499025 60499044 60499028 -
tttggatgcctgtgtgggga

SEQ ID NO: 187967 - DNA, 20 bp, Artificial Sequence
  Synthetic oligonucleotide; TGGAAT chr2 60499016 60499035 60499019 -
ctgtgtggggacagaatcag

SEQ ID NO: 187968 - DNA, 20 bp, Artificial Sequence
  Synthetic oligonucleotide; CTGGAT chr2 60498912 60498931 60498915 -
ctattagacaaacgtagttt

SEQ ID NO: 187969 - DNA, 20 bp, Artificial Sequence
  Synthetic oligonucleotide; ATGAGT chr2 60498908 60498927 60498911 -
tagacaaacgtagtttctgg

SEQ ID NO: 187970 - DNA, 20 bp, Artificial Sequence
  Synthetic oligonucleotide; CTGAGT chr2 60498891 60498910 60498894 -
tggatgagttggacagtcat

SEQ ID NO: 187971 - DNA, 20 bp, Artificial Sequence
  Synthetic oligonucleotide; CTGGGT chr2 60498766 60498785 60498769 -
tcagagaactggcagtctgg

SEQ ID NO: 187972 - DNA, 20 bp, Artificial Sequence
  Synthetic oligonucleotide; GTGAGT chr2 60498673 60498692 60498676 -
cttctctttactgatcttat

SEQ ID NO: 187973 - DNA, 20 bp, Artificial Sequence
  Synthetic oligonucleotide; AGGGGT chr2 60498661 60498680 60498664 -
gatcttatgtgagtaggtag

SEQ ID NO: 187974 - DNA, 20 bp, Artificial Sequence
  Synthetic oligonucleotide; ATGAAT chr2 60498563 60498582 60498566 -
gtgccagaggtggctaaata

SEQ ID NO: 187975 - DNA, 20 bp, Artificial Sequence
  Synthetic oligonucleotide; GTGGGT chr2 60498531 60498550 60498534 -
ggccaattctaggaagggaa

SEQ ID NO: 187976 - DNA, 20 bp, Artificial Sequence
  Synthetic oligonucleotide; CAGGAT chr2 60498497 60498516 60498500 -
gcccattgccttcctggtac

SEQ ID NO: 187977 - DNA, 20 bp, Artificial Sequence
  Synthetic oligonucleotide; CTGGGT chr2 60498408 60498427 60498411 -
acccctctgtccagcccagc

SEQ ID NO: 187978 - DNA, 20 bp, Artificial Sequence
  Synthetic oligonucleotide; AGGGGT chr2 60498372 60498391 60498375 -
tgtgcttggtcggcactgat

SEQ ID NO: 187979 - DNA, 20 bp, Artificial Sequence
  Synthetic oligonucleotide; GGGAGT chr2 60498359 60498378 60498362 -
cactgataggggtcgcggta

SEQ ID NO: 187980 - DNA, 20 bp, Artificial Sequence
  Synthetic oligonucleotide; CTGGGT chr2 60498212 60498231 60498215 -
cacttctgtgcccagggctg

SEQ ID NO: 187981 - DNA, 20 bp, Artificial Sequence
  Synthetic oligonucleotide; TGGGGT chr2 60498160 60498179 60498163 -
acatagaggcccttcctgct

SEQ ID NO: 187982 - DNA, 20 bp, Artificial Sequence
  Synthetic oligonucleotide; AAGAGT chr2 60498091 60498110 60498094 -
tgactcaccccagccctgct

SEQ ID NO: 187983 - DNA, 20 bp, Artificial Sequence
  Synthetic oligonucleotide; GAGGGT chr2 60498051 60498070 60498054 -
aagagaagacccctgctctt

SEQ ID NO: 187984 - DNA, 20 bp, Artificial Sequence
  Synthetic oligonucleotide; GTGGGT chr2 60498038 60498057 60498041 -
tgctcttgagggtctgccag

SEQ ID NO: 187985 - DNA, 20 bp, Artificial Sequence
  Synthetic oligonucleotide; TTGGAT chr2 60498004 60498023 60498007 -
tccccacctccatgggcctc

SEQ ID NO: 187986 - DNA, 20 bp, Artificial Sequence
  Synthetic oligonucleotide; TGGGGT chr2 60497961 60497980 60497964 -
ctgcaacaccctgaccttta

SEQ ID NO: 187987 - DNA, 20 bp, Artificial Sequence
  Synthetic oligonucleotide; GTGGGT chr2 60497935 60497954 60497938 -
catcctcggccaatgaagcg

SEQ ID NO: 187988 - DNA, 20 bp, Artificial Sequence
  Synthetic oligonucleotide; CAGGAT chr2 60497856 60497875 60497859 -
gtttcatttaggacaatgtg

SEQ ID NO: 187989 - DNA, 20 bp, Artificial Sequence
  Synthetic oligonucleotide; CTGGAT chr2 60497831 60497850 60497834 -
tccttttgatcatttctcta

SEQ ID NO: 187990 - DNA, 20 bp, Artificial Sequence
  Synthetic oligonucleotide; CTGAGT chr2 60497790 60497809 60497793 -
aaatgagacaaaagaggcca

SEQ ID NO: 187991 - DNA, 20 bp, Artificial Sequence
  Synthetic oligonucleotide; AAGAGT chr2 60497734 60497753 60497737 -
gtgatagttcagagaaagag

SEQ ID NO: 187992 - DNA, 20 bp, Artificial Sequence
  Synthetic oligonucleotide; AAGGAT chr2 60497693 60497712 60497696 -
aaggccttccaaaaaaagta

SEQ ID NO: 187993 - DNA, 20 bp, Artificial Sequence
  Synthetic oligonucleotide; TAGGAT chr2 60497597 60497616 60497600 -
ggtcattatcatcaccatta

SEQ ID NO: 187994 - DNA, 20 bp, Artificial Sequence
  Synthetic oligonucleotide; TTGAGT chr2 60497555 60497574 60497558 -
tagtgactggtaagagccga

SEQ ID NO: 187995 - DNA, 20 bp, Artificial Sequence
  Synthetic oligonucleotide; ATGAAT chr2 60497521 60497540 60497524 -
gattcctgatgttaggggcc

SEQ ID NO: 187996 - DNA, 20 bp, Artificial Sequence
  Synthetic oligonucleotide; TGGAAT chr2 60497506 60497525 60497509 -
gggccatgaatctgtctacc

SEQ ID NO: 187997 - DNA, 20 bp, Artificial Sequence
  Synthetic oligonucleotide; AGGGAT chr2 60497410 60497429 60497413 -
taacctgagggctagtttct

SEQ ID NO: 187998 - DNA, 20 bp, Artificial Sequence
  Synthetic oligonucleotide; TTGAAT chr2 60497375 60497394 60497378 -
taaagacagttcatatatgc

SEQ ID NO: 187999 - DNA, 20 bp, Artificial Sequence
  Synthetic oligonucleotide; AAGGAT chr2 60497274 60497293 60497277 -
attttcccccctctttacaa

SEQ ID NO: 188000 - DNA, 20 bp, Artificial Sequence
  Synthetic oligonucleotide; TGGAAT chr2 60497247 60497266 60497250 -
cacagtggtattcctttcaa

SEQ ID NO: 188001 - DNA, 20 bp, Artificial Sequence
  Synthetic oligonucleotide; GGGGAT chr2 60497132 60497151 60497135 -
ctagctctagctctagctta

SEQ ID NO: 188002 - DNA, 20 bp, Artificial Sequence
  Synthetic oligonucleotide; GGGAAT chr2 60497116 60497135 60497119 -
cttaggggatgctagctaaa

SEQ ID NO: 188003 - DNA, 20 bp, Artificial Sequence
  Synthetic oligonucleotide; TAGAAT chr2 60497110 60497129 60497113 -
ggatgctagctaaagggaat

SEQ ID NO: 188004 - DNA, 20 bp, Artificial Sequence
  Synthetic oligonucleotide; AGGAGT chr2 60497051 60497070 60497054 -
tgtccactcaacactggggg

SEQ ID NO: 188005 - DNA, 20 bp, Artificial Sequence
  Synthetic oligonucleotide; TGGAAT chr2 60497004 60497023 60497007 -
gtgagagcttatagtccctt

SEQ ID NO: 188006 - DNA, 20 bp, Artificial Sequence
  Synthetic oligonucleotide; ATGGGT chr2 60496914 60496933 60496917 -
ttatgactgtccatggggaa

SEQ ID NO: 188007 - DNA, 20 bp, Artificial Sequence
  Synthetic oligonucleotide; AGGGGT chr2 60496831 60496850 60496834 -
cagtgagggagatttgagga

SEQ ID NO: 188008 - DNA, 20 bp, Artificial Sequence
  Synthetic oligonucleotide; TAGAGT chr2 60496759 60496778 60496762 -
agagcactcacagtggaacc

SEQ ID NO: 188009 - DNA, 20 bp, Artificial Sequence
  Synthetic oligonucleotide; GAGGGT chr2 60496636 60496655 60496639 -
agagaaagtcggtgaggaga

SEQ ID NO: 188010 - DNA, 20 bp, Artificial Sequence
  Synthetic oligonucleotide; AGGGGT chr2 60496589 60496608 60496592 -
actcaccaggctcttccaga

SEQ ID NO: 188011 - DNA, 20 bp, Artificial Sequence
  Synthetic oligonucleotide; TGGGAT chr2 60496316 60496335 60496319 -
ttgcccctcagtaacaccac

SEQ ID NO: 188012 - DNA, 20 bp, Artificial Sequence
  Synthetic oligonucleotide; TGGGAT chr2 60496167 60496186 60496170 -
ctttcccggttctggttttc

SEQ ID NO: 188013 - DNA, 20 bp, Artificial Sequence
  Synthetic oligonucleotide; GAGGGT chr2 60496048 60496067 60496051 -
tcaattgacttttcacatat

SEQ ID NO: 188014 - DNA, 20 bp, Artificial Sequence
  Synthetic oligonucleotide; CTGGAT chr2 60496037 60496056 60496040 -
ttcacatatgagggtgacct

SEQ ID NO: 188015 - DNA, 20 bp, Artificial Sequence
  Synthetic oligonucleotide; AAGAAT chr2 60495959 60495978 60495962 -
aggtgttttaaaaaatagct

SEQ ID NO: 188016 - DNA, 20 bp, Artificial Sequence
  Synthetic oligonucleotide; TGGAAT chr2 60495894 60495913 60495897 -
tgacagcaccatttagagcc

SEQ ID NO: 188017 - DNA, 20 bp, Artificial Sequence
  Synthetic oligonucleotide; AAGGGT chr2 60495839 60495858 60495842 -
ccccaggctcccatggtggc

SEQ ID NO: 188018 - DNA, 20 bp, Artificial Sequence
  Synthetic oligonucleotide; AGGGGT chr2 60495819 60495838 60495822 -
aagggtttttggttggggga

SEQ ID NO: 188019 - DNA, 20 bp, Artificial Sequence
  Synthetic oligonucleotide; TTGAAT chr2 60495812 60495831 60495815 -
tttggttgggggaaggggta

SEQ ID NO: 188020 - DNA, 20 bp, Artificial Sequence
  Synthetic oligonucleotide; AAGAAT chr2 60495786 60495805 60495789 -
tgcctgtctttgagcaggaa

SEQ ID NO: 188021 - DNA, 20 bp, Artificial Sequence
  Synthetic oligonucleotide; GAGAAT chr2 60495730 60495749 60495733 -
gtgctgattgagggcccatt

SEQ ID NO: 188022 - DNA, 20 bp, Artificial Sequence
  Synthetic oligonucleotide; AGGGAT chr2 60495686 60495705 60495689 -
gctccaaactctcaaaccac

SEQ ID NO: 188023 - DNA, 20 bp, Artificial Sequence
  Synthetic oligonucleotide; GAGAAT chr2 60495626 60495645 60495629 -
tgtaagcatcacaacaggca

SEQ ID NO: 188024 - DNA, 20 bp, Artificial Sequence
  Synthetic oligonucleotide; GGGGGT chr2 60495557 60495576 60495560 -
gcaaaccagactagtttata

SEQ ID NO: 188025 - DNA, 20 bp, Artificial Sequence
  Synthetic oligonucleotide; TTGGGT chr2 60495527 60495546 60495530 -
ctctgaggtactgatggacc

SEQ ID NO: 188026 - DNA, 20 bp, Artificial Sequence
  Synthetic oligonucleotide; GGGAGT chr2 60495483 60495502 60495486 -
aaggcagctagacaggactt

SEQ ID NO: 188027 - DNA, 20 bp, Artificial Sequence
  Synthetic oligonucleotide; CAGGGT chr2 60495321 60495340 60495324 -
tactcttagacataacacac

SEQ ID NO: 188028 - DNA, 20 bp, Artificial Sequence
  Synthetic oligonucleotide; AAGGGT chr2 60495254 60495273 60495257 -
cttttatcacaggctccagg

SEQ ID NO: 188029 - DNA, 20 bp, Artificial Sequence
  Synthetic oligonucleotide; TAGGGT chr2 60495236 60495255 60495239 -
ggaagggtttggcctctgat

SEQ ID NO: 188030 - DNA, 20 bp, Artificial Sequence
  Synthetic oligonucleotide; GTGGGT chr2 60495224 60495243 60495227 -
cctctgattagggtgggggc

SEQ ID NO: 188031 - DNA, 20 bp, Artificial Sequence
  Synthetic oligonucleotide; TGGGGT chr2 60495219 60495238 60495222 -
gattagggtgggggcgtggg

SEQ ID NO: 188032 - DNA, 20 bp, Artificial Sequence
  Synthetic oligonucleotide; GAGAAT chr2 60495136 60495155 60495139 -
ggaaggctctcttggtgatg

SEQ ID NO: 188033 - DNA, 20 bp, Artificial Sequence
  Synthetic oligonucleotide; TTGGAT chr2 60495131 60495150 60495134 -
gctctcttggtgatggagaa

SEQ ID NO: 188034 - DNA, 20 bp, Artificial Sequence
  Synthetic oligonucleotide; GGGAAT chr2 60495112 60495131 60495115 -
attggattttatttctcaat

SEQ ID NO: 188035 - DNA, 20 bp, Artificial Sequence
  Synthetic oligonucleotide; TAGGAT chr2 60494944 60494963 60494947 -
tcaggtaccagctactgtgt

SEQ ID NO: 188036 - DNA, 20 bp, Artificial Sequence
  Synthetic oligonucleotide; AGGAAT chr2 60494852 60494871 60494855 -
cttttcttctgacccaaact

SEQ ID NO: 188037 - DNA, 20 bp, Artificial Sequence
  Synthetic oligonucleotide; ACGGAT chr2 60494670 60494689 60494673 -
actattattattcctatttt

SEQ ID NO: 188038 - DNA, 20 bp, Artificial Sequence
  Synthetic oligonucleotide; ATGAGT chr2 60494666 60494685 60494669 -
ttattattcctattttacgg

SEQ ID NO: 188039 - DNA, 20 bp, Artificial Sequence
  Synthetic oligonucleotide; AGGAAT chr2 60494611 60494630 60494614 -
acatttggtgataaatcatt

SEQ ID NO: 188040 - DNA, 20 bp, Artificial Sequence
  Synthetic oligonucleotide; AGGAGT chr2 60494600 60494619 60494603 -
taaatcattaggaatgagct

SEQ ID NO: 188041 - DNA, 20 bp, Artificial Sequence
  Synthetic oligonucleotide; TGGAAT chr2 60494527 60494546 60494530 -
ccaattggagattagggaga

SEQ ID NO: 188042 - DNA, 20 bp, Artificial Sequence
  Synthetic oligonucleotide; TAGGGT chr2 60494410 60494429 60494413 -
gcataagatttataagacat

SEQ ID NO: 188043 - DNA, 20 bp, Artificial Sequence
  Synthetic oligonucleotide; CAGAGT chr2 60494352 60494371 60494355 -
acagaggggcaacccaggtc

SEQ ID NO: 188044 - DNA, 20 bp, Artificial Sequence
  Synthetic oligonucleotide; AAGGAT chr2 60494196 60494215 60494199 -
ttgcttagcctgtgtagctc

SEQ ID NO: 188045 - DNA, 20 bp, Artificial Sequence
  Synthetic oligonucleotide; AAGAAT chr2 60494170 60494189 60494173 -
gtatttattgccctaggcgt

SEQ ID NO: 188046 - DNA, 20 bp, Artificial Sequence
  Synthetic oligonucleotide; AGGGGT chr2 60493922 60493941 60493925 -
ctggaggccctgtctccccc

SEQ ID NO: 188047 - DNA, 20 bp, Artificial Sequence
  Synthetic oligonucleotide; GAGGAT chr2 60493862 60493881 60493865 -
cctgccatggccaagctgat

SEQ ID NO: 188048 - DNA, 20 bp, Artificial Sequence
  Synthetic oligonucleotide; GGGAAT chr2 60493838 60493857 60493841 -
atgggggagggggaggcagg

SEQ ID NO: 188049 - DNA, 20 bp, Artificial Sequence
  Synthetic oligonucleotide; TGGAGT chr2 60493775 60493794 60493778 -
ctgggcagcagctgcctccc

SEQ ID NO: 188050 - DNA, 20 bp, Artificial Sequence
  Synthetic oligonucleotide; CAGAGT chr2 60493605 60493624 60493608 -
cacttaagttatctctgacc

SEQ ID NO: 188051 - DNA, 20 bp, Artificial Sequence
  Synthetic oligonucleotide; ATGAAT chr2 60493576 60493595 60493579 -
atttatttggcctgattcaa

SEQ ID NO: 188052 - DNA, 20 bp, Artificial Sequence
  Synthetic oligonucleotide; AAGAAT chr2 60493561 60493580 60493564 -
ttcaaatgaatgcccatttt

SEQ ID NO: 188053 - DNA, 20 bp, Artificial Sequence
  Synthetic oligonucleotide; TGGGGT chr2 60493551 60493570 60493554 -
tgcccattttaagaatgttt

SEQ ID NO: 188054 - DNA, 20 bp, Artificial Sequence
  Synthetic oligonucleotide; CGGAAT chr2 60493503 60493522 60493506 -
gtagtggagaggtttctatt

SEQ ID NO: 188055 - DNA, 20 bp, Artificial Sequence
  Synthetic oligonucleotide; TAGGAT chr2 60493498 60493517 60493501 -
ggagaggtttctattcggaa

SEQ ID NO: 188056 - DNA, 20 bp, Artificial Sequence
  Synthetic oligonucleotide; TGGGAT chr2 60493462 60493481 60493465 -
agctgagccaaacagatagc

SEQ ID NO: 188057 - DNA, 20 bp, Artificial Sequence
  Synthetic oligonucleotide; TAGGGT chr2 60493455 60493474 60493458 -
ccaaacagatagctgggata

SEQ ID NO: 188058 - DNA, 20 bp, Artificial Sequence
  Synthetic oligonucleotide; TGGAGT chr2 60493448 60493467 60493451 -
gatagctgggatatagggtt

SEQ ID NO: 188059 - DNA, 20 bp, Artificial Sequence
  Synthetic oligonucleotide; GGGAAT chr2 60493431 60493450 60493434 -
gtttggagttgaactctcca

SEQ ID NO: 188060 - DNA, 20 bp, Artificial Sequence
  Synthetic oligonucleotide; TGGGGT chr2 60493426 60493445 60493429 -
gagttgaactctccagggaa

SEQ ID NO: 188061 - DNA, 20 bp, Artificial Sequence
  Synthetic oligonucleotide; GAGGAT chr2 60493403 60493422 60493406 -
ggtgggaggggggcagcctg

SEQ ID NO: 188062 - DNA, 20 bp, Artificial Sequence
  Synthetic oligonucleotide; TTGAAT chr2 60493217 60493236 60493220 -
cccacatggcaaccaatagg

SEQ ID NO: 188063 - DNA, 20 bp, Artificial Sequence
  Synthetic oligonucleotide; ATGGAT chr2 60493213 60493232 60493216 -
catggcaaccaataggttga

SEQ ID NO: 188064 - DNA, 20 bp, Artificial Sequence
  Synthetic oligonucleotide; TGGAAT chr2 60493194 60493213 60493197 -
aatggataaacgccctatgg

SEQ ID NO: 188065 - DNA, 20 bp, Artificial Sequence
  Synthetic oligonucleotide; AAGAAT chr2 60493173 60493192 60493176 -
ggaatacaactcaacagtag

SEQ ID NO: 188066 - DNA, 20 bp, Artificial Sequence
  Synthetic oligonucleotide; AAGAGT chr2 60493165 60493184 60493168 -
actcaacagtagaagaatga

SEQ ID NO: 188067 - DNA, 20 bp, Artificial Sequence
  Synthetic oligonucleotide; ATGGAT chr2 60493144 60493163 60493147 -
agagtaacacactccacacc

SEQ ID NO: 188068 - DNA, 20 bp, Artificial Sequence
  Synthetic oligonucleotide; ATGAAT chr2 60493140 60493159 60493143 -
taacacactccacaccatgg

SEQ ID NO: 188069 - DNA, 20 bp, Artificial Sequence
  Synthetic oligonucleotide; CAGAAT chr2 60493132 60493151 60493135 -
tccacaccatggatgaatcc

SEQ ID NO: 188070 - DNA, 20 bp, Artificial Sequence
  Synthetic oligonucleotide; ATGAGT chr2 60493080 60493099 60493083 -
cacaaaagacgatatcctgt

SEQ ID NO: 188071 - DNA, 20 bp, Artificial Sequence
  Synthetic oligonucleotide; TAGAAT chr2 60493057 60493076 60493060 -
agtccatttgtaacaaattc

SEQ ID NO: 188072 - DNA, 20 bp, Artificial Sequence
  Synthetic oligonucleotide; GGGGGT chr2 60493029 60493048 60493032 -
tcaacactgtggtggtaggt

SEQ ID NO: 188073 - DNA, 20 bp, Artificial Sequence
  Synthetic oligonucleotide; AGGGGT chr2 60493007 60493026 60493010 -
gggttcagtggttagaagga

SEQ ID NO: 188074 - DNA, 20 bp, Artificial Sequence
  Synthetic oligonucleotide; GAGGGT chr2 60492999 60493018 60493002 -
tggttagaaggaaggggtca

SEQ ID NO: 188075 - DNA, 20 bp, Artificial Sequence
  Synthetic oligonucleotide; GGGGAT chr2 60492986 60493005 60492989 -
ggggtcagagggttagggaa

SEQ ID NO: 188076 - DNA, 20 bp, Artificial Sequence
  Synthetic oligonucleotide; TTGAAT chr2 60492884 60492903 60492887 -
agctgtatacaactggcaaa

SEQ ID NO: 188077 - DNA, 20 bp, Artificial Sequence
  Synthetic oligonucleotide; ATGAAT chr2 60492861 60492880 60492864 -
aatccaactgtacacttaaa

SEQ ID NO: 188078 - DNA, 20 bp, Artificial Sequence
  Synthetic oligonucleotide; TGGAGT chr2 60492789 60492808 60492792 -
caaaacaaaacacccaccac

SEQ ID NO: 188079 - DNA, 20 bp, Artificial Sequence
  Synthetic oligonucleotide; TTGGGT chr2 60492752 60492771 60492755 -
tgtctgtaacctttaactgt

SEQ ID NO: 188080 - DNA, 20 bp, Artificial Sequence
  Synthetic oligonucleotide; CAGGGT chr2 60492722 60492741 60492725 -
tcaagactctagccgtcttt

SEQ ID NO: 188081 - DNA, 20 bp, Artificial Sequence
  Synthetic oligonucleotide; GAGAAT chr2 60492690 60492709 60492693 -
aaagtacatttcagggaaat

SEQ ID NO: 188082 - DNA, 20 bp, Artificial Sequence
  Synthetic oligonucleotide; TGGGGT chr2 60492601 60492620 60492604 -
gagagggaggcccactgaga

SEQ ID NO: 188083 - DNA, 20 bp, Artificial Sequence
  Synthetic oligonucleotide; TTGGGT chr2 60492574 60492593 60492577 -
atccaccataagcagagcat

SEQ ID NO: 188084 - DNA, 20 bp, Artificial Sequence
  Synthetic oligonucleotide; ATGAGT chr2 60492557 60492576 60492560 -
catttgggtctgagaagcgc

SEQ ID NO: 188085 - DNA, 20 bp, Artificial Sequence
  Synthetic oligonucleotide; GTGAGT chr2 60492547 60492566 60492550 -
tgagaagcgcatgagtactg

SEQ ID NO: 188086 - DNA, 20 bp, Artificial Sequence
  Synthetic oligonucleotide; TAGAAT chr2 60492500 60492519 60492503 -
ggggaggaaatctgttttcc

SEQ ID NO: 188087 - DNA, 20 bp, Artificial Sequence
  Synthetic oligonucleotide; GGGAGT chr2 60492464 60492483 60492467 -
ttcaaaaagtaaaaagggga

SEQ ID NO: 188088 - DNA, 20 bp, Artificial Sequence
  Synthetic oligonucleotide; CAGGGT chr2 60492363 60492382 60492366 -
ttgtttgtttgtttttgaga

SEQ ID NO: 188089 - DNA, 20 bp, Artificial Sequence
  Synthetic oligonucleotide; TAGAGT chr2 60492338 60492357 60492341 -
tctcgctgtgttgcctaggc

SEQ ID NO: 188090 - DNA, 20 bp, Artificial Sequence
  Synthetic oligonucleotide; CTGAGT chr2 60492262 60492281 60492265 -
catcctgtcacctcagcctc

SEQ ID NO: 188091 - DNA, 20 bp, Artificial Sequence
  Synthetic oligonucleotide; TGGAGT chr2 60492207 60492226 60492210 -
cctggctaattttgtagaga

SEQ ID NO: 188092 - DNA, 20 bp, Artificial Sequence
  Synthetic oligonucleotide; TGGGAT chr2 60492128 60492147 60492131 -
gccttgacctcccaaagtgc

SEQ ID NO: 188093 - DNA, 20 bp, Artificial Sequence
  Synthetic oligonucleotide; CTGAAT chr2 60492025 60492044 60492028 -
acaatgtagcatctcctgtg

SEQ ID NO: 188094 - DNA, 20 bp, Artificial Sequence
  Synthetic oligonucleotide; GAGGGT chr2 60492008 60492027 60492011 -
gtgctgaattcctgtaaagt

SEQ ID NO: 188095 - DNA, 20 bp, Artificial Sequence
  Synthetic oligonucleotide; TTGGGT chr2 60491875 60491894 60491878 -
actgccttttctgaacctat

SEQ ID NO: 188096 - DNA, 20 bp, Artificial Sequence
  Synthetic oligonucleotide; ATGGAT chr2 60491857 60491876 60491860 -
atttgggtgctaaggactgt

SEQ ID NO: 188097 - DNA, 20 bp, Artificial Sequence
  Synthetic oligonucleotide; TTGGGT chr2 60491851 60491870 60491854 -
gtgctaaggactgtatggat

SEQ ID NO: 188098 - DNA, 20 bp, Artificial Sequence
  Synthetic oligonucleotide; TTGGGT chr2 60491811 60491830 60491814 -
acgtctgtgcctgcgtagtg

SEQ ID NO: 188099 - DNA, 20 bp, Artificial Sequence
  Synthetic oligonucleotide; CGGAGT chr2 60491779 60491798 60491782 -
tggccacttggctctcaaca

SEQ ID NO: 188100 - DNA, 20 bp, Artificial Sequence
  Synthetic oligonucleotide; TAGGGT chr2 60491764 60491783 60491767 -
caacacggagtgatgatgcc

SEQ ID NO: 188101 - DNA, 20 bp, Artificial Sequence
  Synthetic oligonucleotide; TGGAAT chr2 60491642 60491661 60491645 -
tttactcttgttgcccgggc

SEQ ID NO: 188102 - DNA, 20 bp, Artificial Sequence
  Synthetic oligonucleotide; CCGAGT chr2 60491567 60491586 60491570 -
cgatctcctgcctcagcctc

SEQ ID NO: 188103 - DNA, 20 bp, Artificial Sequence
  Synthetic oligonucleotide; CGGGGT chr2 60491503 60491522 60491506 -
ttttgtatttttagtagaga

SEQ ID NO: 188104 - DNA, 20 bp, Artificial Sequence
  Synthetic oligonucleotide; TGGGAT chr2 60491424 60491443 60491427 -
gccccggcctcccaaagtgc

SEQ ID NO: 188105 - DNA, 20 bp, Artificial Sequence
  Synthetic oligonucleotide; AAGAAT chr2 60491255 60491274 60491258 -
gctgcatttaaaacagcatt

SEQ ID NO: 188106 - DNA, 20 bp, Artificial Sequence
  Synthetic oligonucleotide; GAGGAT chr2 60491221 60491240 60491224 -
agaacttagctttttgcatt

SEQ ID NO: 188107 - DNA, 20 bp, Artificial Sequence
  Synthetic oligonucleotide; TAGAGT chr2 60491160 60491179 60491163 -
ccatggttgaaagtcagcta

SEQ ID NO: 188108 - DNA, 20 bp, Artificial Sequence
  Synthetic oligonucleotide; CAGGGT chr2 60491032 60491051 60491035 -
acttcacatttgctcttctc

SEQ ID NO: 188109 - DNA, 20 bp, Artificial Sequence
  Synthetic oligonucleotide; TGGGGT chr2 60491025 60491044 60491028 -
atttgctcttctccagggtg

SEQ ID NO: 188110 - DNA, 20 bp, Artificial Sequence
  Synthetic oligonucleotide; GAGGGT chr2 60491008 60491027 60491011 -
gtgtggggtggctgtttaaa

SEQ ID NO: 188111 - DNA, 20 bp, Artificial Sequence
  Synthetic oligonucleotide; GTGGAT chr2 60491004 60491023 60491007 -
ggggtggctgtttaaagagg

SEQ ID NO: 188112 - DNA, 20 bp, Artificial Sequence
  Synthetic oligonucleotide; GTGGGT chr2 60490903 60490922 60490906 -
atatcagaagggaaatgttt

SEQ ID NO: 188113 - DNA, 20 bp, Artificial Sequence
  Synthetic oligonucleotide; TTGAAT chr2 60490801 60490820 60490804 -
agtcatttatatgctatttg

SEQ ID NO: 188114 - DNA, 20 bp, Artificial Sequence
  Synthetic oligonucleotide; TAGAAT chr2 60490792 60490811 60490795 -
tatgctatttgttgaattcc

SEQ ID NO: 188115 - DNA, 20 bp, Artificial Sequence
  Synthetic oligonucleotide; ATGAAT chr2 60490784 60490803 60490787 -
ttgttgaattcctagaatat

SEQ ID NO: 188116 - DNA, 20 bp, Artificial Sequence
  Synthetic oligonucleotide; AAGAGT chr2 60490724 60490743 60490727 -
taatagaagcaagtaggaga

SEQ ID NO: 188117 - DNA, 20 bp, Artificial Sequence
  Synthetic oligonucleotide; GAGGGT chr2 60490667 60490686 60490670 -
tgaaattaattagaggcata

SEQ ID NO: 188118 - DNA, 20 bp, Artificial Sequence
  Synthetic oligonucleotide; ATGAGT chr2 60490637 60490656 60490640 -
cagcaatgtaaggcctagat

SEQ ID NO: 188119 - DNA, 20 bp, Artificial Sequence
  Synthetic oligonucleotide; GGGAGT chr2 60490629 60490648 60490632 -
taaggcctagatatgagtca

SEQ ID NO: 188120 - DNA, 20 bp, Artificial Sequence
  Synthetic oligonucleotide; TGGGAT chr2 60490617 60490636 60490620 -
atgagtcagggagtggtgca

SEQ ID NO: 188121 - DNA, 20 bp, Artificial Sequence
  Synthetic oligonucleotide; ATGAGT chr2 60490613 60490632 60490616 -
gtcagggagtggtgcatggg

SEQ ID NO: 188122 - DNA, 20 bp, Artificial Sequence
  Synthetic oligonucleotide; AAGGAT chr2 60490590 60490609 60490593 -
agtgttctatgaggttggag

SEQ ID NO: 188123 - DNA, 20 bp, Artificial Sequence
  Synthetic oligonucleotide; CAGGAT chr2 60490523 60490542 60490526 -
ttgaggccttgaagtatgag

SEQ ID NO: 188124 - DNA, 20 bp, Artificial Sequence
  Synthetic oligonucleotide; AGGGAT chr2 60490466 60490485 60490469 -
aggaaggaaatgagaacgga

SEQ ID NO: 188125 - DNA, 20 bp, Artificial Sequence
  Synthetic oligonucleotide; CAGAAT chr2 60490449 60490468 60490452 -
ggaagggatttttacttggg

SEQ ID NO: 188126 - DNA, 20 bp, Artificial Sequence
  Synthetic oligonucleotide; ATGGGT chr2 60490433 60490452 60490436 -
tgggcagaatattttccttg

SEQ ID NO: 188127 - DNA, 20 bp, Artificial Sequence
  Synthetic oligonucleotide; TGGAAT chr2 60490412 60490431 60490415 -
tgggtacggggaactaagac

SEQ ID NO: 188128 - DNA, 20 bp, Artificial Sequence
  Synthetic oligonucleotide; TGGAGT chr2 60490399 60490418 60490402 -
ctaagactggaatagaaaat

SEQ ID NO: 188129 - DNA, 20 bp, Artificial Sequence
  Synthetic oligonucleotide; TTGGAT chr2 60490394 60490413 60490397 -
actggaatagaaaattggag

SEQ ID NO: 188130 - DNA, 20 bp, Artificial Sequence
  Synthetic oligonucleotide; TGGAAT chr2 60490378 60490397 60490381 -
ggagttggattgtggagctc

SEQ ID NO: 188131 - DNA, 20 bp, Artificial Sequence
  Synthetic oligonucleotide; AGGAGT chr2 60490363 60490382 60490366 -
agctctggaatgatggctta

SEQ ID NO: 188132 - DNA, 20 bp, Artificial Sequence
  Synthetic oligonucleotide; GGGGAT chr2 60490288 60490307 60490291 -
aagacaaaggcagcatgcta

SEQ ID NO: 188133 - DNA, 20 bp, Artificial Sequence
  Synthetic oligonucleotide; GGGGGT chr2 60490261 60490280 60490264 -
ttaagtgaggactctgcaaa

SEQ ID NO: 188134 - DNA, 20 bp, Artificial Sequence
  Synthetic oligonucleotide; GTGGAT chr2 60490257 60490276 60490260 -
gtgaggactctgcaaagggg

SEQ ID NO: 188135 - DNA, 20 bp, Artificial Sequence
  Synthetic oligonucleotide; ATGAGT chr2 60490253 60490272 60490256 -
ggactctgcaaagggggtgg

SEQ ID NO: 188136 - DNA, 20 bp, Artificial Sequence
  Synthetic oligonucleotide; CCGAGT chr2 60490218 60490237 60490221 -
tctctgttatacccttcatg

SEQ ID NO: 188137 - DNA, 20 bp, Artificial Sequence
  Synthetic oligonucleotide; GAGGAT chr2 60490186 60490205 60490189 -
ctgttgacttatatgttcta

SEQ ID NO: 188138 - DNA, 20 bp, Artificial Sequence
  Synthetic oligonucleotide; TGGAGT chr2 60490181 60490200 60490184 -
gacttatatgttctagagga

SEQ ID NO: 188139 - DNA, 20 bp, Artificial Sequence
  Synthetic oligonucleotide; TAGGGT chr2 60490165 60490184 60490168 -
aggatggagttggttgaccg

SEQ ID NO: 188140 - DNA, 20 bp, Artificial Sequence
  Synthetic oligonucleotide; CAGAAT chr2 60490146 60490165 60490149 -
gtagggtttcctttcactag

SEQ ID NO: 188141 - DNA, 20 bp, Artificial Sequence
  Synthetic oligonucleotide; ATGGGT chr2 60490112 60490131 60490115 -
atattgtaggagcctagcac

SEQ ID NO: 188142 - DNA, 20 bp, Artificial Sequence
  Synthetic oligonucleotide; GGGAGT chr2 60490036 60490055 60490039 -
ctttgcccccattgcagatg

SEQ ID NO: 188143 - DNA, 20 bp, Artificial Sequence
  Synthetic oligonucleotide; AGGAAT chr2 60490026 60490045 60490029 -
attgcagatggggagtgggc

SEQ ID NO: 188144 - DNA, 20 bp, Artificial Sequence
  Synthetic oligonucleotide; CAGAAT chr2 60490014 60490033 60490017 -
gagtgggcaggaatgacgtt

SEQ ID NO: 188145 - DNA, 20 bp, Artificial Sequence
  Synthetic oligonucleotide; CAGGGT chr2 60489997 60490016 60490000 -
gttcagaatcaagggcccat

SEQ ID NO: 188146 - DNA, 20 bp, Artificial Sequence
  Synthetic oligonucleotide; TGGGAT chr2 60489950 60489969 60489953 -
ctcctccagtccatccatgt

SEQ ID NO: 188147 - DNA, 20 bp, Artificial Sequence
  Synthetic oligonucleotide; ATGGAT chr2 60489935 60489954 60489938 -
catgttgggatactcagggc

SEQ ID NO: 188148 - DNA, 20 bp, Artificial Sequence
  Synthetic oligonucleotide; GGGGGT chr2 60489824 60489843 60489827 -
taatagtgtcctcctgcttt

SEQ ID NO: 188149 - DNA, 20 bp, Artificial Sequence
  Synthetic oligonucleotide; TTGAGT chr2 60489800 60489819 60489803 -
gttattaagctagcctgaac

SEQ ID NO: 188150 - DNA, 20 bp, Artificial Sequence
  Synthetic oligonucleotide; TTGGAT chr2 60489786 60489805 60489789 -
ctgaacttgagtaaacattt

SEQ ID NO: 188151 - DNA, 20 bp, Artificial Sequence
  Synthetic oligonucleotide; TGGGGT chr2 60489781 60489800 60489784 -
cttgagtaaacatttttgga

SEQ ID NO: 188152 - DNA, 20 bp, Artificial Sequence
  Synthetic oligonucleotide; CAGAGT chr2 60489666 60489685 60489669 -
aagcagagatgctagtgacc

SEQ ID NO: 188153 - DNA, 20 bp, Artificial Sequence
  Synthetic oligonucleotide; TAGAAT chr2 60489635 60489654 60489638 -
agaggggaaagaacctctgt

SEQ ID NO: 188154 - DNA, 20 bp, Artificial Sequence
  Synthetic oligonucleotide; CAGAAT chr2 60489577 60489596 60489580 -
caggtgcttcctcttctact

SEQ ID NO: 188155 - DNA, 20 bp, Artificial Sequence
  Synthetic oligonucleotide; CTGGAT chr2 60489491 60489510 60489494 -
cagtgtggctgtttgtcatc

SEQ ID NO: 188156 - DNA, 20 bp, Artificial Sequence
  Synthetic oligonucleotide; CAGAGT chr2 60489363 60489382 60489366 -
ggcagaaattagttaggaag

SEQ ID NO: 188157 - DNA, 20 bp, Artificial Sequence
  Synthetic oligonucleotide; CTGGGT chr2 60489353 60489372 60489356 -
agttaggaagcagagtagca

SEQ ID NO: 188158 - DNA, 20 bp, Artificial Sequence
  Synthetic oligonucleotide; ATGAAT chr2 60489329 60489348 60489332 -
gttccaaatgcctctattgt

SEQ ID NO: 188159 - DNA, 20 bp, Artificial Sequence
  Synthetic oligonucleotide; TTGGAT chr2 60489323 60489342 60489326 -
aatgcctctattgtatgaat

SEQ ID NO: 188160 - DNA, 20 bp, Artificial Sequence
  Synthetic oligonucleotide; TGGAAT chr2 60489288 60489307 60489291 -
gcaaaatgacataaaagaaa

SEQ ID NO: 188161 - DNA, 20 bp, Artificial Sequence
  Synthetic oligonucleotide; GTGAAT chr2 60489213 60489232 60489216 -
tgttgactggctctcacagt

SEQ ID NO: 188162 - DNA, 20 bp, Artificial Sequence
  Synthetic oligonucleotide; TGGGGT chr2 60489154 60489173 60489157 -
ctctaaagcaacagtttaat

SEQ ID NO: 188163 - DNA, 20 bp, Artificial Sequence
  Synthetic oligonucleotide; TTGGGT chr2 60489068 60489087 60489071 -
tctttgaagataaatttgtt

SEQ ID NO: 188164 - DNA, 20 bp, Artificial Sequence
  Synthetic oligonucleotide; CTGGGT chr2 60489058 60489077 60489061 -
taaatttgttttgggtatgg

SEQ ID NO: 188165 - DNA, 20 bp, Artificial Sequence
  Synthetic oligonucleotide; GTGGGT chr2 60489009 60489028 60489012 -
cagcactttgggaggctgag

SEQ ID NO: 188166 - DNA, 20 bp, Artificial Sequence
  Synthetic oligonucleotide; GTGGAT chr2 60489005 60489024 60489008 -
actttgggaggctgaggtgg

SEQ ID NO: 188167 - DNA, 20 bp, Artificial Sequence
  Synthetic oligonucleotide; GGGAGT chr2 60488988 60489007 60488991 -
tgggtggatcacctaaggtc

SEQ ID NO: 188168 - DNA, 20 bp, Artificial Sequence
  Synthetic oligonucleotide; GAGAAT chr2 60488870 60488889 60488873 -
tacttgggaggctgaggcag

SEQ ID NO: 188169 - DNA, 20 bp, Artificial Sequence
  Synthetic oligonucleotide; TTGGGT chr2 60488731 60488750 60488734 -
aacaaacaaacaaaatcgtt

SEQ ID NO: 188170 - DNA, 20 bp, Artificial Sequence
  Synthetic oligonucleotide; TTGGAT chr2 60488704 60488723 60488707 -
gcagtggctttaggctgttt

SEQ ID NO: 188171 - DNA, 20 bp, Artificial Sequence
  Synthetic oligonucleotide; CCGAAT chr2 60488628 60488647 60488631 -
agcaaaactagaaagtttta

SEQ ID NO: 188172 - DNA, 20 bp, Artificial Sequence
  Synthetic oligonucleotide; CAGGGT chr2 60488561 60488580 60488564 -
caaactatttacagccataa

SEQ ID NO: 188173 - DNA, 20 bp, Artificial Sequence
  Synthetic oligonucleotide; GTGAAT chr2 60488550 60488569 60488553 -
cagccataacagggtttcca

SEQ ID NO: 188174 - DNA, 20 bp, Artificial Sequence
  Synthetic oligonucleotide; CTGAGT chr2 60488531 60488550 60488534 -
agtgaattgtataagtagca

SEQ ID NO: 188175 - DNA, 20 bp, Artificial Sequence
  Synthetic oligonucleotide; CTGGAT chr2 60488367 60488386 60488370 -
taaatgctgtcaaattgtaa

SEQ ID NO: 188176 - DNA, 20 bp, Artificial Sequence
  Synthetic oligonucleotide; CTGAAT chr2 60488274 60488293 60488277 -
cttcttccccctctcacagt

SEQ ID NO: 188177 - DNA, 20 bp, Artificial Sequence
  Synthetic oligonucleotide; CAGGAT chr2 60488131 60488150 60488134 -
gcccgtgagacaaactcttc

SEQ ID NO: 188178 - DNA, 20 bp, Artificial Sequence
  Synthetic oligonucleotide; GAGAAT chr2 60488103 60488122 60488106 -
tttaaatgtttctacataat

SEQ ID NO: 188179 - DNA, 20 bp, Artificial Sequence
  Synthetic oligonucleotide; AGGGAT chr2 60488042 60488061 60488045 -
tcaaaagtaatagcacagag

SEQ ID NO: 188180 - DNA, 20 bp, Artificial Sequence
  Synthetic oligonucleotide; TAGAGT chr2 60487971 60487990 60487974 -
tttagatgagggctccattc

SEQ ID NO: 188181 - DNA, 20 bp, Artificial Sequence
  Synthetic oligonucleotide; TGGAGT chr2 60487916 60487935 60487919 -
ggcagatgttatcagggagc

SEQ ID NO: 188182 - DNA, 20 bp, Artificial Sequence
  Synthetic oligonucleotide; TGGAGT chr2 60487910 60487929 60487913 -
tgttatcagggagctggagt

SEQ ID NO: 188183 - DNA, 20 bp, Artificial Sequence
  Synthetic oligonucleotide; TAGAAT chr2 60487778 60487797 60487781 -
ctttctgcagcttccttaga

SEQ ID NO: 188184 - DNA, 20 bp, Artificial Sequence
  Synthetic oligonucleotide; GGGAGT chr2 60487704 60487723 60487707 -
attctgctgctcataaataa

SEQ ID NO: 188185 - DNA, 20 bp, Artificial Sequence
  Synthetic oligonucleotide; GAGAAT chr2 60487649 60487668 60487652 -
aaaggctggtgtggttgcca

SEQ ID NO: 188186 - DNA, 20 bp, Artificial Sequence
  Synthetic oligonucleotide; GGGGAT chr2 60487629 60487648 60487632 -
gagaatagggctaacttaag

SEQ ID NO: 188187 - DNA, 20 bp, Artificial Sequence
  Synthetic oligonucleotide; CTGGAT chr2 60487579 60487598 60487582 -
tttttttgttttgttttgtt

SEQ ID NO: 188188 - DNA, 20 bp, Artificial Sequence
  Synthetic oligonucleotide; CTGAAT chr2 60487541 60487560 60487544 -
tcatttagttttcccttaat

SEQ ID NO: 188189 - DNA, 20 bp, Artificial Sequence
  Synthetic oligonucleotide; AAGGAT chr2 60487474 60487493 60487477 -
tattatttatagccctccag

SEQ ID NO: 188190 - DNA, 20 bp, Artificial Sequence
  Synthetic oligonucleotide; CTGAAT chr2 60487376 60487395 60487379 -
ccactacactgctccccctg

SEQ ID NO: 188191 - DNA, 20 bp, Artificial Sequence
  Synthetic oligonucleotide; TGGGGT chr2 60487339 60487358 60487342 -
actctcggtgtgtggcattg

SEQ ID NO: 188192 - DNA, 20 bp, Artificial Sequence
  Synthetic oligonucleotide; GGGAGT chr2 60487240 60487259 60487243 -
gacttgcaaaatataggtta

SEQ ID NO: 188193 - DNA, 20 bp, Artificial Sequence
  Synthetic oligonucleotide; TAGGAT chr2 60487230 60487249 60487233 -
atataggttagggagtttta

SEQ ID NO: 188194 - DNA, 20 bp, Artificial Sequence
  Synthetic oligonucleotide; ATGGGT chr2 60487163 60487182 60487166 -
tacattaactagatcattac

SEQ ID NO: 188195 - DNA, 20 bp, Artificial Sequence
  Synthetic oligonucleotide; AGGGGT chr2 60487133 60487152 60487136 -
ggttagaacttcacacactt

SEQ ID NO: 188196 - DNA, 20 bp, Artificial Sequence
  Synthetic oligonucleotide; CTGAAT chr2 60487042 60487061 60487045 -
tgtctagcgctcctaaatgc

SEQ ID NO: 188197 - DNA, 20 bp, Artificial Sequence
  Synthetic oligonucleotide; TTGAAT chr2 60486997 60487016 60487000 -
gaggggcatttgccttcgct

SEQ ID NO: 188198 - DNA, 20 bp, Artificial Sequence
  Synthetic oligonucleotide; CCGAGT chr2 60486988 60487007 60486991 -
ttgccttcgctttgaatctc

SEQ ID NO: 188199 - DNA, 20 bp, Artificial Sequence
  Synthetic oligonucleotide; TAGAAT chr2 60486968 60486987 60486971 -
ccgagtcttttttattctga

SEQ ID NO: 188200 - DNA, 20 bp, Artificial Sequence
  Synthetic oligonucleotide; CAGAGT chr2 60486854 60486873 60486857 -
ccatggccaggtttgagaga

SEQ ID NO: 188201 - DNA, 20 bp, Artificial Sequence
  Synthetic oligonucleotide; CAGGGT chr2 60486830 60486849 60486833 -
gtgattcgcagtagtcttcc

SEQ ID NO: 188202 - DNA, 20 bp, Artificial Sequence
  Synthetic oligonucleotide; TTGAGT chr2 60486823 60486842 60486826 -
gcagtagtcttcccagggtg

SEQ ID NO: 188203 - DNA, 20 bp, Artificial Sequence
  Synthetic oligonucleotide; AGGGAT chr2 60486799 60486818 60486802 -
gtgggaacgtctccctggga

SEQ ID NO: 188204 - DNA, 20 bp, Artificial Sequence
  Synthetic oligonucleotide; TTGAGT chr2 60486683 60486702 60486686 -
tttcaggcccaatcctgatg

SEQ ID NO: 188205 - DNA, 20 bp, Artificial Sequence
  Synthetic oligonucleotide; GAGGAT chr2 60486595 60486614 60486598 -
cattattcatctcaaagcca

SEQ ID NO: 188206 - DNA, 20 bp, Artificial Sequence
  Synthetic oligonucleotide; GTGGAT chr2 60486562 60486581 60486565 -
ccatcacagggctgtggtct

SEQ ID NO: 188207 - DNA, 20 bp, Artificial Sequence
  Synthetic oligonucleotide; TTGAAT chr2 60486436 60486455 60486439 -
tgtgcctaagtatagttttc

SEQ ID NO: 188208 - DNA, 20 bp, Artificial Sequence
  Synthetic oligonucleotide; TAGAAT chr2 60486383 60486402 60486386 -
atgtgcagaaagtgaactct

SEQ ID NO: 188209 - DNA, 20 bp, Artificial Sequence
  Synthetic oligonucleotide; TAGGAT chr2 60486177 60486196 60486180 -
atccccagtaccagtctccc

SEQ ID NO: 188210 - DNA, 20 bp, Artificial Sequence
  Synthetic oligonucleotide; CAGAAT chr2 60486134 60486153 60486137 -
ctgttcagtcaaatccattt

SEQ ID NO: 188211 - DNA, 20 bp, Artificial Sequence
  Synthetic oligonucleotide; TTGGGT chr2 60486065 60486084 60486068 -
gaacaaggggcttggagatt

SEQ ID NO: 188212 - DNA, 20 bp, Artificial Sequence
  Synthetic oligonucleotide; GAGAAT chr2 60485908 60485927 60485911 -
tcagccttcttgttgaaaat

SEQ ID NO: 188213 - DNA, 20 bp, Artificial Sequence
  Synthetic oligonucleotide; TGGGAT chr2 60485862 60485881 60485865 -
ttccaagagctatctggtga

SEQ ID NO: 188214 - DNA, 20 bp, Artificial Sequence
  Synthetic oligonucleotide; TGGAAT chr2 60485825 60485844 60485828 -
agggctacttctgggggacc

SEQ ID NO: 188215 - DNA, 20 bp, Artificial Sequence
  Synthetic oligonucleotide; CTGGGT chr2 60485786 60485805 60485789 -
ttgggaaacacttgccttct

SEQ ID NO: 188216 - DNA, 20 bp, Artificial Sequence
  Synthetic oligonucleotide; CCGAGT chr2 60485719 60485738 60485722 -
atagactgtgtttgacagtc

SEQ ID NO: 188217 - DNA, 20 bp, Artificial Sequence
  Synthetic oligonucleotide; CAGAAT chr2 60485689 60485708 60485692 -
ggcaacttcacttctcaccc

SEQ ID NO: 188218 - DNA, 20 bp, Artificial Sequence
  Synthetic oligonucleotide; TTGGAT chr2 60485609 60485628 60485612 -
tattcagcagcttcgtgacg

SEQ ID NO: 188219 - DNA, 20 bp, Artificial Sequence
  Synthetic oligonucleotide; GAGGGT chr2 60485602 60485621 60485605 -
cagcttcgtgacgttggatg

SEQ ID NO: 188220 - DNA, 20 bp, Artificial Sequence
  Synthetic oligonucleotide; ATGAGT chr2 60485584 60485603 60485587 -
tggagggtttttctttttaa

SEQ ID NO: 188221 - DNA, 20 bp, Artificial Sequence
  Synthetic oligonucleotide; TAGAAT chr2 60485516 60485535 60485519 -
gtttatttttcccttatagg

SEQ ID NO: 188222 - DNA, 20 bp, Artificial Sequence
  Synthetic oligonucleotide; AAGAGT chr2 60485506 60485525 60485509 -
cccttataggtagaatataa

SEQ ID NO: 188223 - DNA, 20 bp, Artificial Sequence
  Synthetic oligonucleotide; TGGGGT chr2 60485499 60485518 60485502 -
aggtagaatataaaagagta

SEQ ID NO: 188224 - DNA, 20 bp, Artificial Sequence
  Synthetic oligonucleotide; TGGAGT chr2 60485325 60485344 60485328 -
gctatccttggcattcttgc

SEQ ID NO: 188225 - DNA, 20 bp, Artificial Sequence
  Synthetic oligonucleotide; CTGGAT chr2 60485200 60485219 60485203 -
ggccagacttccattacact

SEQ ID NO: 188226 - DNA, 20 bp, Artificial Sequence
  Synthetic oligonucleotide; AGGGAT chr2 60485095 60485114 60485098 -
cttgcgaaattgtggctgca

SEQ ID NO: 188227 - DNA, 20 bp, Artificial Sequence
  Synthetic oligonucleotide; GAGGGT chr2 60485051 60485070 60485054 -
tatgccttggtggtggtggt

SEQ ID NO: 188228 - DNA, 20 bp, Artificial Sequence
  Synthetic oligonucleotide; GAGGAT chr2 60484943 60484962 60484946 -
agtcctaaacaagtgccaca

SEQ ID NO: 188229 - DNA, 20 bp, Artificial Sequence
  Synthetic oligonucleotide; GAGAAT chr2 60484809 60484828 60484812 -
ataatgaggtgttcctaagt

SEQ ID NO: 188230 - DNA, 20 bp, Artificial Sequence
  Synthetic oligonucleotide; TGGAAT chr2 60484780 60484799 60484783 -
cataatttgaggttttatac

SEQ ID NO: 188231 - DNA, 20 bp, Artificial Sequence
  Synthetic oligonucleotide; TCGAGT chr2 60484733 60484752 60484736 -
cagcccatgtgcattttttc

SEQ ID NO: 188232 - DNA, 20 bp, Artificial Sequence
  Synthetic oligonucleotide; GAGAGT chr2 60484554 60484573 60484557 -
tatttaaaaggcagggaggg

SEQ ID NO: 188233 - DNA, 20 bp, Artificial Sequence
  Synthetic oligonucleotide; GTGAAT chr2 60484476 60484495 60484479 -
aaaacctacttccctttctg

SEQ ID NO: 188234 - DNA, 20 bp, Artificial Sequence
  Synthetic oligonucleotide; GAGGGT chr2 60484324 60484343 60484327 -
agagaggaggcagggggaga

SEQ ID NO: 188235 - DNA, 20 bp, Artificial Sequence
  Synthetic oligonucleotide; TGGAAT chr2 60484318 60484337 60484321 -
gaggcagggggagagagggt

SEQ ID NO: 188236 - DNA, 20 bp, Artificial Sequence
  Synthetic oligonucleotide; CTGAAT chr2 60484297 60484316 60484300 -
ggaattcgagctattttcag

SEQ ID NO: 188237 - DNA, 20 bp, Artificial Sequence
  Synthetic oligonucleotide; GTGAGT chr2 60484291 60484310 60484294 -
cgagctattttcagctgaat

SEQ ID NO: 188238 - DNA, 20 bp, Artificial Sequence
  Synthetic oligonucleotide; CAGAGT chr2 60484181 60484200 60484184 -
actgcattttctgacactgt

SEQ ID NO: 188239 - DNA, 20 bp, Artificial Sequence
  Synthetic oligonucleotide; TAGAGT chr2 60484039 60484058 60484042 -
ttaacagaggagctctaaat

SEQ ID NO: 188240 - DNA, 20 bp, Artificial Sequence
  Synthetic oligonucleotide; GCGAGT chr2 60483774 60483793 60483777 -
tcctccttctagtgctttgg

SEQ ID NO: 188241 - DNA, 20 bp, Artificial Sequence
  Synthetic oligonucleotide; TTGAGT chr2 60483622 60483641 60483625 -
ctggggacgagcatcctctc

SEQ ID NO: 188242 - DNA, 20 bp, Artificial Sequence
  Synthetic oligonucleotide; CAGGGT chr2 60483591 60483610 60483594 -
ctgacaactgcagcattcca

SEQ ID NO: 188243 - DNA, 20 bp, Artificial Sequence
  Synthetic oligonucleotide; CTGAGT chr2 60483585 60483604 60483588 -
actgcagcattccacagggt

SEQ ID NO: 188244 - DNA, 20 bp, Artificial Sequence
  Synthetic oligonucleotide; TTGGGT chr2 60483515 60483534 60483518 -
tgacatagacagcagttgat

SEQ ID NO: 188245 - DNA, 20 bp, Artificial Sequence
  Synthetic oligonucleotide; AGGGAT chr2 60483399 60483418 60483402 -
caagtcttctgaccttggcc

SEQ ID NO: 188246 - DNA, 20 bp, Artificial Sequence
  Synthetic oligonucleotide; GGGAAT chr2 60483378 60483397 60483381 -
gggatctttgcactgggcag

SEQ ID NO: 188247 - DNA, 20 bp, Artificial Sequence
  Synthetic oligonucleotide; TTGAGT chr2 60483372 60483391 60483375 -
tttgcactgggcaggggaat

SEQ ID NO: 188248 - DNA, 20 bp, Artificial Sequence
  Synthetic oligonucleotide; CTGAAT chr2 60483327 60483346 60483330 -
ttaaaccacttttcaaaggc

SEQ ID NO: 188249 - DNA, 20 bp, Artificial Sequence
  Synthetic oligonucleotide; CGGGAT chr2 60483257 60483276 60483260 -
tcaagaccatttctctacca

SEQ ID NO: 188250 - DNA, 20 bp, Artificial Sequence
  Synthetic oligonucleotide; TTGGAT chr2 60482861 60482880 60482864 -
tgctgcaattatttgtctag

SEQ ID NO: 188251 - DNA, 20 bp, Artificial Sequence
  Synthetic oligonucleotide; CTGAAT chr2 60482787 60482806 60482790 -
gcactgtataatcacatgaa

SEQ ID NO: 188252 - DNA, 20 bp, Artificial Sequence
  Synthetic oligonucleotide; TAGAAT chr2 60482742 60482761 60482745 -
tactaacctgtccttcaaaa

SEQ ID NO: 188253 - DNA, 20 bp, Artificial Sequence
  Synthetic oligonucleotide; TGGGAT chr2 60482675 60482694 60482678 -
caggaagctgatcttaacct

SEQ ID NO: 188254 - DNA, 20 bp, Artificial Sequence
  Synthetic oligonucleotide; CAGGGT chr2 60482657 60482676 60482660 -
cttgggatgcagtgtgcttt

SEQ ID NO: 188255 - DNA, 20 bp, Artificial Sequence
  Synthetic oligonucleotide; TTGGGT chr2 60482652 60482671 60482655 -
gatgcagtgtgctttcaggg

SEQ ID NO: 188256 - DNA, 20 bp, Artificial Sequence
  Synthetic oligonucleotide; TGGAAT chr2 60482610 60482629 60482613 -
gaactttccaagtctgaaaa

SEQ ID NO: 188257 - DNA, 20 bp, Artificial Sequence
  Synthetic oligonucleotide; GTGGAT chr2 60482513 60482532 60482516 -
ctctattcttcttgcttcct

SEQ ID NO: 188258 - DNA, 20 bp, Artificial Sequence
  Synthetic oligonucleotide; CCGGAT chr2 60482358 60482377 60482361 -
tttctcacttttctccagtt

SEQ ID NO: 188259 - DNA, 20 bp, Artificial Sequence
  Synthetic oligonucleotide; TAGAAT chr2 60482163 60482182 60482166 -
accaaactaaactctcaaga

SEQ ID NO: 188260 - DNA, 20 bp, Artificial Sequence
  Synthetic oligonucleotide; GGGAGT chr2 60482080 60482099 60482083 -
acaggtctgcctctcttcct

SEQ ID NO: 188261 - DNA, 20 bp, Artificial Sequence
  Synthetic oligonucleotide; CTGGAT chr2 60482055 60482074 60482058 -
tcagaagtgaccttgatgaa

SEQ ID NO: 188262 - DNA, 20 bp, Artificial Sequence
  Synthetic oligonucleotide; GTGGGT chr2 60481934 60481953 60481937 -
gagaaggtctctatacctag

SEQ ID NO: 188263 - DNA, 20 bp, Artificial Sequence
  Synthetic oligonucleotide; GAGAAT chr2 60481917 60481936 60481920 -
taggtgggtttcctgagctg

SEQ ID NO: 188264 - DNA, 20 bp, Artificial Sequence
  Synthetic oligonucleotide; CAGAAT chr2 60481788 60481807 60481791 -
aaggctctcccaccatcaca

SEQ ID NO: 188265 - DNA, 20 bp, Artificial Sequence
  Synthetic oligonucleotide; TAGGGT chr2 60481778 60481797 60481781 -
caccatcacacagaatgtac

SEQ ID NO: 188266 - DNA, 20 bp, Artificial Sequence
  Synthetic oligonucleotide; CTGAGT chr2 60481715 60481734 60481718 -
gcccttaaaacactggagcc

SEQ ID NO: 188267 - DNA, 20 bp, Artificial Sequence
  Synthetic oligonucleotide; GGGGGT chr2 60481672 60481691 60481675 -
gtggggaaaagaaagatgta

SEQ ID NO: 188268 - DNA, 20 bp, Artificial Sequence
  Synthetic oligonucleotide; CTGGGT chr2 60481516 60481535 60481519 -
ttcacctgccagcttgtggg

SEQ ID NO: 188269 - DNA, 20 bp, Artificial Sequence
  Synthetic oligonucleotide; CTGGGT chr2 60481494 60481513 60481497 -
gggtggcttaagttctagcc

SEQ ID NO: 188270 - DNA, 20 bp, Artificial Sequence
  Synthetic oligonucleotide; GTGGGT chr2 60481450 60481469 60481453 -
agcatgtgtatgtgcttgtg

SEQ ID NO: 188271 - DNA, 20 bp, Artificial Sequence
  Synthetic oligonucleotide; TGGGGT chr2 60481445 60481464 60481448 -
gtgtatgtgcttgtggtggg

SEQ ID NO: 188272 - DNA, 20 bp, Artificial Sequence
  Synthetic oligonucleotide; CTGGGT chr2 60481368 60481387 60481371 -
tgggagacagagagaaggcc

SEQ ID NO: 188273 - DNA, 20 bp, Artificial Sequence
  Synthetic oligonucleotide; CTGAAT chr2 60481361 60481380 60481364 -
cagagagaaggccctgggtt

SEQ ID NO: 188274 - DNA, 20 bp, Artificial Sequence
  Synthetic oligonucleotide; TAGGAT chr2 60481341 60481360 60481344 -
ctgaatgtttttacttttcc

SEQ ID NO: 188275 - DNA, 20 bp, Artificial Sequence
  Synthetic oligonucleotide; AGGAGT chr2 60481313 60481332 60481316 -
ctgcttcatttttgttttca

SEQ ID NO: 188276 - DNA, 20 bp, Artificial Sequence
  Synthetic oligonucleotide; ATGGGT chr2 60481263 60481282 60481266 -
ccagcatgtcccaagcagag

SEQ ID NO: 188277 - DNA, 20 bp, Artificial Sequence
  Synthetic oligonucleotide; GGGAAT chr2 60481247 60481266 60481250 -
agagatgggtggctaggttt

SEQ ID NO: 188278 - DNA, 20 bp, Artificial Sequence
  Synthetic oligonucleotide; TGGGGT chr2 60481242 60481261 60481245 -
tgggtggctaggtttgggaa

SEQ ID NO: 188279 - DNA, 20 bp, Artificial Sequence
  Synthetic oligonucleotide; GGGGAT chr2 60481224 60481243 60481227 -
aatggggtgctgggagggga

SEQ ID NO: 188280 - DNA, 20 bp, Artificial Sequence
  Synthetic oligonucleotide; CAGGAT chr2 60481106 60481125 60481109 -
cggccaccactgggctgtac

SEQ ID NO: 188281 - DNA, 20 bp, Artificial Sequence
  Synthetic oligonucleotide; TTGGGT chr2 60481090 60481109 60481093 -
gtaccaggatctagtgcaac

SEQ ID NO: 188282 - DNA, 20 bp, Artificial Sequence
  Synthetic oligonucleotide; GTGGGT chr2 60481076 60481095 60481079 -
tgcaacttgggtgacaaggt

SEQ ID NO: 188283 - DNA, 20 bp, Artificial Sequence
  Synthetic oligonucleotide; ATGAGT chr2 60480934 60480953 60480937 -
agcaaaaactatttagaact

SEQ ID NO: 188284 - DNA, 20 bp, Artificial Sequence
  Synthetic oligonucleotide; TAGGAT chr2 60480921 60480940 60480924 -
tagaactatgagttcaaaaa

SEQ ID NO: 188285 - DNA, 20 bp, Artificial Sequence
  Synthetic oligonucleotide; GGGGGT chr2 60480867 60480886 60480870 -
ctttctcttgggacagagat

SEQ ID NO: 188286 - DNA, 20 bp, Artificial Sequence
  Synthetic oligonucleotide; GGGGAT chr2 60480854 60480873 60480857 -
cagagatgggggtgcaggta

SEQ ID NO: 188287 - DNA, 20 bp, Artificial Sequence
  Synthetic oligonucleotide; GAGAAT chr2 60480848 60480867 60480851 -
tgggggtgcaggtaggggat

SEQ ID NO: 188288 - DNA, 20 bp, Artificial Sequence
  Synthetic oligonucleotide; GAGGAT chr2 60480829 60480848 60480832 -
tgagaatagaggaaaatgtg

SEQ ID NO: 188289 - DNA, 20 bp, Artificial Sequence
  Synthetic oligonucleotide; GTGAAT chr2 60480690 60480709 60480693 -
aattacacagcatttggaaa

SEQ ID NO: 188290 - DNA, 20 bp, Artificial Sequence
  Synthetic oligonucleotide; TTGAGT chr2 60480657 60480676 60480660 -
ctgattgtccataacaacca

SEQ ID NO: 188291 - DNA, 20 bp, Artificial Sequence
  Synthetic oligonucleotide; CTGGGT chr2 60480571 60480590 60480574 -
caaggggctgtaatcctctc

SEQ ID NO: 188292 - DNA, 20 bp, Artificial Sequence
  Synthetic oligonucleotide; GTGAAT chr2 60480537 60480556 60480540 -
acccagaggctccttggtta

SEQ ID NO: 188293 - DNA, 20 bp, Artificial Sequence
  Synthetic oligonucleotide; TAGAAT chr2 60480463 60480482 60480466 -
gtccttccagccaggtcatt

SEQ ID NO: 188294 - DNA, 20 bp, Artificial Sequence
  Synthetic oligonucleotide; TTGAAT chr2 60480420 60480439 60480423 -
aaaagttcactgcacagcgc

SEQ ID NO: 188295 - DNA, 20 bp, Artificial Sequence
  Synthetic oligonucleotide; CTGAGT chr2 60480350 60480369 60480353 -
ggacagtcagaggtagacca

SEQ ID NO: 188296 - DNA, 20 bp, Artificial Sequence
  Synthetic oligonucleotide; TTGGAT chr2 60480274 60480293 60480277 -
catgctgattacagggagac

SEQ ID NO: 188297 - DNA, 20 bp, Artificial Sequence
  Synthetic oligonucleotide; TGGAGT chr2 60480258 60480277 60480261 -
agacttggatccaggagaaa

SEQ ID NO: 188298 - DNA, 20 bp, Artificial Sequence
  Synthetic oligonucleotide; CAGAGT chr2 60480119 60480138 60480122 -
cctcctcgctgtccttggtg

SEQ ID NO: 188299 - DNA, 20 bp, Artificial Sequence
  Synthetic oligonucleotide; TTGAGT chr2 60479986 60480005 60479989 -
tgatttaacaaaagcagctt

SEQ ID NO: 188300 - DNA, 20 bp, Artificial Sequence
  Synthetic oligonucleotide; CTGAGT chr2 60479973 60479992 60479976 -
gcagcttttgagtgagaaag

SEQ ID NO: 188301 - DNA, 20 bp, Artificial Sequence
  Synthetic oligonucleotide; TGGAGT chr2 60479968 60479987 60479971 -
ttttgagtgagaaagctgag

SEQ ID NO: 188302 - DNA, 20 bp, Artificial Sequence
  Synthetic oligonucleotide; TTGAAT chr2 60479730 60479749 60479733 -
cagacccttgactctttgcc

SEQ ID NO: 188303 - DNA, 20 bp, Artificial Sequence
  Synthetic oligonucleotide; AGGAGT chr2 60479684 60479703 60479687 -
tattgcattagagctggggc

SEQ ID NO: 188304 - DNA, 20 bp, Artificial Sequence
  Synthetic oligonucleotide; CAGGGT chr2 60479606 60479625 60479609 -
ccacactctccaccgcctga

SEQ ID NO: 188305 - DNA, 20 bp, Artificial Sequence
  Synthetic oligonucleotide; TTGAGT chr2 60479600 60479619 60479603 -
tctccaccgcctgacagggt

SEQ ID NO: 188306 - DNA, 20 bp, Artificial Sequence
  Synthetic oligonucleotide; AAGGAT chr2 60479514 60479533 60479517 -
ggttgaggccctggaagcaa

SEQ ID NO: 188307 - DNA, 20 bp, Artificial Sequence
  Synthetic oligonucleotide; GAGAGT chr2 60479484 60479503 60479487 -
gcctgaggggcttgttaagg

SEQ ID NO: 188308 - DNA, 20 bp, Artificial Sequence
  Synthetic oligonucleotide; CCGGGT chr2 60479331 60479350 60479334 -
ctcaaaacaaaaaatggtct

SEQ ID NO: 188309 - DNA, 20 bp, Artificial Sequence
  Synthetic oligonucleotide; CTGAGT chr2 60479275 60479294 60479278 -
agaggccaggtgtccatagg

SEQ ID NO: 188310 - DNA, 20 bp, Artificial Sequence
  Synthetic oligonucleotide; GTGGGT chr2 60479250 60479269 60479253 -
tccccacgtggacctgctag

SEQ ID NO: 188311 - DNA, 20 bp, Artificial Sequence
  Synthetic oligonucleotide; AGGAGT chr2 60479240 60479259 60479243 -
gacctgctaggtgggtagaa

SEQ ID NO: 188312 - DNA, 20 bp, Artificial Sequence
  Synthetic oligonucleotide; TTGGAT chr2 60479185 60479204 60479188 -
cttggaggtgtctgggaaca

SEQ ID NO: 188313 - DNA, 20 bp, Artificial Sequence
  Synthetic oligonucleotide; TGGAAT chr2 60479169 60479188 60479172 -
aacattggatgttactcata

SEQ ID NO: 188314 - DNA, 20 bp, Artificial Sequence
  Synthetic oligonucleotide; CAGAAT chr2 60479160 60479179 60479163 -
tgttactcatatggaatcag

SEQ ID NO: 188315 - DNA, 20 bp, Artificial Sequence
  Synthetic oligonucleotide; AAGGAT chr2 60479019 60479038 60479022 -
attggtcagtggtataaatg

SEQ ID NO: 188316 - DNA, 20 bp, Artificial Sequence
  Synthetic oligonucleotide; TTGGGT chr2 60479006 60479025 60479009 -
ataaatgaaggattaggaaa

SEQ ID NO: 188317 - DNA, 20 bp, Artificial Sequence
  Synthetic oligonucleotide; GAGAAT chr2 60478576 60478595 60478579 -
cataataggttttaattctg

SEQ ID NO: 188318 - DNA, 20 bp, Artificial Sequence
  Synthetic oligonucleotide; CAGAAT chr2 60478554 60478573 60478557 -
gaatggccagttctggttct

SEQ ID NO: 188319 - DNA, 20 bp, Artificial Sequence
  Synthetic oligonucleotide; CAGAGT chr2 60478529 60478548 60478532 -
tctcttggccaagactgtca

SEQ ID NO: 188320 - DNA, 20 bp, Artificial Sequence
  Synthetic oligonucleotide; AGGGGT chr2 60478368 60478387 60478371 -
ggccctgaggtggcagtggg

SEQ ID NO: 188321 - DNA, 20 bp, Artificial Sequence
  Synthetic oligonucleotide; CAGGGT chr2 60478347 60478366 60478350 -
ggggtttgtcagaaggtggg

SEQ ID NO: 188322 - DNA, 20 bp, Artificial Sequence
  Synthetic oligonucleotide; TCGAGT chr2 60478289 60478308 60478292 -
gcaggacacttctgagatct

SEQ ID NO: 188323 - DNA, 20 bp, Artificial Sequence
  Synthetic oligonucleotide; CAGGAT chr2 60478226 60478245 60478229 -
ccacagggcgactgttgggg

SEQ ID NO: 188324 - DNA, 20 bp, Artificial Sequence
  Synthetic oligonucleotide; GAGAGT chr2 60478215 60478234 60478218 -
ctgttggggcaggatgtgag

SEQ ID NO: 188325 - DNA, 20 bp, Artificial Sequence
  Synthetic oligonucleotide; CAGAGT chr2 60478000 60478019 60478003 -
ctgcactccagcctgggcaa

SEQ ID NO: 188326 - DNA, 20 bp, Artificial Sequence
  Synthetic oligonucleotide; TAGAGT chr2 60477915 60477934 60477918 -
tgtgcttccttaagaagggc

SEQ ID NO: 188327 - DNA, 20 bp, Artificial Sequence
  Synthetic oligonucleotide; TTGGAT chr2 60477804 60477823 60477807 -
tctccgtgcacagaccagtc

SEQ ID NO: 188328 - DNA, 20 bp, Artificial Sequence
  Synthetic oligonucleotide; AGGAGT chr2 60477659 60477678 60477662 -
gtgcccacgaacaaaacatc

SEQ ID NO: 188329 - DNA, 20 bp, Artificial Sequence
  Synthetic oligonucleotide; TGGGAT chr2 60477585 60477604 60477588 -
atttattttactctaagttc

SEQ ID NO: 188330 - DNA, 20 bp, Artificial Sequence
  Synthetic oligonucleotide; CAGAAT chr2 60477572 60477591 60477575 -
taagttctgggatacatgtg

SEQ ID NO: 188331 - DNA, 20 bp, Artificial Sequence
  Synthetic oligonucleotide; GTGAGT chr2 60477370 60477389 60477373 -
aggcataaagcacatttgtt

SEQ ID NO: 188332 - DNA, 20 bp, Artificial Sequence
  Synthetic oligonucleotide; TGGGGT chr2 60477345 60477364 60477348 -
ttgatgcagataaaaaggct

SEQ ID NO: 188333 - DNA, 20 bp, Artificial Sequence
  Synthetic oligonucleotide; CAGAGT chr2 60477333 60477352 60477336 -
aaaaggcttggggtggtctt

SEQ ID NO: 188334 - DNA, 20 bp, Artificial Sequence
  Synthetic oligonucleotide; GGGAGT chr2 60477322 60477341 60477325 -
ggtggtcttcagagtaattt

SEQ ID NO: 188335 - DNA, 20 bp, Artificial Sequence
  Synthetic oligonucleotide; CAGAAT chr2 60477261 60477280 60477264 -
tctgctctggcaggtgttat

SEQ ID NO: 188336 - DNA, 20 bp, Artificial Sequence
  Synthetic oligonucleotide; CTGAAT chr2 60477197 60477216 60477200 -
tcacagccccatgcctcttc

SEQ ID NO: 188337 - DNA, 20 bp, Artificial Sequence
  Synthetic oligonucleotide; TCGAGT chr2 60477065 60477084 60477068 -
cccatccttttcttcatttc

SEQ ID NO: 188338 - DNA, 20 bp, Artificial Sequence
  Synthetic oligonucleotide; CGGGGT chr2 60477044 60477063 60477047 -
cgagtggggcagggaggcat

SEQ ID NO: 188339 - DNA, 20 bp, Artificial Sequence
  Synthetic oligonucleotide; TCGGGT chr2 60477006 60477025 60477009 -
tttgtgtgaagctggacaat

SEQ ID NO: 188340 - DNA, 20 bp, Artificial Sequence
  Synthetic oligonucleotide; ATGGAT chr2 60476946 60476965 60476949 -
tcccttctaactacaaaggc

SEQ ID NO: 188341 - DNA, 20 bp, Artificial Sequence
  Synthetic oligonucleotide; GAGAGT chr2 60476871 60476890 60476874 -
taatggaaactgataaatta

SEQ ID NO: 188342 - DNA, 20 bp, Artificial Sequence
  Synthetic oligonucleotide; CAGGGT chr2 60476816 60476835 60476819 -
cttttcaaaaggtttcacca

SEQ ID NO: 188343 - DNA, 20 bp, Artificial Sequence
  Synthetic oligonucleotide; CTGAAT chr2 60476786 60476805 60476789 -
ttaaatagtgagctccccca

SEQ ID NO: 188344 - DNA, 20 bp, Artificial Sequence
  Synthetic oligonucleotide; GAGGAT chr2 60476741 60476760 60476744 -
atcattaactacttgacaga

SEQ ID NO: 188345 - DNA, 20 bp, Artificial Sequence
  Synthetic oligonucleotide; GGGGGT chr2 60476732 60476751 60476735 -
tacttgacagagaggatatt

SEQ ID NO: 188346 - DNA, 20 bp, Artificial Sequence
  Synthetic oligonucleotide; AAGGGT chr2 60476660 60476679 60476663 -
ccaattttcaatgagcctgg

SEQ ID NO: 188347 - DNA, 20 bp, Artificial Sequence
  Synthetic oligonucleotide; TGGGGT chr2 60476559 60476578 60476562 -
ccaagaaccctccatgctga

SEQ ID NO: 188348 - DNA, 20 bp, Artificial Sequence
  Synthetic oligonucleotide; CAGGGT chr2 60476532 60476551 60476535 -
tggtgggaggtcaaggacca

SEQ ID NO: 188349 - DNA, 20 bp, Artificial Sequence
  Synthetic oligonucleotide; TAGAGT chr2 60476473 60476492 60476476 -
gggagaggactcccttttct

SEQ ID NO: 188350 - DNA, 20 bp, Artificial Sequence
  Synthetic oligonucleotide; ATGGGT chr2 60476445 60476464 60476448 -
tgtgtgtgcctttgtgagca

SEQ ID NO: 188351 - DNA, 20 bp, Artificial Sequence
  Synthetic oligonucleotide; CTGGGT chr2 60476359 60476378 60476362 -
cttttcccttgacatttagc

SEQ ID NO: 188352 - DNA, 20 bp, Artificial Sequence
  Synthetic oligonucleotide; AAGGAT chr2 60476205 60476224 60476208 -
caggctcactctctaagcct

SEQ ID NO: 188353 - DNA, 20 bp, Artificial Sequence
  Synthetic oligonucleotide; AAGGAT chr2 60475970 60475989 60475973 -
aacacttagggccagaaaga

SEQ ID NO: 188354 - DNA, 20 bp, Artificial Sequence
  Synthetic oligonucleotide; GTGAGT chr2 60475940 60475959 60475943 -
tcaaagtcacgaaacagctg

SEQ ID NO: 188355 - DNA, 20 bp, Artificial Sequence
  Synthetic oligonucleotide; CAGAGT chr2 60475932 60475951 60475935 -
acgaaacagctggtgagtgg

SEQ ID NO: 188356 - DNA, 20 bp, Artificial Sequence
  Synthetic oligonucleotide; TGGGGT chr2 60475926 60475945 60475929 -
cagctggtgagtggcagagt

SEQ ID NO: 188357 - DNA, 20 bp, Artificial Sequence
  Synthetic oligonucleotide; AAGAAT chr2 60475846 60475865 60475849 -
cctgcttcctaaaggaagaa

SEQ ID NO: 188358 - DNA, 20 bp, Artificial Sequence
  Synthetic oligonucleotide; GGGAGT chr2 60475837 60475856 60475840 -
taaaggaagaaaagaatccg

SEQ ID NO: 188359 - DNA, 20 bp, Artificial Sequence
  Synthetic oligonucleotide; GGGAAT chr2 60475822 60475841 60475825 -
atccggggagtggtggcagt

SEQ ID NO: 188360 - DNA, 20 bp, Artificial Sequence
  Synthetic oligonucleotide; TCGGAT chr2 60475763 60475782 60475766 -
caaataacctgataaatacc

SEQ ID NO: 188361 - DNA, 20 bp, Artificial Sequence
  Synthetic oligonucleotide; AGGAGT chr2 60475686 60475705 60475689 -
ctcagctgaggactcagagc

SEQ ID NO: 188362 - DNA, 20 bp, Artificial Sequence
  Synthetic oligonucleotide; AGGGAT chr2 60475625 60475644 60475628 -
aagaaagaggggaaatttgg

SEQ ID NO: 188363 - DNA, 20 bp, Artificial Sequence
  Synthetic oligonucleotide; AGGAAT chr2 60475422 60475441 60475425 -
cacttgtttgtctgactcag

SEQ ID NO: 188364 - DNA, 20 bp, Artificial Sequence
  Synthetic oligonucleotide; TGGAGT chr2 60475323 60475342 60475326 -
acagaacagatgaaccttca

SEQ ID NO: 188365 - DNA, 20 bp, Artificial Sequence
  Synthetic oligonucleotide; AAGAGT chr2 60475312 60475331 60475315 -
gaaccttcatggagtttcac

SEQ ID NO: 188366 - DNA, 20 bp, Artificial Sequence
  Synthetic oligonucleotide; GAGGAT chr2 60475220 60475239 60475223 -
agatgtcacagaaatcttca

SEQ ID NO: 188367 - DNA, 20 bp, Artificial Sequence
  Synthetic oligonucleotide; CTGGAT chr2 60475183 60475202 60475186 -
gtcgtatcctccgctgtcaa

SEQ ID NO: 188368 - DNA, 20 bp, Artificial Sequence
  Synthetic oligonucleotide; ATGAAT chr2 60475179 60475198 60475182 -
tatcctccgctgtcaactgg

SEQ ID NO: 188369 - DNA, 20 bp, Artificial Sequence
  Synthetic oligonucleotide; GTGAAT chr2 60475154 60475173 60475157 -
tcagtgtgcaatattttgat

SEQ ID NO: 188370 - DNA, 20 bp, Artificial Sequence
  Synthetic oligonucleotide; TAGGAT chr2 60475061 60475080 60475064 -
acctgctttttctttttatc

SEQ ID NO: 188371 - DNA, 20 bp, Artificial Sequence
  Synthetic oligonucleotide; TTGAAT chr2 60474960 60474979 60474963 -
tggaaataatttctcttcct

SEQ ID NO: 188372 - DNA, 20 bp, Artificial Sequence
  Synthetic oligonucleotide; GGGGGT chr2 60474907 60474926 60474910 -
tcatgacacactttctacat

SEQ ID NO: 188373 - DNA, 20 bp, Artificial Sequence
  Synthetic oligonucleotide; TTGAAT chr2 60474762 60474781 60474765 -
aggcactcggtaaatatttg

SEQ ID NO: 188374 - DNA, 20 bp, Artificial Sequence
  Synthetic oligonucleotide; ATGAAT chr2 60474758 60474777 60474761 -
actcggtaaatatttgttga

SEQ ID NO: 188375 - DNA, 20 bp, Artificial Sequence
  Synthetic oligonucleotide; TTGAAT chr2 60474742 60474761 60474745 -
ttgaatgaatgcatgagagg

SEQ ID NO: 188376 - DNA, 20 bp, Artificial Sequence
  Synthetic oligonucleotide; ATGAAT chr2 60474738 60474757 60474741 -
atgaatgcatgagaggttga

SEQ ID NO: 188377 - DNA, 20 bp, Artificial Sequence
  Synthetic oligonucleotide; GAGAAT chr2 60474726 60474745 60474729 -
gaggttgaatgaatgcatga

SEQ ID NO: 188378 - DNA, 20 bp, Artificial Sequence
  Synthetic oligonucleotide; ATGAAT chr2 60474722 60474741 60474725 -
ttgaatgaatgcatgagaga

SEQ ID NO: 188379 - DNA, 20 bp, Artificial Sequence
  Synthetic oligonucleotide; ATGAAT chr2 60474718 60474737 60474721 -
atgaatgcatgagagaatga

SEQ ID NO: 188380 - DNA, 20 bp, Artificial Sequence
  Synthetic oligonucleotide; TGGAAT chr2 60474713 60474732 60474716 -
tgcatgagagaatgaatgaa

SEQ ID NO: 188381 - DNA, 20 bp, Artificial Sequence
  Synthetic oligonucleotide; AAGAAT chr2 60474506 60474525 60474509 -
atactttgggcccagagcca

SEQ ID NO: 188382 - DNA, 20 bp, Artificial Sequence
  Synthetic oligonucleotide; TGGAGT chr2 60474495 60474514 60474498 -
ccagagccaaagaatattat

SEQ ID NO: 188383 - DNA, 20 bp, Artificial Sequence
  Synthetic oligonucleotide; TGGAAT chr2 60474457 60474476 60474460 -
acaccctaaatttaaccagc

SEQ ID NO: 188384 - DNA, 20 bp, Artificial Sequence
  Synthetic oligonucleotide; AAGGAT chr2 60474412 60474431 60474415 -
ctattcaaccttttgaaatg

SEQ ID NO: 188385 - DNA, 20 bp, Artificial Sequence
  Synthetic oligonucleotide; TGGAAT chr2 60474312 60474331 60474315 -
aaagcaagattttttttttt

SEQ ID NO: 188386 - DNA, 20 bp, Artificial Sequence
  Synthetic oligonucleotide; TTGAGT chr2 60474126 60474145 60474129 -
tgaagttagtaacctgttgt

SEQ ID NO: 188387 - DNA, 20 bp, Artificial Sequence
  Synthetic oligonucleotide; GAGGAT chr2 60474106 60474125 60474109 -
ttgagtaatcaaggctctaa

SEQ ID NO: 188388 - DNA, 20 bp, Artificial Sequence
  Synthetic oligonucleotide; AAGAGT chr2 60474086 60474105 60474089 -
gaggatagcattgatcaaaa

SEQ ID NO: 188389 - DNA, 20 bp, Artificial Sequence
  Synthetic oligonucleotide; ATGAGT chr2 60474074 60474093 60474077 -
gatcaaaaaagagttttaaa

SEQ ID NO: 188390 - DNA, 20 bp, Artificial Sequence
  Synthetic oligonucleotide; AGGAAT chr2 60474034 60474053 60474037 -
aagtcactggtgaagtatca

SEQ ID NO: 188391 - DNA, 20 bp, Artificial Sequence
  Synthetic oligonucleotide; GAGAGT chr2 60474015 60474034 60474018 -
aaggaatctaaggaccatga

SEQ ID NO: 188392 - DNA, 20 bp, Artificial Sequence
  Synthetic oligonucleotide; CAGAAT chr2 60473952 60473971 60473955 -
attgctttcttttgtttttg

SEQ ID NO: 188393 - DNA, 20 bp, Artificial Sequence
  Synthetic oligonucleotide; CAGGAT chr2 60473928 60473947 60473931 -
atacactttttaaagaacat

SEQ ID NO: 188394 - DNA, 20 bp, Artificial Sequence
  Synthetic oligonucleotide; GAGAGT chr2 60473849 60473868 60473852 -
tgctcatttctagaacaaaa

SEQ ID NO: 188395 - DNA, 20 bp, Artificial Sequence
  Synthetic oligonucleotide; GTGAGT chr2 60473805 60473824 60473808 -
gaaggttaattaagaagtct

SEQ ID NO: 188396 - DNA, 20 bp, Artificial Sequence
  Synthetic oligonucleotide; GAGAAT chr2 60473708 60473727 60473711 -
tataatactctgataagtca

SEQ ID NO: 188397 - DNA, 20 bp, Artificial Sequence
  Synthetic oligonucleotide; TAGGGT chr2 60473669 60473688 60473672 -
actggtatctatggtaaaca

SEQ ID NO: 188398 - DNA, 20 bp, Artificial Sequence
  Synthetic oligonucleotide; CTGAAT chr2 60473647 60473666 60473650 -
gggtcaagagctagatgcgg

SEQ ID NO: 188399 - DNA, 20 bp, Artificial Sequence
  Synthetic oligonucleotide; TCGGAT chr2 60473552 60473571 60473555 -
gtgtggcttgaacctagtaa

SEQ ID NO: 188400 - DNA, 20 bp, Artificial Sequence
  Synthetic oligonucleotide; TGGAAT chr2 60473539 60473558 60473542 -
ctagtaatcggattcagaac

SEQ ID NO: 188401 - DNA, 20 bp, Artificial Sequence
  Synthetic oligonucleotide; ATGGGT chr2 60473535 60473554 60473538 -
taatcggattcagaactgga

SEQ ID NO: 188402 - DNA, 20 bp, Artificial Sequence
  Synthetic oligonucleotide; CAGGGT chr2 60473524 60473543 60473527 -
agaactggaatgggttcctt

SEQ ID NO: 188403 - DNA, 20 bp, Artificial Sequence
  Synthetic oligonucleotide; CAGGAT chr2 60473504 60473523 60473507 -
cagggtactttacaaacgtt

SEQ ID NO: 188404 - DNA, 20 bp, Artificial Sequence
  Synthetic oligonucleotide; GAGGAT chr2 60473448 60473467 60473451 -
atggaagagctgagggactt

SEQ ID NO: 188405 - DNA, 20 bp, Artificial Sequence
  Synthetic oligonucleotide; CAGGGT chr2 60473341 60473360 60473344 -
ccattctctttttgaagacc

SEQ ID NO: 188406 - DNA, 20 bp, Artificial Sequence
  Synthetic oligonucleotide; GGGGGT chr2 60473327 60473346 60473330 -
aagacccagggtgaaagaaa

SEQ ID NO: 188407 - DNA, 20 bp, Artificial Sequence
  Synthetic oligonucleotide; GTGAAT chr2 60472973 60472992 60472976 -
acacacacacgtacatttta

SEQ ID NO: 188408 - DNA, 20 bp, Artificial Sequence
  Synthetic oligonucleotide; GAGAGT chr2 60472943 60472962 60472946 -
cacatctatgtactcctgtg

SEQ ID NO: 188409 - DNA, 20 bp, Artificial Sequence
  Synthetic oligonucleotide; TGGAAT chr2 60472882 60472901 60472885 -
aaagcagtcattaaacgtgt

SEQ ID NO: 188410 - DNA, 20 bp, Artificial Sequence
  Synthetic oligonucleotide; AGGAAT chr2 60472746 60472765 60472749 -
aaatagcatgttaatagtca

SEQ ID NO: 188411 - DNA, 20 bp, Artificial Sequence
  Synthetic oligonucleotide; AAGAGT chr2 60472547 60472566 60472550 -
tttaatgaaacctgaaaaat

SEQ ID NO: 188412 - DNA, 20 bp, Artificial Sequence
  Synthetic oligonucleotide; CTGGGT chr2 60472461 60472480 60472464 -
tgaggccccaagtggaaata

SEQ ID NO: 188413 - DNA, 20 bp, Artificial Sequence
  Synthetic oligonucleotide; TTGAGT chr2 60472381 60472400 60472384 -
gtaagacatttgaaaaaaga

SEQ ID NO: 188414 - DNA, 20 bp, Artificial Sequence
  Synthetic oligonucleotide; AAGAGT chr2 60472330 60472349 60472333 -
gagagaccagaaagggaaac

SEQ ID NO: 188415 - DNA, 20 bp, Artificial Sequence
  Synthetic oligonucleotide; TTGGGT chr2 60472224 60472243 60472227 -
tctgtctggcacaagctggt

SEQ ID NO: 188416 - DNA, 20 bp, Artificial Sequence
  Synthetic oligonucleotide; GAGGGT chr2 60472143 60472162 60472146 -
gtccttatcaatgacagacg

SEQ ID NO: 188417 - DNA, 20 bp, Artificial Sequence
  Synthetic oligonucleotide; CTGAAT chr2 60472132 60472151 60472135 -
tgacagacggagggtggaac

SEQ ID NO: 188418 - DNA, 20 bp, Artificial Sequence
  Synthetic oligonucleotide; AGGGAT chr2 60472116 60472135 60472119 -
gaacctgaatttcctaatgg

SEQ ID NO: 188419 - DNA, 20 bp, Artificial Sequence
  Synthetic oligonucleotide; AGGGAT chr2 60472106 60472125 60472109 -
ttcctaatggagggatcctt

SEQ ID NO: 188420 - DNA, 20 bp, Artificial Sequence
  Synthetic oligonucleotide; GTGGGT chr2 60472056 60472075 60472059 -
ctgttccagtcctaaaggag

SEQ ID NO: 188421 - DNA, 20 bp, Artificial Sequence
  Synthetic oligonucleotide; ATGGGT chr2 60472018 60472037 60472021 -
ggaaaacagcctcatggccc

SEQ ID NO: 188422 - DNA, 20 bp, Artificial Sequence
  Synthetic oligonucleotide; GGGAAT chr2 60472003 60472022 60472006 -
ggcccatgggtctctgccca

SEQ ID NO: 188423 - DNA, 20 bp, Artificial Sequence
  Synthetic oligonucleotide; TTGAGT chr2 60471940 60471959 60471943 -
gacagcagtgctgattcagc

SEQ ID NO: 188424 - DNA, 20 bp, Artificial Sequence
  Synthetic oligonucleotide; GAGAAT chr2 60471928 60471947 60471931 -
gattcagcttgagtgtgcat

SEQ ID NO: 188425 - DNA, 20 bp, Artificial Sequence
  Synthetic oligonucleotide; GAGAAT chr2 60471916 60471935 60471919 -
gtgtgcatgagaatcacctg

SEQ ID NO: 188426 - DNA, 20 bp, Artificial Sequence
  Synthetic oligonucleotide; AAGAAT chr2 60471844 60471863 60471847 -
gtaagtctgaggtggtgccc

SEQ ID NO: 188427 - DNA, 20 bp, Artificial Sequence
  Synthetic oligonucleotide; GGGGGT chr2 60471803 60471822 60471806 -
actcccaggtgatgctgatc

SEQ ID NO: 188428 - DNA, 20 bp, Artificial Sequence
  Synthetic oligonucleotide; CTGGGT chr2 60471793 60471812 60471796 -
gatgctgatcgggggtgggc

SEQ ID NO: 188429 - DNA, 20 bp, Artificial Sequence
  Synthetic oligonucleotide; GAGAAT chr2 60471778 60471797 60471781 -
tgggcctgggtctgcgctgt

SEQ ID NO: 188430 - DNA, 20 bp, Artificial Sequence
  Synthetic oligonucleotide; GAGAAT chr2 60471681 60471700 60471684 -
agagcccatctctggctggg

SEQ ID NO: 188431 - DNA, 20 bp, Artificial Sequence
  Synthetic oligonucleotide; TCGAGT chr2 60471591 60471610 60471594 -
tgggaaggcagagctgctcc

SEQ ID NO: 188432 - DNA, 20 bp, Artificial Sequence
  Synthetic oligonucleotide; GGGAAT chr2 60471458 60471477 60471461 -
ttagcatttccagttcatgt

SEQ ID NO: 188433 - DNA, 20 bp, Artificial Sequence
  Synthetic oligonucleotide; GAGAAT chr2 60471433 60471452 60471436 -
tgtcgattttacttaccaaa

SEQ ID NO: 188434 - DNA, 20 bp, Artificial Sequence
  Synthetic oligonucleotide; ATGGAT chr2 60471424 60471443 60471427 -
tacttaccaaagagaatatt

SEQ ID NO: 188435 - DNA, 20 bp, Artificial Sequence
  Synthetic oligonucleotide; CAGAAT chr2 60471398 60471417 60471401 -
gtgtttagtggaagaagcag

SEQ ID NO: 188436 - DNA, 20 bp, Artificial Sequence
  Synthetic oligonucleotide; TGGGGT chr2 60471388 60471407 60471391 -
gaagaagcagcagaatcagc

SEQ ID NO: 188437 - DNA, 20 bp, Artificial Sequence
  Synthetic oligonucleotide; AAGGGT chr2 60471335 60471354 60471338 -
tcctgaaggaagataaatgc

SEQ ID NO: 188438 - DNA, 20 bp, Artificial Sequence
  Synthetic oligonucleotide; GTGAGT chr2 60471331 60471350 60471334 -
gaaggaagataaatgcaagg

SEQ ID NO: 188439 - DNA, 20 bp, Artificial Sequence
  Synthetic oligonucleotide; GAGGGT chr2 60471229 60471248 60471232 -
ctgcaggggaagcagaggta

SEQ ID NO: 188440 - DNA, 20 bp, Artificial Sequence
  Synthetic oligonucleotide; ATGGAT chr2 60471072 60471091 60471075 -
agacggttaagtactgctta

SEQ ID NO: 188441 - DNA, 20 bp, Artificial Sequence
  Synthetic oligonucleotide; CTGGAT chr2 60470981 60471000 60470984 -
caaattcccaggaaagacca

SEQ ID NO: 188442 - DNA, 20 bp, Artificial Sequence
  Synthetic oligonucleotide; AGGAGT chr2 60470974 60470993 60470977 -
ccaggaaagaccactggatc

SEQ ID NO: 188443 - DNA, 20 bp, Artificial Sequence
  Synthetic oligonucleotide; TAGGGT chr2 60470845 60470864 60470848 -
gggacagacttgatgatagc

SEQ ID NO: 188444 - DNA, 20 bp, Artificial Sequence
  Synthetic oligonucleotide; ATGGGT chr2 60470702 60470721 60470705 -
cgtcagcttgtttagggcta

SEQ ID NO: 188445 - DNA, 20 bp, Artificial Sequence
  Synthetic oligonucleotide; ATGGAT chr2 60470651 60470670 60470654 -
attcatgcgaggggctaggc

SEQ ID NO: 188446 - DNA, 20 bp, Artificial Sequence
  Synthetic oligonucleotide; CAGGGT chr2 60470597 60470616 60470600 -
ggaggcctgctgaagcactt

SEQ ID NO: 188447 - DNA, 20 bp, Artificial Sequence
  Synthetic oligonucleotide; CAGAGT chr2 60470584 60470603 60470587 -
agcacttcagggtctcttcc

SEQ ID NO: 188448 - DNA, 20 bp, Artificial Sequence
  Synthetic oligonucleotide; GAGAAT chr2 60470570 60470589 60470573 -
tcttcccagagtaagtggca

SEQ ID NO: 188449 - DNA, 20 bp, Artificial Sequence
  Synthetic oligonucleotide; AAGGAT chr2 60470541 60470560 60470544 -
aaatttgatactccccatac

SEQ ID NO: 188450 - DNA, 20 bp, Artificial Sequence
  Synthetic oligonucleotide; TGGGAT chr2 60470512 60470531 60470515 -
agtacctgttgcgtttatgc

SEQ ID NO: 188451 - DNA, 20 bp, Artificial Sequence
  Synthetic oligonucleotide; CTGGGT chr2 60470495 60470514 60470498 -
tgctgggatcacagagatac

SEQ ID NO: 188452 - DNA, 20 bp, Artificial Sequence
  Synthetic oligonucleotide; AAGGAT chr2 60470470 60470489 60470473 -
ttgcctgtgtttcctaagaa

SEQ ID NO: 188453 - DNA, 20 bp, Artificial Sequence
  Synthetic oligonucleotide; ATGGAT chr2 60470411 60470430 60470414 -
aggcaaaaacaagtgcaaag

SEQ ID NO: 188454 - DNA, 20 bp, Artificial Sequence
  Synthetic oligonucleotide; TTGGGT chr2 60470247 60470266 60470250 -
tttgtggtgtttattttgtt

SEQ ID NO: 188455 - DNA, 20 bp, Artificial Sequence
  Synthetic oligonucleotide; GAGGAT chr2 60470237 60470256 60470240 -
ttattttgttttgggtcaga

SEQ ID NO: 188456 - DNA, 20 bp, Artificial Sequence
  Synthetic oligonucleotide; CAGGAT chr2 60470029 60470048 60470032 -
tgtgctctatataaggagaa

SEQ ID NO: 188457 - DNA, 20 bp, Artificial Sequence
  Synthetic oligonucleotide; TAGAGT chr2 60469996 60470015 60469999 -
acacttgagacctgctatcc

SEQ ID NO: 188458 - DNA, 20 bp, Artificial Sequence
  Synthetic oligonucleotide; CAGAGT chr2 60469632 60469651 60469635 -
gagaagtcacttgtcttcac

SEQ ID NO: 188459 - DNA, 20 bp, Artificial Sequence
  Synthetic oligonucleotide; ATGGGT chr2 60469599 60469618 60469602 -
agtgcagtaaaatggtgaag

SEQ ID NO: 188460 - DNA, 20 bp, Artificial Sequence
  Synthetic oligonucleotide; CAGGGT chr2 60469593 60469612 60469596 -
gtaaaatggtgaagatgggt

SEQ ID NO: 188461 - DNA, 20 bp, Artificial Sequence
  Synthetic oligonucleotide; CTGGGT chr2 60469585 60469604 60469588 -
gtgaagatgggtcagggttt

SEQ ID NO: 188462 - DNA, 20 bp, Artificial Sequence
  Synthetic oligonucleotide; TGGAAT chr2 60469568 60469587 60469571 -
tttctgggtgctggcattat

SEQ ID NO: 188463 - DNA, 20 bp, Artificial Sequence
  Synthetic oligonucleotide; CAGGAT chr2 60469446 60469465 60469449 -
tgtgtaaggtttccagttga

SEQ ID NO: 188464 - DNA, 20 bp, Artificial Sequence
  Synthetic oligonucleotide; TAGAGT chr2 60469438 60469457 60469441 -
gtttccagttgacaggattc

SEQ ID NO: 188465 - DNA, 20 bp, Artificial Sequence
  Synthetic oligonucleotide; TTGGGT chr2 60469261 60469280 60469264 -
atcagcattttgctttttgc

SEQ ID NO: 188466 - DNA, 20 bp, Artificial Sequence
  Synthetic oligonucleotide; TGGAAT chr2 60468915 60468934 60468918 -
gatgttgtaatctattttaa

SEQ ID NO: 188467 - DNA, 20 bp, Artificial Sequence
  Synthetic oligonucleotide; TTGGGT chr2 60468851 60468870 60468854 -
tgtagctgtagtgcttgatt

SEQ ID NO: 188468 - DNA, 20 bp, Artificial Sequence
  Synthetic oligonucleotide; TGGGAT chr2 60468767 60468786 60468770 -
ggagctctaatccccacgcc

SEQ ID NO: 188469 - DNA, 20 bp, Artificial Sequence
  Synthetic oligonucleotide; ATGAGT chr2 60468763 60468782 60468766 -
ctctaatccccacgcctggg

SEQ ID NO: 188470 - DNA, 20 bp, Artificial Sequence
  Synthetic oligonucleotide; CAGAAT chr2 60468756 60468775 60468759 -
ccccacgcctgggatgagtg

SEQ ID NO: 188471 - DNA, 20 bp, Artificial Sequence
  Synthetic oligonucleotide; CAGGGT chr2 60468742 60468761 60468745 -
tgagtgcagaatatgccccg

SEQ ID NO: 188472 - DNA, 20 bp, Artificial Sequence
  Synthetic oligonucleotide; GAGAAT chr2 60468685 60468704 60468688 -
atgtccatgtgtatagagat

SEQ ID NO: 188473 - DNA, 20 bp, Artificial Sequence
  Synthetic oligonucleotide; AGGAGT chr2 60468646 60468665 60468649 -
ccttactttttaagtactga

SEQ ID NO: 188474 - DNA, 20 bp, Artificial Sequence
  Synthetic oligonucleotide; GTGGGT chr2 60468498 60468517 60468501 -
gctgatagtagctcatccct

SEQ ID NO: 188475 - DNA, 20 bp, Artificial Sequence
  Synthetic oligonucleotide; CAGGGT chr2 60468484 60468503 60468487 -
atccctgtgggtcttctccc

SEQ ID NO: 188476 - DNA, 20 bp, Artificial Sequence
  Synthetic oligonucleotide; TTGGGT chr2 60468384 60468403 60468387 -
ctgtggcctcatttaggact

SEQ ID NO: 188477 - DNA, 20 bp, Artificial Sequence
  Synthetic oligonucleotide; CAGAAT chr2 60468347 60468366 60468350 -
cacacatctttagccaaggc

SEQ ID NO: 188478 - DNA, 20 bp, Artificial Sequence
  Synthetic oligonucleotide; AGGAGT chr2 60468337 60468356 60468340 -
tagccaaggccagaatcaaa

SEQ ID NO: 188479 - DNA, 20 bp, Artificial Sequence
  Synthetic oligonucleotide; TAGGGT chr2 60468326 60468345 60468329 -
agaatcaaaaggagtcagtt

SEQ ID NO: 188480 - DNA, 20 bp, Artificial Sequence
  Synthetic oligonucleotide; CAGAGT chr2 60468315 60468334 60468318 -
gagtcagtttagggttattc

SEQ ID NO: 188481 - DNA, 20 bp, Artificial Sequence
  Synthetic oligonucleotide; ATGAAT chr2 60466926 60466945 60466929 -
tctgtgtaggaacacatggt

SEQ ID NO: 188482 - DNA, 20 bp, Artificial Sequence
  Synthetic oligonucleotide; GGGGGT chr2 60466900 60466919 60466903 -
catgcatggctaaaaggtta

SEQ ID NO: 188483 - DNA, 20 bp, Artificial Sequence
  Synthetic oligonucleotide; GAGAAT chr2 60466756 60466775 60466759 -
aaggaaaaaggtcatggaga

SEQ ID NO: 188484 - DNA, 20 bp, Artificial Sequence
  Synthetic oligonucleotide; CAGAGT chr2 60466733 60466752 60466736 -
aataacaaagagcaagatgc

SEQ ID NO: 188485 - DNA, 20 bp, Artificial Sequence
  Synthetic oligonucleotide; AAGAGT chr2 60466577 60466596 60466580 -
ctaggtaatcctaggtaaca

SEQ ID NO: 188486 - DNA, 20 bp, Artificial Sequence
  Synthetic oligonucleotide; GTGAAT chr2 60466565 60466584 60466568 -
aggtaacaaagagttattgt

SEQ ID NO: 188487 - DNA, 20 bp, Artificial Sequence
  Synthetic oligonucleotide; CTGGGT chr2 60466534 60466553 60466537 -
aagccctcaggtcctgaggg

SEQ ID NO: 188488 - DNA, 20 bp, Artificial Sequence
  Synthetic oligonucleotide; AGGGGT chr2 60466523 60466542 60466526 -
tcctgagggctgggtggttc

SEQ ID NO: 188489 - DNA, 20 bp, Artificial Sequence
  Synthetic oligonucleotide; CTGGGT chr2 60466473 60466492 60466476 -
cccccaagctgggcctaagc

SEQ ID NO: 188490 - DNA, 20 bp, Artificial Sequence
  Synthetic oligonucleotide; CTGGGT chr2 60466404 60466423 60466407 -
ttctagtccctgcatgctgg

SEQ ID NO: 188491 - DNA, 20 bp, Artificial Sequence
  Synthetic oligonucleotide; AGGGAT chr2 60466323 60466342 60466326 -
cggagccacttttggaggga

SEQ ID NO: 188492 - DNA, 20 bp, Artificial Sequence
  Synthetic oligonucleotide; GGGAGT chr2 60466313 60466332 60466316 -
tttggagggaagggatagaa

SEQ ID NO: 188493 - DNA, 20 bp, Artificial Sequence
  Synthetic oligonucleotide; GAGGGT chr2 60466293 60466312 60466296 -
gggagttgagcagttcagag

SEQ ID NO: 188494 - DNA, 20 bp, Artificial Sequence
  Synthetic oligonucleotide; TGGAGT chr2 60466288 60466307 60466291 -
ttgagcagttcagaggaggg

SEQ ID NO: 188495 - DNA, 20 bp, Artificial Sequence
  Synthetic oligonucleotide; GGGAGT chr2 60466215 60466234 60466218 -
gcctggtcttcctgagggct

SEQ ID NO: 188496 - DNA, 20 bp, Artificial Sequence
  Synthetic oligonucleotide; GAGGGT chr2 60466140 60466159 60466143 -
ctcccaccttcccacaaagg

SEQ ID NO: 188497 - DNA, 20 bp, Artificial Sequence
  Synthetic oligonucleotide; AGGAGT chr2 60466096 60466115 60466099 -
cctgctggcaggaccaattt

SEQ ID NO: 188498 - DNA, 20 bp, Artificial Sequence
  Synthetic oligonucleotide; GTGGGT chr2 60466068 60466087 60466071 -
ccagaacaaggtatgtggaa

SEQ ID NO: 188499 - DNA, 20 bp, Artificial Sequence
  Synthetic oligonucleotide; GGGGGT chr2 60466059 60466078 60466062 -
ggtatgtggaagtgggttgt

SEQ ID NO: 188500 - DNA, 20 bp, Artificial Sequence
  Synthetic oligonucleotide; CTGGGT chr2 60465906 60465925 60465909 -
aactagagcctccttttggc

SEQ ID NO: 188501 - DNA, 20 bp, Artificial Sequence
  Synthetic oligonucleotide; CGGGGT chr2 60465864 60465883 60465867 -
accttcctctggaagccgtt

SEQ ID NO: 188502 - DNA, 20 bp, Artificial Sequence
  Synthetic oligonucleotide; AGGAAT chr2 60465692 60465711 60465695 -
tttatgctcattttacagat

SEQ ID NO: 188503 - DNA, 20 bp, Artificial Sequence
  Synthetic oligonucleotide; CAGAGT chr2 60465655 60465674 60465658 -
gagaaatcaaatgactatcc

SEQ ID NO: 188504 - DNA, 20 bp, Artificial Sequence
  Synthetic oligonucleotide; GTGGAT chr2 60465640 60465659 60465643 -
tatcccagagttacaatcta

SEQ ID NO: 188505 - DNA, 20 bp, Artificial Sequence
  Synthetic oligonucleotide; CTGAAT chr2 60465595 60465614 60465598 -
tctcagacctccttgttctt

SEQ ID NO: 188506 - DNA, 20 bp, Artificial Sequence
  Synthetic oligonucleotide; GGGGGT chr2 60465539 60465558 60465542 -
attggtgacatactagaaat

SEQ ID NO: 188507 - DNA, 20 bp, Artificial Sequence
  Synthetic oligonucleotide; CAGAGT chr2 60465349 60465368 60465352 -
attgagaagttgattttcat

SEQ ID NO: 188508 - DNA, 20 bp, Artificial Sequence
  Synthetic oligonucleotide; AAGAAT chr2 60465338 60465357 60465341 -
gattttcatcagagtaaatg

SEQ ID NO: 188509 - DNA, 20 bp, Artificial Sequence
  Synthetic oligonucleotide; AGGAAT chr2 60465181 60465200 60465184 -
tttattgatgactgcagttt

SEQ ID NO: 188510 - DNA, 20 bp, Artificial Sequence
  Synthetic oligonucleotide; TAGAAT chr2 60465174 60465193 60465177 -
atgactgcagtttaggaatt

SEQ ID NO: 188511 - DNA, 20 bp, Artificial Sequence
  Synthetic oligonucleotide; CTGAGT chr2 60465129 60465148 60465132 -
atatggtacaccggcatgag

SEQ ID NO: 188512 - DNA, 20 bp, Artificial Sequence
  Synthetic oligonucleotide; TAGAAT chr2 60464964 60464983 60464967 -
cactagctgccctcatgatc

SEQ ID NO: 188513 - DNA, 20 bp, Artificial Sequence
  Synthetic oligonucleotide; GGGAAT chr2 60464947 60464966 60464950 -
atctagaatatctagttgat

SEQ ID NO: 188514 - DNA, 20 bp, Artificial Sequence
  Synthetic oligonucleotide; GAGGAT chr2 60464853 60464872 60464856 -
ctgatgtatgagagagaggg

SEQ ID NO: 188515 - DNA, 20 bp, Artificial Sequence
  Synthetic oligonucleotide; TAGGAT chr2 60464789 60464808 60464792 -
actggctctgaaaaaaagtt

SEQ ID NO: 188516 - DNA, 20 bp, Artificial Sequence
  Synthetic oligonucleotide; AAGGAT chr2 60464734 60464753 60464737 -
tctcatttaagcctttttga

SEQ ID NO: 188517 - DNA, 20 bp, Artificial Sequence
  Synthetic oligonucleotide; ATGAGT chr2 60464632 60464651 60464635 -
tgaaaccagcaccactaatt

SEQ ID NO: 188518 - DNA, 20 bp, Artificial Sequence
  Synthetic oligonucleotide; CTGGAT chr2 60464620 60464639 60464623 -
cactaattatgagtctagtc

SEQ ID NO: 188519 - DNA, 20 bp, Artificial Sequence
  Synthetic oligonucleotide; TGGAGT chr2 60464571 60464590 60464574 -
aaatataattttaaggcatt

SEQ ID NO: 188520 - DNA, 20 bp, Artificial Sequence
  Synthetic oligonucleotide; TTGGAT chr2 60464547 60464566 60464550 -
gtgatgaacgtgttaaggac

SEQ ID NO: 188521 - DNA, 20 bp, Artificial Sequence
  Synthetic oligonucleotide; AGGAAT chr2 60464493 60464512 60464496 -
ctcagatcgtcaggctaaat

SEQ ID NO: 188522 - DNA, 20 bp, Artificial Sequence
  Synthetic oligonucleotide; GAGGAT chr2 60464444 60464463 60464447 -
aggacaaggaggaagccaca

SEQ ID NO: 188523 - DNA, 20 bp, Artificial Sequence
  Synthetic oligonucleotide; AGGAGT chr2 60464166 60464185 60464169 -
cttgtttaagagatttaccc

SEQ ID NO: 188524 - DNA, 20 bp, Artificial Sequence
  Synthetic oligonucleotide; TTGAGT chr2 60464152 60464171 60464155 -
ttacccaggagtgagatata

SEQ ID NO: 188525 - DNA, 20 bp, Artificial Sequence
  Synthetic oligonucleotide; TGGGAT chr2 60464147 60464166 60464150 -
caggagtgagatatattgag

SEQ ID NO: 188526 - DNA, 20 bp, Artificial Sequence
  Synthetic oligonucleotide; AGGAGT chr2 60464104 60464123 60464107 -
gtaaattacaaggtcagggc

SEQ ID NO: 188527 - DNA, 20 bp, Artificial Sequence
  Synthetic oligonucleotide; TGGAAT chr2 60464058 60464077 60464061 -
tgagcgaggctggcttattt

SEQ ID NO: 188528 - DNA, 20 bp, Artificial Sequence
  Synthetic oligonucleotide; CAGAAT chr2 60463804 60463823 60463807 -
tattttaaggcttttttttt

SEQ ID NO: 188529 - DNA, 20 bp, Artificial Sequence
  Synthetic oligonucleotide; TTGGGT chr2 60463577 60463596 60463580 -
caaagtggcatttaccactc

SEQ ID NO: 188530 - DNA, 20 bp, Artificial Sequence
  Synthetic oligonucleotide; CAGAGT chr2 60463506 60463525 60463509 -
cagacggcttggctactggc

SEQ ID NO: 188531 - DNA, 20 bp, Artificial Sequence
  Synthetic oligonucleotide; CTGAGT chr2 60463457 60463476 60463460 -
tgtttctttctcaactggag

SEQ ID NO: 188532 - DNA, 20 bp, Artificial Sequence
  Synthetic oligonucleotide; CAGGAT chr2 60463437 60463456 60463440 -
ctgagtcccagccgagggcg

SEQ ID NO: 188533 - DNA, 20 bp, Artificial Sequence
  Synthetic oligonucleotide; GAGGAT chr2 60463384 60463403 60463387 -
cctctcaaaacaatgaggag

SEQ ID NO: 188534 - DNA, 20 bp, Artificial Sequence
  Synthetic oligonucleotide; TAGGAT chr2 60463316 60463335 60463319 -
gttttaactgttccttaaac

SEQ ID NO: 188535 - DNA, 20 bp, Artificial Sequence
  Synthetic oligonucleotide; TTGGAT chr2 60463225 60463244 60463228 -
cgggggacaactcctaaaga

SEQ ID NO: 188536 - DNA, 20 bp, Artificial Sequence
  Synthetic oligonucleotide; CTGAAT chr2 60463201 60463220 60463204 -
atacagcctatccgttaaat

SEQ ID NO: 188537 - DNA, 20 bp, Artificial Sequence
  Synthetic oligonucleotide; TGGGGT chr2 60463139 60463158 60463142 -
gataaaaatggacgtcccca

SEQ ID NO: 188538 - DNA, 20 bp, Artificial Sequence
  Synthetic oligonucleotide; TGGGGT chr2 60463091 60463110 60463094 -
tcactgatcctcccacagtc

SEQ ID NO: 188539 - DNA, 20 bp, Artificial Sequence
  Synthetic oligonucleotide; GAGAAT chr2 60463083 60463102 60463086 -
cctcccacagtctggggtgt

SEQ ID NO: 188540 - DNA, 20 bp, Artificial Sequence
  Synthetic oligonucleotide; ATGAGT chr2 60463046 60463065 60463049 -
tttttccacggaagtatttt

SEQ ID NO: 188541 - DNA, 20 bp, Artificial Sequence
  Synthetic oligonucleotide; GTGAGT chr2 60462959 60462978 60462962 -
tagggccatagaacattgta

SEQ ID NO: 188542 - DNA, 20 bp, Artificial Sequence
  Synthetic oligonucleotide; GGGAAT chr2 60462881 60462900 60462884 -
agttcacctgtcacccaggg

SEQ ID NO: 188543 - DNA, 20 bp, Artificial Sequence
  Synthetic oligonucleotide; TGGGAT chr2 60462868 60462887 60462871 -
cccaggggggaatagaaagc

SEQ ID NO: 188544 - DNA, 20 bp, Artificial Sequence
  Synthetic oligonucleotide; TTGGGT chr2 60462841 60462860 60462844 -
taggaagccaaaaagtttcc

SEQ ID NO: 188545 - DNA, 20 bp, Artificial Sequence
  Synthetic oligonucleotide; TAGAAT chr2 60462716 60462735 60462719 -
aagacatttgttgaggtgcc

SEQ ID NO: 188546 - DNA, 20 bp, Artificial Sequence
  Synthetic oligonucleotide; CAGGAT chr2 60462678 60462697 60462681 -
atcctcaagccagaactggt

SEQ ID NO: 188547 - DNA, 20 bp, Artificial Sequence
  Synthetic oligonucleotide; GGGGAT chr2 60462661 60462680 60462664 -
ggtcaggatttttctgcttt

SEQ ID NO: 188548 - DNA, 20 bp, Artificial Sequence
  Synthetic oligonucleotide; TTGGAT chr2 60462656 60462675 60462659 -
ggatttttctgctttgggga

SEQ ID NO: 188549 - DNA, 20 bp, Artificial Sequence
  Synthetic oligonucleotide; CTGAGT chr2 60462635 60462654 60462638 -
tggatataaaatttctagaa

SEQ ID NO: 188550 - DNA, 20 bp, Artificial Sequence
  Synthetic oligonucleotide; CTGGGT chr2 60462595 60462614 60462598 -
atcaattggaccaatattta

SEQ ID NO: 188551 - DNA, 20 bp, Artificial Sequence
  Synthetic oligonucleotide; GGGGGT chr2 60462563 60462582 60462566 -
gctcagacgtgccaggcaca

SEQ ID NO: 188552 - DNA, 20 bp, Artificial Sequence
  Synthetic oligonucleotide; TGGGGT chr2 60462535 60462554 60462538 -
gtcagtgagggcttaggcct

SEQ ID NO: 188553 - DNA, 20 bp, Artificial Sequence
  Synthetic oligonucleotide; AGGGGT chr2 60462527 60462546 60462530 -
gggcttaggccttggggttg

SEQ ID NO: 188554 - DNA, 20 bp, Artificial Sequence
  Synthetic oligonucleotide; ATGGAT chr2 60462335 60462354 60462338 -
gcaacacgcacagaacactc

SEQ ID NO: 188555 - DNA, 20 bp, Artificial Sequence
  Synthetic oligonucleotide; AAGAAT chr2 60462328 60462347 60462331 -
gcacagaacactcatggatt

SEQ ID NO: 188556 - DNA, 20 bp, Artificial Sequence
  Synthetic oligonucleotide; GCGGGT chr2 60462286 60462305 60462289 -
cacggaagtcccctgacccc

SEQ ID NO: 188557 - DNA, 20 bp, Artificial Sequence
  Synthetic oligonucleotide; CAGAAT chr2 60462257 60462276 60462260 -
tatcccttcaggactaggtg

SEQ ID NO: 188558 - DNA, 20 bp, Artificial Sequence
  Synthetic oligonucleotide; TGGGAT chr2 60462229 60462248 60462232 -
ccttcccagccacctctcca

SEQ ID NO: 188559 - DNA, 20 bp, Artificial Sequence
  Synthetic oligonucleotide; AAGAAT chr2 60462190 60462209 60462193 -
aataacccctttaacctgct

SEQ ID NO: 188560 - DNA, 20 bp, Artificial Sequence
  Synthetic oligonucleotide; CAGGAT chr2 60462182 60462201 60462185 -
ctttaacctgctaagaatac

SEQ ID NO: 188561 - DNA, 20 bp, Artificial Sequence
  Synthetic oligonucleotide; CCGAGT chr2 60462033 60462052 60462036 -
tggccctggccacccatcac

SEQ ID NO: 188562 - DNA, 20 bp, Artificial Sequence
  Synthetic oligonucleotide; CAGGGT chr2 60462019 60462038 60462022 -
catcacccgagtgcctttga

SEQ ID NO: 188563 - DNA, 20 bp, Artificial Sequence
  Synthetic oligonucleotide; TTGAAT chr2 60462006 60462025 60462009 -
cctttgacagggtgctgcgg

SEQ ID NO: 188564 - DNA, 20 bp, Artificial Sequence
  Synthetic oligonucleotide; ATGGAT chr2 60461976 60461995 60461979 -
tggctatggagcctcccgcc

SEQ ID NO: 188565 - DNA, 20 bp, Artificial Sequence
  Synthetic oligonucleotide; GCGAGT chr2 60461777 60461796 60461780 -
cccggtcaagtccaagtcat

SEQ ID NO: 188566 - DNA, 20 bp, Artificial Sequence
  Synthetic oligonucleotide; GAGGGT chr2 60461386 60461405 60461389 -
gaggagctgacggagagcga

SEQ ID NO: 188567 - DNA, 20 bp, Artificial Sequence
  Synthetic oligonucleotide; GCGAGT chr2 60461138 60461157 60461141 -
cgacgaagactcggtggccg

SEQ ID NO: 188568 - DNA, 20 bp, Artificial Sequence
  Synthetic oligonucleotide; GCGAGT chr2 60461084 60461103 60461087 -
tggccgcggctgctccccgg

SEQ ID NO: 188569 - DNA, 20 bp, Artificial Sequence
  Synthetic oligonucleotide; AGGAGT chr2 60460994 60461013 60460997 -
taagcgcatcaagctcgaga

SEQ ID NO: 188570 - DNA, 20 bp, Artificial Sequence
  Synthetic oligonucleotide; GGGAGT chr2 60460830 60460849 60460833 -
cggagcactcctcggagaac

SEQ ID NO: 188571 - DNA, 20 bp, Artificial Sequence
  Synthetic oligonucleotide; AGGGAT chr2 60460789 60460808 60460792 -
ccgcccggggagctggacgg

SEQ ID NO: 188572 - DNA, 20 bp, Artificial Sequence
  Synthetic oligonucleotide; GTGAGT chr2 60460682 60460701 60460685 -
gggcagacgcagcgacactt

SEQ ID NO: 188573 - DNA, 20 bp, Artificial Sequence
  Synthetic oligonucleotide; CAGAGT chr2 60460572 60460591 60460575 -
tgtgcaactatgcctgtgcc

SEQ ID NO: 188574 - DNA, 20 bp, Artificial Sequence
  Synthetic oligonucleotide; TCGAGT chr2 60460438 60460457 60460441 -
atgaaaaaatggcacagtga

SEQ ID NO: 188575 - DNA, 20 bp, Artificial Sequence
  Synthetic oligonucleotide; TTGAAT chr2 60460431 60460450 60460434 -
aatggcacagtgatcgagtg

SEQ ID NO: 188576 - DNA, 20 bp, Artificial Sequence
  Synthetic oligonucleotide; CTGAAT chr2 60460412 60460431 60460415 -
gttgaataatgatataaaaa

SEQ ID NO: 188577 - DNA, 20 bp, Artificial Sequence
  Synthetic oligonucleotide; TAGGAT chr2 60460316 60460335 60460319 -
ccctccagccccactccctg

SEQ ID NO: 188578 - DNA, 20 bp, Artificial Sequence
  Synthetic oligonucleotide; AAGAAT chr2 60460252 60460271 60460255 -
caaacagaagtaacgaagct

SEQ ID NO: 188579 - DNA, 20 bp, Artificial Sequence
  Synthetic oligonucleotide; GAGAGT chr2 60460244 60460263 60460247 -
agtaacgaagctaagaatat

SEQ ID NO: 188580 - DNA, 20 bp, Artificial Sequence
  Synthetic oligonucleotide; TTGAAT chr2 60460151 60460170 60460154 -
ttcctttatgttctcaccgt

SEQ ID NO: 188581 - DNA, 20 bp, Artificial Sequence
  Synthetic oligonucleotide; TTGGAT chr2 60459857 60459876 60459860 -
gtgaggaggaaaaacagtct

SEQ ID NO: 188582 - DNA, 20 bp, Artificial Sequence
  Synthetic oligonucleotide; CAGAAT chr2 60459837 60459856 60459840 -
ttggattaaccctctataga

SEQ ID NO: 188583 - DNA, 20 bp, Artificial Sequence
  Synthetic oligonucleotide; AAGGGT chr2 60459785 60459804 60459788 -
gagctaaatgtctgtctcta

SEQ ID NO: 188584 - DNA, 20 bp, Artificial Sequence
  Synthetic oligonucleotide; TTGAAT chr2 60459745 60459764 60459748 -
ggaaaggaagaaaaaaggcc

SEQ ID NO: 188585 - DNA, 20 bp, Artificial Sequence
  Synthetic oligonucleotide; ATGAGT chr2 60459685 60459704 60459688 -
ctatcatttggttttaaaat

SEQ ID NO: 188586 - DNA, 20 bp, Artificial Sequence
  Synthetic oligonucleotide; TTGGAT chr2 60459676 60459695 60459679 -
ggttttaaaatatgagtgcc

SEQ ID NO: 188587 - DNA, 20 bp, Artificial Sequence
  Synthetic oligonucleotide; TTGGGT chr2 60459610 60459629 60459613 -
acttgtagcttaattcagca

SEQ ID NO: 188588 - DNA, 20 bp, Artificial Sequence
  Synthetic oligonucleotide; TTGAAT chr2 60459374 60459393 60459377 -
ttttttaaacaatgattaaa

SEQ ID NO: 188589 - DNA, 20 bp, Artificial Sequence
  Synthetic oligonucleotide; AGGAGT chr2 60459324 60459343 60459327 -
cgcaattaaatacactagta

SEQ ID NO: 188590 - DNA, 20 bp, Artificial Sequence
  Synthetic oligonucleotide; ATGAAT chr2 60459048 60459067 60459051 -
tgatacaatgatgattaact

SEQ ID NO: 188591 - DNA, 20 bp, Artificial Sequence
  Synthetic oligonucleotide; AAGAAT chr2 60458996 60459015 60458999 -
attcttaaaaaaagaagaga

SEQ ID NO: 188592 - DNA, 20 bp, Artificial Sequence
  Synthetic oligonucleotide; AAGAGT chr2 60458987 60459006 60458990 -
aaaagaagagaaagaatttt

SEQ ID NO: 188593 - DNA, 20 bp, Artificial Sequence
  Synthetic oligonucleotide; GAGGAT chr2 60458899 60458918 60458902 -
ctatttgtgttaacatggaa

SEQ ID NO: 188594 - DNA, 20 bp, Artificial Sequence
  Synthetic oligonucleotide; TTGAGT chr2 60458762 60458781 60458765 -
tctaatcagagatacagagg

SEQ ID NO: 188595 - DNA, 20 bp, Artificial Sequence
  Synthetic oligonucleotide; AAGAAT chr2 60458671 60458690 60458674 -
atacttaagggaaaagttgc

SEQ ID NO: 188596 - DNA, 20 bp, Artificial Sequence
  Synthetic oligonucleotide; GTGAAT chr2 60458541 60458560 60458544 -
gacgcaacattgcaagcgct

SEQ ID NO: 188597 - DNA, 20 bp, Artificial Sequence
  Synthetic oligonucleotide; CAGAAT chr2 60458530 60458549 60458533 -
gcaagcgctgtgaatggaaa

SEQ ID NO: 188598 - DNA, 20 bp, Artificial Sequence
  Synthetic oligonucleotide; ATGAAT chr2 60458509 60458528 60458512 -
agaatacacttaacatagaa

SEQ ID NO: 188599 - DNA, 20 bp, Artificial Sequence
  Synthetic oligonucleotide; AAGGAT chr2 60458480 60458499 60458483 -
tgctttcgcttctacagtgc

SEQ ID NO: 188600 - DNA, 20 bp, Artificial Sequence
  Synthetic oligonucleotide; TAGGGT chr2 60458386 60458405 60458389 -
tttaggggggaactgcattt

SEQ ID NO: 188601 - DNA, 20 bp, Artificial Sequence
  Synthetic oligonucleotide; TTGGAT chr2 60458314 60458333 60458317 -
ggtagtggaaattctatgcc

SEQ ID NO: 188602 - DNA, 20 bp, Artificial Sequence
  Synthetic oligonucleotide; TAGAAT chr2 60458167 60458186 60458170 -
tggtcttttttctgtatttc

SEQ ID NO: 188603 - DNA, 20 bp, Artificial Sequence
  Synthetic oligonucleotide; TTGAAT chr2 60458156 60458175 60458159 -
ctgtatttctagaatggtat

SEQ ID NO: 188604 - DNA, 20 bp, Artificial Sequence
  Synthetic oligonucleotide; CAGGAT chr2 60458001 60458020 60458004 -
agtatatttttttaatttgg

SEQ ID NO: 188605 - DNA, 20 bp, Artificial Sequence
  Synthetic oligonucleotide; TAGAAT chr2 60457887 60457906 60457890 -
ggcggtttgggggagcctgc

SEQ ID NO: 188606 - DNA, 20 bp, Artificial Sequence
  Synthetic oligonucleotide; ATGGAT chr2 60457876 60457895 60457879 -
ggagcctgctagaatgtcac

SEQ ID NO: 188607 - DNA, 20 bp, Artificial Sequence
  Synthetic oligonucleotide; AGGGGT chr2 60457861 60457880 60457864 -
gtcacatggatggctgtcat

SEQ ID NO: 188608 - DNA, 20 bp, Artificial Sequence
  Synthetic oligonucleotide; AAGAAT chr2 60457610 60457629 60457613 -
tgctttatatttagattgga

SEQ ID NO: 188609 - DNA, 20 bp, Artificial Sequence
  Synthetic oligonucleotide; CAGAAT chr2 60457539 60457558 60457542 -
cttttttgtaaatggcaatg

SEQ ID NO: 188610 - DNA, 20 bp, Artificial Sequence
  Synthetic oligonucleotide; GGGAGT chr2 60457460 60457479 60457463 -
gaaattttatcttttactat

SEQ ID NO: 188611 - DNA, 20 bp, Artificial Sequence
  Synthetic oligonucleotide; CAGGAT chr2 60457102 60457121 60457105 -
gaaggccagtcagtcttttt

SEQ ID NO: 188612 - DNA, 20 bp, Artificial Sequence
  Synthetic oligonucleotide; TAGAAT chr2 60456983 60457002 60456986 -
agttttaaggctttccagtt

SEQ ID NO: 188613 - DNA, 20 bp, Artificial Sequence
  Synthetic oligonucleotide; AAGAGT chr2 60456731 60456750 60456734 -
cagctctttggtttccatgt

SEQ ID NO: 188614 - DNA, 20 bp, Artificial Sequence
  Synthetic oligonucleotide; AGGGGT chr2 60456583 60456602 60456586 -
aagaaaagaaagcagccact

SEQ ID NO: 188615 - DNA, 20 bp, Artificial Sequence
  Synthetic oligonucleotide; TGGAAT chr2 60456554 60456573 60456557 -
gccagacatagtgaaatctt

SEQ ID NO: 188616 - DNA, 20 bp, Artificial Sequence
  Synthetic oligonucleotide; TAGGGT chr2 60456455 60456474 60456458 -
gattactttaggtgttttga

SEQ ID NO: 188617 - DNA, 20 bp, Artificial Sequence
  Synthetic oligonucleotide; CTGGAT chr2 60456445 60456464 60456448 -
ggtgttttgatagggtcttc

SEQ ID NO: 188618 - DNA, 20 bp, Artificial Sequence
  Synthetic oligonucleotide; GGGAAT chr2 60456423 60456442 60456426 -
ggatgacagcaaataagggc

SEQ ID NO: 188619 - DNA, 20 bp, Artificial Sequence
  Synthetic oligonucleotide; ATGAAT chr2 60456264 60456283 60456267 -
tgtccctgttcccagtgtag

SEQ ID NO: 188620 - DNA, 20 bp, Artificial Sequence
  Synthetic oligonucleotide; ATGAAT chr2 60456260 60456279 60456263 -
cctgttcccagtgtagatga

SEQ ID NO: 188621 - DNA, 20 bp, Artificial Sequence
  Synthetic oligonucleotide; AAGAAT chr2 60456114 60456133 60456117 -
tcatgccttttatctgaggc

SEQ ID NO: 188622 - DNA, 20 bp, Artificial Sequence
  Synthetic oligonucleotide; TTGGGT chr2 60456056 60456075 60456059 -
atgttttctgaaaagccagt

SEQ ID NO: 188623 - DNA, 20 bp, Artificial Sequence
  Synthetic oligonucleotide; GAGAGT chr2 60456042 60456061 60456045 -
gccagtttgggtgggaagga

SEQ ID NO: 188624 - DNA, 20 bp, Artificial Sequence
  Synthetic oligonucleotide; AGGAAT chr2 60456028 60456047 60456031 -
gaaggagagagtggggctag

SEQ ID NO: 188625 - DNA, 20 bp, Artificial Sequence
  Synthetic oligonucleotide; AAGGAT chr2 60456013 60456032 60456016 -
gctagaggaatccactgaga

SEQ ID NO: 188626 - DNA, 20 bp, Artificial Sequence
  Synthetic oligonucleotide; GAGAAT chr2 60456003 60456022 60456006 -
tccactgagaaaggatgttg

SEQ ID NO: 188627 - DNA, 20 bp, Artificial Sequence
  Synthetic oligonucleotide; TGGGGT chr2 60455984 60456003 60455987 -
ggagaatattacataggagg

SEQ ID NO: 188628 - DNA, 20 bp, Artificial Sequence
  Synthetic oligonucleotide; TGGGGT chr2 60455979 60455998 60455982 -
atattacataggaggtgggg

SEQ ID NO: 188629 - DNA, 20 bp, Artificial Sequence
  Synthetic oligonucleotide; TTGGAT chr2 60455907 60455926 60455910 -
aaagatatactgtatgtgtt

SEQ ID NO: 188630 - DNA, 20 bp, Artificial Sequence
  Synthetic oligonucleotide; CTGAAT chr2 60455886 60455905 60455889 -
tggattaggtttctccaaaa

SEQ ID NO: 188631 - DNA, 20 bp, Artificial Sequence
  Synthetic oligonucleotide; ATGAGT chr2 60455747 60455766 60455750 -
ttactcttttattaggagct

SEQ ID NO: 188632 - DNA, 20 bp, Artificial Sequence
  Synthetic oligonucleotide; CAGAAT chr2 60455653 60455672 60455656 -
aggttttgcatcctgacaga

SEQ ID NO: 188633 - DNA, 20 bp, Artificial Sequence
  Synthetic oligonucleotide; GTGGAT chr2 60455642 60455661 60455645 -
cctgacagacagaattaatg

SEQ ID NO: 188634 - DNA, 20 bp, Artificial Sequence
  Synthetic oligonucleotide; GGGAAT chr2 60455598 60455617 60455601 -
caaatttcttaaatcaaatg

SEQ ID NO: 188635 - DNA, 20 bp, Artificial Sequence
  Synthetic oligonucleotide; AGGAGT chr2 60455588 60455607 60455591 -
aaatcaaatggggaatgggg

SEQ ID NO: 188636 - DNA, 20 bp, Artificial Sequence
  Synthetic oligonucleotide; ATGGGT chr2 60455509 60455528 60455512 -
ttaaataaatttactgggag

SEQ ID NO: 188637 - DNA, 20 bp, Artificial Sequence
  Synthetic oligonucleotide; ATGAAT chr2 60455318 60455337 60455321 -
tgcacatttccaatagtaag

SEQ ID NO: 188638 - DNA, 20 bp, Artificial Sequence
  Synthetic oligonucleotide; TGGAAT chr2 60455218 60455237 60455221 -
taacaggcttgacgtgctga

SEQ ID NO: 188639 - DNA, 20 bp, Artificial Sequence
  Synthetic oligonucleotide; AGGAAT chr2 60455142 60455161 60455145 -
ttgagaacaacttaataaac

SEQ ID NO: 188640 - DNA, 20 bp, Artificial Sequence
  Synthetic oligonucleotide; TTGAGT chr2 60454936 60454955 60454939 -
tggcagaaagtgtgaagtag

SEQ ID NO: 188641 - DNA, 20 bp, Artificial Sequence
  Synthetic oligonucleotide; TGGGAT chr2 60454728 60454747 60454731 -
cacagtttgctgaaaggtac

SEQ ID NO: 188642 - DNA, 20 bp, Artificial Sequence
  Synthetic oligonucleotide; AGGAGT chr2 60454702 60454721 60454705 -
tatttcgggccttcctgaaa

SEQ ID NO: 188643 - DNA, 20 bp, Artificial Sequence
  Synthetic oligonucleotide; AGGAAT chr2 60454497 60454516 60454500 -
tccctgggcctggtgtgttc

SEQ ID NO: 188644 - DNA, 20 bp, Artificial Sequence
  Synthetic oligonucleotide; GAGGAT chr2 60454421 60454440 60454424 -
tgtgggaactttgccgatat

SEQ ID NO: 188645 - DNA, 20 bp, Artificial Sequence
  Synthetic oligonucleotide; TGGGAT chr2 60454416 60454435 60454419 -
gaactttgccgatatgagga

SEQ ID NO: 188646 - DNA, 20 bp, Artificial Sequence
  Synthetic oligonucleotide; CAGAGT chr2 60454407 60454426 60454410 -
cgatatgaggatgggattgg

SEQ ID NO: 188647 - DNA, 20 bp, Artificial Sequence
  Synthetic oligonucleotide; GGGAAT chr2 60454239 60454258 60454242 -
tggacatcagaacacataga

SEQ ID NO: 188648 - DNA, 20 bp, Artificial Sequence
  Synthetic oligonucleotide; ATGGGT chr2 60454183 60454202 60454186 -
tatagctatgaactgtggac

SEQ ID NO: 188649 - DNA, 20 bp, Artificial Sequence
  Synthetic oligonucleotide; GGGAAT chr2 60454079 60454098 60454082 -
gccagtgactcagcctttag

SEQ ID NO: 188650 - DNA, 20 bp, Artificial Sequence
  Synthetic oligonucleotide; TGGGAT chr2 60454009 60454028 60454012 -
cccagcgtcatctacggtca

SEQ ID NO: 188651 - DNA, 20 bp, Artificial Sequence
  Synthetic oligonucleotide; ACGGGT chr2 60453955 60453974 60453958 -
aagagaccaatccagttcac

SEQ ID NO: 188652 - DNA, 20 bp, Artificial Sequence
  Synthetic oligonucleotide; AGGGAT chr2 60453829 60453848 60453832 -
acgtgtatcagatctttcat

SEQ ID NO: 188653 - DNA, 20 bp, Artificial Sequence
  Synthetic oligonucleotide; TAGAAT chr2 60453697 60453716 60453700 -
ccatgatatactttgtctat

SEQ ID NO: 188654 - DNA, 20 bp, Artificial Sequence
  Synthetic oligonucleotide; TTGAAT chr2 60453691 60453710 60453694 -
tatactttgtctattagaat

SEQ ID NO: 188655 - DNA, 20 bp, Artificial Sequence
  Synthetic oligonucleotide; AAGGGT chr2 60453665 60453684 60453668 -
attggtagcaggttggacga

SEQ ID NO: 188656 - DNA, 20 bp, Artificial Sequence
  Synthetic oligonucleotide; TGGGGT chr2 60453654 60453673 60453657 -
gttggacgaaagggtttgat

SEQ ID NO: 188657 - DNA, 20 bp, Artificial Sequence
  Synthetic oligonucleotide; GGGAAT chr2 60453605 60453624 60453608 -
cagtgacttagcgctggact

SEQ ID NO: 188658 - DNA, 20 bp, Artificial Sequence
  Synthetic oligonucleotide; TGGGAT chr2 60453600 60453619 60453603 -
acttagcgctggactgggaa

SEQ ID NO: 188659 - DNA, 20 bp, Artificial Sequence
  Synthetic oligonucleotide; AGGGGT chr2 60453535 60453554 60453538 -
aggtctccgctgctctgctc

SEQ ID NO: 188660 - DNA, 20 bp, Artificial Sequence
  Synthetic oligonucleotide; TGGGAT chr2 60453530 60453549 60453533 -
tccgctgctctgctcagggg

SEQ ID NO: 188661 - DNA, 20 bp, Artificial Sequence
  Synthetic oligonucleotide; TCGGGT chr2 60453446 60453465 60453449 -
ggaggccccaggcccctgct

SEQ ID NO: 188662 - DNA, 20 bp, Artificial Sequence
  Synthetic oligonucleotide; TGGAAT chr2 60453422 60453441 60453425 -
gtcgccatggcaacgaggcc

SEQ ID NO: 188663 - DNA, 20 bp, Artificial Sequence
  Synthetic oligonucleotide; TTGGGT chr2 60453207 60453226 60453210 -
gcaatttgagagcaactctt

SEQ ID NO: 188664 - DNA, 20 bp, Artificial Sequence
  Synthetic oligonucleotide; CCGAGT chr2 60452948 60452967 60452951 -
tgtttccttccaggtgtgtc

SEQ ID NO: 188665 - DNA, 20 bp, Artificial Sequence
  Synthetic oligonucleotide; AGGGGT chr2 60452916 60452935 60452919 -
ggactatcatacaattgggc

SEQ ID NO: 188666 - DNA, 20 bp, Artificial Sequence
  Synthetic oligonucleotide; CTGGGT chr2 60452902 60452921 60452905 -
ttgggcaggggtggggggac

SEQ ID NO: 188667 - DNA, 20 bp, Artificial Sequence
  Synthetic oligonucleotide; CTGAGT chr2 60452822 60452841 60452825 -
agatacttggggaggggagg

SEQ ID NO: 188668 - DNA, 20 bp, Artificial Sequence
  Synthetic oligonucleotide; TCGGAT chr2 60452608 60452627 60452611 -
ctcaagatgtgtggcagttt

SEQ ID NO: 188669 - DNA, 20 bp, Artificial Sequence
  Synthetic oligonucleotide; AGGGGT chr2 60452558 60452577 60452561 -
tgagaaaatttgaagccccc

SEQ ID NO: 188670 - DNA, 20 bp, Artificial Sequence
  Synthetic oligonucleotide; TGGGGT chr2 60452553 60452572 60452556 -
aaatttgaagcccccagggg

SEQ ID NO: 188671 - DNA, 20 bp, Artificial Sequence
  Synthetic oligonucleotide; CAGAGT chr2 60452451 60452470 60452454 -
aagaagccgttgtgcgaaga

SEQ ID NO: 188672 - DNA, 20 bp, Artificial Sequence
  Synthetic oligonucleotide; CAGAGT chr2 60452441 60452460 60452444 -
tgtgcgaagacagagtcctg

SEQ ID NO: 188673 - DNA, 20 bp, Artificial Sequence
  Synthetic oligonucleotide; GTGAAT chr2 60452351 60452370 60452354 -
aacagacccacattggaaca

SEQ ID NO: 188674 - DNA, 20 bp, Artificial Sequence
  Synthetic oligonucleotide; ATGAGT chr2 60452309 60452328 60452312 -
gcccgtggaccatcgctgtc

SEQ ID NO: 188675 - DNA, 20 bp, Artificial Sequence
  Synthetic oligonucleotide; ATGAGT chr2 60452246 60452265 60452249 -
cctgtattgtggaaatgcgc

SEQ ID NO: 188676 - DNA, 20 bp, Artificial Sequence
  Synthetic oligonucleotide; TCGGGT chr2 60452063 60452082 60452066 -
ctgtttcctacagacaccca

SEQ ID NO: 188677 - DNA, 20 bp, Artificial Sequence
  Synthetic oligonucleotide; GTGGGT chr2 60452059 60452078 60452062 -
ttcctacagacacccatcgg

SEQ ID NO: 188678 - DNA, 20 bp, Artificial Sequence
  Synthetic oligonucleotide; GAGAAT chr2 60451971 60451990 60451974 -
agatggcataaattttcaag

SEQ ID NO: 188679 - DNA, 20 bp, Artificial Sequence
  Synthetic oligonucleotide; GGGAAT chr2 60451950 60451969 60451953 -
agaatcaaaatgcaaaactt

SEQ ID NO: 188680 - DNA, 20 bp, Artificial Sequence
  Synthetic oligonucleotide; CCGAAT chr2 60451821 60451840 60451824 -
ataatgcataatatggcacg

SEQ ID NO: 188681 - DNA, 20 bp, Artificial Sequence
  Synthetic oligonucleotide; CAGGAT chr2 60451778 60451797 60451781 -
tgcttttggtggctaccatg

SEQ ID NO: 188682 - DNA, 20 bp, Artificial Sequence
  Synthetic oligonucleotide; TTGAAT chr2 60451772 60451791 60451775 -
tggtggctaccatgcaggat

SEQ ID NO: 188683 - DNA, 20 bp, Artificial Sequence
  Synthetic oligonucleotide; GAGAAT chr2 60451382 60451401 60451385 -
tactgcttggagatccagaa

SEQ ID NO: 188684 - DNA, 20 bp, Artificial Sequence
  Synthetic oligonucleotide; GTGAAT chr2 60451210 60451229 60451213 -
gatagccaaataattggcat

SEQ ID NO: 188685 - DNA, 20 bp, Artificial Sequence
  Synthetic oligonucleotide; GGGAGT chr2 60450943 60450962 60450946 -
actctgtttaactgatcaaa

SEQ ID NO: 188686 - DNA, 20 bp, Artificial Sequence
  Synthetic oligonucleotide; CAGGAT chr2 60450866 60450885 60450869 -
gtggcttacacatacagacc

SEQ ID NO: 188687 - DNA, 20 bp, Artificial Sequence
  Synthetic oligonucleotide; CAGAGT chr2 60450841 60450860 60450844 -
tggcctttggtaaaggcatg

SEQ ID NO: 188688 - DNA, 20 bp, Artificial Sequence
  Synthetic oligonucleotide; ACGAGT chr2 60450731 60450750 60450734 -
tgacaaataaccctgattgc

SEQ ID NO: 188689 - DNA, 20 bp, Artificial Sequence
  Synthetic oligonucleotide; TAGGGT chr2 60450609 60450628 60450612 -
ttgctgaaacataagaccat

SEQ ID NO: 188690 - DNA, 20 bp, Artificial Sequence
  Synthetic oligonucleotide; AAGAGT chr2 60450551 60450570 60450554 -
actccttgctgatgcctaga

SEQ ID NO: 188691 - DNA, 20 bp, Artificial Sequence
  Synthetic oligonucleotide; CTGGGT chr2 60450504 60450523 60450507 -
ccagaactgaaacaacaatc

SEQ ID NO: 188692 - DNA, 20 bp, Artificial Sequence
  Synthetic oligonucleotide; CAGAGT chr2 60450402 60450421 60450405 -
actttttatatatttcttct

SEQ ID NO: 188693 - DNA, 20 bp, Artificial Sequence
  Synthetic oligonucleotide; GTGGAT chr2 60450382 60450401 60450385 -
cagagtcagtttgtaaataa

SEQ ID NO: 188694 - DNA, 20 bp, Artificial Sequence
  Synthetic oligonucleotide; TGGGAT chr2 60450365 60450384 60450368 -
taagtggatatctctaaaag

SEQ ID NO: 188695 - DNA, 20 bp, Artificial Sequence
  Synthetic oligonucleotide; GAGGAT chr2 60450346 60450365 60450349 -
gtgggatttttaaggggcaa

SEQ ID NO: 188696 - DNA, 20 bp, Artificial Sequence
  Synthetic oligonucleotide; GTGGAT chr2 60450333 60450352 60450336 -
ggggcaagaggataacagaa

SEQ ID NO: 188697 - DNA, 20 bp, Artificial Sequence
  Synthetic oligonucleotide; AAGGAT chr2 60450326 60450345 60450329 -
gaggataacagaagtggata

SEQ ID NO: 188698 - DNA, 20 bp, Artificial Sequence
  Synthetic oligonucleotide; CAGAAT chr2 60450211 60450230 60450214 -
agacaacaaaaatttattta

SEQ ID NO: 188699 - DNA, 20 bp, Artificial Sequence
  Synthetic oligonucleotide; CAGAAT chr2 60450142 60450161 60450145 -
ttttttttttttttttaaga

SEQ ID NO: 188700 - DNA, 20 bp, Artificial Sequence
  Synthetic oligonucleotide; TGGAGT chr2 60450117 60450136 60450120 -
tctcgctctgtcacccaggc

SEQ ID NO: 188701 - DNA, 20 bp, Artificial Sequence
  Synthetic oligonucleotide; CTGGGT chr2 60450073 60450092 60450076 -
ctcaccacaacctccgccta

SEQ ID NO: 188702 - DNA, 20 bp, Artificial Sequence
  Synthetic oligonucleotide; AGGGAT chr2 60450064 60450083 60450067 -
acctccgcctactgggttca

SEQ ID NO: 188703 - DNA, 20 bp, Artificial Sequence
  Synthetic oligonucleotide; CAGGAT chr2 60449953 60449972 60449956 -
cggcgtttcaccgtgttagc

SEQ ID NO: 188704 - DNA, 20 bp, Artificial Sequence
  Synthetic oligonucleotide; TGGGAT chr2 60449896 60449915 60449899 -
tcctaggcctcccatagtgc

SEQ ID NO: 188705 - DNA, 20 bp, Artificial Sequence
  Synthetic oligonucleotide; ATGAGT chr2 60449800 60449819 60449803 -
ggaagacatctctctgtgtg

SEQ ID NO: 188706 - DNA, 20 bp, Artificial Sequence
  Synthetic oligonucleotide; ATGAAT chr2 60449777 60449796 60449780 -
agtcaagatcatggttatcc

SEQ ID NO: 188707 - DNA, 20 bp, Artificial Sequence
  Synthetic oligonucleotide; AGGGGT chr2 60449738 60449757 60449741 -
aagaggctcacaaatctgcc

SEQ ID NO: 188708 - DNA, 20 bp, Artificial Sequence
  Synthetic oligonucleotide; CAGAGT chr2 60449713 60449732 60449716 -
ttctcactgtgtcctctctg

SEQ ID NO: 188709 - DNA, 20 bp, Artificial Sequence
  Synthetic oligonucleotide; CAGAGT chr2 60449649 60449668 60449652 -
catgagcacagactagagga

SEQ ID NO: 188710 - DNA, 20 bp, Artificial Sequence
  Synthetic oligonucleotide; TTGGAT chr2 60449634 60449653 60449637 -
gaggacagagtcccagccac

SEQ ID NO: 188711 - DNA, 20 bp, Artificial Sequence
  Synthetic oligonucleotide; TGGAGT chr2 60449513 60449532 60449516 -
tattattattattgttgaga

SEQ ID NO: 188712 - DNA, 20 bp, Artificial Sequence
  Synthetic oligonucleotide; TGGAGT chr2 60449488 60449507 60449491 -
tctcactctattgcccaggc

SEQ ID NO: 188713 - DNA, 20 bp, Artificial Sequence
  Synthetic oligonucleotide; CCGGGT chr2 60449444 60449463 60449447 -
ctcactgcaacctctacctc

SEQ ID NO: 188714 - DNA, 20 bp, Artificial Sequence
  Synthetic oligonucleotide; CTGAGT chr2 60449412 60449431 60449415 -
ggttctcctgcctcagcctc

SEQ ID NO: 188715 - DNA, 20 bp, Artificial Sequence
  Synthetic oligonucleotide; TGGGAT chr2 60449403 60449422 60449406 -
gcctcagcctcctgagtggc

SEQ ID NO: 188716 - DNA, 20 bp, Artificial Sequence
  Synthetic oligonucleotide; CGGGGT chr2 60449352 60449371 60449355 -
ttttgtatttttagtagaga

SEQ ID NO: 188717 - DNA, 20 bp, Artificial Sequence
  Synthetic oligonucleotide; TGGGAT chr2 60449275 60449294 60449278 -
gcctcggcctcccaaagtgc

SEQ ID NO: 188718 - DNA, 20 bp, Artificial Sequence
  Synthetic oligonucleotide; TAGAAT chr2 60449212 60449231 60449215 -
actgtataaaaaaggtctgt

SEQ ID NO: 188719 - DNA, 20 bp, Artificial Sequence
  Synthetic oligonucleotide; TGGGGT chr2 60449206 60449225 60449209 -
taaaaaaggtctgttagaat

SEQ ID NO: 188720 - DNA, 20 bp, Artificial Sequence
  Synthetic oligonucleotide; TTGAAT chr2 60449145 60449164 60449148 -
agcacccagcatccagcatg

SEQ ID NO: 188721 - DNA, 20 bp, Artificial Sequence
  Synthetic oligonucleotide; AGGAGT chr2 60449075 60449094 60449078 -
ttaaagaaaactcttaggca

SEQ ID NO: 188722 - DNA, 20 bp, Artificial Sequence
  Synthetic oligonucleotide; TGGAAT chr2 60449062 60449081 60449065 -
ttaggcaaggagtgcaatct

SEQ ID NO: 188723 - DNA, 20 bp, Artificial Sequence
  Synthetic oligonucleotide; CTGAGT chr2 60449042 60449061 60449045 -
tggaatctgctgaggtctaa

SEQ ID NO: 188724 - DNA, 20 bp, Artificial Sequence
  Synthetic oligonucleotide; TGGAGT chr2 60448996 60449015 60448999 -
attttctgggcacttttgct

SEQ ID NO: 188725 - DNA, 20 bp, Artificial Sequence
  Synthetic oligonucleotide; AGGAAT chr2 60448948 60448967 60448951 -
accaagcccttcaagtggtc

SEQ ID NO: 188726 - DNA, 20 bp, Artificial Sequence
  Synthetic oligonucleotide; TAGGAT chr2 60448792 60448811 60448795 -
agtgtccccggaagtaatag

SEQ ID NO: 188727 - DNA, 20 bp, Artificial Sequence
  Synthetic oligonucleotide; TAGAAT chr2 60448786 60448805 60448789 -
cccggaagtaatagtaggat

SEQ ID NO: 188728 - DNA, 20 bp, Artificial Sequence
  Synthetic oligonucleotide; TGGAGT chr2 60448718 60448737 60448721 -
cacatagctttgactccttt

SEQ ID NO: 188729 - DNA, 20 bp, Artificial Sequence
  Synthetic oligonucleotide; AGGAAT chr2 60448689 60448708 60448692 -
gtgtgaaggaagcagatttg

SEQ ID NO: 188730 - DNA, 20 bp, Artificial Sequence
  Synthetic oligonucleotide; TTGAGT chr2 60448682 60448701 60448685 -
ggaagcagatttgaggaatt

SEQ ID NO: 188731 - DNA, 20 bp, Artificial Sequence
  Synthetic oligonucleotide; AAGAGT chr2 60448626 60448645 60448629 -
caagcacaccttccttcttc

SEQ ID NO: 188732 - DNA, 20 bp, Artificial Sequence
  Synthetic oligonucleotide; TTGAGT chr2 60448615 60448634 60448618 -
tccttcttcaagagttcatc

SEQ ID NO: 188733 - DNA, 20 bp, Artificial Sequence
  Synthetic oligonucleotide; TGGAGT chr2 60448528 60448547 60448531 -
ctcttcagtttgcattcccc

SEQ ID NO: 188734 - DNA, 20 bp, Artificial Sequence
  Synthetic oligonucleotide; TAGGAT chr2 60448444 60448463 60448447 -
ttttctatcttagtttaaat

SEQ ID NO: 188735 - DNA, 20 bp, Artificial Sequence
  Synthetic oligonucleotide; TAGAAT chr2 60448362 60448381 60448365 -
caggaagtacttaagcttta

SEQ ID NO: 188736 - DNA, 20 bp, Artificial Sequence
  Synthetic oligonucleotide; TAGAAT chr2 60448340 60448359 60448343 -
gaatacttttatatacatga

SEQ ID NO: 188737 - DNA, 20 bp, Artificial Sequence
  Synthetic oligonucleotide; AAGAAT chr2 60448299 60448318 60448302 -
ttctataaattagataagaa

SEQ ID NO: 188738 - DNA, 20 bp, Artificial Sequence
  Synthetic oligonucleotide; AGGAAT chr2 60448279 60448298 60448282 -
aagaatagactgaagttgaa

SEQ ID NO: 188739 - DNA, 20 bp, Artificial Sequence
  Synthetic oligonucleotide; CAGAAT chr2 60448248 60448267 60448251 -
taatcactcattttagagat

SEQ ID NO: 188740 - DNA, 20 bp, Artificial Sequence
  Synthetic oligonucleotide; ATAGAAT chr2 60448293 60448312 60448309 +
attcttttcttatctaattt

SEQ ID NO: 188741 - DNA, 20 bp, Artificial Sequence
  Synthetic oligonucleotide; AAAGAAA chr2 60448388 60448407 60448404 +
ttttttaaaatacaaagcaa

SEQ ID NO: 188742 - DNA, 20 bp, Artificial Sequence
  Synthetic oligonucleotide; ATAGAAA chr2 60448436 60448455 60448452 +
atatcctaatttaaactaag

SEQ ID NO: 188743 - DNA, 20 bp, Artificial Sequence
  Synthetic oligonucleotide; AAAGAAA chr2 60448554 60448573 60448570 +
ctctcctaggcagtcagagg

SEQ ID NO: 188744 - DNA, 20 bp, Artificial Sequence
  Synthetic oligonucleotide; TAAGAAT chr2 60448803 60448822 60448819 +
ggggacactgatttataaaa

SEQ ID NO: 188745 - DNA, 20 bp, Artificial Sequence
  Synthetic oligonucleotide; TAAGAAT chr2 60448817 60448836 60448833 +
ataaaataagaattataaaa

SEQ ID NO: 188746 - DNA, 20 bp, Artificial Sequence
  Synthetic oligonucleotide; CCAGAAA chr2 60448987 60449006 60449003 +
gaaactccaagcaaaagtgc

SEQ ID NO: 188747 - DNA, 20 bp, Artificial Sequence
  Synthetic oligonucleotide; GAAGAAA chr2 60450383 60450402 60450399 +
tatttacaaactgactctga

SEQ ID NO: 188748 - DNA, 20 bp, Artificial Sequence
  Synthetic oligonucleotide; GTAGAAA chr2 60450406 60450425 60450422 +
gaaatatataaaaagtgggg

SEQ ID NO: 188749 - DNA, 20 bp, Artificial Sequence
  Synthetic oligonucleotide; CCAGAAA chr2 60450419 60450438 60450435 +
agtgggggtagaaacacaga

SEQ ID NO: 188750 - DNA, 20 bp, Artificial Sequence
  Synthetic oligonucleotide; ACAGAAA chr2 60450577 60450596 60450593 +
catttagggaggaagccatc

SEQ ID NO: 188751 - DNA, 20 bp, Artificial Sequence
  Synthetic oligonucleotide; CAAGAAA chr2 60450963 60450982 60450979 +
ttggtgaaattagctctgga

SEQ ID NO: 188752 - DNA, 20 bp, Artificial Sequence
  Synthetic oligonucleotide; CCAGAAA chr2 60450970 60450989 60450986 +
aattagctctggacaagaaa

SEQ ID NO: 188753 - DNA, 20 bp, Artificial Sequence
  Synthetic oligonucleotide; TGAGAAA chr2 60451395 60451414 60451411 +
agcagtaaaaaataccaaac

SEQ ID NO: 188754 - DNA, 20 bp, Artificial Sequence
  Synthetic oligonucleotide; CCAGAAA chr2 60451424 60451443 60451440 +
ttctgtgcaaattaactggg

SEQ ID NO: 188755 - DNA, 20 bp, Artificial Sequence
  Synthetic oligonucleotide; AAAGAAT chr2 60451428 60451447 60451444 +
gtgcaaattaactgggccag

SEQ ID NO: 188756 - DNA, 20 bp, Artificial Sequence
  Synthetic oligonucleotide; TTAGAAT chr2 60451649 60451668 60451665 +
gaaggtttgggaacctaaaa

SEQ ID NO: 188757 - DNA, 20 bp, Artificial Sequence
  Synthetic oligonucleotide; TAAGAAA chr2 60451662 60451681 60451678 +
cctaaaattagaatatttaa

SEQ ID NO: 188758 - DNA, 20 bp, Artificial Sequence
  Synthetic oligonucleotide; ATAGAAT chr2 60452191 60452210 60452207 +
cacactttttaaaagacaac

SEQ ID NO: 188759 - DNA, 20 bp, Artificial Sequence
  Synthetic oligonucleotide; ATAGAAA chr2 60452200 60452219 60452216 +
taaaagacaacatagaatgt

SEQ ID NO: 188760 - DNA, 20 bp, Artificial Sequence
  Synthetic oligonucleotide; TCAGAAA chr2 60452462 60452481 60452478 +
cggcttcttggaggctactg

SEQ ID NO: 188761 - DNA, 20 bp, Artificial Sequence
  Synthetic oligonucleotide; CTAGAAA chr2 60452647 60452666 60452663 +
aatgggggtgtgtgaagaac

SEQ ID NO: 188762 - DNA, 20 bp, Artificial Sequence
  Synthetic oligonucleotide; TGAGAAA chr2 60452962 60452981 60452978 +
gaaacacttgcccttatgac

SEQ ID NO: 188763 - DNA, 20 bp, Artificial Sequence
  Synthetic oligonucleotide; TAAGAAA chr2 60452975 60452994 60452991 +
ttatgactgagaaaacttag

SEQ ID NO: 188764 - DNA, 20 bp, Artificial Sequence
  Synthetic oligonucleotide; AAAGAAA chr2 60453056 60453075 60453072 +
caaaataataataaaattat

SEQ ID NO: 188765 - DNA, 20 bp, Artificial Sequence
  Synthetic oligonucleotide; AGAGAAA chr2 60453168 60453187 60453184 +
agaggcgaacaaatctctga

SEQ ID NO: 188766 - DNA, 20 bp, Artificial Sequence
  Synthetic oligonucleotide; ACAGAAA chr2 60453857 60453876 60453873 +
gaaatagtttttgccacttt

SEQ ID NO: 188767 - DNA, 20 bp, Artificial Sequence
  Synthetic oligonucleotide; AGAGAAA chr2 60454019 60454038 60454035 +
tgacgctgggaaatagagag

SEQ ID NO: 188768 - DNA, 20 bp, Artificial Sequence
  Synthetic oligonucleotide; AGAGAAA chr2 60454039 60454058 60454055 +
agagaaagagagagagagag

SEQ ID NO: 188769 - DNA, 20 bp, Artificial Sequence
  Synthetic oligonucleotide; TAAGAAA chr2 60454350 60454369 60454366 +
tttaaaagttagcagtcttt

SEQ ID NO: 188770 - DNA, 20 bp, Artificial Sequence
  Synthetic oligonucleotide; AGAGAAT chr2 60454453 60454472 60454469 +
tgggaagttgtctgaaaaaa

SEQ ID NO: 188771 - DNA, 20 bp, Artificial Sequence
  Synthetic oligonucleotide; ACAGAAT chr2 60454507 60454526 60454523 +
ggcccagggacaatggagta

SEQ ID NO: 188772 - DNA, 20 bp, Artificial Sequence
  Synthetic oligonucleotide; CAAGAAA chr2 60454595 60454614 60454611 +
gggggaaaagaggcttaaaa

SEQ ID NO: 188773 - DNA, 20 bp, Artificial Sequence
  Synthetic oligonucleotide; ACAGAAT chr2 60454891 60454910 60454907 +
aaataaacagttctatatct

SEQ ID NO: 188774 - DNA, 20 bp, Artificial Sequence
  Synthetic oligonucleotide; TGAGAAA chr2 60455096 60455115 60455112 +
agtttctggtttaaaatctg

SEQ ID NO: 188775 - DNA, 20 bp, Artificial Sequence
  Synthetic oligonucleotide; ATAGAAT chr2 60455102 60455121 60455118 +
tggtttaaaatctgtgagaa

SEQ ID NO: 188776 - DNA, 20 bp, Artificial Sequence
  Synthetic oligonucleotide; TCAGAAA chr2 60455424 60455443 60455440 +
gtttctattgttcatcagct

SEQ ID NO: 188777 - DNA, 20 bp, Artificial Sequence
  Synthetic oligonucleotide; TAAGAAA chr2 60455587 60455606 60455603 +
tccccattccccatttgatt

SEQ ID NO: 188778 - DNA, 20 bp, Artificial Sequence
  Synthetic oligonucleotide; TGAGAAA chr2 60455677 60455696 60455693 +
acgctaagagcagcatatac

SEQ ID NO: 188779 - DNA, 20 bp, Artificial Sequence
  Synthetic oligonucleotide; GGAGAAA chr2 60455870 60455889 60455886 +
agcattttggattcagtttt

SEQ ID NO: 188780 - DNA, 20 bp, Artificial Sequence
  Synthetic oligonucleotide; TCAGAAA chr2 60456045 60456064 60456061 +
ttcccacccaaactggcttt

SEQ ID NO: 188781 - DNA, 20 bp, Artificial Sequence
  Synthetic oligonucleotide; TTAGAAA chr2 60456072 60456091 60456088 +
acattgactttctttatact

SEQ ID NO: 188782 - DNA, 20 bp, Artificial Sequence
  Synthetic oligonucleotide; TGAGAAA chr2 60456696 60456715 60456712 +
aaagtggggttattttgtta

SEQ ID NO: 188783 - DNA, 20 bp, Artificial Sequence
  Synthetic oligonucleotide; GGAGAAT chr2 60456784 60456803 60456800 +
tctaagataaagcaaggatg

SEQ ID NO: 188784 - DNA, 20 bp, Artificial Sequence
  Synthetic oligonucleotide; ATAGAAA chr2 60456789 60456808 60456805 +
gataaagcaaggatgggaga

SEQ ID NO: 188785 - DNA, 20 bp, Artificial Sequence
  Synthetic oligonucleotide; TCAGAAT chr2 60457056 60457075 60457072 +
tttagggtataatacacgca

SEQ ID NO: 188786 - DNA, 20 bp, Artificial Sequence
  Synthetic oligonucleotide; ATAGAAA chr2 60457067 60457086 60457083 +
atacacgcatcagaatgccc

SEQ ID NO: 188787 - DNA, 20 bp, Artificial Sequence
  Synthetic oligonucleotide; CCAGAAA chr2 60457293 60457312 60457309 +
ccaatagaacttaacaaaga

SEQ ID NO: 188788 - DNA, 20 bp, Artificial Sequence
  Synthetic oligonucleotide; AAAGAAA chr2 60457365 60457384 60457381 +
ataaaaaaaaaaataaaaac

SEQ ID NO: 188789 - DNA, 20 bp, Artificial Sequence
  Synthetic oligonucleotide; ATAGAAA chr2 60457490 60457509 60457506 +
aaacagctttcattacagga

SEQ ID NO: 188790 - DNA, 20 bp, Artificial Sequence
  Synthetic oligonucleotide; CTAGAAA chr2 60458144 60458163 60458160 +
catttaattcaaataccatt

SEQ ID NO: 188791 - DNA, 20 bp, Artificial Sequence
  Synthetic oligonucleotide; ACAGAAA chr2 60458152 60458171 60458168 +
tcaaataccattctagaaat

SEQ ID NO: 188792 - DNA, 20 bp, Artificial Sequence
  Synthetic oligonucleotide; ATAGAAT chr2 60458297 60458316 60458313 +
gagcggtgtgtatccaaggc

SEQ ID NO: 188793 - DNA, 20 bp, Artificial Sequence
  Synthetic oligonucleotide; AGAGAAA chr2 60458759 60458778 60458775 +
caacctctgtatctctgatt

SEQ ID NO: 188794 - DNA, 20 bp, Artificial Sequence
  Synthetic oligonucleotide; AAAGAAA chr2 60458836 60458855 60458852 +
gcagatgctagcttaataaa

SEQ ID NO: 188795 - DNA, 20 bp, Artificial Sequence
  Synthetic oligonucleotide; AAAGAAA chr2 60458914 60458933 60458930 +
aatagcacacagtgtatgga

SEQ ID NO: 188796 - DNA, 20 bp, Artificial Sequence
  Synthetic oligonucleotide; TAAGAAT chr2 60458989 60459008 60459005 +
aattctttctcttctttttt

SEQ ID NO: 188797 - DNA, 20 bp, Artificial Sequence
  Synthetic oligonucleotide; TAAGAAT chr2 60459017 60459036 60459033 +
tcacatttaaatgcaagtct

SEQ ID NO: 188798 - DNA, 20 bp, Artificial Sequence
  Synthetic oligonucleotide; TGAGAAA chr2 60459534 60459553 60459550 +
tttttaggtagccattgttg

SEQ ID NO: 188799 - DNA, 20 bp, Artificial Sequence
  Synthetic oligonucleotide; ATAGAAT chr2 60459547 60459566 60459563 +
attgttgtgagaaatacaat

SEQ ID NO: 188800 - DNA, 20 bp, Artificial Sequence
  Synthetic oligonucleotide; GTAGAAA chr2 60459619 60459638 60459635 +
aagctacaagtttataacaa

SEQ ID NO: 188801 - DNA, 20 bp, Artificial Sequence
  Synthetic oligonucleotide; ATAGAAT chr2 60459681 60459700 60459697 +
tcatattttaaaaccaaatg

SEQ ID NO: 188802 - DNA, 20 bp, Artificial Sequence
  Synthetic oligonucleotide; ACAGAAT chr2 60459889 60459908 60459905 +
aactgtacatgatatgtatt

SEQ ID NO: 188803 - DNA, 20 bp, Artificial Sequence
  Synthetic oligonucleotide; AGAGAAA chr2 60460068 60460087 60460084 +
aacatgtaaattattgcaca

SEQ ID NO: 188804 - DNA, 20 bp, Artificial Sequence
  Synthetic oligonucleotide; AAAGAAA chr2 60460167 60460186 60460183 +
ggaaaaaaaaaaaaaaggaa

SEQ ID NO: 188805 - DNA, 20 bp, Artificial Sequence
  Synthetic oligonucleotide; AAAGAAA chr2 60460174 60460193 60460190 +
aaaaaaaaaggaaaaagaaa

SEQ ID NO: 188806 - DNA, 20 bp, Artificial Sequence
  Synthetic oligonucleotide; AAAGAAA chr2 60460180 60460199 60460196 +
aaaggaaaaagaaaaaagaa

SEQ ID NO: 188807 - DNA, 20 bp, Artificial Sequence
  Synthetic oligonucleotide; AAAGAAA chr2 60460186 60460205 60460202 +
aaaagaaaaaagaaaaagaa

SEQ ID NO: 188808 - DNA, 20 bp, Artificial Sequence
  Synthetic oligonucleotide; CTAGAAA chr2 60460280 60460299 60460296 +
tttgtttaaatcacatggga

SEQ ID NO: 188809 - DNA, 20 bp, Artificial Sequence
  Synthetic oligonucleotide; AGAGAAA chr2 60461944 60461963 60461960 +
gccagctctctaagtctcct

SEQ ID NO: 188810 - DNA, 20 bp, Artificial Sequence
  Synthetic oligonucleotide; AGAGAAA chr2 60462336 60462355 60462352 +
agtgttctgtgcgtgttgca

SEQ ID NO: 188811 - DNA, 20 bp, Artificial Sequence
  Synthetic oligonucleotide; CTAGAAA chr2 60462617 60462636 60462633 +
tcctgccattaaactcagtt

SEQ ID NO: 188812 - DNA, 20 bp, Artificial Sequence
  Synthetic oligonucleotide; GCAGAAA chr2 60462644 60462663 60462660 +
ttttatatccaatccccaaa

SEQ ID NO: 188813 - DNA, 20 bp, Artificial Sequence
  Synthetic oligonucleotide; TGAGAAA chr2 60462795 60462814 60462811 +
tctgtttcctccttgttaag

SEQ ID NO: 188814 - DNA, 20 bp, Artificial Sequence
  Synthetic oligonucleotide; AAAGAAT chr2 60463141 60463160 60463157 +
gggacgtccatttttatctc

SEQ ID NO: 188815 - DNA, 20 bp, Artificial Sequence
  Synthetic oligonucleotide; AAAGAAA chr2 60463162 60463181 60463178 +
aagaatgtttaaaaaatctg

SEQ ID NO: 188816 - DNA, 20 bp, Artificial Sequence
  Synthetic oligonucleotide; TGAGAAA chr2 60463342 60463361 60463358 +
cgccatgacaggcagcaggc

SEQ ID NO: 188817 - DNA, 20 bp, Artificial Sequence
  Synthetic oligonucleotide; TGAGAAA chr2 60463444 60463463 60463460 +
ggctgggactcagctccagt

SEQ ID NO: 188818 - DNA, 20 bp, Artificial Sequence
  Synthetic oligonucleotide; AAAGAAA chr2 60463448 60463467 60463464 +
gggactcagctccagttgag

SEQ ID NO: 188819 - DNA, 20 bp, Artificial Sequence
  Synthetic oligonucleotide; ACAGAAA chr2 60463454 60463473 60463470 +
cagctccagttgagaaagaa

SEQ ID NO: 188820 - DNA, 20 bp, Artificial Sequence
  Synthetic oligonucleotide; TGAGAAA chr2 60463754 60463773 60463770 +
tggtagccaaaggacgagga

SEQ ID NO: 188821 - DNA, 20 bp, Artificial Sequence
  Synthetic oligonucleotide; TGAGAAA chr2 60463808 60463827 60463824 +
aaaaagccttaaaatataac

SEQ ID NO: 188822 - DNA, 20 bp, Artificial Sequence
  Synthetic oligonucleotide; TGAGAAT chr2 60463937 60463956 60463953 +
tctaccagggaggttaagag

SEQ ID NO: 188823 - DNA, 20 bp, Artificial Sequence
  Synthetic oligonucleotide; TCAGAAA chr2 60463983 60464002 60463999 +
tgatgcctccatttagcaag

SEQ ID NO: 188824 - DNA, 20 bp, Artificial Sequence
  Synthetic oligonucleotide; AAAGAAA chr2 60463987 60464006 60464003 +
gcctccatttagcaagtcag

SEQ ID NO: 188825 - DNA, 20 bp, Artificial Sequence
  Synthetic oligonucleotide; GCAGAAA chr2 60464230 60464249 60464246 +
atgtggaagggggaaaaaag

SEQ ID NO: 188826 - DNA, 20 bp, Artificial Sequence
  Synthetic oligonucleotide; AAAGAAA chr2 60464244 60464263 60464260 +
aaaaaggcagaaagattttg

SEQ ID NO: 188827 - DNA, 20 bp, Artificial Sequence
  Synthetic oligonucleotide; TGAGAAA chr2 60464729 60464748 60464745 +
tcctttcaaaaaggcttaaa

SEQ ID NO: 188828 - DNA, 20 bp, Artificial Sequence
  Synthetic oligonucleotide; AGAGAAA chr2 60464856 60464875 60464872 +
tctctctcatacatcaggtc

SEQ ID NO: 188829 - DNA, 20 bp, Artificial Sequence
  Synthetic oligonucleotide; TTAGAAA chr2 60465235 60465254 60465251 +
ttcataacatctttgatgat

SEQ ID NO: 188830 - DNA, 20 bp, Artificial Sequence
  Synthetic oligonucleotide; TAAGAAT chr2 60465703 60465722 60465719 +
gagcataaaaacagtacctg

SEQ ID NO: 188831 - DNA, 20 bp, Artificial Sequence
  Synthetic oligonucleotide; CTAGAAA chr2 60466398 60466417 60466414 +
acccagccagcatgcaggga

SEQ ID NO: 188832 - DNA, 20 bp, Artificial Sequence
  Synthetic oligonucleotide; TCAGAAA chr2 60466961 60466980 60466977 +
attttctaaaacagtatctt

SEQ ID NO: 188833 - DNA, 20 bp, Artificial Sequence
  Synthetic oligonucleotide; GGAGAAA chr2 60468192 60468211 60468208 +
tgcatttttctctaaaacca

SEQ ID NO: 188834 - DNA, 20 bp, Artificial Sequence
  Synthetic oligonucleotide; AAAGAAA chr2 60468516 60468535 60468532 +
gctcccagcctccagtgagg

SEQ ID NO: 188835 - DNA, 20 bp, Artificial Sequence
  Synthetic oligonucleotide; CCAGAAA chr2 60468653 60468672 60468669 +
ttaaaaagtaagggcaattt

SEQ ID NO: 188836 - DNA, 20 bp, Artificial Sequence
  Synthetic oligonucleotide; GAAGAAA chr2 60468690 60468709 60468706 +
tatacacatggacatttgta

SEQ ID NO: 188837 - DNA, 20 bp, Artificial Sequence
  Synthetic oligonucleotide; AAAGAAA chr2 60468819 60468838 60468835 +
agtgcagaagtttatctgtg

SEQ ID NO: 188838 - DNA, 20 bp, Artificial Sequence
  Synthetic oligonucleotide; CTAGAAT chr2 60469415 60469434 60469431 +
ggactgagctgggccatact

SEQ ID NO: 188839 - DNA, 20 bp, Artificial Sequence
  Synthetic oligonucleotide; CCAGAAA chr2 60469561 60469580 60469577 +
cattccaataatgccagcac

SEQ ID NO: 188840 - DNA, 20 bp, Artificial Sequence
  Synthetic oligonucleotide; CAAGAAA chr2 60469886 60469905 60469902 +
tgattggggagggcgggaga

SEQ ID NO: 188841 - DNA, 20 bp, Artificial Sequence
  Synthetic oligonucleotide; TGAGAAA chr2 60470371 60470390 60470387 +
tttgtcatggtatttttcaa

SEQ ID NO: 188842 - DNA, 20 bp, Artificial Sequence
  Synthetic oligonucleotide; TGAGAAT chr2 60470380 60470399 60470396 +
gtatttttcaatgagaaatc

SEQ ID NO: 188843 - DNA, 20 bp, Artificial Sequence
  Synthetic oligonucleotide; CAAGAAA chr2 60470599 60470618 60470615 +
gtgcttcagcaggcctccag

SEQ ID NO: 188844 - DNA, 20 bp, Artificial Sequence
  Synthetic oligonucleotide; TGAGAAA chr2 60470875 60470894 60470891 +
agatggggaaactgaggcca

SEQ ID NO: 188845 - DNA, 20 bp, Artificial Sequence
  Synthetic oligonucleotide; TTAGAAT chr2 60470931 60470950 60470947 +
gattaaccacaatgtgaaga

SEQ ID NO: 188846 - DNA, 20 bp, Artificial Sequence
  Synthetic oligonucleotide; GCAGAAT chr2 60471225 60471244 60471241 +
cctctacctctgcttcccct

SEQ ID NO: 188847 - DNA, 20 bp, Artificial Sequence
  Synthetic oligonucleotide; TTAGAAA chr2 60471276 60471295 60471292 +
agcctaagaagctatttact

SEQ ID NO: 188848 - DNA, 20 bp, Artificial Sequence
  Synthetic oligonucleotide; TCAGAAA chr2 60471848 60471867 60471864 +
accacctcagacttactgaa

SEQ ID NO: 188849 - DNA, 20 bp, Artificial Sequence
  Synthetic oligonucleotide; TCAGAAA chr2 60472458 60472477 60472474 +
cagtatttccacttggggcc

SEQ ID NO: 188850 - DNA, 20 bp, Artificial Sequence
  Synthetic oligonucleotide; AGAGAAT chr2 60473332 60473351 60473348 +
ttcaccctgggtcttcaaaa

SEQ ID NO: 188851 - DNA, 20 bp, Artificial Sequence
  Synthetic oligonucleotide; CTAGAAA chr2 60473836 60473855 60473852 +
aaatcgcactctcttttgtt

SEQ ID NO: 188852 - DNA, 20 bp, Artificial Sequence
  Synthetic oligonucleotide; AAAGAAA chr2 60473940 60473959 60473956 +
aagtgtattctgcaaaaaca

SEQ ID NO: 188853 - DNA, 20 bp, Artificial Sequence
  Synthetic oligonucleotide; ATAGAAT chr2 60473970 60473989 60473986 +
ataattatagacactacaat

SEQ ID NO: 188854 - DNA, 20 bp, Artificial Sequence
  Synthetic oligonucleotide; AAAGAAT chr2 60474426 60474445 60474442 +
gaataggatggtacttaaaa

SEQ ID NO: 188855 - DNA, 20 bp, Artificial Sequence
  Synthetic oligonucleotide; TTAGAAT chr2 60474558 60474577 60474574 +
ttacactttaagcttttgcc

SEQ ID NO: 188856 - DNA, 20 bp, Artificial Sequence
  Synthetic oligonucleotide; AAAGAAA chr2 60474802 60474821 60474818 +
ctagccgctgtgggcagtac

SEQ ID NO: 188857 - DNA, 20 bp, Artificial Sequence
  Synthetic oligonucleotide; GTAGAAA chr2 60474847 60474866 60474863 +
cccacagcaggcttcattta

SEQ ID NO: 188858 - DNA, 20 bp, Artificial Sequence
  Synthetic oligonucleotide; ACAGAAA chr2 60474867 60474886 60474883 +
gtagaaaaggtaaggcctgc

SEQ ID NO: 188859 - DNA, 20 bp, Artificial Sequence
  Synthetic oligonucleotide; GTAGAAA chr2 60474889 60474908 60474905 +
agaaattgctctacccccat

SEQ ID NO: 188860 - DNA, 20 bp, Artificial Sequence
  Synthetic oligonucleotide; AGAGAAA chr2 60474944 60474963 60474960 +
tgctatggaaattcaaagga

SEQ ID NO: 188861 - DNA, 20 bp, Artificial Sequence
  Synthetic oligonucleotide; AGAGAAA chr2 60475024 60475043 60475040 +
gagttaaacctggagagcca

SEQ ID NO: 188862 - DNA, 20 bp, Artificial Sequence
  Synthetic oligonucleotide; AAAGAAA chr2 60475046 60475065 60475062 +
agaaaggatatcctagataa

SEQ ID NO: 188863 - DNA, 20 bp, Artificial Sequence
  Synthetic oligonucleotide; CAAGAAA chr2 60475543 60475562 60475559 +
attttcaacaaatgactgtg

SEQ ID NO: 188864 - DNA, 20 bp, Artificial Sequence
  Synthetic oligonucleotide; GAAGAAA chr2 60476317 60476336 60476333 +
actgaaggtcagagaaccag

SEQ ID NO: 188865 - DNA, 20 bp, Artificial Sequence
  Synthetic oligonucleotide; TAAGAAA chr2 60476451 60476470 60476467 +
caaaggcacacacaggactc

SEQ ID NO: 188866 - DNA, 20 bp, Artificial Sequence
  Synthetic oligonucleotide; AAAGAAA chr2 60476784 60476803 60476800 +
agtgggggagctcactattt

SEQ ID NO: 188867 - DNA, 20 bp, Artificial Sequence
  Synthetic oligonucleotide; CGAGAAA chr2 60477042 60477061 60477058 +
cgatgcctccctgccccact

SEQ ID NO: 188868 - DNA, 20 bp, Artificial Sequence
  Synthetic oligonucleotide; GAAGAAA chr2 60477050 60477069 60477066 +
ccctgccccactcgagaaat

SEQ ID NO: 188869 - DNA, 20 bp, Artificial Sequence
  Synthetic oligonucleotide; TGAGAAT chr2 60477209 60477228 60477225 +
ggctgtgaagatggatgcga

SEQ ID NO: 188870 - DNA, 20 bp, Artificial Sequence
  Synthetic oligonucleotide; TGAGAAA chr2 60477394 60477413 60477410 +
attatcatttcgatcggtct

SEQ ID NO: 188871 - DNA, 20 bp, Artificial Sequence
  Synthetic oligonucleotide; CTAGAAT chr2 60477404 60477423 60477420 +
cgatcggtcttgagaaaata

SEQ ID NO: 188872 - DNA, 20 bp, Artificial Sequence
  Synthetic oligonucleotide; AAAGAAA chr2 60477416 60477435 60477432 +
agaaaatactagaataagct

SEQ ID NO: 188873 - DNA, 20 bp, Artificial Sequence
  Synthetic oligonucleotide; GGAGAAA chr2 60477463 60477482 60477479 +
caaggggagggatagcatta

SEQ ID NO: 188874 - DNA, 20 bp, Artificial Sequence
  Synthetic oligonucleotide; AAAGAAA chr2 60477585 60477604 60477601 +
gaacttagagtaaaataaat

SEQ ID NO: 188875 - DNA, 20 bp, Artificial Sequence
  Synthetic oligonucleotide; AAAGAAA chr2 60477589 60477608 60477605 +
ttagagtaaaataaataaag

SEQ ID NO: 188876 - DNA, 20 bp, Artificial Sequence
  Synthetic oligonucleotide; AAAGAAA chr2 60477593 60477612 60477609 +
agtaaaataaataaagaaag

SEQ ID NO: 188877 - DNA, 20 bp, Artificial Sequence
  Synthetic oligonucleotide; AAAGAAA chr2 60477597 60477616 60477613 +
aaataaataaagaaagaaag

SEQ ID NO: 188878 - DNA, 20 bp, Artificial Sequence
  Synthetic oligonucleotide; AAAGAAA chr2 60477601 60477620 60477617 +
aaataaagaaagaaagaaag

SEQ ID NO: 188879 - DNA, 20 bp, Artificial Sequence
  Synthetic oligonucleotide; GCAGAAA chr2 60478371 60478390 60478387 +
actgccacctcagggccgcg

SEQ ID NO: 188880 - DNA, 20 bp, Artificial Sequence
  Synthetic oligonucleotide; CCAGAAT chr2 60478555 60478574 60478571 +
gaaccagaactggccattct

SEQ ID NO: 188881 - DNA, 20 bp, Artificial Sequence
  Synthetic oligonucleotide; TCAGAAA chr2 60478599 60478618 60478615 +
tatggttaacacagagctgc

SEQ ID NO: 188882 - DNA, 20 bp, Artificial Sequence
  Synthetic oligonucleotide; TCAGAAA chr2 60478783 60478802 60478799 +
catgacggcaagtccttctt

SEQ ID NO: 188883 - DNA, 20 bp, Artificial Sequence
  Synthetic oligonucleotide; AAAGAAT chr2 60479450 60479469 60479466 +
tcaggtctactaggaacagg

SEQ ID NO: 188884 - DNA, 20 bp, Artificial Sequence
  Synthetic oligonucleotide; GTAGAAA chr2 60479526 60479545 60479542 +
cctcaaccttctactgctgg

SEQ ID NO: 188885 - DNA, 20 bp, Artificial Sequence
  Synthetic oligonucleotide; AAAGAAA chr2 60479912 60479931 60479928 +
tttgatttatggggaggagg

SEQ ID NO: 188886 - DNA, 20 bp, Artificial Sequence
  Synthetic oligonucleotide; AGAGAAA chr2 60480859 60480878 60480875 +
gcacccccatctctgtccca

SEQ ID NO: 188887 - DNA, 20 bp, Artificial Sequence
  Synthetic oligonucleotide; GAAGAAA chr2 60481115 60481134 60481131 +
agtggtggccgcagctcagg

SEQ ID NO: 188888 - DNA, 20 bp, Artificial Sequence
  Synthetic oligonucleotide; AGAGAAA chr2 60481274 60481293 60481290 +
acatgctggaaggcaagaag

SEQ ID NO: 188889 - DNA, 20 bp, Artificial Sequence
  Synthetic oligonucleotide; GCAGAAA chr2 60481577 60481596 60481593 +
cctggctaagagcaactgca

SEQ ID NO: 188890 - DNA, 20 bp, Artificial Sequence
  Synthetic oligonucleotide; AAAGAAA chr2 60481967 60481986 60481983 +
ctgttctagtcctgctgtca

SEQ ID NO: 188891 - DNA, 20 bp, Artificial Sequence
  Synthetic oligonucleotide; CGAGAAT chr2 60482325 60482344 60482341 +
gctgatacatggagcagagc

SEQ ID NO: 188892 - DNA, 20 bp, Artificial Sequence
  Synthetic oligonucleotide; GGAGAAA chr2 60482342 60482361 60482358 +
agccgagaatatccggaact

SEQ ID NO: 188893 - DNA, 20 bp, Artificial Sequence
  Synthetic oligonucleotide; TGAGAAA chr2 60482351 60482370 60482367 +
tatccggaactggagaaaag

SEQ ID NO: 188894 - DNA, 20 bp, Artificial Sequence
  Synthetic oligonucleotide; GAAGAAT chr2 60482502 60482521 60482518 +
tttaaatccacaggaagcaa

SEQ ID NO: 188895 - DNA, 20 bp, Artificial Sequence
  Synthetic oligonucleotide; CTAGAAT chr2 60482795 60482814 60482811 +
attatacagtgccttgcttt

SEQ ID NO: 188896 - DNA, 20 bp, Artificial Sequence
  Synthetic oligonucleotide; ACAGAAA chr2 60482939 60482958 60482955 +
aaatctttctttcaaacatt

SEQ ID NO: 188897 - DNA, 20 bp, Artificial Sequence
  Synthetic oligonucleotide; CAAGAAA chr2 60483012 60483031 60483028 +
atttactgataaaggcactg

SEQ ID NO: 188898 - DNA, 20 bp, Artificial Sequence
  Synthetic oligonucleotide; GAAGAAT chr2 60483059 60483078 60483075 +
ttactttgcgagatgtttga

SEQ ID NO: 188899 - DNA, 20 bp, Artificial Sequence
  Synthetic oligonucleotide; GGAGAAT chr2 60483127 60483146 60483143 +
ggatagtgtgggtagttgga

SEQ ID NO: 188900 - DNA, 20 bp, Artificial Sequence
  Synthetic oligonucleotide; AGAGAAA chr2 60483241 60483260 60483257 +
tctaatatatatcccgtggt

SEQ ID NO: 188901 - DNA, 20 bp, Artificial Sequence
  Synthetic oligonucleotide; TCAGAAA chr2 60483587 60483606 60483603 +
cctgtggaatgctgcagttg

SEQ ID NO: 188902 - DNA, 20 bp, Artificial Sequence
  Synthetic oligonucleotide; GAAGAAT chr2 60483722 60483741 60483738 +
tgcttcagcagacaacaaag

SEQ ID NO: 188903 - DNA, 20 bp, Artificial Sequence
  Synthetic oligonucleotide; TTAGAAA chr2 60484039 60484058 60484055 +
atttagagctcctctgttaa

SEQ ID NO: 188904 - DNA, 20 bp, Artificial Sequence
  Synthetic oligonucleotide; TCAGAAA chr2 60484167 60484186 60484183 +
ttgtccagactctgacagtg

SEQ ID NO: 188905 - DNA, 20 bp, Artificial Sequence
  Synthetic oligonucleotide; CCAGAAA chr2 60484455 60484474 60484471 +
gtcaaaaacagccacattca

SEQ ID NO: 188906 - DNA, 20 bp, Artificial Sequence
  Synthetic oligonucleotide; ACAGAAA chr2 60484522 60484541 60484538 +
gaaacagcagtgattgtgga

SEQ ID NO: 188907 - DNA, 20 bp, Artificial Sequence
  Synthetic oligonucleotide; GGAGAAA chr2 60484683 60484702 60484699 +
ggaggggggcaaaaaaagaa

SEQ ID NO: 188908 - DNA, 20 bp, Artificial Sequence
  Synthetic oligonucleotide; CGAGAAA chr2 60484710 60484729 60484726 +
gagaggaaaggttaaccact

SEQ ID NO: 188909 - DNA, 20 bp, Artificial Sequence
  Synthetic oligonucleotide; AAAGAAA chr2 60484911 60484930 60484927 +
ttttatcaagttcaagccaa

SEQ ID NO: 188910 - DNA, 20 bp, Artificial Sequence
  Synthetic oligonucleotide; GAAGAAA chr2 60485057 60485076 60485073 +
accaccaaggcatagccttg

SEQ ID NO: 188911 - DNA, 20 bp, Artificial Sequence
  Synthetic oligonucleotide; CAAGAAT chr2 60485306 60485325 60485322 +
gtggagcaaggccactccag

SEQ ID NO: 188912 - DNA, 20 bp, Artificial Sequence
  Synthetic oligonucleotide; AAAGAAA chr2 60485568 60485587 60485584 +
aagccaatcaactcatttaa

SEQ ID NO: 188913 - DNA, 20 bp, Artificial Sequence
  Synthetic oligonucleotide; TGAGAAA chr2 60485645 60485664 60485661 +
ctgtcccagcaacctagata

SEQ ID NO: 188914 - DNA, 20 bp, Artificial Sequence
  Synthetic oligonucleotide; AGAGAAT chr2 60486218 60486237 60486234 +
gtggaccatggctcctttcc

SEQ ID NO: 188915 - DNA, 20 bp, Artificial Sequence
  Synthetic oligonucleotide; TGAGAAA chr2 60486336 60486355 60486352 +
tttgcctccttctcacacaa

SEQ ID NO: 188916 - DNA, 20 bp, Artificial Sequence
  Synthetic oligonucleotide; TGAGAAA chr2 60486404 60486423 60486420 +
tgtgtagttaagtactgaag

SEQ ID NO: 188917 - DNA, 20 bp, Artificial Sequence
  Synthetic oligonucleotide; CAAGAAA chr2 60486413 60486432 60486429 +
aagtactgaagtgagaaatt

SEQ ID NO: 188918 - DNA, 20 bp, Artificial Sequence
  Synthetic oligonucleotide; AAAGAAA chr2 60486489 60486508 60486505 +
cctaccaatctaagatactg

SEQ ID NO: 188919 - DNA, 20 bp, Artificial Sequence
  Synthetic oligonucleotide; CCAGAAA chr2 60486511 60486530 60486527 +
agaaaatggctacatcaggc

SEQ ID NO: 188920 - DNA, 20 bp, Artificial Sequence
  Synthetic oligonucleotide; ACAGAAA chr2 60486596 60486615 60486612 +
ggctttgagatgaataatgc

SEQ ID NO: 188921 - DNA, 20 bp, Artificial Sequence
  Synthetic oligonucleotide; TGAGAAT chr2 60486760 60486779 60486776 +
cagagtctgagcccacagtc

SEQ ID NO: 188922 - DNA, 20 bp, Artificial Sequence
  Synthetic oligonucleotide; ACAGAAA chr2 60486896 60486915 60486912 +
atttgcccttttccctgcta

SEQ ID NO: 188923 - DNA, 20 bp, Artificial Sequence
  Synthetic oligonucleotide; TCAGAAT chr2 60486948 60486967 60486964 +
attttaagattactattcta

SEQ ID NO: 188924 - DNA, 20 bp, Artificial Sequence
  Synthetic oligonucleotide; AAAGAAA chr2 60487343 60487362 60487359 +
gccacacaccgagagtggaa

SEQ ID NO: 188925 - DNA, 20 bp, Artificial Sequence
  Synthetic oligonucleotide; GCAGAAT chr2 60487697 60487716 60487713 +
cactcccttatttatgagca

SEQ ID NO: 188926 - DNA, 20 bp, Artificial Sequence
  Synthetic oligonucleotide; GCAGAAA chr2 60487770 60487789 60487786 +
ccattctatctaaggaagct

SEQ ID NO: 188927 - DNA, 20 bp, Artificial Sequence
  Synthetic oligonucleotide; TAAGAAT chr2 60487820 60487839 60487836 +
cctttaatgggaaatctgga

SEQ ID NO: 188928 - DNA, 20 bp, Artificial Sequence
  Synthetic oligonucleotide; CTAGAAT chr2 60487948 60487967 60487964 +
ctgacttggttttcccaact

SEQ ID NO: 188929 - DNA, 20 bp, Artificial Sequence
  Synthetic oligonucleotide; GTAGAAA chr2 60488088 60488107 60488104 +
ttacaatttattctcattat

SEQ ID NO: 188930 - DNA, 20 bp, Artificial Sequence
  Synthetic oligonucleotide; CAAGAAT chr2 60488243 60488262 60488259 +
ttttaactgaacaatgtctc

SEQ ID NO: 188931 - DNA, 20 bp, Artificial Sequence
  Synthetic oligonucleotide; AAAGAAA chr2 60488424 60488443 60488440 +
acaggattacagcaaatgtg

SEQ ID NO: 188932 - DNA, 20 bp, Artificial Sequence
  Synthetic oligonucleotide; AAAGAAA chr2 60488573 60488592 60488589 +
atagtttgcttcccccaatg

SEQ ID NO: 188933 - DNA, 20 bp, Artificial Sequence
  Synthetic oligonucleotide; AAAGAAA chr2 60489063 60489082 60489079 +
cccaaaacaaatttatcttc

SEQ ID NO: 188934 - DNA, 20 bp, Artificial Sequence
  Synthetic oligonucleotide; AAAGAAA chr2 60489544 60489563 60489560 +
tttgaccagcacctatctca

SEQ ID NO: 188935 - DNA, 20 bp, Artificial Sequence
  Synthetic oligonucleotide; AAAGAAA chr2 60489588 60489607 60489604 +
aagcacctgaaggaagctga

SEQ ID NO: 188936 - DNA, 20 bp, Artificial Sequence
  Synthetic oligonucleotide; AGAGAAT chr2 60490213 60490232 60490229 +
ctcggcatgaagggtataac

SEQ ID NO: 188937 - DNA, 20 bp, Artificial Sequence
  Synthetic oligonucleotide; GAAGAAT chr2 60490550 60490569 60490566 +
ctacctagtcaccttagcaa

SEQ ID NO: 188938 - DNA, 20 bp, Artificial Sequence
  Synthetic oligonucleotide; AAAGAAA chr2 60491659 60491678 60491675 +
aaatctccgtctcaccaaaa

SEQ ID NO: 188939 - DNA, 20 bp, Artificial Sequence
  Synthetic oligonucleotide; AAAGAAA chr2 60491666 60491685 60491682 +
cgtctcaccaaaaaaagaaa

SEQ ID NO: 188940 - DNA, 20 bp, Artificial Sequence
  Synthetic oligonucleotide; AAAGAAA chr2 60491681 60491700 60491697 +
agaaaaaagaaaaaaaaaaa

SEQ ID NO: 188941 - DNA, 20 bp, Artificial Sequence
  Synthetic oligonucleotide; AAAGAAA chr2 60491685 60491704 60491701 +
aaaagaaaaaaaaaaaaaag

SEQ ID NO: 188942 - DNA, 20 bp, Artificial Sequence
  Synthetic oligonucleotide; TCAGAAA chr2 60491861 60491880 60491877 +
tccttagcacccaaataggt

SEQ ID NO: 188943 - DNA, 20 bp, Artificial Sequence
  Synthetic oligonucleotide; GGAGAAA chr2 60492175 60492194 60492191 +
aagaccagcctgggcaacag

SEQ ID NO: 188944 - DNA, 20 bp, Artificial Sequence
  Synthetic oligonucleotide; TTAGAAT chr2 60492394 60492413 60492410 +
acaactaattgggctaatgt

SEQ ID NO: 188945 - DNA, 20 bp, Artificial Sequence
  Synthetic oligonucleotide; GAAGAAA chr2 60492416 60492435 60492432 +
agaataaatgtatttctagg

SEQ ID NO: 188946 - DNA, 20 bp, Artificial Sequence
  Synthetic oligonucleotide; TCAGAAT chr2 60492648 60492667 60492664 +
ttaccaacttctataaaatc

SEQ ID NO: 188947 - DNA, 20 bp, Artificial Sequence
  Synthetic oligonucleotide; CTAGAAA chr2 60492928 60492947 60492944 +
tacagaacacgtccaccagt

SEQ ID NO: 188948 - DNA, 20 bp, Artificial Sequence
  Synthetic oligonucleotide; TGAGAAT chr2 60493026 60493045 60493042 +
cccacctaccaccacagtgt

SEQ ID NO: 188949 - DNA, 20 bp, Artificial Sequence
  Synthetic oligonucleotide; CTAGAAT chr2 60493034 60493053 60493050 +
ccaccacagtgttgagaatt

SEQ ID NO: 188950 - DNA, 20 bp, Artificial Sequence
  Synthetic oligonucleotide; GCAGAAT chr2 60493098 60493117 60493114 +
tgtttaatttcttccacaga

SEQ ID NO: 188951 - DNA, 20 bp, Artificial Sequence
  Synthetic oligonucleotide; ACAGAAA chr2 60493332 60493351 60493348 +
atctaaggcatttcgagaac

SEQ ID NO: 188952 - DNA, 20 bp, Artificial Sequence
  Synthetic oligonucleotide; ATAGAAA chr2 60493484 60493503 60493500 +
caaatgtcatcctattccga

SEQ ID NO: 188953 - DNA, 20 bp, Artificial Sequence
  Synthetic oligonucleotide; TCAGAAA chr2 60493637 60493656 60493653 +
tcctaagagcccccactagc

SEQ ID NO: 188954 - DNA, 20 bp, Artificial Sequence
  Synthetic oligonucleotide; GAAGAAA chr2 60493718 60493737 60493734 +
taccttgccaaaggccttgg

SEQ ID NO: 188955 - DNA, 20 bp, Artificial Sequence
  Synthetic oligonucleotide; GGAGAAA chr2 60494038 60494057 60494054 +
cttagacaacaatgcaaggg

SEQ ID NO: 188956 - DNA, 20 bp, Artificial Sequence
  Synthetic oligonucleotide; GAAGAAA chr2 60494047 60494066 60494063 +
caatgcaagggggagaaact

SEQ ID NO: 188957 - DNA, 20 bp, Artificial Sequence
  Synthetic oligonucleotide; AGAGAAA chr2 60494086 60494105 60494102 +
ccactactggcaataaacag

SEQ ID NO: 188958 - DNA, 20 bp, Artificial Sequence
  Synthetic oligonucleotide; TAAGAAA chr2 60494128 60494147 60494144 +
tgaggcacacctacattact

SEQ ID NO: 188959 - DNA, 20 bp, Artificial Sequence
  Synthetic oligonucleotide; GCAGAAA chr2 60494795 60494814 60494811 +
tatttattagttacacctca

SEQ ID NO: 188960 - DNA, 20 bp, Artificial Sequence
  Synthetic oligonucleotide; GAAGAAA chr2 60494843 60494862 60494859 +
ccaattcctagtttgggtca

SEQ ID NO: 188961 - DNA, 20 bp, Artificial Sequence
  Synthetic oligonucleotide; AAAGAAT chr2 60494874 60494893 60494890 +
aaaagggagaggaaaaagga

SEQ ID NO: 188962 - DNA, 20 bp, Artificial Sequence
  Synthetic oligonucleotide; TGAGAAA chr2 60495094 60495113 60495110 +
acaaattatttcattcccat

SEQ ID NO: 188963 - DNA, 20 bp, Artificial Sequence
  Synthetic oligonucleotide; TAAGAAA chr2 60495958 60495977 60495974 +
tagctattttttaaaacacc

SEQ ID NO: 188964 - DNA, 20 bp, Artificial Sequence
  Synthetic oligonucleotide; CCAGAAA chr2 60496144 60496163 60496160 +
agggaattgttcatgaaatc

SEQ ID NO: 188965 - DNA, 20 bp, Artificial Sequence
  Synthetic oligonucleotide; ACAGAAT chr2 60496224 60496243 60496240 +
tggaagtccaatacacgttt

SEQ ID NO: 188966 - DNA, 20 bp, Artificial Sequence
  Synthetic oligonucleotide; AGAGAAA chr2 60497213 60497232 60497229 +
ctgtaaacacttaatgagct

SEQ ID NO: 188967 - DNA, 20 bp, Artificial Sequence
  Synthetic oligonucleotide; TCAGAAT chr2 60497329 60497348 60497345 +
gtttgatcaagtcagatttt

SEQ ID NO: 188968 - DNA, 20 bp, Artificial Sequence
  Synthetic oligonucleotide; CTAGAAA chr2 60497388 60497407 60497404 +
gtctttaagttaatcaatcc

SEQ ID NO: 188969 - DNA, 20 bp, Artificial Sequence
  Synthetic oligonucleotide; CTAGAAA chr2 60497523 60497542 60497539 +
cccctaacatcaggaatcag

SEQ ID NO: 188970 - DNA, 20 bp, Artificial Sequence
  Synthetic oligonucleotide; AGAGAAA chr2 60497812 60497831 60497828 +
ccctttgctgatgatccagt

SEQ ID NO: 188971 - DNA, 20 bp, Artificial Sequence
  Synthetic oligonucleotide; GGAGAAT chr2 60498099 60498118 60498115 +
tggggtgagtcaaaagtctg

SEQ ID NO: 188972 - DNA, 20 bp, Artificial Sequence
  Synthetic oligonucleotide; CTAGAAT chr2 60498519 60498538 60498535 +
ccccatacccacttcccttc

SEQ ID NO: 188973 - DNA, 20 bp, Artificial Sequence
  Synthetic oligonucleotide; GGAGAAA chr2 60498698 60498717 60498714 +
aggcagatgaggtgacaagg

SEQ ID NO: 188974 - DNA, 20 bp, Artificial Sequence
  Synthetic oligonucleotide; CCAGAAA chr2 60498888 60498907 60498904 +
cagatgactgtccaactcat

SEQ ID NO: 188975 - DNA, 20 bp, Artificial Sequence
  Synthetic oligonucleotide; GAAGAAT chr2 60499027 60499046 60499043 +
cccacacaggcatccaaagg

SEQ ID NO: 188976 - DNA, 20 bp, Artificial Sequence
  Synthetic oligonucleotide; TGAGAAA chr2 60500497 60500516 60500513 +
agggaaggaaggagagcccc

SEQ ID NO: 188977 - DNA, 20 bp, Artificial Sequence
  Synthetic oligonucleotide; GAAGAAT chr2 60500512 60500531 60500528 +
gcccctgagaaaaaatggca

SEQ ID NO: 188978 - DNA, 20 bp, Artificial Sequence
  Synthetic oligonucleotide; TCAGAAA chr2 60501157 60501176 60501173 +
cacttatttatattattgtt

SEQ ID NO: 188979 - DNA, 20 bp, Artificial Sequence
  Synthetic oligonucleotide; TCAGAAT chr2 60502127 60502146 60502143 +
aacaatgcaactcaagacta

SEQ ID NO: 188980 - DNA, 20 bp, Artificial Sequence
  Synthetic oligonucleotide; ACAGAAT chr2 60502391 60502410 60502407 +
agcctaataaaactgcacag

SEQ ID NO: 188981 - DNA, 20 bp, Artificial Sequence
  Synthetic oligonucleotide; AAAGAAA chr2 60502510 60502529 60502526 +
ggatctcaggtattgctcct

SEQ ID NO: 188982 - DNA, 20 bp, Artificial Sequence
  Synthetic oligonucleotide; TAAGAAA chr2 60502605 60502624 60502621 +
ctaatattaaaatatgaatt

SEQ ID NO: 188983 - DNA, 20 bp, Artificial Sequence
  Synthetic oligonucleotide; CCAGAAA chr2 60502637 60502656 60502653 +
gtgaaaagagattttttaaa

SEQ ID NO: 188984 - DNA, 20 bp, Artificial Sequence
  Synthetic oligonucleotide; AGAGAAA chr2 60502699 60502718 60502715 +
aactgttttcaatcatcatc

SEQ ID NO: 188985 - DNA, 20 bp, Artificial Sequence
  Synthetic oligonucleotide; GCAGAAA chr2 60502741 60502760 60502757 +
gatcatggtagcacagtaga

SEQ ID NO: 188986 - DNA, 20 bp, Artificial Sequence
  Synthetic oligonucleotide; AAAGAAA chr2 60502768 60502787 60502784 +
gagcactcaattggtgatca

SEQ ID NO: 188987 - DNA, 20 bp, Artificial Sequence
  Synthetic oligonucleotide; CCAGAAA chr2 60502794 60502813 60502810 +
ataaattctagtcctgtcac

SEQ ID NO: 188988 - DNA, 20 bp, Artificial Sequence
  Synthetic oligonucleotide; AGAGAAT chr2 60502832 60502851 60502848 +
ggggaggtacttaatctcta

SEQ ID NO: 188989 - DNA, 20 bp, Artificial Sequence
  Synthetic oligonucleotide; TGAGAAA chr2 60502883 60502902 60502899 +
ctggggaaggagtgaaccag

SEQ ID NO: 188990 - DNA, 20 bp, Artificial Sequence
  Synthetic oligonucleotide; CCAGAAT chr2 60503241 60503260 60503257 +
ggctctgaccaggtggaaag

SEQ ID NO: 188991 - DNA, 20 bp, Artificial Sequence
  Synthetic oligonucleotide; ACAGAAA chr2 60503271 60503290 60503287 +
gtccaaccaggagacccaag

SEQ ID NO: 188992 - DNA, 20 bp, Artificial Sequence
  Synthetic oligonucleotide; CTAGAAA chr2 60503896 60503915 60503912 +
tattggctgcttcgttgatt

SEQ ID NO: 188993 - DNA, 20 bp, Artificial Sequence
  Synthetic oligonucleotide; AAAGAAA chr2 60503905 60503924 60503921 +
cttcgttgattctagaaaaa

SEQ ID NO: 188994 - DNA, 20 bp, Artificial Sequence
  Synthetic oligonucleotide; CAAGAAA chr2 60503913 60503932 60503929 +
attctagaaaaaaaagaaag

SEQ ID NO: 188995 - DNA, 20 bp, Artificial Sequence
  Synthetic oligonucleotide; CCAGAAA chr2 60504523 60504542 60504539 +
ggagctcagcatcgggacac

SEQ ID NO: 188996 - DNA, 20 bp, Artificial Sequence
  Synthetic oligonucleotide; GCAGAAT chr2 60504558 60504577 60504574 +
tccaaggcaaaaagcaaata

SEQ ID NO: 188997 - DNA, 20 bp, Artificial Sequence
  Synthetic oligonucleotide; TCAGAAT chr2 60504978 60504997 60504994 +
gaagtataaggagttctgga

SEQ ID NO: 188998 - DNA, 20 bp, Artificial Sequence
  Synthetic oligonucleotide; AGAGAAA chr2 60505231 60505250 60505247 +
caaaaaagctagaggatcgg

SEQ ID NO: 188999 - DNA, 20 bp, Artificial Sequence
  Synthetic oligonucleotide; TCAGAAA chr2 60505253 60505272 60505269 +
agaaaagaagggacggatac

SEQ ID NO: 189000 - DNA, 20 bp, Artificial Sequence
  Synthetic oligonucleotide; TTAGAAT chr2 60505752 60505771 60505768 +
ctctacctgggtctatcatt

SEQ ID NO: 189001 - DNA, 20 bp, Artificial Sequence
  Synthetic oligonucleotide; GCAGAAA chr2 60505862 60505881 60505878 +
ccctcccaaaacaacggtgg

SEQ ID NO: 189002 - DNA, 20 bp, Artificial Sequence
  Synthetic oligonucleotide; ATAGAAA chr2 60506116 60506135 60506132 +
gccatcctttgacacccacc

SEQ ID NO: 189003 - DNA, 20 bp, Artificial Sequence
  Synthetic oligonucleotide; TCAGAAA chr2 60506134 60506153 60506150 +
ccatagaaatcacagagagg

SEQ ID NO: 189004 - DNA, 20 bp, Artificial Sequence
  Synthetic oligonucleotide; TAAGAAA chr2 60506619 60506638 60506635 +
taatgataaaggcagctcac

SEQ ID NO: 189005 - DNA, 20 bp, Artificial Sequence
  Synthetic oligonucleotide; GCAGAAT chr2 60507161 60507180 60507177 +
ttaaatgctcttctagctct

SEQ ID NO: 189006 - DNA, 20 bp, Artificial Sequence
  Synthetic oligonucleotide; GAAGAAA chr2 60507183 60507202 60507199 +
agaatgcaaagcaagacaag

SEQ ID NO: 189007 - DNA, 20 bp, Artificial Sequence
  Synthetic oligonucleotide; CTAGAAA chr2 60507396 60507415 60507412 +
cccttgcctttcttgaaaag

SEQ ID NO: 189008 - DNA, 20 bp, Artificial Sequence
  Synthetic oligonucleotide; CCAGAAA chr2 60507466 60507485 60507482 +
tgaagctgcttccgttcaag

SEQ ID NO: 189009 - DNA, 20 bp, Artificial Sequence
  Synthetic oligonucleotide; CAAGAAA chr2 60507524 60507543 60507540 +
tcagatgttttggagtctct

SEQ ID NO: 189010 - DNA, 20 bp, Artificial Sequence
  Synthetic oligonucleotide; GCAGAAA chr2 60507690 60507709 60507706 +
cagcttttctaagacatatg

SEQ ID NO: 189011 - DNA, 20 bp, Artificial Sequence
  Synthetic oligonucleotide; ACAGAAA chr2 60507726 60507745 60507742 +
tgtcttccaaacagcacaag

SEQ ID NO: 189012 - DNA, 20 bp, Artificial Sequence
  Synthetic oligonucleotide; AAAGAAA chr2 60508035 60508054 60508051 +
acgacagatgcaaacacaaa

SEQ ID NO: 189013 - DNA, 20 bp, Artificial Sequence
  Synthetic oligonucleotide; GCAGAAT chr2 60508317 60508336 60508333 +
cagagaagcttcctgggtgt

SEQ ID NO: 189014 - DNA, 20 bp, Artificial Sequence
  Synthetic oligonucleotide; GGAGAAT chr2 60508627 60508646 60508643 +
gccaaagagaagcgttgcta

SEQ ID NO: 189015 - DNA, 20 bp, Artificial Sequence
  Synthetic oligonucleotide; AAAGAAA chr2 60509021 60509040 60509037 +
aagcctagaggacctcctcc

SEQ ID NO: 189016 - DNA, 20 bp, Artificial Sequence
  Synthetic oligonucleotide; ACAGAAA chr2 60509038 60509057 60509054 +
tccaaagaaaagtggctcag

SEQ ID NO: 189017 - DNA, 20 bp, Artificial Sequence
  Synthetic oligonucleotide; TGAGAAA chr2 60509106 60509125 60509122 +
tctggtctaaagattcaagc

SEQ ID NO: 189018 - DNA, 20 bp, Artificial Sequence
  Synthetic oligonucleotide; CAAGAAA chr2 60509113 60509132 60509129 +
taaagattcaagctgagaaa

SEQ ID NO: 189019 - DNA, 20 bp, Artificial Sequence
  Synthetic oligonucleotide; CAAGAAT chr2 60509208 60509227 60509224 +
cttggatgttatgaggattc

SEQ ID NO: 189020 - DNA, 20 bp, Artificial Sequence
  Synthetic oligonucleotide; CCAGAAA chr2 60509290 60509309 60509306 +
atgtgccagcccacttcttt

SEQ ID NO: 189021 - DNA, 20 bp, Artificial Sequence
  Synthetic oligonucleotide; GAAGAAA chr2 60509347 60509366 60509363 +
aagaggacaacggatttccg

SEQ ID NO: 189022 - DNA, 20 bp, Artificial Sequence
  Synthetic oligonucleotide; TCAGAAA chr2 60509408 60509427 60509424 +
agcagagccacacggacgtc

SEQ ID NO: 189023 - DNA, 20 bp, Artificial Sequence
  Synthetic oligonucleotide; TGAGAAA chr2 60509539 60509558 60509555 +
tcgatggtctacctgagacc

SEQ ID NO: 189024 - DNA, 20 bp, Artificial Sequence
  Synthetic oligonucleotide; AAAGAAA chr2 60509558 60509577 60509574 +
ctgagaaaacaaacgaaggg

SEQ ID NO: 189025 - DNA, 20 bp, Artificial Sequence
  Synthetic oligonucleotide; CAAGAAA chr2 60509567 60509586 60509583 +
caaacgaagggaaagaaatg

SEQ ID NO: 189026 - DNA, 20 bp, Artificial Sequence
  Synthetic oligonucleotide; GGAGAAA chr2 60509664 60509683 60509680 +
gaacaaaaagattaggagga

SEQ ID NO: 189027 - DNA, 20 bp, Artificial Sequence
  Synthetic oligonucleotide; CCAGAAT chr2 60510020 60510039 60510036 +
gttttcccttcgaagtatgt

SEQ ID NO: 189028 - DNA, 20 bp, Artificial Sequence
  Synthetic oligonucleotide; CTAGAAA chr2 60510583 60510602 60510599 +
catcttctgtctctccccag

SEQ ID NO: 189029 - DNA, 20 bp, Artificial Sequence
  Synthetic oligonucleotide; CTAGAAA chr2 60510956 60510975 60510972 +
ctaaggcttaggtggagcct

SEQ ID NO: 189030 - DNA, 20 bp, Artificial Sequence
  Synthetic oligonucleotide; CCAGAAA chr2 60511255 60511274 60511271 +
cctgagagcccgggatgcag

SEQ ID NO: 189031 - DNA, 20 bp, Artificial Sequence
  Synthetic oligonucleotide; ACAGAAA chr2 60511695 60511714 60511711 +
gtcaacgtattttccaagcc

SEQ ID NO: 189032 - DNA, 20 bp, Artificial Sequence
  Synthetic oligonucleotide; AAAGAAA chr2 60511949 60511968 60511965 +
aatgtaggtgttcaaaggca

SEQ ID NO: 189033 - DNA, 20 bp, Artificial Sequence
  Synthetic oligonucleotide; TCAGAAT chr2 60512268 60512287 60512284 +
ccgatgcgctgatgtggaac

SEQ ID NO: 189034 - DNA, 20 bp, Artificial Sequence
  Synthetic oligonucleotide; TGAGAAA chr2 60512448 60512467 60512464 +
acacacactcgcctctcaaa

SEQ ID NO: 189035 - DNA, 20 bp, Artificial Sequence
  Synthetic oligonucleotide; AAAGAAA chr2 60512618 60512637 60512634 +
agctctaaattatttggtct

SEQ ID NO: 189036 - DNA, 20 bp, Artificial Sequence
  Synthetic oligonucleotide; AGAGAAA chr2 60512901 60512920 60512917 +
catccatttggaggagacac

SEQ ID NO: 189037 - DNA, 20 bp, Artificial Sequence
  Synthetic oligonucleotide; TGAGAAA chr2 60513018 60513037 60513034 +
caccacctctggttaccccc

SEQ ID NO: 189038 - DNA, 20 bp, Artificial Sequence
  Synthetic oligonucleotide; AGAGAAA chr2 60513028 60513047 60513044 +
ggttaccccctgagaaaggc

SEQ ID NO: 189039 - DNA, 20 bp, Artificial Sequence
  Synthetic oligonucleotide; GCAGAAA chr2 60513403 60513422 60513419 +
cccacttgaggctgtccaca

SEQ ID NO: 189040 - DNA, 20 bp, Artificial Sequence
  Synthetic oligonucleotide; AAAGAAA chr2 60513679 60513698 60513695 +
atccctgatcaggactgaaa

SEQ ID NO: 189041 - DNA, 20 bp, Artificial Sequence
  Synthetic oligonucleotide; AAAGAAA chr2 60513685 60513704 60513701 +
gatcaggactgaaaaaagaa

SEQ ID NO: 189042 - DNA, 20 bp, Artificial Sequence
  Synthetic oligonucleotide; ATAGAAT chr2 60514343 60514362 60514359 +
ggagaacaagccatctgaaa

SEQ ID NO: 189043 - DNA, 20 bp, Artificial Sequence
  Synthetic oligonucleotide; GGAGAAT chr2 60514555 60514574 60514571 +
ctacttgggaggctgaggca

SEQ ID NO: 189044 - DNA, 20 bp, Artificial Sequence
  Synthetic oligonucleotide; ACAGAAA chr2 60514843 60514862 60514859 +
ttgcatacacatacactaaa

SEQ ID NO: 189045 - DNA, 20 bp, Artificial Sequence
  Synthetic oligonucleotide; AAAGAAA chr2 60514850 60514869 60514866 +
cacatacactaaaacagaaa

SEQ ID NO: 189046 - DNA, 20 bp, Artificial Sequence
  Synthetic oligonucleotide; AAAGAAA chr2 60514864 60514883 60514880 +
cagaaaaaagaaaaaaaaaa

SEQ ID NO: 189047 - DNA, 20 bp, Artificial Sequence
  Synthetic oligonucleotide; AGAGAAT chr2 60514889 60514908 60514905 +
aaagagagacagagagagag

SEQ ID NO: 189048 - DNA, 20 bp, Artificial Sequence
  Synthetic oligonucleotide; CCAGAAT chr2 60515007 60515026 60515023 +
agacaggctctagcttgttt

SEQ ID NO: 189049 - DNA, 20 bp, Artificial Sequence
  Synthetic oligonucleotide; ACAGAAT chr2 60515128 60515147 60515144 +
ctggcttccaggtgagcgag

SEQ ID NO: 189050 - DNA, 20 bp, Artificial Sequence
  Synthetic oligonucleotide; GGAGAAA chr2 60515446 60515465 60515462 +
aaaaggttataatttgagga

SEQ ID NO: 189051 - DNA, 20 bp, Artificial Sequence
  Synthetic oligonucleotide; AAAGAAA chr2 60515521 60515540 60515537 +
cccagagtgacacctcctcc

SEQ ID NO: 189052 - DNA, 20 bp, Artificial Sequence
  Synthetic oligonucleotide; CTAGAAA chr2 60515564 60515583 60515580 +
agtcaggccttcctagttac

SEQ ID NO: 189053 - DNA, 20 bp, Artificial Sequence
  Synthetic oligonucleotide; ACAGAAA chr2 60515607 60515626 60515623 +
ccagcccactagaaggagat

SEQ ID NO: 189054 - DNA, 20 bp, Artificial Sequence
  Synthetic oligonucleotide; GGAGAAA chr2 60515682 60515701 60515698 +
agcccagtgctttcaggcag

SEQ ID NO: 189055 - DNA, 20 bp, Artificial Sequence
  Synthetic oligonucleotide; CGAGAAA chr2 60515894 60515913 60515910 +
aggaagtgaacaagtcaatt

SEQ ID NO: 189056 - DNA, 20 bp, Artificial Sequence
  Synthetic oligonucleotide; ACAGAAA chr2 60516193 60516212 60516209 +
acctctcctcaccccagcac

SEQ ID NO: 189057 - DNA, 20 bp, Artificial Sequence
  Synthetic oligonucleotide; CAAGAAA chr2 60516423 60516442 60516439 +
ttaccgagcagtaagtgagg

SEQ ID NO: 189058 - DNA, 20 bp, Artificial Sequence
  Synthetic oligonucleotide; GGAGAAA chr2 60516621 60516640 60516637 +
agagaggggcacctgggatg

SEQ ID NO: 189059 - DNA, 20 bp, Artificial Sequence
  Synthetic oligonucleotide; AAAGAAT chr2 60516786 60516805 60516802 +
aagagtgcagacataagact

SEQ ID NO: 189060 - DNA, 20 bp, Artificial Sequence
  Synthetic oligonucleotide; ATAGAAA chr2 60516890 60516909 60516906 +
agcagattctaaagagaggc

SEQ ID NO: 189061 - DNA, 20 bp, Artificial Sequence
  Synthetic oligonucleotide; GGAGAAT chr2 60516972 60516991 60516988 +
atttaggaagaagaagtggc

SEQ ID NO: 189062 - DNA, 20 bp, Artificial Sequence
  Synthetic oligonucleotide; GAAGAAT chr2 60516984 60517003 60517000 +
gaagtggcggagaatggaat

SEQ ID NO: 189063 - DNA, 20 bp, Artificial Sequence
  Synthetic oligonucleotide; AGAGAAA chr2 60517369 60517388 60517385 +
gaccagccccgaaaaagggc

SEQ ID NO: 189064 - DNA, 20 bp, Artificial Sequence
  Synthetic oligonucleotide; GAAGAAA chr2 60517397 60517416 60517413 +
cagggaaaggaacaaggcaa

SEQ ID NO: 189065 - DNA, 20 bp, Artificial Sequence
  Synthetic oligonucleotide; TAAGAAA chr2 60517530 60517549 60517546 +
ctcttcaacaaagctccagt

SEQ ID NO: 189066 - DNA, 20 bp, Artificial Sequence
  Synthetic oligonucleotide; TCAGAAA chr2 60517889 60517908 60517905 +
gtgctttcttctatgattcc

SEQ ID NO: 189067 - DNA, 20 bp, Artificial Sequence
  Synthetic oligonucleotide; AGAGAAA chr2 60517951 60517970 60517967 +
aaacccaattttaggggagg

SEQ ID NO: 189068 - DNA, 20 bp, Artificial Sequence
  Synthetic oligonucleotide; TCAGAAA chr2 60518020 60518039 60518036 +
atttgcttatgcctataatc

SEQ ID NO: 189069 - DNA, 20 bp, Artificial Sequence
  Synthetic oligonucleotide; AAAGAAA chr2 60518161 60518180 60518177 +
tgagatttagctatcttttc

SEQ ID NO: 189070 - DNA, 20 bp, Artificial Sequence
  Synthetic oligonucleotide; AGAGAAT chr2 60518347 60518366 60518363 +
gcctgtcatgaagcagactc

SEQ ID NO: 189071 - DNA, 20 bp, Artificial Sequence
  Synthetic oligonucleotide; TGAGAAT chr2 60518587 60518606 60518603 +
aggaagcattgctctagatc

SEQ ID NO: 189072 - DNA, 20 bp, Artificial Sequence
  Synthetic oligonucleotide; TGAGAAA chr2 60518648 60518667 60518664 +
acaaacccagcagagaacgt

SEQ ID NO: 189073 - DNA, 20 bp, Artificial Sequence
  Synthetic oligonucleotide; CCAGAAT chr2 60518701 60518720 60518717 +
gagttcacttaaaagtccat

SEQ ID NO: 189074 - DNA, 20 bp, Artificial Sequence
  Synthetic oligonucleotide; AGAGAAA chr2 60519016 60519035 60519032 +
cacacatctctcaactcttg

SEQ ID NO: 189075 - DNA, 20 bp, Artificial Sequence
  Synthetic oligonucleotide; AAAGAAA chr2 60519156 60519175 60519172 +
caaatacaggcgctacaaaa

SEQ ID NO: 189076 - DNA, 20 bp, Artificial Sequence
  Synthetic oligonucleotide; CAAGAAA chr2 60519180 60519199 60519196 +
aaataggtgtgaaagcgggg

SEQ ID NO: 189077 - DNA, 20 bp, Artificial Sequence
  Synthetic oligonucleotide; AGAGAAA chr2 60519497 60519516 60519513 +
ggtgactgcactcatgctgc

SEQ ID NO: 189078 - DNA, 20 bp, Artificial Sequence
  Synthetic oligonucleotide; AGAGAAA chr2 60519577 60519596 60519593 +
gcctgccttctttccttaca

SEQ ID NO: 189079 - DNA, 20 bp, Artificial Sequence
  Synthetic oligonucleotide; GGAGAAA chr2 60519632 60519651 60519648 +
acagcagtaagttgaccact

SEQ ID NO: 189080 - DNA, 20 bp, Artificial Sequence
  Synthetic oligonucleotide; TCAGAAA chr2 60519751 60519770 60519767 +
gggcatgggactgtgcttat

SEQ ID NO: 189081 - DNA, 20 bp, Artificial Sequence
  Synthetic oligonucleotide; AAAGAAA chr2 60519803 60519822 60519819 +
tcctaaattactccaatgac

SEQ ID NO: 189082 - DNA, 20 bp, Artificial Sequence
  Synthetic oligonucleotide; GGAGAAT chr2 60519955 60519974 60519971 +
attctcccctctctctggca

SEQ ID NO: 189083 - DNA, 20 bp, Artificial Sequence
  Synthetic oligonucleotide; TCAGAAA chr2 60520094 60520113 60520110 +
ttttctgaaaattgaaaaat

SEQ ID NO: 189084 - DNA, 20 bp, Artificial Sequence
  Synthetic oligonucleotide; ATAGAAT chr2 60520111 60520130 60520127 +
aattcagaaagccaaagata

SEQ ID NO: 189085 - DNA, 20 bp, Artificial Sequence
  Synthetic oligonucleotide; GGAGAAA chr2 60520525 60520544 60520541 +
tcgcattccgtttataagaa

SEQ ID NO: 189086 - DNA, 20 bp, Artificial Sequence
  Synthetic oligonucleotide; GCAGAAA chr2 60520868 60520887 60520884 +
gcaagcttagccccttcttt

SEQ ID NO: 189087 - DNA, 20 bp, Artificial Sequence
  Synthetic oligonucleotide; GTAGAAA chr2 60520897 60520916 60520913 +
aagatattgatgtgccaaca

SEQ ID NO: 189088 - DNA, 20 bp, Artificial Sequence
  Synthetic oligonucleotide; GAAGAAA chr2 60520904 60520923 60520920 +
tgatgtgccaacagtagaaa

SEQ ID NO: 189089 - DNA, 20 bp, Artificial Sequence
  Synthetic oligonucleotide; AAAGAAA chr2 60521714 60521733 60521730 +
tagccagggctcaaatggcc

SEQ ID NO: 189090 - DNA, 20 bp, Artificial Sequence
  Synthetic oligonucleotide; GGAGAAT chr2 60521890 60521909 60521906 +
aagggatctctgttcttcca

SEQ ID NO: 189091 - DNA, 20 bp, Artificial Sequence
  Synthetic oligonucleotide; GAAGAAA chr2 60522032 60522051 60522048 +
ctctgagccaaacccttggt

SEQ ID NO: 189092 - DNA, 20 bp, Artificial Sequence
  Synthetic oligonucleotide; AGAGAAT chr2 60522127 60522146 60522143 +
ctcaaatactacaaaagtag

SEQ ID NO: 189093 - DNA, 20 bp, Artificial Sequence
  Synthetic oligonucleotide; TCAGAAA chr2 60522415 60522434 60522431 +
ataggggagttattttaaac

SEQ ID NO: 189094 - DNA, 20 bp, Artificial Sequence
  Synthetic oligonucleotide; CAAGAAA chr2 60522487 60522506 60522503 +
aggttcaagactgaagctgc

SEQ ID NO: 189095 - DNA, 20 bp, Artificial Sequence
  Synthetic oligonucleotide; AGAGAAT chr2 60522500 60522519 60522516 +
aagctgccaagaaaagcttc

SEQ ID NO: 189096 - DNA, 20 bp, Artificial Sequence
  Synthetic oligonucleotide; GAAGAAA chr2 60522747 60522766 60522763 +
actggaattcatttgtcttg

SEQ ID NO: 189097 - DNA, 20 bp, Artificial Sequence
  Synthetic oligonucleotide; ACAGAAT chr2 60522776 60522795 60522792 +
gttctcctggacggttctgc

SEQ ID NO: 189098 - DNA, 20 bp, Artificial Sequence
  Synthetic oligonucleotide; ACAGAAA chr2 60523134 60523153 60523150 +
accagatgcagaggcaggtc

SEQ ID NO: 189099 - DNA, 20 bp, Artificial Sequence
  Synthetic oligonucleotide; AGAGAAA chr2 60523200 60523219 60523216 +
ggcaacacgtgttgcaacct

SEQ ID NO: 189100 - DNA, 20 bp, Artificial Sequence
  Synthetic oligonucleotide; AAAGAAT chr2 60523204 60523223 60523220 +
acacgtgttgcaacctagag

SEQ ID NO: 189101 - DNA, 20 bp, Artificial Sequence
  Synthetic oligonucleotide; TGAGAAA chr2 60523724 60523743 60523740 +
attcattgccaggcaaaact

SEQ ID NO: 189102 - DNA, 20 bp, Artificial Sequence
  Synthetic oligonucleotide; TTAGAAA chr2 60523736 60523755 60523752 +
gcaaaacttgagaaatacat

SEQ ID NO: 189103 - DNA, 20 bp, Artificial Sequence
  Synthetic oligonucleotide; ACAGAAA chr2 60523790 60523809 60523806 +
agtaaatgaatcaccaaggc

SEQ ID NO: 189104 - DNA, 20 bp, Artificial Sequence
  Synthetic oligonucleotide; CAAGAAT chr2 60523831 60523850 60523847 +
acttaactagcccaaacgtt

SEQ ID NO: 189105 - DNA, 20 bp, Artificial Sequence
  Synthetic oligonucleotide; TCAGAAA chr2 60524519 60524538 60524535 +
agatagaagagcatgcaaaa

SEQ ID NO: 189106 - DNA, 20 bp, Artificial Sequence
  Synthetic oligonucleotide; AAAGAAA chr2 60524718 60524737 60524734 +
tctgagcacatgggataata

SEQ ID NO: 189107 - DNA, 20 bp, Artificial Sequence
  Synthetic oligonucleotide; ACAGAAA chr2 60524845 60524864 60524861 +
tttgctggacagtgtggaaa

SEQ ID NO: 189108 - DNA, 20 bp, Artificial Sequence
  Synthetic oligonucleotide; AGAGAAA chr2 60525095 60525114 60525111 +
tatgtaggctatgtccatac

SEQ ID NO: 189109 - DNA, 20 bp, Artificial Sequence
  Synthetic oligonucleotide; GGAGAAA chr2 60525252 60525271 60525268 +
ttgcccaaaaaagcaaactt

SEQ ID NO: 189110 - DNA, 20 bp, Artificial Sequence
  Synthetic oligonucleotide; GGAGAAA chr2 60525317 60525336 60525333 +
gcttgcaacaattaaaagat

SEQ ID NO: 189111 - DNA, 20 bp, Artificial Sequence
  Synthetic oligonucleotide; CAAGAAA chr2 60525481 60525500 60525497 +
cttccatctttgaggcaaat

SEQ ID NO: 189112 - DNA, 20 bp, Artificial Sequence
  Synthetic oligonucleotide; GGAGAAA chr2 60525550 60525569 60525566 +
tagattccaaaaaatagcag

SEQ ID NO: 189113 - DNA, 20 bp, Artificial Sequence
  Synthetic oligonucleotide; AAAGAAT chr2 60526029 60526048 60526045 +
atggcagcagggctgggaaa

SEQ ID NO: 189114 - DNA, 20 bp, Artificial Sequence
  Synthetic oligonucleotide; TCAGAAA chr2 60526153 60526172 60526169 +
aaatctagatttgatcaaat

SEQ ID NO: 189115 - DNA, 20 bp, Artificial Sequence
  Synthetic oligonucleotide; TCAGAAT chr2 60526178 60526197 60526194 +
aactggtgatttgatcaaat

SEQ ID NO: 189116 - DNA, 20 bp, Artificial Sequence
  Synthetic oligonucleotide; GCAGAAA chr2 60526211 60526230 60526227 +
ttttgggatgatgtgttcta

SEQ ID NO: 189117 - DNA, 20 bp, Artificial Sequence
  Synthetic oligonucleotide; GTAGAAA chr2 60526940 60526959 60526956 +
gacatttcaatcaggttgaa

SEQ ID NO: 189118 - DNA, 20 bp, Artificial Sequence
  Synthetic oligonucleotide; GCAGAAA chr2 60527139 60527158 60527155 +
tttgtgcttacctaacgaag

SEQ ID NO: 189119 - DNA, 20 bp, Artificial Sequence
  Synthetic oligonucleotide; ACAGAAA chr2 60527145 60527164 60527161 +
cttacctaacgaaggcagaa

SEQ ID NO: 189120 - DNA, 20 bp, Artificial Sequence
  Synthetic oligonucleotide; AAAGAAA chr2 60527151 60527170 60527167 +
taacgaaggcagaaacagaa

SEQ ID NO: 189121 - DNA, 20 bp, Artificial Sequence
  Synthetic oligonucleotide; AAAGAAA chr2 60527157 60527176 60527173 +
aggcagaaacagaaaaagaa

SEQ ID NO: 189122 - DNA, 20 bp, Artificial Sequence
  Synthetic oligonucleotide; GGAGAAT chr2 60527794 60527813 60527810 +
cctggccaatttgaaaggat

SEQ ID NO: 189123 - DNA, 20 bp, Artificial Sequence
  Synthetic oligonucleotide; CCAGAAA chr2 60528059 60528078 60528075 +
cttaccacagccttgttcag

SEQ ID NO: 189124 - DNA, 20 bp, Artificial Sequence
  Synthetic oligonucleotide; TAAGAAA chr2 60528113 60528132 60528129 +
ccccccagaacccatcgtcc

SEQ ID NO: 189125 - DNA, 20 bp, Artificial Sequence
  Synthetic oligonucleotide; GAAGAAA chr2 60528592 60528611 60528608 +
agttgttgcctggcaccgct

SEQ ID NO: 189126 - DNA, 20 bp, Artificial Sequence
  Synthetic oligonucleotide; ATAGAAA chr2 60528960 60528979 60528976 +
cccaaccagctagcagtaac

SEQ ID NO: 189127 - DNA, 20 bp, Artificial Sequence
  Synthetic oligonucleotide; CCAGAAA chr2 60529073 60529092 60529089 +
cacccacgagggagctgcca

SEQ ID NO: 189128 - DNA, 20 bp, Artificial Sequence
  Synthetic oligonucleotide; CTAGAAA chr2 60529388 60529407 60529404 +
atctgcccaaggttgcacaa

SEQ ID NO: 189129 - DNA, 20 bp, Artificial Sequence
  Synthetic oligonucleotide; GAAGAAA chr2 60529452 60529471 60529468 +
tttcgtgtaatcaaagagaa

SEQ ID NO: 189130 - DNA, 20 bp, Artificial Sequence
  Synthetic oligonucleotide; AAAGAAA chr2 60529457 60529476 60529473 +
tgtaatcaaagagaagaaga

SEQ ID NO: 189131 - DNA, 20 bp, Artificial Sequence
  Synthetic oligonucleotide; CTAGAAA chr2 60529663 60529682 60529679 +
ttcccagtttttatttgcta

SEQ ID NO: 189132 - DNA, 20 bp, Artificial Sequence
  Synthetic oligonucleotide; TAAGAAA chr2 60530102 60530121 60530118 +
acaggaagaggccaagaaga

SEQ ID NO: 189133 - DNA, 20 bp, Artificial Sequence
  Synthetic oligonucleotide; AAAGAAA chr2 60530659 60530678 60530675 +
acagtcagcaggtatttaaa

SEQ ID NO: 189134 - DNA, 20 bp, Artificial Sequence
  Synthetic oligonucleotide; AAAGAAA chr2 60530663 60530682 60530679 +
tcagcaggtatttaaaaaag

SEQ ID NO: 189135 - DNA, 20 bp, Artificial Sequence
  Synthetic oligonucleotide; AAAGAAA chr2 60530667 60530686 60530683 +
caggtatttaaaaaagaaag

SEQ ID NO: 189136 - DNA, 20 bp, Artificial Sequence
  Synthetic oligonucleotide; TCAGAAA chr2 60531129 60531148 60531145 +
ttaagcccctcctggcaacc

SEQ ID NO: 189137 - DNA, 20 bp, Artificial Sequence
  Synthetic oligonucleotide; AGAGAAA chr2 60531138 60531157 60531154 +
tcctggcaacctcagaaatt

SEQ ID NO: 189138 - DNA, 20 bp, Artificial Sequence
  Synthetic oligonucleotide; ACAGAAT chr2 60531249 60531268 60531265 +
acacaaatcccgttggaccc

SEQ ID NO: 189139 - DNA, 20 bp, Artificial Sequence
  Synthetic oligonucleotide; CCAGAAA chr2 60531285 60531304 60531301 +
cctctcacactaacactaaa

SEQ ID NO: 189140 - DNA, 20 bp, Artificial Sequence
  Synthetic oligonucleotide; CAAGAAT chr2 60531332 60531351 60531348 +
gccccctcctttgcgttctg

SEQ ID NO: 189141 - DNA, 20 bp, Artificial Sequence
  Synthetic oligonucleotide; GAAGAAA chr2 60532112 60532131 60532128 +
tcgaatctaattaagatcag

SEQ ID NO: 189142 - DNA, 20 bp, Artificial Sequence
  Synthetic oligonucleotide; TGAGAAT chr2 60532172 60532191 60532188 +
cacagaagttcttcaaattt

SEQ ID NO: 189143 - DNA, 20 bp, Artificial Sequence
  Synthetic oligonucleotide; TCAGAAA chr2 60532435 60532454 60532451 +
gtggtggcgttaatgtttct

SEQ ID NO: 189144 - DNA, 20 bp, Artificial Sequence
  Synthetic oligonucleotide; AAAGAAA chr2 60532548 60532567 60532564 +
cttggtatgtgaatggcgaa

SEQ ID NO: 189145 - DNA, 20 bp, Artificial Sequence
  Synthetic oligonucleotide; AAAGAAA chr2 60532562 60532581 60532578 +
ggcgaaaaagaaaaaaaagg

SEQ ID NO: 189146 - DNA, 20 bp, Artificial Sequence
  Synthetic oligonucleotide; AAAGAAA chr2 60532570 60532589 60532586 +
agaaaaaaaaggaaagaaaa

SEQ ID NO: 189147 - DNA, 20 bp, Artificial Sequence
  Synthetic oligonucleotide; TAAGAAA chr2 60532896 60532915 60532912 +
accaaaatttaatggtgact

SEQ ID NO: 189148 - DNA, 20 bp, Artificial Sequence
  Synthetic oligonucleotide; GTAGAAT chr2 60532928 60532947 60532944 +
atactttttatttacttcct

SEQ ID NO: 189149 - DNA, 20 bp, Artificial Sequence
  Synthetic oligonucleotide; TTAGAAT chr2 60533013 60533032 60533029 +
cactagattatgccaatcta

SEQ ID NO: 189150 - DNA, 20 bp, Artificial Sequence
  Synthetic oligonucleotide; AGAGAAA chr2 60533325 60533344 60533341 +
gtttgggggagagagagagg

SEQ ID NO: 189151 - DNA, 20 bp, Artificial Sequence
  Synthetic oligonucleotide; CAAGAAA chr2 60533610 60533629 60533626 +
tcttagtaaagcaattacat

SEQ ID NO: 189152 - DNA, 20 bp, Artificial Sequence
  Synthetic oligonucleotide; GCAGAAT chr2 60533686 60533705 60533702 +
aggctgtgaagtcggagagg

SEQ ID NO: 189153 - DNA, 20 bp, Artificial Sequence
  Synthetic oligonucleotide; TCAGAAT chr2 60533980 60533999 60533996 +
tcattaaacattcgttttaa

SEQ ID NO: 189154 - DNA, 20 bp, Artificial Sequence
  Synthetic oligonucleotide; TGAGAAA chr2 60534261 60534280 60534277 +
agctcagagcagcagctgaa

SEQ ID NO: 189155 - DNA, 20 bp, Artificial Sequence
  Synthetic oligonucleotide; GAAGAAA chr2 60534344 60534363 60534360 +
gtgccagccatctatctaaa

SEQ ID NO: 189156 - DNA, 20 bp, Artificial Sequence
  Synthetic oligonucleotide; TTAGAAA chr2 60534363 60534382 60534379 +
agaagaaacctaaagcattg

SEQ ID NO: 189157 - DNA, 20 bp, Artificial Sequence
  Synthetic oligonucleotide; ACAGAAA chr2 60534495 60534514 60534511 +
ccctgcaatgttcgtgggga

SEQ ID NO: 189158 - DNA, 20 bp, Artificial Sequence
  Synthetic oligonucleotide; AAAGAAA chr2 60534624 60534643 60534640 +
acaaactgtacttaacgtta

SEQ ID NO: 189159 - DNA, 20 bp, Artificial Sequence
  Synthetic oligonucleotide; GAAGAAA chr2 60534889 60534908 60534905 +
tggtgaacttttaatcttga

SEQ ID NO: 189160 - DNA, 20 bp, Artificial Sequence
  Synthetic oligonucleotide; TAAGAAT chr2 60534946 60534965 60534962 +
attttgcaagattgaaaatc

SEQ ID NO: 189161 - DNA, 20 bp, Artificial Sequence
  Synthetic oligonucleotide; TTAGAAT chr2 60535094 60535113 60535110 +
ctggaaggacctaatggtca

SEQ ID NO: 189162 - DNA, 20 bp, Artificial Sequence
  Synthetic oligonucleotide; CAAGAAA chr2 60535643 60535662 60535659 +
tgcttccaaagggaaaccag

SEQ ID NO: 189163 - DNA, 20 bp, Artificial Sequence
  Synthetic oligonucleotide; TCAGAAA chr2 60535800 60535819 60535816 +
atgcagacatcagctgacat

SEQ ID NO: 189164 - DNA, 20 bp, Artificial Sequence
  Synthetic oligonucleotide; GAAGAAT chr2 60535901 60535920 60535917 +
tttccaattactagtctgga

SEQ ID NO: 189165 - DNA, 20 bp, Artificial Sequence
  Synthetic oligonucleotide; ACAGAAT chr2 60535968 60535987 60535984 +
acatttaaaaaattctagtg

SEQ ID NO: 189166 - DNA, 20 bp, Artificial Sequence
  Synthetic oligonucleotide; CAAGAAA chr2 60536031 60536050 60536047 +
ctctccaacccaggtgaaag

SEQ ID NO: 189167 - DNA, 20 bp, Artificial Sequence
  Synthetic oligonucleotide; TGAGAAT chr2 60536079 60536098 60536095 +
agctggtgtgcaagtcagac

SEQ ID NO: 189168 - DNA, 20 bp, Artificial Sequence
  Synthetic oligonucleotide; GAAGAAT chr2 60536177 60536196 60536193 +
atttcatttgaactgctatc

SEQ ID NO: 189169 - DNA, 20 bp, Artificial Sequence
  Synthetic oligonucleotide; GGAGAAA chr2 60536299 60536318 60536315 +
aaggaaatcggaaagagaag

SEQ ID NO: 189170 - DNA, 20 bp, Artificial Sequence
  Synthetic oligonucleotide; TCAGAAA chr2 60536358 60536377 60536374 +
ctcttatccttgggccctgc

SEQ ID NO: 189171 - DNA, 20 bp, Artificial Sequence
  Synthetic oligonucleotide; TTAGAAA chr2 60536386 60536405 60536402 +
gtgccacattttaacattta

SEQ ID NO: 189172 - DNA, 20 bp, Artificial Sequence
  Synthetic oligonucleotide; TCAGAAT chr2 60536541 60536560 60536557 +
atgggatgtgacagggcaaa

SEQ ID NO: 189173 - DNA, 20 bp, Artificial Sequence
  Synthetic oligonucleotide; TTAGAAA chr2 60536566 60536585 60536582 +
attagattaaaaacaaaagt

SEQ ID NO: 189174 - DNA, 20 bp, Artificial Sequence
  Synthetic oligonucleotide; TCAGAAA chr2 60536694 60536713 60536710 +
ctggcaacaccgcaatcaca

SEQ ID NO: 189175 - DNA, 20 bp, Artificial Sequence
  Synthetic oligonucleotide; GTAGAAT chr2 60536983 60537002 60536999 +
gttaagcaatccacttgtat

SEQ ID NO: 189176 - DNA, 20 bp, Artificial Sequence
  Synthetic oligonucleotide; GAAGAAA chr2 60537036 60537055 60537052 +
gtcacacagctccaagatca

SEQ ID NO: 189177 - DNA, 20 bp, Artificial Sequence
  Synthetic oligonucleotide; TCAGAAT chr2 60537120 60537139 60537136 +
aagatccaagagtatcttta

SEQ ID NO: 189178 - DNA, 20 bp, Artificial Sequence
  Synthetic oligonucleotide; AGAGAAA chr2 60537295 60537314 60537311 +
aaaatattagggtgtgatgg

SEQ ID NO: 189179 - DNA, 20 bp, Artificial Sequence
  Synthetic oligonucleotide; GGAGAAT chr2 60537463 60537482 60537479 +
gtataccttgagttggtgaa

SEQ ID NO: 189180 - DNA, 20 bp, Artificial Sequence
  Synthetic oligonucleotide; TAAGAAT chr2 60537604 60537623 60537620 +
tagtgctttgtgctccaaca

SEQ ID NO: 189181 - DNA, 20 bp, Artificial Sequence
  Synthetic oligonucleotide; TAAGAAA chr2 60537685 60537704 60537701 +
ttttatgcatcattacatat

SEQ ID NO: 189182 - DNA, 20 bp, Artificial Sequence
  Synthetic oligonucleotide; TTAGAAA chr2 60537756 60537775 60537772 +
aaaaagcttccttgtgtttt

SEQ ID NO: 189183 - DNA, 20 bp, Artificial Sequence
  Synthetic oligonucleotide; ATAGAAA chr2 60537776 60537795 60537792 +
ttagaaagttcaaaaagcaa

SEQ ID NO: 189184 - DNA, 20 bp, Artificial Sequence
  Synthetic oligonucleotide; TGAGAAT chr2 60537953 60537972 60537969 +
attggcaatgctaacaacag

SEQ ID NO: 189185 - DNA, 20 bp, Artificial Sequence
  Synthetic oligonucleotide; GAAGAAA chr2 60539002 60539021 60539018 +
ttggggagacaactccaaga

SEQ ID NO: 189186 - DNA, 20 bp, Artificial Sequence
  Synthetic oligonucleotide; CAAGAAT chr2 60539047 60539066 60539063 +
cgctatagatcaaaggagaa

SEQ ID NO: 189187 - DNA, 20 bp, Artificial Sequence
  Synthetic oligonucleotide; GCAGAAT chr2 60539390 60539409 60539406 +
caacctaactcaatgccatt

SEQ ID NO: 189188 - DNA, 20 bp, Artificial Sequence
  Synthetic oligonucleotide; TCAGAAA chr2 60539408 60539427 60539424 +
ttgcagaatgacgaatgagc

SEQ ID NO: 189189 - DNA, 20 bp, Artificial Sequence
  Synthetic oligonucleotide; TTAGAAA chr2 60539563 60539582 60539579 +
aagttacattttaaaactga

SEQ ID NO: 189190 - DNA, 20 bp, Artificial Sequence
  Synthetic oligonucleotide; AAAGAAT chr2 60539700 60539719 60539716 +
aggagcacatgtagagagct

SEQ ID NO: 189191 - DNA, 20 bp, Artificial Sequence
  Synthetic oligonucleotide; ACAGAAA chr2 60539748 60539767 60539764 +
tcctggaaattaagtttgtg

SEQ ID NO: 189192 - DNA, 20 bp, Artificial Sequence
  Synthetic oligonucleotide; GGAGAAA chr2 60539917 60539936 60539933 +
gatgcccatttacctaggta

SEQ ID NO: 189193 - DNA, 20 bp, Artificial Sequence
  Synthetic oligonucleotide; TTAGAAT chr2 60540107 60540126 60540123 +
tgttaaaagtgggctctaag

SEQ ID NO: 189194 - DNA, 20 bp, Artificial Sequence
  Synthetic oligonucleotide; GCAGAAA chr2 60540181 60540200 60540197 +
cccaaatgaaatctgaacaa

SEQ ID NO: 189195 - DNA, 20 bp, Artificial Sequence
  Synthetic oligonucleotide; TGAGAAA chr2 60540554 60540573 60540570 +
cctttattaaacattttcat

SEQ ID NO: 189196 - DNA, 20 bp, Artificial Sequence
  Synthetic oligonucleotide; AGAGAAA chr2 60540826 60540845 60540842 +
attatatgccacattcacta

SEQ ID NO: 189197 - DNA, 20 bp, Artificial Sequence
  Synthetic oligonucleotide; TAAGAAA chr2 60540905 60540924 60540921 +
caacaaggaatggggtgatt

SEQ ID NO: 189198 - DNA, 20 bp, Artificial Sequence
  Synthetic oligonucleotide; ACAGAAT chr2 60541005 60541024 60541021 +
ttttgtttttttaagctttc

SEQ ID NO: 189199 - DNA, 20 bp, Artificial Sequence
  Synthetic oligonucleotide; ACAGAAA chr2 60541129 60541148 60541145 +
actgtctgtaacagcaggag

SEQ ID NO: 189200 - DNA, 20 bp, Artificial Sequence
  Synthetic oligonucleotide; TTAGAAA chr2 60541470 60541489 60541486 +
agttctatttacaatttgtc

SEQ ID NO: 189201 - DNA, 20 bp, Artificial Sequence
  Synthetic oligonucleotide; TTAGAAA chr2 60541647 60541666 60541663 +
atgaaaatcctaggtactta

SEQ ID NO: 189202 - DNA, 20 bp, Artificial Sequence
  Synthetic oligonucleotide; TCAGAAT chr2 60541785 60541804 60541801 +
cagaagtcagtcgtttttat

SEQ ID NO: 189203 - DNA, 20 bp, Artificial Sequence
  Synthetic oligonucleotide; AGAGAAA chr2 60541803 60541822 60541819 +
attcagaatcacataaataa

SEQ ID NO: 189204 - DNA, 20 bp, Artificial Sequence
  Synthetic oligonucleotide; AAAGAAA chr2 60541808 60541827 60541824 +
gaatcacataaataaagaga

SEQ ID NO: 189205 - DNA, 20 bp, Artificial Sequence
  Synthetic oligonucleotide; AGAGAAT chr2 60541911 60541930 60541927 +
ccagttcagtctgagctagg

SEQ ID NO: 189206 - DNA, 20 bp, Artificial Sequence
  Synthetic oligonucleotide; TCAGAAT chr2 60541917 60541936 60541933 +
cagtctgagctaggagagaa

SEQ ID NO: 189207 - DNA, 20 bp, Artificial Sequence
  Synthetic oligonucleotide; AAAGAAA chr2 60541932 60541951 60541948 +
gagaatcagaatggatacaa

SEQ ID NO: 189208 - DNA, 20 bp, Artificial Sequence
  Synthetic oligonucleotide; AGAGAAA chr2 60542142 60542161 60542158 +
gtctatgttcatgattttaa

SEQ ID NO: 189209 - DNA, 20 bp, Artificial Sequence
  Synthetic oligonucleotide; AAAGAAA chr2 60542402 60542421 60542418 +
taaaatatgagactaaaaaa

SEQ ID NO: 189210 - DNA, 20 bp, Artificial Sequence
  Synthetic oligonucleotide; AAAGAAT chr2 60542698 60542717 60542714 +
cccatctattcaccaggtaa

SEQ ID NO: 189211 - DNA, 20 bp, Artificial Sequence
  Synthetic oligonucleotide; GGAGAAT chr2 60542917 60542936 60542933 +
ctacttgggaggctgaggca

SEQ ID NO: 189212 - DNA, 20 bp, Artificial Sequence
  Synthetic oligonucleotide; AAAGAAA chr2 60543425 60543444 60543441 +
tgtttccttcctcatcataa

SEQ ID NO: 189213 - DNA, 20 bp, Artificial Sequence
  Synthetic oligonucleotide; AGAGAAA chr2 60543462 60543481 60543478 +
gaattgtgcagacgtgcttt

SEQ ID NO: 189214 - DNA, 20 bp, Artificial Sequence
  Synthetic oligonucleotide; GTAGAAT chr2 60543555 60543574 60543571 +
gtcggaatttatgtgcaatg

SEQ ID NO: 189215 - DNA, 20 bp, Artificial Sequence
  Synthetic oligonucleotide; AAAGAAA chr2 60543708 60543727 60543724 +
acaggtgattaaacacaatg

SEQ ID NO: 189216 - DNA, 20 bp, Artificial Sequence
  Synthetic oligonucleotide; ACAGAAT chr2 60544066 60544085 60544082 +
cctcctctaaatacagaggc

SEQ ID NO: 189217 - DNA, 20 bp, Artificial Sequence
  Synthetic oligonucleotide; CAAGAAA chr2 60544433 60544452 60544449 +
taaggtaaatgtggtggatt

SEQ ID NO: 189218 - DNA, 20 bp, Artificial Sequence
  Synthetic oligonucleotide; ACAGAAA chr2 60544513 60544532 60544529 +
gaaagtatctgagtgctatc

SEQ ID NO: 189219 - DNA, 20 bp, Artificial Sequence
  Synthetic oligonucleotide; AAAGAAA chr2 60544529 60544548 60544545 +
tatcacagaaagcactaaaa

SEQ ID NO: 189220 - DNA, 20 bp, Artificial Sequence
  Synthetic oligonucleotide; AAAGAAA chr2 60544533 60544552 60544549 +
acagaaagcactaaaaaaag

SEQ ID NO: 189221 - DNA, 20 bp, Artificial Sequence
  Synthetic oligonucleotide; GGAGAAA chr2 60544582 60544601 60544598 +
tcaaattctagagggggaga

SEQ ID NO: 189222 - DNA, 20 bp, Artificial Sequence
  Synthetic oligonucleotide; GAAGAAA chr2 60544755 60544774 60544771 +
agctgggtggtaggtagatg

SEQ ID NO: 189223 - DNA, 20 bp, Artificial Sequence
  Synthetic oligonucleotide; ACAGAAT chr2 60544796 60544815 60544812 +
ggcatggcatgtctgtcatc

SEQ ID NO: 189224 - DNA, 20 bp, Artificial Sequence
  Synthetic oligonucleotide; CGAGAAA chr2 60544936 60544955 60544952 +
ttccttttcccttgagctgc

SEQ ID NO: 189225 - DNA, 20 bp, Artificial Sequence
  Synthetic oligonucleotide; CAAGAAA chr2 60545018 60545037 60545034 +
aatacgtgtgtgtatttttc

SEQ ID NO: 189226 - DNA, 20 bp, Artificial Sequence
  Synthetic oligonucleotide; GCAGAAA chr2 60545044 60545063 60545060 +
aatttttacattgtgttata

SEQ ID NO: 189227 - DNA, 20 bp, Artificial Sequence
  Synthetic oligonucleotide; GAAGAAA chr2 60545675 60545694 60545691 +
aatgagaaggtggggatggg

SEQ ID NO: 189228 - DNA, 20 bp, Artificial Sequence
  Synthetic oligonucleotide; AAAGAAA chr2 60545680 60545699 60545696 +
gaaggtggggatggggaaga

SEQ ID NO: 189229 - DNA, 20 bp, Artificial Sequence
  Synthetic oligonucleotide; ACAGAAA chr2 60545798 60545817 60545814 +
ctgtgttctggacgtaagca

SEQ ID NO: 189230 - DNA, 20 bp, Artificial Sequence
  Synthetic oligonucleotide; AGAGAAA chr2 60545854 60545873 60545870 +
ggacagtcacatagagtaat

SEQ ID NO: 189231 - DNA, 20 bp, Artificial Sequence
  Synthetic oligonucleotide; AAAGAAA chr2 60545908 60545927 60545924 +
tacagcacctctgaaaatga

SEQ ID NO: 189232 - DNA, 20 bp, Artificial Sequence
  Synthetic oligonucleotide; TAAGAAT chr2 60546152 60546171 60546168 +
ccgtttgtgctcgataaaaa

SEQ ID NO: 189233 - DNA, 20 bp, Artificial Sequence
  Synthetic oligonucleotide; TAAGAAT chr2 60546257 60546276 60546273 +
gtggtctggttcatcatctg

SEQ ID NO: 189234 - DNA, 20 bp, Artificial Sequence
  Synthetic oligonucleotide; GGAGAAA chr2 60546289 60546308 60546305 +
caagaggctcggctgtggtt

SEQ ID NO: 189235 - DNA, 20 bp, Artificial Sequence
  Synthetic oligonucleotide; ACAGAAA chr2 60546327 60546346 60546343 +
ttattagagtgccagagagg

SEQ ID NO: 189236 - DNA, 20 bp, Artificial Sequence
  Synthetic oligonucleotide; CCAGAAA chr2 60546409 60546428 60546425 +
taggcttctctatataatac

SEQ ID NO: 189237 - DNA, 20 bp, Artificial Sequence
  Synthetic oligonucleotide; AAAGAAA chr2 60546499 60546518 60546515 +
aggcaaatcatcacatatgt

SEQ ID NO: 189238 - DNA, 20 bp, Artificial Sequence
  Synthetic oligonucleotide; TTAGAAA chr2 60546596 60546615 60546612 +
aatgtgtctggtttgtaagt

SEQ ID NO: 189239 - DNA, 20 bp, Artificial Sequence
  Synthetic oligonucleotide; AAAGAAT chr2 60546600 60546619 60546616 +
tgtctggtttgtaagtttag

SEQ ID NO: 189240 - DNA, 20 bp, Artificial Sequence
  Synthetic oligonucleotide; AAAGAAA chr2 60546636 60546655 60546652 +
atagttaacacagggaacat

SEQ ID NO: 189241 - DNA, 20 bp, Artificial Sequence
  Synthetic oligonucleotide; CAAGAAA chr2 60546659 60546678 60546675 +
gaaagcttaaataataacta

SEQ ID NO: 189242 - DNA, 20 bp, Artificial Sequence
  Synthetic oligonucleotide; ATAGAAA chr2 60546688 60546707 60546704 +
ctggttaaaaaaaaaagtgg

SEQ ID NO: 189243 - DNA, 20 bp, Artificial Sequence
  Synthetic oligonucleotide; AAAGAAT chr2 60546741 60546760 60546757 +
accaagttgtccattgtgcc

SEQ ID NO: 189244 - DNA, 20 bp, Artificial Sequence
  Synthetic oligonucleotide; TTAGAAA chr2 60546828 60546847 60546844 +
aacagacatggcttcataaa

SEQ ID NO: 189245 - DNA, 20 bp, Artificial Sequence
  Synthetic oligonucleotide; TAAGAAA chr2 60546880 60546899 60546896 +
ccacatttacactgctgtaa

SEQ ID NO: 189246 - DNA, 20 bp, Artificial Sequence
  Synthetic oligonucleotide; AAAGAAA chr2 60546993 60547012 60547009 +
ctcagcagtgccacaaaatc

SEQ ID NO: 189247 - DNA, 20 bp, Artificial Sequence
  Synthetic oligonucleotide; TAAGAAA chr2 60547061 60547080 60547077 +
atgggatacttttgagtact

SEQ ID NO: 189248 - DNA, 20 bp, Artificial Sequence
  Synthetic oligonucleotide; TGAGAAA chr2 60547098 60547117 60547114 +
tagtcattttttttttattc

SEQ ID NO: 189249 - DNA, 20 bp, Artificial Sequence
  Synthetic oligonucleotide; TCAGAAT chr2 60547163 60547182 60547179 +
tggcatctatgatataaaaa

SEQ ID NO: 189250 - DNA, 20 bp, Artificial Sequence
  Synthetic oligonucleotide; GCAGAAA chr2 60547555 60547574 60547571 +
tgccagttaataaaactgaa

SEQ ID NO: 189251 - DNA, 20 bp, Artificial Sequence
  Synthetic oligonucleotide; AGAGAAT chr2 60547642 60547661 60547658 +
tttaatgaacttaaagccac

SEQ ID NO: 189252 - DNA, 20 bp, Artificial Sequence
  Synthetic oligonucleotide; GTAGAAT chr2 60547673 60547692 60547689 +
aaatagattttaatttgagt

SEQ ID NO: 189253 - DNA, 20 bp, Artificial Sequence
  Synthetic oligonucleotide; ACAGAAT chr2 60547992 60548011 60548008 +
atactggccaaaagataaat

SEQ ID NO: 189254 - DNA, 20 bp, Artificial Sequence
  Synthetic oligonucleotide; CAAGAAT chr2 60548653 60548672 60548669 +
cgtaaattattgctaattaa

SEQ ID NO: 189255 - DNA, 20 bp, Artificial Sequence
  Synthetic oligonucleotide; AGAGAAA chr2 60548726 60548745 60548742 +
acatttggctagtggtgttc

SEQ ID NO: 189256 - DNA, 20 bp, Artificial Sequence
  Synthetic oligonucleotide; AAAGAAA chr2 60548793 60548812 60548809 +
aatcagacaaagtgggacac

SEQ ID NO: 189257 - DNA, 20 bp, Artificial Sequence
  Synthetic oligonucleotide; GAAGAAA chr2 60549120 60549139 60549136 +
aattctctctacgaggggag

SEQ ID NO: 189258 - DNA, 20 bp, Artificial Sequence
  Synthetic oligonucleotide; ATAGAAA chr2 60549126 60549145 60549142 +
ctctacgaggggaggaagaa

SEQ ID NO: 189259 - DNA, 20 bp, Artificial Sequence
  Synthetic oligonucleotide; AAAGAAT chr2 60549227 60549246 60549243 +
ttcctctctgtgtagttgca

SEQ ID NO: 189260 - DNA, 20 bp, Artificial Sequence
  Synthetic oligonucleotide; AAAGAAA chr2 60549423 60549442 60549439 +
gaaattcagagaggaaaagc

SEQ ID NO: 189261 - DNA, 20 bp, Artificial Sequence
  Synthetic oligonucleotide; GCAGAAA chr2 60549488 60549507 60549504 +
ccccggcaagggtggaccgt

SEQ ID NO: 189262 - DNA, 20 bp, Artificial Sequence
  Synthetic oligonucleotide; AAAGAAA chr2 60550189 60550208 60550205 +
taccaaaaatgccggccccg

SEQ ID NO: 189263 - DNA, 20 bp, Artificial Sequence
  Synthetic oligonucleotide; AGAGAAA chr2 60550348 60550367 60550364 +
gacatacggggtgatggggg

SEQ ID NO: 189264 - DNA, 20 bp, Artificial Sequence
  Synthetic oligonucleotide; CGAGAAT chr2 60550419 60550438 60550435 +
aaagctcgttcctccccgga

SEQ ID NO: 189265 - DNA, 20 bp, Artificial Sequence
  Synthetic oligonucleotide; CCAGAAA chr2 60550594 60550613 60550610 +
ctcctgccccctctgagcac

SEQ ID NO: 189266 - DNA, 20 bp, Artificial Sequence
  Synthetic oligonucleotide; ACAGAAA chr2 60550607 60550626 60550623 +
tgagcacccagaaaatgagg

SEQ ID NO: 189267 - DNA, 20 bp, Artificial Sequence
  Synthetic oligonucleotide; TAAGAAT chr2 60551132 60551151 60551148 +
actgcatcaaaaatttaaag

SEQ ID NO: 189268 - DNA, 20 bp, Artificial Sequence
  Synthetic oligonucleotide; TGAGAAA chr2 60551537 60551556 60551553 +
agctgtggacaagagacgtc

SEQ ID NO: 189269 - DNA, 20 bp, Artificial Sequence
  Synthetic oligonucleotide; ACAGAAA chr2 60552154 60552173 60552170 +
gagtcaaagagaaggccgtc

SEQ ID NO: 189270 - DNA, 20 bp, Artificial Sequence
  Synthetic oligonucleotide; CAAGAAA chr2 60552195 60552214 60552211 +
gtttggcttcggtttggggg

SEQ ID NO: 189271 - DNA, 20 bp, Artificial Sequence
  Synthetic oligonucleotide; AGAGAAA chr2 60552909 60552928 60552925 +
cattgcattccttttcgaaa

SEQ ID NO: 189272 - DNA, 20 bp, Artificial Sequence
  Synthetic oligonucleotide; CGAGAAT chr2 60553197 60553216 60553213 +
ctattattgggttacttacg

SEQ ID NO: 189273 - DNA, 20 bp, Artificial Sequence
  Synthetic oligonucleotide; TTAGAAA chr2 60553332 60553351 60553348 +
ttcacatcgggagagccggg

SEQ ID NO: 189274 - DNA, 20 bp, Artificial Sequence
  Synthetic oligonucleotide; AGAGAAA chr2 60553351 60553370 60553367 +
gttagaaagaaggagactcc

SEQ ID NO: 189275 - DNA, 20 bp, Artificial Sequence
  Synthetic oligonucleotide; TTAGAAA chr2 60553394 60553413 60553410 +
cttttgacatccaaaataaa

SEQ ID NO: 189276 - DNA, 20 bp, Artificial Sequence
  Synthetic oligonucleotide; GAAGAAA chr2 60553901 60553920 60553917 +
gcggtggcgtggccgggaga

SEQ ID NO: 189277 - DNA, 20 bp, Artificial Sequence
  Synthetic oligonucleotide; AAAGAAA chr2 60554004 60554023 60554020 +
aaaatgaaagattattcaaa

SEQ ID NO: 189278 - DNA, 20 bp, Artificial Sequence
  Synthetic oligonucleotide; AAAGAAA chr2 60554235 60554254 60554251 +
ttgcccgaggagaggacagc

SEQ ID NO: 189279 - DNA, 20 bp, Artificial Sequence
  Synthetic oligonucleotide; GCAGAAA chr2 60554549 60554568 60554565 +
gtccccggctcctaagggtc

SEQ ID NO: 189280 - DNA, 20 bp, Artificial Sequence
  Synthetic oligonucleotide; GAAGAAA chr2 60554802 60554821 60554818 +
gcaaaagcacagagggatgg

SEQ ID NO: 189281 - DNA, 20 bp, Artificial Sequence
  Synthetic oligonucleotide; AGAGAAA chr2 60554859 60554878 60554875 +
ctgtgctgttacccagggaa

SEQ ID NO: 189282 - DNA, 20 bp, Artificial Sequence
  Synthetic oligonucleotide; TCAGAAA chr2 60555194 60555213 60555210 +
cctgcgattggaaagtttat

SEQ ID NO: 189283 - DNA, 20 bp, Artificial Sequence
  Synthetic oligonucleotide; GGAGAAT chr2 60555332 60555351 60555348 +
tggaaggagttggggggaga

SEQ ID NO: 189284 - DNA, 20 bp, Artificial Sequence
  Synthetic oligonucleotide; TTAGAAA chr2 60555671 60555690 60555687 +
aaagtttcaagtctactgtg

SEQ ID NO: 189285 - DNA, 20 bp, Artificial Sequence
  Synthetic oligonucleotide; GAAGAAA chr2 60555722 60555741 60555738 +
gagcttcggacccctctaag

SEQ ID NO: 189286 - DNA, 20 bp, Artificial Sequence
  Synthetic oligonucleotide; AAAGAAT chr2 60555997 60556016 60556013 +
aaccagccttggagtcacca

SEQ ID NO: 189287 - DNA, 20 bp, Artificial Sequence
  Synthetic oligonucleotide; GAAGAAA chr2 60556071 60556090 60556087 +
gggaaggtgaagagagggaa

SEQ ID NO: 189288 - DNA, 20 bp, Artificial Sequence
  Synthetic oligonucleotide; AAAGAAA chr2 60556113 60556132 60556129 +
ctttgaaaaataaataaata

SEQ ID NO: 189289 - DNA, 20 bp, Artificial Sequence
  Synthetic oligonucleotide; AAAGAAT chr2 60556176 60556195 60556179 -
atctgaaaagcttggttctg

SEQ ID NO: 189290 - DNA, 20 bp, Artificial Sequence
  Synthetic oligonucleotide; ACAGAAT chr2 60555867 60555886 60555870 -
tgaatcctcccgcttcttaa

SEQ ID NO: 189291 - DNA, 20 bp, Artificial Sequence
  Synthetic oligonucleotide; GCAGAAA chr2 60555034 60555053 60555037 -
ctaatttccagggaacgtct

SEQ ID NO: 189292 - DNA, 20 bp, Artificial Sequence
  Synthetic oligonucleotide; TAAGAAA chr2 60554839 60554858 60554842 -
gaacagttgtgctctgcccg

SEQ ID NO: 189293 - DNA, 20 bp, Artificial Sequence
  Synthetic oligonucleotide; CGAGAAA chr2 60553103 60553122 60553106 -
atgcatttttaaatttttca

SEQ ID NO: 189294 - DNA, 20 bp, Artificial Sequence
  Synthetic oligonucleotide; TAAGAAA chr2 60552784 60552803 60552787 -
aggttgcttcccactcaccg

SEQ ID NO: 189295 - DNA, 20 bp, Artificial Sequence
  Synthetic oligonucleotide; GGAGAAA chr2 60552728 60552747 60552731 -
gtctaaaaaacgattcccgg

SEQ ID NO: 189296 - DNA, 20 bp, Artificial Sequence
  Synthetic oligonucleotide; TGAGAAA chr2 60552641 60552660 60552644 -
agtagtcatccccacaatag

SEQ ID NO: 189297 - DNA, 20 bp, Artificial Sequence
  Synthetic oligonucleotide; AGAGAAT chr2 60552235 60552254 60552238 -
aaaataaataaaacaaggca

SEQ ID NO: 189298 - DNA, 20 bp, Artificial Sequence
  Synthetic oligonucleotide; CTAGAAA chr2 60552115 60552134 60552118 -
aaaatctcacaatctctcat

SEQ ID NO: 189299 - DNA, 20 bp, Artificial Sequence
  Synthetic oligonucleotide; AAAGAAA chr2 60551204 60551223 60551207 -
ggaaagtttggcagcaaggg

SEQ ID NO: 189300 - DNA, 20 bp, Artificial Sequence
  Synthetic oligonucleotide; CAAGAAA chr2 60550504 60550523 60550507 -
gctaggaggcagaacaagat

SEQ ID NO: 189301 - DNA, 20 bp, Artificial Sequence
  Synthetic oligonucleotide; GCAGAAT chr2 60550386 60550405 60550389 -
tggggggaaagaacggttag

SEQ ID NO: 189302 - DNA, 20 bp, Artificial Sequence
  Synthetic oligonucleotide; CCAGAAT chr2 60549899 60549918 60549902 -
ccgccgcgcacacccagtgc

SEQ ID NO: 189303 - DNA, 20 bp, Artificial Sequence
  Synthetic oligonucleotide; ACAGAAT chr2 60549835 60549854 60549838 -
aaaagtgtaagcttgtggac

SEQ ID NO: 189304 - DNA, 20 bp, Artificial Sequence
  Synthetic oligonucleotide; AGAGAAT chr2 60549128 60549147 60549131 -
atttcttcctcccctcgtag

SEQ ID NO: 189305 - DNA, 20 bp, Artificial Sequence
  Synthetic oligonucleotide; TTAGAAA chr2 60549034 60549053 60549037 -
gccggagtttaggccggagc

SEQ ID NO: 189306 - DNA, 20 bp, Artificial Sequence
  Synthetic oligonucleotide; AGAGAAA chr2 60548921 60548940 60548924 -
gggaatttgcattaaaatgc

SEQ ID NO: 189307 - DNA, 20 bp, Artificial Sequence
  Synthetic oligonucleotide; CCAGAAA chr2 60548903 60548922 60548906 -
gcagagaaattatcagatgc

SEQ ID NO: 189308 - DNA, 20 bp, Artificial Sequence
  Synthetic oligonucleotide; TGAGAAA chr2 60548878 60548897 60548881 -
aaggaaatgttgattgccac

SEQ ID NO: 189309 - DNA, 20 bp, Artificial Sequence
  Synthetic oligonucleotide; TGAGAAT chr2 60548840 60548859 60548843 -
caaatcagtagactacacca

SEQ ID NO: 189310 - DNA, 20 bp, Artificial Sequence
  Synthetic oligonucleotide; TTAGAAT chr2 60548690 60548709 60548693 -
tgttaaacgtatttcataca

SEQ ID NO: 189311 - DNA, 20 bp, Artificial Sequence
  Synthetic oligonucleotide; ATAGAAA chr2 60548645 60548664 60548648 -
caataatttacgttaagagc

SEQ ID NO: 189312 - DNA, 20 bp, Artificial Sequence
  Synthetic oligonucleotide; GGAGAAT chr2 60548413 60548432 60548416 -
ctttaactatttgataccta

SEQ ID NO: 189313 - DNA, 20 bp, Artificial Sequence
  Synthetic oligonucleotide; TTAGAAA chr2 60548373 60548392 60548376 -
cctaaataatattcccactt

SEQ ID NO: 189314 - DNA, 20 bp, Artificial Sequence
  Synthetic oligonucleotide; AAAGAAT chr2 60548334 60548353 60548337 -
tgggaacaaaaaaaaaaaaa

SEQ ID NO: 189315 - DNA, 20 bp, Artificial Sequence
  Synthetic oligonucleotide; TGAGAAT chr2 60548143 60548162 60548146 -
ttcagacaacaggaatattt

SEQ ID NO: 189316 - DNA, 20 bp, Artificial Sequence
  Synthetic oligonucleotide; GAAGAAT chr2 60548091 60548110 60548094 -
aaatggaagcaaatgtaaga

SEQ ID NO: 189317 - DNA, 20 bp, Artificial Sequence
  Synthetic oligonucleotide; AAAGAAA chr2 60547985 60548004 60547988 -
ttttggccagtatgttgggc

SEQ ID NO: 189318 - DNA, 20 bp, Artificial Sequence
  Synthetic oligonucleotide; CTAGAAA chr2 60547886 60547905 60547889 -
attaggaggagtaccagagg

SEQ ID NO: 189319 - DNA, 20 bp, Artificial Sequence
  Synthetic oligonucleotide; AAAGAAA chr2 60547375 60547394 60547378 -
taaaaaaaaaagcaaacagg

SEQ ID NO: 189320 - DNA, 20 bp, Artificial Sequence
  Synthetic oligonucleotide; GCAGAAA chr2 60547326 60547345 60547329 -
atccgctggtgattatgtgt

SEQ ID NO: 189321 - DNA, 20 bp, Artificial Sequence
  Synthetic oligonucleotide; TCAGAAA chr2 60547288 60547307 60547291 -
tgaagcattttggagctcat

SEQ ID NO: 189322 - DNA, 20 bp, Artificial Sequence
  Synthetic oligonucleotide; AAAGAAA chr2 60547239 60547258 60547242 -
aggcgaagtatttcaagtct

SEQ ID NO: 189323 - DNA, 20 bp, Artificial Sequence
  Synthetic oligonucleotide; TTAGAAT chr2 60547147 60547166 60547150 -
gccaccaagtgcaaacatgt

SEQ ID NO: 189324 - DNA, 20 bp, Artificial Sequence
  Synthetic oligonucleotide; TCAGAAT chr2 60547121 60547140 60547124 -
tattataggcattccatttc

SEQ ID NO: 189325 - DNA, 20 bp, Artificial Sequence
  Synthetic oligonucleotide; TGAGAAA chr2 60547047 60547066 60547050 -
tcccatttagctaatgtgtc

SEQ ID NO: 189326 - DNA, 20 bp, Artificial Sequence
  Synthetic oligonucleotide; GCAGAAA chr2 60546986 60547005 60546989 -
tggcactgctgagagtgaga

SEQ ID NO: 189327 - DNA, 20 bp, Artificial Sequence
  Synthetic oligonucleotide; AAAGAAA chr2 60546731 60546750 60546734 -
acaacttggtgtataggaaa

SEQ ID NO: 189328 - DNA, 20 bp, Artificial Sequence
  Synthetic oligonucleotide; CTAGAAA chr2 60546412 60546431 60546415 -
tgggtattatatagagaagc

SEQ ID NO: 189329 - DNA, 20 bp, Artificial Sequence
  Synthetic oligonucleotide; TTAGAAA chr2 60546128 60546147 60546131 -
aatgcaatggcagcctctgc

SEQ ID NO: 189330 - DNA, 20 bp, Artificial Sequence
  Synthetic oligonucleotide; GGAGAAA chr2 60545956 60545975 60545959 -
agcaggtaaatgagaagcaa

SEQ ID NO: 189331 - DNA, 20 bp, Artificial Sequence
  Synthetic oligonucleotide; ACAGAAA chr2 60545802 60545821 60545805 -
ctgttgcttacgtccagaac

SEQ ID NO: 189332 - DNA, 20 bp, Artificial Sequence
  Synthetic oligonucleotide; CTAGAAT chr2 60544593 60544612 60544596 -
attatttctcctctccccct

SEQ ID NO: 189333 - DNA, 20 bp, Artificial Sequence
  Synthetic oligonucleotide; CAAGAAT chr2 60544164 60544183 60544167 -
aaaacacagtgtctgtcaag

SEQ ID NO: 189334 - DNA, 20 bp, Artificial Sequence
  Synthetic oligonucleotide; CTAGAAT chr2 60543645 60543664 60543648 -
tcaaagtgagatgtcagtaa

SEQ ID NO: 189335 - DNA, 20 bp, Artificial Sequence
  Synthetic oligonucleotide; AAAGAAA chr2 60543384 60543403 60543387 -
atatttgaattgtgtcacaa

SEQ ID NO: 189336 - DNA, 20 bp, Artificial Sequence
  Synthetic oligonucleotide; GAAGAAT chr2 60543327 60543346 60543330 -
gatatattgatgaatctcta

SEQ ID NO: 189337 - DNA, 20 bp, Artificial Sequence
  Synthetic oligonucleotide; CAAGAAT chr2 60543200 60543219 60543203 -
actattttataggcaggaag

SEQ ID NO: 189338 - DNA, 20 bp, Artificial Sequence
  Synthetic oligonucleotide; TTAGAAT chr2 60543155 60543174 60543158 -
cttcctaagataaataaagc

SEQ ID NO: 189339 - DNA, 20 bp, Artificial Sequence
  Synthetic oligonucleotide; GGAGAAT chr2 60543132 60543151 60543135 -
gaattcgggactttcagata

SEQ ID NO: 189340 - DNA, 20 bp, Artificial Sequence
  Synthetic oligonucleotide; ATAGAAA chr2 60542348 60542367 60542351 -
tgtgaaactgctgttccctt

SEQ ID NO: 189341 - DNA, 20 bp, Artificial Sequence
  Synthetic oligonucleotide; AGAGAAA chr2 60542234 60542253 60542237 -
agttagctttttgagagact

SEQ ID NO: 189342 - DNA, 20 bp, Artificial Sequence
  Synthetic oligonucleotide; TCAGAAT chr2 60541985 60542004 60541988 -
aatcaaatacaatatgcttt

SEQ ID NO: 189343 - DNA, 20 bp, Artificial Sequence
  Synthetic oligonucleotide; TTAGAAA chr2 60541978 60541997 60541981 -
tacaatatgcttttcagaat

SEQ ID NO: 189344 - DNA, 20 bp, Artificial Sequence
  Synthetic oligonucleotide; AGAGAAT chr2 60541686 60541705 60541689 -
accttcaaaatccagagagt

SEQ ID NO: 189345 - DNA, 20 bp, Artificial Sequence
  Synthetic oligonucleotide; AGAGAAA chr2 60541558 60541577 60541561 -
gctgtatttgtaaataagac

SEQ ID NO: 189346 - DNA, 20 bp, Artificial Sequence
  Synthetic oligonucleotide; AGAGAAA chr2 60541507 60541526 60541510 -
ttttgtcaaagtacaatgtc

SEQ ID NO: 189347 - DNA, 20 bp, Artificial Sequence
  Synthetic oligonucleotide; ACAGAAA chr2 60541269 60541288 60541272 -
gacattacccttgtggtgac

SEQ ID NO: 189348 - DNA, 20 bp, Artificial Sequence
  Synthetic oligonucleotide; TGAGAAT chr2 60541217 60541236 60541220 -
atcttttataaataatgttt

SEQ ID NO: 189349 - DNA, 20 bp, Artificial Sequence
  Synthetic oligonucleotide; GTAGAAA chr2 60540789 60540808 60540792 -
gctggaaaatgcaactgggt

SEQ ID NO: 189350 - DNA, 20 bp, Artificial Sequence
  Synthetic oligonucleotide; GGAGAAT chr2 60540556 60540575 60540559 -
caatgaaaatgtttaataaa

SEQ ID NO: 189351 - DNA, 20 bp, Artificial Sequence
  Synthetic oligonucleotide; TAAGAAA chr2 60540519 60540538 60540522 -
tggctttgcgtgctggtcag

SEQ ID NO: 189352 - DNA, 20 bp, Artificial Sequence
  Synthetic oligonucleotide; GTAGAAA chr2 60540462 60540481 60540465 -
aaatattaaatttaaccgaa

SEQ ID NO: 189353 - DNA, 20 bp, Artificial Sequence
  Synthetic oligonucleotide; TAAGAAT chr2 60539732 60539751 60539735 -
aggaaatgtaacctgacaaa

SEQ ID NO: 189354 - DNA, 20 bp, Artificial Sequence
  Synthetic oligonucleotide; CCAGAAT chr2 60538979 60538998 60538982 -
tgccacctcccaattcacca

SEQ ID NO: 189355 - DNA, 20 bp, Artificial Sequence
  Synthetic oligonucleotide; GGAGAAA chr2 60538952 60538971 60538955 -
ttttttgcatgtgctggtat

SEQ ID NO: 189356 - DNA, 20 bp, Artificial Sequence
  Synthetic oligonucleotide; ACAGAAT chr2 60538554 60538573 60538557 -
ttttataatgtgttccttta

SEQ ID NO: 189357 - DNA, 20 bp, Artificial Sequence
  Synthetic oligonucleotide; AAAGAAA chr2 60538504 60538523 60538507 -
ggtagatccacaaaacgtat

SEQ ID NO: 189358 - DNA, 20 bp, Artificial Sequence
  Synthetic oligonucleotide; AGAGAAT chr2 60538069 60538088 60538072 -
gaactgaatcagtctctgcc

SEQ ID NO: 189359 - DNA, 20 bp, Artificial Sequence
  Synthetic oligonucleotide; AAAGAAT chr2 60537879 60537898 60537882 -
ttaaaaactcccattaaaat

SEQ ID NO: 189360 - DNA, 20 bp, Artificial Sequence
  Synthetic oligonucleotide; AAAGAAA chr2 60537838 60537857 60537841 -
acctgcaagggtgccttcaa

SEQ ID NO: 189361 - DNA, 20 bp, Artificial Sequence
  Synthetic oligonucleotide; GAAGAAT chr2 60537252 60537271 60537255 -
aaaactgaacattggctact

SEQ ID NO: 189362 - DNA, 20 bp, Artificial Sequence
  Synthetic oligonucleotide; GGAGAAA chr2 60537176 60537195 60537179 -
ttatgtttttgttatgttaa

SEQ ID NO: 189363 - DNA, 20 bp, Artificial Sequence
  Synthetic oligonucleotide; CAAGAAA chr2 60537030 60537049 60537033 -
tggagctgtgtgactggtag

SEQ ID NO: 189364 - DNA, 20 bp, Artificial Sequence
  Synthetic oligonucleotide; AAAGAAA chr2 60537026 60537045 60537029 -
gctgtgtgactggtagcaag

SEQ ID NO: 189365 - DNA, 20 bp, Artificial Sequence
  Synthetic oligonucleotide; TAAGAAA chr2 60536355 60536374 60536358 -
gggcccaaggataagagagt

SEQ ID NO: 189366 - DNA, 20 bp, Artificial Sequence
  Synthetic oligonucleotide; GGAGAAA chr2 60536265 60536284 60536268 -
ttccggtaagatcaactcta

SEQ ID NO: 189367 - DNA, 20 bp, Artificial Sequence
  Synthetic oligonucleotide; CTAGAAT chr2 60535986 60536005 60535989 -
gttcattgggaattctgtca

SEQ ID NO: 189368 - DNA, 20 bp, Artificial Sequence
  Synthetic oligonucleotide; TCAGAAA chr2 60535753 60535772 60535756 -
ctggtgccgaatggaggaaa

SEQ ID NO: 189369 - DNA, 20 bp, Artificial Sequence
  Synthetic oligonucleotide; GCAGAAA chr2 60535646 60535665 60535649 -
ttgctggtttccctttggaa

SEQ ID NO: 189370 - DNA, 20 bp, Artificial Sequence
  Synthetic oligonucleotide; GAAGAAA chr2 60535270 60535289 60535273 -
aaaaaatgaggaaatcatag

SEQ ID NO: 189371 - DNA, 20 bp, Artificial Sequence
  Synthetic oligonucleotide; GGAGAAA chr2 60535010 60535029 60535013 -
tggcctgtcagcctgctgaa

SEQ ID NO: 189372 - DNA, 20 bp, Artificial Sequence
  Synthetic oligonucleotide; GTAGAAA chr2 60534750 60534769 60534753 -
tctcctcctcagatgcccca

SEQ ID NO: 189373 - DNA, 20 bp, Artificial Sequence
  Synthetic oligonucleotide; AGAGAAA chr2 60534542 60534561 60534545 -
tgaggcacttccagatacat

SEQ ID NO: 189374 - DNA, 20 bp, Artificial Sequence
  Synthetic oligonucleotide; GCAGAAT chr2 60534032 60534051 60534035 -
agtttatcactggttaacaa

SEQ ID NO: 189375 - DNA, 20 bp, Artificial Sequence
  Synthetic oligonucleotide; AAAGAAA chr2 60533981 60534000 60533984 -
attaaaacgaatgtttaatg

SEQ ID NO: 189376 - DNA, 20 bp, Artificial Sequence
  Synthetic oligonucleotide; TAAGAAA chr2 60533945 60533964 60533948 -
gatggaaaatgaacagtgtg

SEQ ID NO: 189377 - DNA, 20 bp, Artificial Sequence
  Synthetic oligonucleotide; GGAGAAA chr2 60533527 60533546 60533530 -
tgtggggctgagtgggcagt

SEQ ID NO: 189378 - DNA, 20 bp, Artificial Sequence
  Synthetic oligonucleotide; TAAGAAA chr2 60533496 60533515 60533499 -
tattcagctgacccggtatt

SEQ ID NO: 189379 - DNA, 20 bp, Artificial Sequence
  Synthetic oligonucleotide; CAAGAAA chr2 60533321 60533340 60533324 -
tctctctcccccaaacttta

SEQ ID NO: 189380 - DNA, 20 bp, Artificial Sequence
  Synthetic oligonucleotide; CAAGAAA chr2 60533183 60533202 60533186 -
tgacacagccctagaagcag

SEQ ID NO: 189381 - DNA, 20 bp, Artificial Sequence
  Synthetic oligonucleotide; GGAGAAA chr2 60532988 60533007 60532991 -
agggtagattgttatataat

SEQ ID NO: 189382 - DNA, 20 bp, Artificial Sequence
  Synthetic oligonucleotide; TTAGAAT chr2 60532929 60532948 60532932 -
caggaagtaaataaaaagta

SEQ ID NO: 189383 - DNA, 20 bp, Artificial Sequence
  Synthetic oligonucleotide; GTAGAAA chr2 60532717 60532736 60532720 -
tacttaaagggagtggaggg

SEQ ID NO: 189384 - DNA, 20 bp, Artificial Sequence
  Synthetic oligonucleotide; GAAGAAA chr2 60532457 60532476 60532460 -
ggcccagaagctgtctttct

SEQ ID NO: 189385 - DNA, 20 bp, Artificial Sequence
  Synthetic oligonucleotide; AAAGAAA chr2 60532427 60532446 60532430 -
taacgccaccaccaccaaaa

SEQ ID NO: 189386 - DNA, 20 bp, Artificial Sequence
  Synthetic oligonucleotide; ACAGAAT chr2 60532361 60532380 60532364 -
tttttaaaaaactggaaatg

SEQ ID NO: 189387 - DNA, 20 bp, Artificial Sequence
  Synthetic oligonucleotide; AAAGAAA chr2 60532153 60532172 60532156 -
gattactgggggtacagtga

SEQ ID NO: 189388 - DNA, 20 bp, Artificial Sequence
  Synthetic oligonucleotide; GGAGAAA chr2 60531214 60531233 60531217 -
cgtcgggcaacacagaggga

SEQ ID NO: 189389 - DNA, 20 bp, Artificial Sequence
  Synthetic oligonucleotide; AAAGAAA chr2 60531091 60531110 60531094 -
tctgctccggagaaggtggt

SEQ ID NO: 189390 - DNA, 20 bp, Artificial Sequence
  Synthetic oligonucleotide; ACAGAAT chr2 60530988 60531007 60530991 -
tagccagactggtttagcag

SEQ ID NO: 189391 - DNA, 20 bp, Artificial Sequence
  Synthetic oligonucleotide; ATAGAAA chr2 60530917 60530936 60530920 -
aagcactttgtttatcttga

SEQ ID NO: 189392 - DNA, 20 bp, Artificial Sequence
  Synthetic oligonucleotide; TAAGAAA chr2 60530371 60530390 60530374 -
ggcgtgcctgcgtgtgcagg

SEQ ID NO: 189393 - DNA, 20 bp, Artificial Sequence
  Synthetic oligonucleotide; CAAGAAA chr2 60530241 60530260 60530244 -
aggaaggctcaaggaaggct

SEQ ID NO: 189394 - DNA, 20 bp, Artificial Sequence
  Synthetic oligonucleotide; ATAGAAT chr2 60529887 60529906 60529890 -
ctggggctaaagctgggttc

SEQ ID NO: 189395 - DNA, 20 bp, Artificial Sequence
  Synthetic oligonucleotide; TAAGAAA chr2 60529544 60529563 60529547 -
gtctttgtaacctgagctgg

SEQ ID NO: 189396 - DNA, 20 bp, Artificial Sequence
  Synthetic oligonucleotide; ACAGAAA chr2 60529527 60529546 60529530 -
tggtaagaaagggaggaggg

SEQ ID NO: 189397 - DNA, 20 bp, Artificial Sequence
  Synthetic oligonucleotide; GGAGAAT chr2 60529348 60529367 60529351 -
ttcctcaatctgtaaagtgg

SEQ ID NO: 189398 - DNA, 20 bp, Artificial Sequence
  Synthetic oligonucleotide; CCAGAAT chr2 60528833 60528852 60528836 -
tcgctccgggggctgcacct

SEQ ID NO: 189399 - DNA, 20 bp, Artificial Sequence
  Synthetic oligonucleotide; GAAGAAT chr2 60528515 60528534 60528518 -
tttcaatcttctgggaaaga

SEQ ID NO: 189400 - DNA, 20 bp, Artificial Sequence
  Synthetic oligonucleotide; CCAGAAT chr2 60528408 60528427 60528411 -
gtagtcatttccccatctgt

SEQ ID NO: 189401 - DNA, 20 bp, Artificial Sequence
  Synthetic oligonucleotide; TGAGAAA chr2 60528377 60528396 60528380 -
ctgaaatcaagtgagggtcc

SEQ ID NO: 189402 - DNA, 20 bp, Artificial Sequence
  Synthetic oligonucleotide; TGAGAAA chr2 60528310 60528329 60528313 -
ggagactgcagtgggctgaa

SEQ ID NO: 189403 - DNA, 20 bp, Artificial Sequence
  Synthetic oligonucleotide; GGAGAAT chr2 60528203 60528222 60528206 -
atcgtaccttcaaaggctgg

SEQ ID NO: 189404 - DNA, 20 bp, Artificial Sequence
  Synthetic oligonucleotide; TCAGAAT chr2 60528197 60528216 60528200 -
ccttcaaaggctggggagaa

SEQ ID NO: 189405 - DNA, 20 bp, Artificial Sequence
  Synthetic oligonucleotide; AGAGAAT chr2 60527775 60527794 60527778 -
gctaacatagacctccactg

SEQ ID NO: 189406 - DNA, 20 bp, Artificial Sequence
  Synthetic oligonucleotide; TCAGAAT chr2 60527767 60527786 60527770 -
agacctccactgagagaatt

SEQ ID NO: 189407 - DNA, 20 bp, Artificial Sequence
  Synthetic oligonucleotide; TGAGAAT chr2 60527547 60527566 60527550 -
ggtgggatggaggtggctgc

SEQ ID NO: 189408 - DNA, 20 bp, Artificial Sequence
  Synthetic oligonucleotide; TAAGAAT chr2 60526873 60526892 60526876 -
gtgctaagtagttccccgct

SEQ ID NO: 189409 - DNA, 20 bp, Artificial Sequence
  Synthetic oligonucleotide; GAAGAAA chr2 60526270 60526289 60526273 -
ctatttaaaaatcttttggg

SEQ ID NO: 189410 - DNA, 20 bp, Artificial Sequence
  Synthetic oligonucleotide; AGAGAAA chr2 60526136 60526155 60526139 -
ttttgcagaagttcagggtg

SEQ ID NO: 189411 - DNA, 20 bp, Artificial Sequence
  Synthetic oligonucleotide; CTAGAAA chr2 60526112 60526131 60526115 -
aaaccatgcctgttttatat

SEQ ID NO: 189412 - DNA, 20 bp, Artificial Sequence
  Synthetic oligonucleotide; ATAGAAA chr2 60526091 60526110 60526094 -
tagaaagtgaaatcattgtt

SEQ ID NO: 189413 - DNA, 20 bp, Artificial Sequence
  Synthetic oligonucleotide; TTAGAAA chr2 60526071 60526090 60526074 -
atagaaaaaacctactgtgg

SEQ ID NO: 189414 - DNA, 20 bp, Artificial Sequence
  Synthetic oligonucleotide; CCAGAAA chr2 60526023 60526042 60526026 -
agccctgctgccatcctcta

SEQ ID NO: 189415 - DNA, 20 bp, Artificial Sequence
  Synthetic oligonucleotide; GGAGAAA chr2 60525866 60525885 60525869 -
tacccttctgtgaaagccat

SEQ ID NO: 189416 - DNA, 20 bp, Artificial Sequence
  Synthetic oligonucleotide; GCAGAAT chr2 60525520 60525539 60525523 -
ggggctcacctgcaaagaca

SEQ ID NO: 189417 - DNA, 20 bp, Artificial Sequence
  Synthetic oligonucleotide; ACAGAAA chr2 60525443 60525462 60525446 -
cttggattcgtgattcccca

SEQ ID NO: 189418 - DNA, 20 bp, Artificial Sequence
  Synthetic oligonucleotide; AAAGAAT chr2 60525297 60525316 60525300 -
tgttttttttgaaaaactcc

SEQ ID NO: 189419 - DNA, 20 bp, Artificial Sequence
  Synthetic oligonucleotide; AAAGAAA chr2 60525217 60525236 60525220 -
aatagaagtacgtttttgaa

SEQ ID NO: 189420 - DNA, 20 bp, Artificial Sequence
  Synthetic oligonucleotide; CAAGAAA chr2 60524492 60524511 60524495 -
caaaataaaatcttaaaaaa

SEQ ID NO: 189421 - DNA, 20 bp, Artificial Sequence
  Synthetic oligonucleotide; AAAGAAA chr2 60524485 60524504 60524488 -
aaatcttaaaaaacaagaaa

SEQ ID NO: 189422 - DNA, 20 bp, Artificial Sequence
  Synthetic oligonucleotide; GTAGAAA chr2 60523509 60523528 60523512 -
agttgtgtgcctgtgtgtgt

SEQ ID NO: 189423 - DNA, 20 bp, Artificial Sequence
  Synthetic oligonucleotide; AGAGAAT chr2 60523493 60523512 60523496 -
gtgtgtagaaagggagagag

SEQ ID NO: 189424 - DNA, 20 bp, Artificial Sequence
  Synthetic oligonucleotide; TTAGAAT chr2 60523476 60523495 60523479 -
gagagagaataggaaagtct

SEQ ID NO: 189425 - DNA, 20 bp, Artificial Sequence
  Synthetic oligonucleotide; GTAGAAA chr2 60523420 60523439 60523423 -
agtttttgaaagctatccat

SEQ ID NO: 189426 - DNA, 20 bp, Artificial Sequence
  Synthetic oligonucleotide; AGAGAAA chr2 60523039 60523058 60523042 -
cttttacccacagagtctac

SEQ ID NO: 189427 - DNA, 20 bp, Artificial Sequence
  Synthetic oligonucleotide; AAAGAAA chr2 60522345 60522364 60522348 -
tggttttgcagttgtattta

SEQ ID NO: 189428 - DNA, 20 bp, Artificial Sequence
  Synthetic oligonucleotide; CAAGAAT chr2 60522219 60522238 60522222 -
ggcgatagggttacagaaga

SEQ ID NO: 189429 - DNA, 20 bp, Artificial Sequence
  Synthetic oligonucleotide; CCAGAAA chr2 60522121 60522140 60522124 -
ttgtagtatttgagattttt

SEQ ID NO: 189430 - DNA, 20 bp, Artificial Sequence
  Synthetic oligonucleotide; CAAGAAA chr2 60522005 60522024 60522008 -
ggggacaagtgtcctatggg

SEQ ID NO: 189431 - DNA, 20 bp, Artificial Sequence
  Synthetic oligonucleotide; AGAGAAA chr2 60521712 60521731 60521715 -
ccatttgagccctggctatt

SEQ ID NO: 189432 - DNA, 20 bp, Artificial Sequence
  Synthetic oligonucleotide; TCAGAAA chr2 60521672 60521691 60521675 -
agaggagattgaccacactc

SEQ ID NO: 189433 - DNA, 20 bp, Artificial Sequence
  Synthetic oligonucleotide; GTAGAAA chr2 60521163 60521182 60521166 -
gacaatggaaggcagctgtt

SEQ ID NO: 189434 - DNA, 20 bp, Artificial Sequence
  Synthetic oligonucleotide; GCAGAAT chr2 60520785 60520804 60520788 -
tgatctgatgggtggtatag

SEQ ID NO: 189435 - DNA, 20 bp, Artificial Sequence
  Synthetic oligonucleotide; TCAGAAA chr2 60520574 60520593 60520577 -
ggccacttatttaattttcc

SEQ ID NO: 189436 - DNA, 20 bp, Artificial Sequence
  Synthetic oligonucleotide; CCAGAAT chr2 60520419 60520438 60520422 -
tgatttcaggtcctcagact

SEQ ID NO: 189437 - DNA, 20 bp, Artificial Sequence
  Synthetic oligonucleotide; TCAGAAA chr2 60520102 60520121 60520105 -
ctttctgaatttttcaattt

SEQ ID NO: 189438 - DNA, 20 bp, Artificial Sequence
  Synthetic oligonucleotide; GGAGAAT chr2 60519962 60519981 60519965 -
attctcctgccagagagagg

SEQ ID NO: 189439 - DNA, 20 bp, Artificial Sequence
  Synthetic oligonucleotide; AGAGAAT chr2 60519921 60519940 60519924 -
ttttaacactccaagtctag

SEQ ID NO: 189440 - DNA, 20 bp, Artificial Sequence
  Synthetic oligonucleotide; GGAGAAT chr2 60519806 60519825 60519809 -
tttgtcattggagtaattta

SEQ ID NO: 189441 - DNA, 20 bp, Artificial Sequence
  Synthetic oligonucleotide; TCAGAAA chr2 60519696 60519715 60519699 -
gtgtcagaacagaactggcc

SEQ ID NO: 189442 - DNA, 20 bp, Artificial Sequence
  Synthetic oligonucleotide; ATAGAAT chr2 60519284 60519303 60519287 -
tgtctctcaatatggaggtt

SEQ ID NO: 189443 - DNA, 20 bp, Artificial Sequence
  Synthetic oligonucleotide; GGAGAAA chr2 60519134 60519153 60519137 -
aggggttcctggtgtacttg

SEQ ID NO: 189444 - DNA, 20 bp, Artificial Sequence
  Synthetic oligonucleotide; ACAGAAT chr2 60518923 60518942 60518926 -
ttcaggacccaccttgaatg

SEQ ID NO: 189445 - DNA, 20 bp, Artificial Sequence
  Synthetic oligonucleotide; GAAGAAA chr2 60517900 60517919 60517903 -
agagtttctgaggaatcata

SEQ ID NO: 189446 - DNA, 20 bp, Artificial Sequence
  Synthetic oligonucleotide; TGAGAAA chr2 60517773 60517792 60517776 -
taaccctgtcattttacaga

SEQ ID NO: 189447 - DNA, 20 bp, Artificial Sequence
  Synthetic oligonucleotide; AGAGAAT chr2 60517443 60517462 60517446 -
ccaatcacctgtgctgttgc

SEQ ID NO: 189448 - DNA, 20 bp, Artificial Sequence
  Synthetic oligonucleotide; CCAGAAT chr2 60517203 60517222 60517206 -
tctcaggggcagatggccct

SEQ ID NO: 189449 - DNA, 20 bp, Artificial Sequence
  Synthetic oligonucleotide; TTAGAAT chr2 60516902 60516921 60516905 -
tattgtttctatgcctctct

SEQ ID NO: 189450 - DNA, 20 bp, Artificial Sequence
  Synthetic oligonucleotide; TGAGAAA chr2 60516471 60516490 60516474 -
agtgacgacttcatggaggc

SEQ ID NO: 189451 - DNA, 20 bp, Artificial Sequence
  Synthetic oligonucleotide; AGAGAAT chr2 60515944 60515963 60515947 -
gtgttggcccagcggtgccc

SEQ ID NO: 189452 - DNA, 20 bp, Artificial Sequence
  Synthetic oligonucleotide; GCAGAAA chr2 60515810 60515829 60515813 -
cctgggagctcaagtcaggg

SEQ ID NO: 189453 - DNA, 20 bp, Artificial Sequence
  Synthetic oligonucleotide; AGAGAAA chr2 60515339 60515358 60515342 -
ctcacgctgcttgattgaac

SEQ ID NO: 189454 - DNA, 20 bp, Artificial Sequence
  Synthetic oligonucleotide; GGAGAAA chr2 60515250 60515269 60515253 -
atttcccccttcctccctgg

SEQ ID NO: 189455 - DNA, 20 bp, Artificial Sequence
  Synthetic oligonucleotide; TAAGAAA chr2 60514708 60514727 60514711 -
cacaactctgatttttttcc

SEQ ID NO: 189456 - DNA, 20 bp, Artificial Sequence
  Synthetic oligonucleotide; CCAGAAA chr2 60514328 60514347 60514331 -
tctccaagtcttgggactgc

SEQ ID NO: 189457 - DNA, 20 bp, Artificial Sequence
  Synthetic oligonucleotide; AGAGAAT chr2 60513978 60513997 60513981 -
ggatttaggactgtgaacct

SEQ ID NO: 189458 - DNA, 20 bp, Artificial Sequence
  Synthetic oligonucleotide; CTAGAAT chr2 60513957 60513976 60513960 -
gagaattcaaagtagtggaa

SEQ ID NO: 189459 - DNA, 20 bp, Artificial Sequence
  Synthetic oligonucleotide; AGAGAAT chr2 60513867 60513886 60513870 -
gaggtgcctgtctggaaggc

SEQ ID NO: 189460 - DNA, 20 bp, Artificial Sequence
  Synthetic oligonucleotide; TGAGAAA chr2 60513181 60513200 60513184 -
ggggaagagccgctcaaaga

SEQ ID NO: 189461 - DNA, 20 bp, Artificial Sequence
  Synthetic oligonucleotide; TGAGAAA chr2 60512971 60512990 60512974 -
ttgctctgtgtgttcatttt

SEQ ID NO: 189462 - DNA, 20 bp, Artificial Sequence
  Synthetic oligonucleotide; AGAGAAT chr2 60512786 60512805 60512789 -
ctcatacttgagacactaaa

SEQ ID NO: 189463 - DNA, 20 bp, Artificial Sequence
  Synthetic oligonucleotide; AAAGAAA chr2 60511868 60511887 60511871 -
tcattttactgatttatttg

SEQ ID NO: 189464 - DNA, 20 bp, Artificial Sequence
  Synthetic oligonucleotide; ATAGAAA chr2 60511836 60511855 60511839 -
tccctccaacccttgccttc

SEQ ID NO: 189465 - DNA, 20 bp, Artificial Sequence
  Synthetic oligonucleotide; GAAGAAT chr2 60511809 60511828 60511812 -
cagagtgttgaaagcttgga

SEQ ID NO: 189466 - DNA, 20 bp, Artificial Sequence
  Synthetic oligonucleotide; TCAGAAA chr2 60511529 60511548 60511532 -
gaaggaaaaaaaaagaactg

SEQ ID NO: 189467 - DNA, 20 bp, Artificial Sequence
  Synthetic oligonucleotide; ATAGAAT chr2 60511408 60511427 60511411 -
acggaaaagagtggagtcac

SEQ ID NO: 189468 - DNA, 20 bp, Artificial Sequence
  Synthetic oligonucleotide; GGAGAAT chr2 60511185 60511204 60511188 -
agtgcccctgccaggaggag

SEQ ID NO: 189469 - DNA, 20 bp, Artificial Sequence
  Synthetic oligonucleotide; CAAGAAT chr2 60511171 60511190 60511174 -
gaggagggagaatctgaaag

SEQ ID NO: 189470 - DNA, 20 bp, Artificial Sequence
  Synthetic oligonucleotide; ATAGAAA chr2 60510650 60510669 60510653 -
aacggttcttggtgttgggc

SEQ ID NO: 189471 - DNA, 20 bp, Artificial Sequence
  Synthetic oligonucleotide; TGAGAAT chr2 60510412 60510431 60510415 -
agaggtgaggaagttggcca

SEQ ID NO: 189472 - DNA, 20 bp, Artificial Sequence
  Synthetic oligonucleotide; GGAGAAT chr2 60509933 60509952 60509936 -
aatgtgtggctcggtgactg

SEQ ID NO: 189473 - DNA, 20 bp, Artificial Sequence
  Synthetic oligonucleotide; ATAGAAT chr2 60509928 60509947 60509931 -
gtggctcggtgactgggaga

SEQ ID NO: 189474 - DNA, 20 bp, Artificial Sequence
  Synthetic oligonucleotide; CCAGAAA chr2 60509902 60509921 60509905 -
ttgctgtttattgggatggg

SEQ ID NO: 189475 - DNA, 20 bp, Artificial Sequence
  Synthetic oligonucleotide; CCAGAAA chr2 60509612 60509631 60509615 -
agacaacttgatcttttgat

SEQ ID NO: 189476 - DNA, 20 bp, Artificial Sequence
  Synthetic oligonucleotide; TGAGAAA chr2 60509084 60509103 60509087 -
cctgtgatttcggagtctga

SEQ ID NO: 189477 - DNA, 20 bp, Artificial Sequence
  Synthetic oligonucleotide; TCAGAAT chr2 60508182 60508201 60508185 -
ggtagacagtgctgggcctg

SEQ ID NO: 189478 - DNA, 20 bp, Artificial Sequence
  Synthetic oligonucleotide; AAAGAAA chr2 60508114 60508133 60508117 -
ctcaactacttttgtttgtg

SEQ ID NO: 189479 - DNA, 20 bp, Artificial Sequence
  Synthetic oligonucleotide; AGAGAAT chr2 60508085 60508104 60508088 -
gcagtaagcaccatgacatg

SEQ ID NO: 189480 - DNA, 20 bp, Artificial Sequence
  Synthetic oligonucleotide; TTAGAAA chr2 60507969 60507988 60507972 -
gaccatatgattttaaagct

SEQ ID NO: 189481 - DNA, 20 bp, Artificial Sequence
  Synthetic oligonucleotide; TTAGAAA chr2 60507914 60507933 60507917 -
tttttttttgttcttttgct

SEQ ID NO: 189482 - DNA, 20 bp, Artificial Sequence
  Synthetic oligonucleotide; TTAGAAA chr2 60507702 60507721 60507705 -
ccacatttctgccatatgtc

SEQ ID NO: 189483 - DNA, 20 bp, Artificial Sequence
  Synthetic oligonucleotide; CAAGAAA chr2 60507411 60507430 60507414 -
gacacagttttctagctttt

SEQ ID NO: 189484 - DNA, 20 bp, Artificial Sequence
  Synthetic oligonucleotide; ACAGAAA chr2 60506752 60506771 60506755 -
gacattatttgaggttgctg

SEQ ID NO: 189485 - DNA, 20 bp, Artificial Sequence
  Synthetic oligonucleotide; CCAGAAT chr2 60506370 60506389 60506373 -
ttttccaggggtttgacaga

SEQ ID NO: 189486 - DNA, 20 bp, Artificial Sequence
  Synthetic oligonucleotide; AGAGAAT chr2 60506277 60506296 60506280 -
tgactcttcctctgatgcag

SEQ ID NO: 189487 - DNA, 20 bp, Artificial Sequence
  Synthetic oligonucleotide; AGAGAAA chr2 60506222 60506241 60506225 -
tgcctcccctccatgccctc

SEQ ID NO: 189488 - DNA, 20 bp, Artificial Sequence
  Synthetic oligonucleotide; GAAGAAT chr2 60505315 60505334 60505318 -
caggcatttggaacaatctg

SEQ ID NO: 189489 - DNA, 20 bp, Artificial Sequence
  Synthetic oligonucleotide; GGAGAAA chr2 60505080 60505099 60505083 -
agtaaccctgtgaagaggca

SEQ ID NO: 189490 - DNA, 20 bp, Artificial Sequence
  Synthetic oligonucleotide; GTAGAAA chr2 60504725 60504744 60504728 -
ggcattgtccctaagcacca

SEQ ID NO: 189491 - DNA, 20 bp, Artificial Sequence
  Synthetic oligonucleotide; TAAGAAA chr2 60504327 60504346 60504330 -
gggtgaaatcttgcagtgac

SEQ ID NO: 189492 - DNA, 20 bp, Artificial Sequence
  Synthetic oligonucleotide; TCAGAAT chr2 60504066 60504085 60504069 -
agtggtactcttcagagttc

SEQ ID NO: 189493 - DNA, 20 bp, Artificial Sequence
  Synthetic oligonucleotide; CTAGAAT chr2 60503920 60503939 60503923 -
tttcttgctttctttttttt

SEQ ID NO: 189494 - DNA, 20 bp, Artificial Sequence
  Synthetic oligonucleotide; CCAGAAT chr2 60503812 60503831 60503815 -
ataaagctctgacaaaagat

SEQ ID NO: 189495 - DNA, 20 bp, Artificial Sequence
  Synthetic oligonucleotide; AGAGAAA chr2 60503464 60503483 60503467 -
ataggtggaggagagggtcc

SEQ ID NO: 189496 - DNA, 20 bp, Artificial Sequence
  Synthetic oligonucleotide; GCAGAAT chr2 60503231 60503250 60503234 -
ggtcagagcctcctgaggct

SEQ ID NO: 189497 - DNA, 20 bp, Artificial Sequence
  Synthetic oligonucleotide; CAAGAAA chr2 60502962 60502981 60502965 -
aggaggtgtttggacaagag

SEQ ID NO: 189498 - DNA, 20 bp, Artificial Sequence
  Synthetic oligonucleotide; CTAGAAT chr2 60502805 60502824 60502808 -
atagtttctgggtgacagga

SEQ ID NO: 189499 - DNA, 20 bp, Artificial Sequence
  Synthetic oligonucleotide; TTAGAAA chr2 60502609 60502628 60502612 -
cttaaattcatattttaata

SEQ ID NO: 189500 - DNA, 20 bp, Artificial Sequence
  Synthetic oligonucleotide; CCAGAAT chr2 60502511 60502530 60502514 -
taggagcaatacctgagatc

SEQ ID NO: 189501 - DNA, 20 bp, Artificial Sequence
  Synthetic oligonucleotide; CGAGAAA chr2 60502460 60502479 60502463 -
agagctcaaatctgtgctag

SEQ ID NO: 189502 - DNA, 20 bp, Artificial Sequence
  Synthetic oligonucleotide; ACAGAAT chr2 60502355 60502374 60502358 -
gtttatttttccgtttgctc

SEQ ID NO: 189503 - DNA, 20 bp, Artificial Sequence
  Synthetic oligonucleotide; GTAGAAA chr2 60501991 60502010 60501994 -
cctagtgcaacacaagttgt

SEQ ID NO: 189504 - DNA, 20 bp, Artificial Sequence
  Synthetic oligonucleotide; AAAGAAA chr2 60501987 60502006 60501990 -
gtgcaacacaagttgtgtag

SEQ ID NO: 189505 - DNA, 20 bp, Artificial Sequence
  Synthetic oligonucleotide; TTAGAAT chr2 60501941 60501960 60501944 -
ataattcactagtaaaataa

SEQ ID NO: 189506 - DNA, 20 bp, Artificial Sequence
  Synthetic oligonucleotide; TCAGAAT chr2 60501886 60501905 60501889 -
agaggggctgatataacttc

SEQ ID NO: 189507 - DNA, 20 bp, Artificial Sequence
  Synthetic oligonucleotide; TAAGAAA chr2 60501822 60501841 60501825 -
gatgagcacactgctgtaat

SEQ ID NO: 189508 - DNA, 20 bp, Artificial Sequence
  Synthetic oligonucleotide; GGAGAAA chr2 60501706 60501725 60501709 -
gagaccagcctgaccaacat

SEQ ID NO: 189509 - DNA, 20 bp, Artificial Sequence
  Synthetic oligonucleotide; GGAGAAT chr2 60501618 60501637 60501621 -
ctactcaggaggctgaggga

SEQ ID NO: 189510 - DNA, 20 bp, Artificial Sequence
  Synthetic oligonucleotide; AAAGAAA chr2 60501509 60501528 60501512 -
tcaaaaaaaaaaaaaaaaaa

SEQ ID NO: 189511 - DNA, 20 bp, Artificial Sequence
  Synthetic oligonucleotide; GCAGAAT chr2 60501201 60501220 60501204 -
ttggctgccattgaatcaaa

SEQ ID NO: 189512 - DNA, 20 bp, Artificial Sequence
  Synthetic oligonucleotide; CCAGAAA chr2 60501130 60501149 60501133 -
ggatgtttaccaacaacttt

SEQ ID NO: 189513 - DNA, 20 bp, Artificial Sequence
  Synthetic oligonucleotide; CCAGAAA chr2 60500982 60501001 60500985 -
acagaggaggatgcagcgac

SEQ ID NO: 189514 - DNA, 20 bp, Artificial Sequence
  Synthetic oligonucleotide; GAAGAAA chr2 60500868 60500887 60500871 -
atcatacacattttaccagt

SEQ ID NO: 189515 - DNA, 20 bp, Artificial Sequence
  Synthetic oligonucleotide; TGAGAAA chr2 60499579 60499598 60499582 -
gcccgtggcaaacactgtct

SEQ ID NO: 189516 - DNA, 20 bp, Artificial Sequence
  Synthetic oligonucleotide; GAAGAAA chr2 60499423 60499442 60499426 -
atttccttttttgcccctgg

SEQ ID NO: 189517 - DNA, 20 bp, Artificial Sequence
  Synthetic oligonucleotide; ACAGAAT chr2 60499399 60499418 60499402 -
aaatatcacttagaggagtt

SEQ ID NO: 189518 - DNA, 20 bp, Artificial Sequence
  Synthetic oligonucleotide; CCAGAAA chr2 60499133 60499152 60499136 -
ccagagaagataatggcagc

SEQ ID NO: 189519 - DNA, 20 bp, Artificial Sequence
  Synthetic oligonucleotide; CCAGAAA chr2 60499091 60499110 60499094 -
acacattgtagggtgatctc

SEQ ID NO: 189520 - DNA, 20 bp, Artificial Sequence
  Synthetic oligonucleotide; CGAGAAA chr2 60499078 60499097 60499081 -
tgatctcccagaaaagccag

SEQ ID NO: 189521 - DNA, 20 bp, Artificial Sequence
  Synthetic oligonucleotide; ACAGAAT chr2 60499026 60499045 60499029 -
ctttggatgcctgtgtgggg

SEQ ID NO: 189522 - DNA, 20 bp, Artificial Sequence
  Synthetic oligonucleotide; GAAGAAA chr2 60499000 60499019 60499003 -
tcagtggaatggaaaatgaa

SEQ ID NO: 189523 - DNA, 20 bp, Artificial Sequence
  Synthetic oligonucleotide; GGAGAAA chr2 60497814 60497833 60497817 -
ctactggatcatcagcaaag

SEQ ID NO: 189524 - DNA, 20 bp, Artificial Sequence
  Synthetic oligonucleotide; AGAGAAA chr2 60497744 60497763 60497747 -
ctatagtaaggtgatagttc

SEQ ID NO: 189525 - DNA, 20 bp, Artificial Sequence
  Synthetic oligonucleotide; AGAGAAA chr2 60497182 60497201 60497185 -
ctgcatggaaggactttgct

SEQ ID NO: 189526 - DNA, 20 bp, Artificial Sequence
  Synthetic oligonucleotide; TTAGAAT chr2 60497111 60497130 60497114 -
gggatgctagctaaagggaa

SEQ ID NO: 189527 - DNA, 20 bp, Artificial Sequence
  Synthetic oligonucleotide; ACAGAAA chr2 60496970 60496989 60496973 -
atcgtgaagtaatcgtgaag

SEQ ID NO: 189528 - DNA, 20 bp, Artificial Sequence
  Synthetic oligonucleotide; AGAGAAA chr2 60496656 60496675 60496659 -
ggcccctgctggctgctggg

SEQ ID NO: 189529 - DNA, 20 bp, Artificial Sequence
  Synthetic oligonucleotide; TAAGAAT chr2 60495960 60495979 60495963 -
taggtgttttaaaaaatagc

SEQ ID NO: 189530 - DNA, 20 bp, Artificial Sequence
  Synthetic oligonucleotide; TCAGAAA chr2 60495923 60495942 60495926 -
cccttgtaatttagagactc

SEQ ID NO: 189531 - DNA, 20 bp, Artificial Sequence
  Synthetic oligonucleotide; AAAGAAT chr2 60495787 60495806 60495790 -
ttgcctgtctttgagcagga

SEQ ID NO: 189532 - DNA, 20 bp, Artificial Sequence
  Synthetic oligonucleotide; TGAGAAT chr2 60495731 60495750 60495734 -
tgtgctgattgagggcccat

SEQ ID NO: 189533 - DNA, 20 bp, Artificial Sequence
  Synthetic oligonucleotide; AGAGAAT chr2 60495627 60495646 60495630 -
atgtaagcatcacaacaggc

SEQ ID NO: 189534 - DNA, 20 bp, Artificial Sequence
  Synthetic oligonucleotide; CCAGAAA chr2 60495362 60495381 60495365 -
catacaggtaataacatagg

SEQ ID NO: 189535 - DNA, 20 bp, Artificial Sequence
  Synthetic oligonucleotide; GGAGAAT chr2 60495137 60495156 60495140 -
cggaaggctctcttggtgat

SEQ ID NO: 189536 - DNA, 20 bp, Artificial Sequence
  Synthetic oligonucleotide; GAAGAAA chr2 60494640 60494659 60494643 -
ccatattttaaattccagct

SEQ ID NO: 189537 - DNA, 20 bp, Artificial Sequence
  Synthetic oligonucleotide; TAAGAAT chr2 60494171 60494190 60494174 -
tgtatttattgccctaggcg

SEQ ID NO: 189538 - DNA, 20 bp, Artificial Sequence
  Synthetic oligonucleotide; TAAGAAT chr2 60493562 60493581 60493565 -
attcaaatgaatgcccattt

SEQ ID NO: 189539 - DNA, 20 bp, Artificial Sequence
  Synthetic oligonucleotide; AGAGAAA chr2 60493323 60493342 60493326 -
atgccttagatgtttaccta

SEQ ID NO: 189540 - DNA, 20 bp, Artificial Sequence
  Synthetic oligonucleotide; GAAGAAT chr2 60493174 60493193 60493177 -
tggaatacaactcaacagta

SEQ ID NO: 189541 - DNA, 20 bp, Artificial Sequence
  Synthetic oligonucleotide; CCAGAAT chr2 60493133 60493152 60493136 -
ctccacaccatggatgaatc

SEQ ID NO: 189542 - DNA, 20 bp, Artificial Sequence
  Synthetic oligonucleotide; GAAGAAA chr2 60493112 60493131 60493115 -
cagaatcattctgctctgtg

SEQ ID NO: 189543 - DNA, 20 bp, Artificial Sequence
  Synthetic oligonucleotide; CTAGAAT chr2 60493058 60493077 60493061 -
gagtccatttgtaacaaatt

SEQ ID NO: 189544 - DNA, 20 bp, Artificial Sequence
  Synthetic oligonucleotide; TGAGAAT chr2 60492691 60492710 60492694 -
caaagtacatttcagggaaa

SEQ ID NO: 189545 - DNA, 20 bp, Artificial Sequence
  Synthetic oligonucleotide; CTAGAAT chr2 60492501 60492520 60492504 -
aggggaggaaatctgttttc

SEQ ID NO: 189546 - DNA, 20 bp, Artificial Sequence
  Synthetic oligonucleotide; CTAGAAA chr2 60492435 60492454 60492438 -
caactaagtttttttcttcc

SEQ ID NO: 189547 - DNA, 20 bp, Artificial Sequence
  Synthetic oligonucleotide; TAAGAAT chr2 60491256 60491275 60491259 -
tgctgcatttaaaacagcat

SEQ ID NO: 189548 - DNA, 20 bp, Artificial Sequence
  Synthetic oligonucleotide; ACAGAAA chr2 60490869 60490888 60490872 -
ggttaaaattaccattttga

SEQ ID NO: 189549 - DNA, 20 bp, Artificial Sequence
  Synthetic oligonucleotide; CTAGAAT chr2 60490793 60490812 60490796 -
atatgctatttgttgaattc

SEQ ID NO: 189550 - DNA, 20 bp, Artificial Sequence
  Synthetic oligonucleotide; GGAGAAA chr2 60490729 60490748 60490732 -
aaatataatagaagcaagta

SEQ ID NO: 189551 - DNA, 20 bp, Artificial Sequence
  Synthetic oligonucleotide; GAAGAAA chr2 60490709 60490728 60490712 -
ggagaaagagtccctgtatt

SEQ ID NO: 189552 - DNA, 20 bp, Artificial Sequence
  Synthetic oligonucleotide; GAAGAAA chr2 60490497 60490516 60490500 -
tccaggaggtaagagaagaa

SEQ ID NO: 189553 - DNA, 20 bp, Artificial Sequence
  Synthetic oligonucleotide; GCAGAAT chr2 60490450 60490469 60490453 -
cggaagggatttttacttgg

SEQ ID NO: 189554 - DNA, 20 bp, Artificial Sequence
  Synthetic oligonucleotide; ATAGAAA chr2 60490408 60490427 60490411 -
tacggggaactaagactgga

SEQ ID NO: 189555 - DNA, 20 bp, Artificial Sequence
  Synthetic oligonucleotide; GCAGAAT chr2 60490147 60490166 60490150 -
cgtagggtttcctttcacta

SEQ ID NO: 189556 - DNA, 20 bp, Artificial Sequence
  Synthetic oligonucleotide; TCAGAAT chr2 60490015 60490034 60490018 -
ggagtgggcaggaatgacgt

SEQ ID NO: 189557 - DNA, 20 bp, Artificial Sequence
  Synthetic oligonucleotide; TTAGAAT chr2 60489636 60489655 60489639 -
tagaggggaaagaacctctg

SEQ ID NO: 189558 - DNA, 20 bp, Artificial Sequence
  Synthetic oligonucleotide; TCAGAAT chr2 60489578 60489597 60489581 -
tcaggtgcttcctcttctac

SEQ ID NO: 189559 - DNA, 20 bp, Artificial Sequence
  Synthetic oligonucleotide; CAAGAAA chr2 60489436 60489455 60489439 -
ggccgccgtgtgtttactgc

SEQ ID NO: 189560 - DNA, 20 bp, Artificial Sequence
  Synthetic oligonucleotide; GCAGAAA chr2 60489382 60489401 60489385 -
ttaggaacaaacttccagcg

SEQ ID NO: 189561 - DNA, 20 bp, Artificial Sequence
  Synthetic oligonucleotide; AAAGAAA chr2 60489295 60489314 60489298 -
gttgtgggcaaaatgacata

SEQ ID NO: 189562 - DNA, 20 bp, Artificial Sequence
  Synthetic oligonucleotide; TGAGAAA chr2 60489283 60489302 60489286 -
atgacataaaagaaatggaa

SEQ ID NO: 189563 - DNA, 20 bp, Artificial Sequence
  Synthetic oligonucleotide; TTAGAAA chr2 60489136 60489155 60489139 -
attggggtctaaggtaccct

SEQ ID NO: 189564 - DNA, 20 bp, Artificial Sequence
  Synthetic oligonucleotide; GGAGAAA chr2 60488960 60488979 60488963 -
gagaccagcctgaccaacat

SEQ ID NO: 189565 - DNA, 20 bp, Artificial Sequence
  Synthetic oligonucleotide; ACAGAAA chr2 60488934 60488953 60488937 -
accccgtctctaccaaaaat

SEQ ID NO: 189566 - DNA, 20 bp, Artificial Sequence
  Synthetic oligonucleotide; GGAGAAT chr2 60488871 60488890 60488874 -
ctacttgggaggctgaggca

SEQ ID NO: 189567 - DNA, 20 bp, Artificial Sequence
  Synthetic oligonucleotide; TCAGAAA chr2 60488779 60488798 60488782 -
aacaagagcgaaactccacc

SEQ ID NO: 189568 - DNA, 20 bp, Artificial Sequence
  Synthetic oligonucleotide; CTAGAAA chr2 60488641 60488660 60488644 -
tattttcatgttaagcaaaa

SEQ ID NO: 189569 - DNA, 20 bp, Artificial Sequence
  Synthetic oligonucleotide; GAAGAAA chr2 60488171 60488190 60488174 -
tcatgttcctagaaggaaag

SEQ ID NO: 189570 - DNA, 20 bp, Artificial Sequence
  Synthetic oligonucleotide; TGAGAAT chr2 60488104 60488123 60488107 -
atttaaatgtttctacataa

SEQ ID NO: 189571 - DNA, 20 bp, Artificial Sequence
  Synthetic oligonucleotide; ATAGAAT chr2 60487779 60487798 60487782 -
cctttctgcagcttccttag

SEQ ID NO: 189572 - DNA, 20 bp, Artificial Sequence
  Synthetic oligonucleotide; TGAGAAA chr2 60487766 60487785 60487769 -
tccttagatagaatggttga

SEQ ID NO: 189573 - DNA, 20 bp, Artificial Sequence
  Synthetic oligonucleotide; AGAGAAT chr2 60487650 60487669 60487653 -
taaaggctggtgtggttgcc

SEQ ID NO: 189574 - DNA, 20 bp, Artificial Sequence
  Synthetic oligonucleotide; ATAGAAT chr2 60486969 60486988 60486972 -
cccgagtcttttttattctg

SEQ ID NO: 189575 - DNA, 20 bp, Artificial Sequence
  Synthetic oligonucleotide; TTAGAAA chr2 60486486 60486505 60486489 -
tatcttagattggtaggtct

SEQ ID NO: 189576 - DNA, 20 bp, Artificial Sequence
  Synthetic oligonucleotide; GCAGAAA chr2 60486399 60486418 60486402 -
gtacttaactacacatatgt

SEQ ID NO: 189577 - DNA, 20 bp, Artificial Sequence
  Synthetic oligonucleotide; TTAGAAT chr2 60486384 60486403 60486387 -
tatgtgcagaaagtgaactc

SEQ ID NO: 189578 - DNA, 20 bp, Artificial Sequence
  Synthetic oligonucleotide; TCAGAAT chr2 60486135 60486154 60486138 -
gctgttcagtcaaatccatt

SEQ ID NO: 189579 - DNA, 20 bp, Artificial Sequence
  Synthetic oligonucleotide; GGAGAAA chr2 60485975 60485994 60485978 -
gagaaccagagcagaaggtt

SEQ ID NO: 189580 - DNA, 20 bp, Artificial Sequence
  Synthetic oligonucleotide; AAAGAAA chr2 60485971 60485990 60485974 -
accagagcagaaggttggag

SEQ ID NO: 189581 - DNA, 20 bp, Artificial Sequence
  Synthetic oligonucleotide; TGAGAAT chr2 60485909 60485928 60485912 -
ctcagccttcttgttgaaaa

SEQ ID NO: 189582 - DNA, 20 bp, Artificial Sequence
  Synthetic oligonucleotide; CCAGAAT chr2 60485690 60485709 60485693 -
aggcaacttcacttctcacc

SEQ ID NO: 189583 - DNA, 20 bp, Artificial Sequence
  Synthetic oligonucleotide; GTAGAAT chr2 60485517 60485536 60485520 -
ggtttatttttcccttatag

SEQ ID NO: 189584 - DNA, 20 bp, Artificial Sequence
  Synthetic oligonucleotide; TGAGAAT chr2 60484810 60484829 60484813 -
cataatgaggtgttcctaag

SEQ ID NO: 189585 - DNA, 20 bp, Artificial Sequence
  Synthetic oligonucleotide; TAAGAAA chr2 60484667 60484686 60484670 -
ctccaaattcccccttctct

SEQ ID NO: 189586 - DNA, 20 bp, Artificial Sequence
  Synthetic oligonucleotide; TGAGAAA chr2 60484414 60484433 60484417 -
aggactaaagagagagaaga

SEQ ID NO: 189587 - DNA, 20 bp, Artificial Sequence
  Synthetic oligonucleotide; GGAGAAA chr2 60484385 60484404 60484388 -
agatgctggaaacagaggtt

SEQ ID NO: 189588 - DNA, 20 bp, Artificial Sequence
  Synthetic oligonucleotide; GTAGAAA chr2 60484365 60484384 60484368 -
ggagaaagagaggcaaggaa

SEQ ID NO: 189589 - DNA, 20 bp, Artificial Sequence
  Synthetic oligonucleotide; GCAGAAA chr2 60484083 60484102 60484086 -
gtcgatagtgacctgcattt

SEQ ID NO: 189590 - DNA, 20 bp, Artificial Sequence
  Synthetic oligonucleotide; CAAGAAA chr2 60483888 60483907 60483891 -
aagggggaaaaaaaagcaac

SEQ ID NO: 189591 - DNA, 20 bp, Artificial Sequence
  Synthetic oligonucleotide; AAAGAAA chr2 60483884 60483903 60483887 -
gggaaaaaaaagcaaccaag

SEQ ID NO: 189592 - DNA, 20 bp, Artificial Sequence
  Synthetic oligonucleotide; AAAGAAA chr2 60483870 60483889 60483873 -
accaagaaagaaaaagaagg

SEQ ID NO: 189593 - DNA, 20 bp, Artificial Sequence
  Synthetic oligonucleotide; GGAGAAA chr2 60483858 60483877 60483861 -
aaagaaggaaagaaaaaaag

SEQ ID NO: 189594 - DNA, 20 bp, Artificial Sequence
  Synthetic oligonucleotide; GAAGAAA chr2 60483849 60483868 60483852 -
aagaaaaaaagggagaaaag

SEQ ID NO: 189595 - DNA, 20 bp, Artificial Sequence
  Synthetic oligonucleotide; AAAGAAA chr2 60483845 60483864 60483848 -
aaaaaagggagaaaaggaag

SEQ ID NO: 189596 - DNA, 20 bp, Artificial Sequence
  Synthetic oligonucleotide; AAAGAAA chr2 60483813 60483832 60483816 -
accagaagaacaaaaatagg

SEQ ID NO: 189597 - DNA, 20 bp, Artificial Sequence
  Synthetic oligonucleotide; AAAGAAA chr2 60483801 60483820 60483804 -
aaaataggaaagaaaaataa

SEQ ID NO: 189598 - DNA, 20 bp, Artificial Sequence
  Synthetic oligonucleotide; AGAGAAA chr2 60483497 60483516 60483500 -
atttgggttctgccttggac

SEQ ID NO: 189599 - DNA, 20 bp, Artificial Sequence
  Synthetic oligonucleotide; AAAGAAA chr2 60482951 60482970 60482954 -
catcatttctgtaatgtttg

SEQ ID NO: 189600 - DNA, 20 bp, Artificial Sequence
  Synthetic oligonucleotide; TCAGAAA chr2 60482842 60482861 60482845 -
gttggatatttaaaatgtca

SEQ ID NO: 189601 - DNA, 20 bp, Artificial Sequence
  Synthetic oligonucleotide; CTAGAAA chr2 60482819 60482838 60482822 -
gaaagagatgattacacatt

SEQ ID NO: 189602 - DNA, 20 bp, Artificial Sequence
  Synthetic oligonucleotide; ATAGAAT chr2 60482743 60482762 60482746 -
gtactaacctgtccttcaaa

SEQ ID NO: 189603 - DNA, 20 bp, Artificial Sequence
  Synthetic oligonucleotide; CAAGAAA chr2 60482394 60482413 60482397 -
aattacaactgtttggaagc

SEQ ID NO: 189604 - DNA, 20 bp, Artificial Sequence
  Synthetic oligonucleotide; ACAGAAA chr2 60482265 60482284 60482268 -
gtccgctccgtgaacaggaa

SEQ ID NO: 189605 - DNA, 20 bp, Artificial Sequence
  Synthetic oligonucleotide; AGAGAAA chr2 60482227 60482246 60482230 -
tttttttttttaatggagga

SEQ ID NO: 189606 - DNA, 20 bp, Artificial Sequence
  Synthetic oligonucleotide; ATAGAAT chr2 60482164 60482183 60482167 -
aaccaaactaaactctcaag

SEQ ID NO: 189607 - DNA, 20 bp, Artificial Sequence
  Synthetic oligonucleotide; GGAGAAT chr2 60481918 60481937 60481921 -
ctaggtgggtttcctgagct

SEQ ID NO: 189608 - DNA, 20 bp, Artificial Sequence
  Synthetic oligonucleotide; ACAGAAT chr2 60481789 60481808 60481792 -
aaaggctctcccaccatcac

SEQ ID NO: 189609 - DNA, 20 bp, Artificial Sequence
  Synthetic oligonucleotide; TTAGAAA chr2 60481768 60481787 60481771 -
cagaatgtactagggttctg

SEQ ID NO: 189610 - DNA, 20 bp, Artificial Sequence
  Synthetic oligonucleotide; AAAGAAA chr2 60481685 60481704 60481688 -
tgtgctggagcatgtgggga

SEQ ID NO: 189611 - DNA, 20 bp, Artificial Sequence
  Synthetic oligonucleotide; CAAGAAA chr2 60481659 60481678 60481662 -
agatgtagggggtggagcgt

SEQ ID NO: 189612 - DNA, 20 bp, Artificial Sequence
  Synthetic oligonucleotide; GAAGAAA chr2 60481616 60481635 60481619 -
tcacgagccatggaaatgga

SEQ ID NO: 189613 - DNA, 20 bp, Artificial Sequence
  Synthetic oligonucleotide; TGAGAAT chr2 60480849 60480868 60480852 -
atgggggtgcaggtagggga

SEQ ID NO: 189614 - DNA, 20 bp, Artificial Sequence
  Synthetic oligonucleotide; GAAGAAA chr2 60480798 60480817 60480801 -
aaacaaattgagagaggaag

SEQ ID NO: 189615 - DNA, 20 bp, Artificial Sequence
  Synthetic oligonucleotide; TTAGAAT chr2 60480464 60480483 60480467 -
ggtccttccagccaggtcat

SEQ ID NO: 189616 - DNA, 20 bp, Artificial Sequence
  Synthetic oligonucleotide; GAAGAAA chr2 60480444 60480463 60480447 -
ttagaatggctctccaacag

SEQ ID NO: 189617 - DNA, 20 bp, Artificial Sequence
  Synthetic oligonucleotide; GGAGAAA chr2 60480265 60480284 60480268 -
tacagggagacttggatcca

SEQ ID NO: 189618 - DNA, 20 bp, Artificial Sequence
  Synthetic oligonucleotide; TGAGAAA chr2 60479981 60480000 60479984 -
taacaaaagcagcttttgag

SEQ ID NO: 189619 - DNA, 20 bp, Artificial Sequence
  Synthetic oligonucleotide; TAAGAAA chr2 60479863 60479882 60479866 -
cgtttcattttcagattttg

SEQ ID NO: 189620 - DNA, 20 bp, Artificial Sequence
  Synthetic oligonucleotide; GTAGAAA chr2 60479246 60479265 60479249 -
cacgtggacctgctaggtgg

SEQ ID NO: 189621 - DNA, 20 bp, Artificial Sequence
  Synthetic oligonucleotide; GCAGAAT chr2 60479161 60479180 60479164 -
atgttactcatatggaatca

SEQ ID NO: 189622 - DNA, 20 bp, Artificial Sequence
  Synthetic oligonucleotide; GAAGAAA chr2 60478701 60478720 60478704 -
ggcagcctagttttattcct

SEQ ID NO: 189623 - DNA, 20 bp, Artificial Sequence
  Synthetic oligonucleotide; GGAGAAT chr2 60478577 60478596 60478580 -
acataataggttttaattct

SEQ ID NO: 189624 - DNA, 20 bp, Artificial Sequence
  Synthetic oligonucleotide; TCAGAAT chr2 60478555 60478574 60478558 -
agaatggccagttctggttc

SEQ ID NO: 189625 - DNA, 20 bp, Artificial Sequence
  Synthetic oligonucleotide; CCAGAAA chr2 60478460 60478479 60478463 -
acaccagtcactcaatagtg

SEQ ID NO: 189626 - DNA, 20 bp, Artificial Sequence
  Synthetic oligonucleotide; GCAGAAT chr2 60477573 60477592 60477576 -
ctaagttctgggatacatgt

SEQ ID NO: 189627 - DNA, 20 bp, Artificial Sequence
  Synthetic oligonucleotide; TCAGAAT chr2 60477262 60477281 60477265 -
ctctgctctggcaggtgtta

SEQ ID NO: 189628 - DNA, 20 bp, Artificial Sequence
  Synthetic oligonucleotide; GGAGAAA chr2 60477138 60477157 60477141 -
ggtatctaatacttaacctg

SEQ ID NO: 189629 - DNA, 20 bp, Artificial Sequence
  Synthetic oligonucleotide; ACAGAAA chr2 60476999 60477018 60477002 -
gaagctggacaattcgggtg

SEQ ID NO: 189630 - DNA, 20 bp, Artificial Sequence
  Synthetic oligonucleotide; ACAGAAA chr2 60476852 60476871 60476855 -
agagagtgatttttcacatt

SEQ ID NO: 189631 - DNA, 20 bp, Artificial Sequence
  Synthetic oligonucleotide; ACAGAAA chr2 60476606 60476625 60476609 -
tagcaaatatgatttatttt

SEQ ID NO: 189632 - DNA, 20 bp, Artificial Sequence
  Synthetic oligonucleotide; CCAGAAA chr2 60475979 60475998 60475982 -
aaagatggaaacacttaggg

SEQ ID NO: 189633 - DNA, 20 bp, Artificial Sequence
  Synthetic oligonucleotide; AAAGAAA chr2 60475975 60475994 60475978 -
atggaaacacttagggccag

SEQ ID NO: 189634 - DNA, 20 bp, Artificial Sequence
  Synthetic oligonucleotide; GAAGAAA chr2 60475852 60475871 60475855 -
caagtccctgcttcctaaag

SEQ ID NO: 189635 - DNA, 20 bp, Artificial Sequence
  Synthetic oligonucleotide; AAAGAAT chr2 60475847 60475866 60475850 -
ccctgcttcctaaaggaaga

SEQ ID NO: 189636 - DNA, 20 bp, Artificial Sequence
  Synthetic oligonucleotide; GAAGAAA chr2 60475646 60475665 60475649 -
cctccccatggctttgaaaa

SEQ ID NO: 189637 - DNA, 20 bp, Artificial Sequence
  Synthetic oligonucleotide; GAAGAAA chr2 60475369 60475388 60475372 -
gccacccacattcattgggg

SEQ ID NO: 189638 - DNA, 20 bp, Artificial Sequence
  Synthetic oligonucleotide; TCAGAAA chr2 60475283 60475302 60475286 -
catggttgtgtcccttattt

SEQ ID NO: 189639 - DNA, 20 bp, Artificial Sequence
  Synthetic oligonucleotide; ACAGAAA chr2 60475233 60475252 60475236 -
ttgtgaaagctgaagatgtc

SEQ ID NO: 189640 - DNA, 20 bp, Artificial Sequence
  Synthetic oligonucleotide; GGAGAAA chr2 60474849 60474868 60474852 -
actaaatgaagcctgctgtg

SEQ ID NO: 189641 - DNA, 20 bp, Artificial Sequence
  Synthetic oligonucleotide; AGAGAAT chr2 60474727 60474746 60474730 -
agaggttgaatgaatgcatg

SEQ ID NO: 189642 - DNA, 20 bp, Artificial Sequence
  Synthetic oligonucleotide; AAAGAAT chr2 60474507 60474526 60474510 -
aatactttgggcccagagcc

SEQ ID NO: 189643 - DNA, 20 bp, Artificial Sequence
  Synthetic oligonucleotide; TCAGAAA chr2 60474337 60474356 60474340 -
gtctttggcttagttgcttt

SEQ ID NO: 189644 - DNA, 20 bp, Artificial Sequence
  Synthetic oligonucleotide; GCAGAAA chr2 60474274 60474293 60474277 -
ttatgttaaagacacagctt

SEQ ID NO: 189645 - DNA, 20 bp, Artificial Sequence
  Synthetic oligonucleotide; TGAGAAA chr2 60474180 60474199 60474183 -
tctctacttcctccctttat

SEQ ID NO: 189646 - DNA, 20 bp, Artificial Sequence
  Synthetic oligonucleotide; GAAGAAA chr2 60474003 60474022 60474006 -
gaccatgagagagtttcagg

SEQ ID NO: 189647 - DNA, 20 bp, Artificial Sequence
  Synthetic oligonucleotide; GCAGAAT chr2 60473953 60473972 60473956 -
tattgctttcttttgttttt

SEQ ID NO: 189648 - DNA, 20 bp, Artificial Sequence
  Synthetic oligonucleotide; AGAGAAT chr2 60473709 60473728 60473712 -
ctataatactctgataagtc

SEQ ID NO: 189649 - DNA, 20 bp, Artificial Sequence
  Synthetic oligonucleotide; ATAGAAA chr2 60473643 60473662 60473646 -
caagagctagatgcggctga

SEQ ID NO: 189650 - DNA, 20 bp, Artificial Sequence
  Synthetic oligonucleotide; AAAGAAA chr2 60473334 60473353 60473337 -
ctttttgaagacccagggtg

SEQ ID NO: 189651 - DNA, 20 bp, Artificial Sequence
  Synthetic oligonucleotide; TCAGAAA chr2 60472774 60472793 60472777 -
tacacacccagtgattagtt

SEQ ID NO: 189652 - DNA, 20 bp, Artificial Sequence
  Synthetic oligonucleotide; GTAGAAA chr2 60472633 60472652 60472636 -
aaagttggtacccaatatat

SEQ ID NO: 189653 - DNA, 20 bp, Artificial Sequence
  Synthetic oligonucleotide; CCAGAAA chr2 60472411 60472430 60472414 -
acaggttgaaacaccttcca

SEQ ID NO: 189654 - DNA, 20 bp, Artificial Sequence
  Synthetic oligonucleotide; TCAGAAA chr2 60472376 60472395 60472379 -
acatttgaaaaaagattgag

SEQ ID NO: 189655 - DNA, 20 bp, Artificial Sequence
  Synthetic oligonucleotide; CCAGAAA chr2 60472344 60472363 60472347 -
aatgtgtcccatttgagaga

SEQ ID NO: 189656 - DNA, 20 bp, Artificial Sequence
  Synthetic oligonucleotide; TGAGAAT chr2 60471929 60471948 60471932 -
tgattcagcttgagtgtgca

SEQ ID NO: 189657 - DNA, 20 bp, Artificial Sequence
  Synthetic oligonucleotide; GGAGAAT chr2 60471917 60471936 60471920 -
agtgtgcatgagaatcacct

SEQ ID NO: 189658 - DNA, 20 bp, Artificial Sequence
  Synthetic oligonucleotide; CAAGAAT chr2 60471845 60471864 60471848 -
agtaagtctgaggtggtgcc

SEQ ID NO: 189659 - DNA, 20 bp, Artificial Sequence
  Synthetic oligonucleotide; TGAGAAT chr2 60471779 60471798 60471782 -
gtgggcctgggtctgcgctg

SEQ ID NO: 189660 - DNA, 20 bp, Artificial Sequence
  Synthetic oligonucleotide; AAAGAAA chr2 60471751 60471770 60471754 -
acttgcctaagagcactaac

SEQ ID NO: 189661 - DNA, 20 bp, Artificial Sequence
  Synthetic oligonucleotide; GGAGAAT chr2 60471682 60471701 60471685 -
cagagcccatctctggctgg

SEQ ID NO: 189662 - DNA, 20 bp, Artificial Sequence
  Synthetic oligonucleotide; AGAGAAT chr2 60471434 60471453 60471437 -
atgtcgattttacttaccaa

SEQ ID NO: 189663 - DNA, 20 bp, Artificial Sequence
  Synthetic oligonucleotide; GCAGAAT chr2 60471399 60471418 60471402 -
tgtgtttagtggaagaagca

SEQ ID NO: 189664 - DNA, 20 bp, Artificial Sequence
  Synthetic oligonucleotide; ATAGAAA chr2 60471275 60471294 60471278 -
gtaaatagcttcttaggctg

SEQ ID NO: 189665 - DNA, 20 bp, Artificial Sequence
  Synthetic oligonucleotide; GTAGAAA chr2 60471064 60471083 60471067 -
aagtactgcttaatggatca

SEQ ID NO: 189666 - DNA, 20 bp, Artificial Sequence
  Synthetic oligonucleotide; TTAGAAA chr2 60470829 60470848 60470832 -
tagctagggttttttacaac

SEQ ID NO: 189667 - DNA, 20 bp, Artificial Sequence
  Synthetic oligonucleotide; AGAGAAT chr2 60470571 60470590 60470574 -
ctcttcccagagtaagtggc

SEQ ID NO: 189668 - DNA, 20 bp, Artificial Sequence
  Synthetic oligonucleotide; TAAGAAA chr2 60470476 60470495 60470479 -
cctgggttgcctgtgtttcc

SEQ ID NO: 189669 - DNA, 20 bp, Artificial Sequence
  Synthetic oligonucleotide; CCAGAAA chr2 60469417 60469436 60469420 -
agagtatggcccagctcagt

SEQ ID NO: 189670 - DNA, 20 bp, Artificial Sequence
  Synthetic oligonucleotide; AGAGAAA chr2 60469341 60469360 60469344 -
gaagaggggggcagagggac

SEQ ID NO: 189671 - DNA, 20 bp, Artificial Sequence
  Synthetic oligonucleotide; ACAGAAA chr2 60469017 60469036 60469020 -
agaccgaaattgaaaacaaa

SEQ ID NO: 189672 - DNA, 20 bp, Artificial Sequence
  Synthetic oligonucleotide; GCAGAAT chr2 60468757 60468776 60468760 -
tccccacgcctgggatgagt

SEQ ID NO: 189673 - DNA, 20 bp, Artificial Sequence
  Synthetic oligonucleotide; TGAGAAT chr2 60468686 60468705 60468689 -
aatgtccatgtgtatagaga

SEQ ID NO: 189674 - DNA, 20 bp, Artificial Sequence
  Synthetic oligonucleotide; CCAGAAT chr2 60468348 60468367 60468351 -
gcacacatctttagccaagg

SEQ ID NO: 189675 - DNA, 20 bp, Artificial Sequence
  Synthetic oligonucleotide; AGAGAAA chr2 60468205 60468224 60468208 -
ctaatttttctcctggtttt

SEQ ID NO: 189676 - DNA, 20 bp, Artificial Sequence
  Synthetic oligonucleotide; TTAGAAA chr2 60466970 60466989 60466973 -
gttttctgaaagatactgtt

SEQ ID NO: 189677 - DNA, 20 bp, Artificial Sequence
  Synthetic oligonucleotide; GAAGAAA chr2 60466854 60466873 60466857 -
acacaaaaaagcaggttcaa

SEQ ID NO: 189678 - DNA, 20 bp, Artificial Sequence
  Synthetic oligonucleotide; AAAGAAA chr2 60466792 60466811 60466795 -
tgaaaaataacctgctgtgg

SEQ ID NO: 189679 - DNA, 20 bp, Artificial Sequence
  Synthetic oligonucleotide; AAAGAAA chr2 60466782 60466801 60466785 -
cctgctgtggaaagaaaaaa

SEQ ID NO: 189680 - DNA, 20 bp, Artificial Sequence
  Synthetic oligonucleotide; AGAGAAT chr2 60466757 60466776 60466760 -
aaaggaaaaaggtcatggag

SEQ ID NO: 189681 - DNA, 20 bp, Artificial Sequence
  Synthetic oligonucleotide; CCAGAAA chr2 60466053 60466072 60466056 -
tggaagtgggttgtgggggt

SEQ ID NO: 189682 - DNA, 20 bp, Artificial Sequence
  Synthetic oligonucleotide; AGAGAAA chr2 60465676 60465695 60465679 -
agataggaattccaagactc

SEQ ID NO: 189683 - DNA, 20 bp, Artificial Sequence
  Synthetic oligonucleotide; CTAGAAA chr2 60465547 60465566 60465550 -
tttttcacattggtgacata

SEQ ID NO: 189684 - DNA, 20 bp, Artificial Sequence
  Synthetic oligonucleotide; GAAGAAT chr2 60465339 60465358 60465342 -
tgattttcatcagagtaaat

SEQ ID NO: 189685 - DNA, 20 bp, Artificial Sequence
  Synthetic oligonucleotide; TTAGAAT chr2 60465175 60465194 60465178 -
gatgactgcagtttaggaat

SEQ ID NO: 189686 - DNA, 20 bp, Artificial Sequence
  Synthetic oligonucleotide; CTAGAAT chr2 60464965 60464984 60464968 -
acactagctgccctcatgat

SEQ ID NO: 189687 - DNA, 20 bp, Artificial Sequence
  Synthetic oligonucleotide; TTAGAAA chr2 60463918 60463937 60463921 -
attttttttttttttccttc

SEQ ID NO: 189688 - DNA, 20 bp, Artificial Sequence
  Synthetic oligonucleotide; GGAGAAA chr2 60463851 60463870 60463854 -
cagcccttcttttaaaagaa

SEQ ID NO: 189689 - DNA, 20 bp, Artificial Sequence
  Synthetic oligonucleotide; TCAGAAT chr2 60463805 60463824 60463808 -
atattttaaggctttttttt

SEQ ID NO: 189690 - DNA, 20 bp, Artificial Sequence
  Synthetic oligonucleotide; TGAGAAT chr2 60463084 60463103 60463087 -
tcctcccacagtctggggtg

SEQ ID NO: 189691 - DNA, 20 bp, Artificial Sequence
  Synthetic oligonucleotide; TTAGAAA chr2 60462907 60462926 60462910 -
tctatgaaatgtttgcctat

SEQ ID NO: 189692 - DNA, 20 bp, Artificial Sequence
  Synthetic oligonucleotide; ATAGAAA chr2 60462877 60462896 60462880 -
cacctgtcacccagggggga

SEQ ID NO: 189693 - DNA, 20 bp, Artificial Sequence
  Synthetic oligonucleotide; CTAGAAT chr2 60462717 60462736 60462720 -
gaagacatttgttgaggtgc

SEQ ID NO: 189694 - DNA, 20 bp, Artificial Sequence
  Synthetic oligonucleotide; TAAGAAT chr2 60462329 60462348 60462332 -
cgcacagaacactcatggat

SEQ ID NO: 189695 - DNA, 20 bp, Artificial Sequence
  Synthetic oligonucleotide; TTAGAAA chr2 60462318 60462337 60462321 -
ctcatggattaagaatctac

SEQ ID NO: 189696 - DNA, 20 bp, Artificial Sequence
  Synthetic oligonucleotide; GCAGAAT chr2 60462258 60462277 60462261 -
gtatcccttcaggactaggt

SEQ ID NO: 189697 - DNA, 20 bp, Artificial Sequence
  Synthetic oligonucleotide; TAAGAAT chr2 60462191 60462210 60462194 -
caataacccctttaacctgc

SEQ ID NO: 189698 - DNA, 20 bp, Artificial Sequence
  Synthetic oligonucleotide; GGAGAAA chr2 60460468 60460487 60460471 -
tttagcgtgtacagtaccct

SEQ ID NO: 189699 - DNA, 20 bp, Artificial Sequence
  Synthetic oligonucleotide; TAAGAAT chr2 60460253 60460272 60460256 -
acaaacagaagtaacgaagc

SEQ ID NO: 189700 - DNA, 20 bp, Artificial Sequence
  Synthetic oligonucleotide; AGAGAAA chr2 60459958 60459977 60459961 -
ctgtttccagttccgttctg

SEQ ID NO: 189701 - DNA, 20 bp, Artificial Sequence
  Synthetic oligonucleotide; AGAGAAA chr2 60459940 60459959 60459943 -
tgagagaaaaagagagagag

SEQ ID NO: 189702 - DNA, 20 bp, Artificial Sequence
  Synthetic oligonucleotide; ACAGAAT chr2 60459838 60459857 60459841 -
tttggattaaccctctatag

SEQ ID NO: 189703 - DNA, 20 bp, Artificial Sequence
  Synthetic oligonucleotide; GAAGAAA chr2 60459759 60459778 60459762 -
taaatgtatcaattggaaag

SEQ ID NO: 189704 - DNA, 20 bp, Artificial Sequence
  Synthetic oligonucleotide; ACAGAAA chr2 60459729 60459748 60459732 -
ggccttgaattgacaaatta

SEQ ID NO: 189705 - DNA, 20 bp, Artificial Sequence
  Synthetic oligonucleotide; AAAGAAA chr2 60459427 60459446 60459430 -
ttgctcctggtgagagctta

SEQ ID NO: 189706 - DNA, 20 bp, Artificial Sequence
  Synthetic oligonucleotide; AAAGAAA chr2 60459264 60459283 60459267 -
ttttaaaaatactggcacca

SEQ ID NO: 189707 - DNA, 20 bp, Artificial Sequence
  Synthetic oligonucleotide; GAAGAAA chr2 60459146 60459165 60459149 -
aggtttgacagaggggaaca

SEQ ID NO: 189708 - DNA, 20 bp, Artificial Sequence
  Synthetic oligonucleotide; AGAGAAA chr2 60459001 60459020 60459004 -
gtgacattcttaaaaaaaga

SEQ ID NO: 189709 - DNA, 20 bp, Artificial Sequence
  Synthetic oligonucleotide; AAAGAAT chr2 60458997 60459016 60459000 -
cattcttaaaaaaagaagag

SEQ ID NO: 189710 - DNA, 20 bp, Artificial Sequence
  Synthetic oligonucleotide; CAAGAAT chr2 60458672 60458691 60458675 -
tatacttaagggaaaagttg

SEQ ID NO: 189711 - DNA, 20 bp, Artificial Sequence
  Synthetic oligonucleotide; ACAGAAT chr2 60458531 60458550 60458534 -
tgcaagcgctgtgaatggaa

SEQ ID NO: 189712 - DNA, 20 bp, Artificial Sequence
  Synthetic oligonucleotide; ATAGAAA chr2 60458515 60458534 60458518 -
ggaaacagaatacacttaac

SEQ ID NO: 189713 - DNA, 20 bp, Artificial Sequence
  Synthetic oligonucleotide; TAAGAAA chr2 60458441 60458460 60458444 -
acttttttaaatataaatgt

SEQ ID NO: 189714 - DNA, 20 bp, Artificial Sequence
  Synthetic oligonucleotide; CTAGAAT chr2 60458168 60458187 60458171 -
atggtcttttttctgtattt

SEQ ID NO: 189715 - DNA, 20 bp, Artificial Sequence
  Synthetic oligonucleotide; AGAGAAA chr2 60457952 60457971 60457955 -
gcttcaaaaaaaaaaaaaag

SEQ ID NO: 189716 - DNA, 20 bp, Artificial Sequence
  Synthetic oligonucleotide; CTAGAAT chr2 60457888 60457907 60457891 -
tggcggtttgggggagcctg

SEQ ID NO: 189717 - DNA, 20 bp, Artificial Sequence
  Synthetic oligonucleotide; AAAGAAA chr2 60457709 60457728 60457712 -
tcttaccttcatatgcagta

SEQ ID NO: 189718 - DNA, 20 bp, Artificial Sequence
  Synthetic oligonucleotide; AAAGAAA chr2 60457705 60457724 60457708 -
accttcatatgcagtaaaag

SEQ ID NO: 189719 - DNA, 20 bp, Artificial Sequence
  Synthetic oligonucleotide; AAAGAAA chr2 60457701 60457720 60457704 -
tcatatgcagtaaaagaaag

SEQ ID NO: 189720 - DNA, 20 bp, Artificial Sequence
  Synthetic oligonucleotide; AAAGAAT chr2 60457611 60457630 60457614 -
gtgctttatatttagattgg

SEQ ID NO: 189721 - DNA, 20 bp, Artificial Sequence
  Synthetic oligonucleotide; AGAGAAA chr2 60457583 60457602 60457586 -
tcatatgcaaagcatattaa

SEQ ID NO: 189722 - DNA, 20 bp, Artificial Sequence
  Synthetic oligonucleotide; GCAGAAT chr2 60457540 60457559 60457543 -
acttttttgtaaatggcaat

SEQ ID NO: 189723 - DNA, 20 bp, Artificial Sequence
  Synthetic oligonucleotide; CAAGAAA chr2 60457145 60457164 60457148 -
cacactctgtaaattacttg

SEQ ID NO: 189724 - DNA, 20 bp, Artificial Sequence
  Synthetic oligonucleotide; TTAGAAT chr2 60456984 60457003 60456987 -
tagttttaaggctttccagt

SEQ ID NO: 189725 - DNA, 20 bp, Artificial Sequence
  Synthetic oligonucleotide; CAAGAAA chr2 60456971 60456990 60456974 -
ttccagtttagaatagtttt

SEQ ID NO: 189726 - DNA, 20 bp, Artificial Sequence
  Synthetic oligonucleotide; GCAGAAA chr2 60456918 60456937 60456921 -
aaaacttactccatctctta

SEQ ID NO: 189727 - DNA, 20 bp, Artificial Sequence
  Synthetic oligonucleotide; GGAGAAA chr2 60456625 60456644 60456628 -
ttgttttgtttaaaaaagag

SEQ ID NO: 189728 - DNA, 20 bp, Artificial Sequence
  Synthetic oligonucleotide; AAAGAAA chr2 60456604 60456623 60456607 -
gagaaaaaaagagagagacg

SEQ ID NO: 189729 - DNA, 20 bp, Artificial Sequence
  Synthetic oligonucleotide; AAAGAAA chr2 60456599 60456618 60456602 -
aaaaagagagagacgaaaga

SEQ ID NO: 189730 - DNA, 20 bp, Artificial Sequence
  Synthetic oligonucleotide; TTAGAAA chr2 60456368 60456387 60456371 -
taggtctattttaaaaatcc

SEQ ID NO: 189731 - DNA, 20 bp, Artificial Sequence
  Synthetic oligonucleotide; CAAGAAT chr2 60456115 60456134 60456118 -
gtcatgccttttatctgagg

SEQ ID NO: 189732 - DNA, 20 bp, Artificial Sequence
  Synthetic oligonucleotide; AAAGAAA chr2 60456087 60456106 60456090 -
gttttatctttctaaagtat

SEQ ID NO: 189733 - DNA, 20 bp, Artificial Sequence
  Synthetic oligonucleotide; TGAGAAA chr2 60456018 60456037 60456021 -
gtggggctagaggaatccac

SEQ ID NO: 189734 - DNA, 20 bp, Artificial Sequence
  Synthetic oligonucleotide; GGAGAAT chr2 60456004 60456023 60456007 -
atccactgagaaaggatgtt

SEQ ID NO: 189735 - DNA, 20 bp, Artificial Sequence
  Synthetic oligonucleotide; TTAGAAA chr2 60455932 60455951 60455935 -
cttgatgtttgtcactgaac

SEQ ID NO: 189736 - DNA, 20 bp, Artificial Sequence
  Synthetic oligonucleotide; ATAGAAA chr2 60455859 60455878 60455862 -
caaaatgctgctcaagacag

SEQ ID NO: 189737 - DNA, 20 bp, Artificial Sequence
  Synthetic oligonucleotide; ACAGAAT chr2 60455654 60455673 60455657 -
taggttttgcatcctgacag

SEQ ID NO: 189738 - DNA, 20 bp, Artificial Sequence
  Synthetic oligonucleotide; ATAGAAA chr2 60455432 60455451 60455435 -
atttctgaagctgatgaaca

SEQ ID NO: 189739 - DNA, 20 bp, Artificial Sequence
  Synthetic oligonucleotide; CCAGAAA chr2 60455105 60455124 60455108 -
tatttctcacagattttaaa

SEQ ID NO: 189740 - DNA, 20 bp, Artificial Sequence
  Synthetic oligonucleotide; GCAGAAA chr2 60454954 60454973 60454957 -
cttcatttgcactggccatg

SEQ ID NO: 189741 - DNA, 20 bp, Artificial Sequence
  Synthetic oligonucleotide; GGAGAAA chr2 60454783 60454802 60454786 -
gcttaggtataattccaatt

SEQ ID NO: 189742 - DNA, 20 bp, Artificial Sequence
  Synthetic oligonucleotide; ATAGAAA chr2 60454291 60454310 60454294 -
aaagccctgcatatttccca

SEQ ID NO: 189743 - DNA, 20 bp, Artificial Sequence
  Synthetic oligonucleotide; AGAGAAA chr2 60454266 60454285 60454269 -
aaataaacgaacccattgtt

SEQ ID NO: 189744 - DNA, 20 bp, Artificial Sequence
  Synthetic oligonucleotide; GTAGAAA chr2 60453822 60453841 60453825 -
tcagatctttcatagggatg

SEQ ID NO: 189745 - DNA, 20 bp, Artificial Sequence
  Synthetic oligonucleotide; TTAGAAT chr2 60453698 60453717 60453701 -
cccatgatatactttgtcta

SEQ ID NO: 189746 - DNA, 20 bp, Artificial Sequence
  Synthetic oligonucleotide; AAAGAAA chr2 60453276 60453295 60453279 -
attgccttcccccttccaaa

SEQ ID NO: 189747 - DNA, 20 bp, Artificial Sequence
  Synthetic oligonucleotide; AAAGAAA chr2 60453271 60453290 60453274 -
cttcccccttccaaaaaaga

SEQ ID NO: 189748 - DNA, 20 bp, Artificial Sequence
  Synthetic oligonucleotide; AAAGAAA chr2 60453252 60453271 60453255 -
aaaagaaaactgcatgtttg

SEQ ID NO: 189749 - DNA, 20 bp, Artificial Sequence
  Synthetic oligonucleotide; ACAGAAA chr2 60452739 60452758 60452742 -
tttaaaaagctagttagaga

SEQ ID NO: 189750 - DNA, 20 bp, Artificial Sequence
  Synthetic oligonucleotide; TGAGAAA chr2 60452578 60452597 60452581 -
gctcgagagcccttaagttc

SEQ ID NO: 189751 - DNA, 20 bp, Artificial Sequence
  Synthetic oligonucleotide; TGAGAAA chr2 60452039 60452058 60452042 -
gtgggtaggaggaacagatt

SEQ ID NO: 189752 - DNA, 20 bp, Artificial Sequence
  Synthetic oligonucleotide; GGAGAAT chr2 60451972 60451991 60451975 -
cagatggcataaattttcaa

SEQ ID NO: 189753 - DNA, 20 bp, Artificial Sequence
  Synthetic oligonucleotide; TTAGAAA chr2 60451504 60451523 60451507 -
tcacagcaatgctctattcc

SEQ ID NO: 189754 - DNA, 20 bp, Artificial Sequence
  Synthetic oligonucleotide; AGAGAAT chr2 60451383 60451402 60451386 -
ttactgcttggagatccaga

SEQ ID NO: 189755 - DNA, 20 bp, Artificial Sequence
  Synthetic oligonucleotide; TTAGAAA chr2 60451377 60451396 60451380 -
cttggagatccagaagagaa

SEQ ID NO: 189756 - DNA, 20 bp, Artificial Sequence
  Synthetic oligonucleotide; AGAGAAA chr2 60451019 60451038 60451022 -
ccagaggccacatcagtaag

SEQ ID NO: 189757 - DNA, 20 bp, Artificial Sequence
  Synthetic oligonucleotide; TGAGAAA chr2 60450806 60450825 60450809 -
ctaccaacagatgtgtgcac

SEQ ID NO: 189758 - DNA, 20 bp, Artificial Sequence
  Synthetic oligonucleotide; AAAGAAA chr2 60450667 60450686 60450670 -
cagacaagaagttatttcat

SEQ ID NO: 189759 - DNA, 20 bp, Artificial Sequence
  Synthetic oligonucleotide; CTAGAAA chr2 60450556 60450575 60450559 -
gctgaactccttgctgatgc

SEQ ID NO: 189760 - DNA, 20 bp, Artificial Sequence
  Synthetic oligonucleotide; ACAGAAT chr2 60450212 60450231 60450215 -
aagacaacaaaaatttattt

SEQ ID NO: 189761 - DNA, 20 bp, Artificial Sequence
  Synthetic oligonucleotide; ACAGAAT chr2 60450143 60450162 60450146 -
tttttttttttttttttaag

SEQ ID NO: 189762 - DNA, 20 bp, Artificial Sequence
  Synthetic oligonucleotide; TTAGAAT chr2 60449213 60449232 60449216 -
cactgtataaaaaaggtctg

SEQ ID NO: 189763 - DNA, 20 bp, Artificial Sequence
  Synthetic oligonucleotide; AGAGAAA chr2 60449190 60449209 60449193 -
gaattggggtccatgatggg

SEQ ID NO: 189764 - DNA, 20 bp, Artificial Sequence
  Synthetic oligonucleotide; TGAGAAA chr2 60449128 60449147 60449131 -
atgttgaatatcagcctgtt

SEQ ID NO: 189765 - DNA, 20 bp, Artificial Sequence
  Synthetic oligonucleotide; AAAGAAA chr2 60449093 60449112 60449096 -
tcaaaaaccagtgatcattt

SEQ ID NO: 189766 - DNA, 20 bp, Artificial Sequence
  Synthetic oligonucleotide; TTAGAAT chr2 60448787 60448806 60448790 -
ccccggaagtaatagtagga

SEQ ID NO: 189767 - DNA, 20 bp, Artificial Sequence
  Synthetic oligonucleotide; AGAGAAA chr2 60448598 60448617 60448601 -
atcttgagttcctaaccagc

SEQ ID NO: 189768 - DNA, 20 bp, Artificial Sequence
  Synthetic oligonucleotide; ATAGAAT chr2 60448363 60448382 60448366 -
ccaggaagtacttaagcttt

SEQ ID NO: 189769 - DNA, 20 bp, Artificial Sequence
  Synthetic oligonucleotide; ATAGAAT chr2 60448341 60448360 60448344 -
agaatacttttatatacatg

SEQ ID NO: 189770 - DNA, 20 bp, Artificial Sequence
  Synthetic oligonucleotide; TAAGAAA chr2 60448305 60448324 60448308 -
ttgtgattctataaattaga

SEQ ID NO: 189771 - DNA, 20 bp, Artificial Sequence
  Synthetic oligonucleotide; AAAGAAT chr2 60448300 60448319 60448303 -
attctataaattagataaga

SEQ ID NO: 189772 - DNA, 20 bp, Artificial Sequence
  Synthetic oligonucleotide; TCAGAAT chr2 60448249 60448268 60448252 -
gtaatcactcattttagaga

SEQ ID NO: 189773 - DNA, 20 bp, Artificial Sequence
  Synthetic oligonucleotide; AAAAAC chr2 60448440 60448459 60448456 +
cctaatttaaactaagatag

SEQ ID NO: 189774 - DNA, 20 bp, Artificial Sequence
  Synthetic oligonucleotide; CAAAAC chr2 60448907 60448926 60448923 +
aaaaatcatgtcaacgcata

SEQ ID NO: 189775 - DNA, 20 bp, Artificial Sequence
  Synthetic oligonucleotide; AAAAAC chr2 60449578 60449597 60449594 +
cacaaaaggcttgggaaagt

SEQ ID NO: 189776 - DNA, 20 bp, Artificial Sequence
  Synthetic oligonucleotide; TAAAAC chr2 60450291 60450310 60450307 +
cttctccacagtgaagagga

SEQ ID NO: 189777 - DNA, 20 bp, Artificial Sequence
  Synthetic oligonucleotide; GAAAAC chr2 60450973 60450992 60450989 +
tagctctggacaagaaacca

SEQ ID NO: 189778 - DNA, 20 bp, Artificial Sequence
  Synthetic oligonucleotide; AAAAAC chr2 60451786 60451805 60451802 +
ccaccaaaagcatatatttg

SEQ ID NO: 189779 - DNA, 20 bp, Artificial Sequence
  Synthetic oligonucleotide; GAAAAC chr2 60451855 60451874 60451871 +
attataagtcagacagttag

SEQ ID NO: 189780 - DNA, 20 bp, Artificial Sequence
  Synthetic oligonucleotide; GAAAAC chr2 60452465 60452484 60452481 +
cttcttggaggctactgtca

SEQ ID NO: 189781 - DNA, 20 bp, Artificial Sequence
  Synthetic oligonucleotide; GAAAAC chr2 60452586 60452605 60452602 +
gggctctcgagcttccatcc

SEQ ID NO: 189782 - DNA, 20 bp, Artificial Sequence
  Synthetic oligonucleotide; GAAAAC chr2 60452965 60452984 60452981 +
acacttgcccttatgactga

SEQ ID NO: 189783 - DNA, 20 bp, Artificial Sequence
  Synthetic oligonucleotide; CAAAAC chr2 60453071 60453090 60453087 +
attataaagaaacaaaaaat

SEQ ID NO: 189784 - DNA, 20 bp, Artificial Sequence
  Synthetic oligonucleotide; GAAAAC chr2 60453097 60453116 60453113 +
tgatgtaaaagcagcacaac

SEQ ID NO: 189785 - DNA, 20 bp, Artificial Sequence
  Synthetic oligonucleotide; GAAAAC chr2 60453171 60453190 60453187 +
ggcgaacaaatctctgaaga

SEQ ID NO: 189786 - DNA, 20 bp, Artificial Sequence
  Synthetic oligonucleotide; AAAAAC chr2 60453210 60453229 60453226 +
agttgctctcaaattgcacc

SEQ ID NO: 189787 - DNA, 20 bp, Artificial Sequence
  Synthetic oligonucleotide; AAAAAC chr2 60453866 60453885 60453882 +
tttgccactttacagaaagg

SEQ ID NO: 189788 - DNA, 20 bp, Artificial Sequence
  Synthetic oligonucleotide; TAAAAC chr2 60454590 60454609 60454606 +
acggagggggaaaagaggct

SEQ ID NO: 189789 - DNA, 20 bp, Artificial Sequence
  Synthetic oligonucleotide; GAAAAC chr2 60454598 60454617 60454614 +
ggaaaagaggcttaaaacaa

SEQ ID NO: 189790 - DNA, 20 bp, Artificial Sequence
  Synthetic oligonucleotide; AAAAAC chr2 60454906 60454925 60454922 +
tatctacagaatgccctggg

SEQ ID NO: 189791 - DNA, 20 bp, Artificial Sequence
  Synthetic oligonucleotide; AAAAAC chr2 60455219 60455238 60455235 +
cagcacgtcaagcctgttac

SEQ ID NO: 189792 - DNA, 20 bp, Artificial Sequence
  Synthetic oligonucleotide; CAAAAC chr2 60455645 60455664 60455661 +
taattctgtctgtcaggatg

SEQ ID NO: 189793 - DNA, 20 bp, Artificial Sequence
  Synthetic oligonucleotide; TAAAAC chr2 60455703 60455722 60455719 +
attaaaatgaatactgtata

SEQ ID NO: 189794 - DNA, 20 bp, Artificial Sequence
  Synthetic oligonucleotide; CAAAAC chr2 60455884 60455903 60455900 +
agttttggagaaacctaatc

SEQ ID NO: 189795 - DNA, 20 bp, Artificial Sequence
  Synthetic oligonucleotide; GAAAAC chr2 60456048 60456067 60456064 +
ccacccaaactggcttttca

SEQ ID NO: 189796 - DNA, 20 bp, Artificial Sequence
  Synthetic oligonucleotide; TAAAAC chr2 60456081 60456100 60456097 +
ttctttatactttagaaaga

SEQ ID NO: 189797 - DNA, 20 bp, Artificial Sequence
  Synthetic oligonucleotide; CAAAAC chr2 60456436 60456455 60456452 +
gtcatccaggaagaccctat

SEQ ID NO: 189798 - DNA, 20 bp, Artificial Sequence
  Synthetic oligonucleotide; CAAAAC chr2 60456617 60456636 60456633 +
ttttctccctcttttttaaa

SEQ ID NO: 189799 - DNA, 20 bp, Artificial Sequence
  Synthetic oligonucleotide; CAAAAC chr2 60456622 60456641 60456638 +
tccctcttttttaaacaaaa

SEQ ID NO: 189800 - DNA, 20 bp, Artificial Sequence
  Synthetic oligonucleotide; CAAAAC chr2 60456627 60456646 60456643 +
cttttttaaacaaaacaaaa

SEQ ID NO: 189801 - DNA, 20 bp, Artificial Sequence
  Synthetic oligonucleotide; CAAAAC chr2 60456632 60456651 60456648 +
ttaaacaaaacaaaacaaaa

SEQ ID NO: 189802 - DNA, 20 bp, Artificial Sequence
  Synthetic oligonucleotide; CAAAAC chr2 60456637 60456656 60456653 +
caaaacaaaacaaaacaaaa

SEQ ID NO: 189803 - DNA, 20 bp, Artificial Sequence
  Synthetic oligonucleotide; GAAAAC chr2 60456930 60456949 60456946 +
taagtttttaacatcagact

SEQ ID NO: 189804 - DNA, 20 bp, Artificial Sequence
  Synthetic oligonucleotide; GAAAAC chr2 60456950 60456969 60456966 +
gaaaacaccttccatttctt

SEQ ID NO: 189805 - DNA, 20 bp, Artificial Sequence
  Synthetic oligonucleotide; TAAAAC chr2 60456976 60456995 60456992 +
tattctaaactggaaagcct

SEQ ID NO: 189806 - DNA, 20 bp, Artificial Sequence
  Synthetic oligonucleotide; TAAAAC chr2 60457105 60457124 60457121 +
aagactgactggccttctct

SEQ ID NO: 189807 - DNA, 20 bp, Artificial Sequence
  Synthetic oligonucleotide; AAAAAC chr2 60457251 60457270 60457267 +
ttaatgcagacaactgccaa

SEQ ID NO: 189808 - DNA, 20 bp, Artificial Sequence
  Synthetic oligonucleotide; AAAAAC chr2 60457359 60457378 60457375 +
atctaaataaaaaaaaaaat

SEQ ID NO: 189809 - DNA, 20 bp, Artificial Sequence
  Synthetic oligonucleotide; AAAAAC chr2 60457632 60457651 60457648 +
atttagtttttggcaatgaa

SEQ ID NO: 189810 - DNA, 20 bp, Artificial Sequence
  Synthetic oligonucleotide; CAAAAC chr2 60457640 60457659 60457656 +
tttggcaatgaaaaaaactg

SEQ ID NO: 189811 - DNA, 20 bp, Artificial Sequence
  Synthetic oligonucleotide; AAAAAC chr2 60458862 60458881 60458878 +
aaaattaaaaaaataaaaat

SEQ ID NO: 189812 - DNA, 20 bp, Artificial Sequence
  Synthetic oligonucleotide; TAAAAC chr2 60459376 60459395 60459392 +
taatcattgtttaaaaaaaa

SEQ ID NO: 189813 - DNA, 20 bp, Artificial Sequence
  Synthetic oligonucleotide; CAAAAC chr2 60459388 60459407 60459404 +
aaaaaaaataaaactttggg

SEQ ID NO: 189814 - DNA, 20 bp, Artificial Sequence
  Synthetic oligonucleotide; TAAAAC chr2 60459669 60459688 60459685 +
gatccaaggcactcatattt

SEQ ID NO: 189815 - DNA, 20 bp, Artificial Sequence
  Synthetic oligonucleotide; TAAAAC chr2 60459866 60459885 60459882 +
ttcctcctcacgttataaaa

SEQ ID NO: 189816 - DNA, 20 bp, Artificial Sequence
  Synthetic oligonucleotide; AAAAAC chr2 60460036 60460055 60460052 +
catgctgtctaagtttaaaa

SEQ ID NO: 189817 - DNA, 20 bp, Artificial Sequence
  Synthetic oligonucleotide; AAAAAC chr2 60460193 60460212 60460209 +
aaaagaaaaagaaaaagaaa

SEQ ID NO: 189818 - DNA, 20 bp, Artificial Sequence
  Synthetic oligonucleotide; AAAAAC chr2 60463166 60463185 60463182 +
atgtttaaaaaatctgaaag

SEQ ID NO: 189819 - DNA, 20 bp, Artificial Sequence
  Synthetic oligonucleotide; TAAAAC chr2 60463310 60463329 60463326 +
atcctagtttaaggaacagt

SEQ ID NO: 189820 - DNA, 20 bp, Artificial Sequence
  Synthetic oligonucleotide; AAAAAC chr2 60463758 60463777 60463774 +
agccaaaggacgaggatgag

SEQ ID NO: 189821 - DNA, 20 bp, Artificial Sequence
  Synthetic oligonucleotide; CAAAAC chr2 60463763 60463782 60463779 +
aaggacgaggatgagaaaaa

SEQ ID NO: 189822 - DNA, 20 bp, Artificial Sequence
  Synthetic oligonucleotide; GAAAAC chr2 60464247 60464266 60464263 +
aaggcagaaagattttgaaa

SEQ ID NO: 189823 - DNA, 20 bp, Artificial Sequence
  Synthetic oligonucleotide; AAAAAC chr2 60464392 60464411 60464408 +
ggtcccaaataggctggaaa

SEQ ID NO: 189824 - DNA, 20 bp, Artificial Sequence
  Synthetic oligonucleotide; TAAAAC chr2 60464578 60464597 60464594 +
taaaattatattttacctta

SEQ ID NO: 189825 - DNA, 20 bp, Artificial Sequence
  Synthetic oligonucleotide; AAAAAC chr2 60465689 60465708 60465705 +
cctatctgtaaaatgagcat

SEQ ID NO: 189826 - DNA, 20 bp, Artificial Sequence
  Synthetic oligonucleotide; AAAAAC chr2 60466682 60466701 60466698 +
gtgtcatctccctcccatct

SEQ ID NO: 189827 - DNA, 20 bp, Artificial Sequence
  Synthetic oligonucleotide; TAAAAC chr2 60466947 60466966 60466963 +
aagcaaactgtattattttc

SEQ ID NO: 189828 - DNA, 20 bp, Artificial Sequence
  Synthetic oligonucleotide; GAAAAC chr2 60466964 60466983 60466980 +
ttctaaaacagtatctttca

SEQ ID NO: 189829 - DNA, 20 bp, Artificial Sequence
  Synthetic oligonucleotide; TAAAAC chr2 60468184 60468203 60468200 +
caatgatgtgcatttttctc

SEQ ID NO: 189830 - DNA, 20 bp, Artificial Sequence
  Synthetic oligonucleotide; GAAAAC chr2 60469140 60469159 60469156 +
agatgtgtaagcagcaaggg

SEQ ID NO: 189831 - DNA, 20 bp, Artificial Sequence
  Synthetic oligonucleotide; AAAAAC chr2 60469890 60469909 60469906 +
tggggagggcgggagacaag

SEQ ID NO: 189832 - DNA, 20 bp, Artificial Sequence
  Synthetic oligonucleotide; CAAAAC chr2 60470224 60470243 60470240 +
acatttcatcctctctgacc

SEQ ID NO: 189833 - DNA, 20 bp, Artificial Sequence
  Synthetic oligonucleotide; CAAAAC chr2 60470434 60470453 60470450 +
ccgttcactaagtttgctgc

SEQ ID NO: 189834 - DNA, 20 bp, Artificial Sequence
  Synthetic oligonucleotide; AAAAAC chr2 60470815 60470834 60470831 +
tttttgttttctaagttgta

SEQ ID NO: 189835 - DNA, 20 bp, Artificial Sequence
  Synthetic oligonucleotide; GAAAAC chr2 60471148 60471167 60471164 +
ctgacttggtctcacaattg

SEQ ID NO: 189836 - DNA, 20 bp, Artificial Sequence
  Synthetic oligonucleotide; AAAAAC chr2 60471241 60471260 60471257 +
ccctgcagaattagacagct

SEQ ID NO: 189837 - DNA, 20 bp, Artificial Sequence
  Synthetic oligonucleotide; AAAAAC chr2 60472058 60472077 60472074 +
cctttaggactggaacagtc

SEQ ID NO: 189838 - DNA, 20 bp, Artificial Sequence
  Synthetic oligonucleotide; CAAAAC chr2 60472832 60472851 60472848 +
ctgcagatttccaaatgtgc

SEQ ID NO: 189839 - DNA, 20 bp, Artificial Sequence
  Synthetic oligonucleotide; TAAAAC chr2 60472905 60472924 60472921 +
agcccaactttaacaggtat

SEQ ID NO: 189840 - DNA, 20 bp, Artificial Sequence
  Synthetic oligonucleotide; AAAAAC chr2 60473933 60473952 60473949 +
ctttaaaaagtgtattctgc

SEQ ID NO: 189841 - DNA, 20 bp, Artificial Sequence
  Synthetic oligonucleotide; TAAAAC chr2 60474056 60474075 60474072 +
ataacatcaatcactcattt

SEQ ID NO: 189842 - DNA, 20 bp, Artificial Sequence
  Synthetic oligonucleotide; GAAAAC chr2 60474805 60474824 60474821 +
gccgctgtgggcagtacaaa

SEQ ID NO: 189843 - DNA, 20 bp, Artificial Sequence
  Synthetic oligonucleotide; GAAAAC chr2 60474994 60475013 60475010 +
agagaggctttgggaaagag

SEQ ID NO: 189844 - DNA, 20 bp, Artificial Sequence
  Synthetic oligonucleotide; GAAAAC chr2 60477419 60477438 60477435 +
aaatactagaataagctaaa

SEQ ID NO: 189845 - DNA, 20 bp, Artificial Sequence
  Synthetic oligonucleotide; TAAAAC chr2 60478562 60478581 60478578 +
aactggccattctccagaat

SEQ ID NO: 189846 - DNA, 20 bp, Artificial Sequence
  Synthetic oligonucleotide; TAAAAC chr2 60478686 60478705 60478702 +
ctctaacatttcttcaggaa

SEQ ID NO: 189847 - DNA, 20 bp, Artificial Sequence
  Synthetic oligonucleotide; GAAAAC chr2 60478786 60478805 60478802 +
gacggcaagtccttctttca

SEQ ID NO: 189848 - DNA, 20 bp, Artificial Sequence
  Synthetic oligonucleotide; CAAAAC chr2 60478910 60478929 60478926 +
tctggcaaagtcccacagaa

SEQ ID NO: 189849 - DNA, 20 bp, Artificial Sequence
  Synthetic oligonucleotide; CAAAAC chr2 60481169 60481188 60481185 +
agattgaggcttcccagccc

SEQ ID NO: 189850 - DNA, 20 bp, Artificial Sequence
  Synthetic oligonucleotide; GAAAAC chr2 60481294 60481313 60481310 +
agagaaacaagtaactcctt

SEQ ID NO: 189851 - DNA, 20 bp, Artificial Sequence
  Synthetic oligonucleotide; AAAAAC chr2 60481329 60481348 60481345 +
gcagggatcctaggaaaagt

SEQ ID NO: 189852 - DNA, 20 bp, Artificial Sequence
  Synthetic oligonucleotide; GAAAAC chr2 60482674 60482693 60482690 +
aaggttaagatcagcttcct

SEQ ID NO: 189853 - DNA, 20 bp, Artificial Sequence
  Synthetic oligonucleotide; GAAAAC chr2 60483015 60483034 60483031 +
tactgataaaggcactgcaa

SEQ ID NO: 189854 - DNA, 20 bp, Artificial Sequence
  Synthetic oligonucleotide; TAAAAC chr2 60483680 60483699 60483696 +
ggattacagtaaggaaaatc

SEQ ID NO: 189855 - DNA, 20 bp, Artificial Sequence
  Synthetic oligonucleotide; AAAAAC chr2 60484438 60484457 60484454 +
aactggggtcctctgctgtc

SEQ ID NO: 189856 - DNA, 20 bp, Artificial Sequence
  Synthetic oligonucleotide; TAAAAC chr2 60484763 60484782 60484779 +
cccttatcaccattccagta

SEQ ID NO: 189857 - DNA, 20 bp, Artificial Sequence
  Synthetic oligonucleotide; AAAAAC chr2 60484957 60484976 60484973 +
aggacttaaaaaaaaaaaaa

SEQ ID NO: 189858 - DNA, 20 bp, Artificial Sequence
  Synthetic oligonucleotide; AAAAAC chr2 60484977 60484996 60484993 +
aaaaaccaaccaaccaaaca

SEQ ID NO: 189859 - DNA, 20 bp, Artificial Sequence
  Synthetic oligonucleotide; AAAAAC chr2 60485010 60485029 60485026 +
aaatcaaaataggaaataca

SEQ ID NO: 189860 - DNA, 20 bp, Artificial Sequence
  Synthetic oligonucleotide; AAAAAC chr2 60485445 60485464 60485461 +
catgcctttaagctaactgc

SEQ ID NO: 189861 - DNA, 20 bp, Artificial Sequence
  Synthetic oligonucleotide; GAAAAC chr2 60485525 60485544 60485541 +
gaaaaataaacctagacctg

SEQ ID NO: 189862 - DNA, 20 bp, Artificial Sequence
  Synthetic oligonucleotide; AAAAAC chr2 60485572 60485591 60485588 +
caatcaactcatttaaaaag

SEQ ID NO: 189863 - DNA, 20 bp, Artificial Sequence
  Synthetic oligonucleotide; GAAAAC chr2 60486416 60486435 60486432 +
tactgaagtgagaaattcaa

SEQ ID NO: 189864 - DNA, 20 bp, Artificial Sequence
  Synthetic oligonucleotide; TAAAAC chr2 60487210 60487229 60487226 +
taagataatttgatatccta

SEQ ID NO: 189865 - DNA, 20 bp, Artificial Sequence
  Synthetic oligonucleotide; GAAAAC chr2 60487528 60487547 60487544 +
aatacagattcagattaagg

SEQ ID NO: 189866 - DNA, 20 bp, Artificial Sequence
  Synthetic oligonucleotide; CAAAAC chr2 60487561 60487580 60487577 +
tgcctttataaaatccagaa

SEQ ID NO: 189867 - DNA, 20 bp, Artificial Sequence
  Synthetic oligonucleotide; CAAAAC chr2 60487566 60487585 60487582 +
ttataaaatccagaacaaaa

SEQ ID NO: 189868 - DNA, 20 bp, Artificial Sequence
  Synthetic oligonucleotide; GAAAAC chr2 60487780 60487799 60487796 +
taaggaagctgcagaaaggt

SEQ ID NO: 189869 - DNA, 20 bp, Artificial Sequence
  Synthetic oligonucleotide; AAAAAC chr2 60488052 60488071 60488068 +
ttacttttgacctgggtttt

SEQ ID NO: 189870 - DNA, 20 bp, Artificial Sequence
  Synthetic oligonucleotide; TAAAAC chr2 60488608 60488627 60488624 +
tgtactgcaggggaattcgg

SEQ ID NO: 189871 - DNA, 20 bp, Artificial Sequence
  Synthetic oligonucleotide; AAAAAC chr2 60488682 60488701 60488698 +
gtatcaatagccaaagatcc

SEQ ID NO: 189872 - DNA, 20 bp, Artificial Sequence
  Synthetic oligonucleotide; CAAAAC chr2 60488708 60488727 60488724 +
agcctaaagccactgctacc

SEQ ID NO: 189873 - DNA, 20 bp, Artificial Sequence
  Synthetic oligonucleotide; CAAAAC chr2 60489045 60489064 60489061 +
ctaccacacccagccatacc

SEQ ID NO: 189874 - DNA, 20 bp, Artificial Sequence
  Synthetic oligonucleotide; AAAAAC chr2 60491221 60491240 60491237 +
aatgcaaaaagctaagttct

SEQ ID NO: 189875 - DNA, 20 bp, Artificial Sequence
  Synthetic oligonucleotide; CAAAAC chr2 60491732 60491751 60491748 +
gctgggctgactgcccacgt

SEQ ID NO: 189876 - DNA, 20 bp, Artificial Sequence
  Synthetic oligonucleotide; AAAAAC chr2 60491972 60491991 60491988 +
gagaggaagatggatgtagg

SEQ ID NO: 189877 - DNA, 20 bp, Artificial Sequence
  Synthetic oligonucleotide; AAAAAC chr2 60491978 60491997 60491994 +
aagatggatgtaggaaaaac

SEQ ID NO: 189878 - DNA, 20 bp, Artificial Sequence
  Synthetic oligonucleotide; AAAAAC chr2 60492347 60492366 60492363 +
acacagcgagaccctgtctc

SEQ ID NO: 189879 - DNA, 20 bp, Artificial Sequence
  Synthetic oligonucleotide; AAAAAC chr2 60492422 60492441 60492438 +
aatgtatttctagggaagaa

SEQ ID NO: 189880 - DNA, 20 bp, Artificial Sequence
  Synthetic oligonucleotide; GAAAAC chr2 60492481 60492500 60492497 +
gaagcctgctggaattctag

SEQ ID NO: 189881 - DNA, 20 bp, Artificial Sequence
  Synthetic oligonucleotide; CAAAAC chr2 60493529 60493548 60493545 +
gaaatgatgggaagagaccc

SEQ ID NO: 189882 - DNA, 20 bp, Artificial Sequence
  Synthetic oligonucleotide; GAAAAC chr2 60494050 60494069 60494066 +
tgcaagggggagaaactgaa

SEQ ID NO: 189883 - DNA, 20 bp, Artificial Sequence
  Synthetic oligonucleotide; GAAAAC chr2 60495750 60495769 60495766 +
atacacacaaaaggtacctg

SEQ ID NO: 189884 - DNA, 20 bp, Artificial Sequence
  Synthetic oligonucleotide; AAAAAC chr2 60495809 60495828 60495825 +
caataccccttcccccaacc

SEQ ID NO: 189885 - DNA, 20 bp, Artificial Sequence
  Synthetic oligonucleotide; TAAAAC chr2 60495949 60495968 60495965 +
cactattcttagctattttt

SEQ ID NO: 189886 - DNA, 20 bp, Artificial Sequence
  Synthetic oligonucleotide; GAAAAC chr2 60496147 60496166 60496163 +
gaattgttcatgaaatccca

SEQ ID NO: 189887 - DNA, 20 bp, Artificial Sequence
  Synthetic oligonucleotide; AAAAAC chr2 60496180 60496199 60496196 +
gggaaagttctggaagtcgg

SEQ ID NO: 189888 - DNA, 20 bp, Artificial Sequence
  Synthetic oligonucleotide; TAAAAC chr2 60497280 60497299 60497296 +
agaggggggaaaatcttttg

SEQ ID NO: 189889 - DNA, 20 bp, Artificial Sequence
  Synthetic oligonucleotide; GAAAAC chr2 60500166 60500185 60500182 +
ctgcggctgtgccctggatg

SEQ ID NO: 189890 - DNA, 20 bp, Artificial Sequence
  Synthetic oligonucleotide; GAAAAC chr2 60501843 60501862 60501859 +
cacataaaaatttaagacgg

SEQ ID NO: 189891 - DNA, 20 bp, Artificial Sequence
  Synthetic oligonucleotide; CAAAAC chr2 60501900 60501919 60501916 +
ccctctgcctctctacattc

SEQ ID NO: 189892 - DNA, 20 bp, Artificial Sequence
  Synthetic oligonucleotide; GAAAAC chr2 60502082 60502101 60502098 +
ctgtaccaccagaagtcctg

SEQ ID NO: 189893 - DNA, 20 bp, Artificial Sequence
  Synthetic oligonucleotide; TAAAAC chr2 60502378 60502397 60502394 +
cggaaaaagtctcagcctaa

SEQ ID NO: 189894 - DNA, 20 bp, Artificial Sequence
  Synthetic oligonucleotide; TAAAAC chr2 60502676 60502695 60502692 +
taatgttcttgatatgttaa

SEQ ID NO: 189895 - DNA, 20 bp, Artificial Sequence
  Synthetic oligonucleotide; AAAAAC chr2 60502703 60502722 60502719 +
gttttcaatcatcatcagag

SEQ ID NO: 189896 - DNA, 20 bp, Artificial Sequence
  Synthetic oligonucleotide; CAAAAC chr2 60503010 60503029 60503026 +
ggatggctactggcttggag

SEQ ID NO: 189897 - DNA, 20 bp, Artificial Sequence
  Synthetic oligonucleotide; AAAAAC chr2 60503330 60503349 60503346 +
aggcattgtgactttttatt

SEQ ID NO: 189898 - DNA, 20 bp, Artificial Sequence
  Synthetic oligonucleotide; CAAAAC chr2 60503985 60504004 60504001 +
gtattaaggcccaacccagc

SEQ ID NO: 189899 - DNA, 20 bp, Artificial Sequence
  Synthetic oligonucleotide; TAAAAC chr2 60504867 60504886 60504883 +
gcttccttgctccaaactat

SEQ ID NO: 189900 - DNA, 20 bp, Artificial Sequence
  Synthetic oligonucleotide; AAAAAC chr2 60504888 60504907 60504904 +
aaaacagagcgtccccccaa

SEQ ID NO: 189901 - DNA, 20 bp, Artificial Sequence
  Synthetic oligonucleotide; CAAAAC chr2 60505848 60505867 60505864 +
agggagggggaaatccctcc

SEQ ID NO: 189902 - DNA, 20 bp, Artificial Sequence
  Synthetic oligonucleotide; GAAAAC chr2 60506365 60506384 60506381 +
tctggtctgtcaaacccctg

SEQ ID NO: 189903 - DNA, 20 bp, Artificial Sequence
  Synthetic oligonucleotide; CAAAAC chr2 60506553 60506572 60506569 +
ccaggaaagccctggctata

SEQ ID NO: 189904 - DNA, 20 bp, Artificial Sequence
  Synthetic oligonucleotide; GAAAAC chr2 60506622 60506641 60506638 +
tgataaaggcagctcactaa

SEQ ID NO: 189905 - DNA, 20 bp, Artificial Sequence
  Synthetic oligonucleotide; CAAAAC chr2 60506809 60506828 60506825 +
tgatttcattatagcctctg

SEQ ID NO: 189906 - DNA, 20 bp, Artificial Sequence
  Synthetic oligonucleotide; AAAAAC chr2 60507105 60507124 60507121 +
tcataaacaagcactattaa

SEQ ID NO: 189907 - DNA, 20 bp, Artificial Sequence
  Synthetic oligonucleotide; GAAAAC chr2 60507399 60507418 60507415 +
ttgcctttcttgaaaagcta

SEQ ID NO: 189908 - DNA, 20 bp, Artificial Sequence
  Synthetic oligonucleotide; CAAAAC chr2 60507411 60507430 60507427 +
aaaagctagaaaactgtgtc

SEQ ID NO: 189909 - DNA, 20 bp, Artificial Sequence
  Synthetic oligonucleotide; TAAAAC chr2 60507476 60507495 60507492 +
tccgttcaagccagaaaagt

SEQ ID NO: 189910 - DNA, 20 bp, Artificial Sequence
  Synthetic oligonucleotide; AAAAAC chr2 60507778 60507797 60507794 +
gcggggagaagggaagaagt

SEQ ID NO: 189911 - DNA, 20 bp, Artificial Sequence
  Synthetic oligonucleotide; AAAAAC chr2 60508223 60508242 60508239 +
caacaacaaattacacaaat

SEQ ID NO: 189912 - DNA, 20 bp, Artificial Sequence
  Synthetic oligonucleotide; CAAAAC chr2 60508576 60508595 60508592 +
agcatttggcaggcaaagga

SEQ ID NO: 189913 - DNA, 20 bp, Artificial Sequence
  Synthetic oligonucleotide; GAAAAC chr2 60509411 60509430 60509427 +
agagccacacggacgtctca

SEQ ID NO: 189914 - DNA, 20 bp, Artificial Sequence
  Synthetic oligonucleotide; GAAAAC chr2 60509542 60509561 60509558 +
atggtctacctgagacctga

SEQ ID NO: 189915 - DNA, 20 bp, Artificial Sequence
  Synthetic oligonucleotide; AAAAAC chr2 60509668 60509687 60509684 +
aaaaagattaggaggaggag

SEQ ID NO: 189916 - DNA, 20 bp, Artificial Sequence
  Synthetic oligonucleotide; TAAAAC chr2 60510747 60510766 60510763 +
gccactcaatgccatatcta

SEQ ID NO: 189917 - DNA, 20 bp, Artificial Sequence
  Synthetic oligonucleotide; TAAAAC chr2 60510914 60510933 60510930 +
aacccttgacaggagccagt

SEQ ID NO: 189918 - DNA, 20 bp, Artificial Sequence
  Synthetic oligonucleotide; TAAAAC chr2 60511414 60511433 60511430 +
ccactcttttccgttaccaa

SEQ ID NO: 189919 - DNA, 20 bp, Artificial Sequence
  Synthetic oligonucleotide; CAAAAC chr2 60511574 60511593 60511590 +
aacagagcgctaatctgatt

SEQ ID NO: 189920 - DNA, 20 bp, Artificial Sequence
  Synthetic oligonucleotide; GAAAAC chr2 60511657 60511676 60511673 +
tacatgttgcaccatttcat

SEQ ID NO: 189921 - DNA, 20 bp, Artificial Sequence
  Synthetic oligonucleotide; GAAAAC chr2 60512621 60512640 60512637 +
tctaaattatttggtctaaa

SEQ ID NO: 189922 - DNA, 20 bp, Artificial Sequence
  Synthetic oligonucleotide; CAAAAC chr2 60513900 60513919 60513916 +
tgttcctggcttgtggtgag

SEQ ID NO: 189923 - DNA, 20 bp, Artificial Sequence
  Synthetic oligonucleotide; TAAAAC chr2 60514839 60514858 60514855 +
ggtcttgcatacacatacac

SEQ ID NO: 189924 - DNA, 20 bp, Artificial Sequence
  Synthetic oligonucleotide; TAAAAC chr2 60515404 60515423 60515420 +
caccaagaaggcacaaaaaa

SEQ ID NO: 189925 - DNA, 20 bp, Artificial Sequence
  Synthetic oligonucleotide; TAAAAC chr2 60516266 60516285 60516282 +
caatgacccactcctattat

SEQ ID NO: 189926 - DNA, 20 bp, Artificial Sequence
  Synthetic oligonucleotide; CAAAAC chr2 60516342 60516361 60516358 +
gaatctgggctccgctcttc

SEQ ID NO: 189927 - DNA, 20 bp, Artificial Sequence
  Synthetic oligonucleotide; GAAAAC chr2 60516796 60516815 60516812 +
acataagactaaagaatgtg

SEQ ID NO: 189928 - DNA, 20 bp, Artificial Sequence
  Synthetic oligonucleotide; GAAAAC chr2 60516863 60516882 60516879 +
atgtttgagtaaaagagctg

SEQ ID NO: 189929 - DNA, 20 bp, Artificial Sequence
  Synthetic oligonucleotide; GAAAAC chr2 60517372 60517391 60517388 +
cagccccgaaaaagggcaga

SEQ ID NO: 189930 - DNA, 20 bp, Artificial Sequence
  Synthetic oligonucleotide; TAAAAC chr2 60517929 60517948 60517945 +
gaggaacaagaaccttactc

SEQ ID NO: 189931 - DNA, 20 bp, Artificial Sequence
  Synthetic oligonucleotide; CAAAAC chr2 60518092 60518111 60518108 +
gaccagcctgggcaacatag

SEQ ID NO: 189932 - DNA, 20 bp, Artificial Sequence
  Synthetic oligonucleotide; TAAAAC chr2 60518265 60518284 60518281 +
tgctgagctctcataataca

SEQ ID NO: 189933 - DNA, 20 bp, Artificial Sequence
  Synthetic oligonucleotide; TAAAAC chr2 60519284 60519303 60519300 +
aacctccatattgagagaca

SEQ ID NO: 189934 - DNA, 20 bp, Artificial Sequence
  Synthetic oligonucleotide; AAAAAC chr2 60519387 60519406 60519403 +
tgatgtgaaagttaaagatt

SEQ ID NO: 189935 - DNA, 20 bp, Artificial Sequence
  Synthetic oligonucleotide; GAAAAC chr2 60519806 60519825 60519822 +
taaattactccaatgacaaa

SEQ ID NO: 189936 - DNA, 20 bp, Artificial Sequence
  Synthetic oligonucleotide; CAAAAC chr2 60520327 60520346 60520343 +
gacatgaggtgtgaatgatg

SEQ ID NO: 189937 - DNA, 20 bp, Artificial Sequence
  Synthetic oligonucleotide; AAAAAC chr2 60520800 60520819 60520816 +
gatcagccaccaaccgaacc

SEQ ID NO: 189938 - DNA, 20 bp, Artificial Sequence
  Synthetic oligonucleotide; TAAAAC chr2 60520955 60520974 60520971 +
cctttgtcaacccagcatga

SEQ ID NO: 189939 - DNA, 20 bp, Artificial Sequence
  Synthetic oligonucleotide; TAAAAC chr2 60521322 60521341 60521338 +
gagagagagcggacattttg

SEQ ID NO: 189940 - DNA, 20 bp, Artificial Sequence
  Synthetic oligonucleotide; CAAAAC chr2 60522337 60522356 60522353 +
ttttcttttaaatacaactg

SEQ ID NO: 189941 - DNA, 20 bp, Artificial Sequence
  Synthetic oligonucleotide; TAAAAC chr2 60522937 60522956 60522953 +
agagacagtgaggtctacaa

SEQ ID NO: 189942 - DNA, 20 bp, Artificial Sequence
  Synthetic oligonucleotide; AAAAAC chr2 60523413 60523432 60523429 +
tttctacatggatagctttc

SEQ ID NO: 189943 - DNA, 20 bp, Artificial Sequence
  Synthetic oligonucleotide; CAAAAC chr2 60523717 60523736 60523733 +
caaaatcattcattgccagg

SEQ ID NO: 189944 - DNA, 20 bp, Artificial Sequence
  Synthetic oligonucleotide; TAAAAC chr2 60523949 60523968 60523965 +
ttaaacttcagccagagatc

SEQ ID NO: 189945 - DNA, 20 bp, Artificial Sequence
  Synthetic oligonucleotide; GAAAAC chr2 60524043 60524062 60524059 +
cggaccacaggaactagtgt

SEQ ID NO: 189946 - DNA, 20 bp, Artificial Sequence
  Synthetic oligonucleotide; CAAAAC chr2 60524572 60524591 60524588 +
gcatgcctattaaaaatccc

SEQ ID NO: 189947 - DNA, 20 bp, Artificial Sequence
  Synthetic oligonucleotide; GAAAAC chr2 60524783 60524802 60524799 +
ccctttttcagcatgcttct

SEQ ID NO: 189948 - DNA, 20 bp, Artificial Sequence
  Synthetic oligonucleotide; GAAAAC chr2 60524841 60524860 60524857 +
ggtatttgctggacagtgtg

SEQ ID NO: 189949 - DNA, 20 bp, Artificial Sequence
  Synthetic oligonucleotide; AAAAAC chr2 60525200 60525219 60525216 +
aattcaactatttctttttc

SEQ ID NO: 189950 - DNA, 20 bp, Artificial Sequence
  Synthetic oligonucleotide; AAAAAC chr2 60525290 60525309 60525306 +
attctttggagtttttcaaa

SEQ ID NO: 189951 - DNA, 20 bp, Artificial Sequence
  Synthetic oligonucleotide; GAAAAC chr2 60525553 60525572 60525569 +
attccaaaaaatagcaggga

SEQ ID NO: 189952 - DNA, 20 bp, Artificial Sequence
  Synthetic oligonucleotide; TAAAAC chr2 60526095 60526114 60526111 +
atgatttcactttctagata

SEQ ID NO: 189953 - DNA, 20 bp, Artificial Sequence
  Synthetic oligonucleotide; GAAAAC chr2 60527222 60527241 60527238 +
gattttcaagggaagagaag

SEQ ID NO: 189954 - DNA, 20 bp, Artificial Sequence
  Synthetic oligonucleotide; TAAAAC chr2 60527325 60527344 60527341 +
agtctaggagacccagcaaa

SEQ ID NO: 189955 - DNA, 20 bp, Artificial Sequence
  Synthetic oligonucleotide; GAAAAC chr2 60527805 60527824 60527821 +
tgaaaggatggagaatacag

SEQ ID NO: 189956 - DNA, 20 bp, Artificial Sequence
  Synthetic oligonucleotide; GAAAAC chr2 60527935 60527954 60527951 +
ggagaggccaccacgcagct

SEQ ID NO: 189957 - DNA, 20 bp, Artificial Sequence
  Synthetic oligonucleotide; CAAAAC chr2 60527998 60528017 60528014 +
tgttgactgcagtttccatt

SEQ ID NO: 189958 - DNA, 20 bp, Artificial Sequence
  Synthetic oligonucleotide; GAAAAC chr2 60528067 60528086 60528083 +
agccttgttcagccagaaat

SEQ ID NO: 189959 - DNA, 20 bp, Artificial Sequence
  Synthetic oligonucleotide; TAAAAC chr2 60528332 60528351 60528348 +
accaagccacacacaaacag

SEQ ID NO: 189960 - DNA, 20 bp, Artificial Sequence
  Synthetic oligonucleotide; AAAAAC chr2 60528512 60528531 60528528 +
ttctctttcccagaagattg

SEQ ID NO: 189961 - DNA, 20 bp, Artificial Sequence
  Synthetic oligonucleotide; AAAAAC chr2 60530076 60530095 60530092 +
cataatgtcacaataaacta

SEQ ID NO: 189962 - DNA, 20 bp, Artificial Sequence
  Synthetic oligonucleotide; CAAAAC chr2 60530117 60530136 60530133 +
gaagataagaaaatcgagaa

SEQ ID NO: 189963 - DNA, 20 bp, Artificial Sequence
  Synthetic oligonucleotide; AAAAAC chr2 60530683 60530702 60530699 +
aaagaaagaaaaaggaaaaa

SEQ ID NO: 189964 - DNA, 20 bp, Artificial Sequence
  Synthetic oligonucleotide; AAAAAC chr2 60530855 60530874 60530871 +
cctacctctttcgagctcct

SEQ ID NO: 189965 - DNA, 20 bp, Artificial Sequence
  Synthetic oligonucleotide; CAAAAC chr2 60530947 60530966 60530963 +
gcgcaccctgggacccctga

SEQ ID NO: 189966 - DNA, 20 bp, Artificial Sequence
  Synthetic oligonucleotide; TAAAAC chr2 60532327 60532346 60532343 +
ggtttttttttttttccttt

SEQ ID NO: 189967 - DNA, 20 bp, Artificial Sequence
  Synthetic oligonucleotide; AAAAAC chr2 60532650 60532669 60532666 +
cattattatgactttacttg

SEQ ID NO: 189968 - DNA, 20 bp, Artificial Sequence
  Synthetic oligonucleotide; AAAAAC chr2 60532722 60532741 60532738 +
cactccctttaagtacttcg

SEQ ID NO: 189969 - DNA, 20 bp, Artificial Sequence
  Synthetic oligonucleotide; TAAAAC chr2 60532775 60532794 60532791 +
aagcattaactggtttggat

SEQ ID NO: 189970 - DNA, 20 bp, Artificial Sequence
  Synthetic oligonucleotide; CAAAAC chr2 60533220 60533239 60533236 +
agttaaataaaccgacatgg

SEQ ID NO: 189971 - DNA, 20 bp, Artificial Sequence
  Synthetic oligonucleotide; GAAAAC chr2 60534264 60534283 60534280 +
tcagagcagcagctgaatga

SEQ ID NO: 189972 - DNA, 20 bp, Artificial Sequence
  Synthetic oligonucleotide; TAAAAC chr2 60534467 60534486 60534483 +
tgccatcaaactgctaacaa

SEQ ID NO: 189973 - DNA, 20 bp, Artificial Sequence
  Synthetic oligonucleotide; GAAAAC chr2 60534627 60534646 60534643 +
aactgtacttaacgttaaaa

SEQ ID NO: 189974 - DNA, 20 bp, Artificial Sequence
  Synthetic oligonucleotide; TAAAAC chr2 60534636 60534655 60534652 +
taacgttaaaagaaaacgga

SEQ ID NO: 189975 - DNA, 20 bp, Artificial Sequence
  Synthetic oligonucleotide; CAAAAC chr2 60534771 60534790 60534787 +
ccactgaggcagctaataca

SEQ ID NO: 189976 - DNA, 20 bp, Artificial Sequence
  Synthetic oligonucleotide; AAAAAC chr2 60534894 60534913 60534910 +
aacttttaatcttgagaaga

SEQ ID NO: 189977 - DNA, 20 bp, Artificial Sequence
  Synthetic oligonucleotide; CAAAAC chr2 60535056 60535075 60535072 +
taataggccaatcaaaaatg

SEQ ID NO: 189978 - DNA, 20 bp, Artificial Sequence
  Synthetic oligonucleotide; TAAAAC chr2 60535387 60535406 60535403 +
atcgtcacggactttgttca

SEQ ID NO: 189979 - DNA, 20 bp, Artificial Sequence
  Synthetic oligonucleotide; AAAAAC chr2 60535438 60535457 60535454 +
tctaaacatggtaatttatc

SEQ ID NO: 189980 - DNA, 20 bp, Artificial Sequence
  Synthetic oligonucleotide; AAAAAC chr2 60535574 60535593 60535590 +
gtaaacatccactgtggtat

SEQ ID NO: 189981 - DNA, 20 bp, Artificial Sequence
  Synthetic oligonucleotide; AAAAAC chr2 60536554 60536573 60536570 +
gggcaaatcagaattagatt

SEQ ID NO: 189982 - DNA, 20 bp, Artificial Sequence
  Synthetic oligonucleotide; AAAAAC chr2 60537166 60537185 60537182 +
ttttttctccttaacataac

SEQ ID NO: 189983 - DNA, 20 bp, Artificial Sequence
  Synthetic oligonucleotide; TAAAAC chr2 60537542 60537561 60537558 +
tgcagggattggccaaatat

SEQ ID NO: 189984 - DNA, 20 bp, Artificial Sequence
  Synthetic oligonucleotide; TAAAAC chr2 60537899 60537918 60537915 +
tcagtggattcgcctctatc

SEQ ID NO: 189985 - DNA, 20 bp, Artificial Sequence
  Synthetic oligonucleotide; AAAAAC chr2 60537966 60537985 60537982 +
acaacagtgagaatacaaac

SEQ ID NO: 189986 - DNA, 20 bp, Artificial Sequence
  Synthetic oligonucleotide; TAAAAC chr2 60538562 60538581 60538578 +
cacattataaaaatcttctt

SEQ ID NO: 189987 - DNA, 20 bp, Artificial Sequence
  Synthetic oligonucleotide; TAAAAC chr2 60539554 60539573 60539570 +
atatggaataagttacattt

SEQ ID NO: 189988 - DNA, 20 bp, Artificial Sequence
  Synthetic oligonucleotide; AAAAAC chr2 60539809 60539828 60539825 +
aattaattaggtcatgttgt

SEQ ID NO: 189989 - DNA, 20 bp, Artificial Sequence
  Synthetic oligonucleotide; AAAAAC chr2 60540063 60540082 60540079 +
tccaaattgatacataacat

SEQ ID NO: 189990 - DNA, 20 bp, Artificial Sequence
  Synthetic oligonucleotide; AAAAAC chr2 60540303 60540322 60540319 +
aagctggtactactgtatgt

SEQ ID NO: 189991 - DNA, 20 bp, Artificial Sequence
  Synthetic oligonucleotide; CAAAAC chr2 60540839 60540858 60540855 +
ttcactaagagaaaggtgtg

SEQ ID NO: 189992 - DNA, 20 bp, Artificial Sequence
  Synthetic oligonucleotide; AAAAAC chr2 60541133 60541152 60541149 +
tctgtaacagcaggagacag

SEQ ID NO: 189993 - DNA, 20 bp, Artificial Sequence
  Synthetic oligonucleotide; CAAAAC chr2 60541195 60541214 60541211 +
atatcacgtggacctattct

SEQ ID NO: 189994 - DNA, 20 bp, Artificial Sequence
  Synthetic oligonucleotide; CAAAAC chr2 60541502 60541521 60541518 +
tctctgacattgtactttga

SEQ ID NO: 189995 - DNA, 20 bp, Artificial Sequence
  Synthetic oligonucleotide; GAAAAC chr2 60541650 60541669 60541666 +
aaaatcctaggtacttatta

SEQ ID NO: 189996 - DNA, 20 bp, Artificial Sequence
  Synthetic oligonucleotide; CAAAAC chr2 60542280 60542299 60542296 +
gattcctatgtgcaataagc

SEQ ID NO: 189997 - DNA, 20 bp, Artificial Sequence
  Synthetic oligonucleotide; GAAAAC chr2 60542405 60542424 60542421 +
aatatgagactaaaaaaaaa

SEQ ID NO: 189998 - DNA, 20 bp, Artificial Sequence
  Synthetic oligonucleotide; CAAAAC chr2 60542410 60542429 60542426 +
gagactaaaaaaaaagaaaa

SEQ ID NO: 189999 - DNA, 20 bp, Artificial Sequence
  Synthetic oligonucleotide; CAAAAC chr2 60542415 60542434 60542431 +
taaaaaaaaagaaaacaaaa

SEQ ID NO: 190000 - DNA, 20 bp, Artificial Sequence
  Synthetic oligonucleotide; CAAAAC chr2 60542420 60542439 60542436 +
aaaaagaaaacaaaacaaaa

SEQ ID NO: 190001 - DNA, 20 bp, Artificial Sequence
  Synthetic oligonucleotide; AAAAAC chr2 60542856 60542875 60542872 +
ctgcctctactgaaaataca

SEQ ID NO: 190002 - DNA, 20 bp, Artificial Sequence
  Synthetic oligonucleotide; CAAAAC chr2 60542997 60543016 60543013 +
tccagcctgggcaacaagag

SEQ ID NO: 190003 - DNA, 20 bp, Artificial Sequence
  Synthetic oligonucleotide; AAAAAC chr2 60543029 60543048 60543045 +
taaaaaaaaaaaaaaaaaaa

SEQ ID NO: 190004 - DNA, 20 bp, Artificial Sequence
  Synthetic oligonucleotide; TAAAAC chr2 60544705 60544724 60544721 +
atgatatgcactacctttcc

SEQ ID NO: 190005 - DNA, 20 bp, Artificial Sequence
  Synthetic oligonucleotide; CAAAAC chr2 60545128 60545147 60545144 +
caaaatcaagatacatctgt

SEQ ID NO: 190006 - DNA, 20 bp, Artificial Sequence
  Synthetic oligonucleotide; GAAAAC chr2 60545911 60545930 60545927 +
agcacctctgaaaatgaaaa

SEQ ID NO: 190007 - DNA, 20 bp, Artificial Sequence
  Synthetic oligonucleotide; GAAAAC chr2 60546502 60546521 60546518 +
caaatcatcacatatgtaaa

SEQ ID NO: 190008 - DNA, 20 bp, Artificial Sequence
  Synthetic oligonucleotide; AAAAAC chr2 60546663 60546682 60546679 +
gcttaaataataactacaag

SEQ ID NO: 190009 - DNA, 20 bp, Artificial Sequence
  Synthetic oligonucleotide; GAAAAC chr2 60546883 60546902 60546899 +
catttacactgctgtaataa

SEQ ID NO: 190010 - DNA, 20 bp, Artificial Sequence
  Synthetic oligonucleotide; AAAAAC chr2 60546952 60546971 60546968 +
gcagcataattcacactgcc

SEQ ID NO: 190011 - DNA, 20 bp, Artificial Sequence
  Synthetic oligonucleotide; CAAAAC chr2 60547518 60547537 60547534 +
aaaaaaaaaatcacaaaata

SEQ ID NO: 190012 - DNA, 20 bp, Artificial Sequence
  Synthetic oligonucleotide; TAAAAC chr2 60547545 60547564 60547561 +
tccaggatgctgccagttaa

SEQ ID NO: 190013 - DNA, 20 bp, Artificial Sequence
  Synthetic oligonucleotide; CAAAAC chr2 60548424 60548443 60548440 +
tagttaaaggtaatgtggtt

SEQ ID NO: 190014 - DNA, 20 bp, Artificial Sequence
  Synthetic oligonucleotide; CAAAAC chr2 60548478 60548497 60548494 +
tgactgaactgatttacaat

SEQ ID NO: 190015 - DNA, 20 bp, Artificial Sequence
  Synthetic oligonucleotide; TAAAAC chr2 60548597 60548616 60548613 +
gatgatcaaatgtacagata

SEQ ID NO: 190016 - DNA, 20 bp, Artificial Sequence
  Synthetic oligonucleotide; CAAAAC chr2 60548702 60548721 60548718 +
gtttaacatcggtctccttg

SEQ ID NO: 190017 - DNA, 20 bp, Artificial Sequence
  Synthetic oligonucleotide; CAAAAC chr2 60548736 60548755 60548752 +
agtggtgttcagagaaatac

SEQ ID NO: 190018 - DNA, 20 bp, Artificial Sequence
  Synthetic oligonucleotide; AAAAAC chr2 60548929 60548948 60548945 +
atgcaaattcccctttccct

SEQ ID NO: 190019 - DNA, 20 bp, Artificial Sequence
  Synthetic oligonucleotide; CAAAAC chr2 60549285 60549304 60549301 +
aaatgttggtaaggagcgag

SEQ ID NO: 190020 - DNA, 20 bp, Artificial Sequence
  Synthetic oligonucleotide; GAAAAC chr2 60549736 60549755 60549752 +
gaaaaaggaagtgaggtttg

SEQ ID NO: 190021 - DNA, 20 bp, Artificial Sequence
  Synthetic oligonucleotide; GAAAAC chr2 60550198 60550217 60550214 +
tgccggccccgaaagaaagc

SEQ ID NO: 190022 - DNA, 20 bp, Artificial Sequence
  Synthetic oligonucleotide; AAAAAC chr2 60551077 60551096 60551093 +
ccccaccaccacccctttaa

SEQ ID NO: 190023 - DNA, 20 bp, Artificial Sequence
  Synthetic oligonucleotide; TAAAAC chr2 60551108 60551127 60551124 +
accaagtataggtggtcctt

SEQ ID NO: 190024 - DNA, 20 bp, Artificial Sequence
  Synthetic oligonucleotide; CAAAAC chr2 60552858 60552877 60552874 +
tagcattgttcattattttg

SEQ ID NO: 190025 - DNA, 20 bp, Artificial Sequence
  Synthetic oligonucleotide; CAAAAC chr2 60553638 60553657 60553654 +
tctggatggacagagacaca

SEQ ID NO: 190026 - DNA, 20 bp, Artificial Sequence
  Synthetic oligonucleotide; TAAAAC chr2 60555051 60555070 60555067 +
tagggaagacctgttggaaa

SEQ ID NO: 190027 - DNA, 20 bp, Artificial Sequence
  Synthetic oligonucleotide; AAAAAC chr2 60556496 60556515 60556512 +
attgattttcctttttaaaa

SEQ ID NO: 190028 - DNA, 20 bp, Artificial Sequence
  Synthetic oligonucleotide; CAAAAC chr2 60555760 60555779 60555763 -
tctctctcaatgttgagcat

SEQ ID NO: 190029 - DNA, 20 bp, Artificial Sequence
  Synthetic oligonucleotide; TAAAAC chr2 60555589 60555608 60555592 -
gcaagcccggggccctcgct

SEQ ID NO: 190030 - DNA, 20 bp, Artificial Sequence
  Synthetic oligonucleotide; TAAAAC chr2 60555169 60555188 60555172 -
ctgttgctgtacattttacg

SEQ ID NO: 190031 - DNA, 20 bp, Artificial Sequence
  Synthetic oligonucleotide; AAAAAC chr2 60553099 60553118 60553102 -
atttttaaatttttcacgag

SEQ ID NO: 190032 - DNA, 20 bp, Artificial Sequence
  Synthetic oligonucleotide; AAAAAC chr2 60553059 60553078 60553062 -
gtaaaagagataaaggggga

SEQ ID NO: 190033 - DNA, 20 bp, Artificial Sequence
  Synthetic oligonucleotide; AAAAAC chr2 60552743 60552762 60552746 -
agggagtgagtacaagtcta

SEQ ID NO: 190034 - DNA, 20 bp, Artificial Sequence
  Synthetic oligonucleotide; TAAAAC chr2 60552247 60552266 60552250 -
atacataaaaataaaataaa

SEQ ID NO: 190035 - DNA, 20 bp, Artificial Sequence
  Synthetic oligonucleotide; AAAAAC chr2 60548770 60548789 60548773 -
aataatataccagcaatgat

SEQ ID NO: 190036 - DNA, 20 bp, Artificial Sequence
  Synthetic oligonucleotide; CAAAAC chr2 60544867 60544886 60544870 -
taacactatatagtgaccct

SEQ ID NO: 190037 - DNA, 20 bp, Artificial Sequence
  Synthetic oligonucleotide; TAAAAC chr2 60544578 60544597 60544581 -
cccctctagaatttgatcat

SEQ ID NO: 190038 - DNA, 20 bp, Artificial Sequence
  Synthetic oligonucleotide; CAAAAC chr2 60544185 60544204 60544188 -
cgagctgctcgtttaaaaga

SEQ ID NO: 190039 - DNA, 20 bp, Artificial Sequence
  Synthetic oligonucleotide; TAAAAC chr2 60544157 60544176 60544160 -
agtgtctgtcaagcaagaat

SEQ ID NO: 190040 - DNA, 20 bp, Artificial Sequence
  Synthetic oligonucleotide; CAAAAC chr2 60543900 60543919 60543903 -
atagcagagcctagagaagc

SEQ ID NO: 190041 - DNA, 20 bp, Artificial Sequence
  Synthetic oligonucleotide; TAAAAC chr2 60543194 60543213 60543197 -
ttataggcaggaagcaagaa

SEQ ID NO: 190042 - DNA, 20 bp, Artificial Sequence
  Synthetic oligonucleotide; AAAAAC chr2 60541803 60541822 60541806 -
ttatttatgtgattctgaat

SEQ ID NO: 190043 - DNA, 20 bp, Artificial Sequence
  Synthetic oligonucleotide; TAAAAC chr2 60541762 60541781 60541765 -
tgaattttcagcatggcagt

SEQ ID NO: 190044 - DNA, 20 bp, Artificial Sequence
  Synthetic oligonucleotide; AAAAAC chr2 60541754 60541773 60541757 -
cagcatggcagttaaaacaa

SEQ ID NO: 190045 - DNA, 20 bp, Artificial Sequence
  Synthetic oligonucleotide; AAAAAC chr2 60541736 60541755 60541739 -
aaaaaaacaccactaccaca

SEQ ID NO: 190046 - DNA, 20 bp, Artificial Sequence
  Synthetic oligonucleotide; AAAAAC chr2 60541015 60541034 60541018 -
tttattctgtgaaagcttaa

SEQ ID NO: 190047 - DNA, 20 bp, Artificial Sequence
  Synthetic oligonucleotide; AAAAAC chr2 60541007 60541026 60541010 -
gtgaaagcttaaaaaaacaa

SEQ ID NO: 190048 - DNA, 20 bp, Artificial Sequence
  Synthetic oligonucleotide; CAAAAC chr2 60540949 60540968 60540952 -
cacacacacacacacacaca

SEQ ID NO: 190049 - DNA, 20 bp, Artificial Sequence
  Synthetic oligonucleotide; AAAAAC chr2 60540625 60540644 60540628 -
gtactaaattggggtacata

SEQ ID NO: 190050 - DNA, 20 bp, Artificial Sequence
  Synthetic oligonucleotide; TAAAAC chr2 60539493 60539512 60539496 -
ctgcactccctatgcatttt

SEQ ID NO: 190051 - DNA, 20 bp, Artificial Sequence
  Synthetic oligonucleotide; GAAAAC chr2 60539043 60539062 60539046 -
cctttgatctatagcgaaat

SEQ ID NO: 190052 - DNA, 20 bp, Artificial Sequence
  Synthetic oligonucleotide; AAAAAC chr2 60538658 60538677 60538661 -
cttcatttgtacttttttta

SEQ ID NO: 190053 - DNA, 20 bp, Artificial Sequence
  Synthetic oligonucleotide; CAAAAC chr2 60538514 60538533 60538517 -
aagcagttgtggtagatcca

SEQ ID NO: 190054 - DNA, 20 bp, Artificial Sequence
  Synthetic oligonucleotide; CAAAAC chr2 60538479 60538498 60538482 -
aaaatacacgtttcctgaaa

SEQ ID NO: 190055 - DNA, 20 bp, Artificial Sequence
  Synthetic oligonucleotide; AAAAAC chr2 60537897 60537916 60537900 -
tagaggcgaatccactgatt

SEQ ID NO: 190056 - DNA, 20 bp, Artificial Sequence
  Synthetic oligonucleotide; GAAAAC chr2 60537835 60537854 60537838 -
tgcaagggtgccttcaaaaa

SEQ ID NO: 190057 - DNA, 20 bp, Artificial Sequence
  Synthetic oligonucleotide; AAAAAC chr2 60537777 60537796 60537780 -
tttgctttttgaactttcta

SEQ ID NO: 190058 - DNA, 20 bp, Artificial Sequence
  Synthetic oligonucleotide; AAAAAC chr2 60537531 60537550 60537534 -
atccctgcacctcctcaaac

SEQ ID NO: 190059 - DNA, 20 bp, Artificial Sequence
  Synthetic oligonucleotide; AAAAAC chr2 60537517 60537536 60537520 -
tcaaacaaaaacaaacctca

SEQ ID NO: 190060 - DNA, 20 bp, Artificial Sequence
  Synthetic oligonucleotide; TAAAAC chr2 60537365 60537384 60537368 -
cgatcctttcagtttccagt

SEQ ID NO: 190061 - DNA, 20 bp, Artificial Sequence
  Synthetic oligonucleotide; TAAAAC chr2 60537273 60537292 60537276 -
aaaaattattcctttacatt

SEQ ID NO: 190062 - DNA, 20 bp, Artificial Sequence
  Synthetic oligonucleotide; GAAAAC chr2 60537119 60537138 60537122 -
aaagatactcttggatcttt

SEQ ID NO: 190063 - DNA, 20 bp, Artificial Sequence
  Synthetic oligonucleotide; TAAAAC chr2 60537095 60537114 60537098 -
acaactgctgtccttttaac

SEQ ID NO: 190064 - DNA, 20 bp, Artificial Sequence
  Synthetic oligonucleotide; AAAAAC chr2 60535266 60535285 60535269 -
aatgaggaaatcataggaag

SEQ ID NO: 190065 - DNA, 20 bp, Artificial Sequence
  Synthetic oligonucleotide; GAAAAC chr2 60534165 60534184 60534168 -
tacacgagtgccctggtggt

SEQ ID NO: 190066 - DNA, 20 bp, Artificial Sequence
  Synthetic oligonucleotide; TAAAAC chr2 60533999 60534018 60534002 -
agtgtaactgatattctgat

SEQ ID NO: 190067 - DNA, 20 bp, Artificial Sequence
  Synthetic oligonucleotide; GAAAAC chr2 60533493 60533512 60533496 -
tcagctgacccggtatttaa

SEQ ID NO: 190068 - DNA, 20 bp, Artificial Sequence
  Synthetic oligonucleotide; CAAAAC chr2 60533488 60533507 60533491 -
tgacccggtatttaagaaaa

SEQ ID NO: 190069 - DNA, 20 bp, Artificial Sequence
  Synthetic oligonucleotide; AAAAAC chr2 60533158 60533177 60533161 -
aagattacagtattagagtt

SEQ ID NO: 190070 - DNA, 20 bp, Artificial Sequence
  Synthetic oligonucleotide; AAAAAC chr2 60532423 60532442 60532426 -
gccaccaccaccaaaaaaag

SEQ ID NO: 190071 - DNA, 20 bp, Artificial Sequence
  Synthetic oligonucleotide; AAAAAC chr2 60532415 60532434 60532418 -
caccaaaaaaagaaaaacaa

SEQ ID NO: 190072 - DNA, 20 bp, Artificial Sequence
  Synthetic oligonucleotide; AAAAAC chr2 60532408 60532427 60532411 -
aaaagaaaaacaaaaaaaca

SEQ ID NO: 190073 - DNA, 20 bp, Artificial Sequence
  Synthetic oligonucleotide; CAAAAC chr2 60532398 60532417 60532401 -
caaaaaaacaaaaaacaaag

SEQ ID NO: 190074 - DNA, 20 bp, Artificial Sequence
  Synthetic oligonucleotide; CAAAAC chr2 60532393 60532412 60532396 -
aaacaaaaaacaaagcaaaa

SEQ ID NO: 190075 - DNA, 20 bp, Artificial Sequence
  Synthetic oligonucleotide; CAAAAC chr2 60532388 60532407 60532391 -
aaaaacaaagcaaaacaaaa

SEQ ID NO: 190076 - DNA, 20 bp, Artificial Sequence
  Synthetic oligonucleotide; AAAAAC chr2 60532375 60532394 60532378 -
aacaaaacaaaaccttttta

SEQ ID NO: 190077 - DNA, 20 bp, Artificial Sequence
  Synthetic oligonucleotide; AAAAAC chr2 60532334 60532353 60532337 -
agttttaaaaggaaaaaaaa

SEQ ID NO: 190078 - DNA, 20 bp, Artificial Sequence
  Synthetic oligonucleotide; AAAAAC chr2 60532326 60532345 60532329 -
aaggaaaaaaaaaaaaaccc

SEQ ID NO: 190079 - DNA, 20 bp, Artificial Sequence
  Synthetic oligonucleotide; CAAAAC chr2 60532292 60532311 60532295 -
aacaaccaccttctgacgct

SEQ ID NO: 190080 - DNA, 20 bp, Artificial Sequence
  Synthetic oligonucleotide; CAAAAC chr2 60531674 60531693 60531677 -
ccccaatgccagggcactgc

SEQ ID NO: 190081 - DNA, 20 bp, Artificial Sequence
  Synthetic oligonucleotide; TAAAAC chr2 60531381 60531400 60531384 -
gtaaattaatggatatgatt

SEQ ID NO: 190082 - DNA, 20 bp, Artificial Sequence
  Synthetic oligonucleotide; CAAAAC chr2 60531376 60531395 60531379 -
ttaatggatatgatttaaaa

SEQ ID NO: 190083 - DNA, 20 bp, Artificial Sequence
  Synthetic oligonucleotide; AAAAAC chr2 60531210 60531229 60531213 -
gggcaacacagagggaggag

SEQ ID NO: 190084 - DNA, 20 bp, Artificial Sequence
  Synthetic oligonucleotide; AAAAAC chr2 60529675 60529694 60529678 -
ctccttttctagtagcaaat

SEQ ID NO: 190085 - DNA, 20 bp, Artificial Sequence
  Synthetic oligonucleotide; TAAAAC chr2 60529263 60529282 60529266 -
gctcagtgctgggcacatgg

SEQ ID NO: 190086 - DNA, 20 bp, Artificial Sequence
  Synthetic oligonucleotide; CAAAAC chr2 60527848 60527867 60527851 -
atggattacacaatgtattc

SEQ ID NO: 190087 - DNA, 20 bp, Artificial Sequence
  Synthetic oligonucleotide; GAAAAC chr2 60526295 60526314 60526298 -
gttgaaatccttttaaagat

SEQ ID NO: 190088 - DNA, 20 bp, Artificial Sequence
  Synthetic oligonucleotide; AAAAAC chr2 60526086 60526105 60526089 -
agtgaaatcattgttataga

SEQ ID NO: 190089 - DNA, 20 bp, Artificial Sequence
  Synthetic oligonucleotide; AAAAAC chr2 60526065 60526084 60526068 -
aaaacctactgtggttagaa

SEQ ID NO: 190090 - DNA, 20 bp, Artificial Sequence
  Synthetic oligonucleotide; GAAAAC chr2 60525755 60525774 60525758 -
taacagagagacactgatct

SEQ ID NO: 190091 - DNA, 20 bp, Artificial Sequence
  Synthetic oligonucleotide; AAAAAC chr2 60525306 60525325 60525309 -
gttgcaagctgttttttttg

SEQ ID NO: 190092 - DNA, 20 bp, Artificial Sequence
  Synthetic oligonucleotide; TAAAAC chr2 60524751 60524770 60524754 -
tcctttggataatgatgatc

SEQ ID NO: 190093 - DNA, 20 bp, Artificial Sequence
  Synthetic oligonucleotide; AAAAAC chr2 60524497 60524516 60524500 -
ggtaacaaaataaaatctta

SEQ ID NO: 190094 - DNA, 20 bp, Artificial Sequence
  Synthetic oligonucleotide; AAAAAC chr2 60524477 60524496 60524480 -
aaaaacaagaaaaaagaaaa

SEQ ID NO: 190095 - DNA, 20 bp, Artificial Sequence
  Synthetic oligonucleotide; AAAAAC chr2 60524471 60524490 60524474 -
aagaaaaaagaaaaaaaaac

SEQ ID NO: 190096 - DNA, 20 bp, Artificial Sequence
  Synthetic oligonucleotide; AAAAAC chr2 60524465 60524484 60524468 -
aaagaaaaaaaaacaaaaac

SEQ ID NO: 190097 - DNA, 20 bp, Artificial Sequence
  Synthetic oligonucleotide; GAAAAC chr2 60523036 60523055 60523039 -
ttacccacagagtctacaga

SEQ ID NO: 190098 - DNA, 20 bp, Artificial Sequence
  Synthetic oligonucleotide; GAAAAC chr2 60522871 60522890 60522874 -
cctgcagaaccttgacctgt

SEQ ID NO: 190099 - DNA, 20 bp, Artificial Sequence
  Synthetic oligonucleotide; CAAAAC chr2 60522470 60522489 60522473 -
cctcactggaagggatcctc

SEQ ID NO: 190100 - DNA, 20 bp, Artificial Sequence
  Synthetic oligonucleotide; AAAAAC chr2 60522338 60522357 60522341 -
gcagttgtatttaaaagaaa

SEQ ID NO: 190101 - DNA, 20 bp, Artificial Sequence
  Synthetic oligonucleotide; GAAAAC chr2 60520866 60520885 60520869 -
agaaggggctaagcttgcac

SEQ ID NO: 190102 - DNA, 20 bp, Artificial Sequence
  Synthetic oligonucleotide; CAAAAC chr2 60520613 60520632 60520616 -
ctcatagtgttgagtcagag

SEQ ID NO: 190103 - DNA, 20 bp, Artificial Sequence
  Synthetic oligonucleotide; GAAAAC chr2 60520571 60520590 60520574 -
cacttatttaattttcctca

SEQ ID NO: 190104 - DNA, 20 bp, Artificial Sequence
  Synthetic oligonucleotide; CAAAAC chr2 60520292 60520311 60520295 -
aaatgtttcctcaaaataaa

SEQ ID NO: 190105 - DNA, 20 bp, Artificial Sequence
  Synthetic oligonucleotide; GAAAAC chr2 60519858 60519877 60519861 -
tggcaaatgacaatgcctat

SEQ ID NO: 190106 - DNA, 20 bp, Artificial Sequence
  Synthetic oligonucleotide; TAAAAC chr2 60518683 60518702 60518686 -
tctgatgatgagtaggctct

SEQ ID NO: 190107 - DNA, 20 bp, Artificial Sequence
  Synthetic oligonucleotide; TAAAAC chr2 60518412 60518431 60518415 -
ctgctctatcgcagacattt

SEQ ID NO: 190108 - DNA, 20 bp, Artificial Sequence
  Synthetic oligonucleotide; AAAAAC chr2 60518211 60518230 60518214 -
aggtctaggtttgatagata

SEQ ID NO: 190109 - DNA, 20 bp, Artificial Sequence
  Synthetic oligonucleotide; TAAAAC chr2 60517489 60517508 60517492 -
ctaacctggggagcccatgg

SEQ ID NO: 190110 - DNA, 20 bp, Artificial Sequence
  Synthetic oligonucleotide; CAAAAC chr2 60517475 60517494 60517478 -
ccatggtaaaacccaagcaa

SEQ ID NO: 190111 - DNA, 20 bp, Artificial Sequence
  Synthetic oligonucleotide; AAAAAC chr2 60516767 60516786 60516770 -
tatgtcctgcttgctttttt

SEQ ID NO: 190112 - DNA, 20 bp, Artificial Sequence
  Synthetic oligonucleotide; CAAAAC chr2 60516302 60516321 60516305 -
agtcttttttgagtttccag

SEQ ID NO: 190113 - DNA, 20 bp, Artificial Sequence
  Synthetic oligonucleotide; CAAAAC chr2 60516251 60516270 60516254 -
cattgtgtttaatagtacaa

SEQ ID NO: 190114 - DNA, 20 bp, Artificial Sequence
  Synthetic oligonucleotide; TAAAAC chr2 60512844 60512863 60512847 -
actttaggtgtgtattgtag

SEQ ID NO: 190115 - DNA, 20 bp, Artificial Sequence
  Synthetic oligonucleotide; TAAAAC chr2 60512214 60512233 60512217 -
gggctctaggtggcttcctt

SEQ ID NO: 190116 - DNA, 20 bp, Artificial Sequence
  Synthetic oligonucleotide; AAAAAC chr2 60510638 60510657 60510641 -
tgttgggcatagaaagcctt

SEQ ID NO: 190117 - DNA, 20 bp, Artificial Sequence
  Synthetic oligonucleotide; GAAAAC chr2 60510026 60510045 60510029 -
ttctggacatacttcgaagg

SEQ ID NO: 190118 - DNA, 20 bp, Artificial Sequence
  Synthetic oligonucleotide; CAAAAC chr2 60507536 60507555 60507539 -
cctcatttcttgagagactc

SEQ ID NO: 190119 - DNA, 20 bp, Artificial Sequence
  Synthetic oligonucleotide; GAAAAC chr2 60502709 60502728 60502712 -
gtttttctctgatgatgatt

SEQ ID NO: 190120 - DNA, 20 bp, Artificial Sequence
  Synthetic oligonucleotide; AAAAAC chr2 60498597 60498616 60498600 -
ctatttgctattaaaatttg

SEQ ID NO: 190121 - DNA, 20 bp, Artificial Sequence
  Synthetic oligonucleotide; GAAAAC chr2 60495950 60495969 60495953 -
aaaaaatagctaagaatagt

SEQ ID NO: 190122 - DNA, 20 bp, Artificial Sequence
  Synthetic oligonucleotide; GAAAAC chr2 60495603 60495622 60495606 -
aatgtctgcaccccaccctg

SEQ ID NO: 190123 - DNA, 20 bp, Artificial Sequence
  Synthetic oligonucleotide; CAAAAC chr2 60493367 60493386 60493370 -
gggctccctggactcaaact

SEQ ID NO: 190124 - DNA, 20 bp, Artificial Sequence
  Synthetic oligonucleotide; CAAAAC chr2 60492809 60492828 60492812 -
ttaataaagctaaagcgaaa

SEQ ID NO: 190125 - DNA, 20 bp, Artificial Sequence
  Synthetic oligonucleotide; CAAAAC chr2 60492804 60492823 60492807 -
aaagctaaagcgaaacaaaa

SEQ ID NO: 190126 - DNA, 20 bp, Artificial Sequence
  Synthetic oligonucleotide; GAAAAC chr2 60491835 60491854 60491838 -
ggatttgggttcttaacatg

SEQ ID NO: 190127 - DNA, 20 bp, Artificial Sequence
  Synthetic oligonucleotide; TAAAAC chr2 60491267 60491286 60491270 -
ctttttagtagtgctgcatt

SEQ ID NO: 190128 - DNA, 20 bp, Artificial Sequence
  Synthetic oligonucleotide; AAAAAC chr2 60488770 60488789 60488773 -
gaaactccacctcagaaaca

SEQ ID NO: 190129 - DNA, 20 bp, Artificial Sequence
  Synthetic oligonucleotide; CAAAAC chr2 60488646 60488665 60488649 -
gttattattttcatgttaag

SEQ ID NO: 190130 - DNA, 20 bp, Artificial Sequence
  Synthetic oligonucleotide; AAAAAC chr2 60488502 60488521 60488505 -
gtgtcagcaaaaaatgaaac

SEQ ID NO: 190131 - DNA, 20 bp, Artificial Sequence
  Synthetic oligonucleotide; TAAAAC chr2 60488073 60488092 60488076 -
tgtaagtgttactgtgtttt

SEQ ID NO: 190132 - DNA, 20 bp, Artificial Sequence
  Synthetic oligonucleotide; GAAAAC chr2 60487962 60487981 60487965 -
gggctccattctagagttgg

SEQ ID NO: 190133 - DNA, 20 bp, Artificial Sequence
  Synthetic oligonucleotide; GAAAAC chr2 60487410 60487429 60487413 -
ccaatttccatacagatgac

SEQ ID NO: 190134 - DNA, 20 bp, Artificial Sequence
  Synthetic oligonucleotide; AAAAAC chr2 60484662 60484681 60484665 -
aattcccccttctcttaaga

SEQ ID NO: 190135 - DNA, 20 bp, Artificial Sequence
  Synthetic oligonucleotide; TAAAAC chr2 60484497 60484516 60484500 -
aaagcaacccggtttatctg

SEQ ID NO: 190136 - DNA, 20 bp, Artificial Sequence
  Synthetic oligonucleotide; CAAAAC chr2 60483544 60483563 60483547 -
cctaacttaaatattacaat

SEQ ID NO: 190137 - DNA, 20 bp, Artificial Sequence
  Synthetic oligonucleotide; GAAAAC chr2 60483238 60483257 60483241 -
acgggatatatattagaggg

SEQ ID NO: 190138 - DNA, 20 bp, Artificial Sequence
  Synthetic oligonucleotide; AAAAAC chr2 60482206 60482225 60482209 -
gagaaaccacaacccgaaca

SEQ ID NO: 190139 - DNA, 20 bp, Artificial Sequence
  Synthetic oligonucleotide; AAAAAC chr2 60482198 60482217 60482201 -
acaacccgaacaaaaaactc

SEQ ID NO: 190140 - DNA, 20 bp, Artificial Sequence
  Synthetic oligonucleotide; TAAAAC chr2 60481730 60481749 60481733 -
ttgtggaaaaaaaatgccct

SEQ ID NO: 190141 - DNA, 20 bp, Artificial Sequence
  Synthetic oligonucleotide; AAAAAC chr2 60481655 60481674 60481658 -
gtagggggtggagcgtcaag

SEQ ID NO: 190142 - DNA, 20 bp, Artificial Sequence
  Synthetic oligonucleotide; AAAAAC chr2 60480951 60480970 60480954 -
ttaagcccttttagtggagc

SEQ ID NO: 190143 - DNA, 20 bp, Artificial Sequence
  Synthetic oligonucleotide; TAAAAC chr2 60480820 60480839 60480823 -
aggaaaatgtggaggattgc

SEQ ID NO: 190144 - DNA, 20 bp, Artificial Sequence
  Synthetic oligonucleotide; AAAAAC chr2 60479914 60479933 60479917 -
ttcctcctccccataaatca

SEQ ID NO: 190145 - DNA, 20 bp, Artificial Sequence
  Synthetic oligonucleotide; CAAAAC chr2 60479349 60479368 60479352 -
caagcagtcttagagagact

SEQ ID NO: 190146 - DNA, 20 bp, Artificial Sequence
  Synthetic oligonucleotide; AAAAAC chr2 60478974 60478993 60478977 -
ccagggaggagggaaaaaaa

SEQ ID NO: 190147 - DNA, 20 bp, Artificial Sequence
  Synthetic oligonucleotide; AAAAAC chr2 60478967 60478986 60478970 -
ggagggaaaaaaaaaaaaca

SEQ ID NO: 190148 - DNA, 20 bp, Artificial Sequence
  Synthetic oligonucleotide; CAAAAC chr2 60477668 60477687 60477671 -
gtttccacagtgcccacgaa

SEQ ID NO: 190149 - DNA, 20 bp, Artificial Sequence
  Synthetic oligonucleotide; TAAAAC chr2 60475417 60475436 60475420 -
gtttgtctgactcagaggaa

SEQ ID NO: 190150 - DNA, 20 bp, Artificial Sequence
  Synthetic oligonucleotide; GAAAAC chr2 60475347 60475366 60475350 -
agaaacaattgaggtggggg

SEQ ID NO: 190151 - DNA, 20 bp, Artificial Sequence
  Synthetic oligonucleotide; TAAAAC chr2 60473918 60473937 60473921 -
taaagaacatcaggatttgg

SEQ ID NO: 190152 - DNA, 20 bp, Artificial Sequence
  Synthetic oligonucleotide; AAAAAC chr2 60473246 60473265 60473249 -
tgtctcactgaaaaaaaaaa

SEQ ID NO: 190153 - DNA, 20 bp, Artificial Sequence
  Synthetic oligonucleotide; AAAAAC chr2 60473227 60473246 60473230 -
aaaaaacagggaaattatct

SEQ ID NO: 190154 - DNA, 20 bp, Artificial Sequence
  Synthetic oligonucleotide; AAAAAC chr2 60472715 60472734 60472718 -
agatgttcttgaggaaacca

SEQ ID NO: 190155 - DNA, 20 bp, Artificial Sequence
  Synthetic oligonucleotide; GAAAAC chr2 60472037 60472056 60472040 -
ggtgggtcctggacaggagg

SEQ ID NO: 190156 - DNA, 20 bp, Artificial Sequence
  Synthetic oligonucleotide; GAAAAC chr2 60470826 60470845 60470829 -
ctagggttttttacaactta

SEQ ID NO: 190157 - DNA, 20 bp, Artificial Sequence
  Synthetic oligonucleotide; AAAAAC chr2 60470820 60470839 60470823 -
ttttttacaacttagaaaac

SEQ ID NO: 190158 - DNA, 20 bp, Artificial Sequence
  Synthetic oligonucleotide; AAAAAC chr2 60470814 60470833 60470817 -
acaacttagaaaacaaaaac

SEQ ID NO: 190159 - DNA, 20 bp, Artificial Sequence
  Synthetic oligonucleotide; AAAAAC chr2 60470808 60470827 60470811 -
tagaaaacaaaaacaaaaac

SEQ ID NO: 190160 - DNA, 20 bp, Artificial Sequence
  Synthetic oligonucleotide; AAAAAC chr2 60470802 60470821 60470805 -
acaaaaacaaaaacaaaaac

SEQ ID NO: 190161 - DNA, 20 bp, Artificial Sequence
  Synthetic oligonucleotide; AAAAAC chr2 60470427 60470446 60470430 -
acttagtgaacggctgaggc

SEQ ID NO: 190162 - DNA, 20 bp, Artificial Sequence
  Synthetic oligonucleotide; GAAAAC chr2 60469948 60469967 60469951 -
ctcttaatattaagctaatg

SEQ ID NO: 190163 - DNA, 20 bp, Artificial Sequence
  Synthetic oligonucleotide; AAAAAC chr2 60469311 60469330 60469314 -
aagtgggactctgtcccata

SEQ ID NO: 190164 - DNA, 20 bp, Artificial Sequence
  Synthetic oligonucleotide; TAAAAC chr2 60469066 60469085 60469069 -
agaccacctctcccctttcc

SEQ ID NO: 190165 - DNA, 20 bp, Artificial Sequence
  Synthetic oligonucleotide; GAAAAC chr2 60469026 60469045 60469029 -
ttgtcaaaaagaccgaaatt

SEQ ID NO: 190166 - DNA, 20 bp, Artificial Sequence
  Synthetic oligonucleotide; CAAAAC chr2 60469021 60469040 60469024 -
aaaaagaccgaaattgaaaa

SEQ ID NO: 190167 - DNA, 20 bp, Artificial Sequence
  Synthetic oligonucleotide; GAAAAC chr2 60465806 60465825 60465809 -
taatcacccctggtagtaat

SEQ ID NO: 190168 - DNA, 20 bp, Artificial Sequence
  Synthetic oligonucleotide; CAAAAC chr2 60465406 60465425 60465409 -
gtcagtttattgctctaaat

SEQ ID NO: 190169 - DNA, 20 bp, Artificial Sequence
  Synthetic oligonucleotide; GAAAAC chr2 60464925 60464944 60464928 -
gaatactaaaatgcgatagt

SEQ ID NO: 190170 - DNA, 20 bp, Artificial Sequence
  Synthetic oligonucleotide; CAAAAC chr2 60463399 60463418 60463402 -
ggttcacgttgttagcctct

SEQ ID NO: 190171 - DNA, 20 bp, Artificial Sequence
  Synthetic oligonucleotide; GAAAAC chr2 60460546 60460565 60460549 -
agcaagctcaccaggcacat

SEQ ID NO: 190172 - DNA, 20 bp, Artificial Sequence
  Synthetic oligonucleotide; AAAAAC chr2 60460417 60460436 60460420 -
cgagtgttgaataatgatat

SEQ ID NO: 190173 - DNA, 20 bp, Artificial Sequence
  Synthetic oligonucleotide; AAAAAC chr2 60459868 60459887 60459871 -
tattttataacgtgaggagg

SEQ ID NO: 190174 - DNA, 20 bp, Artificial Sequence
  Synthetic oligonucleotide; AAAAAC chr2 60459725 60459744 60459728 -
ttgaattgacaaattaacag

SEQ ID NO: 190175 - DNA, 20 bp, Artificial Sequence
  Synthetic oligonucleotide; TAAAAC chr2 60459666 60459685 60459669 -
tatgagtgccttggatctat

SEQ ID NO: 190176 - DNA, 20 bp, Artificial Sequence
  Synthetic oligonucleotide; CAAAAC chr2 60459478 60459497 60459481 -
ctttagtttaattttataaa

SEQ ID NO: 190177 - DNA, 20 bp, Artificial Sequence
  Synthetic oligonucleotide; TAAAAC chr2 60459098 60459117 60459101 -
acgtggtactatttgccatt

SEQ ID NO: 190178 - DNA, 20 bp, Artificial Sequence
  Synthetic oligonucleotide; AAAAAC chr2 60458622 60458641 60458625 -
ctcattgaggagcatttttt

SEQ ID NO: 190179 - DNA, 20 bp, Artificial Sequence
  Synthetic oligonucleotide; AAAAAC chr2 60458607 60458626 60458610 -
tttttaaaaactaaaaaaaa

SEQ ID NO: 190180 - DNA, 20 bp, Artificial Sequence
  Synthetic oligonucleotide; CAAAAC chr2 60458465 60458484 60458468 -
agtgcaaggatttttttgta

SEQ ID NO: 190181 - DNA, 20 bp, Artificial Sequence
  Synthetic oligonucleotide; AAAAAC chr2 60458423 60458442 60458426 -
gttaagaaaaatttttttta

SEQ ID NO: 190182 - DNA, 20 bp, Artificial Sequence
  Synthetic oligonucleotide; AAAAAC chr2 60458280 60458299 60458283 -
ctcttcaggttgtaaaaaaa

SEQ ID NO: 190183 - DNA, 20 bp, Artificial Sequence
  Synthetic oligonucleotide; AAAAAC chr2 60457676 60457695 60457679 -
aaaaaaaaggaaaaaaaaaa

SEQ ID NO: 190184 - DNA, 20 bp, Artificial Sequence
  Synthetic oligonucleotide; AAAAAC chr2 60457643 60457662 60457646 -
ttgcagtttttttcattgcc

SEQ ID NO: 190185 - DNA, 20 bp, Artificial Sequence
  Synthetic oligonucleotide; CAAAAC chr2 60457424 60457443 60457427 -
tattgcttatgtgccctgtt

SEQ ID NO: 190186 - DNA, 20 bp, Artificial Sequence
  Synthetic oligonucleotide; AAAAAC chr2 60457293 60457312 60457296 -
tctttgttaagttctattgg

SEQ ID NO: 190187 - DNA, 20 bp, Artificial Sequence
  Synthetic oligonucleotide; AAAAAC chr2 60456939 60456958 60456942 -
ggtgttttcagtctgatgtt

SEQ ID NO: 190188 - DNA, 20 bp, Artificial Sequence
  Synthetic oligonucleotide; AAAAAC chr2 60456892 60456911 60456895 -
atccattcaaacataagtga

SEQ ID NO: 190189 - DNA, 20 bp, Artificial Sequence
  Synthetic oligonucleotide; AAAAAC chr2 60456231 60456250 60456234 -
acattgttcttatttttgta

SEQ ID NO: 190190 - DNA, 20 bp, Artificial Sequence
  Synthetic oligonucleotide; CAAAAC chr2 60456225 60456244 60456228 -
ttcttatttttgtaaaaaac

SEQ ID NO: 190191 - DNA, 20 bp, Artificial Sequence
  Synthetic oligonucleotide; CAAAAC chr2 60455891 60455910 60455894 -
tgttttggattaggtttctc

SEQ ID NO: 190192 - DNA, 20 bp, Artificial Sequence
  Synthetic oligonucleotide; TAAAAC chr2 60455788 60455807 60455791 -
tccaccctattaaatgtcca

SEQ ID NO: 190193 - DNA, 20 bp, Artificial Sequence
  Synthetic oligonucleotide; AAAAAC chr2 60453869 60453888 60453872 -
tttcctttctgtaaagtggc

SEQ ID NO: 190194 - DNA, 20 bp, Artificial Sequence
  Synthetic oligonucleotide; GAAAAC chr2 60453268 60453287 60453271 -
cccccttccaaaaaagaaaa

SEQ ID NO: 190195 - DNA, 20 bp, Artificial Sequence
  Synthetic oligonucleotide; AAAAAC chr2 60452382 60452401 60452385 -
tatattttttaataaaaagt

SEQ ID NO: 190196 - DNA, 20 bp, Artificial Sequence
  Synthetic oligonucleotide; AAAAAC chr2 60452374 60452393 60452377 -
ttaataaaaagtaaaaacaa

SEQ ID NO: 190197 - DNA, 20 bp, Artificial Sequence
  Synthetic oligonucleotide; CAAAAC chr2 60451958 60451977 60451961 -
tttcaaggagaatcaaaatg

SEQ ID NO: 190198 - DNA, 20 bp, Artificial Sequence
  Synthetic oligonucleotide; TAAAAC chr2 60451617 60451636 60451620 -
ttaatgcagacaaacaaaca

SEQ ID NO: 190199 - DNA, 20 bp, Artificial Sequence
  Synthetic oligonucleotide; CAAAAC chr2 60450283 60450302 60450286 -
actgtggagaagaaccccct

SEQ ID NO: 190200 - DNA, 20 bp, Artificial Sequence
  Synthetic oligonucleotide; AAAAAC chr2 60449111 60449130 60449114 -
gtttgagaaataattgtttc

SEQ ID NO: 190201 - DNA, 20 bp, Artificial Sequence
  Synthetic oligonucleotide; GAAAAC chr2 60449090 60449109 60449093 -
aaaaccagtgatcatttaaa

SEQ ID NO: 190202 - DNA, 20 bp, Artificial Sequence
  Synthetic oligonucleotide; TAAAAC chr2 60448972 60448991 60448975 -
gtttccaagagcattcagat

SEQ ID NO: 190203 - DNA, 20 bp, Artificial Sequence
  Synthetic oligonucleotide; AAAAAC chr2 60448195 60448214 60448198 -
acctaagatcacagtgtgaa

SEQ ID NO: 190204 - DNA, 20 bp, Artificial Sequence
  Synthetic oligonucleotide; GAGTGATT chr2 60448239 60448258 60448255 +
attattctgatctctaaaat

SEQ ID NO: 190205 - DNA, 20 bp, Artificial Sequence
  Synthetic oligonucleotide; CTAGGATT chr2 60448248 60448267 60448264 +
atctctaaaatgagtgatta

SEQ ID NO: 190206 - DNA, 20 bp, Artificial Sequence
  Synthetic oligonucleotide; AATTGATT chr2 60448309 60448328 60448325 +
atttatagaatcacaaggaa

SEQ ID NO: 190207 - DNA, 20 bp, Artificial Sequence
  Synthetic oligonucleotide; TAAAGCTT chr2 60448342 60448361 60448358 +
atgtatataaaagtattcta

SEQ ID NO: 190208 - DNA, 20 bp, Artificial Sequence
  Synthetic oligonucleotide; GACTGCTT chr2 60448453 60448472 60448469 +
aagatagaaaaacagacaat

SEQ ID NO: 190209 - DNA, 20 bp, Artificial Sequence
  Synthetic oligonucleotide; TCTGGATT chr2 60448460 60448479 60448476 +
aaaaacagacaatgactgct

SEQ ID NO: 190210 - DNA, 20 bp, Artificial Sequence
  Synthetic oligonucleotide; TATTGTTT chr2 60448566 60448585 60448582 +
gtcagaggaaagaaatataa

SEQ ID NO: 190211 - DNA, 20 bp, Artificial Sequence
  Synthetic oligonucleotide; GTGTGCTT chr2 60448617 60448636 60448633 +
tgaactcttgaagaaggaag

SEQ ID NO: 190212 - DNA, 20 bp, Artificial Sequence
  Synthetic oligonucleotide; ATCTGCTT chr2 60448672 60448691 60448688 +
ccagactcaaaattcctcaa

SEQ ID NO: 190213 - DNA, 20 bp, Artificial Sequence
  Synthetic oligonucleotide; CACTGATT chr2 60448788 60448807 60448804 +
cctactattacttccgggga

SEQ ID NO: 190214 - DNA, 20 bp, Artificial Sequence
  Synthetic oligonucleotide; AAGGGCTT chr2 60448937 60448956 60448953 +
aagatattcctgaccacttg

SEQ ID NO: 190215 - DNA, 20 bp, Artificial Sequence
  Synthetic oligonucleotide; CTTGGTTT chr2 60448942 60448961 60448958 +
attcctgaccacttgaaggg

SEQ ID NO: 190216 - DNA, 20 bp, Artificial Sequence
  Synthetic oligonucleotide; CAAGGTTT chr2 60449003 60449022 60449019 +
gtgcccagaaaatatgctgc

SEQ ID NO: 190217 - DNA, 20 bp, Artificial Sequence
  Synthetic oligonucleotide; AGCAGATT chr2 60449031 60449050 60449047 +
ggggcactcagttagacctc

SEQ ID NO: 190218 - DNA, 20 bp, Artificial Sequence
  Synthetic oligonucleotide; CCAAGATT chr2 60449039 60449058 60449055 +
cagttagacctcagcagatt

SEQ ID NO: 190219 - DNA, 20 bp, Artificial Sequence
  Synthetic oligonucleotide; AAGAGTTT chr2 60449060 60449079 60449076 +
caagattgcactccttgcct

SEQ ID NO: 190220 - DNA, 20 bp, Artificial Sequence
  Synthetic oligonucleotide; ACTGGTTT chr2 60449081 60449100 60449097 +
agagttttctttaaatgatc

SEQ ID NO: 190221 - DNA, 20 bp, Artificial Sequence
  Synthetic oligonucleotide; AGGGGCTT chr2 60449147 60449166 60449163 +
tgctggatgctgggtgctgc

SEQ ID NO: 190222 - DNA, 20 bp, Artificial Sequence
  Synthetic oligonucleotide; GGTGGCTT chr2 60449232 60449251 60449248 +
gtaataatctgtccgggcgc

SEQ ID NO: 190223 - DNA, 20 bp, Artificial Sequence
  Synthetic oligonucleotide; AAAGGCTT chr2 60449562 60449581 60449578 +
aataatctgaacagcccaca

SEQ ID NO: 190224 - DNA, 20 bp, Artificial Sequence
  Synthetic oligonucleotide; GGCAGATT chr2 60449718 60449737 60449734 +
aggacacagtgagaacccct

SEQ ID NO: 190225 - DNA, 20 bp, Artificial Sequence
  Synthetic oligonucleotide; CCCTGCTT chr2 60449738 60449757 60449754 +
ggcagatttgtgagcctctt

SEQ ID NO: 190226 - DNA, 20 bp, Artificial Sequence
  Synthetic oligonucleotide; TGGGGTTT chr2 60449818 60449837 60449834 +
cccaaattgtcaatcttgta

SEQ ID NO: 190227 - DNA, 20 bp, Artificial Sequence
  Synthetic oligonucleotide; GCGAGATT chr2 60450111 60450130 60450127 +
actccagcctgggtgacaga

SEQ ID NO: 190228 - DNA, 20 bp, Artificial Sequence
  Synthetic oligonucleotide; TACCGTTT chr2 60450169 60450188 60450185 +
aatggctagccctaacacaa

SEQ ID NO: 190229 - DNA, 20 bp, Artificial Sequence
  Synthetic oligonucleotide; TTCTGTTT chr2 60450249 60450268 60450265 +
gggaaaagacagtctttttg

SEQ ID NO: 190230 - DNA, 20 bp, Artificial Sequence
  Synthetic oligonucleotide; GTTTGTTT chr2 60450253 60450272 60450269 +
aaagacagtctttttgttct

SEQ ID NO: 190231 - DNA, 20 bp, Artificial Sequence
  Synthetic oligonucleotide; CCAGGATT chr2 60450480 60450499 60450496 +
ggctgaacttgtctcaagac

SEQ ID NO: 190232 - DNA, 20 bp, Artificial Sequence
  Synthetic oligonucleotide; TGTTGTTT chr2 60450487 60450506 60450503 +
cttgtctcaagacccaggat

SEQ ID NO: 190233 - DNA, 20 bp, Artificial Sequence
  Synthetic oligonucleotide; TTATGTTT chr2 60450595 60450614 60450611 +
tcacagaaaccctaatggtc

SEQ ID NO: 190234 - DNA, 20 bp, Artificial Sequence
  Synthetic oligonucleotide; GAGGGTTT chr2 60450635 60450654 60450651 +
ggcagagcatggggcaggga

SEQ ID NO: 190235 - DNA, 20 bp, Artificial Sequence
  Synthetic oligonucleotide; CAGAGTTT chr2 60450937 60450956 60450953 +
actccctttgatcagttaaa

SEQ ID NO: 190236 - DNA, 20 bp, Artificial Sequence
  Synthetic oligonucleotide; CCTGGCTT chr2 60450978 60450997 60450994 +
ctggacaagaaaccagaaaa

SEQ ID NO: 190237 - DNA, 20 bp, Artificial Sequence
  Synthetic oligonucleotide; CTCTGCTT chr2 60450986 60451005 60451002 +
gaaaccagaaaacctggctt

SEQ ID NO: 190238 - DNA, 20 bp, Artificial Sequence
  Synthetic oligonucleotide; GTAGGATT chr2 60451249 60451268 60451265 +
tctagccagaaggtggatag

SEQ ID NO: 190239 - DNA, 20 bp, Artificial Sequence
  Synthetic oligonucleotide; TGTTGTTT chr2 60451345 60451364 60451361 +
aaacctattttaatttgcta

SEQ ID NO: 190240 - DNA, 20 bp, Artificial Sequence
  Synthetic oligonucleotide; ACCTGTTT chr2 60451442 60451461 60451458 +
ggccagaaagaatttttacc

SEQ ID NO: 190241 - DNA, 20 bp, Artificial Sequence
  Synthetic oligonucleotide; CTGTGATT chr2 60451498 60451517 60451514 +
ttctaaggaatagagcattg

SEQ ID NO: 190242 - DNA, 20 bp, Artificial Sequence
  Synthetic oligonucleotide; AGAAGTTT chr2 60451587 60451606 60451603 +
tttcctgatgtaagtactaa

SEQ ID NO: 190243 - DNA, 20 bp, Artificial Sequence
  Synthetic oligonucleotide; TTATGTTT chr2 60451594 60451613 60451610 +
atgtaagtactaaagaagtt

SEQ ID NO: 190244 - DNA, 20 bp, Artificial Sequence
  Synthetic oligonucleotide; GTTTGTTT chr2 60451598 60451617 60451614 +
aagtactaaagaagttttat

SEQ ID NO: 190245 - DNA, 20 bp, Artificial Sequence
  Synthetic oligonucleotide; GAAGGTTT chr2 60451629 60451648 60451645 +
tgcattaagatatatttcct

SEQ ID NO: 190246 - DNA, 20 bp, Artificial Sequence
  Synthetic oligonucleotide; TTAGGATT chr2 60451691 60451710 60451707 +
actgacatttatcaccttct

SEQ ID NO: 190247 - DNA, 20 bp, Artificial Sequence
  Synthetic oligonucleotide; ACAGGATT chr2 60451790 60451809 60451806 +
caaaagcatatatttgaaaa

SEQ ID NO: 190248 - DNA, 20 bp, Artificial Sequence
  Synthetic oligonucleotide; CTATGATT chr2 60451915 60451934 60451931 +
ctacattaattatgatattg

SEQ ID NO: 190249 - DNA, 20 bp, Artificial Sequence
  Synthetic oligonucleotide; CCAAGTTT chr2 60451928 60451947 60451944 +
gatattgctatgatttattc

SEQ ID NO: 190250 - DNA, 20 bp, Artificial Sequence
  Synthetic oligonucleotide; TTTTGATT chr2 60451940 60451959 60451956 +
atttattcccaagttttgca

SEQ ID NO: 190251 - DNA, 20 bp, Artificial Sequence
  Synthetic oligonucleotide; GCTGGTTT chr2 60452257 60452276 60452273 +
caatacaggtaattaggttg

SEQ ID NO: 190252 - DNA, 20 bp, Artificial Sequence
  Synthetic oligonucleotide; GACTGATT chr2 60452320 60452339 60452336 +
tccacgggccctctctatgg

SEQ ID NO: 190253 - DNA, 20 bp, Artificial Sequence
  Synthetic oligonucleotide; GTCTGTTT chr2 60452344 60452363 60452360 +
gattcactgttccaatgtgg

SEQ ID NO: 190254 - DNA, 20 bp, Artificial Sequence
  Synthetic oligonucleotide; TTTTGTTT chr2 60452352 60452371 60452368 +
gttccaatgtgggtctgttt

SEQ ID NO: 190255 - DNA, 20 bp, Artificial Sequence
  Synthetic oligonucleotide; AACGGCTT chr2 60452440 60452459 60452456 +
gcaggactctgtcttcgcac

SEQ ID NO: 190256 - DNA, 20 bp, Artificial Sequence
  Synthetic oligonucleotide; GGGGGCTT chr2 60452538 60452557 60452554 +
cacgcgtccaccccacccct

SEQ ID NO: 190257 - DNA, 20 bp, Artificial Sequence
  Synthetic oligonucleotide; TCGAGCTT chr2 60452572 60452591 60452588 +
ttctcagaacttaagggctc

SEQ ID NO: 190258 - DNA, 20 bp, Artificial Sequence
  Synthetic oligonucleotide; CAATGATT chr2 60452705 60452724 60452721 +
agtacaggtgtgacttggcc

SEQ ID NO: 190259 - DNA, 20 bp, Artificial Sequence
  Synthetic oligonucleotide; ACTAGCTT chr2 60452725 60452744 60452741 +
caatgattttctgttctcta

SEQ ID NO: 190260 - DNA, 20 bp, Artificial Sequence
  Synthetic oligonucleotide; GCATGATT chr2 60452784 60452803 60452800 +
tcgagccactggcatcttaa

SEQ ID NO: 190261 - DNA, 20 bp, Artificial Sequence
  Synthetic oligonucleotide; CAATGATT chr2 60453136 60453155 60453152 +
aagttcaacgtcaaagcagc

SEQ ID NO: 190262 - DNA, 20 bp, Artificial Sequence
  Synthetic oligonucleotide; TGTAGTTT chr2 60453220 60453239 60453236 +
aaattgcaccaaaaactgcc

SEQ ID NO: 190263 - DNA, 20 bp, Artificial Sequence
  Synthetic oligonucleotide; TGCAGTTT chr2 60453238 60453257 60453254 +
cctgtagtttctttcaaaca

SEQ ID NO: 190264 - DNA, 20 bp, Artificial Sequence
  Synthetic oligonucleotide; ATGGGTTT chr2 60453739 60453758 60453755 +
tttaaaagcacagcccccct

SEQ ID NO: 190265 - DNA, 20 bp, Artificial Sequence
  Synthetic oligonucleotide; TCCCGCTT chr2 60453753 60453772 60453769 +
ccccctatgggtttaggggc

SEQ ID NO: 190266 - DNA, 20 bp, Artificial Sequence
  Synthetic oligonucleotide; AATGGCTT chr2 60453778 60453797 60453794 +
ctttagaggatacttgggga

SEQ ID NO: 190267 - DNA, 20 bp, Artificial Sequence
  Synthetic oligonucleotide; AATAGTTT chr2 60453839 60453858 60453855 +
tgatacacgtgctcccttga

SEQ ID NO: 190268 - DNA, 20 bp, Artificial Sequence
  Synthetic oligonucleotide; CCAAGTTT chr2 60453903 60453922 60453919 +
aaccatcgagctgtgttcag

SEQ ID NO: 190269 - DNA, 20 bp, Artificial Sequence
  Synthetic oligonucleotide; ACTGGATT chr2 60453939 60453958 60453955 +
aagtacaatgacccgtgtga

SEQ ID NO: 190270 - DNA, 20 bp, Artificial Sequence
  Synthetic oligonucleotide; GTTCGTTT chr2 60454254 60454273 60454270 +
gtccatttctctaacaatgg

SEQ ID NO: 190271 - DNA, 20 bp, Artificial Sequence
  Synthetic oligonucleotide; CAGGGCTT chr2 60454282 60454301 60454298 +
attttctattgggaaatatg

SEQ ID NO: 190272 - DNA, 20 bp, Artificial Sequence
  Synthetic oligonucleotide; AGAGGCTT chr2 60454583 60454602 60454599 +
tgtgtgtacggagggggaaa

SEQ ID NO: 190273 - DNA, 20 bp, Artificial Sequence
  Synthetic oligonucleotide; TGAGGCTT chr2 60454664 60454683 60454680 +
aagcaggagaggatggggcc

SEQ ID NO: 190274 - DNA, 20 bp, Artificial Sequence
  Synthetic oligonucleotide; TTATGATT chr2 60454822 60454841 60454838 +
tcaagttctcacttctagca

SEQ ID NO: 190275 - DNA, 20 bp, Artificial Sequence
  Synthetic oligonucleotide; AAGAGTTT chr2 60455073 60455092 60455089 +
ggaggtaatataggcactgg

SEQ ID NO: 190276 - DNA, 20 bp, Artificial Sequence
  Synthetic oligonucleotide; TCTGGTTT chr2 60455080 60455099 60455096 +
atataggcactggaagagtt

SEQ ID NO: 190277 - DNA, 20 bp, Artificial Sequence
  Synthetic oligonucleotide; TCCTGTTT chr2 60455118 60455137 60455134 +
agaaatagaatttgcggtat

SEQ ID NO: 190278 - DNA, 20 bp, Artificial Sequence
  Synthetic oligonucleotide; TGAAGATT chr2 60455143 60455162 60455159 +
tttattaagttgttctcaaa

SEQ ID NO: 190279 - DNA, 20 bp, Artificial Sequence
  Synthetic oligonucleotide; TGAGGATT chr2 60455230 60455249 60455246 +
gcctgttacaaaaacttact

SEQ ID NO: 190280 - DNA, 20 bp, Artificial Sequence
  Synthetic oligonucleotide; TTAAGATT chr2 60455330 60455349 60455346 +
aatgtgcatgttattttata

SEQ ID NO: 190281 - DNA, 20 bp, Artificial Sequence
  Synthetic oligonucleotide; TCATGTTT chr2 60455400 60455419 60455416 +
atatcatgttggctaggttc

SEQ ID NO: 190282 - DNA, 20 bp, Artificial Sequence
  Synthetic oligonucleotide; ATCAGCTT chr2 60455417 60455436 60455433 +
ttctcatgtttctattgttc

SEQ ID NO: 190283 - DNA, 20 bp, Artificial Sequence
  Synthetic oligonucleotide; CTGTGATT chr2 60455537 60455556 60455553 +
ccatgtaaatcaaacataat

SEQ ID NO: 190284 - DNA, 20 bp, Artificial Sequence
  Synthetic oligonucleotide; AGATGTTT chr2 60455552 60455571 60455568 +
ataatctgtgatttatcacc

SEQ ID NO: 190285 - DNA, 20 bp, Artificial Sequence
  Synthetic oligonucleotide; ATTTGATT chr2 60455579 60455598 60455595 +
tgcactcctccccattcccc

SEQ ID NO: 190286 - DNA, 20 bp, Artificial Sequence
  Synthetic oligonucleotide; AGAGGTTT chr2 60455758 60455777 60455774 +
aaagagtaatagggacacac

SEQ ID NO: 190287 - DNA, 20 bp, Artificial Sequence
  Synthetic oligonucleotide; TTTGGATT chr2 60455855 60455874 60455871 +
ctatctgtcttgagcagcat

SEQ ID NO: 190288 - DNA, 20 bp, Artificial Sequence
  Synthetic oligonucleotide; TTCAGTTT chr2 60455861 60455880 60455877 +
gtcttgagcagcattttgga

SEQ ID NO: 190289 - DNA, 20 bp, Artificial Sequence
  Synthetic oligonucleotide; AGTGGATT chr2 60455997 60456016 60456013 +
attctccaacatcctttctc

SEQ ID NO: 190290 - DNA, 20 bp, Artificial Sequence
  Synthetic oligonucleotide; ACTGGCTT chr2 60456036 60456055 60456052 +
actctctccttcccacccaa

SEQ ID NO: 190291 - DNA, 20 bp, Artificial Sequence
  Synthetic oligonucleotide; AACGGCTT chr2 60456189 60456208 60456205 +
ctaccacaagaagacaacag

SEQ ID NO: 190292 - DNA, 20 bp, Artificial Sequence
  Synthetic oligonucleotide; TTTTGTTT chr2 60456195 60456214 60456211 +
caagaagacaacagaacggc

SEQ ID NO: 190293 - DNA, 20 bp, Artificial Sequence
  Synthetic oligonucleotide; TTTGGTTT chr2 60456201 60456220 60456217 +
gacaacagaacggcttttgt

SEQ ID NO: 190294 - DNA, 20 bp, Artificial Sequence
  Synthetic oligonucleotide; ATGTGTTT chr2 60456279 60456298 60456295 +
ggacacgatatcacagaggt

SEQ ID NO: 190295 - DNA, 20 bp, Artificial Sequence
  Synthetic oligonucleotide; CACAGATT chr2 60456335 60456354 60456351 +
agtatttgtaaaagtgacaa

SEQ ID NO: 190296 - DNA, 20 bp, Artificial Sequence
  Synthetic oligonucleotide; TAAGGATT chr2 60456345 60456364 60456361 +
aaagtgacaacacagatttc

SEQ ID NO: 190297 - DNA, 20 bp, Artificial Sequence
  Synthetic oligonucleotide; GGCTGATT chr2 60456523 60456542 60456539 +
atgcatctcaggaaatcagt

SEQ ID NO: 190298 - DNA, 20 bp, Artificial Sequence
  Synthetic oligonucleotide; CAAAGATT chr2 60456532 60456551 60456548 +
aggaaatcagtggctgattc

SEQ ID NO: 190299 - DNA, 20 bp, Artificial Sequence
  Synthetic oligonucleotide; GGCTGCTT chr2 60456566 60456585 60456582 +
tgtctggctacacccctagt

SEQ ID NO: 190300 - DNA, 20 bp, Artificial Sequence
  Synthetic oligonucleotide; CTTTGTTT chr2 60456650 60456669 60456666 +
aacaaaacaaaacctgatgc

SEQ ID NO: 190301 - DNA, 20 bp, Artificial Sequence
  Synthetic oligonucleotide; TCCAGATT chr2 60456657 60456676 60456673 +
caaaacctgatgcctttgtt

SEQ ID NO: 190302 - DNA, 20 bp, Artificial Sequence
  Synthetic oligonucleotide; TTTAGATT chr2 60456665 60456684 60456681 +
gatgcctttgtttccagatt

SEQ ID NO: 190303 - DNA, 20 bp, Artificial Sequence
  Synthetic oligonucleotide; AGCTGATT chr2 60456726 60456745 60456742 +
ctcttacatggaaaccaaag

SEQ ID NO: 190304 - DNA, 20 bp, Artificial Sequence
  Synthetic oligonucleotide; AAAAGTTT chr2 60456839 60456858 60456855 +
gcaaaaaatttaaaggaaat

SEQ ID NO: 190305 - DNA, 20 bp, Artificial Sequence
  Synthetic oligonucleotide; GCAAGTTT chr2 60456862 60456881 60456878 +
agtttaagatgctattacca

SEQ ID NO: 190306 - DNA, 20 bp, Artificial Sequence
  Synthetic oligonucleotide; TTATGTTT chr2 60456876 60456895 60456892 +
ttaccagcaagttttttcac

SEQ ID NO: 190307 - DNA, 20 bp, Artificial Sequence
  Synthetic oligonucleotide; AATGGATT chr2 60456885 60456904 60456901 +
agttttttcacttatgtttg

SEQ ID NO: 190308 - DNA, 20 bp, Artificial Sequence
  Synthetic oligonucleotide; GTAAGTTT chr2 60456909 60456928 60456925 +
gatttctgctaagagatgga

SEQ ID NO: 190309 - DNA, 20 bp, Artificial Sequence
  Synthetic oligonucleotide; CAGGGTTT chr2 60456988 60457007 60457004 +
gaaagccttaaaactatgtc

SEQ ID NO: 190310 - DNA, 20 bp, Artificial Sequence
  Synthetic oligonucleotide; AGAAGCTT chr2 60457160 60457179 60457176 +
gtgtgtcaaatgaggacaca

SEQ ID NO: 190311 - DNA, 20 bp, Artificial Sequence
  Synthetic oligonucleotide; AGTGGTTT chr2 60457263 60457282 60457279 +
actgccaaaaaaacacagac

SEQ ID NO: 190312 - DNA, 20 bp, Artificial Sequence
  Synthetic oligonucleotide; CTCTGTTT chr2 60457394 60457413 60457410 +
taaaagatcaaattaagtgc

SEQ ID NO: 190313 - DNA, 20 bp, Artificial Sequence
  Synthetic oligonucleotide; AACAGCTT chr2 60457471 60457490 60457487 +
taaaatttcaagttacgaca

SEQ ID NO: 190314 - DNA, 20 bp, Artificial Sequence
  Synthetic oligonucleotide; GCGGGCTT chr2 60457550 60457569 60457566 +
acaaaaaagtattgactaaa

SEQ ID NO: 190315 - DNA, 20 bp, Artificial Sequence
  Synthetic oligonucleotide; ATATGCTT chr2 60457566 60457585 60457582 +
taaagcgggctttctcttta

SEQ ID NO: 190316 - DNA, 20 bp, Artificial Sequence
  Synthetic oligonucleotide; TTTAGTTT chr2 60457613 60457632 60457629 +
aatctaaatataaagcacca

SEQ ID NO: 190317 - DNA, 20 bp, Artificial Sequence
  Synthetic oligonucleotide; ATTGGTTT chr2 60457646 60457665 60457662 +
aatgaaaaaaactgcaaaac

SEQ ID NO: 190318 - DNA, 20 bp, Artificial Sequence
  Synthetic oligonucleotide; ATTAGCTT chr2 60457772 60457791 60457788 +
ctacataacaaaccaacgtt

SEQ ID NO: 190319 - DNA, 20 bp, Artificial Sequence
  Synthetic oligonucleotide; TATGGCTT chr2 60457891 60457910 60457907 +
gctcccccaaaccgccatta

SEQ ID NO: 190320 - DNA, 20 bp, Artificial Sequence
  Synthetic oligonucleotide; TTTTGTTT chr2 60457920 60457939 60457936 +
tcatctgtaatgtcacactt

SEQ ID NO: 190321 - DNA, 20 bp, Artificial Sequence
  Synthetic oligonucleotide; ACAAGCTT chr2 60458081 60458100 60458097 +
aacaagcaacagttaaaaat

SEQ ID NO: 190322 - DNA, 20 bp, Artificial Sequence
  Synthetic oligonucleotide; GTATGTTT chr2 60458250 60458269 60458266 +
atcttaaacctttccccaat

SEQ ID NO: 190323 - DNA, 20 bp, Artificial Sequence
  Synthetic oligonucleotide; AAGTGTTT chr2 60458393 60458412 60458409 +
gttcccccctaaacataatg

SEQ ID NO: 190324 - DNA, 20 bp, Artificial Sequence
  Synthetic oligonucleotide; AAAAGTTT chr2 60458435 60458454 60458451 +
ttcttaacatttatatttaa

SEQ ID NO: 190325 - DNA, 20 bp, Artificial Sequence
  Synthetic oligonucleotide; TTCTGTTT chr2 60458505 60458524 60458521 +
tcatttctatgttaagtgta

SEQ ID NO: 190326 - DNA, 20 bp, Artificial Sequence
  Synthetic oligonucleotide; CAGCGCTT chr2 60458520 60458539 60458536 +
gtgtattctgtttccattca

SEQ ID NO: 190327 - DNA, 20 bp, Artificial Sequence
  Synthetic oligonucleotide; CAAAGTTT chr2 60458577 60458596 60458593 +
atagtcaagtaaatggctgg

SEQ ID NO: 190328 - DNA, 20 bp, Artificial Sequence
  Synthetic oligonucleotide; TTTAGTTT chr2 60458592 60458611 60458608 +
gctggcaaagtttttttttt

SEQ ID NO: 190329 - DNA, 20 bp, Artificial Sequence
  Synthetic oligonucleotide; ATGAGATT chr2 60458617 60458636 60458633 +
tttttaaaaaatgctcctca

SEQ ID NO: 190330 - DNA, 20 bp, Artificial Sequence
  Synthetic oligonucleotide; GCAGGTTT chr2 60458721 60458740 60458737 +
cacttaattgtcctatctga

SEQ ID NO: 190331 - DNA, 20 bp, Artificial Sequence
  Synthetic oligonucleotide; CTCTGATT chr2 60458751 60458770 60458767 +
tttatactcaacctctgtat

SEQ ID NO: 190332 - DNA, 20 bp, Artificial Sequence
  Synthetic oligonucleotide; GCTAGCTT chr2 60458822 60458841 60458838 +
gaacaccaactggggcagat

SEQ ID NO: 190333 - DNA, 20 bp, Artificial Sequence
  Synthetic oligonucleotide; ATTAGCTT chr2 60459050 60459069 60459066 +
ttaatcatcattgtatcaat

SEQ ID NO: 190334 - DNA, 20 bp, Artificial Sequence
  Synthetic oligonucleotide; TCTAGTTT chr2 60459068 60459087 60459084 +
atattagcttatatacctgt

SEQ ID NO: 190335 - DNA, 20 bp, Artificial Sequence
  Synthetic oligonucleotide; TAAAGTTT chr2 60459186 60459205 60459202 +
caatatggtatacaaggtct

SEQ ID NO: 190336 - DNA, 20 bp, Artificial Sequence
  Synthetic oligonucleotide; ATTTGATT chr2 60459197 60459216 60459213 +
acaaggtcttaaagtttatc

SEQ ID NO: 190337 - DNA, 20 bp, Artificial Sequence
  Synthetic oligonucleotide; CAGGGCTT chr2 60459327 60459346 60459343 +
tagtgtatttaattgcgttc

SEQ ID NO: 190338 - DNA, 20 bp, Artificial Sequence
  Synthetic oligonucleotide; CATTGTTT chr2 60459360 60459379 60459376 +
cattacacattcaatttaat

SEQ ID NO: 190339 - DNA, 20 bp, Artificial Sequence
  Synthetic oligonucleotide; AGTAGCTT chr2 60459427 60459446 60459443 +
taagctctcaccaggagcaa

SEQ ID NO: 190340 - DNA, 20 bp, Artificial Sequence
  Synthetic oligonucleotide; ATCAGTTT chr2 60459448 60459467 60459464 +
gtagcttttatactggtata

SEQ ID NO: 190341 - DNA, 20 bp, Artificial Sequence
  Synthetic oligonucleotide; TTTTGTTT chr2 60459453 60459472 60459469 +
ttttatactggtataatcag

SEQ ID NO: 190342 - DNA, 20 bp, Artificial Sequence
  Synthetic oligonucleotide; TGATGATT chr2 60459484 60459503 60459500 +
aaattaaactaaaggaaaaa

SEQ ID NO: 190343 - DNA, 20 bp, Artificial Sequence
  Synthetic oligonucleotide; TAAGGTTT chr2 60459568 60459587 60459584 +
tagaattatatgctagttcc

SEQ ID NO: 190344 - DNA, 20 bp, Artificial Sequence
  Synthetic oligonucleotide; ACAAGTTT chr2 60459604 60459623 60459620 +
acccaatgctgaattaagct

SEQ ID NO: 190345 - DNA, 20 bp, Artificial Sequence
  Synthetic oligonucleotide; TGTGGTTT chr2 60459636 60459655 60459652 +
caagtagaaagaaccatcga

SEQ ID NO: 190346 - DNA, 20 bp, Artificial Sequence
  Synthetic oligonucleotide; TTCTGTTT chr2 60459695 60459714 60459711 +
caaatgatagaataaacttg

SEQ ID NO: 190347 - DNA, 20 bp, Artificial Sequence
  Synthetic oligonucleotide; TAGAGATT chr2 60459786 60459805 60459802 +
agagacagacatttagctca

SEQ ID NO: 190348 - DNA, 20 bp, Artificial Sequence
  Synthetic oligonucleotide; GACTGTTT chr2 60459838 60459857 60459854 +
ctatagagggttaatccaaa

SEQ ID NO: 190349 - DNA, 20 bp, Artificial Sequence
  Synthetic oligonucleotide; ACATGTTT chr2 60459960 60459979 60459976 +
gaacggaactggaaacagca

SEQ ID NO: 190350 - DNA, 20 bp, Artificial Sequence
  Synthetic oligonucleotide; CTAAGTTT chr2 60460024 60460043 60460040 +
taacataccatacatgctgt

SEQ ID NO: 190351 - DNA, 20 bp, Artificial Sequence
  Synthetic oligonucleotide; CAAAGTTT chr2 60460079 60460098 60460095 +
tattgcacaagagaaaggct

SEQ ID NO: 190352 - DNA, 20 bp, Artificial Sequence
  Synthetic oligonucleotide; CTTAGCTT chr2 60460229 60460248 60460245 +
gtgacaagcactctcatatt

SEQ ID NO: 190353 - DNA, 20 bp, Artificial Sequence
  Synthetic oligonucleotide; TTCTGTTT chr2 60460243 60460262 60460259 +
catattcttagcttcgttac

SEQ ID NO: 190354 - DNA, 20 bp, Artificial Sequence
  Synthetic oligonucleotide; GTTTGTTT chr2 60460247 60460266 60460263 +
ttcttagcttcgttacttct

SEQ ID NO: 190355 - DNA, 20 bp, Artificial Sequence
  Synthetic oligonucleotide; GTTTGTTT chr2 60460251 60460270 60460267 +
tagcttcgttacttctgttt

SEQ ID NO: 190356 - DNA, 20 bp, Artificial Sequence
  Synthetic oligonucleotide; GTTTGTTT chr2 60460255 60460274 60460271 +
ttcgttacttctgtttgttt

SEQ ID NO: 190357 - DNA, 20 bp, Artificial Sequence
  Synthetic oligonucleotide; GTTTGTTT chr2 60460259 60460278 60460275 +
ttacttctgtttgtttgttt

SEQ ID NO: 190358 - DNA, 20 bp, Artificial Sequence
  Synthetic oligonucleotide; TTCAGTTT chr2 60460387 60460406 60460403 +
ggggtattaatatacctcta

SEQ ID NO: 190359 - DNA, 20 bp, Artificial Sequence
  Synthetic oligonucleotide; ATGTGTTT chr2 60460436 60460455 60460452 +
gatcactgtgccattttttc

SEQ ID NO: 190360 - DNA, 20 bp, Artificial Sequence
  Synthetic oligonucleotide; ATGCGTTT chr2 60460516 60460535 60460532 +
acgtccttccccacctggcc

SEQ ID NO: 190361 - DNA, 20 bp, Artificial Sequence
  Synthetic oligonucleotide; GTGAGCTT chr2 60460535 60460554 60460551 +
catgcgttttcatgtgcctg

SEQ ID NO: 190362 - DNA, 20 bp, Artificial Sequence
  Synthetic oligonucleotide; TGTGGCTT chr2 60460599 60460618 60460615 +
tttataaggcctttcgcccg

SEQ ID NO: 190363 - DNA, 20 bp, Artificial Sequence
  Synthetic oligonucleotide; GTGAGATT chr2 60460619 60460638 60460635 +
tgtggcttctcctgtggaca

SEQ ID NO: 190364 - DNA, 20 bp, Artificial Sequence
  Synthetic oligonucleotide; AGGCGATT chr2 60460843 60460862 60460859 +
tgctccgacgaggaggcaaa

SEQ ID NO: 190365 - DNA, 20 bp, Artificial Sequence
  Synthetic oligonucleotide; TCGAGCTT chr2 60460976 60460995 60460992 +
ggggcaggtcgaactccttc

SEQ ID NO: 190366 - DNA, 20 bp, Artificial Sequence
  Synthetic oligonucleotide; ATGCGCTT chr2 60460985 60461004 60461001 +
cgaactccttctcgagcttg

SEQ ID NO: 190367 - DNA, 20 bp, Artificial Sequence
  Synthetic oligonucleotide; AGCAGCTT chr2 60461027 60461046 60461043 +
gcgagctggggctgcccagc

SEQ ID NO: 190368 - DNA, 20 bp, Artificial Sequence
  Synthetic oligonucleotide; CCGCGCTT chr2 60461174 60461193 60461190 +
cctcggcctcggccaggtgg

SEQ ID NO: 190369 - DNA, 20 bp, Artificial Sequence
  Synthetic oligonucleotide; TTATGCTT chr2 60461180 60461199 60461196 +
cctcggccaggtggccgcgc

SEQ ID NO: 190370 - DNA, 20 bp, Artificial Sequence
  Synthetic oligonucleotide; GGACGATT chr2 60461596 60461615 60461612 +
tcggacttgaccgtcatggg

SEQ ID NO: 190371 - DNA, 20 bp, Artificial Sequence
  Synthetic oligonucleotide; TGGCGCTT chr2 60461624 60461643 60461640 +
tgtgcatgtgcgtcttcatg

SEQ ID NO: 190372 - DNA, 20 bp, Artificial Sequence
  Synthetic oligonucleotide; TTCAGCTT chr2 60461630 60461649 60461646 +
tgtgcgtcttcatgtggcgc

SEQ ID NO: 190373 - DNA, 20 bp, Artificial Sequence
  Synthetic oligonucleotide; TAGGGCTT chr2 60461678 60461697 60461694 +
ggtcgcacaggttgcacttg

SEQ ID NO: 190374 - DNA, 20 bp, Artificial Sequence
  Synthetic oligonucleotide; GGCGGATT chr2 60461794 60461813 60461810 +
gggggctgggagggaggagg

SEQ ID NO: 190375 - DNA, 20 bp, Artificial Sequence
  Synthetic oligonucleotide; GGCGGCTT chr2 60461834 60461853 60461850 +
gggggggcgtcgccaggaag

SEQ ID NO: 190376 - DNA, 20 bp, Artificial Sequence
  Synthetic oligonucleotide; ATTGGATT chr2 60461975 60461994 60461991 +
tggcgggaggctccatagcc

SEQ ID NO: 190377 - DNA, 20 bp, Artificial Sequence
  Synthetic oligonucleotide; GTTCGCTT chr2 60462285 60462304 60462301 +
cggggtcaggggacttccgt

SEQ ID NO: 190378 - DNA, 20 bp, Artificial Sequence
  Synthetic oligonucleotide; AGTAGATT chr2 60462297 60462316 60462313 +
acttccgtgttcgctttcta

SEQ ID NO: 190379 - DNA, 20 bp, Artificial Sequence
  Synthetic oligonucleotide; GGCTGTTT chr2 60462359 60462378 60462375 +
gaaaccatgcactggtgaat

SEQ ID NO: 190380 - DNA, 20 bp, Artificial Sequence
  Synthetic oligonucleotide; CAATGTTT chr2 60462430 60462449 60462446 +
aaataatacaacaccaacat

SEQ ID NO: 190381 - DNA, 20 bp, Artificial Sequence
  Synthetic oligonucleotide; AATTGCTT chr2 60462460 60462479 60462476 +
tcactgaggcgggcatcagc

SEQ ID NO: 190382 - DNA, 20 bp, Artificial Sequence
  Synthetic oligonucleotide; TCTGGCTT chr2 60462664 60462683 60462680 +
gcagaaaaatcctgaccagt

SEQ ID NO: 190383 - DNA, 20 bp, Artificial Sequence
  Synthetic oligonucleotide; TGTAGTTT chr2 60462739 60462758 60462755 +
aactttccagttccatcagc

SEQ ID NO: 190384 - DNA, 20 bp, Artificial Sequence
  Synthetic oligonucleotide; CTCTGTTT chr2 60462774 60462793 60462790 +
gccatctcatctccatgtgc

SEQ ID NO: 190385 - DNA, 20 bp, Artificial Sequence
  Synthetic oligonucleotide; TTTGGCTT chr2 60462829 60462848 60462845 +
aaggtgacccaaggaaactt

SEQ ID NO: 190386 - DNA, 20 bp, Artificial Sequence
  Synthetic oligonucleotide; CCCAGCTT chr2 60462844 60462863 60462860 +
aactttttggcttcctaaat

SEQ ID NO: 190387 - DNA, 20 bp, Artificial Sequence
  Synthetic oligonucleotide; AGATGCTT chr2 60462960 60462979 60462976 +
acaatgttctatggccctaa

SEQ ID NO: 190388 - DNA, 20 bp, Artificial Sequence
  Synthetic oligonucleotide; GAATGTTT chr2 60463144 60463163 60463160 +
acgtccatttttatctcaaa

SEQ ID NO: 190389 - DNA, 20 bp, Artificial Sequence
  Synthetic oligonucleotide; TTCAGATT chr2 60463176 60463195 60463192 +
aatctgaaagaaaaacttca

SEQ ID NO: 190390 - DNA, 20 bp, Artificial Sequence
  Synthetic oligonucleotide; CCTAGTTT chr2 60463292 60463311 60463308 +
gacttaagcagacacagcat

SEQ ID NO: 190391 - DNA, 20 bp, Artificial Sequence
  Synthetic oligonucleotide; CATTGTTT chr2 60463369 60463388 60463385 +
tgctacactatcctcctcct

SEQ ID NO: 190392 - DNA, 20 bp, Artificial Sequence
  Synthetic oligonucleotide; CCCTGCTT chr2 60463514 60463533 60463530 +
ccaagccgtctggagagggg

SEQ ID NO: 190393 - DNA, 20 bp, Artificial Sequence
  Synthetic oligonucleotide; GCCAGCTT chr2 60463587 60463606 60463603 +
tgccactttggcaaagaagg

SEQ ID NO: 190394 - DNA, 20 bp, Artificial Sequence
  Synthetic oligonucleotide; AACAGTTT chr2 60463690 60463709 60463706 +
tatatatggaataactgacc

SEQ ID NO: 190395 - DNA, 20 bp, Artificial Sequence
  Synthetic oligonucleotide; CAGAGATT chr2 60463773 60463792 60463789 +
atgagaaaaacaaaacttcc

SEQ ID NO: 190396 - DNA, 20 bp, Artificial Sequence
  Synthetic oligonucleotide; ACAAGATT chr2 60464161 60464180 60464177 +
ctcctgggtaaatctcttaa

SEQ ID NO: 190397 - DNA, 20 bp, Artificial Sequence
  Synthetic oligonucleotide; TTAGGTTT chr2 60464188 60464207 60464204 +
tagatggtaagataccaaaa

SEQ ID NO: 190398 - DNA, 20 bp, Artificial Sequence
  Synthetic oligonucleotide; GAAAGATT chr2 60464233 60464252 60464249 +
tggaagggggaaaaaaggca

SEQ ID NO: 190399 - DNA, 20 bp, Artificial Sequence
  Synthetic oligonucleotide; TTTTGTTT chr2 60464283 60464302 60464299 +
gtatcacattatctgcctat

SEQ ID NO: 190400 - DNA, 20 bp, Artificial Sequence
  Synthetic oligonucleotide; AAAAGCTT chr2 60464315 60464334 60464331 +
cctctcttcaaagggaaata

SEQ ID NO: 190401 - DNA, 20 bp, Artificial Sequence
  Synthetic oligonucleotide; TGTGGCTT chr2 60464424 60464443 60464440 +
gttccaactacatgatcctc

SEQ ID NO: 190402 - DNA, 20 bp, Artificial Sequence
  Synthetic oligonucleotide; AAAAGATT chr2 60464504 60464523 60464520 +
cgatctgagttgggcaagta

SEQ ID NO: 190403 - DNA, 20 bp, Artificial Sequence
  Synthetic oligonucleotide; CATCGATT chr2 60464583 60464602 60464599 +
ttatattttaccttataaaa

SEQ ID NO: 190404 - DNA, 20 bp, Artificial Sequence
  Synthetic oligonucleotide; GCTGGTTT chr2 60464622 60464641 60464638 +
ctagactcataattagtggt

SEQ ID NO: 190405 - DNA, 20 bp, Artificial Sequence
  Synthetic oligonucleotide; AAAGGCTT chr2 60464718 60464737 60464734 +
tctcatttgtatcctttcaa

SEQ ID NO: 190406 - DNA, 20 bp, Artificial Sequence
  Synthetic oligonucleotide; TACAGTTT chr2 60464895 60464914 60464911 +
cttataatgagcatacaaca

SEQ ID NO: 190407 - DNA, 20 bp, Artificial Sequence
  Synthetic oligonucleotide; TTACGATT chr2 60464991 60465010 60465007 +
aatgtcaatgagaagggctg

SEQ ID NO: 190408 - DNA, 20 bp, Artificial Sequence
  Synthetic oligonucleotide; TAAAGATT chr2 60465004 60465023 60465020 +
agggctgttacgattgagac

SEQ ID NO: 190409 - DNA, 20 bp, Artificial Sequence
  Synthetic oligonucleotide; AGCTGCTT chr2 60465022 60465041 60465038 +
actaaagattacatggagag

SEQ ID NO: 190410 - DNA, 20 bp, Artificial Sequence
  Synthetic oligonucleotide; CACAGATT chr2 60465143 60465162 60465159 +
ccatattatattacagtgct

SEQ ID NO: 190411 - DNA, 20 bp, Artificial Sequence
  Synthetic oligonucleotide; TGATGATT chr2 60465228 60465247 60465244 +
tactttgttcataacatctt

SEQ ID NO: 190412 - DNA, 20 bp, Artificial Sequence
  Synthetic oligonucleotide; AATTGATT chr2 60465248 60465267 60465264 +
tgatgatttagaaagactgg

SEQ ID NO: 190413 - DNA, 20 bp, Artificial Sequence
  Synthetic oligonucleotide; CATTGATT chr2 60465280 60465299 60465296 +
gtgtggcaaaattagggcta

SEQ ID NO: 190414 - DNA, 20 bp, Artificial Sequence
  Synthetic oligonucleotide; CGGGGATT chr2 60465372 60465391 60465388 +
agagcctcattgggcattta

SEQ ID NO: 190415 - DNA, 20 bp, Artificial Sequence
  Synthetic oligonucleotide; GATTGTTT chr2 60465376 60465395 60465392 +
cctcattgggcatttacggg

SEQ ID NO: 190416 - DNA, 20 bp, Artificial Sequence
  Synthetic oligonucleotide; TTTTGATT chr2 60465381 60465400 60465397 +
ttgggcatttacggggattg

SEQ ID NO: 190417 - DNA, 20 bp, Artificial Sequence
  Synthetic oligonucleotide; ACTGGCTT chr2 60465470 60465489 60465486 +
aatcagctattagcccacct

SEQ ID NO: 190418 - DNA, 20 bp, Artificial Sequence
  Synthetic oligonucleotide; TCAAGATT chr2 60465564 60465583 60465580 +
aaagtcatgtgatctaagcc

SEQ ID NO: 190419 - DNA, 20 bp, Artificial Sequence
  Synthetic oligonucleotide; ACTAGATT chr2 60465618 60465637 60465634 +
gaggcctagctctattatcc

SEQ ID NO: 190420 - DNA, 20 bp, Artificial Sequence
  Synthetic oligonucleotide; ATTTGATT chr2 60465643 60465662 60465659 +
attgtaactctgggatagtc

SEQ ID NO: 190421 - DNA, 20 bp, Artificial Sequence
  Synthetic oligonucleotide; GTGAGTTT chr2 60465776 60465795 60465792 +
ctatcaggtcgaatgtgaat

SEQ ID NO: 190422 - DNA, 20 bp, Artificial Sequence
  Synthetic oligonucleotide; GGGTGATT chr2 60465797 60465816 60465813 +
tgagttttcattactaccag

SEQ ID NO: 190423 - DNA, 20 bp, Artificial Sequence
  Synthetic oligonucleotide; AACGGCTT chr2 60465844 60465863 60465860 +
taaccacattacacaccccg

SEQ ID NO: 190424 - DNA, 20 bp, Artificial Sequence
  Synthetic oligonucleotide; TCAGGTTT chr2 60466008 60466027 60466024 +
gccgccaagtggaatgggca

SEQ ID NO: 190425 - DNA, 20 bp, Artificial Sequence
  Synthetic oligonucleotide; TAGAGCTT chr2 60466020 60466039 60466036 +
aatgggcatcaggtttgttc

SEQ ID NO: 190426 - DNA, 20 bp, Artificial Sequence
  Synthetic oligonucleotide; CTATGTTT chr2 60466228 60466247 60466244 +
accaggctgaagaccgagaa

SEQ ID NO: 190427 - DNA, 20 bp, Artificial Sequence
  Synthetic oligonucleotide; CTCCGTTT chr2 60466318 60466337 60466334 +
tcccttccctccaaaagtgg

SEQ ID NO: 190428 - DNA, 20 bp, Artificial Sequence
  Synthetic oligonucleotide; CCAGGCTT chr2 60466449 60466468 60466465 +
tctgcaatctgtgacctaac

SEQ ID NO: 190429 - DNA, 20 bp, Artificial Sequence
  Synthetic oligonucleotide; CCCAGCTT chr2 60466460 60466479 60466476 +
tgacctaacccaggcttagg

SEQ ID NO: 190430 - DNA, 20 bp, Artificial Sequence
  Synthetic oligonucleotide; AGGTGCTT chr2 60466486 60466505 60466502 +
ttgggggaagggagcagatg

SEQ ID NO: 190431 - DNA, 20 bp, Artificial Sequence
  Synthetic oligonucleotide; GAGGGCTT chr2 60466526 60466545 60466542 +
ccacccagccctcaggacct

SEQ ID NO: 190432 - DNA, 20 bp, Artificial Sequence
  Synthetic oligonucleotide; CTAGGATT chr2 60466563 60466582 60466579 +
acacaataactctttgttac

SEQ ID NO: 190433 - DNA, 20 bp, Artificial Sequence
  Synthetic oligonucleotide; ACTGGCTT chr2 60466596 60466615 60466612 +
ggagttaacaaaaataaaca

SEQ ID NO: 190434 - DNA, 20 bp, Artificial Sequence
  Synthetic oligonucleotide; ACCTGCTT chr2 60466838 60466857 60466854 +
cacacttcttttcttcttga

SEQ ID NO: 190435 - DNA, 20 bp, Artificial Sequence
  Synthetic oligonucleotide; TTGTGTTT chr2 60466848 60466867 60466864 +
ttcttcttgaacctgctttt

SEQ ID NO: 190436 - DNA, 20 bp, Artificial Sequence
  Synthetic oligonucleotide; GCATGATT chr2 60466895 60466914 60466911 +
ccccctaaccttttagccat

SEQ ID NO: 190437 - DNA, 20 bp, Artificial Sequence
  Synthetic oligonucleotide; TTAAGTTT chr2 60466990 60467009 60467006 +
atttgtataaatggacaaat

SEQ ID NO: 190438 - DNA, 20 bp, Artificial Sequence
  Synthetic oligonucleotide; TTTTGATT chr2 60468316 60468335 60468332 +
aataaccctaaactgactcc

SEQ ID NO: 190439 - DNA, 20 bp, Artificial Sequence
  Synthetic oligonucleotide; TGGGGATT chr2 60468751 60468770 60468767 +
ttctgcactcatcccaggcg

SEQ ID NO: 190440 - DNA, 20 bp, Artificial Sequence
  Synthetic oligonucleotide; AGAAGTTT chr2 60468804 60468823 60468820 +
aggagaggcccctccagtgc

SEQ ID NO: 190441 - DNA, 20 bp, Artificial Sequence
  Synthetic oligonucleotide; AATAGATT chr2 60468899 60468918 60468915 +
tcacatttcaattccattaa

SEQ ID NO: 190442 - DNA, 20 bp, Artificial Sequence
  Synthetic oligonucleotide; CAGAGTTT chr2 60468985 60469004 60469001 +
aagagtggtgagttatttcc

SEQ ID NO: 190443 - DNA, 20 bp, Artificial Sequence
  Synthetic oligonucleotide; TTCTGTTT chr2 60468991 60469010 60469007 +
ggtgagttatttcccagagt

SEQ ID NO: 190444 - DNA, 20 bp, Artificial Sequence
  Synthetic oligonucleotide; TTTTGTTT chr2 60468996 60469015 60469012 +
gttatttcccagagtttctg

SEQ ID NO: 190445 - DNA, 20 bp, Artificial Sequence
  Synthetic oligonucleotide; AAGGGTTT chr2 60469032 60469051 60469048 +
ggtctttttgacaaaagtga

SEQ ID NO: 190446 - DNA, 20 bp, Artificial Sequence
  Synthetic oligonucleotide; GTTTGTTT chr2 60469036 60469055 60469052 +
tttttgacaaaagtgaaagg

SEQ ID NO: 190447 - DNA, 20 bp, Artificial Sequence
  Synthetic oligonucleotide; ATTTGCTT chr2 60469073 60469092 60469089 +
ggagaggtggtctttggttc

SEQ ID NO: 190448 - DNA, 20 bp, Artificial Sequence
  Synthetic oligonucleotide; TGTTGTTT chr2 60469091 60469110 60469107 +
tcatttgcttatttatttgt

SEQ ID NO: 190449 - DNA, 20 bp, Artificial Sequence
  Synthetic oligonucleotide; GTTTGATT chr2 60469095 60469114 60469111 +
ttgcttatttatttgttgtt

SEQ ID NO: 190450 - DNA, 20 bp, Artificial Sequence
  Synthetic oligonucleotide; GGGGGATT chr2 60469176 60469195 60469192 +
gtgggtagcctggaaacatg

SEQ ID NO: 190451 - DNA, 20 bp, Artificial Sequence
  Synthetic oligonucleotide; GCTGGTTT chr2 60469195 60469214 60469211 +
ggggggattttatctgcaag

SEQ ID NO: 190452 - DNA, 20 bp, Artificial Sequence
  Synthetic oligonucleotide; AGTAGATT chr2 60469269 60469288 60469285 +
caaaatgctgataggaaatg

SEQ ID NO: 190453 - DNA, 20 bp, Artificial Sequence
  Synthetic oligonucleotide; AATCGTTT chr2 60469281 60469300 60469297 +
aggaaatgagtagatttgtg

SEQ ID NO: 190454 - DNA, 20 bp, Artificial Sequence
  Synthetic oligonucleotide; CTTTGCTT chr2 60469308 60469327 60469324 +
ttttatgggacagagtccca

SEQ ID NO: 190455 - DNA, 20 bp, Artificial Sequence
  Synthetic oligonucleotide; TGTGGCTT chr2 60469448 60469467 60469464 +
aactggaaaccttacacaga

SEQ ID NO: 190456 - DNA, 20 bp, Artificial Sequence
  Synthetic oligonucleotide; TAAAGATT chr2 60469480 60469499 60469496 +
caatacaaagcaatggaaga

SEQ ID NO: 190457 - DNA, 20 bp, Artificial Sequence
  Synthetic oligonucleotide; CTGAGATT chr2 60469676 60469695 60469692 +
tcaatgaaacatttgtagca

SEQ ID NO: 190458 - DNA, 20 bp, Artificial Sequence
  Synthetic oligonucleotide; TTTGGTTT chr2 60469702 60469721 60469718 +
tttttttgagaagaggaaaa

SEQ ID NO: 190459 - DNA, 20 bp, Artificial Sequence
  Synthetic oligonucleotide; TGGGGATT chr2 60469718 60469737 60469734 +
aaaatttggtttgtgcaatc

SEQ ID NO: 190460 - DNA, 20 bp, Artificial Sequence
  Synthetic oligonucleotide; TACGGTTT chr2 60469727 60469746 60469743 +
tttgtgcaatctggggattt

SEQ ID NO: 190461 - DNA, 20 bp, Artificial Sequence
  Synthetic oligonucleotide; CCTAGCTT chr2 60469747 60469766 60469763 +
tacggtttatgtggtaagtg

SEQ ID NO: 190462 - DNA, 20 bp, Artificial Sequence
  Synthetic oligonucleotide; AGAGGTTT chr2 60469847 60469866 60469863 +
ggagacgctctgtgtgttct

SEQ ID NO: 190463 - DNA, 20 bp, Artificial Sequence
  Synthetic oligonucleotide; TGATGATT chr2 60469863 60469882 60469879 +
ttctagaggtttggagttca

SEQ ID NO: 190464 - DNA, 20 bp, Artificial Sequence
  Synthetic oligonucleotide; GTATGTTT chr2 60469918 60469937 60469934 +
actttgatggtgaacaaaca

SEQ ID NO: 190465 - DNA, 20 bp, Artificial Sequence
  Synthetic oligonucleotide; ATTAGCTT chr2 60469929 60469948 60469945 +
gaacaaacagtatgttttcc

SEQ ID NO: 190466 - DNA, 20 bp, Artificial Sequence
  Synthetic oligonucleotide; ACAAGATT chr2 60470056 60470075 60470072 +
gcacagccaaggcagttggg

SEQ ID NO: 190467 - DNA, 20 bp, Artificial Sequence
  Synthetic oligonucleotide; GACTGTTT chr2 60470301 60470320 60470317 +
aaacaagtatgtctacattt

SEQ ID NO: 190468 - DNA, 20 bp, Artificial Sequence
  Synthetic oligonucleotide; TACAGATT chr2 60470344 60470363 60470360 +
agagtgtggcgtaaaattac

SEQ ID NO: 190469 - DNA, 20 bp, Artificial Sequence
  Synthetic oligonucleotide; ACTTGTTT chr2 60470397 60470416 60470413 +
atctgagaatccatctttgc

SEQ ID NO: 190470 - DNA, 20 bp, Artificial Sequence
  Synthetic oligonucleotide; CTAAGTTT chr2 60470421 60470440 60470437 +
gtttttgcctcagccgttca

SEQ ID NO: 190471 - DNA, 20 bp, Artificial Sequence
  Synthetic oligonucleotide; AAGTGCTT chr2 60470577 60470596 60470593 +
tactctgggaagagaccctg

SEQ ID NO: 190472 - DNA, 20 bp, Artificial Sequence
  Synthetic oligonucleotide; CATAGTTT chr2 60470768 60470787 60470784 +
ctcatctgactatctggcag

SEQ ID NO: 190473 - DNA, 20 bp, Artificial Sequence
  Synthetic oligonucleotide; GTTTGTTT chr2 60470772 60470791 60470788 +
tctgactatctggcagcata

SEQ ID NO: 190474 - DNA, 20 bp, Artificial Sequence
  Synthetic oligonucleotide; TTTTGTTT chr2 60470778 60470797 60470794 +
tatctggcagcatagtttgt

SEQ ID NO: 190475 - DNA, 20 bp, Artificial Sequence
  Synthetic oligonucleotide; TTTTGTTT chr2 60470784 60470803 60470800 +
gcagcatagtttgtttttgt

SEQ ID NO: 190476 - DNA, 20 bp, Artificial Sequence
  Synthetic oligonucleotide; TTTTGTTT chr2 60470790 60470809 60470806 +
tagtttgtttttgtttttgt

SEQ ID NO: 190477 - DNA, 20 bp, Artificial Sequence
  Synthetic oligonucleotide; TTTTGTTT chr2 60470796 60470815 60470812 +
gtttttgtttttgtttttgt

SEQ ID NO: 190478 - DNA, 20 bp, Artificial Sequence
  Synthetic oligonucleotide; TGATGATT chr2 60470907 60470926 60470923 +
tgacttgcccatggctacac

SEQ ID NO: 190479 - DNA, 20 bp, Artificial Sequence
  Synthetic oligonucleotide; TGAAGATT chr2 60470925 60470944 60470941 +
actgatgattaaccacaatg

SEQ ID NO: 190480 - DNA, 20 bp, Artificial Sequence
  Synthetic oligonucleotide; TCCTGTTT chr2 60471032 60471051 60471048 +
ttcactgcccaacaagaagg

SEQ ID NO: 190481 - DNA, 20 bp, Artificial Sequence
  Synthetic oligonucleotide; TGGGGCTT chr2 60471102 60471121 60471118 +
tccagcccagcagcgctaca

SEQ ID NO: 190482 - DNA, 20 bp, Artificial Sequence
  Synthetic oligonucleotide; CTCTGCTT chr2 60471212 60471231 60471228 +
ttgctgtgttcaccctctac

SEQ ID NO: 190483 - DNA, 20 bp, Artificial Sequence
  Synthetic oligonucleotide; AGCTGATT chr2 60471367 60471386 60471383 +
caaagccaactggggacccc

SEQ ID NO: 190484 - DNA, 20 bp, Artificial Sequence
  Synthetic oligonucleotide; TGCTGCTT chr2 60471376 60471395 60471392 +
ctggggaccccagctgattc

SEQ ID NO: 190485 - DNA, 20 bp, Artificial Sequence
  Synthetic oligonucleotide; TAGGGCTT chr2 60471475 60471494 60471491 +
taaattgttaatagcctccc

SEQ ID NO: 190486 - DNA, 20 bp, Artificial Sequence
  Synthetic oligonucleotide; CACGGCTT chr2 60471516 60471535 60471532 +
gatgccttcaattatttcat

SEQ ID NO: 190487 - DNA, 20 bp, Artificial Sequence
  Synthetic oligonucleotide; TAATGCTT chr2 60471546 60471565 60471562 +
gcaaagtaaagtatcacaat

SEQ ID NO: 190488 - DNA, 20 bp, Artificial Sequence
  Synthetic oligonucleotide; CTTCGCTT chr2 60471645 60471664 60471661 +
agggcctcttcttttcccac

SEQ ID NO: 190489 - DNA, 20 bp, Artificial Sequence
  Synthetic oligonucleotide; AAGTGATT chr2 60471747 60471766 60471763 +
ctttgttagtgctcttaggc

SEQ ID NO: 190490 - DNA, 20 bp, Artificial Sequence
  Synthetic oligonucleotide; GGGAGTTT chr2 60471797 60471816 60471813 +
acccccgatcagcatcacct

SEQ ID NO: 190491 - DNA, 20 bp, Artificial Sequence
  Synthetic oligonucleotide; AGGTGATT chr2 60471897 60471916 60471913 +
ctatgttgaataaattctcc

SEQ ID NO: 190492 - DNA, 20 bp, Artificial Sequence
  Synthetic oligonucleotide; GGAAGCTT chr2 60471965 60471984 60471981 +
gtaagggaagtatgaacgct

SEQ ID NO: 190493 - DNA, 20 bp, Artificial Sequence
  Synthetic oligonucleotide; GGCTGTTT chr2 60472007 60472026 60472023 +
cagagacccatgggccatga

SEQ ID NO: 190494 - DNA, 20 bp, Artificial Sequence
  Synthetic oligonucleotide; TTAAGCTT chr2 60472067 60472086 60472083 +
ctggaacagtcaaaaacaaa

SEQ ID NO: 190495 - DNA, 20 bp, Artificial Sequence
  Synthetic oligonucleotide; ACCAGCTT chr2 60472204 60472223 60472220 +
tagcatgagacaacacccaa

SEQ ID NO: 190496 - DNA, 20 bp, Artificial Sequence
  Synthetic oligonucleotide; GACAGATT chr2 60472218 60472237 60472234 +
acccaaaccagcttgtgcca

SEQ ID NO: 190497 - DNA, 20 bp, Artificial Sequence
  Synthetic oligonucleotide; CACTGCTT chr2 60472233 60472252 60472249 +
tgccagacagattgtgtcct

SEQ ID NO: 190498 - DNA, 20 bp, Artificial Sequence
  Synthetic oligonucleotide; TCTTGTTT chr2 60472306 60472325 60472322 +
ggacacagcaggaactggac

SEQ ID NO: 190499 - DNA, 20 bp, Artificial Sequence
  Synthetic oligonucleotide; AGGTGTTT chr2 60472395 60472414 60472411 +
tcttacacttttctggtgga

SEQ ID NO: 190500 - DNA, 20 bp, Artificial Sequence
  Synthetic oligonucleotide; CAAAGTTT chr2 60472487 60472506 60472503 +
ccttacacattattaggttg

SEQ ID NO: 190501 - DNA, 20 bp, Artificial Sequence
  Synthetic oligonucleotide; TCAGGTTT chr2 60472532 60472551 60472548 +
aaaatagtgactcttatttt

SEQ ID NO: 190502 - DNA, 20 bp, Artificial Sequence
  Synthetic oligonucleotide; AATGGCTT chr2 60472566 60472585 60472582 +
aaaatatgcagcaaactggg

SEQ ID NO: 190503 - DNA, 20 bp, Artificial Sequence
  Synthetic oligonucleotide; CTTTGATT chr2 60472571 60472590 60472587 +
atgcagcaaactgggaatgg

SEQ ID NO: 190504 - DNA, 20 bp, Artificial Sequence
  Synthetic oligonucleotide; TCAAGTTT chr2 60472685 60472704 60472701 +
ctggaatttaagtcattaaa

SEQ ID NO: 190505 - DNA, 20 bp, Artificial Sequence
  Synthetic oligonucleotide; TTTGGTTT chr2 60472693 60472712 60472709 +
taagtcattaaatcaagttt

SEQ ID NO: 190506 - DNA, 20 bp, Artificial Sequence
  Synthetic oligonucleotide; CAAAGATT chr2 60472715 60472734 60472731 +
tggtttcctcaagaacatct

SEQ ID NO: 190507 - DNA, 20 bp, Artificial Sequence
  Synthetic oligonucleotide; ATTTGTTT chr2 60472742 60472761 60472758 +
tccttgactattaacatgct

SEQ ID NO: 190508 - DNA, 20 bp, Artificial Sequence
  Synthetic oligonucleotide; TGCAGATT chr2 60472813 60472832 60472829 +
tactaatcaacaggtaatac

SEQ ID NO: 190509 - DNA, 20 bp, Artificial Sequence
  Synthetic oligonucleotide; ACACGTTT chr2 60472862 60472881 60472878 +
aagcaaaaagcatcattcca

SEQ ID NO: 190510 - DNA, 20 bp, Artificial Sequence
  Synthetic oligonucleotide; GACTGCTT chr2 60472873 60472892 60472889 +
atcattccaacacgtttaat

SEQ ID NO: 190511 - DNA, 20 bp, Artificial Sequence
  Synthetic oligonucleotide; GTGTGTTT chr2 60472969 60472988 60472985 +
tcactaaaatgtacgtgtgt

SEQ ID NO: 190512 - DNA, 20 bp, Artificial Sequence
  Synthetic oligonucleotide; ATGTGTTT chr2 60473021 60473040 60473037 +
gtgttagcgtgtgcatgcat

SEQ ID NO: 190513 - DNA, 20 bp, Artificial Sequence
  Synthetic oligonucleotide; GTATGCTT chr2 60473074 60473093 60473090 +
gtgactgtgtgcatgtgtgt

SEQ ID NO: 190514 - DNA, 20 bp, Artificial Sequence
  Synthetic oligonucleotide; ATATGTTT chr2 60473197 60473216 60473213 +
tgtgtgtatatttcctaaac

SEQ ID NO: 190515 - DNA, 20 bp, Artificial Sequence
  Synthetic oligonucleotide; CCCTGTTT chr2 60473216 60473235 60473232 +
catatgtttttagataattt

SEQ ID NO: 190516 - DNA, 20 bp, Artificial Sequence
  Synthetic oligonucleotide; GAACGTTT chr2 60473483 60473502 60473499 +
ctacacttaaaatgcatcct

SEQ ID NO: 190517 - DNA, 20 bp, Artificial Sequence
  Synthetic oligonucleotide; ATCCGATT chr2 60473526 60473545 60473542 +
ggaacccattccagttctga

SEQ ID NO: 190518 - DNA, 20 bp, Artificial Sequence
  Synthetic oligonucleotide; AGAGGCTT chr2 60473581 60473600 60473597 +
cagtgcagctagtctgagct

SEQ ID NO: 190519 - DNA, 20 bp, Artificial Sequence
  Synthetic oligonucleotide; CTATGTTT chr2 60473646 60473665 60473662 +
gccgcatctagctcttgacc

SEQ ID NO: 190520 - DNA, 20 bp, Artificial Sequence
  Synthetic oligonucleotide; CTTAGATT chr2 60473677 60473696 60473693 +
atagataccagttcttctca

SEQ ID NO: 190521 - DNA, 20 bp, Artificial Sequence
  Synthetic oligonucleotide; GCCAGCTT chr2 60473764 60473783 60473780 +
tcaatctgtaatgaaaatgt

SEQ ID NO: 190522 - DNA, 20 bp, Artificial Sequence
  Synthetic oligonucleotide; CATTGCTT chr2 60473873 60473892 60473889 +
catgtgcattttttttcctt

SEQ ID NO: 190523 - DNA, 20 bp, Artificial Sequence
  Synthetic oligonucleotide; GGCTGTTT chr2 60473888 60473907 60473904 +
tccttcattgcttttttact

SEQ ID NO: 190524 - DNA, 20 bp, Artificial Sequence
  Synthetic oligonucleotide; CTTAGATT chr2 60474003 60474022 60474019 +
cctgaaactctctcatggtc

SEQ ID NO: 190525 - DNA, 20 bp, Artificial Sequence
  Synthetic oligonucleotide; CCTTGATT chr2 60474092 60474111 60474108 +
tcaatgctatcctcttagag

SEQ ID NO: 190526 - DNA, 20 bp, Artificial Sequence
  Synthetic oligonucleotide; CTAGGCTT chr2 60474145 60474164 60474161 +
accttttaagagttctcctc

SEQ ID NO: 190527 - DNA, 20 bp, Artificial Sequence
  Synthetic oligonucleotide; TCTTGCTT chr2 60474303 60474322 60474319 +
ataattccaaaaaaaaaaaa

SEQ ID NO: 190528 - DNA, 20 bp, Artificial Sequence
  Synthetic oligonucleotide; TGCAGATT chr2 60474362 60474381 60474378 +
gttccatctttgtgttgaaa

SEQ ID NO: 190529 - DNA, 20 bp, Artificial Sequence
  Synthetic oligonucleotide; TTAAGCTT chr2 60474545 60474564 60474561 +
agataaatttttattacact

SEQ ID NO: 190530 - DNA, 20 bp, Artificial Sequence
  Synthetic oligonucleotide; TTTTGTTT chr2 60474633 60474652 60474649 +
attgtcttaggacaattttt

SEQ ID NO: 190531 - DNA, 20 bp, Artificial Sequence
  Synthetic oligonucleotide; GTTTGTTT chr2 60474637 60474656 60474653 +
tcttaggacaattttttttt

SEQ ID NO: 190532 - DNA, 20 bp, Artificial Sequence
  Synthetic oligonucleotide; CACAGATT chr2 60474816 60474835 60474832 +
cagtacaaagaaaacacgga

SEQ ID NO: 190533 - DNA, 20 bp, Artificial Sequence
  Synthetic oligonucleotide; GCAGGCTT chr2 60474833 60474852 60474849 +
ggacacagatttctcccaca

SEQ ID NO: 190534 - DNA, 20 bp, Artificial Sequence
  Synthetic oligonucleotide; AGAGGCTT chr2 60474976 60474995 60474992 +
tccatttggaagggagggag

SEQ ID NO: 190535 - DNA, 20 bp, Artificial Sequence
  Synthetic oligonucleotide; AGATGCTT chr2 60475063 60475082 60475079 +
taaaaagaaaaagcaggtaa

SEQ ID NO: 190536 - DNA, 20 bp, Artificial Sequence
  Synthetic oligonucleotide; CACTGATT chr2 60475148 60475167 60475164 +
attcacatcaaaatattgca

SEQ ID NO: 190537 - DNA, 20 bp, Artificial Sequence
  Synthetic oligonucleotide; TGAAGATT chr2 60475200 60475219 60475216 +
gaccatctaaataaatcctc

SEQ ID NO: 190538 - DNA, 20 bp, Artificial Sequence
  Synthetic oligonucleotide; TTCAGCTT chr2 60475219 60475238 60475235 +
ctgaagatttctgtgacatc

SEQ ID NO: 190539 - DNA, 20 bp, Artificial Sequence
  Synthetic oligonucleotide; TTCTGTTT chr2 60475317 60475336 60475333 +
actccatgaaggttcatctg

SEQ ID NO: 190540 - DNA, 20 bp, Artificial Sequence
  Synthetic oligonucleotide; AATTGTTT chr2 60475337 60475356 60475353 +
ttctgttttccccccacctc

SEQ ID NO: 190541 - DNA, 20 bp, Artificial Sequence
  Synthetic oligonucleotide; CTATGTTT chr2 60475387 60475406 60475403 +
gcccgctaaggcaaaattta

SEQ ID NO: 190542 - DNA, 20 bp, Artificial Sequence
  Synthetic oligonucleotide; CCTGGCTT chr2 60475456 60475475 60475472 +
cttccttgcaatactgcctc

SEQ ID NO: 190543 - DNA, 20 bp, Artificial Sequence
  Synthetic oligonucleotide; GCCAGTTT chr2 60475490 60475509 60475506 +
tctatttcagatgtctcatt

SEQ ID NO: 190544 - DNA, 20 bp, Artificial Sequence
  Synthetic oligonucleotide; ATGGGCTT chr2 60475501 60475520 60475517 +
tgtctcattgccagtttaag

SEQ ID NO: 190545 - DNA, 20 bp, Artificial Sequence
  Synthetic oligonucleotide; TTGAGATT chr2 60475552 60475571 60475568 +
aaatgactgtgcaagaaaca

SEQ ID NO: 190546 - DNA, 20 bp, Artificial Sequence
  Synthetic oligonucleotide; TCTTGTTT chr2 60475688 60475707 60475704 +
tctgagtcctcagctgagga

SEQ ID NO: 190547 - DNA, 20 bp, Artificial Sequence
  Synthetic oligonucleotide; CCCGGATT chr2 60475815 60475834 60475831 +
tattcccactgccaccactc

SEQ ID NO: 190548 - DNA, 20 bp, Artificial Sequence
  Synthetic oligonucleotide; AGCTGTTT chr2 60475921 60475940 60475937 +
ccccaactctgccactcacc

SEQ ID NO: 190549 - DNA, 20 bp, Artificial Sequence
  Synthetic oligonucleotide; AAGTGTTT chr2 60475963 60475982 60475979 +
aatcctttctttctggccct

SEQ ID NO: 190550 - DNA, 20 bp, Artificial Sequence
  Synthetic oligonucleotide; ACTGGATT chr2 60475990 60476009 60476006 +
tccatctttaaaaggagaag

SEQ ID NO: 190551 - DNA, 20 bp, Artificial Sequence
  Synthetic oligonucleotide; GGTGGCTT chr2 60476004 60476023 60476020 +
gagaagactggattagatgg

SEQ ID NO: 190552 - DNA, 20 bp, Artificial Sequence
  Synthetic oligonucleotide; CTGGGCTT chr2 60476158 60476177 60476174 +
ccttataggagagttcaggg

SEQ ID NO: 190553 - DNA, 20 bp, Artificial Sequence
  Synthetic oligonucleotide; TTAGGCTT chr2 60476183 60476202 60476199 +
cttggtccccaggctaatcc

SEQ ID NO: 190554 - DNA, 20 bp, Artificial Sequence
  Synthetic oligonucleotide; GATGGATT chr2 60476207 60476226 60476223 +
gcttagagagtgagcctgat

SEQ ID NO: 190555 - DNA, 20 bp, Artificial Sequence
  Synthetic oligonucleotide; CAAAGTTT chr2 60476239 60476258 60476255 +
cctcctgggacacagtcttg

SEQ ID NO: 190556 - DNA, 20 bp, Artificial Sequence
  Synthetic oligonucleotide; CTGAGCTT chr2 60476253 60476272 60476269 +
gtcttgcaaagtttacatgt

SEQ ID NO: 190557 - DNA, 20 bp, Artificial Sequence
  Synthetic oligonucleotide; AGATGTTT chr2 60476622 60476641 60476638 +
gctaaccaacataatttcag

SEQ ID NO: 190558 - DNA, 20 bp, Artificial Sequence
  Synthetic oligonucleotide; CAGGGCTT chr2 60476660 60476679 60476676 +
ccaggctcattgaaaattgg

SEQ ID NO: 190559 - DNA, 20 bp, Artificial Sequence
  Synthetic oligonucleotide; ATCAGTTT chr2 60476857 60476876 60476873 +
gaaaaatcactctctaattt

SEQ ID NO: 190560 - DNA, 20 bp, Artificial Sequence
  Synthetic oligonucleotide; ATGAGATT chr2 60476871 60476890 60476887 +
taatttatcagtttccatta

SEQ ID NO: 190561 - DNA, 20 bp, Artificial Sequence
  Synthetic oligonucleotide; TCCAGCTT chr2 60476990 60477009 60477006 +
tatttctgtcacccgaattg

SEQ ID NO: 190562 - DNA, 20 bp, Artificial Sequence
  Synthetic oligonucleotide; TTGCGTTT chr2 60477106 60477125 60477122 +
gaaagccttgcaaaccacac

SEQ ID NO: 190563 - DNA, 20 bp, Artificial Sequence
  Synthetic oligonucleotide; AAACGTTT chr2 60477226 60477245 60477242 +
cgatgagaatgatcatttgc

SEQ ID NO: 190564 - DNA, 20 bp, Artificial Sequence
  Synthetic oligonucleotide; GTTTGATT chr2 60477230 60477249 60477246 +
gagaatgatcatttgcaaac

SEQ ID NO: 190565 - DNA, 20 bp, Artificial Sequence
  Synthetic oligonucleotide; AAGGGCTT chr2 60477262 60477281 60477278 +
taacacctgccagagcagag

SEQ ID NO: 190566 - DNA, 20 bp, Artificial Sequence
  Synthetic oligonucleotide; ATGTGCTT chr2 60477355 60477374 60477371 +
tctgcatcaactcacaacaa

SEQ ID NO: 190567 - DNA, 20 bp, Artificial Sequence
  Synthetic oligonucleotide; TGGTGTTT chr2 60477618 60477637 60477634 +
aagaaagaaataatcaaaca

SEQ ID NO: 190568 - DNA, 20 bp, Artificial Sequence
  Synthetic oligonucleotide; TGATGTTT chr2 60477638 60477657 60477654 +
tggtgtttccaagagactcc

SEQ ID NO: 190569 - DNA, 20 bp, Artificial Sequence
  Synthetic oligonucleotide; GAGGGCTT chr2 60477758 60477777 60477774 +
cactgcagcccggccaggtg

SEQ ID NO: 190570 - DNA, 20 bp, Artificial Sequence
  Synthetic oligonucleotide; GAAAGCTT chr2 60477933 60477952 60477949 +
catctgtcctggcctttatg

SEQ ID NO: 190571 - DNA, 20 bp, Artificial Sequence
  Synthetic oligonucleotide; CTGGGCTT chr2 60478309 60478328 60478325 +
tgtggacagggaggacaggg

SEQ ID NO: 190572 - DNA, 20 bp, Artificial Sequence
  Synthetic oligonucleotide; AAGAGATT chr2 60478523 60478542 60478539 +
actctgtgacagtcttggcc

SEQ ID NO: 190573 - DNA, 20 bp, Artificial Sequence
  Synthetic oligonucleotide; TAAGGCTT chr2 60478621 60478640 60478637 +
agaaattatgagaactaatt

SEQ ID NO: 190574 - DNA, 20 bp, Artificial Sequence
  Synthetic oligonucleotide; AGCTGCTT chr2 60478816 60478835 60478832 +
ctctgcccggggcatgctgc

SEQ ID NO: 190575 - DNA, 20 bp, Artificial Sequence
  Synthetic oligonucleotide; CTTGGCTT chr2 60478922 60478941 60478938 +
ccacagaacaaaacacaggc

SEQ ID NO: 190576 - DNA, 20 bp, Artificial Sequence
  Synthetic oligonucleotide; ACGTGCTT chr2 60478932 60478951 60478948 +
aaacacaggccttggctttg

SEQ ID NO: 190577 - DNA, 20 bp, Artificial Sequence
  Synthetic oligonucleotide; CTTTGTTT chr2 60478937 60478956 60478953 +
caggccttggctttgacgtg

SEQ ID NO: 190578 - DNA, 20 bp, Artificial Sequence
  Synthetic oligonucleotide; TTTTGTTT chr2 60478944 60478963 60478960 +
tggctttgacgtgctttgtt

SEQ ID NO: 190579 - DNA, 20 bp, Artificial Sequence
  Synthetic oligonucleotide; CCTGGCTT chr2 60478969 60478988 60478985 +
ttttttttttttccctcctc

SEQ ID NO: 190580 - DNA, 20 bp, Artificial Sequence
  Synthetic oligonucleotide; TGCTGATT chr2 60479138 60479157 60479154 +
gttcttggctctactaattc

SEQ ID NO: 190581 - DNA, 20 bp, Artificial Sequence
  Synthetic oligonucleotide; TTTTGTTT chr2 60479319 60479338 60479335 +
ggtgggacccggagaccatt

SEQ ID NO: 190582 - DNA, 20 bp, Artificial Sequence
  Synthetic oligonucleotide; GACTGCTT chr2 60479340 60479359 60479356 +
tttgttttgagtctctctaa

SEQ ID NO: 190583 - DNA, 20 bp, Artificial Sequence
  Synthetic oligonucleotide; TTTTGCTT chr2 60479492 60479511 60479508 +
agcccctcaggctgaaatcc

SEQ ID NO: 190584 - DNA, 20 bp, Artificial Sequence
  Synthetic oligonucleotide; CGCGGTTT chr2 60479618 60479637 60479634 +
gagtgtggacggcaggctga

SEQ ID NO: 190585 - DNA, 20 bp, Artificial Sequence
  Synthetic oligonucleotide; AGAGGCTT chr2 60479742 60479761 60479758 +
agggtctgtcaccattttaa

SEQ ID NO: 190586 - DNA, 20 bp, Artificial Sequence
  Synthetic oligonucleotide; TTTTGATT chr2 60479819 60479838 60479835 +
tatcagcgtgggacaggttc

SEQ ID NO: 190587 - DNA, 20 bp, Artificial Sequence
  Synthetic oligonucleotide; AAACGCTT chr2 60479858 60479877 60479874 +
tcttacaaaatctgaaaatg

SEQ ID NO: 190588 - DNA, 20 bp, Artificial Sequence
  Synthetic oligonucleotide; AACCGTTT chr2 60479884 60479903 60479900 +
ttctgtccctcccttccacc

SEQ ID NO: 190589 - DNA, 20 bp, Artificial Sequence
  Synthetic oligonucleotide; TTTTGATT chr2 60479891 60479910 60479907 +
cctcccttccaccaaccgtt

SEQ ID NO: 190590 - DNA, 20 bp, Artificial Sequence
  Synthetic oligonucleotide; CTCAGCTT chr2 60479948 60479967 60479964 +
gacaggttgggacaactcca

SEQ ID NO: 190591 - DNA, 20 bp, Artificial Sequence
  Synthetic oligonucleotide; AGCTGCTT chr2 60479967 60479986 60479983 +
actcagctttctcactcaaa

SEQ ID NO: 190592 - DNA, 20 bp, Artificial Sequence
  Synthetic oligonucleotide; CAAGGCTT chr2 60480304 60480323 60480320 +
tggttctccaactaaaagtt

SEQ ID NO: 190593 - DNA, 20 bp, Artificial Sequence
  Synthetic oligonucleotide; TTAGGATT chr2 60480389 60480408 60480405 +
aagagcccctcaataaataa

SEQ ID NO: 190594 - DNA, 20 bp, Artificial Sequence
  Synthetic oligonucleotide; AAATGATT chr2 60480506 60480525 60480522 +
caggggaaaccttccctagt

SEQ ID NO: 190595 - DNA, 20 bp, Artificial Sequence
  Synthetic oligonucleotide; AGAGGATT chr2 60480552 60480571 60480568 +
tgggtcagccttgacccagg

SEQ ID NO: 190596 - DNA, 20 bp, Artificial Sequence
  Synthetic oligonucleotide; CATCGCTT chr2 60480587 60480606 60480603 +
cttgaaagtggctgctggtc

SEQ ID NO: 190597 - DNA, 20 bp, Artificial Sequence
  Synthetic oligonucleotide; ATTTGTTT chr2 60480790 60480809 60480806 +
ctttcttccttcctctctca

SEQ ID NO: 190598 - DNA, 20 bp, Artificial Sequence
  Synthetic oligonucleotide; CTCCGCTT chr2 60480882 60480901 60480898 +
gaaagaacagtgtgaagtac

SEQ ID NO: 190599 - DNA, 20 bp, Artificial Sequence
  Synthetic oligonucleotide; AATAGTTT chr2 60480921 60480940 60480937 +
tttttgaactcatagttcta

SEQ ID NO: 190600 - DNA, 20 bp, Artificial Sequence
  Synthetic oligonucleotide; AAGGGCTT chr2 60480941 60480960 60480957 +
aatagtttttgctccactaa

SEQ ID NO: 190601 - DNA, 20 bp, Artificial Sequence
  Synthetic oligonucleotide; AGGAGATT chr2 60481146 60481165 60481162 +
gcaaagccctgctgtgctca

SEQ ID NO: 190602 - DNA, 20 bp, Artificial Sequence
  Synthetic oligonucleotide; TGAGGCTT chr2 60481153 60481172 60481169 +
cctgctgtgctcaaggagat

SEQ ID NO: 190603 - DNA, 20 bp, Artificial Sequence
  Synthetic oligonucleotide; CTCTGCTT chr2 60481243 60481262 60481259 +
tcccaaacctagccacccat

SEQ ID NO: 190604 - DNA, 20 bp, Artificial Sequence
  Synthetic oligonucleotide; CTCTGCTT chr2 60481392 60481411 60481408 +
ctacaccaggcccttcgcac

SEQ ID NO: 190605 - DNA, 20 bp, Artificial Sequence
  Synthetic oligonucleotide; TGCGGCTT chr2 60481400 60481419 60481416 +
ggcccttcgcacctctgctt

SEQ ID NO: 190606 - DNA, 20 bp, Artificial Sequence
  Synthetic oligonucleotide; CAGTGTTT chr2 60481584 60481603 60481600 +
aagagcaactgcagcagaaa

SEQ ID NO: 190607 - DNA, 20 bp, Artificial Sequence
  Synthetic oligonucleotide; TCTTGTTT chr2 60481625 60481644 60481641 +
atggctcgtgaatttttttg

SEQ ID NO: 190608 - DNA, 20 bp, Artificial Sequence
  Synthetic oligonucleotide; CAGTGTTT chr2 60481700 60481719 60481716 +
gcacatacaactcagggctc

SEQ ID NO: 190609 - DNA, 20 bp, Artificial Sequence
  Synthetic oligonucleotide; GTGAGATT chr2 60481730 60481749 60481746 +
agggcattttttttccacaa

SEQ ID NO: 190610 - DNA, 20 bp, Artificial Sequence
  Synthetic oligonucleotide; TGATGTTT chr2 60481984 60482003 60482000 +
tcaaaagaaaggggttggac

SEQ ID NO: 190611 - DNA, 20 bp, Artificial Sequence
  Synthetic oligonucleotide; GAGGGCTT chr2 60481999 60482018 60482015 +
tggactgatgtttcccagtg

SEQ ID NO: 190612 - DNA, 20 bp, Artificial Sequence
  Synthetic oligonucleotide; GCTTGTTT chr2 60482003 60482022 60482019 +
ctgatgtttcccagtggagg

SEQ ID NO: 190613 - DNA, 20 bp, Artificial Sequence
  Synthetic oligonucleotide; GGTGGTTT chr2 60482089 60482108 60482105 +
ggcagacctgttaaggggcg

SEQ ID NO: 190614 - DNA, 20 bp, Artificial Sequence
  Synthetic oligonucleotide; TCATGATT chr2 60482132 60482151 60482148 +
ttttggacattttgcatctc

SEQ ID NO: 190615 - DNA, 20 bp, Artificial Sequence
  Synthetic oligonucleotide; GAGAGTTT chr2 60482147 60482166 60482163 +
atctctcatgattctatctt

SEQ ID NO: 190616 - DNA, 20 bp, Artificial Sequence
  Synthetic oligonucleotide; TTTAGTTT chr2 60482152 60482171 60482168 +
tcatgattctatcttgagag

SEQ ID NO: 190617 - DNA, 20 bp, Artificial Sequence
  Synthetic oligonucleotide; TGGAGTTT chr2 60482163 60482182 60482179 +
tcttgagagtttagtttggt

SEQ ID NO: 190618 - DNA, 20 bp, Artificial Sequence
  Synthetic oligonucleotide; TTTAGTTT chr2 60482168 60482187 60482184 +
agagtttagtttggttggag

SEQ ID NO: 190619 - DNA, 20 bp, Artificial Sequence
  Synthetic oligonucleotide; TTGAGTTT chr2 60482176 60482195 60482192 +
gtttggttggagtttagttt

SEQ ID NO: 190620 - DNA, 20 bp, Artificial Sequence
  Synthetic oligonucleotide; TGTGGTTT chr2 60482195 60482214 60482211 +
tttgagttttttgttcgggt

SEQ ID NO: 190621 - DNA, 20 bp, Artificial Sequence
  Synthetic oligonucleotide; TTCTGTTT chr2 60482239 60482258 60482255 +
aaaaaaaattggagctgtat

SEQ ID NO: 190622 - DNA, 20 bp, Artificial Sequence
  Synthetic oligonucleotide; TGGAGCTT chr2 60482358 60482377 60482374 +
aactggagaaaagtgagaaa

SEQ ID NO: 190623 - DNA, 20 bp, Artificial Sequence
  Synthetic oligonucleotide; CTTGGCTT chr2 60482370 60482389 60482386 +
gtgagaaatggagctttttt

SEQ ID NO: 190624 - DNA, 20 bp, Artificial Sequence
  Synthetic oligonucleotide; CACTGCTT chr2 60482402 60482421 60482418 +
acagttgtaatttccactgc

SEQ ID NO: 190625 - DNA, 20 bp, Artificial Sequence
  Synthetic oligonucleotide; TCAGGATT chr2 60482469 60482488 60482485 +
tgtgacaactttgccacaaa

SEQ ID NO: 190626 - DNA, 20 bp, Artificial Sequence
  Synthetic oligonucleotide; GACTGCTT chr2 60482514 60482533 60482530 +
ggaagcaagaagaatagagg

SEQ ID NO: 190627 - DNA, 20 bp, Artificial Sequence
  Synthetic oligonucleotide; TATAGATT chr2 60482525 60482544 60482541 +
gaatagagggactgcttatt

SEQ ID NO: 190628 - DNA, 20 bp, Artificial Sequence
  Synthetic oligonucleotide; ATCAGCTT chr2 60482663 60482682 60482679 +
cactgcatcccaaggttaag

SEQ ID NO: 190629 - DNA, 20 bp, Artificial Sequence
  Synthetic oligonucleotide; TGCTGCTT chr2 60482692 60482711 60482708 +
ctgaaaacagggcagaagac

SEQ ID NO: 190630 - DNA, 20 bp, Artificial Sequence
  Synthetic oligonucleotide; ACTGGATT chr2 60482756 60482775 60482772 +
ttagtaccacactacattta

SEQ ID NO: 190631 - DNA, 20 bp, Artificial Sequence
  Synthetic oligonucleotide; ATGTGATT chr2 60482770 60482789 60482786 +
catttaactggattcagttc

SEQ ID NO: 190632 - DNA, 20 bp, Artificial Sequence
  Synthetic oligonucleotide; CCTTGCTT chr2 60482786 60482805 60482802 +
gttcatgtgattatacagtg

SEQ ID NO: 190633 - DNA, 20 bp, Artificial Sequence
  Synthetic oligonucleotide; CATTGATT chr2 60482891 60482910 60482907 +
gcagagtcaagctggaagat

SEQ ID NO: 190634 - DNA, 20 bp, Artificial Sequence
  Synthetic oligonucleotide; TGATGTTT chr2 60482949 60482968 60482965 +
ttcaaacattacagaaatga

SEQ ID NO: 190635 - DNA, 20 bp, Artificial Sequence
  Synthetic oligonucleotide; ATCTGATT chr2 60482987 60483006 60483003 +
tttgctgataaatgctcaaa

SEQ ID NO: 190636 - DNA, 20 bp, Artificial Sequence
  Synthetic oligonucleotide; CCATGATT chr2 60483033 60483052 60483049 +
aagaaaacctgcacttcagc

SEQ ID NO: 190637 - DNA, 20 bp, Artificial Sequence
  Synthetic oligonucleotide; AGATGTTT chr2 60483049 60483068 60483065 +
cagcccatgattactttgcg

SEQ ID NO: 190638 - DNA, 20 bp, Artificial Sequence
  Synthetic oligonucleotide; GTGTGATT chr2 60483072 60483091 60483088 +
tgtttgagaagaatcaggca

SEQ ID NO: 190639 - DNA, 20 bp, Artificial Sequence
  Synthetic oligonucleotide; CAGGGTTT chr2 60483198 60483217 60483214 +
gaacaatgctagccaacaat

SEQ ID NO: 190640 - DNA, 20 bp, Artificial Sequence
  Synthetic oligonucleotide; AGCCGTTT chr2 60483208 60483227 60483224 +
agccaacaatcagggtttac

SEQ ID NO: 190641 - DNA, 20 bp, Artificial Sequence
  Synthetic oligonucleotide; AGTGGTTT chr2 60483317 60483336 60483333 +
ctccattcaggcctttgaaa

SEQ ID NO: 190642 - DNA, 20 bp, Artificial Sequence
  Synthetic oligonucleotide; GTCTGTTT chr2 60483465 60483484 60483481 +
ctgcagtccctttagcccca

SEQ ID NO: 190643 - DNA, 20 bp, Artificial Sequence
  Synthetic oligonucleotide; ATGTGTTT chr2 60483514 60483533 60483530 +
aatcaactgctgtctatgtc

SEQ ID NO: 190644 - DNA, 20 bp, Artificial Sequence
  Synthetic oligonucleotide; TTTTGATT chr2 60483519 60483538 60483535 +
actgctgtctatgtcatgtg

SEQ ID NO: 190645 - DNA, 20 bp, Artificial Sequence
  Synthetic oligonucleotide; CGTGGATT chr2 60483657 60483676 60483673 +
tgagctggcatattagcaga

SEQ ID NO: 190646 - DNA, 20 bp, Artificial Sequence
  Synthetic oligonucleotide; GGATGCTT chr2 60483699 60483718 60483715 +
ctaaaacagaagatgtatct

SEQ ID NO: 190647 - DNA, 20 bp, Artificial Sequence
  Synthetic oligonucleotide; GGAGGATT chr2 60483768 60483787 60483784 +
actcgcccaaagcactagaa

SEQ ID NO: 190648 - DNA, 20 bp, Artificial Sequence
  Synthetic oligonucleotide; GGTTGCTT chr2 60483867 60483886 60483883 +
tttccttctttttctttctt

SEQ ID NO: 190649 - DNA, 20 bp, Artificial Sequence
  Synthetic oligonucleotide; CATAGCTT chr2 60483919 60483938 60483935 +
cattataaatgagttggtct

SEQ ID NO: 190650 - DNA, 20 bp, Artificial Sequence
  Synthetic oligonucleotide; AGAAGCTT chr2 60483939 60483958 60483955 +
catagcttctgttaaaaatc

SEQ ID NO: 190651 - DNA, 20 bp, Artificial Sequence
  Synthetic oligonucleotide; TAATGATT chr2 60483955 60483974 60483971 +
aatcagaagcttgttagatg

SEQ ID NO: 190652 - DNA, 20 bp, Artificial Sequence
  Synthetic oligonucleotide; AACAGCTT chr2 60484004 60484023 60484020 +
gcgtatgaggggtcttgtcg

SEQ ID NO: 190653 - DNA, 20 bp, Artificial Sequence
  Synthetic oligonucleotide; CTCAGATT chr2 60484049 60484068 60484065 +
cctctgttaattagaaagcc

SEQ ID NO: 190654 - DNA, 20 bp, Artificial Sequence
  Synthetic oligonucleotide; TCATGCTT chr2 60484086 60484105 60484102 +
tgcaggtcactatcgacagc

SEQ ID NO: 190655 - DNA, 20 bp, Artificial Sequence
  Synthetic oligonucleotide; TGATGCTT chr2 60484095 60484114 60484111 +
ctatcgacagctcatgcttt

SEQ ID NO: 190656 - DNA, 20 bp, Artificial Sequence
  Synthetic oligonucleotide; GGCTGCTT chr2 60484187 60484206 60484203 +
tcagaaaatgcagtcaccac

SEQ ID NO: 190657 - DNA, 20 bp, Artificial Sequence
  Synthetic oligonucleotide; GTCAGTTT chr2 60484226 60484245 60484242 +
acacgcaaggtccgcacaca

SEQ ID NO: 190658 - DNA, 20 bp, Artificial Sequence
  Synthetic oligonucleotide; CTCTGTTT chr2 60484368 60484387 60484384 +
cttgcctctctttctccaac

SEQ ID NO: 190659 - DNA, 20 bp, Artificial Sequence
  Synthetic oligonucleotide; GTAGGTTT chr2 60484467 60484486 60484483 +
cacattcaccagaaagggaa

SEQ ID NO: 190660 - DNA, 20 bp, Artificial Sequence
  Synthetic oligonucleotide; GGTTGCTT chr2 60484488 60484507 60484504 +
taggttttacagataaaccg

SEQ ID NO: 190661 - DNA, 20 bp, Artificial Sequence
  Synthetic oligonucleotide; CAGTGATT chr2 60484509 60484528 60484525 +
gttgcttttcactgaaacag

SEQ ID NO: 190662 - DNA, 20 bp, Artificial Sequence
  Synthetic oligonucleotide; ACGTGTTT chr2 60484632 60484651 60484648 +
ctgtacttccaacatggctc

SEQ ID NO: 190663 - DNA, 20 bp, Artificial Sequence
  Synthetic oligonucleotide; TGAGGTTT chr2 60484731 60484750 60484747 +
gagaaaaaatgcacatgggc

SEQ ID NO: 190664 - DNA, 20 bp, Artificial Sequence
  Synthetic oligonucleotide; ACTTGTTT chr2 60484929 60484948 60484945 +
aaaaagaaatcctctgtggc

SEQ ID NO: 190665 - DNA, 20 bp, Artificial Sequence
  Synthetic oligonucleotide; ACTGGCTT chr2 60485208 60485227 60485224 +
ggaagtctggccttggagtt

SEQ ID NO: 190666 - DNA, 20 bp, Artificial Sequence
  Synthetic oligonucleotide; CAACGCTT chr2 60485652 60485671 60485668 +
agcaacctagatatgagaaa

SEQ ID NO: 190667 - DNA, 20 bp, Artificial Sequence
  Synthetic oligonucleotide; AAGTGTTT chr2 60485773 60485792 60485789 +
gagctcaacccagagaaggc

SEQ ID NO: 190668 - DNA, 20 bp, Artificial Sequence
  Synthetic oligonucleotide; ATCTGATT chr2 60485877 60485896 60485893 +
tggaaataatacattgctgc

SEQ ID NO: 190669 - DNA, 20 bp, Artificial Sequence
  Synthetic oligonucleotide; ATGAGATT chr2 60485911 60485930 60485927 +
ttcaacaagaaggctgagga

SEQ ID NO: 190670 - DNA, 20 bp, Artificial Sequence
  Synthetic oligonucleotide; TTTAGTTT chr2 60485925 60485944 60485941 +
tgaggaatgagattgcacat

SEQ ID NO: 190671 - DNA, 20 bp, Artificial Sequence
  Synthetic oligonucleotide; GTATGTTT chr2 60486011 60486030 60486027 +
gtacaaaaaaaatcttttta

SEQ ID NO: 190672 - DNA, 20 bp, Artificial Sequence
  Synthetic oligonucleotide; AATGGATT chr2 60486115 60486134 60486131 +
caagctgttctccattctga

SEQ ID NO: 190673 - DNA, 20 bp, Artificial Sequence
  Synthetic oligonucleotide; TGGGGATT chr2 60486170 60486189 60486186 +
catcctagggagactggtac

SEQ ID NO: 190674 - DNA, 20 bp, Artificial Sequence
  Synthetic oligonucleotide; TTGTGATT chr2 60486228 60486247 60486244 +
gctcctttccagagaatgac

SEQ ID NO: 190675 - DNA, 20 bp, Artificial Sequence
  Synthetic oligonucleotide; TCTGGCTT chr2 60486573 60486592 60486589 +
ctgtgatggacatgagatcc

SEQ ID NO: 190676 - DNA, 20 bp, Artificial Sequence
  Synthetic oligonucleotide; GATGGATT chr2 60486613 60486632 60486629 +
tgcacagaaatgagcagcat

SEQ ID NO: 190677 - DNA, 20 bp, Artificial Sequence
  Synthetic oligonucleotide; GGCAGATT chr2 60486625 60486644 60486641 +
agcagcatgatggattagct

SEQ ID NO: 190678 - DNA, 20 bp, Artificial Sequence
  Synthetic oligonucleotide; TCAGGATT chr2 60486665 60486684 60486681 +
gtgaacatgccaactcaaca

SEQ ID NO: 190679 - DNA, 20 bp, Artificial Sequence
  Synthetic oligonucleotide; TTAAGATT chr2 60486931 60486950 60486947 +
gaacaaattaatatttaatt

SEQ ID NO: 190680 - DNA, 20 bp, Artificial Sequence
  Synthetic oligonucleotide; GGGAGATT chr2 60486966 60486985 60486982 +
tatcagaataaaaaagactc

SEQ ID NO: 190681 - DNA, 20 bp, Artificial Sequence
  Synthetic oligonucleotide; GTGAGTTT chr2 60487044 60487063 60487060 +
atttaggagcgctagacaca

SEQ ID NO: 190682 - DNA, 20 bp, Artificial Sequence
  Synthetic oligonucleotide; CTGTGATT chr2 60487065 60487084 60487081 +
tgagtttccctgcctccaac

SEQ ID NO: 190683 - DNA, 20 bp, Artificial Sequence
  Synthetic oligonucleotide; AGTCGATT chr2 60487236 60487255 60487252 +
tccctaacctatattttgca

SEQ ID NO: 190684 - DNA, 20 bp, Artificial Sequence
  Synthetic oligonucleotide; TCAGGCTT chr2 60487293 60487312 60487309 +
agcccatgttacatctccag

SEQ ID NO: 190685 - DNA, 20 bp, Artificial Sequence
  Synthetic oligonucleotide; TTACGTTT chr2 60487380 60487399 60487396 +
gggagcagtgtagtgggcag

SEQ ID NO: 190686 - DNA, 20 bp, Artificial Sequence
  Synthetic oligonucleotide; TGTAGATT chr2 60487427 60487446 60487443 +
tgggaaatcgtcttctcaaa

SEQ ID NO: 190687 - DNA, 20 bp, Artificial Sequence
  Synthetic oligonucleotide; TACAGATT chr2 60487510 60487529 60487526 +
attagatatttaaaaatgaa

SEQ ID NO: 190688 - DNA, 20 bp, Artificial Sequence
  Synthetic oligonucleotide; TTCAGATT chr2 60487516 60487535 60487532 +
tatttaaaaatgaatacaga

SEQ ID NO: 190689 - DNA, 20 bp, Artificial Sequence
  Synthetic oligonucleotide; GAAGGCTT chr2 60487590 60487609 60487606 +
acaaaaaaaggcatgaaaaa

SEQ ID NO: 190690 - DNA, 20 bp, Artificial Sequence
  Synthetic oligonucleotide; AGAGGCTT chr2 60487714 60487733 60487730 +
gcagcagaatgtaaaaagca

SEQ ID NO: 190691 - DNA, 20 bp, Artificial Sequence
  Synthetic oligonucleotide; AAAGGTTT chr2 60487919 60487938 60487935 +
ccctgataacatctgccact

SEQ ID NO: 190692 - DNA, 20 bp, Artificial Sequence
  Synthetic oligonucleotide; CTTGGTTT chr2 60487932 60487951 60487948 +
tgccactaaaggtttactga

SEQ ID NO: 190693 - DNA, 20 bp, Artificial Sequence
  Synthetic oligonucleotide; AAATGCTT chr2 60488004 60488023 60488020 +
tatatgaacaattagatatt

SEQ ID NO: 190694 - DNA, 20 bp, Artificial Sequence
  Synthetic oligonucleotide; CTGGGTTT chr2 60488043 60488062 60488059 +
tctgtgctattacttttgac

SEQ ID NO: 190695 - DNA, 20 bp, Artificial Sequence
  Synthetic oligonucleotide; AAGAGTTT chr2 60488112 60488131 60488128 +
aaacatttaaattatcctgg

SEQ ID NO: 190696 - DNA, 20 bp, Artificial Sequence
  Synthetic oligonucleotide; GAGTGTTT chr2 60488139 60488158 60488155 +
tgtctcacgggctgttcaaa

SEQ ID NO: 190697 - DNA, 20 bp, Artificial Sequence
  Synthetic oligonucleotide; TCATGATT chr2 60488217 60488236 60488233 +
gcctgtaaaagatacctgag

SEQ ID NO: 190698 - DNA, 20 bp, Artificial Sequence
  Synthetic oligonucleotide; ACAGGATT chr2 60488404 60488423 60488420 +
gataataggacaatgccata

SEQ ID NO: 190699 - DNA, 20 bp, Artificial Sequence
  Synthetic oligonucleotide; ATCAGTTT chr2 60488472 60488491 60488488 +
tttaggtaatgtcatctatg

SEQ ID NO: 190700 - DNA, 20 bp, Artificial Sequence
  Synthetic oligonucleotide; TTTTGTTT chr2 60488478 60488497 60488494 +
taatgtcatctatgatcagt

SEQ ID NO: 190701 - DNA, 20 bp, Artificial Sequence
  Synthetic oligonucleotide; AATAGTTT chr2 60488552 60488571 60488568 +
gaaaccctgttatggctgta

SEQ ID NO: 190702 - DNA, 20 bp, Artificial Sequence
  Synthetic oligonucleotide; GTTTGCTT chr2 60488556 60488575 60488572 +
ccctgttatggctgtaaata

SEQ ID NO: 190703 - DNA, 20 bp, Artificial Sequence
  Synthetic oligonucleotide; TCTAGTTT chr2 60488616 60488635 60488632 +
aggggaattcggtaaaactt

SEQ ID NO: 190704 - DNA, 20 bp, Artificial Sequence
  Synthetic oligonucleotide; TTTTGCTT chr2 60488621 60488640 60488637 +
aattcggtaaaactttctag

SEQ ID NO: 190705 - DNA, 20 bp, Artificial Sequence
  Synthetic oligonucleotide; AAACGATT chr2 60488710 60488729 60488726 +
cctaaagccactgctaccca

SEQ ID NO: 190706 - DNA, 20 bp, Artificial Sequence
  Synthetic oligonucleotide; TTTTGTTT chr2 60488716 60488735 60488732 +
gccactgctacccaaaacga

SEQ ID NO: 190707 - DNA, 20 bp, Artificial Sequence
  Synthetic oligonucleotide; GTTTGTTT chr2 60488720 60488739 60488736 +
ctgctacccaaaacgatttt

SEQ ID NO: 190708 - DNA, 20 bp, Artificial Sequence
  Synthetic oligonucleotide; GTTTGTTT chr2 60488724 60488743 60488740 +
tacccaaaacgattttgttt

SEQ ID NO: 190709 - DNA, 20 bp, Artificial Sequence
  Synthetic oligonucleotide; GTTTGTTT chr2 60488728 60488747 60488744 +
caaaacgattttgtttgttt

SEQ ID NO: 190710 - DNA, 20 bp, Artificial Sequence
  Synthetic oligonucleotide; GTTTGTTT chr2 60488732 60488751 60488748 +
acgattttgtttgtttgttt

SEQ ID NO: 190711 - DNA, 20 bp, Artificial Sequence
  Synthetic oligonucleotide; GTTTGTTT chr2 60488736 60488755 60488752 +
ttttgtttgtttgtttgttt

SEQ ID NO: 190712 - DNA, 20 bp, Artificial Sequence
  Synthetic oligonucleotide; GTTTGTTT chr2 60488740 60488759 60488756 +
gtttgtttgtttgtttgttt

SEQ ID NO: 190713 - DNA, 20 bp, Artificial Sequence
  Synthetic oligonucleotide; TTTTGTTT chr2 60488747 60488766 60488763 +
tgtttgtttgtttgtttgtt

SEQ ID NO: 190714 - DNA, 20 bp, Artificial Sequence
  Synthetic oligonucleotide; TGGAGTTT chr2 60488761 60488780 60488777 +
tttgttttttgtttctgagg

SEQ ID NO: 190715 - DNA, 20 bp, Artificial Sequence
  Synthetic oligonucleotide; AAGCGATT chr2 60488839 60488858 60488855 +
aatctccgcctcccgggttc

SEQ ID NO: 190716 - DNA, 20 bp, Artificial Sequence
  Synthetic oligonucleotide; CTGGGATT chr2 60488871 60488890 60488887 +
tgcctcagcctcccaagtag

SEQ ID NO: 190717 - DNA, 20 bp, Artificial Sequence
  Synthetic oligonucleotide; CGGGGTTT chr2 60488928 60488947 60488944 +
ttctgtatttttggtagaga

SEQ ID NO: 190718 - DNA, 20 bp, Artificial Sequence
  Synthetic oligonucleotide; CTGGGATT chr2 60489006 60489025 60489022 +
cacctcagcctcccaaagtg

SEQ ID NO: 190719 - DNA, 20 bp, Artificial Sequence
  Synthetic oligonucleotide; AAATGTTT chr2 60489104 60489123 60489120 +
tcctaaataataggtggtca

SEQ ID NO: 190720 - DNA, 20 bp, Artificial Sequence
  Synthetic oligonucleotide; TGTTGCTT chr2 60489141 60489160 60489157 +
accttagaccccaattaaac

SEQ ID NO: 190721 - DNA, 20 bp, Artificial Sequence
  Synthetic oligonucleotide; TAGAGTTT chr2 60489149 60489168 60489165 +
ccccaattaaactgttgctt

SEQ ID NO: 190722 - DNA, 20 bp, Artificial Sequence
  Synthetic oligonucleotide; CTCTGCTT chr2 60489338 60489357 60489354 +
gcatttggaacccagtgcta

SEQ ID NO: 190723 - DNA, 20 bp, Artificial Sequence
  Synthetic oligonucleotide; GGAAGTTT chr2 60489366 60489385 60489382 +
cctaactaatttctgccgct

SEQ ID NO: 190724 - DNA, 20 bp, Artificial Sequence
  Synthetic oligonucleotide; AAAAGCTT chr2 60489515 60489534 60489531 +
ccaagtgaccagccacaaac

SEQ ID NO: 190725 - DNA, 20 bp, Artificial Sequence
  Synthetic oligonucleotide; GCTTGTTT chr2 60489519 60489538 60489535 +
gtgaccagccacaaacaaaa

SEQ ID NO: 190726 - DNA, 20 bp, Artificial Sequence
  Synthetic oligonucleotide; CTCTGCTT chr2 60489658 60489677 60489674 +
acactctgggtcactagcat

SEQ ID NO: 190727 - DNA, 20 bp, Artificial Sequence
  Synthetic oligonucleotide; AAATGTTT chr2 60489766 60489785 60489782 +
ccccctctcaccccatccaa

SEQ ID NO: 190728 - DNA, 20 bp, Artificial Sequence
  Synthetic oligonucleotide; GCTAGCTT chr2 60489786 60489805 60489802 +
aaatgtttactcaagttcag

SEQ ID NO: 190729 - DNA, 20 bp, Artificial Sequence
  Synthetic oligonucleotide; CCTTGATT chr2 60489983 60490002 60489999 +
caatacagaccctgatgggc

SEQ ID NO: 190730 - DNA, 20 bp, Artificial Sequence
  Synthetic oligonucleotide; GAAAGCTT chr2 60490043 60490062 60490059 +
aatgggggcaaaggcaaaag

SEQ ID NO: 190731 - DNA, 20 bp, Artificial Sequence
  Synthetic oligonucleotide; CCAAGATT chr2 60490052 60490071 60490068 +
aaaggcaaaaggaaagcttt

SEQ ID NO: 190732 - DNA, 20 bp, Artificial Sequence
  Synthetic oligonucleotide; CCTGGCTT chr2 60490463 60490482 60490479 +
ccttccgttctcatttcctt

SEQ ID NO: 190733 - DNA, 20 bp, Artificial Sequence
  Synthetic oligonucleotide; ATGAGTTT chr2 60490677 60490696 60490693 +
attaatttcatgtgttccca

SEQ ID NO: 190734 - DNA, 20 bp, Artificial Sequence
  Synthetic oligonucleotide; ACTTGCTT chr2 60490710 60490729 60490726 +
atacagggactctttctcct

SEQ ID NO: 190735 - DNA, 20 bp, Artificial Sequence
  Synthetic oligonucleotide; GACTGATT chr2 60490797 60490816 60490813 +
tcaacaaatagcatataaat

SEQ ID NO: 190736 - DNA, 20 bp, Artificial Sequence
  Synthetic oligonucleotide; CAAAGATT chr2 60490961 60490980 60490977 +
cagtaacatgttatgctaca

SEQ ID NO: 190737 - DNA, 20 bp, Artificial Sequence
  Synthetic oligonucleotide; TGAAGTTT chr2 60491026 60491045 60491042 +
accctggagaagagcaaatg

SEQ ID NO: 190738 - DNA, 20 bp, Artificial Sequence
  Synthetic oligonucleotide; TGCTGTTT chr2 60491237 60491256 60491253 +
ttctaaaaacgtattcttaa

SEQ ID NO: 190739 - DNA, 20 bp, Artificial Sequence
  Synthetic oligonucleotide; ATCAGTTT chr2 60491454 60491473 60491470 +
cctgaggtcaggagttcaag

SEQ ID NO: 190740 - DNA, 20 bp, Artificial Sequence
  Synthetic oligonucleotide; GATCGCTT chr2 60491562 60491581 60491578 +
ctcgggaggctgaggcagga

SEQ ID NO: 190741 - DNA, 20 bp, Artificial Sequence
  Synthetic oligonucleotide; AGACGTTT chr2 60491805 60491824 60491821 +
acccaacactacgcaggcac

SEQ ID NO: 190742 - DNA, 20 bp, Artificial Sequence
  Synthetic oligonucleotide; CTCCGCTT chr2 60492031 60492050 60492047 +
agatgctacattgttagcat

SEQ ID NO: 190743 - DNA, 20 bp, Artificial Sequence
  Synthetic oligonucleotide; GATGGCTT chr2 60492258 60492277 60492274 +
tcaggaggctgaggtgacag

SEQ ID NO: 190744 - DNA, 20 bp, Artificial Sequence
  Synthetic oligonucleotide; TAATGTTT chr2 60492388 60492407 60492404 +
caaaagacaactaattgggc

SEQ ID NO: 190745 - DNA, 20 bp, Artificial Sequence
  Synthetic oligonucleotide; AACAGATT chr2 60492484 60492503 60492500 +
gcctgctggaattctaggaa

SEQ ID NO: 190746 - DNA, 20 bp, Artificial Sequence
  Synthetic oligonucleotide; ATGCGCTT chr2 60492535 60492554 60492551 +
tcacatactcaccagtactc

SEQ ID NO: 190747 - DNA, 20 bp, Artificial Sequence
  Synthetic oligonucleotide; CTCTGCTT chr2 60492557 60492576 60492573 +
gcgcttctcagacccaaatg

SEQ ID NO: 190748 - DNA, 20 bp, Artificial Sequence
  Synthetic oligonucleotide; GGGTGTTT chr2 60492774 60492793 60492790 +
cttggttccactccagtggt

SEQ ID NO: 190749 - DNA, 20 bp, Artificial Sequence
  Synthetic oligonucleotide; TTTTGTTT chr2 60492779 60492798 60492795 +
ttccactccagtggtgggtg

SEQ ID NO: 190750 - DNA, 20 bp, Artificial Sequence
  Synthetic oligonucleotide; TTTTGTTT chr2 60492784 60492803 60492800 +
ctccagtggtgggtgttttg

SEQ ID NO: 190751 - DNA, 20 bp, Artificial Sequence
  Synthetic oligonucleotide; TTTCGCTT chr2 60492789 60492808 60492805 +
gtggtgggtgttttgttttg

SEQ ID NO: 190752 - DNA, 20 bp, Artificial Sequence
  Synthetic oligonucleotide; TTTAGCTT chr2 60492795 60492814 60492811 +
ggtgttttgttttgtttcgc

SEQ ID NO: 190753 - DNA, 20 bp, Artificial Sequence
  Synthetic oligonucleotide; GTTGGATT chr2 60492853 60492872 60492869 +
tcattcattttaagtgtaca

SEQ ID NO: 190754 - DNA, 20 bp, Artificial Sequence
  Synthetic oligonucleotide; TTGTGTTT chr2 60493075 60493094 60493091 +
ctcatacaggatatcgtctt

SEQ ID NO: 190755 - DNA, 20 bp, Artificial Sequence
  Synthetic oligonucleotide; GAATGATT chr2 60493101 60493120 60493117 +
ttaatttcttccacagagca

SEQ ID NO: 190756 - DNA, 20 bp, Artificial Sequence
  Synthetic oligonucleotide; CTGGGATT chr2 60493109 60493128 60493125 +
ttccacagagcagaatgatt

SEQ ID NO: 190757 - DNA, 20 bp, Artificial Sequence
  Synthetic oligonucleotide; GGGCGTTT chr2 60493179 60493198 60493195 +
ttgagttgtattccaccata

SEQ ID NO: 190758 - DNA, 20 bp, Artificial Sequence
  Synthetic oligonucleotide; ATGTGTTT chr2 60493269 60493288 60493285 +
ctacaatggacactgtgtag

SEQ ID NO: 190759 - DNA, 20 bp, Artificial Sequence
  Synthetic oligonucleotide; AAAGGTTT chr2 60493337 60493356 60493353 +
aggcatttcgagaacacaga

SEQ ID NO: 190760 - DNA, 20 bp, Artificial Sequence
  Synthetic oligonucleotide; TTGAGTTT chr2 60493344 60493363 60493360 +
tcgagaacacagaaaaggtt

SEQ ID NO: 190761 - DNA, 20 bp, Artificial Sequence
  Synthetic oligonucleotide; ATCTGTTT chr2 60493445 60493464 60493461 +
ccaaaccctatatcccagct

SEQ ID NO: 190762 - DNA, 20 bp, Artificial Sequence
  Synthetic oligonucleotide; CAAAGCTT chr2 60493787 60493806 60493803 +
ctgcccagtgctgtggacag

SEQ ID NO: 190763 - DNA, 20 bp, Artificial Sequence
  Synthetic oligonucleotide; TTAAGATT chr2 60493807 60493826 60493823 +
caaagcttcagtgcaggaaa

SEQ ID NO: 190764 - DNA, 20 bp, Artificial Sequence
  Synthetic oligonucleotide; ATCAGCTT chr2 60493842 60493861 60493858 +
cctccccctcccccatcctc

SEQ ID NO: 190765 - DNA, 20 bp, Artificial Sequence
  Synthetic oligonucleotide; AGCTGATT chr2 60493958 60493977 60493974 +
tggcctcaggcagtggcgga

SEQ ID NO: 190766 - DNA, 20 bp, Artificial Sequence
  Synthetic oligonucleotide; GGGAGTTT chr2 60494258 60494277 60494274 +
gaagacgtgggctgggagct

SEQ ID NO: 190767 - DNA, 20 bp, Artificial Sequence
  Synthetic oligonucleotide; TTTGGCTT chr2 60494263 60494282 60494279 +
cgtgggctgggagctgggag

SEQ ID NO: 190768 - DNA, 20 bp, Artificial Sequence
  Synthetic oligonucleotide; TAATGATT chr2 60494590 60494609 60494606 +
aataactcctagctcattcc

SEQ ID NO: 190769 - DNA, 20 bp, Artificial Sequence
  Synthetic oligonucleotide; ATATGCTT chr2 60494670 60494689 60494686 +
aaaataggaataataatagt

SEQ ID NO: 190770 - DNA, 20 bp, Artificial Sequence
  Synthetic oligonucleotide; TAGGGTTT chr2 60494680 60494699 60494696 +
taataatagtatatgcttca

SEQ ID NO: 190771 - DNA, 20 bp, Artificial Sequence
  Synthetic oligonucleotide; CCGAGCTT chr2 60494743 60494762 60494759 +
cctagagcagagtaagtgct

SEQ ID NO: 190772 - DNA, 20 bp, Artificial Sequence
  Synthetic oligonucleotide; CCTAGTTT chr2 60494829 60494848 60494845 +
atcaggccctttccccaatt

SEQ ID NO: 190773 - DNA, 20 bp, Artificial Sequence
  Synthetic oligonucleotide; GGAAGCTT chr2 60495026 60495045 60495042 +
gaggggagagtgcagacagg

SEQ ID NO: 190774 - DNA, 20 bp, Artificial Sequence
  Synthetic oligonucleotide; GTTAGCTT chr2 60495259 60495278 60495275 +
agcctgtgataaaagcaact

SEQ ID NO: 190775 - DNA, 20 bp, Artificial Sequence
  Synthetic oligonucleotide; ACTAGCTT chr2 60495274 60495293 60495290 +
caactgttagcttgcactag

SEQ ID NO: 190776 - DNA, 20 bp, Artificial Sequence
  Synthetic oligonucleotide; TATCGCTT chr2 60495427 60495446 60495443 +
ggggcatagagccagccctg

SEQ ID NO: 190777 - DNA, 20 bp, Artificial Sequence
  Synthetic oligonucleotide; TCTGGTTT chr2 60495547 60495566 60495563 +
tagaaccccctataaactag

SEQ ID NO: 190778 - DNA, 20 bp, Artificial Sequence
  Synthetic oligonucleotide; GGCTGTTT chr2 60495573 60495592 60495589 +
ttgcccatggggcacagtca

SEQ ID NO: 190779 - DNA, 20 bp, Artificial Sequence
  Synthetic oligonucleotide; TGATGCTT chr2 60495615 60495634 60495631 +
cagacattctctgcctgttg

SEQ ID NO: 190780 - DNA, 20 bp, Artificial Sequence
  Synthetic oligonucleotide; TGTGGTTT chr2 60495665 60495684 60495681 +
cacgtatgtgttgtgatccc

SEQ ID NO: 190781 - DNA, 20 bp, Artificial Sequence
  Synthetic oligonucleotide; GAGAGTTT chr2 60495673 60495692 60495689 +
tgttgtgatccctgtggttt

SEQ ID NO: 190782 - DNA, 20 bp, Artificial Sequence
  Synthetic oligonucleotide; TGGAGCTT chr2 60495680 60495699 60495696 +
atccctgtggtttgagagtt

SEQ ID NO: 190783 - DNA, 20 bp, Artificial Sequence
  Synthetic oligonucleotide; GGGTGTTT chr2 60495920 60495939 60495936 +
tgagagtctctaaattacaa

SEQ ID NO: 190784 - DNA, 20 bp, Artificial Sequence
  Synthetic oligonucleotide; GAAGGCTT chr2 60496052 60496071 60496068 +
gtgaaaagtcaattgataat

SEQ ID NO: 190785 - DNA, 20 bp, Artificial Sequence
  Synthetic oligonucleotide; AGATGATT chr2 60496077 60496096 60496093 +
ctttaggataaccggagggg

SEQ ID NO: 190786 - DNA, 20 bp, Artificial Sequence
  Synthetic oligonucleotide; AATGGATT chr2 60496108 60496127 60496124 +
agcaatgcacctgtgcagga

SEQ ID NO: 190787 - DNA, 20 bp, Artificial Sequence
  Synthetic oligonucleotide; ACACGTTT chr2 60496216 60496235 60496232 +
ttaagcaatggaagtccaat

SEQ ID NO: 190788 - DNA, 20 bp, Artificial Sequence
  Synthetic oligonucleotide; TGGAGCTT chr2 60496353 60496372 60496369 +
gcaagtgtccagggcagaac

SEQ ID NO: 190789 - DNA, 20 bp, Artificial Sequence
  Synthetic oligonucleotide; CAAGGATT chr2 60496545 60496564 60496561 +
actttgctgcaggttcaagg

SEQ ID NO: 190790 - DNA, 20 bp, Artificial Sequence
  Synthetic oligonucleotide; TCACGATT chr2 60496952 60496971 60496968 +
gtagcacttaatttctgtct

SEQ ID NO: 190791 - DNA, 20 bp, Artificial Sequence
  Synthetic oligonucleotide; TCTGGATT chr2 60496973 60496992 60496989 +
cacgattacttcacgataaa

SEQ ID NO: 190792 - DNA, 20 bp, Artificial Sequence
  Synthetic oligonucleotide; CTCTGTTT chr2 60497305 60497324 60497321 +
cgaagcatcgcctttaactg

SEQ ID NO: 190793 - DNA, 20 bp, Artificial Sequence
  Synthetic oligonucleotide; GTCAGATT chr2 60497319 60497338 60497335 +
taactgctctgtttgatcaa

SEQ ID NO: 190794 - DNA, 20 bp, Artificial Sequence
  Synthetic oligonucleotide; GAGTGCTT chr2 60497429 60497448 60497445 +
agcaggccaaggatatatga

SEQ ID NO: 190795 - DNA, 20 bp, Artificial Sequence
  Synthetic oligonucleotide; GACAGATT chr2 60497490 60497509 60497506 +
gaattagaacattccaggta

SEQ ID NO: 190796 - DNA, 20 bp, Artificial Sequence
  Synthetic oligonucleotide; AATAGCTT chr2 60497620 60497639 60497636 +
atgatgatgataataataat

SEQ ID NO: 190797 - DNA, 20 bp, Artificial Sequence
  Synthetic oligonucleotide; CCAAGCTT chr2 60497855 60497874 60497871 +
gcacattgtcctaaatgaaa

SEQ ID NO: 190798 - DNA, 20 bp, Artificial Sequence
  Synthetic oligonucleotide; CACCGCTT chr2 60497912 60497931 60497928 +
tagaagggggagcctggacc

SEQ ID NO: 190799 - DNA, 20 bp, Artificial Sequence
  Synthetic oligonucleotide; CAGAGATT chr2 60497958 60497977 60497974 +
ccataaaggtcagggtgttg

SEQ ID NO: 190800 - DNA, 20 bp, Artificial Sequence
  Synthetic oligonucleotide; ATTTGTTT chr2 60498567 60498586 60498583 +
tagccacctctggcacctgc

SEQ ID NO: 190801 - DNA, 20 bp, Artificial Sequence
  Synthetic oligonucleotide; ATAGGCTT chr2 60498593 60498612 60498609 +
ttttcaaattttaatagcaa

SEQ ID NO: 190802 - DNA, 20 bp, Artificial Sequence
  Synthetic oligonucleotide; TGTGGCTT chr2 60498779 60498798 60498795 +
tctctgaggagctagagact

SEQ ID NO: 190803 - DNA, 20 bp, Artificial Sequence
  Synthetic oligonucleotide; CTACGTTT chr2 60498895 60498914 60498911 +
ctgtccaactcatccagaaa

SEQ ID NO: 190804 - DNA, 20 bp, Artificial Sequence
  Synthetic oligonucleotide; CAGTGTTT chr2 60498968 60498987 60498984 +
gcattgatgagaggcagggc

SEQ ID NO: 190805 - DNA, 20 bp, Artificial Sequence
  Synthetic oligonucleotide; CACTGATT chr2 60498994 60499013 60499010 +
ttcttcttcattttccattc

SEQ ID NO: 190806 - DNA, 20 bp, Artificial Sequence
  Synthetic oligonucleotide; GCTGGCTT chr2 60499057 60499076 60499073 +
acagctacagtccatttctc

SEQ ID NO: 190807 - DNA, 20 bp, Artificial Sequence
  Synthetic oligonucleotide; TCAGGTTT chr2 60499101 60499120 60499117 +
tacaatgtgttccccagtat

SEQ ID NO: 190808 - DNA, 20 bp, Artificial Sequence
  Synthetic oligonucleotide; GGCTGATT chr2 60499461 60499480 60499477 +
aaagagcctgaggcccaata

SEQ ID NO: 190809 - DNA, 20 bp, Artificial Sequence
  Synthetic oligonucleotide; CAGTGTTT chr2 60499562 60499581 60499578 +
aacgtcccactttctcaaga

SEQ ID NO: 190810 - DNA, 20 bp, Artificial Sequence
  Synthetic oligonucleotide; CTAAGATT chr2 60499889 60499908 60499905 +
ctgctagacctcaagcagga

SEQ ID NO: 190811 - DNA, 20 bp, Artificial Sequence
  Synthetic oligonucleotide; GGCTGTTT chr2 60499981 60500000 60499997 +
aggcactcaccccactgcca

SEQ ID NO: 190812 - DNA, 20 bp, Artificial Sequence
  Synthetic oligonucleotide; TGGTGTTT chr2 60499998 60500017 60500014 +
ccaggctgtttactcttagc

SEQ ID NO: 190813 - DNA, 20 bp, Artificial Sequence
  Synthetic oligonucleotide; GTGAGATT chr2 60500089 60500108 60500105 +
ctgcctgaggctgcctgcca

SEQ ID NO: 190814 - DNA, 20 bp, Artificial Sequence
  Synthetic oligonucleotide; CAGGGCTT chr2 60500103 60500122 60500119 +
ctgccagtgagattgcatgt

SEQ ID NO: 190815 - DNA, 20 bp, Artificial Sequence
  Synthetic oligonucleotide; CTCTGCTT chr2 60500334 60500353 60500350 +
gttcccccattatgcactgc

SEQ ID NO: 190816 - DNA, 20 bp, Artificial Sequence
  Synthetic oligonucleotide; CTCAGTTT chr2 60500836 60500855 60500852 +
gctctttaacctctccaagc

SEQ ID NO: 190817 - DNA, 20 bp, Artificial Sequence
  Synthetic oligonucleotide; GTGGGCTT chr2 60500940 60500959 60500956 +
tgtgaagcaagcctagctgg

SEQ ID NO: 190818 - DNA, 20 bp, Artificial Sequence
  Synthetic oligonucleotide; ACCTGTTT chr2 60501098 60501117 60501114 +
ggcacatcttctgaaacaag

SEQ ID NO: 190819 - DNA, 20 bp, Artificial Sequence
  Synthetic oligonucleotide; TATTGTTT chr2 60501150 60501169 60501166 +
aattttgcacttatttatat

SEQ ID NO: 190820 - DNA, 20 bp, Artificial Sequence
  Synthetic oligonucleotide; TTCTGCTT chr2 60501175 60501194 60501191 +
tttcagaaacactaccttca

SEQ ID NO: 190821 - DNA, 20 bp, Artificial Sequence
  Synthetic oligonucleotide; CTTTGATT chr2 60501180 60501199 60501196 +
gaaacactaccttcattctg

SEQ ID NO: 190822 - DNA, 20 bp, Artificial Sequence
  Synthetic oligonucleotide; ATATGATT chr2 60501378 60501397 60501394 +
aaatgaagaacactcttgta

SEQ ID NO: 190823 - DNA, 20 bp, Artificial Sequence
  Synthetic oligonucleotide; CCTGGTTT chr2 60501406 60501425 60501422 +
aatcacttccaaatacttta

SEQ ID NO: 190824 - DNA, 20 bp, Artificial Sequence
  Synthetic oligonucleotide; GGGTGCTT chr2 60501428 60501447 60501444 +
tggtttgtaagttctctttc

SEQ ID NO: 190825 - DNA, 20 bp, Artificial Sequence
  Synthetic oligonucleotide; CACCGCTT chr2 60501476 60501495 60501492 +
aggccttttgcaagtactga

SEQ ID NO: 190826 - DNA, 20 bp, Artificial Sequence
  Synthetic oligonucleotide; CAGAGTTT chr2 60501511 60501530 60501527 +
ttttttttttttttttgaga

SEQ ID NO: 190827 - DNA, 20 bp, Artificial Sequence
  Synthetic oligonucleotide; CTGGGATT chr2 60501618 60501637 60501634 +
tccctcagcctcctgagtag

SEQ ID NO: 190828 - DNA, 20 bp, Artificial Sequence
  Synthetic oligonucleotide; CTAAGTTT chr2 60501650 60501669 60501666 +
gcatgtgcgaccatgcctgg

SEQ ID NO: 190829 - DNA, 20 bp, Artificial Sequence
  Synthetic oligonucleotide; TGAGGTTT chr2 60501674 60501693 60501690 +
gtttatatttttaatagaga

SEQ ID NO: 190830 - DNA, 20 bp, Artificial Sequence
  Synthetic oligonucleotide; CACTGCTT chr2 60501789 60501808 60501805 +
agccactgcgcccagcctta

SEQ ID NO: 190831 - DNA, 20 bp, Artificial Sequence
  Synthetic oligonucleotide; TTATGTTT chr2 60501955 60501974 60501971 +
aattatggaataaagtagta

SEQ ID NO: 190832 - DNA, 20 bp, Artificial Sequence
  Synthetic oligonucleotide; CAGAGCTT chr2 60502007 60502026 60502023 +
taggtgaaatctcaggctaa

SEQ ID NO: 190833 - DNA, 20 bp, Artificial Sequence
  Synthetic oligonucleotide; AGAGGTTT chr2 60502090 60502109 60502106 +
ccagaagtcctggaaaactg

SEQ ID NO: 190834 - DNA, 20 bp, Artificial Sequence
  Synthetic oligonucleotide; ATGAGCTT chr2 60502193 60502212 60502209 +
cagagatcaggtccctccaa

SEQ ID NO: 190835 - DNA, 20 bp, Artificial Sequence
  Synthetic oligonucleotide; TACAGTTT chr2 60502200 60502219 60502216 +
caggtccctccaaatgagct

SEQ ID NO: 190836 - DNA, 20 bp, Artificial Sequence
  Synthetic oligonucleotide; TCCTGCTT chr2 60502212 60502231 60502228 +
aatgagcttacagtttatga

SEQ ID NO: 190837 - DNA, 20 bp, Artificial Sequence
  Synthetic oligonucleotide; AGCAGATT chr2 60502250 60502269 60502266 +
ggtgaaacaaaatgatggat

SEQ ID NO: 190838 - DNA, 20 bp, Artificial Sequence
  Synthetic oligonucleotide; ATCAGATT chr2 60502407 60502426 60502423 +
acagacagaataacttcttc

SEQ ID NO: 190839 - DNA, 20 bp, Artificial Sequence
  Synthetic oligonucleotide; GGGGGTTT chr2 60502428 60502447 60502444 +
tcagattcagaagagtagca

SEQ ID NO: 190840 - DNA, 20 bp, Artificial Sequence
  Synthetic oligonucleotide; CACAGATT chr2 60502444 60502463 60502460 +
agcagggggtttctcgctag

SEQ ID NO: 190841 - DNA, 20 bp, Artificial Sequence
  Synthetic oligonucleotide; GCCAGCTT chr2 60502519 60502538 60502535 +
gtattgctcctaaagaaaga

SEQ ID NO: 190842 - DNA, 20 bp, Artificial Sequence
  Synthetic oligonucleotide; CCATGCTT chr2 60502576 60502595 60502592 +
agcagtgttcacacccaatc

SEQ ID NO: 190843 - DNA, 20 bp, Artificial Sequence
  Synthetic oligonucleotide; AAGAGATT chr2 60502622 60502641 60502638 +
atttaagaaataccagtgaa

SEQ ID NO: 190844 - DNA, 20 bp, Artificial Sequence
  Synthetic oligonucleotide; AACTGTTT chr2 60502679 60502698 60502695 +
tgttcttgatatgttaataa

SEQ ID NO: 190845 - DNA, 20 bp, Artificial Sequence
  Synthetic oligonucleotide; ACTGGCTT chr2 60502998 60503017 60503014 +
ggctgtctagggggatggct

SEQ ID NO: 190846 - DNA, 20 bp, Artificial Sequence
  Synthetic oligonucleotide; TATTGCTT chr2 60503409 60503428 60503425 +
gtccctggaagacagtaggc

SEQ ID NO: 190847 - DNA, 20 bp, Artificial Sequence
  Synthetic oligonucleotide; ATTAGATT chr2 60503496 60503515 60503512 +
cataaccctccctcctatcc

SEQ ID NO: 190848 - DNA, 20 bp, Artificial Sequence
  Synthetic oligonucleotide; TCAGGCTT chr2 60503577 60503596 60503593 +
tcccaataccagtggctctt

SEQ ID NO: 190849 - DNA, 20 bp, Artificial Sequence
  Synthetic oligonucleotide; GGTGGTTT chr2 60503595 60503614 60503611 +
tttcaggcttacaaagcctt

SEQ ID NO: 190850 - DNA, 20 bp, Artificial Sequence
  Synthetic oligonucleotide; AGAAGATT chr2 60503734 60503753 60503750 +
aggactaatttaacccgcct

SEQ ID NO: 190851 - DNA, 20 bp, Artificial Sequence
  Synthetic oligonucleotide; CAGAGCTT chr2 60503801 60503820 60503817 +
caatattctggatcttttgt

SEQ ID NO: 190852 - DNA, 20 bp, Artificial Sequence
  Synthetic oligonucleotide; GGCTGCTT chr2 60503880 60503899 60503896 +
cctcctgaaaattggttatt

SEQ ID NO: 190853 - DNA, 20 bp, Artificial Sequence
  Synthetic oligonucleotide; CGTTGATT chr2 60503888 60503907 60503904 +
aaattggttattggctgctt

SEQ ID NO: 190854 - DNA, 20 bp, Artificial Sequence
  Synthetic oligonucleotide; CATGGCTT chr2 60504021 60504040 60504037 +
agaagcctgctggaagccta

SEQ ID NO: 190855 - DNA, 20 bp, Artificial Sequence
  Synthetic oligonucleotide; TGTGGTTT chr2 60504198 60504217 60504214 +
ccccagggctcatgctgcac

SEQ ID NO: 190856 - DNA, 20 bp, Artificial Sequence
  Synthetic oligonucleotide; GCAAGATT chr2 60504313 60504332 60504329 +
cccttcctttcttagtcact

SEQ ID NO: 190857 - DNA, 20 bp, Artificial Sequence
  Synthetic oligonucleotide; TCTGGTTT chr2 60504464 60504483 60504480 +
aaagtcaacctctgactact

SEQ ID NO: 190858 - DNA, 20 bp, Artificial Sequence
  Synthetic oligonucleotide; AGAAGCTT chr2 60504682 60504701 60504698 +
tacagctgatgtatttactg

SEQ ID NO: 190859 - DNA, 20 bp, Artificial Sequence
  Synthetic oligonucleotide; TCAAGCTT chr2 60504692 60504711 60504708 +
gtatttactgagaagcttct

SEQ ID NO: 190860 - DNA, 20 bp, Artificial Sequence
  Synthetic oligonucleotide; TGGTGCTT chr2 60504705 60504724 60504721 +
agcttcttcaagctttctac

SEQ ID NO: 190861 - DNA, 20 bp, Artificial Sequence
  Synthetic oligonucleotide; AAATGCTT chr2 60504782 60504801 60504798 +
aggtacatatctgtccctga

SEQ ID NO: 190862 - DNA, 20 bp, Artificial Sequence
  Synthetic oligonucleotide; AACTGATT chr2 60504799 60504818 60504815 +
tgaaaatgcttaaaagatca

SEQ ID NO: 190863 - DNA, 20 bp, Artificial Sequence
  Synthetic oligonucleotide; ACTAGCTT chr2 60504843 60504862 60504859 +
cctaccagtgagcgcccacc

SEQ ID NO: 190864 - DNA, 20 bp, Artificial Sequence
  Synthetic oligonucleotide; CTAAGCTT chr2 60505036 60505055 60505052 +
agacctgccatttaacctct

SEQ ID NO: 190865 - DNA, 20 bp, Artificial Sequence
  Synthetic oligonucleotide; AAGGGCTT chr2 60505114 60505133 60505130 +
caatttgacaatactcctca

SEQ ID NO: 190866 - DNA, 20 bp, Artificial Sequence
  Synthetic oligonucleotide; ATGTGATT chr2 60505135 60505154 60505151 +
agggcttactcaaaaaaaaa

SEQ ID NO: 190867 - DNA, 20 bp, Artificial Sequence
  Synthetic oligonucleotide; AACGGCTT chr2 60505258 60505277 60505274 +
agaagggacggatactcaga

SEQ ID NO: 190868 - DNA, 20 bp, Artificial Sequence
  Synthetic oligonucleotide; TCCAGATT chr2 60505293 60505312 60505309 +
gtcctttggcaccccattct

SEQ ID NO: 190869 - DNA, 20 bp, Artificial Sequence
  Synthetic oligonucleotide; GTCAGCTT chr2 60505387 60505406 60505403 +
tgaaatgtgttggagcagct

SEQ ID NO: 190870 - DNA, 20 bp, Artificial Sequence
  Synthetic oligonucleotide; GGGTGCTT chr2 60505476 60505495 60505492 +
catccacacagggaacaagc

SEQ ID NO: 190871 - DNA, 20 bp, Artificial Sequence
  Synthetic oligonucleotide; TAGGGCTT chr2 60505970 60505989 60505986 +
catttggtaaataacccaaa

SEQ ID NO: 190872 - DNA, 20 bp, Artificial Sequence
  Synthetic oligonucleotide; CTAGGCTT chr2 60505999 60506018 60506015 +
gcagggtatgggacaccaca

SEQ ID NO: 190873 - DNA, 20 bp, Artificial Sequence
  Synthetic oligonucleotide; GGCTGCTT chr2 60506584 60506603 60506600 +
acccacgtgcctttgtgcat

SEQ ID NO: 190874 - DNA, 20 bp, Artificial Sequence
  Synthetic oligonucleotide; GCATGTTT chr2 60506689 60506708 60506705 +
accactgatgacagcccccc

SEQ ID NO: 190875 - DNA, 20 bp, Artificial Sequence
  Synthetic oligonucleotide; CTGAGATT chr2 60506759 60506778 60506775 +
ctcaaataatgtctataatg

SEQ ID NO: 190876 - DNA, 20 bp, Artificial Sequence
  Synthetic oligonucleotide; ATGTGATT chr2 60506786 60506805 60506802 +
ttatacatgggtacttataa

SEQ ID NO: 190877 - DNA, 20 bp, Artificial Sequence
  Synthetic oligonucleotide; AGCTGTTT chr2 60506975 60506994 60506991 +
taaacatgttggcgtaactg

SEQ ID NO: 190878 - DNA, 20 bp, Artificial Sequence
  Synthetic oligonucleotide; CAAGGATT chr2 60507135 60507154 60507151 +
tatcccaacagacagagggc

SEQ ID NO: 190879 - DNA, 20 bp, Artificial Sequence
  Synthetic oligonucleotide; AGCTGCTT chr2 60507449 60507468 60507465 +
ttgtgctcttgttgacttga

SEQ ID NO: 190880 - DNA, 20 bp, Artificial Sequence
  Synthetic oligonucleotide; AAGTGCTT chr2 60507488 60507507 60507504 +
agaaaagttaaaaccttgtg

SEQ ID NO: 190881 - DNA, 20 bp, Artificial Sequence
  Synthetic oligonucleotide; AGATGTTT chr2 60507506 60507525 60507522 +
tgaagtgcttttacattttc

SEQ ID NO: 190882 - DNA, 20 bp, Artificial Sequence
  Synthetic oligonucleotide; AACTGTTT chr2 60507551 60507570 60507567 +
tgaggacaggcaaggggaag

SEQ ID NO: 190883 - DNA, 20 bp, Artificial Sequence
  Synthetic oligonucleotide; AGCTGTTT chr2 60507567 60507586 60507583 +
gaagaactgtttccacatgc

SEQ ID NO: 190884 - DNA, 20 bp, Artificial Sequence
  Synthetic oligonucleotide; CTGAGCTT chr2 60507629 60507648 60507645 +
gggctgcctccgcacctgag

SEQ ID NO: 190885 - DNA, 20 bp, Artificial Sequence
  Synthetic oligonucleotide; TACTGCTT chr2 60507653 60507672 60507669 +
gcttgctgtcctaagtcggc

SEQ ID NO: 190886 - DNA, 20 bp, Artificial Sequence
  Synthetic oligonucleotide; CCCAGCTT chr2 60507668 60507687 60507684 +
tcggctactgcttctaagtc

SEQ ID NO: 190887 - DNA, 20 bp, Artificial Sequence
  Synthetic oligonucleotide; TATGGATT chr2 60507869 60507888 60507885 +
gcatactatgggataattac

SEQ ID NO: 190888 - DNA, 20 bp, Artificial Sequence
  Synthetic oligonucleotide; TACAGTTT chr2 60507882 60507901 60507898 +
taattactatggattattat

SEQ ID NO: 190889 - DNA, 20 bp, Artificial Sequence
  Synthetic oligonucleotide; CGCAGATT chr2 60507936 60507955 60507952 +
cacaaaagacatattacaca

SEQ ID NO: 190890 - DNA, 20 bp, Artificial Sequence
  Synthetic oligonucleotide; TAAAGCTT chr2 60507946 60507965 60507962 +
atattacacacgcagatttc

SEQ ID NO: 190891 - DNA, 20 bp, Artificial Sequence
  Synthetic oligonucleotide; TGGTGCTT chr2 60508072 60508091 60508088 +
cctgaaattctctcatgtca

SEQ ID NO: 190892 - DNA, 20 bp, Artificial Sequence
  Synthetic oligonucleotide; AGAAGCTT chr2 60508300 60508319 60508316 +
tgatgtgaaagaggagacag

SEQ ID NO: 190893 - DNA, 20 bp, Artificial Sequence
  Synthetic oligonucleotide; CTTTGCTT chr2 60508533 60508552 60508549 +
ttttcctgttctgaagagga

SEQ ID NO: 190894 - DNA, 20 bp, Artificial Sequence
  Synthetic oligonucleotide; CTCAGCTT chr2 60508653 60508672 60508669 +
tggacacggcaggaaacagc

SEQ ID NO: 190895 - DNA, 20 bp, Artificial Sequence
  Synthetic oligonucleotide; CTATGATT chr2 60508805 60508824 60508821 +
tgagctcccccttgggttac

SEQ ID NO: 190896 - DNA, 20 bp, Artificial Sequence
  Synthetic oligonucleotide; AAGAGTTT chr2 60508817 60508836 60508833 +
tgggttacctatgattccag

SEQ ID NO: 190897 - DNA, 20 bp, Artificial Sequence
  Synthetic oligonucleotide; CTGTGATT chr2 60508989 60509008 60509005 +
ggaacctgtcactggttctt

SEQ ID NO: 190898 - DNA, 20 bp, Artificial Sequence
  Synthetic oligonucleotide; ACAGGCTT chr2 60509079 60509098 60509095 +
tctcatcagactccgaaatc

SEQ ID NO: 190899 - DNA, 20 bp, Artificial Sequence
  Synthetic oligonucleotide; TAAAGATT chr2 60509093 60509112 60509109 +
gaaatcacaggcttctggtc

SEQ ID NO: 190900 - DNA, 20 bp, Artificial Sequence
  Synthetic oligonucleotide; ATTTGTTT chr2 60509123 60509142 60509139 +
agctgagaaacaagaaagca

SEQ ID NO: 190901 - DNA, 20 bp, Artificial Sequence
  Synthetic oligonucleotide; GTTTGATT chr2 60509127 60509146 60509143 +
gagaaacaagaaagcaattt

SEQ ID NO: 190902 - DNA, 20 bp, Artificial Sequence
  Synthetic oligonucleotide; CTCAGCTT chr2 60509173 60509192 60509189 +
cccccaataatttacttggt

SEQ ID NO: 190903 - DNA, 20 bp, Artificial Sequence
  Synthetic oligonucleotide; GCTGGCTT chr2 60509183 60509202 60509199 +
tttacttggtctcagctttg

SEQ ID NO: 190904 - DNA, 20 bp, Artificial Sequence
  Synthetic oligonucleotide; TGAGGATT chr2 60509199 60509218 60509215 +
tttggctggcttggatgtta

SEQ ID NO: 190905 - DNA, 20 bp, Artificial Sequence
  Synthetic oligonucleotide; AACGGATT chr2 60509335 60509354 60509351 +
gaacctgtggaaaagaggac

SEQ ID NO: 190906 - DNA, 20 bp, Artificial Sequence
  Synthetic oligonucleotide; TGCAGCTT chr2 60509475 60509494 60509491 +
ctgagaagtccaggaaaaga

SEQ ID NO: 190907 - DNA, 20 bp, Artificial Sequence
  Synthetic oligonucleotide; AAAAGATT chr2 60509649 60509668 60509665 +
acagagaaggaaaaagaaca

SEQ ID NO: 190908 - DNA, 20 bp, Artificial Sequence
  Synthetic oligonucleotide; GCCGGTTT chr2 60509996 60510015 60510012 +
cccaccagtcagcaaatcct

SEQ ID NO: 190909 - DNA, 20 bp, Artificial Sequence
  Synthetic oligonucleotide; GACTGCTT chr2 60510094 60510113 60510110 +
ttgcctaaaatttgccttct

SEQ ID NO: 190910 - DNA, 20 bp, Artificial Sequence
  Synthetic oligonucleotide; CCATGCTT chr2 60510115 60510134 60510131 +
actgcttctgcctcactttc

SEQ ID NO: 190911 - DNA, 20 bp, Artificial Sequence
  Synthetic oligonucleotide; AGTGGCTT chr2 60510185 60510204 60510201 +
tcatatgacatcactcctcc

SEQ ID NO: 190912 - DNA, 20 bp, Artificial Sequence
  Synthetic oligonucleotide; CTTTGCTT chr2 60510419 60510438 60510435 +
cttcctcacctctttggagc

SEQ ID NO: 190913 - DNA, 20 bp, Artificial Sequence
  Synthetic oligonucleotide; GGCAGTTT chr2 60510512 60510531 60510528 +
ccccaccttattttcgtgca

SEQ ID NO: 190914 - DNA, 20 bp, Artificial Sequence
  Synthetic oligonucleotide; GGGAGTTT chr2 60510608 60510627 60510624 +
aagggggtgccacaagagca

SEQ ID NO: 190915 - DNA, 20 bp, Artificial Sequence
  Synthetic oligonucleotide; TAAGGCTT chr2 60510617 60510636 60510633 +
ccacaagagcagggagtttt

SEQ ID NO: 190916 - DNA, 20 bp, Artificial Sequence
  Synthetic oligonucleotide; TTTAGCTT chr2 60510779 60510798 60510795 +
gcagcccaacctgggggcac

SEQ ID NO: 190917 - DNA, 20 bp, Artificial Sequence
  Synthetic oligonucleotide; TTGGGTTT chr2 60510793 60510812 60510809 +
gggcactttagctttggatc

SEQ ID NO: 190918 - DNA, 20 bp, Artificial Sequence
  Synthetic oligonucleotide; GCCAGATT chr2 60510803 60510822 60510819 +
gctttggatcttgggtttga

SEQ ID NO: 190919 - DNA, 20 bp, Artificial Sequence
  Synthetic oligonucleotide; AAGAGCTT chr2 60510844 60510863 60510860 +
aggccctgagacccacaggg

SEQ ID NO: 190920 - DNA, 20 bp, Artificial Sequence
  Synthetic oligonucleotide; GCTGGTTT chr2 60510881 60510900 60510897 +
aatgtaaatggaggggttga

SEQ ID NO: 190921 - DNA, 20 bp, Artificial Sequence
  Synthetic oligonucleotide; TAAGGCTT chr2 60510937 60510956 60510953 +
aaccaaacgaaagtctttcc

SEQ ID NO: 190922 - DNA, 20 bp, Artificial Sequence
  Synthetic oligonucleotide; CTGCGTTT chr2 60511039 60511058 60511055 +
cactggggctgtgcagccaa

SEQ ID NO: 190923 - DNA, 20 bp, Artificial Sequence
  Synthetic oligonucleotide; TCTTGCTT chr2 60511146 60511165 60511162 +
cggcattactctccctccat

SEQ ID NO: 190924 - DNA, 20 bp, Artificial Sequence
  Synthetic oligonucleotide; TTCAGATT chr2 60511153 60511172 60511169 +
actctccctccattcttgct

SEQ ID NO: 190925 - DNA, 20 bp, Artificial Sequence
  Synthetic oligonucleotide; CCATGTTT chr2 60511470 60511489 60511486 +
gtgctaatggccacttgtta

SEQ ID NO: 190926 - DNA, 20 bp, Artificial Sequence
  Synthetic oligonucleotide; CTCTGATT chr2 60511496 60511515 60511512 +
ttcataatgctaatatttcc

SEQ ID NO: 190927 - DNA, 20 bp, Artificial Sequence
  Synthetic oligonucleotide; ATCTGATT chr2 60511566 60511585 60511582 +
tttaagttaacagagcgcta

SEQ ID NO: 190928 - DNA, 20 bp, Artificial Sequence
  Synthetic oligonucleotide; CATTGCTT chr2 60511629 60511648 60511645 +
actgcactattaatgacaac

SEQ ID NO: 190929 - DNA, 20 bp, Artificial Sequence
  Synthetic oligonucleotide; CCAAGCTT chr2 60511790 60511809 60511806 +
ggggagtcattaattcttct

SEQ ID NO: 190930 - DNA, 20 bp, Artificial Sequence
  Synthetic oligonucleotide; CTCTGTTT chr2 60511804 60511823 60511820 +
tcttctccaagctttcaaca

SEQ ID NO: 190931 - DNA, 20 bp, Artificial Sequence
  Synthetic oligonucleotide; GGGAGCTT chr2 60511832 60511851 60511848 +
ctatgaaggcaagggttgga

SEQ ID NO: 190932 - DNA, 20 bp, Artificial Sequence
  Synthetic oligonucleotide; AGGTGCTT chr2 60511870 60511889 60511886 +
aataaatcagtaaaatgatg

SEQ ID NO: 190933 - DNA, 20 bp, Artificial Sequence
  Synthetic oligonucleotide; TAACGCTT chr2 60512000 60512019 60512016 +
ttgctcggccaaagacatag

SEQ ID NO: 190934 - DNA, 20 bp, Artificial Sequence
  Synthetic oligonucleotide; CTGGGCTT chr2 60512061 60512080 60512077 +
atgaatatgtgtgcagccac

SEQ ID NO: 190935 - DNA, 20 bp, Artificial Sequence
  Synthetic oligonucleotide; GCCTGCTT chr2 60512171 60512190 60512187 +
ggagagcagtcagagaggaa

SEQ ID NO: 190936 - DNA, 20 bp, Artificial Sequence
  Synthetic oligonucleotide; AGATGTTT chr2 60512184 60512203 60512200 +
agaggaagcctgctttcctc

SEQ ID NO: 190937 - DNA, 20 bp, Artificial Sequence
  Synthetic oligonucleotide; TTGGGCTT chr2 60512282 60512301 60512298 +
tggaactcagaatcattcat

SEQ ID NO: 190938 - DNA, 20 bp, Artificial Sequence
  Synthetic oligonucleotide; TTGAGCTT chr2 60512357 60512376 60512373 +
acctcccttggcctgtgtcc

SEQ ID NO: 190939 - DNA, 20 bp, Artificial Sequence
  Synthetic oligonucleotide; GGCAGCTT chr2 60512455 60512474 60512471 +
ctcgcctctcaaatgagaaa

SEQ ID NO: 190940 - DNA, 20 bp, Artificial Sequence
  Synthetic oligonucleotide; GGATGCTT chr2 60512470 60512489 60512486 +
agaaaggcagctttgagaga

SEQ ID NO: 190941 - DNA, 20 bp, Artificial Sequence
  Synthetic oligonucleotide; GATGGTTT chr2 60512666 60512685 60512682 +
attttgcatatctaattgga

SEQ ID NO: 190942 - DNA, 20 bp, Artificial Sequence
  Synthetic oligonucleotide; GACAGTTT chr2 60512751 60512770 60512767 +
gacgttcacagccttatgaa

SEQ ID NO: 190943 - DNA, 20 bp, Artificial Sequence
  Synthetic oligonucleotide; GCAGGTTT chr2 60512814 60512833 60512830 +
gatgacggataggagaacaa

SEQ ID NO: 190944 - DNA, 20 bp, Artificial Sequence
  Synthetic oligonucleotide; AGGAGTTT chr2 60512907 60512926 60512923 +
tttggaggagacacagagaa

SEQ ID NO: 190945 - DNA, 20 bp, Artificial Sequence
  Synthetic oligonucleotide; CAGAGATT chr2 60512931 60512950 60512947 +
gtttcacctcttagacgtct

SEQ ID NO: 190946 - DNA, 20 bp, Artificial Sequence
  Synthetic oligonucleotide; CTAGGTTT chr2 60513200 60513219 60513216 +
cagagtcaggatgactctca

SEQ ID NO: 190947 - DNA, 20 bp, Artificial Sequence
  Synthetic oligonucleotide; GGGTGCTT chr2 60513354 60513373 60513370 +
tccctcaggagccatctgcc

SEQ ID NO: 190948 - DNA, 20 bp, Artificial Sequence
  Synthetic oligonucleotide; TGCTGCTT chr2 60513497 60513516 60513513 +
tagcctctagccagaactcc

SEQ ID NO: 190949 - DNA, 20 bp, Artificial Sequence
  Synthetic oligonucleotide; CAGAGATT chr2 60513835 60513854 60513851 +
actctctcttctcaacaagc

SEQ ID NO: 190950 - DNA, 20 bp, Artificial Sequence
  Synthetic oligonucleotide; CCTGGCTT chr2 60513884 60513903 60513900 +
ctccatgaagagaagctgtt

SEQ ID NO: 190951 - DNA, 20 bp, Artificial Sequence
  Synthetic oligonucleotide; CCTGGATT chr2 60513908 60513927 60513924 +
gcttgtggtgagcaaaactc

SEQ ID NO: 190952 - DNA, 20 bp, Artificial Sequence
  Synthetic oligonucleotide; CCTGGATT chr2 60513925 60513944 60513941 +
ctccctggattgagtcgaga

SEQ ID NO: 190953 - DNA, 20 bp, Artificial Sequence
  Synthetic oligonucleotide; AGAGGCTT chr2 60514125 60514144 60514141 +
agtgctccaagcactctctg

SEQ ID NO: 190954 - DNA, 20 bp, Artificial Sequence
  Synthetic oligonucleotide; AGAGGCTT chr2 60514149 60514168 60514165 +
gcttccaggctggagctctg

SEQ ID NO: 190955 - DNA, 20 bp, Artificial Sequence
  Synthetic oligonucleotide; GGGAGTTT chr2 60514676 60514695 60514692 +
aaaaaaattaaattgggtgg

SEQ ID NO: 190956 - DNA, 20 bp, Artificial Sequence
  Synthetic oligonucleotide; AGAGGATT chr2 60514792 60514811 60514808 +
ctgtgaattccattgataag

SEQ ID NO: 190957 - DNA, 20 bp, Artificial Sequence
  Synthetic oligonucleotide; TCTAGCTT chr2 60514995 60515014 60515011 +
ctccctctggtgagacaggc

SEQ ID NO: 190958 - DNA, 20 bp, Artificial Sequence
  Synthetic oligonucleotide; GCTTGTTT chr2 60514999 60515018 60515015 +
ctctggtgagacaggctcta

SEQ ID NO: 190959 - DNA, 20 bp, Artificial Sequence
  Synthetic oligonucleotide; ACCAGCTT chr2 60515020 60515039 60515036 +
cttgtttccagaatgccact

SEQ ID NO: 190960 - DNA, 20 bp, Artificial Sequence
  Synthetic oligonucleotide; ACTGGCTT chr2 60515107 60515126 60515123 +
ccacgtgctccttccccaac

SEQ ID NO: 190961 - DNA, 20 bp, Artificial Sequence
  Synthetic oligonucleotide; CACTGCTT chr2 60515149 60515168 60515165 +
cagaatctgcaagcagagtt

SEQ ID NO: 190962 - DNA, 20 bp, Artificial Sequence
  Synthetic oligonucleotide; TACAGATT chr2 60515344 60515363 60515360 +
atcaagcagcgtgagcaaag

SEQ ID NO: 190963 - DNA, 20 bp, Artificial Sequence
  Synthetic oligonucleotide; CAGTGCTT chr2 60515666 60515685 60515682 +
tacctctctgaaacacagcc

SEQ ID NO: 190964 - DNA, 20 bp, Artificial Sequence
  Synthetic oligonucleotide; GGGGGCTT chr2 60515736 60515755 60515752 +
gagtggactgacacagacat

SEQ ID NO: 190965 - DNA, 20 bp, Artificial Sequence
  Synthetic oligonucleotide; TCCAGCTT chr2 60515770 60515789 60515786 +
gactcttgatcacccaactt

SEQ ID NO: 190966 - DNA, 20 bp, Artificial Sequence
  Synthetic oligonucleotide; TGGGGATT chr2 60515838 60515857 60515854 +
cccactgtgaggtcttactg

SEQ ID NO: 190967 - DNA, 20 bp, Artificial Sequence
  Synthetic oligonucleotide; CAGGGATT chr2 60516052 60516071 60516068 +
tgggttatgaaaaagggaag

SEQ ID NO: 190968 - DNA, 20 bp, Artificial Sequence
  Synthetic oligonucleotide; GCCAGCTT chr2 60516100 60516119 60516116 +
ataagcctgtgatgactcat

SEQ ID NO: 190969 - DNA, 20 bp, Artificial Sequence
  Synthetic oligonucleotide; AGATGCTT chr2 60516119 60516138 60516135 +
tgccagctttgggtgctcta

SEQ ID NO: 190970 - DNA, 20 bp, Artificial Sequence
  Synthetic oligonucleotide; TAATGCTT chr2 60516138 60516157 60516154 +
aagatgctttcccatgtctg

SEQ ID NO: 190971 - DNA, 20 bp, Artificial Sequence
  Synthetic oligonucleotide; ATGTGCTT chr2 60516202 60516221 60516218 +
caccccagcacacagaaaag

SEQ ID NO: 190972 - DNA, 20 bp, Artificial Sequence
  Synthetic oligonucleotide; TTAGGTTT chr2 60516221 60516240 60516237 +
gatgtgcttattatgtgcac

SEQ ID NO: 190973 - DNA, 20 bp, Artificial Sequence
  Synthetic oligonucleotide; ACAGGTTT chr2 60516272 60516291 60516288 +
cccactcctattattaaaac

SEQ ID NO: 190974 - DNA, 20 bp, Artificial Sequence
  Synthetic oligonucleotide; GAAAGTTT chr2 60516652 60516671 60516668 +
gcatcaggacaactgggagt

SEQ ID NO: 190975 - DNA, 20 bp, Artificial Sequence
  Synthetic oligonucleotide; ACTGGTTT chr2 60516737 60516756 60516753 +
gcatgagtcatcaatgaagc

SEQ ID NO: 190976 - DNA, 20 bp, Artificial Sequence
  Synthetic oligonucleotide; TAATGTTT chr2 60516841 60516860 60516857 +
ggactctgtagttatcagac

SEQ ID NO: 190977 - DNA, 20 bp, Artificial Sequence
  Synthetic oligonucleotide; AGCAGATT chr2 60516870 60516889 60516886 +
agtaaaagagctggaaaacc

SEQ ID NO: 190978 - DNA, 20 bp, Artificial Sequence
  Synthetic oligonucleotide; AAGAGATT chr2 60516944 60516963 60516960 +
ccatgagttcaggttcagga

SEQ ID NO: 190979 - DNA, 20 bp, Artificial Sequence
  Synthetic oligonucleotide; ATGGGTTT chr2 60517060 60517079 60517076 +
gtctctggaatgaagaggaa

SEQ ID NO: 190980 - DNA, 20 bp, Artificial Sequence
  Synthetic oligonucleotide; GAAGGATT chr2 60517103 60517122 60517119 +
ggatcgaaggtagacaaaag

SEQ ID NO: 190981 - DNA, 20 bp, Artificial Sequence
  Synthetic oligonucleotide; CTGCGATT chr2 60517113 60517132 60517129 +
tagacaaaaggaaggatttc

SEQ ID NO: 190982 - DNA, 20 bp, Artificial Sequence
  Synthetic oligonucleotide; AGGTGATT chr2 60517433 60517452 60517449 +
accattctctgcaacagcac

SEQ ID NO: 190983 - DNA, 20 bp, Artificial Sequence
  Synthetic oligonucleotide; GGTGGTTT chr2 60517445 60517464 60517461 +
aacagcacaggtgattgggt

SEQ ID NO: 190984 - DNA, 20 bp, Artificial Sequence
  Synthetic oligonucleotide; TGTTGCTT chr2 60517453 60517472 60517469 +
aggtgattgggtggtggttt

SEQ ID NO: 190985 - DNA, 20 bp, Artificial Sequence
  Synthetic oligonucleotide; TTGGGTTT chr2 60517459 60517478 60517475 +
ttgggtggtggttttgttgc

SEQ ID NO: 190986 - DNA, 20 bp, Artificial Sequence
  Synthetic oligonucleotide; GTGCGATT chr2 60517633 60517652 60517649 +
gctggccatggagaggccat

SEQ ID NO: 190987 - DNA, 20 bp, Artificial Sequence
  Synthetic oligonucleotide; TTTGGCTT chr2 60517828 60517847 60517844 +
gatgctcaataagtattcac

SEQ ID NO: 190988 - DNA, 20 bp, Artificial Sequence
  Synthetic oligonucleotide; CTGTGCTT chr2 60517867 60517886 60517883 +
aactatctatgctcaaagag

SEQ ID NO: 190989 - DNA, 20 bp, Artificial Sequence
  Synthetic oligonucleotide; CTATGATT chr2 60517879 60517898 60517895 +
tcaaagagctgtgctttctt

SEQ ID NO: 190990 - DNA, 20 bp, Artificial Sequence
  Synthetic oligonucleotide; ATTTGCTT chr2 60518000 60518019 60518016 +
attacttgaaggccagaggc

SEQ ID NO: 190991 - DNA, 20 bp, Artificial Sequence
  Synthetic oligonucleotide; GGAAGATT chr2 60518044 60518063 60518060 +
aaatttggaaggccacagag

SEQ ID NO: 190992 - DNA, 20 bp, Artificial Sequence
  Synthetic oligonucleotide; GATTGCTT chr2 60518048 60518067 60518064 +
ttggaaggccacagagggaa

SEQ ID NO: 190993 - DNA, 20 bp, Artificial Sequence
  Synthetic oligonucleotide; AAAAGCTT chr2 60518110 60518129 60518126 +
agcaaaaccctgtctctaca

SEQ ID NO: 190994 - DNA, 20 bp, Artificial Sequence
  Synthetic oligonucleotide; CTGAGATT chr2 60518140 60518159 60518156 +
taaataaaataaaataattg

SEQ ID NO: 190995 - DNA, 20 bp, Artificial Sequence
  Synthetic oligonucleotide; CCCAGTTT chr2 60518181 60518200 60518197 +
aaagaaaatataaaatttgg

SEQ ID NO: 190996 - DNA, 20 bp, Artificial Sequence
  Synthetic oligonucleotide; ACAGGATT chr2 60518289 60518308 60518305 +
acatcatagataaaggagtc

SEQ ID NO: 190997 - DNA, 20 bp, Artificial Sequence
  Synthetic oligonucleotide; TTTAGTTT chr2 60518382 60518401 60518398 +
tacttagtactaacatttaa

SEQ ID NO: 190998 - DNA, 20 bp, Artificial Sequence
  Synthetic oligonucleotide; AGCAGATT chr2 60518407 60518426 60518423 +
ttttaaaatgtctgcgatag

SEQ ID NO: 190999 - DNA, 20 bp, Artificial Sequence
  Synthetic oligonucleotide; TCAGGATT chr2 60518414 60518433 60518430 +
atgtctgcgatagagcagat

SEQ ID NO: 191000 - DNA, 20 bp, Artificial Sequence
  Synthetic oligonucleotide; TTTAGCTT chr2 60518529 60518548 60518545 +
agggcatcgcacatgtgaat

SEQ ID NO: 191001 - DNA, 20 bp, Artificial Sequence
  Synthetic oligonucleotide; AAGAGTTT chr2 60518653 60518672 60518669 +
cccagcagagaacgttgaga

SEQ ID NO: 191002 - DNA, 20 bp, Artificial Sequence
  Synthetic oligonucleotide; CGTGGATT chr2 60518752 60518771 60518768 +
aggcattcctgggggccggg

SEQ ID NO: 191003 - DNA, 20 bp, Artificial Sequence
  Synthetic oligonucleotide; GGCTGCTT chr2 60518879 60518898 60518895 +
ccaccagccgtatttcctgg

SEQ ID NO: 191004 - DNA, 20 bp, Artificial Sequence
  Synthetic oligonucleotide; GTGGGATT chr2 60519033 60519052 60519049 +
ttgagagaaaatggacagaa

SEQ ID NO: 191005 - DNA, 20 bp, Artificial Sequence
  Synthetic oligonucleotide; AGAAGCTT chr2 60519097 60519116 60519113 +
tggtaggtactaccaaacca

SEQ ID NO: 191006 - DNA, 20 bp, Artificial Sequence
  Synthetic oligonucleotide; TTTTGATT chr2 60519252 60519271 60519268 +
tttaaggcattttgcggtct

SEQ ID NO: 191007 - DNA, 20 bp, Artificial Sequence
  Synthetic oligonucleotide; ATCAGCTT chr2 60519354 60519373 60519370 +
aggcagctgaaagtcagtac

SEQ ID NO: 191008 - DNA, 20 bp, Artificial Sequence
  Synthetic oligonucleotide; TAAAGATT chr2 60519379 60519398 60519395 +
ctttttaatgatgtgaaagt

SEQ ID NO: 191009 - DNA, 20 bp, Artificial Sequence
  Synthetic oligonucleotide; GAACGCTT chr2 60519399 60519418 60519415 +
taaagattaaaaacatgttg

SEQ ID NO: 191010 - DNA, 20 bp, Artificial Sequence
  Synthetic oligonucleotide; ACGTGCTT chr2 60519600 60519619 60519616 +
gaaatcgctcctgaaatctg

SEQ ID NO: 191011 - DNA, 20 bp, Artificial Sequence
  Synthetic oligonucleotide; TGTAGATT chr2 60519663 60519682 60519679 +
ggctggaaccactggaatct

SEQ ID NO: 191012 - DNA, 20 bp, Artificial Sequence
  Synthetic oligonucleotide; ACTGGTTT chr2 60519711 60519730 60519727 +
gacacatgcagctgggagcc

SEQ ID NO: 191013 - DNA, 20 bp, Artificial Sequence
  Synthetic oligonucleotide; CTGTGCTT chr2 60519741 60519760 60519757 +
gaattcacgtgggcatggga

SEQ ID NO: 191014 - DNA, 20 bp, Artificial Sequence
  Synthetic oligonucleotide; GATCGTTT chr2 60519828 60519847 60519844 +
aaactcagtgaagacaaaga

SEQ ID NO: 191015 - DNA, 20 bp, Artificial Sequence
  Synthetic oligonucleotide; CTATGCTT chr2 60519881 60519900 60519897 +
cataactcaggaattcatgg

SEQ ID NO: 191016 - DNA, 20 bp, Artificial Sequence
  Synthetic oligonucleotide; AAAAGTTT chr2 60519917 60519936 60519933 +
ctctctagacttggagtgtt

SEQ ID NO: 191017 - DNA, 20 bp, Artificial Sequence
  Synthetic oligonucleotide; TATGGCTT chr2 60520064 60520083 60520080 +
atgtgtgtatgatatagtat

SEQ ID NO: 191018 - DNA, 20 bp, Artificial Sequence
  Synthetic oligonucleotide; TATTGATT chr2 60520138 60520157 60520154 +
ataccttgcgtggcaaggta

SEQ ID NO: 191019 - DNA, 20 bp, Artificial Sequence
  Synthetic oligonucleotide; GCAGGTTT chr2 60520262 60520281 60520278 +
cccttacaataaactcttct

SEQ ID NO: 191020 - DNA, 20 bp, Artificial Sequence
  Synthetic oligonucleotide; TTTTGTTT chr2 60520267 60520286 60520283 +
acaataaactcttctgcagg

SEQ ID NO: 191021 - DNA, 20 bp, Artificial Sequence
  Synthetic oligonucleotide; TCTAGATT chr2 60520441 60520460 60520457 +
tgccaccaaattttttaaaa

SEQ ID NO: 191022 - DNA, 20 bp, Artificial Sequence
  Synthetic oligonucleotide; TTCCGTTT chr2 60520510 60520529 60520526 +
catttgtgtacacattcgca

SEQ ID NO: 191023 - DNA, 20 bp, Artificial Sequence
  Synthetic oligonucleotide; CAGAGTTT chr2 60520541 60520560 60520557 +
agaaggagaaattatcctca

SEQ ID NO: 191024 - DNA, 20 bp, Artificial Sequence
  Synthetic oligonucleotide; AACTGTTT chr2 60520583 60520602 60520599 +
aataagtggcctttgatgta

SEQ ID NO: 191025 - DNA, 20 bp, Artificial Sequence
  Synthetic oligonucleotide; CGGTGTTT chr2 60520836 60520855 60520852 +
cttctccagtgggttcccac

SEQ ID NO: 191026 - DNA, 20 bp, Artificial Sequence
  Synthetic oligonucleotide; GCAAGCTT chr2 60520848 60520867 60520864 +
gttcccaccggtgttttcgt

SEQ ID NO: 191027 - DNA, 20 bp, Artificial Sequence
  Synthetic oligonucleotide; CTCAGCTT chr2 60521391 60521410 60521407 +
tgtgatgtggttaggccagt

SEQ ID NO: 191028 - DNA, 20 bp, Artificial Sequence
  Synthetic oligonucleotide; CCTAGCTT chr2 60521473 60521492 60521489 +
tgcacgaagcccaccagtga

SEQ ID NO: 191029 - DNA, 20 bp, Artificial Sequence
  Synthetic oligonucleotide; CCTGGCTT chr2 60521501 60521520 60521517 +
tcaagtcacacagcgacagt

SEQ ID NO: 191030 - DNA, 20 bp, Artificial Sequence
  Synthetic oligonucleotide; GGCTGCTT chr2 60521609 60521628 60521625 +
cagtcctcccttaaagggaa

SEQ ID NO: 191031 - DNA, 20 bp, Artificial Sequence
  Synthetic oligonucleotide; AGCTGCTT chr2 60521771 60521790 60521787 +
cagccacgtgagcacgtccc

SEQ ID NO: 191032 - DNA, 20 bp, Artificial Sequence
  Synthetic oligonucleotide; ACTCGTTT chr2 60522308 60522327 60522324 +
tgtattttttaaacatagga

SEQ ID NO: 191033 - DNA, 20 bp, Artificial Sequence
  Synthetic oligonucleotide; TCATGTTT chr2 60522440 60522459 60522456 +
aatacttctttccatctggg

SEQ ID NO: 191034 - DNA, 20 bp, Artificial Sequence
  Synthetic oligonucleotide; AAAAGCTT chr2 60522491 60522510 60522507 +
tcaagactgaagctgccaag

SEQ ID NO: 191035 - DNA, 20 bp, Artificial Sequence
  Synthetic oligonucleotide; ATGGGTTT chr2 60522841 60522860 60522857 +
atatgtcagttatgttccaa

SEQ ID NO: 191036 - DNA, 20 bp, Artificial Sequence
  Synthetic oligonucleotide; AAATGCTT chr2 60522907 60522926 60522923 +
ttttagacaggataaggtca

SEQ ID NO: 191037 - DNA, 20 bp, Artificial Sequence
  Synthetic oligonucleotide; CAGAGATT chr2 60522982 60523001 60522998 +
actagtgctccagagagaca

SEQ ID NO: 191038 - DNA, 20 bp, Artificial Sequence
  Synthetic oligonucleotide; GGCCGTTT chr2 60523006 60523025 60523022 +
gattgaaacaaaaattgcct

SEQ ID NO: 191039 - DNA, 20 bp, Artificial Sequence
  Synthetic oligonucleotide; AAAAGCTT chr2 60523034 60523053 60523050 +
tctctgtagactctgtgggt

SEQ ID NO: 191040 - DNA, 20 bp, Artificial Sequence
  Synthetic oligonucleotide; TACAGATT chr2 60523091 60523110 60523107 +
ataagtaagaagtaactgtg

SEQ ID NO: 191041 - DNA, 20 bp, Artificial Sequence
  Synthetic oligonucleotide; GGGAGATT chr2 60523168 60523187 60523184 +
catggcagaaccgtaaagaa

SEQ ID NO: 191042 - DNA, 20 bp, Artificial Sequence
  Synthetic oligonucleotide; CCAGGATT chr2 60523260 60523279 60523276 +
cacaaaggacagcctgccat

SEQ ID NO: 191043 - DNA, 20 bp, Artificial Sequence
  Synthetic oligonucleotide; TCCTGCTT chr2 60523267 60523286 60523283 +
gacagcctgccatccaggat

SEQ ID NO: 191044 - DNA, 20 bp, Artificial Sequence
  Synthetic oligonucleotide; ATTTGCTT chr2 60523361 60523380 60523377 +
agataaatagtatggagata

SEQ ID NO: 191045 - DNA, 20 bp, Artificial Sequence
  Synthetic oligonucleotide; GTCAGATT chr2 60523371 60523390 60523387 +
tatggagataatttgcttaa

SEQ ID NO: 191046 - DNA, 20 bp, Artificial Sequence
  Synthetic oligonucleotide; AGTGGTTT chr2 60523388 60523407 60523404 +
taagtcagattttgatgaaa

SEQ ID NO: 191047 - DNA, 20 bp, Artificial Sequence
  Synthetic oligonucleotide; GATAGCTT chr2 60523403 60523422 60523419 +
tgaaaagtggtttctacatg

SEQ ID NO: 191048 - DNA, 20 bp, Artificial Sequence
  Synthetic oligonucleotide; TATTGATT chr2 60523424 60523443 60523440 +
atagctttcaaaaacttcta

SEQ ID NO: 191049 - DNA, 20 bp, Artificial Sequence
  Synthetic oligonucleotide; ATATGCTT chr2 60523590 60523609 60523606 +
gtatatagatgcatatgtat

SEQ ID NO: 191050 - DNA, 20 bp, Artificial Sequence
  Synthetic oligonucleotide; ATGTGTTT chr2 60523619 60523638 60523635 +
atcttatgatgacagtgttg

SEQ ID NO: 191051 - DNA, 20 bp, Artificial Sequence
  Synthetic oligonucleotide; TGGGGATT chr2 60523626 60523645 60523642 +
gatgacagtgttgatgtgtt

SEQ ID NO: 191052 - DNA, 20 bp, Artificial Sequence
  Synthetic oligonucleotide; CAAGGTTT chr2 60523842 60523861 60523858 +
ccaaacgttcaagaattgac

SEQ ID NO: 191053 - DNA, 20 bp, Artificial Sequence
  Synthetic oligonucleotide; AGGAGCTT chr2 60523886 60523905 60523902 +
ataatttatttaagccaaat

SEQ ID NO: 191054 - DNA, 20 bp, Artificial Sequence
  Synthetic oligonucleotide; GGGTGCTT chr2 60523998 60524017 60524014 +
aaatacctctccattatcag

SEQ ID NO: 191055 - DNA, 20 bp, Artificial Sequence
  Synthetic oligonucleotide; TATTGTTT chr2 60524006 60524025 60524022 +
ctccattatcaggggtgctt

SEQ ID NO: 191056 - DNA, 20 bp, Artificial Sequence
  Synthetic oligonucleotide; GGCAGCTT chr2 60524171 60524190 60524187 +
tgagccaagactgtcctagc

SEQ ID NO: 191057 - DNA, 20 bp, Artificial Sequence
  Synthetic oligonucleotide; TCATGCTT chr2 60524323 60524342 60524339 +
tatctctggcatgaatgtta

SEQ ID NO: 191058 - DNA, 20 bp, Artificial Sequence
  Synthetic oligonucleotide; ATTTGCTT chr2 60524397 60524416 60524413 +
tgccattcattcggcctgtt

SEQ ID NO: 191059 - DNA, 20 bp, Artificial Sequence
  Synthetic oligonucleotide; CCTTGTTT chr2 60524435 60524454 60524451 +
ttagggctaaactttatgtt

SEQ ID NO: 191060 - DNA, 20 bp, Artificial Sequence
  Synthetic oligonucleotide; TTTTGTTT chr2 60524441 60524460 60524457 +
ctaaactttatgttccttgt

SEQ ID NO: 191061 - DNA, 20 bp, Artificial Sequence
  Synthetic oligonucleotide; TTTTGTTT chr2 60524447 60524466 60524463 +
tttatgttccttgtttttgt

SEQ ID NO: 191062 - DNA, 20 bp, Artificial Sequence
  Synthetic oligonucleotide; TCTTGTTT chr2 60524467 60524486 60524483 +
ttttgtttttttttcttttt

SEQ ID NO: 191063 - DNA, 20 bp, Artificial Sequence
  Synthetic oligonucleotide; TTAAGATT chr2 60524476 60524495 60524492 +
tttttcttttttcttgtttt

SEQ ID NO: 191064 - DNA, 20 bp, Artificial Sequence
  Synthetic oligonucleotide; AGCTGATT chr2 60524527 60524546 60524543 +
gagcatgcaaaatcagaaac

SEQ ID NO: 191065 - DNA, 20 bp, Artificial Sequence
  Synthetic oligonucleotide; AACTGATT chr2 60524676 60524695 60524692 +
acaaggaacacatatttcac

SEQ ID NO: 191066 - DNA, 20 bp, Artificial Sequence
  Synthetic oligonucleotide; GAAAGTTT chr2 60524721 60524740 60524737 +
gagcacatgggataataaaa

SEQ ID NO: 191067 - DNA, 20 bp, Artificial Sequence
  Synthetic oligonucleotide; GCATGCTT chr2 60524773 60524792 60524789 +
actttgaatgccctttttca

SEQ ID NO: 191068 - DNA, 20 bp, Artificial Sequence
  Synthetic oligonucleotide; CCAAGTTT chr2 60524880 60524899 60524896 +
ctaaaagccaatggtaaaca

SEQ ID NO: 191069 - DNA, 20 bp, Artificial Sequence
  Synthetic oligonucleotide; AATGGATT chr2 60524892 60524911 60524908 +
ggtaaacaccaagtttaaaa

SEQ ID NO: 191070 - DNA, 20 bp, Artificial Sequence
  Synthetic oligonucleotide; ATATGCTT chr2 60524928 60524947 60524944 +
cgcatgtcccagaacaggcc

SEQ ID NO: 191071 - DNA, 20 bp, Artificial Sequence
  Synthetic oligonucleotide; ACCAGCTT chr2 60525101 60525120 60525117 +
ggctatgtccatacagagaa

SEQ ID NO: 191072 - DNA, 20 bp, Artificial Sequence
  Synthetic oligonucleotide; GGTTGTTT chr2 60525171 60525190 60525187 +
taattgaatttaaaatacct

SEQ ID NO: 191073 - DNA, 20 bp, Artificial Sequence
  Synthetic oligonucleotide; TGGAGTTT chr2 60525276 60525295 60525292 +
aaaatacacattacattctt

SEQ ID NO: 191074 - DNA, 20 bp, Artificial Sequence
  Synthetic oligonucleotide; AACAGCTT chr2 60525293 60525312 60525309 +
ctttggagtttttcaaaaaa

SEQ ID NO: 191075 - DNA, 20 bp, Artificial Sequence
  Synthetic oligonucleotide; TTTTGCTT chr2 60525381 60525400 60525397 +
tccattatactgcacttcaa

SEQ ID NO: 191076 - DNA, 20 bp, Artificial Sequence
  Synthetic oligonucleotide; TTAAGCTT chr2 60525410 60525429 60525426 +
cagcaatttgaaagatgcct

SEQ ID NO: 191077 - DNA, 20 bp, Artificial Sequence
  Synthetic oligonucleotide; CATAGCTT chr2 60525456 60525475 60525472 +
atccaagccttaatctccac

SEQ ID NO: 191078 - DNA, 20 bp, Artificial Sequence
  Synthetic oligonucleotide; ACTAGATT chr2 60525528 60525547 60525544 +
caggtgagccccattcagca

SEQ ID NO: 191079 - DNA, 20 bp, Artificial Sequence
  Synthetic oligonucleotide; CCTGGTTT chr2 60525725 60525744 60525741 +
aagggtcagaacccaggtgt

SEQ ID NO: 191080 - DNA, 20 bp, Artificial Sequence
  Synthetic oligonucleotide; CAAAGTTT chr2 60525766 60525785 60525782 +
tctctgttaacactaaaagt

SEQ ID NO: 191081 - DNA, 20 bp, Artificial Sequence
  Synthetic oligonucleotide; CATGGCTT chr2 60525845 60525864 60525861 +
accagtcttggtaatttctc

SEQ ID NO: 191082 - DNA, 20 bp, Artificial Sequence
  Synthetic oligonucleotide; TCGTGTTT chr2 60525918 60525937 60525934 +
atgttatcttcttccttcat

SEQ ID NO: 191083 - DNA, 20 bp, Artificial Sequence
  Synthetic oligonucleotide; AATAGTTT chr2 60525936 60525955 60525952 +
attcgtgtttggtaatcaaa

SEQ ID NO: 191084 - DNA, 20 bp, Artificial Sequence
  Synthetic oligonucleotide; TGTGGTTT chr2 60526035 60526054 60526051 +
gcagggctgggaaaaaagaa

SEQ ID NO: 191085 - DNA, 20 bp, Artificial Sequence
  Synthetic oligonucleotide; GTAGGTTT chr2 60526056 60526075 60526072 +
gtggtttttttctaaccaca

SEQ ID NO: 191086 - DNA, 20 bp, Artificial Sequence
  Synthetic oligonucleotide; CAATGATT chr2 60526073 60526092 60526089 +
acagtaggttttttctataa

SEQ ID NO: 191087 - DNA, 20 bp, Artificial Sequence
  Synthetic oligonucleotide; CATGGTTT chr2 60526104 60526123 60526120 +
ctttctagatataaaacagg

SEQ ID NO: 191088 - DNA, 20 bp, Artificial Sequence
  Synthetic oligonucleotide; TCTAGATT chr2 60526136 60526155 60526152 +
caccctgaacttctgcaaaa

SEQ ID NO: 191089 - DNA, 20 bp, Artificial Sequence
  Synthetic oligonucleotide; TGGTGATT chr2 60526161 60526180 60526177 +
atttgatcaaattcagaaac

SEQ ID NO: 191090 - DNA, 20 bp, Artificial Sequence
  Synthetic oligonucleotide; AAAAGATT chr2 60526253 60526272 60526269 +
tattttgctctttcttcccc

SEQ ID NO: 191091 - DNA, 20 bp, Artificial Sequence
  Synthetic oligonucleotide; AATAGTTT chr2 60526265 60526284 60526281 +
tcttccccaaaagattttta

SEQ ID NO: 191092 - DNA, 20 bp, Artificial Sequence
  Synthetic oligonucleotide; AAAGGATT chr2 60526282 60526301 60526298 +
ttaaatagttttcatcttta

SEQ ID NO: 191093 - DNA, 20 bp, Artificial Sequence
  Synthetic oligonucleotide; TTCAGATT chr2 60526295 60526314 60526311 +
atctttaaaaggatttcaac

SEQ ID NO: 191094 - DNA, 20 bp, Artificial Sequence
  Synthetic oligonucleotide; ATATGTTT chr2 60526363 60526382 60526379 +
aataagacaaacaaagcagc

SEQ ID NO: 191095 - DNA, 20 bp, Artificial Sequence
  Synthetic oligonucleotide; TGCAGATT chr2 60526405 60526424 60526421 +
gggaagtgtacattaattac

SEQ ID NO: 191096 - DNA, 20 bp, Artificial Sequence
  Synthetic oligonucleotide; CTCTGATT chr2 60526551 60526570 60526567 +
ttgcatcagggacaaatgag

SEQ ID NO: 191097 - DNA, 20 bp, Artificial Sequence
  Synthetic oligonucleotide; TTTAGATT chr2 60526574 60526593 60526590 +
tgattttaatctgcagcgca

SEQ ID NO: 191098 - DNA, 20 bp, Artificial Sequence
  Synthetic oligonucleotide; GATGGTTT chr2 60526603 60526622 60526619 +
gcccaaagatagtgtaattt

SEQ ID NO: 191099 - DNA, 20 bp, Artificial Sequence
  Synthetic oligonucleotide; CTCGGATT chr2 60526622 60526641 60526638 +
tgatggtttataggcctcct

SEQ ID NO: 191100 - DNA, 20 bp, Artificial Sequence
  Synthetic oligonucleotide; AAATGTTT chr2 60526701 60526720 60526717 +
taaagaagaagatgcaatga

SEQ ID NO: 191101 - DNA, 20 bp, Artificial Sequence
  Synthetic oligonucleotide; GTCTGATT chr2 60526790 60526809 60526806 +
aaagggctgacctataatgc

SEQ ID NO: 191102 - DNA, 20 bp, Artificial Sequence
  Synthetic oligonucleotide; CATTGATT chr2 60526905 60526924 60526921 +
aaattatcactagtcaacag

SEQ ID NO: 191103 - DNA, 20 bp, Artificial Sequence
  Synthetic oligonucleotide; TATGGCTT chr2 60527009 60527028 60527025 +
ccctctgaggtctccccggt

SEQ ID NO: 191104 - DNA, 20 bp, Artificial Sequence
  Synthetic oligonucleotide; TGTAGCTT chr2 60527054 60527073 60527070 +
tctcaccattcgatatttat

SEQ ID NO: 191105 - DNA, 20 bp, Artificial Sequence
  Synthetic oligonucleotide; TTGTGCTT chr2 60527120 60527139 60527136 +
tgcctcttgggacatcaaat

SEQ ID NO: 191106 - DNA, 20 bp, Artificial Sequence
  Synthetic oligonucleotide; GCCTGATT chr2 60527188 60527207 60527204 +
aggccatcatcagagatgtg

SEQ ID NO: 191107 - DNA, 20 bp, Artificial Sequence
  Synthetic oligonucleotide; CACTGATT chr2 60527198 60527217 60527214 +
cagagatgtggcctgatttt

SEQ ID NO: 191108 - DNA, 20 bp, Artificial Sequence
  Synthetic oligonucleotide; TTCAGCTT chr2 60527288 60527307 60527304 +
catgatacgccttttatcat

SEQ ID NO: 191109 - DNA, 20 bp, Artificial Sequence
  Synthetic oligonucleotide; AAGAGCTT chr2 60527332 60527351 60527348 +
gagacccagcaaataaaact

SEQ ID NO: 191110 - DNA, 20 bp, Artificial Sequence
  Synthetic oligonucleotide; AAGGGCTT chr2 60527430 60527449 60527446 +
caagagaaggggtgaggggg

SEQ ID NO: 191111 - DNA, 20 bp, Artificial Sequence
  Synthetic oligonucleotide; TGAAGCTT chr2 60527491 60527510 60527507 +
gacagagtgcgaagtaaaag

SEQ ID NO: 191112 - DNA, 20 bp, Artificial Sequence
  Synthetic oligonucleotide; CATGGATT chr2 60527515 60527534 60527531 +
gctttggagctcttgaccca

SEQ ID NO: 191113 - DNA, 20 bp, Artificial Sequence
  Synthetic oligonucleotide; AGGCGCTT chr2 60527717 60527736 60527733 +
acggggcctccgcatgaagt

SEQ ID NO: 191114 - DNA, 20 bp, Artificial Sequence
  Synthetic oligonucleotide; AAATGATT chr2 60527735 60527754 60527751 +
gtaggcgcttctcaactacc

SEQ ID NO: 191115 - DNA, 20 bp, Artificial Sequence
  Synthetic oligonucleotide; TTTGGTTT chr2 60527818 60527837 60527834 +
aatacaggaaaacagtaaca

SEQ ID NO: 191116 - DNA, 20 bp, Artificial Sequence
  Synthetic oligonucleotide; TCTTGCTT chr2 60527865 60527884 60527881 +
catctgcaacgaacctcagg

SEQ ID NO: 191117 - DNA, 20 bp, Artificial Sequence
  Synthetic oligonucleotide; TGCAGTTT chr2 60527985 60528004 60528001 +
gatcatatggagctgttgac

SEQ ID NO: 191118 - DNA, 20 bp, Artificial Sequence
  Synthetic oligonucleotide; TCAAGTTT chr2 60528009 60528028 60528025 +
gtttccattcaaaacttccc

SEQ ID NO: 191119 - DNA, 20 bp, Artificial Sequence
  Synthetic oligonucleotide; AGCAGATT chr2 60528081 60528100 60528097 +
agaaatgaaaacctcctcga

SEQ ID NO: 191120 - DNA, 20 bp, Artificial Sequence
  Synthetic oligonucleotide; TTCTGATT chr2 60528171 60528190 60528187 +
gtctctccctccctgtataa

SEQ ID NO: 191121 - DNA, 20 bp, Artificial Sequence
  Synthetic oligonucleotide; CCGAGCTT chr2 60528273 60528292 60528289 +
cctcaccacttcttaaaagt

SEQ ID NO: 191122 - DNA, 20 bp, Artificial Sequence
  Synthetic oligonucleotide; CTTAGTTT chr2 60528278 60528297 60528294 +
ccacttcttaaaagtccgag

SEQ ID NO: 191123 - DNA, 20 bp, Artificial Sequence
  Synthetic oligonucleotide; CTCTGTTT chr2 60528345 60528364 60528361 +
caaacagtaaaacctcctcc

SEQ ID NO: 191124 - DNA, 20 bp, Artificial Sequence
  Synthetic oligonucleotide; ACTTGATT chr2 60528365 60528384 60528381 +
ctctgtttctcaggaccctc

SEQ ID NO: 191125 - DNA, 20 bp, Artificial Sequence
  Synthetic oligonucleotide; GCAGGATT chr2 60528415 60528434 60528431 +
gggaaatgactacttgcaaa

SEQ ID NO: 191126 - DNA, 20 bp, Artificial Sequence
  Synthetic oligonucleotide; AGAAGATT chr2 60528503 60528522 60528519 +
ggaacattcttctctttccc

SEQ ID NO: 191127 - DNA, 20 bp, Artificial Sequence
  Synthetic oligonucleotide; CAGAGCTT chr2 60528557 60528576 60528573 +
gagggacaactgtccagcac

SEQ ID NO: 191128 - DNA, 20 bp, Artificial Sequence
  Synthetic oligonucleotide; AAAGGATT chr2 60528645 60528664 60528661 +
gagggtggcggccgcaggcc

SEQ ID NO: 191129 - DNA, 20 bp, Artificial Sequence
  Synthetic oligonucleotide; GAGTGTTT chr2 60528732 60528751 60528748 +
ctaccaaatgaggctaatgg

SEQ ID NO: 191130 - DNA, 20 bp, Artificial Sequence
  Synthetic oligonucleotide; CTGTGCTT chr2 60528840 60528859 60528856 +
gcccccggagcgagtaatgt

SEQ ID NO: 191131 - DNA, 20 bp, Artificial Sequence
  Synthetic oligonucleotide; AAATGATT chr2 60528920 60528939 60528936 +
ctccatttcacagagaggtg

SEQ ID NO: 191132 - DNA, 20 bp, Artificial Sequence
  Synthetic oligonucleotide; ATGAGCTT chr2 60529220 60529239 60529236 +
gagtcataaccgtaatagta

SEQ ID NO: 191133 - DNA, 20 bp, Artificial Sequence
  Synthetic oligonucleotide; ACATGTTT chr2 60529233 60529252 60529249 +
aatagtaatgagcttttgtg

SEQ ID NO: 191134 - DNA, 20 bp, Artificial Sequence
  Synthetic oligonucleotide; CCGTGATT chr2 60529316 60529335 60529332 +
aaggccctatgaggcaagcc

SEQ ID NO: 191135 - DNA, 20 bp, Artificial Sequence
  Synthetic oligonucleotide; TACAGATT chr2 60529334 60529353 60529350 +
ccccgtgattctccccactt

SEQ ID NO: 191136 - DNA, 20 bp, Artificial Sequence
  Synthetic oligonucleotide; GGAGGCTT chr2 60529350 60529369 60529366 +
actttacagattgaggaagc

SEQ ID NO: 191137 - DNA, 20 bp, Artificial Sequence
  Synthetic oligonucleotide; AAGGGCTT chr2 60529571 60529590 60529587 +
tgggagagaagactgcctct

SEQ ID NO: 191138 - DNA, 20 bp, Artificial Sequence
  Synthetic oligonucleotide; CCCAGTTT chr2 60529645 60529664 60529661 +
cccagaggcccccaaatttt

SEQ ID NO: 191139 - DNA, 20 bp, Artificial Sequence
  Synthetic oligonucleotide; ATGTGATT chr2 60529719 60529738 60529735 +
ggcctagccaggggaagtaa

SEQ ID NO: 191140 - DNA, 20 bp, Artificial Sequence
  Synthetic oligonucleotide; GTGGGATT chr2 60529855 60529874 60529871 +
aaagccctggtgtcccctag

SEQ ID NO: 191141 - DNA, 20 bp, Artificial Sequence
  Synthetic oligonucleotide; CCCAGCTT chr2 60529870 60529889 60529886 +
cctaggtgggattctatgaa

SEQ ID NO: 191142 - DNA, 20 bp, Artificial Sequence
  Synthetic oligonucleotide; TCCTGCTT chr2 60530027 60530046 60530043 +
gaagttattgggatgatgac

SEQ ID NO: 191143 - DNA, 20 bp, Artificial Sequence
  Synthetic oligonucleotide; ATGGGTTT chr2 60530135 60530154 60530151 +
aacaaaacaagcccaaacac

SEQ ID NO: 191144 - DNA, 20 bp, Artificial Sequence
  Synthetic oligonucleotide; GACAGCTT chr2 60530265 60530284 60530281 +
tattatcgttctcagccacc

SEQ ID NO: 191145 - DNA, 20 bp, Artificial Sequence
  Synthetic oligonucleotide; AAGAGTTT chr2 60530329 60530348 60530345 +
atttaaaaaaaaaaaaaaaa

SEQ ID NO: 191146 - DNA, 20 bp, Artificial Sequence
  Synthetic oligonucleotide; CACTGATT chr2 60530338 60530357 60530354 +
aaaaaaaaaaaaagagtttc

SEQ ID NO: 191147 - DNA, 20 bp, Artificial Sequence
  Synthetic oligonucleotide; AAAGGCTT chr2 60530694 60530713 60530710 +
aaggaaaaaaaaaacactga

SEQ ID NO: 191148 - DNA, 20 bp, Artificial Sequence
  Synthetic oligonucleotide; CATCGATT chr2 60530865 60530884 60530881 +
tcgagctcctaaaaactaga

SEQ ID NO: 191149 - DNA, 20 bp, Artificial Sequence
  Synthetic oligonucleotide; CTGCGCTT chr2 60530877 60530896 60530893 +
aaactagacatcgattatgt

SEQ ID NO: 191150 - DNA, 20 bp, Artificial Sequence
  Synthetic oligonucleotide; AAGTGCTT chr2 60530909 60530928 60530925 +
ctttctattcaagataaaca

SEQ ID NO: 191151 - DNA, 20 bp, Artificial Sequence
  Synthetic oligonucleotide; CTTTGCTT chr2 60531103 60531122 60531119 +
ggagcagatggacttgacca

SEQ ID NO: 191152 - DNA, 20 bp, Artificial Sequence
  Synthetic oligonucleotide; CCAGGTTT chr2 60531180 60531199 60531196 +
cctggctaccctactccggt

SEQ ID NO: 191153 - DNA, 20 bp, Artificial Sequence
  Synthetic oligonucleotide; GTGAGTTT chr2 60531346 60531365 60531362 +
gttctgcaagaatattttaa

SEQ ID NO: 191154 - DNA, 20 bp, Artificial Sequence
  Synthetic oligonucleotide; TTTTGTTT chr2 60531351 60531370 60531367 +
gcaagaatattttaagtgag

SEQ ID NO: 191155 - DNA, 20 bp, Artificial Sequence
  Synthetic oligonucleotide; AATAGATT chr2 60531522 60531541 60531538 +
aataatattaatgaaacaaa

SEQ ID NO: 191156 - DNA, 20 bp, Artificial Sequence
  Synthetic oligonucleotide; CAGGGCTT chr2 60531543 60531562 60531559 +
atagattcataagccttggc

SEQ ID NO: 191157 - DNA, 20 bp, Artificial Sequence
  Synthetic oligonucleotide; GCGTGTTT chr2 60531644 60531663 60531660 +
cactaccattaaactcaaga

SEQ ID NO: 191158 - DNA, 20 bp, Artificial Sequence
  Synthetic oligonucleotide; GGCTGCTT chr2 60531775 60531794 60531791 +
tggtcgggaagttacccaca

SEQ ID NO: 191159 - DNA, 20 bp, Artificial Sequence
  Synthetic oligonucleotide; AATAGTTT chr2 60532255 60532274 60532271 +
tatctcactggtggtctatt

SEQ ID NO: 191160 - DNA, 20 bp, Artificial Sequence
  Synthetic oligonucleotide; TGAAGTTT chr2 60532262 60532281 60532278 +
ctggtggtctattaatagtt

SEQ ID NO: 191161 - DNA, 20 bp, Artificial Sequence
  Synthetic oligonucleotide; TGTTGCTT chr2 60532288 60532307 60532304 +
tttgagcgtcagaaggtggt

SEQ ID NO: 191162 - DNA, 20 bp, Artificial Sequence
  Synthetic oligonucleotide; TTTGGTTT chr2 60532296 60532315 60532312 +
tcagaaggtggttgttgctt

SEQ ID NO: 191163 - DNA, 20 bp, Artificial Sequence
  Synthetic oligonucleotide; TTGGGTTT chr2 60532304 60532323 60532320 +
tggttgttgctttttggttt

SEQ ID NO: 191164 - DNA, 20 bp, Artificial Sequence
  Synthetic oligonucleotide; TCCAGTTT chr2 60532345 60532364 60532361 +
tttaaaactattctgtcatt

SEQ ID NO: 191165 - DNA, 20 bp, Artificial Sequence
  Synthetic oligonucleotide; AAAGGTTT chr2 60532358 60532377 60532374 +
tgtcatttccagttttttaa

SEQ ID NO: 191166 - DNA, 20 bp, Artificial Sequence
  Synthetic oligonucleotide; TTTTGTTT chr2 60532363 60532382 60532379 +
tttccagttttttaaaaagg

SEQ ID NO: 191167 - DNA, 20 bp, Artificial Sequence
  Synthetic oligonucleotide; TTTTGTTT chr2 60532368 60532387 60532384 +
agttttttaaaaaggttttg

SEQ ID NO: 191168 - DNA, 20 bp, Artificial Sequence
  Synthetic oligonucleotide; TTTTGCTT chr2 60532373 60532392 60532389 +
tttaaaaaggttttgttttg

SEQ ID NO: 191169 - DNA, 20 bp, Artificial Sequence
  Synthetic oligonucleotide; CTTTGTTT chr2 60532378 60532397 60532394 +
aaaggttttgttttgttttg

SEQ ID NO: 191170 - DNA, 20 bp, Artificial Sequence
  Synthetic oligonucleotide; TTTTGTTT chr2 60532385 60532404 60532401 +
ttgttttgttttgctttgtt

SEQ ID NO: 191171 - DNA, 20 bp, Artificial Sequence
  Synthetic oligonucleotide; TTTTGTTT chr2 60532393 60532412 60532409 +
ttttgctttgttttttgttt

SEQ ID NO: 191172 - DNA, 20 bp, Artificial Sequence
  Synthetic oligonucleotide; TAATGTTT chr2 60532425 60532444 60532441 +
ttttttggtggtggtggcgt

SEQ ID NO: 191173 - DNA, 20 bp, Artificial Sequence
  Synthetic oligonucleotide; GACAGCTT chr2 60532442 60532461 60532458 +
cgttaatgtttcttcagaaa

SEQ ID NO: 191174 - DNA, 20 bp, Artificial Sequence
  Synthetic oligonucleotide; TTATGATT chr2 60532467 60532486 60532483 +
cttctgggccactctgggta

SEQ ID NO: 191175 - DNA, 20 bp, Artificial Sequence
  Synthetic oligonucleotide; TTTGGTTT chr2 60532473 60532492 60532489 +
ggccactctgggtattatga

SEQ ID NO: 191176 - DNA, 20 bp, Artificial Sequence
  Synthetic oligonucleotide; CCTGGTTT chr2 60532505 60532524 60532521 +
cttacaatagttactctctg

SEQ ID NO: 191177 - DNA, 20 bp, Artificial Sequence
  Synthetic oligonucleotide; TACTGATT chr2 60532512 60532531 60532528 +
tagttactctctgcctggtt

SEQ ID NO: 191178 - DNA, 20 bp, Artificial Sequence
  Synthetic oligonucleotide; ATATGTTT chr2 60532593 60532612 60532609 +
gaaaattccttggcataagg

SEQ ID NO: 191179 - DNA, 20 bp, Artificial Sequence
  Synthetic oligonucleotide; AACAGTTT chr2 60532653 60532672 60532669 +
tattatgactttacttgaaa

SEQ ID NO: 191180 - DNA, 20 bp, Artificial Sequence
  Synthetic oligonucleotide; GATGGATT chr2 60532671 60532690 60532687 +
aaaacagtttgccacagtga

SEQ ID NO: 191181 - DNA, 20 bp, Artificial Sequence
  Synthetic oligonucleotide; ATATGCTT chr2 60532684 60532703 60532700 +
acagtgagatggattcactt

SEQ ID NO: 191182 - DNA, 20 bp, Artificial Sequence
  Synthetic oligonucleotide; GGTAGATT chr2 60532745 60532764 60532761 +
aacagtacaatttttttaaa

SEQ ID NO: 191183 - DNA, 20 bp, Artificial Sequence
  Synthetic oligonucleotide; ACTGGTTT chr2 60532763 60532782 60532779 +
aaggtagatttaaagcatta

SEQ ID NO: 191184 - DNA, 20 bp, Artificial Sequence
  Synthetic oligonucleotide; TTTGGATT chr2 60532768 60532787 60532784 +
agatttaaagcattaactgg

SEQ ID NO: 191185 - DNA, 20 bp, Artificial Sequence
  Synthetic oligonucleotide; CAATGTTT chr2 60532780 60532799 60532796 +
ttaactggtttggattaaaa

SEQ ID NO: 191186 - DNA, 20 bp, Artificial Sequence
  Synthetic oligonucleotide; ACATGATT chr2 60532840 60532859 60532856 +
caaaagacttatgcaaagcc

SEQ ID NO: 191187 - DNA, 20 bp, Artificial Sequence
  Synthetic oligonucleotide; ATGAGATT chr2 60532860 60532879 60532876 +
acatgattttgaaggagcta

SEQ ID NO: 191188 - DNA, 20 bp, Artificial Sequence
  Synthetic oligonucleotide; TACAGTTT chr2 60532956 60532975 60532972 +
atttgtgtacttgacattta

SEQ ID NO: 191189 - DNA, 20 bp, Artificial Sequence
  Synthetic oligonucleotide; ACTAGATT chr2 60532994 60533013 60533010 +
taacaatctaccctgggtac

SEQ ID NO: 191190 - DNA, 20 bp, Artificial Sequence
  Synthetic oligonucleotide; AGAAGTTT chr2 60533042 60533061 60533058 +
aatttgtactccatataagc

SEQ ID NO: 191191 - DNA, 20 bp, Artificial Sequence
  Synthetic oligonucleotide; TTATGTTT chr2 60533071 60533090 60533087 +
cagtcacttttgacttacca

SEQ ID NO: 191192 - DNA, 20 bp, Artificial Sequence
  Synthetic oligonucleotide; TCACGTTT chr2 60533128 60533147 60533144 +
aaagcacagctcctccatgc

SEQ ID NO: 191193 - DNA, 20 bp, Artificial Sequence
  Synthetic oligonucleotide; TGCTGCTT chr2 60533161 60533180 60533177 +
tctaatactgtaatctttct

SEQ ID NO: 191194 - DNA, 20 bp, Artificial Sequence
  Synthetic oligonucleotide; CAGTGTTT chr2 60533181 60533200 60533197 +
tgctgcttctagggctgtgt

SEQ ID NO: 191195 - DNA, 20 bp, Artificial Sequence
  Synthetic oligonucleotide; TAAGGCTT chr2 60533245 60533264 60533261 +
ctcctggatagactgaataa

SEQ ID NO: 191196 - DNA, 20 bp, Artificial Sequence
  Synthetic oligonucleotide; AATTGTTT chr2 60533263 60533282 60533279 +
aataaggcttgtgatgacta

SEQ ID NO: 191197 - DNA, 20 bp, Artificial Sequence
  Synthetic oligonucleotide; TAAAGTTT chr2 60533301 60533320 60533317 +
ttgttaggatccctttcttg

SEQ ID NO: 191198 - DNA, 20 bp, Artificial Sequence
  Synthetic oligonucleotide; GAGAGATT chr2 60533370 60533389 60533386 +
ggtgatgcaagatagaagga

SEQ ID NO: 191199 - DNA, 20 bp, Artificial Sequence
  Synthetic oligonucleotide; ACTGGCTT chr2 60533383 60533402 60533399 +
agaaggagagagatttatac

SEQ ID NO: 191200 - DNA, 20 bp, Artificial Sequence
  Synthetic oligonucleotide; TGTTGCTT chr2 60533454 60533473 60533470 +
aagcagcatgcataagttag

SEQ ID NO: 191201 - DNA, 20 bp, Artificial Sequence
  Synthetic oligonucleotide; GCTTGTTT chr2 60533458 60533477 60533474 +
agcatgcataagttagtgtt

SEQ ID NO: 191202 - DNA, 20 bp, Artificial Sequence
  Synthetic oligonucleotide; TTTTGTTT chr2 60533463 60533482 60533479 +
gcataagttagtgttgcttg

SEQ ID NO: 191203 - DNA, 20 bp, Artificial Sequence
  Synthetic oligonucleotide; TGAAGATT chr2 60533534 60533553 60533550 +
actcagccccacataaagta

SEQ ID NO: 191204 - DNA, 20 bp, Artificial Sequence
  Synthetic oligonucleotide; ATTAGATT chr2 60533574 60533593 60533590 +
tttcaaatagcaaattatcc

SEQ ID NO: 191205 - DNA, 20 bp, Artificial Sequence
  Synthetic oligonucleotide; TACTGTTT chr2 60533801 60533820 60533817 +
taatttatttgtgttctgga

SEQ ID NO: 191206 - DNA, 20 bp, Artificial Sequence
  Synthetic oligonucleotide; GCATGCTT chr2 60533840 60533859 60533856 +
attaacaactttaaactgaa

SEQ ID NO: 191207 - DNA, 20 bp, Artificial Sequence
  Synthetic oligonucleotide; TTATGTTT chr2 60533913 60533932 60533929 +
ctcggaggttaaaattatag

SEQ ID NO: 191208 - DNA, 20 bp, Artificial Sequence
  Synthetic oligonucleotide; ATTCGTTT chr2 60533969 60533988 60533985 +
tttattttctttcattaaac

SEQ ID NO: 191209 - DNA, 20 bp, Artificial Sequence
  Synthetic oligonucleotide; TTCTGATT chr2 60534000 60534019 60534016 +
tcagaatatcagttacactg

SEQ ID NO: 191210 - DNA, 20 bp, Artificial Sequence
  Synthetic oligonucleotide; TTCTGCTT chr2 60534006 60534025 60534022 +
tatcagttacactgttctga

SEQ ID NO: 191211 - DNA, 20 bp, Artificial Sequence
  Synthetic oligonucleotide; CCTTGTTT chr2 60534135 60534154 60534151 +
tcggaaaccgttagttagca

SEQ ID NO: 191212 - DNA, 20 bp, Artificial Sequence
  Synthetic oligonucleotide; AAAGGTTT chr2 60534367 60534386 60534383 +
gaaacctaaagcattgttag

SEQ ID NO: 191213 - DNA, 20 bp, Artificial Sequence
  Synthetic oligonucleotide; CAAGGCTT chr2 60534437 60534456 60534453 +
tcttaatacactataatagc

SEQ ID NO: 191214 - DNA, 20 bp, Artificial Sequence
  Synthetic oligonucleotide; GAACGATT chr2 60534580 60534599 60534596 +
acagtcttctccccaaatga

SEQ ID NO: 191215 - DNA, 20 bp, Artificial Sequence
  Synthetic oligonucleotide; AAGTGATT chr2 60534785 60534804 60534801 +
aatacacaaaacatgatcaa

SEQ ID NO: 191216 - DNA, 20 bp, Artificial Sequence
  Synthetic oligonucleotide; AACAGCTT chr2 60534796 60534815 60534812 +
catgatcaaaagtgattaac

SEQ ID NO: 191217 - DNA, 20 bp, Artificial Sequence
  Synthetic oligonucleotide; CACTGCTT chr2 60534899 60534918 60534915 +
ttaatcttgagaagaaaaaa

SEQ ID NO: 191218 - DNA, 20 bp, Artificial Sequence
  Synthetic oligonucleotide; GCAAGATT chr2 60534931 60534950 60534947 +
ttttttacatcatcaatttt

SEQ ID NO: 191219 - DNA, 20 bp, Artificial Sequence
  Synthetic oligonucleotide; TGAAGATT chr2 60535165 60535184 60535181 +
tcataaagcaatttagcctt

SEQ ID NO: 191220 - DNA, 20 bp, Artificial Sequence
  Synthetic oligonucleotide; AAGTGCTT chr2 60535177 60535196 60535193 +
ttagcctttgaagattaaag

SEQ ID NO: 191221 - DNA, 20 bp, Artificial Sequence
  Synthetic oligonucleotide; ATGAGCTT chr2 60535194 60535213 60535210 +
aagaagtgcttaaaattcaa

SEQ ID NO: 191222 - DNA, 20 bp, Artificial Sequence
  Synthetic oligonucleotide; GTAAGATT chr2 60535215 60535234 60535231 +
tgagctttagcaaattatca

SEQ ID NO: 191223 - DNA, 20 bp, Artificial Sequence
  Synthetic oligonucleotide; AAGGGTTT chr2 60535236 60535255 60535252 +
taagattcatccaaaaagca

SEQ ID NO: 191224 - DNA, 20 bp, Artificial Sequence
  Synthetic oligonucleotide; CTATGATT chr2 60535250 60535269 60535266 +
aaagcaaagggtttttcttc

SEQ ID NO: 191225 - DNA, 20 bp, Artificial Sequence
  Synthetic oligonucleotide; CTGAGCTT chr2 60535297 60535316 60535313 +
aaattgtaatatcttccaga

SEQ ID NO: 191226 - DNA, 20 bp, Artificial Sequence
  Synthetic oligonucleotide; TAGAGCTT chr2 60535315 60535334 60535331 +
gactgagcttaaactaaaca

SEQ ID NO: 191227 - DNA, 20 bp, Artificial Sequence
  Synthetic oligonucleotide; AACAGATT chr2 60535488 60535507 60535504 +
actgcatagtcctccaacag

SEQ ID NO: 191228 - DNA, 20 bp, Artificial Sequence
  Synthetic oligonucleotide; AACAGCTT chr2 60535577 60535596 60535593 +
aacatccactgtggtataaa

SEQ ID NO: 191229 - DNA, 20 bp, Artificial Sequence
  Synthetic oligonucleotide; ATTGGCTT chr2 60535589 60535608 60535605 +
ggtataaaaacagctttttc

SEQ ID NO: 191230 - DNA, 20 bp, Artificial Sequence
  Synthetic oligonucleotide; AGAAGTTT chr2 60535614 60535633 60535630 +
cttggagtggcattaatttt

SEQ ID NO: 191231 - DNA, 20 bp, Artificial Sequence
  Synthetic oligonucleotide; TTCTGCTT chr2 60535620 60535639 60535636 +
gtggcattaattttagaagt

SEQ ID NO: 191232 - DNA, 20 bp, Artificial Sequence
  Synthetic oligonucleotide; TCTGGTTT chr2 60535679 60535698 60535695 +
caggagggagaggagcaagg

SEQ ID NO: 191233 - DNA, 20 bp, Artificial Sequence
  Synthetic oligonucleotide; TGTTGCTT chr2 60535708 60535727 60535724 +
cttctgaggagtgcaaatcc

SEQ ID NO: 191234 - DNA, 20 bp, Artificial Sequence
  Synthetic oligonucleotide; TTGAGATT chr2 60535714 60535733 60535730 +
aggagtgcaaatcctgttgc

SEQ ID NO: 191235 - DNA, 20 bp, Artificial Sequence
  Synthetic oligonucleotide; TTCTGATT chr2 60535727 60535746 60535743 +
ctgttgcttgagatttgcct

SEQ ID NO: 191236 - DNA, 20 bp, Artificial Sequence
  Synthetic oligonucleotide; CCTGGATT chr2 60535866 60535885 60535882 +
attagagagtatcgtgggaa

SEQ ID NO: 191237 - DNA, 20 bp, Artificial Sequence
  Synthetic oligonucleotide; GCAGGCTT chr2 60535875 60535894 60535891 +
tatcgtgggaacctggattt

SEQ ID NO: 191238 - DNA, 20 bp, Artificial Sequence
  Synthetic oligonucleotide; CTTTGCTT chr2 60535909 60535928 60535925 +
tactagtctggagaagaatc

SEQ ID NO: 191239 - DNA, 20 bp, Artificial Sequence
  Synthetic oligonucleotide; AACAGCTT chr2 60536086 60536105 60536102 +
gtgcaagtcagactgagaat

SEQ ID NO: 191240 - DNA, 20 bp, Artificial Sequence
  Synthetic oligonucleotide; CCCAGCTT chr2 60536109 60536128 60536125 +
agcttcgaaaggccacgtgt

SEQ ID NO: 191241 - DNA, 20 bp, Artificial Sequence
  Synthetic oligonucleotide; TGGGGATT chr2 60536152 60536171 60536168 +
gacccaaaagctctctgctg

SEQ ID NO: 191242 - DNA, 20 bp, Artificial Sequence
  Synthetic oligonucleotide; CCCTGATT chr2 60536322 60536341 60536338 +
gaaaaatctcaggtactacc

SEQ ID NO: 191243 - DNA, 20 bp, Artificial Sequence
  Synthetic oligonucleotide; TTCCGTTT chr2 60536468 60536487 60536484 +
aggtccacagtcctgaccaa

SEQ ID NO: 191244 - DNA, 20 bp, Artificial Sequence
  Synthetic oligonucleotide; ATTAGATT chr2 60536546 60536565 60536562 +
atgtgacagggcaaatcaga

SEQ ID NO: 191245 - DNA, 20 bp, Artificial Sequence
  Synthetic oligonucleotide; AAAAGTTT chr2 60536560 60536579 60536576 +
atcagaattagattaaaaac

SEQ ID NO: 191246 - DNA, 20 bp, Artificial Sequence
  Synthetic oligonucleotide; AAGTGATT chr2 60536632 60536651 60536648 +
aatttcccctaactgccttc

SEQ ID NO: 191247 - DNA, 20 bp, Artificial Sequence
  Synthetic oligonucleotide; GAGCGTTT chr2 60536650 60536669 60536666 +
tcaagtgattttccctatta

SEQ ID NO: 191248 - DNA, 20 bp, Artificial Sequence
  Synthetic oligonucleotide; ATAAGATT chr2 60536988 60537007 60537004 +
gcaatccacttgtatgtaga

SEQ ID NO: 191249 - DNA, 20 bp, Artificial Sequence
  Synthetic oligonucleotide; AAATGTTT chr2 60537065 60537084 60537081 +
catagtctttgaagctgctc

SEQ ID NO: 191250 - DNA, 20 bp, Artificial Sequence
  Synthetic oligonucleotide; AGTTGTTT chr2 60537089 60537108 60537105 +
gttttagttaaaaggacagc

SEQ ID NO: 191251 - DNA, 20 bp, Artificial Sequence
  Synthetic oligonucleotide; TATTGATT chr2 60537139 60537158 60537155 +
atcagaattaaatttttcct

SEQ ID NO: 191252 - DNA, 20 bp, Artificial Sequence
  Synthetic oligonucleotide; TTACGATT chr2 60537186 60537205 60537202 +
aaaaacataacatgagaagg

SEQ ID NO: 191253 - DNA, 20 bp, Artificial Sequence
  Synthetic oligonucleotide; TTCAGTTT chr2 60537243 60537262 60537259 +
tcattcttcagtagccaatg

SEQ ID NO: 191254 - DNA, 20 bp, Artificial Sequence
  Synthetic oligonucleotide; ACGAGATT chr2 60537305 60537324 60537321 +
ggtgtgatggagagaaactc

SEQ ID NO: 191255 - DNA, 20 bp, Artificial Sequence
  Synthetic oligonucleotide; TTAAGATT chr2 60537312 60537331 60537328 +
tggagagaaactcacgagat

SEQ ID NO: 191256 - DNA, 20 bp, Artificial Sequence
  Synthetic oligonucleotide; CATTGTTT chr2 60537335 60537354 60537351 +
agatttaacattggttaatg

SEQ ID NO: 191257 - DNA, 20 bp, Artificial Sequence
  Synthetic oligonucleotide; TCAGGTTT chr2 60537473 60537492 60537489 +
agttggtgaaggagaatact

SEQ ID NO: 191258 - DNA, 20 bp, Artificial Sequence
  Synthetic oligonucleotide; CTTAGTTT chr2 60537487 60537506 60537503 +
aatacttcaggtttggttct

SEQ ID NO: 191259 - DNA, 20 bp, Artificial Sequence
  Synthetic oligonucleotide; TGAGGTTT chr2 60537497 60537516 60537513 +
gtttggttctcttagttttt

SEQ ID NO: 191260 - DNA, 20 bp, Artificial Sequence
  Synthetic oligonucleotide; GTTTGTTT chr2 60537501 60537520 60537517 +
ggttctcttagttttttgag

SEQ ID NO: 191261 - DNA, 20 bp, Artificial Sequence
  Synthetic oligonucleotide; TTTTGTTT chr2 60537507 60537526 60537523 +
cttagttttttgaggtttgt

SEQ ID NO: 191262 - DNA, 20 bp, Artificial Sequence
  Synthetic oligonucleotide; CAGGGATT chr2 60537524 60537543 60537540 +
tgtttttgtttgaggaggtg

SEQ ID NO: 191263 - DNA, 20 bp, Artificial Sequence
  Synthetic oligonucleotide; TAGTGCTT chr2 60537584 60537603 60537600 +
acaggaacagacttggcaca

SEQ ID NO: 191264 - DNA, 20 bp, Artificial Sequence
  Synthetic oligonucleotide; ATGTGATT chr2 60537645 60537664 60537661 +
atttccctaaaaattaacag

SEQ ID NO: 191265 - DNA, 20 bp, Artificial Sequence
  Synthetic oligonucleotide; TGATGCTT chr2 60537725 60537744 60537741 +
gaatataaatttaaatgccc

SEQ ID NO: 191266 - DNA, 20 bp, Artificial Sequence
  Synthetic oligonucleotide; AAAAGCTT chr2 60537737 60537756 60537753 +
aaatgccctgatgcttagca

SEQ ID NO: 191267 - DNA, 20 bp, Artificial Sequence
  Synthetic oligonucleotide; TTGTGTTT chr2 60537747 60537766 60537763 +
atgcttagcaaaaagcttcc

SEQ ID NO: 191268 - DNA, 20 bp, Artificial Sequence
  Synthetic oligonucleotide; ACTGGTTT chr2 60537805 60537824 60537821 +
cgaggtaggtatacaacagc

SEQ ID NO: 191269 - DNA, 20 bp, Artificial Sequence
  Synthetic oligonucleotide; GCAGGTTT chr2 60537832 60537851 60537848 +
ttctttttgaaggcaccctt

SEQ ID NO: 191270 - DNA, 20 bp, Artificial Sequence
  Synthetic oligonucleotide; GGGAGTTT chr2 60537867 60537886 60537883 +
attccattctttattttaat

SEQ ID NO: 191271 - DNA, 20 bp, Artificial Sequence
  Synthetic oligonucleotide; AGTGGATT chr2 60537881 60537900 60537897 +
tttaatgggagtttttaatc

SEQ ID NO: 191272 - DNA, 20 bp, Artificial Sequence
  Synthetic oligonucleotide; GACTGATT chr2 60538055 60538074 60538071 +
actgggaattctctggcaga

SEQ ID NO: 191273 - DNA, 20 bp, Artificial Sequence
  Synthetic oligonucleotide; GGAAGTTT chr2 60538134 60538153 60538150 +
gccttctcgcctcttttaca

SEQ ID NO: 191274 - DNA, 20 bp, Artificial Sequence
  Synthetic oligonucleotide; TGTTGTTT chr2 60538177 60538196 60538193 +
acctttaggtatatataatt

SEQ ID NO: 191275 - DNA, 20 bp, Artificial Sequence
  Synthetic oligonucleotide; AGCAGCTT chr2 60538433 60538452 60538449 +
cttctaattcgccagttctt

SEQ ID NO: 191276 - DNA, 20 bp, Artificial Sequence
  Synthetic oligonucleotide; AAGTGTTT chr2 60538449 60538468 60538465 +
tcttagcagcttatttttcc

SEQ ID NO: 191277 - DNA, 20 bp, Artificial Sequence
  Synthetic oligonucleotide; TTTTGTTT chr2 60538454 60538473 60538470 +
gcagcttatttttccaagtg

SEQ ID NO: 191278 - DNA, 20 bp, Artificial Sequence
  Synthetic oligonucleotide; ATACGTTT chr2 60538484 60538503 60538500 +
ggaaacgtgtatttttcttt

SEQ ID NO: 191279 - DNA, 20 bp, Artificial Sequence
  Synthetic oligonucleotide; AACTGCTT chr2 60538506 60538525 60538522 +
acgttttgtggatctaccac

SEQ ID NO: 191280 - DNA, 20 bp, Artificial Sequence
  Synthetic oligonucleotide; TGTTGATT chr2 60538522 60538541 60538538 +
ccacaactgcttctgacagc

SEQ ID NO: 191281 - DNA, 20 bp, Artificial Sequence
  Synthetic oligonucleotide; AGTTGTTT chr2 60538628 60538647 60538644 +
ttaatggaattccagttgaa

SEQ ID NO: 191282 - DNA, 20 bp, Artificial Sequence
  Synthetic oligonucleotide; ACTAGATT chr2 60538681 60538700 60538697 +
cagaagtcctttagatcagt

SEQ ID NO: 191283 - DNA, 20 bp, Artificial Sequence
  Synthetic oligonucleotide; TGATGTTT chr2 60539013 60539032 60539029 +
actccaagagaagaaaagga

SEQ ID NO: 191284 - DNA, 20 bp, Artificial Sequence
  Synthetic oligonucleotide; CTAAGTTT chr2 60539108 60539127 60539124 +
tgtctttcacactgggctat

SEQ ID NO: 191285 - DNA, 20 bp, Artificial Sequence
  Synthetic oligonucleotide; TTAAGCTT chr2 60539142 60539161 60539158 +
ttccccagactagctgcata

SEQ ID NO: 191286 - DNA, 20 bp, Artificial Sequence
  Synthetic oligonucleotide; TACAGCTT chr2 60539156 60539175 60539172 +
tgcatattaagcttgctgtg

SEQ ID NO: 191287 - DNA, 20 bp, Artificial Sequence
  Synthetic oligonucleotide; AAATGTTT chr2 60539463 60539482 60539479 +
aacagcaaaagcctttgctg

SEQ ID NO: 191288 - DNA, 20 bp, Artificial Sequence
  Synthetic oligonucleotide; AACTGATT chr2 60539557 60539576 60539573 +
tggaataagttacattttaa

SEQ ID NO: 191289 - DNA, 20 bp, Artificial Sequence
  Synthetic oligonucleotide; TGATGTTT chr2 60539577 60539596 60539593 +
aactgattagaaatacagtc

SEQ ID NO: 191290 - DNA, 20 bp, Artificial Sequence
  Synthetic oligonucleotide; ACTGGCTT chr2 60539585 60539604 60539601 +
agaaatacagtctgatgttt

SEQ ID NO: 191291 - DNA, 20 bp, Artificial Sequence
  Synthetic oligonucleotide; TTGAGTTT chr2 60539597 60539616 60539613 +
tgatgtttactggcttcaaa

SEQ ID NO: 191292 - DNA, 20 bp, Artificial Sequence
  Synthetic oligonucleotide; ACTGGCTT chr2 60539617 60539636 60539633 +
ttgagtttggcatcaagtat

SEQ ID NO: 191293 - DNA, 20 bp, Artificial Sequence
  Synthetic oligonucleotide; TTAAGTTT chr2 60539737 60539756 60539753 +
caggttacatttcctggaaa

SEQ ID NO: 191294 - DNA, 20 bp, Artificial Sequence
  Synthetic oligonucleotide; AGCTGTTT chr2 60539886 60539905 60539902 +
ccctggtcgtaaaggggaga

SEQ ID NO: 191295 - DNA, 20 bp, Artificial Sequence
  Synthetic oligonucleotide; ACCTGCTT chr2 60540067 60540086 60540083 +
aattgatacataacataaaa

SEQ ID NO: 191296 - DNA, 20 bp, Artificial Sequence
  Synthetic oligonucleotide; GCTTGATT chr2 60540071 60540090 60540087 +
gatacataacataaaaacct

SEQ ID NO: 191297 - DNA, 20 bp, Artificial Sequence
  Synthetic oligonucleotide; AGATGCTT chr2 60540196 60540215 60540212 +
aacaagcagaaaggtactaa

SEQ ID NO: 191298 - DNA, 20 bp, Artificial Sequence
  Synthetic oligonucleotide; TGGTGATT chr2 60540203 60540222 60540219 +
agaaaggtactaaagatgct

SEQ ID NO: 191299 - DNA, 20 bp, Artificial Sequence
  Synthetic oligonucleotide; TCCAGCTT chr2 60540250 60540269 60540266 +
tggcaaggtgccaggctggg

SEQ ID NO: 191300 - DNA, 20 bp, Artificial Sequence
  Synthetic oligonucleotide; AAGTGCTT chr2 60540264 60540283 60540280 +
gctgggtccagcttgatgct

SEQ ID NO: 191301 - DNA, 20 bp, Artificial Sequence
  Synthetic oligonucleotide; TTGGGCTT chr2 60540313 60540332 60540329 +
tactgtatgtaaaaacagac

SEQ ID NO: 191302 - DNA, 20 bp, Artificial Sequence
  Synthetic oligonucleotide; AGTAGATT chr2 60540380 60540399 60540396 +
ggtgtgaacagaccaaccaa

SEQ ID NO: 191303 - DNA, 20 bp, Artificial Sequence
  Synthetic oligonucleotide; CTGTGCTT chr2 60540429 60540448 60540445 +
atcttggtgcatctccctag

SEQ ID NO: 191304 - DNA, 20 bp, Artificial Sequence
  Synthetic oligonucleotide; ATTTGTTT chr2 60540482 60540501 60540498 +
ccccccaaaggaaagccaaa

SEQ ID NO: 191305 - DNA, 20 bp, Artificial Sequence
  Synthetic oligonucleotide; AAATGTTT chr2 60540576 60540595 60540592 +
agaaatcacaaaaatctaaa

SEQ ID NO: 191306 - DNA, 20 bp, Artificial Sequence
  Synthetic oligonucleotide; CTAGGATT chr2 60540586 60540605 60540602 +
aaaatctaaaaaatgtttcc

SEQ ID NO: 191307 - DNA, 20 bp, Artificial Sequence
  Synthetic oligonucleotide; GCATGTTT chr2 60540595 60540614 60540611 +
aaaatgtttccctaggattt

SEQ ID NO: 191308 - DNA, 20 bp, Artificial Sequence
  Synthetic oligonucleotide; TAATGATT chr2 60540666 60540685 60540682 +
tggaagctgcagtgtgaaat

SEQ ID NO: 191309 - DNA, 20 bp, Artificial Sequence
  Synthetic oligonucleotide; GCACGTTT chr2 60540757 60540776 60540773 +
tgcctgtcctgaccctgcct

SEQ ID NO: 191310 - DNA, 20 bp, Artificial Sequence
  Synthetic oligonucleotide; GGGTGATT chr2 60540897 60540916 60540913 +
ttgcaacacaacaaggaatg

SEQ ID NO: 191311 - DNA, 20 bp, Artificial Sequence
  Synthetic oligonucleotide; ACTGGTTT chr2 60540919 60540938 60540935 +
gtgatttaagaaattacagc

SEQ ID NO: 191312 - DNA, 20 bp, Artificial Sequence
  Synthetic oligonucleotide; TTTTGTTT chr2 60540977 60540996 60540993 +
tgtgtgtgtgtgtgtggtta

SEQ ID NO: 191313 - DNA, 20 bp, Artificial Sequence
  Synthetic oligonucleotide; TTTTGTTT chr2 60540985 60541004 60541001 +
tgtgtgtggttattttgttt

SEQ ID NO: 191314 - DNA, 20 bp, Artificial Sequence
  Synthetic oligonucleotide; TTAAGCTT chr2 60540995 60541014 60541011 +
tattttgtttttttgttttt

SEQ ID NO: 191315 - DNA, 20 bp, Artificial Sequence
  Synthetic oligonucleotide; TTGTGTTT chr2 60541076 60541095 60541092 +
ttcttgaagtgaatacatat

SEQ ID NO: 191316 - DNA, 20 bp, Artificial Sequence
  Synthetic oligonucleotide; AGAAGTTT chr2 60541272 60541291 60541288 +
accacaagggtaatgtctga

SEQ ID NO: 191317 - DNA, 20 bp, Artificial Sequence
  Synthetic oligonucleotide; TTTGGCTT chr2 60541326 60541345 60541342 +
agatatattttttttttcct

SEQ ID NO: 191318 - DNA, 20 bp, Artificial Sequence
  Synthetic oligonucleotide; GTAAGTTT chr2 60541340 60541359 60541356 +
tttccttttggctttcctta

SEQ ID NO: 191319 - DNA, 20 bp, Artificial Sequence
  Synthetic oligonucleotide; CTGTGTTT chr2 60541365 60541384 60541381 +
tttagcagccatgcgggcca

SEQ ID NO: 191320 - DNA, 20 bp, Artificial Sequence
  Synthetic oligonucleotide; TTAAGCTT chr2 60541375 60541394 60541391 +
atgcgggccactgtgtttaa

SEQ ID NO: 191321 - DNA, 20 bp, Artificial Sequence
  Synthetic oligonucleotide; AAGAGTTT chr2 60541475 60541494 60541491 +
tatttacaatttgtcttaga

SEQ ID NO: 191322 - DNA, 20 bp, Artificial Sequence
  Synthetic oligonucleotide; TACAGCTT chr2 60541552 60541571 60541568 +
ttctctgtcttatttacaaa

SEQ ID NO: 191323 - DNA, 20 bp, Artificial Sequence
  Synthetic oligonucleotide; CCCAGTTT chr2 60541572 60541591 60541588 +
tacagcttgtatataggact

SEQ ID NO: 191324 - DNA, 20 bp, Artificial Sequence
  Synthetic oligonucleotide; TCTGGATT chr2 60541670 60541689 60541686 +
gaaaacaatattctctactc

SEQ ID NO: 191325 - DNA, 20 bp, Artificial Sequence
  Synthetic oligonucleotide; TATTGTTT chr2 60541706 60541725 60541722 +
aagtaaaatgttcaccagta

SEQ ID NO: 191326 - DNA, 20 bp, Artificial Sequence
  Synthetic oligonucleotide; TGGTGTTT chr2 60541724 60541743 60541740 +
tatattgttttttgtggtag

SEQ ID NO: 191327 - DNA, 20 bp, Artificial Sequence
  Synthetic oligonucleotide; TTTTGTTT chr2 60541732 60541751 60541748 +
tttttgtggtagtggtgttt

SEQ ID NO: 191328 - DNA, 20 bp, Artificial Sequence
  Synthetic oligonucleotide; AGTCGTTT chr2 60541773 60541792 60541789 +
gaaaattcacttcagaagtc

SEQ ID NO: 191329 - DNA, 20 bp, Artificial Sequence
  Synthetic oligonucleotide; ATTTGATT chr2 60541977 60541996 60541993 +
aattctgaaaagcatattgt

SEQ ID NO: 191330 - DNA, 20 bp, Artificial Sequence
  Synthetic oligonucleotide; TCATGATT chr2 60542130 60542149 60542146 +
cctgatataaatgtctatgt

SEQ ID NO: 191331 - DNA, 20 bp, Artificial Sequence
  Synthetic oligonucleotide; TAAAGATT chr2 60542256 60542275 60542272 +
atgacagcccaaacctaatt

SEQ ID NO: 191332 - DNA, 20 bp, Artificial Sequence
  Synthetic oligonucleotide; TAATGTTT chr2 60542307 60542326 60542323 +
tcaaatctgacatgatggga

SEQ ID NO: 191333 - DNA, 20 bp, Artificial Sequence
  Synthetic oligonucleotide; AGCAGTTT chr2 60542336 60542355 60542352 +
ggtcttttctataagggaac

SEQ ID NO: 191334 - DNA, 20 bp, Artificial Sequence
  Synthetic oligonucleotide; ACCTGATT chr2 60542616 60542635 60542632 +
taaataaaatgaaaaaagca

SEQ ID NO: 191335 - DNA, 20 bp, Artificial Sequence
  Synthetic oligonucleotide; CTCAGTTT chr2 60542718 60542737 60542734 +
aaagaatcctctaaaaaata

SEQ ID NO: 191336 - DNA, 20 bp, Artificial Sequence
  Synthetic oligonucleotide; AATCGCTT chr2 60542921 60542940 60542937 +
ttgggaggctgaggcaggag

SEQ ID NO: 191337 - DNA, 20 bp, Artificial Sequence
  Synthetic oligonucleotide; CTCAGCTT chr2 60543034 60543053 60543050 +
aaaaaaaaaaaaaaaaaaaa

SEQ ID NO: 191338 - DNA, 20 bp, Artificial Sequence
  Synthetic oligonucleotide; TCAAGATT chr2 60543081 60543100 60543097 +
gaaaatgcataccattttac

SEQ ID NO: 191339 - DNA, 20 bp, Artificial Sequence
  Synthetic oligonucleotide; CTAAGCTT chr2 60543131 60543150 60543147 +
ctatctgaaagtcccgaatt

SEQ ID NO: 191340 - DNA, 20 bp, Artificial Sequence
  Synthetic oligonucleotide; CACTGTTT chr2 60543164 60543183 60543180 +
atcttaggaagaagatctgt

SEQ ID NO: 191341 - DNA, 20 bp, Artificial Sequence
  Synthetic oligonucleotide; TCTTGCTT chr2 60543175 60543194 60543191 +
aagatctgtcactgttttat

SEQ ID NO: 191342 - DNA, 20 bp, Artificial Sequence
  Synthetic oligonucleotide; GCACGCTT chr2 60543260 60543279 60543276 +
aataaagcctttcctaccca

SEQ ID NO: 191343 - DNA, 20 bp, Artificial Sequence
  Synthetic oligonucleotide; TAGAGATT chr2 60543307 60543326 60543323 +
ggttgccaaacacattcttc

SEQ ID NO: 191344 - DNA, 20 bp, Artificial Sequence
  Synthetic oligonucleotide; CATTGCTT chr2 60543345 60543364 60543361 +
tctctttccttaatacaagg

SEQ ID NO: 191345 - DNA, 20 bp, Artificial Sequence
  Synthetic oligonucleotide; GAATGATT chr2 60543389 60543408 60543405 +
acacaattcaaatatctact

SEQ ID NO: 191346 - DNA, 20 bp, Artificial Sequence
  Synthetic oligonucleotide; TATTGTTT chr2 60543402 60543421 60543418 +
atctactgaatgattactgt

SEQ ID NO: 191347 - DNA, 20 bp, Artificial Sequence
  Synthetic oligonucleotide; ACGTGCTT chr2 60543453 60543472 60543469 +
gcagacttggaattgtgcag

SEQ ID NO: 191348 - DNA, 20 bp, Artificial Sequence
  Synthetic oligonucleotide; CTTCGCTT chr2 60543504 60543523 60543520 +
cacacagccgtcttccagaa

SEQ ID NO: 191349 - DNA, 20 bp, Artificial Sequence
  Synthetic oligonucleotide; TCGTGATT chr2 60543613 60543632 60543629 +
ttactgtgaattatgagaag

SEQ ID NO: 191350 - DNA, 20 bp, Artificial Sequence
  Synthetic oligonucleotide; AGGTGATT chr2 60543690 60543709 60543706 +
gccagttccagggtgggaac

SEQ ID NO: 191351 - DNA, 20 bp, Artificial Sequence
  Synthetic oligonucleotide; AAAGGTTT chr2 60543742 60543761 60543758 +
tttgtaattattcatgcacg

SEQ ID NO: 191352 - DNA, 20 bp, Artificial Sequence
  Synthetic oligonucleotide; GAGAGCTT chr2 60543806 60543825 60543822 +
tgaatatcttagacatctta

SEQ ID NO: 191353 - DNA, 20 bp, Artificial Sequence
  Synthetic oligonucleotide; AAATGATT chr2 60543826 60543845 60543842 +
gagagcttttcgtctcagtt

SEQ ID NO: 191354 - DNA, 20 bp, Artificial Sequence
  Synthetic oligonucleotide; GATTGATT chr2 60543830 60543849 60543846 +
gcttttcgtctcagttaaat

SEQ ID NO: 191355 - DNA, 20 bp, Artificial Sequence
  Synthetic oligonucleotide; ATTTGCTT chr2 60543863 60543882 60543879 +
cgctataaaatatattttaa

SEQ ID NO: 191356 - DNA, 20 bp, Artificial Sequence
  Synthetic oligonucleotide; TTTGGTTT chr2 60543870 60543889 60543886 +
aaatatattttaaatttgct

SEQ ID NO: 191357 - DNA, 20 bp, Artificial Sequence
  Synthetic oligonucleotide; TTTGGCTT chr2 60543876 60543895 60543892 +
attttaaatttgcttttggt

SEQ ID NO: 191358 - DNA, 20 bp, Artificial Sequence
  Synthetic oligonucleotide; CATAGATT chr2 60543978 60543997 60543994 +
aaatatctcttatttcccta

SEQ ID NO: 191359 - DNA, 20 bp, Artificial Sequence
  Synthetic oligonucleotide; TTTAGATT chr2 60544038 60544057 60544054 +
gtaaggccttccccccagca

SEQ ID NO: 191360 - DNA, 20 bp, Artificial Sequence
  Synthetic oligonucleotide; TGTGGTTT chr2 60544127 60544146 60544143 +
tttgggacctcagtaagaag

SEQ ID NO: 191361 - DNA, 20 bp, Artificial Sequence
  Synthetic oligonucleotide; TCTTGCTT chr2 60544139 60544158 60544155 +
gtaagaagtgtggttttaat

SEQ ID NO: 191362 - DNA, 20 bp, Artificial Sequence
  Synthetic oligonucleotide; CTGTGTTT chr2 60544155 60544174 60544171 +
taattcttgcttgacagaca

SEQ ID NO: 191363 - DNA, 20 bp, Artificial Sequence
  Synthetic oligonucleotide; TGGTGATT chr2 60544229 60544248 60544245 +
cgcaagtgttactccatatt

SEQ ID NO: 191364 - DNA, 20 bp, Artificial Sequence
  Synthetic oligonucleotide; CAAGGCTT chr2 60544240 60544259 60544256 +
ctccatatttggtgatttag

SEQ ID NO: 191365 - DNA, 20 bp, Artificial Sequence
  Synthetic oligonucleotide; TCTTGCTT chr2 60544284 60544303 60544300 +
acaaatccccttccgcctgc

SEQ ID NO: 191366 - DNA, 20 bp, Artificial Sequence
  Synthetic oligonucleotide; GGTGGATT chr2 60544425 60544444 60544441 +
atgtcacataaggtaaatgt

SEQ ID NO: 191367 - DNA, 20 bp, Artificial Sequence
  Synthetic oligonucleotide; TGCAGCTT chr2 60544453 60544472 60544469 +
caagaaatacactccacaaa

SEQ ID NO: 191368 - DNA, 20 bp, Artificial Sequence
  Synthetic oligonucleotide; AGCAGATT chr2 60544468 60544487 60544484 +
acaaatgcagcttccctagc

SEQ ID NO: 191369 - DNA, 20 bp, Artificial Sequence
  Synthetic oligonucleotide; CCATGTTT chr2 60544543 60544562 60544559 +
ctaaaaaaagaaagaaaatg

SEQ ID NO: 191370 - DNA, 20 bp, Artificial Sequence
  Synthetic oligonucleotide; TTTGGTTT chr2 60544548 60544567 60544564 +
aaaagaaagaaaatgccatg

SEQ ID NO: 191371 - DNA, 20 bp, Artificial Sequence
  Synthetic oligonucleotide; AAATGTTT chr2 60544837 60544856 60544853 +
gtctaacatgctcaagcaaa

SEQ ID NO: 191372 - DNA, 20 bp, Artificial Sequence
  Synthetic oligonucleotide; TACTGTTT chr2 60544865 60544884 60544881 +
tgagggtcactatatagtgt

SEQ ID NO: 191373 - DNA, 20 bp, Artificial Sequence
  Synthetic oligonucleotide; GTGCGCTT chr2 60545272 60545291 60545288 +
cttttcgagtaagcatgtct

SEQ ID NO: 191374 - DNA, 20 bp, Artificial Sequence
  Synthetic oligonucleotide; CTGTGTTT chr2 60545363 60545382 60545379 +
ggtgtcatcccaccacgggg

SEQ ID NO: 191375 - DNA, 20 bp, Artificial Sequence
  Synthetic oligonucleotide; ATCTGATT chr2 60545744 60545763 60545760 +
tgtgtacctatcctgcctac

SEQ ID NO: 191376 - DNA, 20 bp, Artificial Sequence
  Synthetic oligonucleotide; AAATGATT chr2 60545802 60545821 60545818 +
gttctggacgtaagcaacag

SEQ ID NO: 191377 - DNA, 20 bp, Artificial Sequence
  Synthetic oligonucleotide; TACTGCTT chr2 60545877 60545896 60545893 +
gaaagcacttcacaactcct

SEQ ID NO: 191378 - DNA, 20 bp, Artificial Sequence
  Synthetic oligonucleotide; AACAGCTT chr2 60545922 60545941 60545938 +
aaatgaaaagaaaacatgca

SEQ ID NO: 191379 - DNA, 20 bp, Artificial Sequence
  Synthetic oligonucleotide; CCTTGCTT chr2 60545934 60545953 60545950 +
aacatgcaaacagcttttct

SEQ ID NO: 191380 - DNA, 20 bp, Artificial Sequence
  Synthetic oligonucleotide; TCCTGTTT chr2 60545962 60545981 60545978 +
ctcatttacctgctatgtgt

SEQ ID NO: 191381 - DNA, 20 bp, Artificial Sequence
  Synthetic oligonucleotide; ACGGGATT chr2 60546040 60546059 60546056 +
tgacctggatgccaacctcc

SEQ ID NO: 191382 - DNA, 20 bp, Artificial Sequence
  Synthetic oligonucleotide; GGATGCTT chr2 60546048 60546067 60546064 +
atgccaacctccacgggatt

SEQ ID NO: 191383 - DNA, 20 bp, Artificial Sequence
  Synthetic oligonucleotide; TCTCGATT chr2 60546062 60546081 60546078 +
gggattggatgcttttttca

SEQ ID NO: 191384 - DNA, 20 bp, Artificial Sequence
  Synthetic oligonucleotide; GGTGGCTT chr2 60546082 60546101 60546098 +
tctcgattggtgaaggggaa

SEQ ID NO: 191385 - DNA, 20 bp, Artificial Sequence
  Synthetic oligonucleotide; CACAGCTT chr2 60546093 60546112 60546109 +
gaaggggaaggtggcttatc

SEQ ID NO: 191386 - DNA, 20 bp, Artificial Sequence
  Synthetic oligonucleotide; CATTGTTT chr2 60546124 60546143 60546140 +
ctaagcagaggctgccattg

SEQ ID NO: 191387 - DNA, 20 bp, Artificial Sequence
  Synthetic oligonucleotide; TTCCGTTT chr2 60546130 60546149 60546146 +
agaggctgccattgcattgt

SEQ ID NO: 191388 - DNA, 20 bp, Artificial Sequence
  Synthetic oligonucleotide; AATGGCTT chr2 60546261 60546280 60546277 +
tctggttcatcatctgtaag

SEQ ID NO: 191389 - DNA, 20 bp, Artificial Sequence
  Synthetic oligonucleotide; AAGTGTTT chr2 60546380 60546399 60546396 +
ccatcccaccacatcatgta

SEQ ID NO: 191390 - DNA, 20 bp, Artificial Sequence
  Synthetic oligonucleotide; CTAGGCTT chr2 60546388 60546407 60546404 +
ccacatcatgtaaagtgttt

SEQ ID NO: 191391 - DNA, 20 bp, Artificial Sequence
  Synthetic oligonucleotide; TCTGGTTT chr2 60546582 60546601 60546598 +
cacccacagcaacaaatgtg

SEQ ID NO: 191392 - DNA, 20 bp, Artificial Sequence
  Synthetic oligonucleotide; GTAAGTTT chr2 60546590 60546609 60546606 +
gcaacaaatgtgtctggttt

SEQ ID NO: 191393 - DNA, 20 bp, Artificial Sequence
  Synthetic oligonucleotide; GAAAGCTT chr2 60546639 60546658 60546655 +
gttaacacagggaacataaa

SEQ ID NO: 191394 - DNA, 20 bp, Artificial Sequence
  Synthetic oligonucleotide; ATTTGTTT chr2 60546699 60546718 60546715 +
aaaaagtggatagaaaccaa

SEQ ID NO: 191395 - DNA, 20 bp, Artificial Sequence
  Synthetic oligonucleotide; CATGGCTT chr2 60546814 60546833 60546830 +
tatactcctaagtaaacaga

SEQ ID NO: 191396 - DNA, 20 bp, Artificial Sequence
  Synthetic oligonucleotide; ACATGTTT chr2 60547127 60547146 60547143 +
gaatgcctataatattctaa

SEQ ID NO: 191397 - DNA, 20 bp, Artificial Sequence
  Synthetic oligonucleotide; AAATGCTT chr2 60547278 60547297 60547294 +
aattttctgaatgagctcca

SEQ ID NO: 191398 - DNA, 20 bp, Artificial Sequence
  Synthetic oligonucleotide; TCCTGTTT chr2 60547354 60547373 60547370 +
aaggtagacatgtctttctt

SEQ ID NO: 191399 - DNA, 20 bp, Artificial Sequence
  Synthetic oligonucleotide; GTTTGCTT chr2 60547358 60547377 60547374 +
tagacatgtctttctttcct

SEQ ID NO: 191400 - DNA, 20 bp, Artificial Sequence
  Synthetic oligonucleotide; ACCAGCTT chr2 60547407 60547426 60547423 +
aatactccagcatctacttt

SEQ ID NO: 191401 - DNA, 20 bp, Artificial Sequence
  Synthetic oligonucleotide; TTAAGCTT chr2 60547425 60547444 60547441 +
ttaccagcttctatcatttt

SEQ ID NO: 191402 - DNA, 20 bp, Artificial Sequence
  Synthetic oligonucleotide; CTCTGCTT chr2 60547460 60547479 60547476 +
ggaaaagagagttggtaagt

SEQ ID NO: 191403 - DNA, 20 bp, Artificial Sequence
  Synthetic oligonucleotide; TTATGCTT chr2 60547476 60547495 60547492 +
aagtctctgcttgtgaaatc

SEQ ID NO: 191404 - DNA, 20 bp, Artificial Sequence
  Synthetic oligonucleotide; AATAGATT chr2 60547654 60547673 60547670 +
aaagccacagagaatcaaaa

SEQ ID NO: 191405 - DNA, 20 bp, Artificial Sequence
  Synthetic oligonucleotide; AACAGATT chr2 60547685 60547704 60547701 +
atttgagtgtagaatattgg

SEQ ID NO: 191406 - DNA, 20 bp, Artificial Sequence
  Synthetic oligonucleotide; TTATGTTT chr2 60547953 60547972 60547969 +
aaagacagtaaagtaagcac

SEQ ID NO: 191407 - DNA, 20 bp, Artificial Sequence
  Synthetic oligonucleotide; ATTTGCTT chr2 60548077 60548096 60548093 +
taatgtcattcttctcttac

SEQ ID NO: 191408 - DNA, 20 bp, Artificial Sequence
  Synthetic oligonucleotide; TAAGGATT chr2 60548144 60548163 60548160 +
aatattcctgttgtctgaat

SEQ ID NO: 191409 - DNA, 20 bp, Artificial Sequence
  Synthetic oligonucleotide; TGTGGCTT chr2 60548171 60548190 60548187 +
tttaagtacacattgataaa

SEQ ID NO: 191410 - DNA, 20 bp, Artificial Sequence
  Synthetic oligonucleotide; TTTTGTTT chr2 60548179 60548198 60548195 +
cacattgataaatgtggctt

SEQ ID NO: 191411 - DNA, 20 bp, Artificial Sequence
  Synthetic oligonucleotide; TGAGGTTT chr2 60548205 60548224 60548221 +
ttagcattagctacaagttc

SEQ ID NO: 191412 - DNA, 20 bp, Artificial Sequence
  Synthetic oligonucleotide; TTAAGATT chr2 60548302 60548321 60548318 +
aaaattttttatttccaccg

SEQ ID NO: 191413 - DNA, 20 bp, Artificial Sequence
  Synthetic oligonucleotide; AACTGATT chr2 60548464 60548483 60548480 +
tcttctaaatgtagtgactg

SEQ ID NO: 191414 - DNA, 20 bp, Artificial Sequence
  Synthetic oligonucleotide; TGCTGATT chr2 60548511 60548530 60548527 +
tgaagtggtaattcagaggt

SEQ ID NO: 191415 - DNA, 20 bp, Artificial Sequence
  Synthetic oligonucleotide; ATACGTTT chr2 60548678 60548697 60548694 +
attatattctaatgtatgaa

SEQ ID NO: 191416 - DNA, 20 bp, Artificial Sequence
  Synthetic oligonucleotide; ACGTGTTT chr2 60548740 60548759 60548756 +
gtgttcagagaaataccaaa

SEQ ID NO: 191417 - DNA, 20 bp, Artificial Sequence
  Synthetic oligonucleotide; TACTGATT chr2 60548830 60548849 60548846 +
acaattctcatggtgtagtc

SEQ ID NO: 191418 - DNA, 20 bp, Artificial Sequence
  Synthetic oligonucleotide; CCTCGATT chr2 60549049 60549068 60549065 +
ccggctacaaagcagggagt

SEQ ID NO: 191419 - DNA, 20 bp, Artificial Sequence
  Synthetic oligonucleotide; AAATGCTT chr2 60549136 60549155 60549152 +
ggaggaagaaatagaaaata

SEQ ID NO: 191420 - DNA, 20 bp, Artificial Sequence
  Synthetic oligonucleotide; TCAAGTTT chr2 60549338 60549357 60549354 +
ggggaaagggagatgtgtct

SEQ ID NO: 191421 - DNA, 20 bp, Artificial Sequence
  Synthetic oligonucleotide; GTTTGCTT chr2 60549342 60549361 60549358 +
aaagggagatgtgtcttcaa

SEQ ID NO: 191422 - DNA, 20 bp, Artificial Sequence
  Synthetic oligonucleotide; CCTTGATT chr2 60549363 60549382 60549379 +
tttgctttccaagtccttct

SEQ ID NO: 191423 - DNA, 20 bp, Artificial Sequence
  Synthetic oligonucleotide; CCGCGCTT chr2 60549557 60549576 60549573 +
gtgctggctgcaggctcccg

SEQ ID NO: 191424 - DNA, 20 bp, Artificial Sequence
  Synthetic oligonucleotide; TGAGGTTT chr2 60549727 60549746 60549743 +
ccagttggtgaaaaaggaag

SEQ ID NO: 191425 - DNA, 20 bp, Artificial Sequence
  Synthetic oligonucleotide; CTGAGATT chr2 60549799 60549818 60549815 +
acacacctcaagcgcgggtc

SEQ ID NO: 191426 - DNA, 20 bp, Artificial Sequence
  Synthetic oligonucleotide; ACAAGCTT chr2 60549819 60549838 60549835 +
ctgagattcattctgtgtcc

SEQ ID NO: 191427 - DNA, 20 bp, Artificial Sequence
  Synthetic oligonucleotide; TTGTGATT chr2 60549967 60549986 60549983 +
gatgataactattactattg

SEQ ID NO: 191428 - DNA, 20 bp, Artificial Sequence
  Synthetic oligonucleotide; CTGTGCTT chr2 60550047 60550066 60550063 +
ccagccgaggccaccgaggt

SEQ ID NO: 191429 - DNA, 20 bp, Artificial Sequence
  Synthetic oligonucleotide; GGTCGCTT chr2 60550271 60550290 60550287 +
ggggtgtcggccgcgcgccc

SEQ ID NO: 191430 - DNA, 20 bp, Artificial Sequence
  Synthetic oligonucleotide; CTGAGCTT chr2 60550471 60550490 60550487 +
ctggtacaggttcaagttcg

SEQ ID NO: 191431 - DNA, 20 bp, Artificial Sequence
  Synthetic oligonucleotide; GGGAGCTT chr2 60550992 60551011 60551008 +
cgcgcaacgtgccggggtgg

SEQ ID NO: 191432 - DNA, 20 bp, Artificial Sequence
  Synthetic oligonucleotide; ACGCGCTT chr2 60551576 60551595 60551592 +
gaggggaggggaggcgcaga

SEQ ID NO: 191433 - DNA, 20 bp, Artificial Sequence
  Synthetic oligonucleotide; AAATGCTT chr2 60551606 60551625 60551622 +
acagttgccctgcaaaataa

SEQ ID NO: 191434 - DNA, 20 bp, Artificial Sequence
  Synthetic oligonucleotide; CCGAGTTT chr2 60551621 60551640 60551637 +
aataaaaatgctttgcaaag

SEQ ID NO: 191435 - DNA, 20 bp, Artificial Sequence
  Synthetic oligonucleotide; AGCCGATT chr2 60551634 60551653 60551650 +
tgcaaagccgagtttcaccc

SEQ ID NO: 191436 - DNA, 20 bp, Artificial Sequence
  Synthetic oligonucleotide; GTCTGTTT chr2 60551880 60551899 60551896 +
cgcgccgcgctcggtcctct

SEQ ID NO: 191437 - DNA, 20 bp, Artificial Sequence
  Synthetic oligonucleotide; CGGTGCTT chr2 60551912 60551931 60551928 +
gcaggaggctcccgcacacg

SEQ ID NO: 191438 - DNA, 20 bp, Artificial Sequence
  Synthetic oligonucleotide; ACGAGATT chr2 60551934 60551953 60551950 +
gtgcttgtaaacattcagac

SEQ ID NO: 191439 - DNA, 20 bp, Artificial Sequence
  Synthetic oligonucleotide; CTAAGTTT chr2 60552038 60552057 60552054 +
ctctccgtgccgtcggcgcc

SEQ ID NO: 191440 - DNA, 20 bp, Artificial Sequence
  Synthetic oligonucleotide; AGGGGTTT chr2 60552054 60552073 60552070 +
cgccctaagtttgcaactga

SEQ ID NO: 191441 - DNA, 20 bp, Artificial Sequence
  Synthetic oligonucleotide; GGGTGATT chr2 60552071 60552090 60552087 +
tgaaggggtttgggggaaga

SEQ ID NO: 191442 - DNA, 20 bp, Artificial Sequence
  Synthetic oligonucleotide; GAGAGATT chr2 60552097 60552116 60552113 +
ttgtaaatttttttctagat

SEQ ID NO: 191443 - DNA, 20 bp, Artificial Sequence
  Synthetic oligonucleotide; GTGAGATT chr2 60552105 60552124 60552121 +
ttttttctagatgagagatt

SEQ ID NO: 191444 - DNA, 20 bp, Artificial Sequence
  Synthetic oligonucleotide; GAGCGTTT chr2 60552171 60552190 60552187 +
gtcacagaaaagggttggca

SEQ ID NO: 191445 - DNA, 20 bp, Artificial Sequence
  Synthetic oligonucleotide; TTTGGCTT chr2 60552176 60552195 60552192 +
agaaaagggttggcagagcg

SEQ ID NO: 191446 - DNA, 20 bp, Artificial Sequence
  Synthetic oligonucleotide; TTCGGTTT chr2 60552182 60552201 60552198 +
gggttggcagagcgtttggc

SEQ ID NO: 191447 - DNA, 20 bp, Artificial Sequence
  Synthetic oligonucleotide; CCTTGTTT chr2 60552217 60552236 60552233 +
agaaattgtacattctcttg

SEQ ID NO: 191448 - DNA, 20 bp, Artificial Sequence
  Synthetic oligonucleotide; AATCGTTT chr2 60552713 60552732 60552729 +
tcacctcttttctccccggg

SEQ ID NO: 191449 - DNA, 20 bp, Artificial Sequence
  Synthetic oligonucleotide; CCAGGTTT chr2 60552808 60552827 60552824 +
ttccccaccagctcccaccc

SEQ ID NO: 191450 - DNA, 20 bp, Artificial Sequence
  Synthetic oligonucleotide; GAGGGTTT chr2 60553029 60553048 60553045 +
gcaatggttccagatgggat

SEQ ID NO: 191451 - DNA, 20 bp, Artificial Sequence
  Synthetic oligonucleotide; GGAGGTTT chr2 60553069 60553088 60553085 +
tctcttttacctcgactctc

SEQ ID NO: 191452 - DNA, 20 bp, Artificial Sequence
  Synthetic oligonucleotide; CCTCGCTT chr2 60553122 60553141 60553138 +
tgcacacacccctctctccc

SEQ ID NO: 191453 - DNA, 20 bp, Artificial Sequence
  Synthetic oligonucleotide; TTTTGCTT chr2 60553128 60553147 60553144 +
cacccctctctccccctcgc

SEQ ID NO: 191454 - DNA, 20 bp, Artificial Sequence
  Synthetic oligonucleotide; TCGTGATT chr2 60553152 60553171 60553168 +
gcttctagtcctgcgcgctc

SEQ ID NO: 191455 - DNA, 20 bp, Artificial Sequence
  Synthetic oligonucleotide; TCCCGTTT chr2 60553204 60553223 60553220 +
tgggttacttacgcgagaat

SEQ ID NO: 191456 - DNA, 20 bp, Artificial Sequence
  Synthetic oligonucleotide; GTTTGCTT chr2 60553208 60553227 60553224 +
ttacttacgcgagaattccc

SEQ ID NO: 191457 - DNA, 20 bp, Artificial Sequence
  Synthetic oligonucleotide; TGGGGTTT chr2 60553222 60553241 60553238 +
attcccgtttgcttaagtgc

SEQ ID NO: 191458 - DNA, 20 bp, Artificial Sequence
  Synthetic oligonucleotide; CCTTGCTT chr2 60553231 60553250 60553247 +
tgcttaagtgctggggtttg

SEQ ID NO: 191459 - DNA, 20 bp, Artificial Sequence
  Synthetic oligonucleotide; CATGGCTT chr2 60553445 60553464 60553461 +
atgaattgtgggagagccgt

SEQ ID NO: 191460 - DNA, 20 bp, Artificial Sequence
  Synthetic oligonucleotide; GAAAGATT chr2 60553989 60554008 60554005 +
acacacgcggactctaaaat

SEQ ID NO: 191461 - DNA, 20 bp, Artificial Sequence
  Synthetic oligonucleotide; CTAAGTTT chr2 60554335 60554354 60554351 +
acggcaacgcggaatccagc

SEQ ID NO: 191462 - DNA, 20 bp, Artificial Sequence
  Synthetic oligonucleotide; AAATGTTT chr2 60554807 60554826 60554823 +
agcacagagggatgggaaga

SEQ ID NO: 191463 - DNA, 20 bp, Artificial Sequence
  Synthetic oligonucleotide; GCGGGCTT chr2 60555112 60555131 60555128 +
cgtgctgccgctgtcaaaaa

SEQ ID NO: 191464 - DNA, 20 bp, Artificial Sequence
  Synthetic oligonucleotide; TTCAGTTT chr2 60555139 60555158 60555155 +
tcactctggcgtgggatact

SEQ ID NO: 191465 - DNA, 20 bp, Artificial Sequence
  Synthetic oligonucleotide; CTGCGATT chr2 60555175 60555194 60555191 +
atgtacagcaacagcacccc

SEQ ID NO: 191466 - DNA, 20 bp, Artificial Sequence
  Synthetic oligonucleotide; GAAAGTTT chr2 60555184 60555203 60555200 +
aacagcaccccctgcgattg

SEQ ID NO: 191467 - DNA, 20 bp, Artificial Sequence
  Synthetic oligonucleotide; GTCCGATT chr2 60555297 60555316 60555313 +
ccgccgccggggagatcgca

SEQ ID NO: 191468 - DNA, 20 bp, Artificial Sequence
  Synthetic oligonucleotide; TGTCGCTT chr2 60555520 60555539 60555536 +
cccctcttcagtctaaaggg

SEQ ID NO: 191469 - DNA, 20 bp, Artificial Sequence
  Synthetic oligonucleotide; GGGGGCTT chr2 60555551 60555570 60555567 +
taaactcacccacccggtgg

SEQ ID NO: 191470 - DNA, 20 bp, Artificial Sequence
  Synthetic oligonucleotide; TATTGTTT chr2 60555559 60555578 60555575 +
cccacccggtgggggggctt

SEQ ID NO: 191471 - DNA, 20 bp, Artificial Sequence
  Synthetic oligonucleotide; CCGGGCTT chr2 60555579 60555598 60555595 +
tattgttttaagcgagggcc

SEQ ID NO: 191472 - DNA, 20 bp, Artificial Sequence
  Synthetic oligonucleotide; GGCTGTTT chr2 60555624 60555643 60555640 +
ccgcagccctgccggcaagc

SEQ ID NO: 191473 - DNA, 20 bp, Artificial Sequence
  Synthetic oligonucleotide; TCCTGTTT chr2 60555634 60555653 60555650 +
gccggcaagcggctgtttat

SEQ ID NO: 191474 - DNA, 20 bp, Artificial Sequence
  Synthetic oligonucleotide; TAAAGTTT chr2 60555650 60555669 60555666 +
ttattcctgtttcgtcttag

SEQ ID NO: 191475 - DNA, 20 bp, Artificial Sequence
  Synthetic oligonucleotide; ACTGGCTT chr2 60555681 60555700 60555697 +
gtctactgtgttagaaaatg

SEQ ID NO: 191476 - DNA, 20 bp, Artificial Sequence
  Synthetic oligonucleotide; CGGAGCTT chr2 60555700 60555719 60555716 +
gactggcttgcctagctcgg

SEQ ID NO: 191477 - DNA, 20 bp, Artificial Sequence
  Synthetic oligonucleotide; GGAGGTTT chr2 60555730 60555749 60555746 +
gacccctctaaggaagaaaa

SEQ ID NO: 191478 - DNA, 20 bp, Artificial Sequence
  Synthetic oligonucleotide; CTGGGATT chr2 60555771 60555790 60555787 +
tgagagagatgtgggctgta

SEQ ID NO: 191479 - DNA, 20 bp, Artificial Sequence
  Synthetic oligonucleotide; TGTGGTTT chr2 60555786 60555805 60555802 +
ctgtactgggattgtgtcaa

SEQ ID NO: 191480 - DNA, 20 bp, Artificial Sequence
  Synthetic oligonucleotide; TGTTGTTT chr2 60555793 60555812 60555809 +
gggattgtgtcaatgtggtt

SEQ ID NO: 191481 - DNA, 20 bp, Artificial Sequence
  Synthetic oligonucleotide; TGTTGTTT chr2 60555803 60555822 60555819 +
caatgtggtttgttgtttgt

SEQ ID NO: 191482 - DNA, 20 bp, Artificial Sequence
  Synthetic oligonucleotide; TCCAGTTT chr2 60555814 60555833 60555830 +
gttgtttgttgttgtttccc

SEQ ID NO: 191483 - DNA, 20 bp, Artificial Sequence
  Synthetic oligonucleotide; TTCTGTTT chr2 60555841 60555860 60555857 +
tgtgggagggagacctcaaa

SEQ ID NO: 191484 - DNA, 20 bp, Artificial Sequence
  Synthetic oligonucleotide; GGAGGATT chr2 60555857 60555876 60555873 +
caaattctgtttaagaagcg

SEQ ID NO: 191485 - DNA, 20 bp, Artificial Sequence
  Synthetic oligonucleotide; TGTAGCTT chr2 60555882 60555901 60555898 +
attcactagaagttaagctc

SEQ ID NO: 191486 - DNA, 20 bp, Artificial Sequence
  Synthetic oligonucleotide; GTCTGCTT chr2 60555957 60555976 60555973 +
agcatctctattccaccaca

SEQ ID NO: 191487 - DNA, 20 bp, Artificial Sequence
  Synthetic oligonucleotide; GCCAGATT chr2 60556144 60556163 60556160 +
ccttcaggtaacaatagtga

SEQ ID NO: 191488 - DNA, 20 bp, Artificial Sequence
  Synthetic oligonucleotide; CCAAGCTT chr2 60556161 60556180 60556177 +
tgagccagattctttcagaa

SEQ ID NO: 191489 - DNA, 20 bp, Artificial Sequence
  Synthetic oligonucleotide; TTCAGATT chr2 60556169 60556188 60556185 +
attctttcagaaccaagctt

SEQ ID NO: 191490 - DNA, 20 bp, Artificial Sequence
  Synthetic oligonucleotide; GTATGATT chr2 60556265 60556284 60556281 +
ttgtggaaatatatatatat

SEQ ID NO: 191491 - DNA, 20 bp, Artificial Sequence
  Synthetic oligonucleotide; TAAAGCTT chr2 60556291 60556310 60556307 +
tttatatataatggtgtgta

SEQ ID NO: 191492 - DNA, 20 bp, Artificial Sequence
  Synthetic oligonucleotide; TATTGATT chr2 60556475 60556494 60556491 +
ataaataactggcaacattt

SEQ ID NO: 191493 - DNA, 20 bp, Artificial Sequence
  Synthetic oligonucleotide; AAGTGCTT chr2 60556540 60556559 60556543 -
tagcagacctacttgtaact

SEQ ID NO: 191494 - DNA, 20 bp, Artificial Sequence
  Synthetic oligonucleotide; CTATGTTT chr2 60556526 60556545 60556529 -
gtaactaagtgcttaatttc

SEQ ID NO: 191495 - DNA, 20 bp, Artificial Sequence
  Synthetic oligonucleotide; AAAAGCTT chr2 60556321 60556340 60556324 -
ttacactacagccaaccccg

SEQ ID NO: 191496 - DNA, 20 bp, Artificial Sequence
  Synthetic oligonucleotide; AAAAGCTT chr2 60556191 60556210 60556194 -
gggaacaatattcaaatctg

SEQ ID NO: 191497 - DNA, 20 bp, Artificial Sequence
  Synthetic oligonucleotide; AGGGGCTT chr2 60556147 60556166 60556150 -
ggctcactattgttacctga

SEQ ID NO: 191498 - DNA, 20 bp, Artificial Sequence
  Synthetic oligonucleotide; GCTGGTTT chr2 60556004 60556023 60556007 -
attcttttggtgactccaag

SEQ ID NO: 191499 - DNA, 20 bp, Artificial Sequence
  Synthetic oligonucleotide; CAGAGCTT chr2 60555904 60555923 60555907 -
atggtgtcacacacaagcta

SEQ ID NO: 191500 - DNA, 20 bp, Artificial Sequence
  Synthetic oligonucleotide; TCCCGCTT chr2 60555880 60555899 60555883 -
gcttaacttctagtgaatcc

SEQ ID NO: 191501 - DNA, 20 bp, Artificial Sequence
  Synthetic oligonucleotide; AGCCGCTT chr2 60555648 60555667 60555651 -
aagacgaaacaggaataaac

SEQ ID NO: 191502 - DNA, 20 bp, Artificial Sequence
  Synthetic oligonucleotide; CCTCGCTT chr2 60555596 60555615 60555599 -
agcgcgtgcaagcccggggc

SEQ ID NO: 191503 - DNA, 20 bp, Artificial Sequence
  Synthetic oligonucleotide; GTGAGTTT chr2 60555560 60555579 60555563 -
aaagcccccccaccgggtgg

SEQ ID NO: 191504 - DNA, 20 bp, Artificial Sequence
  Synthetic oligonucleotide; TCCAGATT chr2 60555336 60555355 60555339 -
ctcctctccccccaactcct

SEQ ID NO: 191505 - DNA, 20 bp, Artificial Sequence
  Synthetic oligonucleotide; GCACGTTT chr2 60555226 60555245 60555229 -
ggcgccaggggactttacag

SEQ ID NO: 191506 - DNA, 20 bp, Artificial Sequence
  Synthetic oligonucleotide; GCCCGCTT chr2 60555138 60555157 60555141 -
gtatcccacgccagagtgaa

SEQ ID NO: 191507 - DNA, 20 bp, Artificial Sequence
  Synthetic oligonucleotide; CAGGGTTT chr2 60555081 60555100 60555084 -
gcgtgtgtgcattaaagaga

SEQ ID NO: 191508 - DNA, 20 bp, Artificial Sequence
  Synthetic oligonucleotide; CTGTGCTT chr2 60554814 60554833 60554817 -
aacattttcttcccatccct

SEQ ID NO: 191509 - DNA, 20 bp, Artificial Sequence
  Synthetic oligonucleotide; CCGCGCTT chr2 60554697 60554716 60554700 -
actgggactcccgggactgc

SEQ ID NO: 191510 - DNA, 20 bp, Artificial Sequence
  Synthetic oligonucleotide; CGGCGCTT chr2 60554548 60554567 60554551 -
acccttaggagccggggact

SEQ ID NO: 191511 - DNA, 20 bp, Artificial Sequence
  Synthetic oligonucleotide; AGTCGCTT chr2 60554522 60554541 60554525 -
tttcagttgcattcagaccc

SEQ ID NO: 191512 - DNA, 20 bp, Artificial Sequence
  Synthetic oligonucleotide; CTCAGATT chr2 60554505 60554524 60554508 -
cccagtcgcttggcggggcg

SEQ ID NO: 191513 - DNA, 20 bp, Artificial Sequence
  Synthetic oligonucleotide; GCTGGATT chr2 60554355 60554374 60554358 -
ccgcagccctccaaacttag

SEQ ID NO: 191514 - DNA, 20 bp, Artificial Sequence
  Synthetic oligonucleotide; GGGTGATT chr2 60554270 60554289 60554273 -
gaggctcagctctcaacttc

SEQ ID NO: 191515 - DNA, 20 bp, Artificial Sequence
  Synthetic oligonucleotide; CAAAGTTT chr2 60554238 60554257 60554241 -
tttgctgtcctctcctcggg

SEQ ID NO: 191516 - DNA, 20 bp, Artificial Sequence
  Synthetic oligonucleotide; CGGGGCTT chr2 60554210 60554229 60554213 -
cccgagcgcagccgcgggct

SEQ ID NO: 191517 - DNA, 20 bp, Artificial Sequence
  Synthetic oligonucleotide; CCTGGCTT chr2 60554101 60554120 60554104 -
ggtgtccgggagcaactcta

SEQ ID NO: 191518 - DNA, 20 bp, Artificial Sequence
  Synthetic oligonucleotide; CCGCGCTT chr2 60554085 60554104 60554088 -
tctacctggcttccctccgc

SEQ ID NO: 191519 - DNA, 20 bp, Artificial Sequence
  Synthetic oligonucleotide; ATTGGCTT chr2 60553768 60553787 60553771 -
tccccctccccgcactggcc

SEQ ID NO: 191520 - DNA, 20 bp, Artificial Sequence
  Synthetic oligonucleotide; GTGAGCTT chr2 60553713 60553732 60553716 -
cctgatgtgtgtccattggt

SEQ ID NO: 191521 - DNA, 20 bp, Artificial Sequence
  Synthetic oligonucleotide; CCATGTTT chr2 60553668 60553687 60553671 -
ttctctcctgctcgccctgc

SEQ ID NO: 191522 - DNA, 20 bp, Artificial Sequence
  Synthetic oligonucleotide; GGGGGCTT chr2 60553582 60553601 60553585 -
cacttgaacttgcagctcag

SEQ ID NO: 191523 - DNA, 20 bp, Artificial Sequence
  Synthetic oligonucleotide; TTTTGCTT chr2 60553487 60553506 60553490 -
tttttttttttttttttttt

SEQ ID NO: 191524 - DNA, 20 bp, Artificial Sequence
  Synthetic oligonucleotide; CGCCGCTT chr2 60552946 60552965 60552949 -
tcctcctctttcctcctttc

SEQ ID NO: 191525 - DNA, 20 bp, Artificial Sequence
  Synthetic oligonucleotide; CAATGATT chr2 60552914 60552933 60552917 -
tctcttttcgaaaaggaatg

SEQ ID NO: 191526 - DNA, 20 bp, Artificial Sequence
  Synthetic oligonucleotide; GCCAGTTT chr2 60552888 60552907 60552891 -
ttccactccccccccgcccc

SEQ ID NO: 191527 - DNA, 20 bp, Artificial Sequence
  Synthetic oligonucleotide; GGTTGCTT chr2 60552803 60552822 60552806 -
ggagctggtggggaaaggga

SEQ ID NO: 191528 - DNA, 20 bp, Artificial Sequence
  Synthetic oligonucleotide; AAACGATT chr2 60552741 60552760 60552744 -
ggagtgagtacaagtctaaa

SEQ ID NO: 191529 - DNA, 20 bp, Artificial Sequence
  Synthetic oligonucleotide; ACTGGCTT chr2 60552712 60552731 60552715 -
ccggggagaaaagaggtgag

SEQ ID NO: 191530 - DNA, 20 bp, Artificial Sequence
  Synthetic oligonucleotide; GGGTGTTT chr2 60552496 60552515 60552499 -
cttttgttccggccagaggt

SEQ ID NO: 191531 - DNA, 20 bp, Artificial Sequence
  Synthetic oligonucleotide; TCGCGCTT chr2 60552462 60552481 60552465 -
ctgccttttgtgccggctcc

SEQ ID NO: 191532 - DNA, 20 bp, Artificial Sequence
  Synthetic oligonucleotide; GGAAGATT chr2 60552005 60552024 60552008 -
ccctcctcttactatttttt

SEQ ID NO: 191533 - DNA, 20 bp, Artificial Sequence
  Synthetic oligonucleotide; AGTGGATT chr2 60551982 60552001 60551985 -
agattttcaaaaaaagtgga

SEQ ID NO: 191534 - DNA, 20 bp, Artificial Sequence
  Synthetic oligonucleotide; TTTTGATT chr2 60551976 60551995 60551979 -
tcaaaaaaagtggaagtgga

SEQ ID NO: 191535 - DNA, 20 bp, Artificial Sequence
  Synthetic oligonucleotide; GAATGTTT chr2 60551950 60551969 60551953 -
ttgggaaaaatctcgtgtct

SEQ ID NO: 191536 - DNA, 20 bp, Artificial Sequence
  Synthetic oligonucleotide; CTCGGCTT chr2 60551646 60551665 60551649 -
gcgaaatcggctgggtgaaa

SEQ ID NO: 191537 - DNA, 20 bp, Artificial Sequence
  Synthetic oligonucleotide; ACGTGCTT chr2 60551516 60551535 60551519 -
gggaccgcgaggaggtcacc

SEQ ID NO: 191538 - DNA, 20 bp, Artificial Sequence
  Synthetic oligonucleotide; GTGTGTTT chr2 60551405 60551424 60551408 -
cggggaagggcaggggagaa

SEQ ID NO: 191539 - DNA, 20 bp, Artificial Sequence
  Synthetic oligonucleotide; CCTGGCTT chr2 60551322 60551341 60551325 -
gtcttgccctcttccccagg

SEQ ID NO: 191540 - DNA, 20 bp, Artificial Sequence
  Synthetic oligonucleotide; GAAAGTTT chr2 60551223 60551242 60551226 -
ggcgggcggtgggcacttag

SEQ ID NO: 191541 - DNA, 20 bp, Artificial Sequence
  Synthetic oligonucleotide; TTATGATT chr2 60551164 60551183 60551167 -
acattccccccctactcaat

SEQ ID NO: 191542 - DNA, 20 bp, Artificial Sequence
  Synthetic oligonucleotide; TGCAGTTT chr2 60551138 60551157 60551141 -
ttcttactttaaatttttga

SEQ ID NO: 191543 - DNA, 20 bp, Artificial Sequence
  Synthetic oligonucleotide; CTGTGTTT chr2 60551107 60551126 60551110 -
aggaccacctatacttggtt

SEQ ID NO: 191544 - DNA, 20 bp, Artificial Sequence
  Synthetic oligonucleotide; GCCAGTTT chr2 60550666 60550685 60550669 -
tcctgtcccggggttaaagg

SEQ ID NO: 191545 - DNA, 20 bp, Artificial Sequence
  Synthetic oligonucleotide; CGGCGATT chr2 60550451 60550470 60550454 -
agcctcccccacctcctgcc

SEQ ID NO: 191546 - DNA, 20 bp, Artificial Sequence
  Synthetic oligonucleotide; ACGAGCTT chr2 60550428 60550447 60550431 -
cgattctcgtccggggagga

SEQ ID NO: 191547 - DNA, 20 bp, Artificial Sequence
  Synthetic oligonucleotide; AAATGCTT chr2 60550325 60550344 60550328 -
gttcttcattttgactttaa

SEQ ID NO: 191548 - DNA, 20 bp, Artificial Sequence
  Synthetic oligonucleotide; TGCAGTTT chr2 60550228 60550247 60550231 -
gcgccgggctcggagcacgg

SEQ ID NO: 191549 - DNA, 20 bp, Artificial Sequence
  Synthetic oligonucleotide; TTTCGCTT chr2 60550222 60550241 60550225 -
ggctcggagcacggtgcagt

SEQ ID NO: 191550 - DNA, 20 bp, Artificial Sequence
  Synthetic oligonucleotide; TAGGGCTT chr2 60550165 60550184 60550168 -
ggaaccgggagtgcgcgctc

SEQ ID NO: 191551 - DNA, 20 bp, Artificial Sequence
  Synthetic oligonucleotide; GCAAGTTT chr2 60550130 60550149 60550133 -
tggccgaagagggggatatg

SEQ ID NO: 191552 - DNA, 20 bp, Artificial Sequence
  Synthetic oligonucleotide; GCTGGCTT chr2 60550052 60550071 60550055 -
cacagacctcggtggcctcg

SEQ ID NO: 191553 - DNA, 20 bp, Artificial Sequence
  Synthetic oligonucleotide; GTAAGCTT chr2 60549849 60549868 60549852 -
gatcccccaaagtaaaaagt

SEQ ID NO: 191554 - DNA, 20 bp, Artificial Sequence
  Synthetic oligonucleotide; CCGCGCTT chr2 60549816 60549835 60549819 -
cacagaatgaatctcaggac

SEQ ID NO: 191555 - DNA, 20 bp, Artificial Sequence
  Synthetic oligonucleotide; CCGGGTTT chr2 60549766 60549785 60549769 -
gactgcaccaggttaaccag

SEQ ID NO: 191556 - DNA, 20 bp, Artificial Sequence
  Synthetic oligonucleotide; GCTCGCTT chr2 60549554 60549573 60549557 -
gagcctgcagccagcacgct

SEQ ID NO: 191557 - DNA, 20 bp, Artificial Sequence
  Synthetic oligonucleotide; CCCGGCTT chr2 60549466 60549485 60549469 -
cctgccccgggcctgtagcc

SEQ ID NO: 191558 - DNA, 20 bp, Artificial Sequence
  Synthetic oligonucleotide; CTTTGCTT chr2 60549461 60549480 60549464 -
cccgggcctgtagcccccgg

SEQ ID NO: 191559 - DNA, 20 bp, Artificial Sequence
  Synthetic oligonucleotide; TTTTGTTT chr2 60549455 60549474 60549458 -
cctgtagcccccggctttgc

SEQ ID NO: 191560 - DNA, 20 bp, Artificial Sequence
  Synthetic oligonucleotide; CTTTGCTT chr2 60549447 60549466 60549450 -
ccccggctttgcttttgttt

SEQ ID NO: 191561 - DNA, 20 bp, Artificial Sequence
  Synthetic oligonucleotide; CTCCGTTT chr2 60549420 60549439 60549423 -
tttcctctctgaatttcagc

SEQ ID NO: 191562 - DNA, 20 bp, Artificial Sequence
  Synthetic oligonucleotide; GTTTGCTT chr2 60549416 60549435 60549419 -
ctctctgaatttcagcctcc

SEQ ID NO: 191563 - DNA, 20 bp, Artificial Sequence
  Synthetic oligonucleotide; TCTCGTTT chr2 60549315 60549334 60549318 -
cccctccgctccccggcagc

SEQ ID NO: 191564 - DNA, 20 bp, Artificial Sequence
  Synthetic oligonucleotide; TAAGGATT chr2 60549281 60549300 60549284 -
ctccttaccaacatttccta

SEQ ID NO: 191565 - DNA, 20 bp, Artificial Sequence
  Synthetic oligonucleotide; TGCTGTTT chr2 60549180 60549199 60549183 -
tgagacgttccaggctgtct

SEQ ID NO: 191566 - DNA, 20 bp, Artificial Sequence
  Synthetic oligonucleotide; TTATGATT chr2 60549108 60549127 60549111 -
agagaattcgcggctaatta

SEQ ID NO: 191567 - DNA, 20 bp, Artificial Sequence
  Synthetic oligonucleotide; CCCTGCTT chr2 60549066 60549085 60549069 -
ttccacttcaatcgaggact

SEQ ID NO: 191568 - DNA, 20 bp, Artificial Sequence
  Synthetic oligonucleotide; CGGAGTTT chr2 60549052 60549071 60549055 -
aggactccctgctttgtagc

SEQ ID NO: 191569 - DNA, 20 bp, Artificial Sequence
  Synthetic oligonucleotide; CGGAGCTT chr2 60549040 60549059 60549043 -
tttgtagccggagtttaggc

SEQ ID NO: 191570 - DNA, 20 bp, Artificial Sequence
  Synthetic oligonucleotide; GAAGGTTT chr2 60548959 60548978 60548962 -
ggtaaatggctgagggttag

SEQ ID NO: 191571 - DNA, 20 bp, Artificial Sequence
  Synthetic oligonucleotide; TGTTGATT chr2 60548891 60548910 60548894 -
tcagatgcccagaaaggaaa

SEQ ID NO: 191572 - DNA, 20 bp, Artificial Sequence
  Synthetic oligonucleotide; GTCTGATT chr2 60548801 60548820 60548804 -
ttttctttgtgtcccacttt

SEQ ID NO: 191573 - DNA, 20 bp, Artificial Sequence
  Synthetic oligonucleotide; ACACGTTT chr2 60548766 60548785 60548769 -
atataccagcaatgataaaa

SEQ ID NO: 191574 - DNA, 20 bp, Artificial Sequence
  Synthetic oligonucleotide; AAATGTTT chr2 60548732 60548751 60548735 -
ttctctgaacaccactagcc

SEQ ID NO: 191575 - DNA, 20 bp, Artificial Sequence
  Synthetic oligonucleotide; ACAGGTTT chr2 60548627 60548646 60548630 -
gcatagaaaatgttgaggtt

SEQ ID NO: 191576 - DNA, 20 bp, Artificial Sequence
  Synthetic oligonucleotide; CCCGGTTT chr2 60548508 60548527 60548511 -
tctgaattaccacttcattt

SEQ ID NO: 191577 - DNA, 20 bp, Artificial Sequence
  Synthetic oligonucleotide; TTTTGATT chr2 60548503 60548522 60548506 -
attaccacttcatttcccgg

SEQ ID NO: 191578 - DNA, 20 bp, Artificial Sequence
  Synthetic oligonucleotide; GTCTGTTT chr2 60548454 60548473 60548457 -
atttagaagactttaaccaa

SEQ ID NO: 191579 - DNA, 20 bp, Artificial Sequence
  Synthetic oligonucleotide; GTAAGTTT chr2 60548276 60548295 60548279 -
tgcaaaggttctatgtacta

SEQ ID NO: 191580 - DNA, 20 bp, Artificial Sequence
  Synthetic oligonucleotide; TTCTGTTT chr2 60548058 60548077 60548061 -
aaggcacaatgcagaggcac

SEQ ID NO: 191581 - DNA, 20 bp, Artificial Sequence
  Synthetic oligonucleotide; AAGTGCTT chr2 60547975 60547994 60547978 -
tatgttgggcaaagaaacat

SEQ ID NO: 191582 - DNA, 20 bp, Artificial Sequence
  Synthetic oligonucleotide; ACTGGATT chr2 60547736 60547755 60547739 -
aataaatttaacctgagttc

SEQ ID NO: 191583 - DNA, 20 bp, Artificial Sequence
  Synthetic oligonucleotide; TTTTGATT chr2 60547674 60547693 60547677 -
cactcaaattaaaatctatt

SEQ ID NO: 191584 - DNA, 20 bp, Artificial Sequence
  Synthetic oligonucleotide; TGTGGCTT chr2 60547663 60547682 60547666 -
aaatctattttttgattctc

SEQ ID NO: 191585 - DNA, 20 bp, Artificial Sequence
  Synthetic oligonucleotide; GGCAGCTT chr2 60547633 60547652 60547636 -
agttcattaaatgtaaaatt

SEQ ID NO: 191586 - DNA, 20 bp, Artificial Sequence
  Synthetic oligonucleotide; GACTGATT chr2 60547611 60547630 60547614 -
cagcttgctaaagaaggtca

SEQ ID NO: 191587 - DNA, 20 bp, Artificial Sequence
  Synthetic oligonucleotide; AACTGTTT chr2 60547603 60547622 60547606 -
taaagaaggtcagactgatt

SEQ ID NO: 191588 - DNA, 20 bp, Artificial Sequence
  Synthetic oligonucleotide; TTCTGCTT chr2 60547581 60547600 60547584 -
ctgtttaagacttgtacatt

SEQ ID NO: 191589 - DNA, 20 bp, Artificial Sequence
  Synthetic oligonucleotide; TTCAGTTT chr2 60547575 60547594 60547578 -
aagacttgtacattttctgc

SEQ ID NO: 191590 - DNA, 20 bp, Artificial Sequence
  Synthetic oligonucleotide; GGATGTTT chr2 60547548 60547567 60547551 -
ttattaactggcagcatcct

SEQ ID NO: 191591 - DNA, 20 bp, Artificial Sequence
  Synthetic oligonucleotide; TTGTGATT chr2 60547534 60547553 60547537 -
catcctggatgttttgtatt

SEQ ID NO: 191592 - DNA, 20 bp, Artificial Sequence
  Synthetic oligonucleotide; ATAAGATT chr2 60547500 60547519 60547503 -
ttttttttgatagagcaagc

SEQ ID NO: 191593 - DNA, 20 bp, Artificial Sequence
  Synthetic oligonucleotide; GGAAGCTT chr2 60547455 60547474 60547458 -
ccaactctcttttccccttt

SEQ ID NO: 191594 - DNA, 20 bp, Artificial Sequence
  Synthetic oligonucleotide; TGGTGATT chr2 60547340 60547359 60547343 -
taccttgttataccatccgc

SEQ ID NO: 191595 - DNA, 20 bp, Artificial Sequence
  Synthetic oligonucleotide; TGGTGTTT chr2 60547206 60547225 60547209 -
ctcagccttgctctgaaatg

SEQ ID NO: 191596 - DNA, 20 bp, Artificial Sequence
  Synthetic oligonucleotide; GTTTGCTT chr2 60547202 60547221 60547205 -
gccttgctctgaaatgtggt

SEQ ID NO: 191597 - DNA, 20 bp, Artificial Sequence
  Synthetic oligonucleotide; TTCTGATT chr2 60547189 60547208 60547192 -
atgtggtgtttgcttgacca

SEQ ID NO: 191598 - DNA, 20 bp, Artificial Sequence
  Synthetic oligonucleotide; ACATGTTT chr2 60547153 60547172 60547156 -
atagatgccaccaagtgcaa

SEQ ID NO: 191599 - DNA, 20 bp, Artificial Sequence
  Synthetic oligonucleotide; ATTGGCTT chr2 60547098 60547117 60547101 -
gaataaaaaaaaaatgacta

SEQ ID NO: 191600 - DNA, 20 bp, Artificial Sequence
  Synthetic oligonucleotide; CTTTGATT chr2 60547017 60547036 60547020 -
tgcccgtgcatttggtattt

SEQ ID NO: 191601 - DNA, 20 bp, Artificial Sequence
  Synthetic oligonucleotide; AAAGGTTT chr2 60546982 60547001 60546985 -
actgctgagagtgagagcag

SEQ ID NO: 191602 - DNA, 20 bp, Artificial Sequence
  Synthetic oligonucleotide; ACATGATT chr2 60546951 60546970 60546954 -
gcagtgtgaattatgctgcg

SEQ ID NO: 191603 - DNA, 20 bp, Artificial Sequence
  Synthetic oligonucleotide; ATCCGTTT chr2 60546934 60546953 60546937 -
gcgacatgattattatttag

SEQ ID NO: 191604 - DNA, 20 bp, Artificial Sequence
  Synthetic oligonucleotide; AGTCGTTT chr2 60546913 60546932 60546916 -
tccgtttcataggtgcatgc

SEQ ID NO: 191605 - DNA, 20 bp, Artificial Sequence
  Synthetic oligonucleotide; AGTAGCTT chr2 60546861 60546880 60546864 -
gcacatttttcatgtgacat

SEQ ID NO: 191606 - DNA, 20 bp, Artificial Sequence
  Synthetic oligonucleotide; GTCTGTTT chr2 60546835 60546854 60546838 -
tttctaatttatgaagccat

SEQ ID NO: 191607 - DNA, 20 bp, Artificial Sequence
  Synthetic oligonucleotide; GTGTGTTT chr2 60546792 60546811 60546795 -
cattcacacacaaagggtgt

SEQ ID NO: 191608 - DNA, 20 bp, Artificial Sequence
  Synthetic oligonucleotide; TTTGGTTT chr2 60546720 60546739 60546723 -
tataggaaaaaagaaacaaa

SEQ ID NO: 191609 - DNA, 20 bp, Artificial Sequence
  Synthetic oligonucleotide; ACCAGTTT chr2 60546693 60546712 60546696 -
tctatccactttttttttta

SEQ ID NO: 191610 - DNA, 20 bp, Artificial Sequence
  Synthetic oligonucleotide; TTAAGCTT chr2 60546669 60546688 60546672 -
gtttttcttgtagttattat

SEQ ID NO: 191611 - DNA, 20 bp, Artificial Sequence
  Synthetic oligonucleotide; GACTGTTT chr2 60546532 60546551 60546535 -
ctctggagttatgcaaggaa

SEQ ID NO: 191612 - DNA, 20 bp, Artificial Sequence
  Synthetic oligonucleotide; TGATGATT chr2 60546512 60546531 60546515 -
gactgttttctttacatatg

SEQ ID NO: 191613 - DNA, 20 bp, Artificial Sequence
  Synthetic oligonucleotide; ATGTGCTT chr2 60546368 60546387 60546371 -
tgggatggcatggggttgag

SEQ ID NO: 191614 - DNA, 20 bp, Artificial Sequence
  Synthetic oligonucleotide; TTGTGCTT chr2 60546327 60546346 60546330 -
cctctctggcactctaataa

SEQ ID NO: 191615 - DNA, 20 bp, Artificial Sequence
  Synthetic oligonucleotide; TTTTGTTT chr2 60546321 60546340 60546324 -
tggcactctaataattgtgc

SEQ ID NO: 191616 - DNA, 20 bp, Artificial Sequence
  Synthetic oligonucleotide; CTCTGCTT chr2 60546134 60546153 60546137 -
ggaaacaatgcaatggcagc

SEQ ID NO: 191617 - DNA, 20 bp, Artificial Sequence
  Synthetic oligonucleotide; TGACGATT chr2 60546030 60546049 60546033 -
atccaggtcacgccagagga

SEQ ID NO: 191618 - DNA, 20 bp, Artificial Sequence
  Synthetic oligonucleotide; GATTGTTT chr2 60546026 60546045 60546029 -
aggtcacgccagaggatgac

SEQ ID NO: 191619 - DNA, 20 bp, Artificial Sequence
  Synthetic oligonucleotide; AGCTGTTT chr2 60545949 60545968 60545952 -
aaatgagaagcaaggagaaa

SEQ ID NO: 191620 - DNA, 20 bp, Artificial Sequence
  Synthetic oligonucleotide; GCATGTTT chr2 60545941 60545960 60545944 -
agcaaggagaaaagctgttt

SEQ ID NO: 191621 - DNA, 20 bp, Artificial Sequence
  Synthetic oligonucleotide; AAGTGCTT chr2 60545887 60545906 60545890 -
ccaagcagtaaggagttgtg

SEQ ID NO: 191622 - DNA, 20 bp, Artificial Sequence
  Synthetic oligonucleotide; TGTTGCTT chr2 60545821 60545840 60545824 -
aatgttaaaataatcatttc

SEQ ID NO: 191623 - DNA, 20 bp, Artificial Sequence
  Synthetic oligonucleotide; TGTCGATT chr2 60545720 60545739 60545723 -
agacaccttctctctggatc

SEQ ID NO: 191624 - DNA, 20 bp, Artificial Sequence
  Synthetic oligonucleotide; TTTGGATT chr2 60545713 60545732 60545716 -
ttctctctggatctgtcgat

SEQ ID NO: 191625 - DNA, 20 bp, Artificial Sequence
  Synthetic oligonucleotide; TTGAGCTT chr2 60545667 60545686 60545670 -
caccttctcattttgaagta

SEQ ID NO: 191626 - DNA, 20 bp, Artificial Sequence
  Synthetic oligonucleotide; TCCAGCTT chr2 60545647 60545666 60545650 -
ttgagctttactacacctag

SEQ ID NO: 191627 - DNA, 20 bp, Artificial Sequence
  Synthetic oligonucleotide; ACTTGTTT chr2 60545565 60545584 60545568 -
catttgcagttcagccaatg

SEQ ID NO: 191628 - DNA, 20 bp, Artificial Sequence
  Synthetic oligonucleotide; CAAGGCTT chr2 60545511 60545530 60545514 -
ttaggggttcagctcgttct

SEQ ID NO: 191629 - DNA, 20 bp, Artificial Sequence
  Synthetic oligonucleotide; CTGAGCTT chr2 60545451 60545470 60545454 -
gaggtggtggaaagagttaa

SEQ ID NO: 191630 - DNA, 20 bp, Artificial Sequence
  Synthetic oligonucleotide; ACATGCTT chr2 60545290 60545309 60545293 -
gcagttgctgaagcgcacag

SEQ ID NO: 191631 - DNA, 20 bp, Artificial Sequence
  Synthetic oligonucleotide; AAAAGTTT chr2 60545277 60545296 60545280 -
cgcacagacatgcttactcg

SEQ ID NO: 191632 - DNA, 20 bp, Artificial Sequence
  Synthetic oligonucleotide; GTTGGTTT chr2 60545244 60545263 60545247 -
catgttggaaatttcaaaag

SEQ ID NO: 191633 - DNA, 20 bp, Artificial Sequence
  Synthetic oligonucleotide; AAATGCTT chr2 60545190 60545209 60545193 -
tgcctcctcagctaaatgat

SEQ ID NO: 191634 - DNA, 20 bp, Artificial Sequence
  Synthetic oligonucleotide; TGTGGTTT chr2 60545158 60545177 60545161 -
gtgctctctcttgtctctga

SEQ ID NO: 191635 - DNA, 20 bp, Artificial Sequence
  Synthetic oligonucleotide; TCTTGATT chr2 60545139 60545158 60545142 -
atgtggttttgacagatgta

SEQ ID NO: 191636 - DNA, 20 bp, Artificial Sequence
  Synthetic oligonucleotide; TTTTGTTT chr2 60545133 60545152 60545136 -
ttttgacagatgtatcttga

SEQ ID NO: 191637 - DNA, 20 bp, Artificial Sequence
  Synthetic oligonucleotide; TGTGGTTT chr2 60545126 60545145 60545129 -
agatgtatcttgattttgtt

SEQ ID NO: 191638 - DNA, 20 bp, Artificial Sequence
  Synthetic oligonucleotide; CACTGTTT chr2 60545076 60545095 60545079 -
caaatgtccagtccagactc

SEQ ID NO: 191639 - DNA, 20 bp, Artificial Sequence
  Synthetic oligonucleotide; GTGGGTTT chr2 60544968 60544987 60544971 -
gcagggaggcagctaggtgt

SEQ ID NO: 191640 - DNA, 20 bp, Artificial Sequence
  Synthetic oligonucleotide; TTTTGCTT chr2 60544858 60544877 60544861 -
atagtgaccctcaaaacatt

SEQ ID NO: 191641 - DNA, 20 bp, Artificial Sequence
  Synthetic oligonucleotide; TGCAGATT chr2 60544828 60544847 60544831 -
gcatgttagacaaaagtcaa

SEQ ID NO: 191642 - DNA, 20 bp, Artificial Sequence
  Synthetic oligonucleotide; GATCGCTT chr2 60544788 60544807 60544791 -
acatgccatgcctgttggtg

SEQ ID NO: 191643 - DNA, 20 bp, Artificial Sequence
  Synthetic oligonucleotide; AGAGGTTT chr2 60544744 60544763 60544747 -
cacccagctcccgaaaggca

SEQ ID NO: 191644 - DNA, 20 bp, Artificial Sequence
  Synthetic oligonucleotide; TTCAGTTT chr2 60544735 60544754 60544738 -
cccgaaaggcaagaggtttg

SEQ ID NO: 191645 - DNA, 20 bp, Artificial Sequence
  Synthetic oligonucleotide; AATTGATT chr2 60544704 60544723 60544707 -
gaaaggtagtgcatatcatg

SEQ ID NO: 191646 - DNA, 20 bp, Artificial Sequence
  Synthetic oligonucleotide; CCTAGTTT chr2 60544675 60544694 60544678 -
actggaacttgtctctccga

SEQ ID NO: 191647 - DNA, 20 bp, Artificial Sequence
  Synthetic oligonucleotide; AGGGGATT chr2 60544630 60544649 60544633 -
ataataggtcagtggtctag

SEQ ID NO: 191648 - DNA, 20 bp, Artificial Sequence
  Synthetic oligonucleotide; TAGTGCTT chr2 60544546 60544565 60544549 -
tggcattttctttctttttt

SEQ ID NO: 191649 - DNA, 20 bp, Artificial Sequence
  Synthetic oligonucleotide; TGAAGATT chr2 60544420 60544439 60544423 -
taccttatgtgacatgtagg

SEQ ID NO: 191650 - DNA, 20 bp, Artificial Sequence
  Synthetic oligonucleotide; GCATGATT chr2 60544324 60544343 60544327 -
aaaatgaacagaagtgtaag

SEQ ID NO: 191651 - DNA, 20 bp, Artificial Sequence
  Synthetic oligonucleotide; AGGGGATT chr2 60544295 60544314 60544298 -
atgaagcaagagcaggcgga

SEQ ID NO: 191652 - DNA, 20 bp, Artificial Sequence
  Synthetic oligonucleotide; GCTCGTTT chr2 60544199 60544218 60544202 -
tcgtatttacatatcgagct

SEQ ID NO: 191653 - DNA, 20 bp, Artificial Sequence
  Synthetic oligonucleotide; CTTAGATT chr2 60544114 60544133 60544117 -
tcccaaataggttattcagt

SEQ ID NO: 191654 - DNA, 20 bp, Artificial Sequence
  Synthetic oligonucleotide; ATTTGCTT chr2 60543982 60544001 60543985 -
tatgtagggaaataagagat

SEQ ID NO: 191655 - DNA, 20 bp, Artificial Sequence
  Synthetic oligonucleotide; TCTTGATT chr2 60543741 60543760 60543744 -
gtgcatgaataattacaaag

SEQ ID NO: 191656 - DNA, 20 bp, Artificial Sequence
  Synthetic oligonucleotide; TTGTGTTT chr2 60543726 60543745 60543729 -
caaagtcttgatttctttca

SEQ ID NO: 191657 - DNA, 20 bp, Artificial Sequence
  Synthetic oligonucleotide; AAGAGTTT chr2 60543607 60543626 60543610 -
ataattcacagtaatgaatt

SEQ ID NO: 191658 - DNA, 20 bp, Artificial Sequence
  Synthetic oligonucleotide; GTCTGCTT chr2 60543459 60543478 60543462 -
gcacgtctgcacaattccaa

SEQ ID NO: 191659 - DNA, 20 bp, Artificial Sequence
  Synthetic oligonucleotide; ATGTGTTT chr2 60543322 60543341 60543325 -
attgatgaatctctagaaga

SEQ ID NO: 191660 - DNA, 20 bp, Artificial Sequence
  Synthetic oligonucleotide; AAAGGCTT chr2 60543272 60543291 60543275 -
atttaagcgtgctgggtagg

SEQ ID NO: 191661 - DNA, 20 bp, Artificial Sequence
  Synthetic oligonucleotide; GTTGGATT chr2 60543248 60543267 60543251 -
gctttattaaagtgatgtaa

SEQ ID NO: 191662 - DNA, 20 bp, Artificial Sequence
  Synthetic oligonucleotide; TAAAGCTT chr2 60543161 60543180 60543164 -
gatcttcttcctaagataaa

SEQ ID NO: 191663 - DNA, 20 bp, Artificial Sequence
  Synthetic oligonucleotide; CTGAGTTT chr2 60543059 60543078 60543062 -
tgtactcaggcctctccaag

SEQ ID NO: 191664 - DNA, 20 bp, Artificial Sequence
  Synthetic oligonucleotide; CAGAGTTT chr2 60543027 60543046 60543030 -
tttttttttttttttttaga

SEQ ID NO: 191665 - DNA, 20 bp, Artificial Sequence
  Synthetic oligonucleotide; GCATGATT chr2 60542989 60543008 60542992 -
gcccaggctggagtgcagtg

SEQ ID NO: 191666 - DNA, 20 bp, Artificial Sequence
  Synthetic oligonucleotide; AAGCGATT chr2 60542949 60542968 60542952 -
aacctctgcctcctaggttc

SEQ ID NO: 191667 - DNA, 20 bp, Artificial Sequence
  Synthetic oligonucleotide; CTGGGATT chr2 60542917 60542936 60542920 -
tgcctcagcctcccaagtag

SEQ ID NO: 191668 - DNA, 20 bp, Artificial Sequence
  Synthetic oligonucleotide; GCTAGTTT chr2 60542886 60542905 60542889 -
ggcgtgtgccactacgccca

SEQ ID NO: 191669 - DNA, 20 bp, Artificial Sequence
  Synthetic oligonucleotide; CAGGGTTT chr2 60542859 60542878 60542862 -
ttttgtattttcagtagagg

SEQ ID NO: 191670 - DNA, 20 bp, Artificial Sequence
  Synthetic oligonucleotide; CCTGGCTT chr2 60542803 60542822 60542806 -
tcctgacctcaggtgatcca

SEQ ID NO: 191671 - DNA, 20 bp, Artificial Sequence
  Synthetic oligonucleotide; CTGGGATT chr2 60542781 60542800 60542784 -
tggcttggcctcccaaagtg

SEQ ID NO: 191672 - DNA, 20 bp, Artificial Sequence
  Synthetic oligonucleotide; ACAGGCTT chr2 60542773 60542792 60542776 -
cctcccaaagtgctgggatt

SEQ ID NO: 191673 - DNA, 20 bp, Artificial Sequence
  Synthetic oligonucleotide; AGAGGATT chr2 60542730 60542749 60542733 -
gcccaaactgagtatttttt

SEQ ID NO: 191674 - DNA, 20 bp, Artificial Sequence
  Synthetic oligonucleotide; GGTTGCTT chr2 60542639 60542658 60542642 -
gtacacatagatgttaatca

SEQ ID NO: 191675 - DNA, 20 bp, Artificial Sequence
  Synthetic oligonucleotide; GTGTGATT chr2 60542601 60542620 60542604 -
atttaaatattcaaaatatt

SEQ ID NO: 191676 - DNA, 20 bp, Artificial Sequence
  Synthetic oligonucleotide; AGCAGCTT chr2 60542547 60542566 60542550 -
tattaatttagctgggaatt

SEQ ID NO: 191677 - DNA, 20 bp, Artificial Sequence
  Synthetic oligonucleotide; CAGAGCTT chr2 60542463 60542482 60542466 -
agcagcctttgacttgcagt

SEQ ID NO: 191678 - DNA, 20 bp, Artificial Sequence
  Synthetic oligonucleotide; AGGGGTTT chr2 60542450 60542469 60542453 -
ttgcagtcagagctttcaat

SEQ ID NO: 191679 - DNA, 20 bp, Artificial Sequence
  Synthetic oligonucleotide; TTTTGTTT chr2 60542445 60542464 60542448 -
gtcagagctttcaatagggg

SEQ ID NO: 191680 - DNA, 20 bp, Artificial Sequence
  Synthetic oligonucleotide; TTTTGTTT chr2 60542440 60542459 60542443 -
agctttcaataggggttttg

SEQ ID NO: 191681 - DNA, 20 bp, Artificial Sequence
  Synthetic oligonucleotide; TTTTGTTT chr2 60542435 60542454 60542438 -
tcaataggggttttgttttg

SEQ ID NO: 191682 - DNA, 20 bp, Artificial Sequence
  Synthetic oligonucleotide; GGAAGATT chr2 60542382 60542401 60542385 -
tgatggggggaaatattcat

SEQ ID NO: 191683 - DNA, 20 bp, Artificial Sequence
  Synthetic oligonucleotide; GTCAGATT chr2 60542318 60542337 60542321 -
cccaaacattatcccatcat

SEQ ID NO: 191684 - DNA, 20 bp, Artificial Sequence
  Synthetic oligonucleotide; TGAGGTTT chr2 60542310 60542329 60542313 -
ttatcccatcatgtcagatt

SEQ ID NO: 191685 - DNA, 20 bp, Artificial Sequence
  Synthetic oligonucleotide; TTTGGCTT chr2 60542304 60542323 60542307 -
catcatgtcagatttgaggt

SEQ ID NO: 191686 - DNA, 20 bp, Artificial Sequence
  Synthetic oligonucleotide; TTAGGTTT chr2 60542274 60542293 60542277 -
tgcacataggaatctttaaa

SEQ ID NO: 191687 - DNA, 20 bp, Artificial Sequence
  Synthetic oligonucleotide; GTTAGCTT chr2 60542253 60542272 60542256 -
taggtttgggctgtcataaa

SEQ ID NO: 191688 - DNA, 20 bp, Artificial Sequence
  Synthetic oligonucleotide; ATATGCTT chr2 60541994 60542013 60541997 -
ttaaaagtaaatcaaataca

SEQ ID NO: 191689 - DNA, 20 bp, Artificial Sequence
  Synthetic oligonucleotide; TTCTGATT chr2 60541943 60541962 60541946 -
accttttctttttgtatcca

SEQ ID NO: 191690 - DNA, 20 bp, Artificial Sequence
  Synthetic oligonucleotide; ATGTGATT chr2 60541817 60541836 60541820 -
tttttcttttctctttattt

SEQ ID NO: 191691 - DNA, 20 bp, Artificial Sequence
  Synthetic oligonucleotide; TATTGTTT chr2 60541680 60541699 60541683 -
aaaatccagagagtagagaa

SEQ ID NO: 191692 - DNA, 20 bp, Artificial Sequence
  Synthetic oligonucleotide; CTAGGATT chr2 60541660 60541679 60541663 -
tattgttttctaataagtac

SEQ ID NO: 191693 - DNA, 20 bp, Artificial Sequence
  Synthetic oligonucleotide; CTATGTTT chr2 60541640 60541659 60541643 -
ctaggattttcatagggagc

SEQ ID NO: 191694 - DNA, 20 bp, Artificial Sequence
  Synthetic oligonucleotide; GGCAGCTT chr2 60541540 60541559 60541543 -
acagagaaaggttgtgaact

SEQ ID NO: 191695 - DNA, 20 bp, Artificial Sequence
  Synthetic oligonucleotide; GGATGTTT chr2 60541532 60541551 60541535 -
aggttgtgaactggcagctt

SEQ ID NO: 191696 - DNA, 20 bp, Artificial Sequence
  Synthetic oligonucleotide; CAGTGATT chr2 60541466 60541485 60541469 -
aattgtaaatagaactgtca

SEQ ID NO: 191697 - DNA, 20 bp, Artificial Sequence
  Synthetic oligonucleotide; GCATGATT chr2 60541458 60541477 60541461 -
atagaactgtcacagtgatt

SEQ ID NO: 191698 - DNA, 20 bp, Artificial Sequence
  Synthetic oligonucleotide; GAAAGCTT chr2 60541405 60541424 60541408 -
ttggcattgtcaggactttt

SEQ ID NO: 191699 - DNA, 20 bp, Artificial Sequence
  Synthetic oligonucleotide; TAATGTTT chr2 60541225 60541244 60541228 -
tcctagtcatcttttataaa

SEQ ID NO: 191700 - DNA, 20 bp, Artificial Sequence
  Synthetic oligonucleotide; TGGAGATT chr2 60541173 60541192 60541176 -
agatcatcctgtgtgtgatg

SEQ ID NO: 191701 - DNA, 20 bp, Artificial Sequence
  Synthetic oligonucleotide; GTTAGTTT chr2 60541163 60541182 60541166 -
gtgtgtgatgtggagattgt

SEQ ID NO: 191702 - DNA, 20 bp, Artificial Sequence
  Synthetic oligonucleotide; CAAAGTTT chr2 60541060 60541079 60541063 -
agaacaggagcagaggggga

SEQ ID NO: 191703 - DNA, 20 bp, Artificial Sequence
  Synthetic oligonucleotide; CTGTGTTT chr2 60541040 60541059 60541043 -
caaagtttccctcccgttct

SEQ ID NO: 191704 - DNA, 20 bp, Artificial Sequence
  Synthetic oligonucleotide; GAAAGCTT chr2 60541025 60541044 60541028 -
gttctctgtgtttattctgt

SEQ ID NO: 191705 - DNA, 20 bp, Artificial Sequence
  Synthetic oligonucleotide; ATATGTTT chr2 60540869 60540888 60540872 -
tttactataaaggatctgaa

SEQ ID NO: 191706 - DNA, 20 bp, Artificial Sequence
  Synthetic oligonucleotide; GGATGCTT chr2 60540730 60540749 60540733 -
gctcagggaggaggcgagtt

SEQ ID NO: 191707 - DNA, 20 bp, Artificial Sequence
  Synthetic oligonucleotide; TGCAGCTT chr2 60540677 60540696 60540680 -
gaaaatcattaatttcacac

SEQ ID NO: 191708 - DNA, 20 bp, Artificial Sequence
  Synthetic oligonucleotide; TGTAGTTT chr2 60540666 60540685 60540669 -
atttcacactgcagcttcca

SEQ ID NO: 191709 - DNA, 20 bp, Artificial Sequence
  Synthetic oligonucleotide; TTTAGATT chr2 60540596 60540615 60540599 -
caaatcctagggaaacattt

SEQ ID NO: 191710 - DNA, 20 bp, Artificial Sequence
  Synthetic oligonucleotide; TTGTGATT chr2 60540587 60540606 60540590 -
gggaaacattttttagattt

SEQ ID NO: 191711 - DNA, 20 bp, Artificial Sequence
  Synthetic oligonucleotide; AAATGTTT chr2 60540570 60540589 60540573 -
tttttgtgatttctcaatga

SEQ ID NO: 191712 - DNA, 20 bp, Artificial Sequence
  Synthetic oligonucleotide; GGTGGCTT chr2 60540541 60540560 60540544 -
ataaaggagaataggtgaat

SEQ ID NO: 191713 - DNA, 20 bp, Artificial Sequence
  Synthetic oligonucleotide; TTTGGCTT chr2 60540502 60540521 60540505 -
cagtaagaaaggaaacaaat

SEQ ID NO: 191714 - DNA, 20 bp, Artificial Sequence
  Synthetic oligonucleotide; CCAAGATT chr2 60540436 60540455 60540439 -
agcacagctagggagatgca

SEQ ID NO: 191715 - DNA, 20 bp, Artificial Sequence
  Synthetic oligonucleotide; GTCTGTTT chr2 60540333 60540352 60540336 -
aaaatttaccccaagcccaa

SEQ ID NO: 191716 - DNA, 20 bp, Artificial Sequence
  Synthetic oligonucleotide; ACCAGCTT chr2 60540311 60540330 60540314 -
ctgtttttacatacagtagt

SEQ ID NO: 191717 - DNA, 20 bp, Artificial Sequence
  Synthetic oligonucleotide; ATGAGATT chr2 60540240 60540259 60540243 -
caccttgccacttttttagc

SEQ ID NO: 191718 - DNA, 20 bp, Artificial Sequence
  Synthetic oligonucleotide; TTCTGCTT chr2 60540207 60540226 60540210 -
accaagcatctttagtacct

SEQ ID NO: 191719 - DNA, 20 bp, Artificial Sequence
  Synthetic oligonucleotide; TTCAGATT chr2 60540198 60540217 60540201 -
ctttagtacctttctgcttg

SEQ ID NO: 191720 - DNA, 20 bp, Artificial Sequence
  Synthetic oligonucleotide; CAAGGATT chr2 60540152 60540171 60540155 -
tgtcagcagtgttgttattt

SEQ ID NO: 191721 - DNA, 20 bp, Artificial Sequence
  Synthetic oligonucleotide; AAAAGATT chr2 60540139 60540158 60540142 -
gttatttcaaggattaaaaa

SEQ ID NO: 191722 - DNA, 20 bp, Artificial Sequence
  Synthetic oligonucleotide; GCAGGTTT chr2 60540093 60540112 60540096 -
ttaacattatttcaaatcaa

SEQ ID NO: 191723 - DNA, 20 bp, Artificial Sequence
  Synthetic oligonucleotide; AACAGCTT chr2 60539913 60539932 60539916 -
taggtaaatgggcatcctta

SEQ ID NO: 191724 - DNA, 20 bp, Artificial Sequence
  Synthetic oligonucleotide; CGTAGTTT chr2 60539839 60539858 60539842 -
tttacctttgtaatttgcca

SEQ ID NO: 191725 - DNA, 20 bp, Artificial Sequence
  Synthetic oligonucleotide; GGCAGATT chr2 60539690 60539709 60539693 -
atgtgctcctagagaccaaa

SEQ ID NO: 191726 - DNA, 20 bp, Artificial Sequence
  Synthetic oligonucleotide; ATCAGTTT chr2 60539584 60539603 60539587 -
aacatcagactgtatttcta

SEQ ID NO: 191727 - DNA, 20 bp, Artificial Sequence
  Synthetic oligonucleotide; CCCTGCTT chr2 60539533 60539552 60539536 -
gggttcattggaatttgtct

SEQ ID NO: 191728 - DNA, 20 bp, Artificial Sequence
  Synthetic oligonucleotide; AAAGGCTT chr2 60539479 60539498 60539482 -
catttttaaaacatttcagc

SEQ ID NO: 191729 - DNA, 20 bp, Artificial Sequence
  Synthetic oligonucleotide; GAAGGATT chr2 60539384 60539403 60539387 -
attgagttaggttggcaagg

SEQ ID NO: 191730 - DNA, 20 bp, Artificial Sequence
  Synthetic oligonucleotide; GTGAGCTT chr2 60539328 60539347 60539331 -
ctgatcccagcagggaatag

SEQ ID NO: 191731 - DNA, 20 bp, Artificial Sequence
  Synthetic oligonucleotide; TAATGCTT chr2 60539214 60539233 60539217 -
cagatgcggagctggaatat

SEQ ID NO: 191732 - DNA, 20 bp, Artificial Sequence
  Synthetic oligonucleotide; GCAAGCTT chr2 60539172 60539191 60539175 -
ccataataaagctgtacaca

SEQ ID NO: 191733 - DNA, 20 bp, Artificial Sequence
  Synthetic oligonucleotide; CACAGTTT chr2 60539084 60539103 60539087 -
tggaaaaatgctcgatatgc

SEQ ID NO: 191734 - DNA, 20 bp, Artificial Sequence
  Synthetic oligonucleotide; ATTTGTTT chr2 60538936 60538955 60538939 -
gtatggagaaatgcaacata

SEQ ID NO: 191735 - DNA, 20 bp, Artificial Sequence
  Synthetic oligonucleotide; AGGCGTTT chr2 60538913 60538932 60538916 -
tgtttcatatggttaattac

SEQ ID NO: 191736 - DNA, 20 bp, Artificial Sequence
  Synthetic oligonucleotide; TCCAGCTT chr2 60538876 60538895 60538879 -
aaattttaaatagccacagt

SEQ ID NO: 191737 - DNA, 20 bp, Artificial Sequence
  Synthetic oligonucleotide; ATGTGATT chr2 60538854 60538873 60538857 -
cagcttttcccgttaaaagt

SEQ ID NO: 191738 - DNA, 20 bp, Artificial Sequence
  Synthetic oligonucleotide; TGGTGATT chr2 60538816 60538835 60538819 -
gagtacagtgtaaatatttg

SEQ ID NO: 191739 - DNA, 20 bp, Artificial Sequence
  Synthetic oligonucleotide; TTCAGTTT chr2 60538718 60538737 60538721 -
gagagagagagagagagaca

SEQ ID NO: 191740 - DNA, 20 bp, Artificial Sequence
  Synthetic oligonucleotide; CATTGCTT chr2 60538599 60538618 60538602 -
ccattatatttttgagtcca

SEQ ID NO: 191741 - DNA, 20 bp, Artificial Sequence
  Synthetic oligonucleotide; TGAGGTTT chr2 60538592 60538611 60538595 -
atttttgagtccacattgct

SEQ ID NO: 191742 - DNA, 20 bp, Artificial Sequence
  Synthetic oligonucleotide; AGAAGATT chr2 60538581 60538600 60538584 -
cacattgcttgaggttttaa

SEQ ID NO: 191743 - DNA, 20 bp, Artificial Sequence
  Synthetic oligonucleotide; ACACGTTT chr2 60538494 60538513 60538497 -
caaaacgtataaagaaaaat

SEQ ID NO: 191744 - DNA, 20 bp, Artificial Sequence
  Synthetic oligonucleotide; AGAAGTTT chr2 60538438 60538457 60538441 -
ctgctaagaactggcgaatt

SEQ ID NO: 191745 - DNA, 20 bp, Artificial Sequence
  Synthetic oligonucleotide; GGAAGATT chr2 60538355 60538374 60538358 -
ggatctgatgcaatgctgct

SEQ ID NO: 191746 - DNA, 20 bp, Artificial Sequence
  Synthetic oligonucleotide; GCACGATT chr2 60538310 60538329 60538313 -
cctctaaggcaacgcgcagt

SEQ ID NO: 191747 - DNA, 20 bp, Artificial Sequence
  Synthetic oligonucleotide; TCAGGTTT chr2 60538170 60538189 60538173 -
tatacctaaaggtgagatga

SEQ ID NO: 191748 - DNA, 20 bp, Artificial Sequence
  Synthetic oligonucleotide; ATGAGTTT chr2 60537996 60538015 60537999 -
gggacctttggtcactcaca

SEQ ID NO: 191749 - DNA, 20 bp, Artificial Sequence
  Synthetic oligonucleotide; TTTTGTTT chr2 60537990 60538009 60537993 -
tttggtcactcacaatgagt

SEQ ID NO: 191750 - DNA, 20 bp, Artificial Sequence
  Synthetic oligonucleotide; ATTTGATT chr2 60537936 60537955 60537939 -
aatgaacaattgcacctaca

SEQ ID NO: 191751 - DNA, 20 bp, Artificial Sequence
  Synthetic oligonucleotide; TTTAGTTT chr2 60537929 60537948 60537932 -
aattgcacctacaatttgat

SEQ ID NO: 191752 - DNA, 20 bp, Artificial Sequence
  Synthetic oligonucleotide; CACTGATT chr2 60537905 60537924 60537908 -
gttttagatagaggcgaatc

SEQ ID NO: 191753 - DNA, 20 bp, Artificial Sequence
  Synthetic oligonucleotide; ATTTGCTT chr2 60537798 60537817 60537801 -
tatacctacctcgcctttct

SEQ ID NO: 191754 - DNA, 20 bp, Artificial Sequence
  Synthetic oligonucleotide; GGAAGCTT chr2 60537767 60537786 60537770 -
gaactttctaaaaaacacaa

SEQ ID NO: 191755 - DNA, 20 bp, Artificial Sequence
  Synthetic oligonucleotide; TGTAGCTT chr2 60537641 60537660 60537644 -
taatttttagggaaataaag

SEQ ID NO: 191756 - DNA, 20 bp, Artificial Sequence
  Synthetic oligonucleotide; CTTGGATT chr2 60537636 60537655 60537639 -
tttagggaaataaagtgtag

SEQ ID NO: 191757 - DNA, 20 bp, Artificial Sequence
  Synthetic oligonucleotide; TAGAGTTT chr2 60537572 60537591 60537575 -
gttcctgtacattttaaata

SEQ ID NO: 191758 - DNA, 20 bp, Artificial Sequence
  Synthetic oligonucleotide; CCATGATT chr2 60537464 60537483 60537467 -
cttcaccaactcaaggtata

SEQ ID NO: 191759 - DNA, 20 bp, Artificial Sequence
  Synthetic oligonucleotide; TTATGATT chr2 60537456 60537475 60537459 -
actcaaggtataccatgatt

SEQ ID NO: 191760 - DNA, 20 bp, Artificial Sequence
  Synthetic oligonucleotide; TTCAGTTT chr2 60537378 60537397 60537381 -
aactcccctgccccgatcct

SEQ ID NO: 191761 - DNA, 20 bp, Artificial Sequence
  Synthetic oligonucleotide; GTGAGTTT chr2 60537327 60537346 60537330 -
aatgttaaatcttaaatctc

SEQ ID NO: 191762 - DNA, 20 bp, Artificial Sequence
  Synthetic oligonucleotide; GAATGATT chr2 60537249 60537268 60537252 -
actgaacattggctactgaa

SEQ ID NO: 191763 - DNA, 20 bp, Artificial Sequence
  Synthetic oligonucleotide; TTATGTTT chr2 60537196 60537215 60537199 -
taaatcgtaaccttctcatg

SEQ ID NO: 191764 - DNA, 20 bp, Artificial Sequence
  Synthetic oligonucleotide; AGCAGCTT chr2 60537084 60537103 60537087 -
ccttttaactaaaacatttg

SEQ ID NO: 191765 - DNA, 20 bp, Artificial Sequence
  Synthetic oligonucleotide; AGTGGATT chr2 60536998 60537017 60537001 -
aaaatcttattctacataca

SEQ ID NO: 191766 - DNA, 20 bp, Artificial Sequence
  Synthetic oligonucleotide; GATTGCTT chr2 60536994 60537013 60536997 -
tcttattctacatacaagtg

SEQ ID NO: 191767 - DNA, 20 bp, Artificial Sequence
  Synthetic oligonucleotide; ACTTGTTT chr2 60536965 60536984 60536968 -
acaagtcagcacagacacgt

SEQ ID NO: 191768 - DNA, 20 bp, Artificial Sequence
  Synthetic oligonucleotide; TTGTGCTT chr2 60536882 60536901 60536885 -
attgttgttggacctgtctt

SEQ ID NO: 191769 - DNA, 20 bp, Artificial Sequence
  Synthetic oligonucleotide; ATCTGCTT chr2 60536845 60536864 60536848 -
ctgggtccccctcccctcct

SEQ ID NO: 191770 - DNA, 20 bp, Artificial Sequence
  Synthetic oligonucleotide; CAAGGCTT chr2 60536750 60536769 60536753 -
gtatttaaagaggaatatct

SEQ ID NO: 191771 - DNA, 20 bp, Artificial Sequence
  Synthetic oligonucleotide; ATGTGATT chr2 60536715 60536734 60536718 -
gcattccactttactttctg

SEQ ID NO: 191772 - DNA, 20 bp, Artificial Sequence
  Synthetic oligonucleotide; ATTGGTTT chr2 60536598 60536617 60536601 -
catttgctctgtagtgtagc

SEQ ID NO: 191773 - DNA, 20 bp, Artificial Sequence
  Synthetic oligonucleotide; TTTTGTTT chr2 60536584 60536603 60536587 -
tgtagcattggtttctaaac

SEQ ID NO: 191774 - DNA, 20 bp, Artificial Sequence
  Synthetic oligonucleotide; TTCTGATT chr2 60536567 60536586 60536570 -
aacttttgtttttaatctaa

SEQ ID NO: 191775 - DNA, 20 bp, Artificial Sequence
  Synthetic oligonucleotide; CTGAGATT chr2 60536334 60536353 60536337 -
aagaaatcagggggtagtac

SEQ ID NO: 191776 - DNA, 20 bp, Artificial Sequence
  Synthetic oligonucleotide; TTCCGATT chr2 60536312 60536331 60536315 -
gagatttttctcccttctct

SEQ ID NO: 191777 - DNA, 20 bp, Artificial Sequence
  Synthetic oligonucleotide; GAGAGCTT chr2 60536167 60536186 60536170 -
caaatgaaatccccacagca

SEQ ID NO: 191778 - DNA, 20 bp, Artificial Sequence
  Synthetic oligonucleotide; TCTTGCTT chr2 60536056 60536075 60536059 -
ataggacttaacatatactt

SEQ ID NO: 191779 - DNA, 20 bp, Artificial Sequence
  Synthetic oligonucleotide; AAAGGATT chr2 60535933 60535952 60535936 -
gtgtgagttagcattcaagc

SEQ ID NO: 191780 - DNA, 20 bp, Artificial Sequence
  Synthetic oligonucleotide; CATGGATT chr2 60535789 60535808 60535792 -
tgtctgcatgacccgttcac

SEQ ID NO: 191781 - DNA, 20 bp, Artificial Sequence
  Synthetic oligonucleotide; ACAGGATT chr2 60535731 60535750 60535734 -
agaaaggcaaatctcaagca

SEQ ID NO: 191782 - DNA, 20 bp, Artificial Sequence
  Synthetic oligonucleotide; CTGTGCTT chr2 60535682 60535701 60535685 -
agaccttgctcctctccctc

SEQ ID NO: 191783 - DNA, 20 bp, Artificial Sequence
  Synthetic oligonucleotide; GCTGGTTT chr2 60535664 60535683 60535667 -
tcctgtgcttctcctttctt

SEQ ID NO: 191784 - DNA, 20 bp, Artificial Sequence
  Synthetic oligonucleotide; AGCTGTTT chr2 60535604 60535623 60535607 -
ccactccaagccaatgaaaa

SEQ ID NO: 191785 - DNA, 20 bp, Artificial Sequence
  Synthetic oligonucleotide; GGATGTTT chr2 60535584 60535603 60535587 -
agctgtttttataccacagt

SEQ ID NO: 191786 - DNA, 20 bp, Artificial Sequence
  Synthetic oligonucleotide; AAAGGCTT chr2 60535550 60535569 60535553 -
gagagacaacttgaggggga

SEQ ID NO: 191787 - DNA, 20 bp, Artificial Sequence
  Synthetic oligonucleotide; GGCTGTTT chr2 60535468 60535487 60535471 -
attgcctatgagcgactctg

SEQ ID NO: 191788 - DNA, 20 bp, Artificial Sequence
  Synthetic oligonucleotide; CCATGTTT chr2 60535449 60535468 60535452 -
gggctgtttttgataaatta

SEQ ID NO: 191789 - DNA, 20 bp, Artificial Sequence
  Synthetic oligonucleotide; ATAGGTTT chr2 60535437 60535456 60535440 -
ataaattaccatgtttagag

SEQ ID NO: 191790 - DNA, 20 bp, Artificial Sequence
  Synthetic oligonucleotide; AAGGGCTT chr2 60535422 60535441 60535425 -
tagagataggtttggctctt

SEQ ID NO: 191791 - DNA, 20 bp, Artificial Sequence
  Synthetic oligonucleotide; CTTAGTTT chr2 60535417 60535436 60535420 -
ataggtttggctcttaaggg

SEQ ID NO: 191792 - DNA, 20 bp, Artificial Sequence
  Synthetic oligonucleotide; CGATGTTT chr2 60535391 60535410 60535394 -
tttatgaacaaagtccgtga

SEQ ID NO: 191793 - DNA, 20 bp, Artificial Sequence
  Synthetic oligonucleotide; CTCTGTTT chr2 60535378 60535397 60535381 -
tccgtgacgatgtttgcagc

SEQ ID NO: 191794 - DNA, 20 bp, Artificial Sequence
  Synthetic oligonucleotide; TTTGGCTT chr2 60535357 60535376 60535360 -
tctgtttgtatcttagcccc

SEQ ID NO: 191795 - DNA, 20 bp, Artificial Sequence
  Synthetic oligonucleotide; CTATGTTT chr2 60535338 60535357 60535341 -
ctttggcttgactagaagct

SEQ ID NO: 191796 - DNA, 20 bp, Artificial Sequence
  Synthetic oligonucleotide; TTTAGTTT chr2 60535333 60535352 60535336 -
gcttgactagaagctctatg

SEQ ID NO: 191797 - DNA, 20 bp, Artificial Sequence
  Synthetic oligonucleotide; CTTTGCTT chr2 60535259 60535278 60535262 -
aaatcataggaagaaaaacc

SEQ ID NO: 191798 - DNA, 20 bp, Artificial Sequence
  Synthetic oligonucleotide; AATTGCTT chr2 60535178 60535197 60535181 -
tctttaatcttcaaaggcta

SEQ ID NO: 191799 - DNA, 20 bp, Artificial Sequence
  Synthetic oligonucleotide; AATTGTTT chr2 60535086 60535105 60535089 -
aggtccttccagtaattgcg

SEQ ID NO: 191800 - DNA, 20 bp, Artificial Sequence
  Synthetic oligonucleotide; TTTTGATT chr2 60535073 60535092 60535076 -
aattgcgaattgttttgcat

SEQ ID NO: 191801 - DNA, 20 bp, Artificial Sequence
  Synthetic oligonucleotide; AATTGTTT chr2 60534992 60535011 60534995 -
aaggagaaaaaaaaggtgaa

SEQ ID NO: 191802 - DNA, 20 bp, Artificial Sequence
  Synthetic oligonucleotide; CCAAGATT chr2 60534978 60534997 60534981 -
ggtgaaaattgtttatagca

SEQ ID NO: 191803 - DNA, 20 bp, Artificial Sequence
  Synthetic oligonucleotide; CTTAGATT chr2 60534970 60534989 60534973 -
ttgtttatagcaccaagatt

SEQ ID NO: 191804 - DNA, 20 bp, Artificial Sequence
  Synthetic oligonucleotide; CAGTGTTT chr2 60534924 60534943 60534927 -
atgatgtaaaaaaattaaag

SEQ ID NO: 191805 - DNA, 20 bp, Artificial Sequence
  Synthetic oligonucleotide; TCAAGATT chr2 60534909 60534928 60534912 -
taaagcagtgttttttcttc

SEQ ID NO: 191806 - DNA, 20 bp, Artificial Sequence
  Synthetic oligonucleotide; AAGAGATT chr2 60534890 60534909 60534893 -
ctcaagattaaaagttcacc

SEQ ID NO: 191807 - DNA, 20 bp, Artificial Sequence
  Synthetic oligonucleotide; TCATGTTT chr2 60534801 60534820 60534804 -
ctgttgttaatcacttttga

SEQ ID NO: 191808 - DNA, 20 bp, Artificial Sequence
  Synthetic oligonucleotide; CCAAGTTT chr2 60534719 60534738 60534722 -
caaaatgatgcatcttcttg

SEQ ID NO: 191809 - DNA, 20 bp, Artificial Sequence
  Synthetic oligonucleotide; ATATGTTT chr2 60534666 60534685 60534669 -
gtctaaccttgagtaattac

SEQ ID NO: 191810 - DNA, 20 bp, Artificial Sequence
  Synthetic oligonucleotide; ATCCGTTT chr2 60534657 60534676 60534660 -
tgagtaattacatatgtttt

SEQ ID NO: 191811 - DNA, 20 bp, Artificial Sequence
  Synthetic oligonucleotide; TACAGTTT chr2 60534634 60534653 60534637 -
cgttttcttttaacgttaag

SEQ ID NO: 191812 - DNA, 20 bp, Artificial Sequence
  Synthetic oligonucleotide; ATATGATT chr2 60534569 60534588 60534572 -
gaagactgtaaaatttaagt

SEQ ID NO: 191813 - DNA, 20 bp, Artificial Sequence
  Synthetic oligonucleotide; GCCTGTTT chr2 60534527 60534546 60534530 -
tacatagagaaatatgtatt

SEQ ID NO: 191814 - DNA, 20 bp, Artificial Sequence
  Synthetic oligonucleotide; GGCAGTTT chr2 60534497 60534516 60534500 -
gttccccacgaacattgcag

SEQ ID NO: 191815 - DNA, 20 bp, Artificial Sequence
  Synthetic oligonucleotide; AGCAGTTT chr2 60534482 60534501 60534485 -
tgcagggcagttttattgtt

SEQ ID NO: 191816 - DNA, 20 bp, Artificial Sequence
  Synthetic oligonucleotide; CAATGCTT chr2 60534383 60534402 60534386 -
agaactacaaacctttctaa

SEQ ID NO: 191817 - DNA, 20 bp, Artificial Sequence
  Synthetic oligonucleotide; TTAGGTTT chr2 60534376 60534395 60534379 -
caaacctttctaacaatgct

SEQ ID NO: 191818 - DNA, 20 bp, Artificial Sequence
  Synthetic oligonucleotide; CTGGGTTT chr2 60534329 60534348 60534332 -
ggcacctaaaggacttgggc

SEQ ID NO: 191819 - DNA, 20 bp, Artificial Sequence
  Synthetic oligonucleotide; GTAAGTTT chr2 60534294 60534313 60534297 -
tcttttatcttttagatcaa

SEQ ID NO: 191820 - DNA, 20 bp, Artificial Sequence
  Synthetic oligonucleotide; AACGGTTT chr2 60534147 60534166 60534150 -
gtgaaaacaaggtgctaact

SEQ ID NO: 191821 - DNA, 20 bp, Artificial Sequence
  Synthetic oligonucleotide; TTCCGATT chr2 60534141 60534160 60534144 -
acaaggtgctaactaacggt

SEQ ID NO: 191822 - DNA, 20 bp, Artificial Sequence
  Synthetic oligonucleotide; CTGTGATT chr2 60534124 60534143 60534127 -
ggtttccgatttttgagagc

SEQ ID NO: 191823 - DNA, 20 bp, Artificial Sequence
  Synthetic oligonucleotide; TGGTGTTT chr2 60534115 60534134 60534118 -
tttttgagagcctgtgattt

SEQ ID NO: 191824 - DNA, 20 bp, Artificial Sequence
  Synthetic oligonucleotide; TTTGGTTT chr2 60534063 60534082 60534066 -
ctgtattattgatgttcatc

SEQ ID NO: 191825 - DNA, 20 bp, Artificial Sequence
  Synthetic oligonucleotide; ATGAGTTT chr2 60534055 60534074 60534058 -
ttgatgttcatctttggttt

SEQ ID NO: 191826 - DNA, 20 bp, Artificial Sequence
  Synthetic oligonucleotide; TTCTGATT chr2 60534006 60534025 60534009 -
tcagaacagtgtaactgata

SEQ ID NO: 191827 - DNA, 20 bp, Artificial Sequence
  Synthetic oligonucleotide; GAATGTTT chr2 60533993 60534012 60533996 -
actgatattctgattaaaac

SEQ ID NO: 191828 - DNA, 20 bp, Artificial Sequence
  Synthetic oligonucleotide; GCATGCTT chr2 60533866 60533885 60533869 -
ccatccataccatgctaaaa

SEQ ID NO: 191829 - DNA, 20 bp, Artificial Sequence
  Synthetic oligonucleotide; TTCAGTTT chr2 60533860 60533879 60533863 -
ataccatgctaaaagcatgc

SEQ ID NO: 191830 - DNA, 20 bp, Artificial Sequence
  Synthetic oligonucleotide; AGGGGCTT chr2 60533742 60533761 60533745 -
ggggtccatctgtgagatcc

SEQ ID NO: 191831 - DNA, 20 bp, Artificial Sequence
  Synthetic oligonucleotide; GAGCGATT chr2 60533718 60533737 60533721 -
gctttttatttgtgtgtgtc

SEQ ID NO: 191832 - DNA, 20 bp, Artificial Sequence
  Synthetic oligonucleotide; AATTGATT chr2 60533661 60533680 60533664 -
ctccggccaactgcatgcat

SEQ ID NO: 191833 - DNA, 20 bp, Artificial Sequence
  Synthetic oligonucleotide; AATTGCTT chr2 60533626 60533645 60533629 -
cactatcattttcttgatgt

SEQ ID NO: 191834 - DNA, 20 bp, Artificial Sequence
  Synthetic oligonucleotide; TGCTGCTT chr2 60533462 60533481 60533465 -
aagcaacactaacttatgca

SEQ ID NO: 191835 - DNA, 20 bp, Artificial Sequence
  Synthetic oligonucleotide; AGGAGTTT chr2 60533250 60533269 60533253 -
ccttattattcagtctatcc

SEQ ID NO: 191836 - DNA, 20 bp, Artificial Sequence
  Synthetic oligonucleotide; GTCGGTTT chr2 60533236 60533255 60533239 -
ctatccaggagttttgccat

SEQ ID NO: 191837 - DNA, 20 bp, Artificial Sequence
  Synthetic oligonucleotide; GAAAGATT chr2 60533180 60533199 60533183 -
cacagccctagaagcagcaa

SEQ ID NO: 191838 - DNA, 20 bp, Artificial Sequence
  Synthetic oligonucleotide; CTGTGCTT chr2 60533137 60533156 60533140 -
aaaacgtgagcatggaggag

SEQ ID NO: 191839 - DNA, 20 bp, Artificial Sequence
  Synthetic oligonucleotide; TTCTGCTT chr2 60533066 60533085 60533069 -
agtcaaaagtgactggaaac

SEQ ID NO: 191840 - DNA, 20 bp, Artificial Sequence
  Synthetic oligonucleotide; AATAGATT chr2 60533035 60533054 60533038 -
tggagtacaaatttcattct

SEQ ID NO: 191841 - DNA, 20 bp, Artificial Sequence
  Synthetic oligonucleotide; GGTAGATT chr2 60533006 60533025 60533009 -
gcataatctagtgtacccag

SEQ ID NO: 191842 - DNA, 20 bp, Artificial Sequence
  Synthetic oligonucleotide; TGTGGCTT chr2 60532863 60532882 60532866 -
cattagctccttcaaaatca

SEQ ID NO: 191843 - DNA, 20 bp, Artificial Sequence
  Synthetic oligonucleotide; CATTGTTT chr2 60532805 60532824 60532808 -
ggaatttacagatggtgaaa

SEQ ID NO: 191844 - DNA, 20 bp, Artificial Sequence
  Synthetic oligonucleotide; TAATGCTT chr2 60532783 60532802 60532786 -
ttgttttaatccaaaccagt

SEQ ID NO: 191845 - DNA, 20 bp, Artificial Sequence
  Synthetic oligonucleotide; TACTGTTT chr2 60532752 60532771 60532755 -
atctacctttaaaaaaattg

SEQ ID NO: 191846 - DNA, 20 bp, Artificial Sequence
  Synthetic oligonucleotide; AACTGTTT chr2 60532680 60532699 60532683 -
gaatccatctcactgtggca

SEQ ID NO: 191847 - DNA, 20 bp, Artificial Sequence
  Synthetic oligonucleotide; AATAGTTT chr2 60532357 60532376 60532360 -
taaaaaactggaaatgacag

SEQ ID NO: 191848 - DNA, 20 bp, Artificial Sequence
  Synthetic oligonucleotide; CTGTGATT chr2 60532177 60532196 60532180 -
tctcaaaatttgaagaactt

SEQ ID NO: 191849 - DNA, 20 bp, Artificial Sequence
  Synthetic oligonucleotide; ATTAGATT chr2 60532123 60532142 60532126 -
caaatttcttcctgatctta

SEQ ID NO: 191850 - DNA, 20 bp, Artificial Sequence
  Synthetic oligonucleotide; ATTCGATT chr2 60532118 60532137 60532121 -
ttcttcctgatcttaattag

SEQ ID NO: 191851 - DNA, 20 bp, Artificial Sequence
  Synthetic oligonucleotide; GTTGGATT chr2 60532097 60532116 60532100 -
ttcgattgtgcggtgggtgt

SEQ ID NO: 191852 - DNA, 20 bp, Artificial Sequence
  Synthetic oligonucleotide; GGCAGCTT chr2 60531991 60532010 60531994 -
ggcggtgtggcaggaacaaa

SEQ ID NO: 191853 - DNA, 20 bp, Artificial Sequence
  Synthetic oligonucleotide; GCAGGATT chr2 60531972 60531991 60531975 -
aggcagcttccaacgctggt

SEQ ID NO: 191854 - DNA, 20 bp, Artificial Sequence
  Synthetic oligonucleotide; GTGGGCTT chr2 60531911 60531930 60531914 -
gtcttgagttcttcatttag

SEQ ID NO: 191855 - DNA, 20 bp, Artificial Sequence
  Synthetic oligonucleotide; GGGGGATT chr2 60531887 60531906 60531890 -
gcttatttcccactgggtct

SEQ ID NO: 191856 - DNA, 20 bp, Artificial Sequence
  Synthetic oligonucleotide; TTGAGTTT chr2 60531662 60531681 60531665 -
ggcactgccaaaacacgctc

SEQ ID NO: 191857 - DNA, 20 bp, Artificial Sequence
  Synthetic oligonucleotide; GCAAGTTT chr2 60531614 60531633 60531617 -
gtcctgccaaagtgtatgga

SEQ ID NO: 191858 - DNA, 20 bp, Artificial Sequence
  Synthetic oligonucleotide; CAAGGCTT chr2 60531561 60531580 60531564 -
gaaataataaaagccctggc

SEQ ID NO: 191859 - DNA, 20 bp, Artificial Sequence
  Synthetic oligonucleotide; TTTTGTTT chr2 60531543 60531562 60531546 -
gccaaggcttatgaatctat

SEQ ID NO: 191860 - DNA, 20 bp, Artificial Sequence
  Synthetic oligonucleotide; GTGTGCTT chr2 60531429 60531448 60531432 -
ttccgtactggttgtaaaaa

SEQ ID NO: 191861 - DNA, 20 bp, Artificial Sequence
  Synthetic oligonucleotide; ATATGATT chr2 60531389 60531408 60531392 -
aagtcagggtaaattaatgg

SEQ ID NO: 191862 - DNA, 20 bp, Artificial Sequence
  Synthetic oligonucleotide; TCTGGTTT chr2 60531310 60531329 60531313 -
tcccagtatttaatttattt

SEQ ID NO: 191863 - DNA, 20 bp, Artificial Sequence
  Synthetic oligonucleotide; AAAAGATT chr2 60531281 60531300 60531284 -
gtgttagtgtgagagggtcg

SEQ ID NO: 191864 - DNA, 20 bp, Artificial Sequence
  Synthetic oligonucleotide; ACGGGATT chr2 60531262 60531281 60531265 -
gaaaagattctgtgggtcca

SEQ ID NO: 191865 - DNA, 20 bp, Artificial Sequence
  Synthetic oligonucleotide; AGGGGCTT chr2 60531139 60531158 60531142 -
taatttctgaggttgccagg

SEQ ID NO: 191866 - DNA, 20 bp, Artificial Sequence
  Synthetic oligonucleotide; ACTGGTTT chr2 60531001 60531020 60531004 -
cctggccatggtgtagccag

SEQ ID NO: 191867 - DNA, 20 bp, Artificial Sequence
  Synthetic oligonucleotide; GATAGATT chr2 60530981 60531000 60530984 -
actggtttagcagacagaat

SEQ ID NO: 191868 - DNA, 20 bp, Artificial Sequence
  Synthetic oligonucleotide; GATTGTTT chr2 60530977 60530996 60530980 -
gtttagcagacagaatgata

SEQ ID NO: 191869 - DNA, 20 bp, Artificial Sequence
  Synthetic oligonucleotide; CTTTGTTT chr2 60530932 60530951 60530935 -
tgcgccctgaacttgaagca

SEQ ID NO: 191870 - DNA, 20 bp, Artificial Sequence
  Synthetic oligonucleotide; TCTAGTTT chr2 60530885 60530904 60530888 -
aagcgcagacataatcgatg

SEQ ID NO: 191871 - DNA, 20 bp, Artificial Sequence
  Synthetic oligonucleotide; CCAGGCTT chr2 60530763 60530782 60530766 -
cagatgaacttggccgaggg

SEQ ID NO: 191872 - DNA, 20 bp, Artificial Sequence
  Synthetic oligonucleotide; CAGTGTTT chr2 60530713 60530732 60530716 -
ccagtgcagccaagcctttt

SEQ ID NO: 191873 - DNA, 20 bp, Artificial Sequence
  Synthetic oligonucleotide; CCTGGCTT chr2 60530517 60530536 60530520 -
atgcgggttctatcatcttt

SEQ ID NO: 191874 - DNA, 20 bp, Artificial Sequence
  Synthetic oligonucleotide; AAGGGTTT chr2 60530457 60530476 60530460 -
taacccgagggccagatggg

SEQ ID NO: 191875 - DNA, 20 bp, Artificial Sequence
  Synthetic oligonucleotide; TGAAGTTT chr2 60530326 60530345 60530329 -
tttttttttttttaaatggc

SEQ ID NO: 191876 - DNA, 20 bp, Artificial Sequence
  Synthetic oligonucleotide; ATGTGTTT chr2 60530157 60530176 60530160 -
ccaggaccgatggcaaaccc

SEQ ID NO: 191877 - DNA, 20 bp, Artificial Sequence
  Synthetic oligonucleotide; TTGGGCTT chr2 60530151 60530170 60530154 -
ccgatggcaaacccatgtgt

SEQ ID NO: 191878 - DNA, 20 bp, Artificial Sequence
  Synthetic oligonucleotide; GCTTGTTT chr2 60530147 60530166 60530150 -
tggcaaacccatgtgtttgg

SEQ ID NO: 191879 - DNA, 20 bp, Artificial Sequence
  Synthetic oligonucleotide; TCTCGATT chr2 60530136 60530155 60530139 -
tgtgtttgggcttgttttgt

SEQ ID NO: 191880 - DNA, 20 bp, Artificial Sequence
  Synthetic oligonucleotide; CTGTGTTT chr2 60530106 60530125 60530109 -
cttatcttcttggcctcttc

SEQ ID NO: 191881 - DNA, 20 bp, Artificial Sequence
  Synthetic oligonucleotide; TTTAGTTT chr2 60530098 60530117 60530101 -
cttggcctcttcctgtgttt

SEQ ID NO: 191882 - DNA, 20 bp, Artificial Sequence
  Synthetic oligonucleotide; CAGGGCTT chr2 60529864 60529883 60529867 -
gaatcccacctaggggacac

SEQ ID NO: 191883 - DNA, 20 bp, Artificial Sequence
  Synthetic oligonucleotide; AGTGGTTT chr2 60529853 60529872 60529856 -
aggggacaccagggctttca

SEQ ID NO: 191884 - DNA, 20 bp, Artificial Sequence
  Synthetic oligonucleotide; GCAGGATT chr2 60529708 60529727 60529711 -
ggctaggcctcataagggag

SEQ ID NO: 191885 - DNA, 20 bp, Artificial Sequence
  Synthetic oligonucleotide; CTGGGTTT chr2 60529650 60529669 60529653 -
ctgggaaaatttgggggcct

SEQ ID NO: 191886 - DNA, 20 bp, Artificial Sequence
  Synthetic oligonucleotide; CTTTGATT chr2 60529468 60529487 60529471 -
cttctttcttttcttcttct

SEQ ID NO: 191887 - DNA, 20 bp, Artificial Sequence
  Synthetic oligonucleotide; AATGGTTT chr2 60529449 60529468 60529452 -
tctttgattacacgaaataa

SEQ ID NO: 191888 - DNA, 20 bp, Artificial Sequence
  Synthetic oligonucleotide; GGCAGATT chr2 60529395 60529414 60529398 -
tttctagttgtgcaaccttg

SEQ ID NO: 191889 - DNA, 20 bp, Artificial Sequence
  Synthetic oligonucleotide; CTCCGCTT chr2 60529374 60529393 60529377 -
gcagatttcattccctaagc

SEQ ID NO: 191890 - DNA, 20 bp, Artificial Sequence
  Synthetic oligonucleotide; CGGGGCTT chr2 60529339 60529358 60529342 -
ctgtaaagtggggagaatca

SEQ ID NO: 191891 - DNA, 20 bp, Artificial Sequence
  Synthetic oligonucleotide; CATGGCTT chr2 60529221 60529240 60529224 -
ttactattacggttatgact

SEQ ID NO: 191892 - DNA, 20 bp, Artificial Sequence
  Synthetic oligonucleotide; TTATGTTT chr2 60529105 60529124 60529108 -
ctaaagagctcagggtctca

SEQ ID NO: 191893 - DNA, 20 bp, Artificial Sequence
  Synthetic oligonucleotide; AGAGGCTT chr2 60529036 60529055 60529039 -
tagacgtgtgttgccttacg

SEQ ID NO: 191894 - DNA, 20 bp, Artificial Sequence
  Synthetic oligonucleotide; TTCAGATT chr2 60528993 60529012 60528996 -
tgtgacacagttactctggg

SEQ ID NO: 191895 - DNA, 20 bp, Artificial Sequence
  Synthetic oligonucleotide; GTACGTTT chr2 60528632 60528651 60528635 -
caccctctgctacctcttca

SEQ ID NO: 191896 - DNA, 20 bp, Artificial Sequence
  Synthetic oligonucleotide; TGCAGCTT chr2 60528625 60528644 60528628 -
tgctacctcttcagtacgtt

SEQ ID NO: 191897 - DNA, 20 bp, Artificial Sequence
  Synthetic oligonucleotide; TCAAGTTT chr2 60528542 60528561 60528545 -
ccctcccatgggttctgtgg

SEQ ID NO: 191898 - DNA, 20 bp, Artificial Sequence
  Synthetic oligonucleotide; TCCTGCTT chr2 60528441 60528460 60528444 -
aaaagttgcaatgtaaggaa

SEQ ID NO: 191899 - DNA, 20 bp, Artificial Sequence
  Synthetic oligonucleotide; GGAGGTTT chr2 60528362 60528381 60528365 -
ggtcctgagaaacagaggga

SEQ ID NO: 191900 - DNA, 20 bp, Artificial Sequence
  Synthetic oligonucleotide; TACTGTTT chr2 60528354 60528373 60528357 -
gaaacagagggaggaggttt

SEQ ID NO: 191901 - DNA, 20 bp, Artificial Sequence
  Synthetic oligonucleotide; TGTGGCTT chr2 60528343 60528362 60528346 -
aggaggttttactgtttgtg

SEQ ID NO: 191902 - DNA, 20 bp, Artificial Sequence
  Synthetic oligonucleotide; TGAGGCTT chr2 60528278 60528297 60528281 -
ctcggacttttaagaagtgg

SEQ ID NO: 191903 - DNA, 20 bp, Artificial Sequence
  Synthetic oligonucleotide; TGGTGTTT chr2 60528145 60528164 60528148 -
tgagtgagtgtgcgtggcag

SEQ ID NO: 191904 - DNA, 20 bp, Artificial Sequence
  Synthetic oligonucleotide; ATCTGCTT chr2 60528108 60528127 60528111 -
atgggttctggggggtcata

SEQ ID NO: 191905 - DNA, 20 bp, Artificial Sequence
  Synthetic oligonucleotide; GGAGGTTT chr2 60528097 60528116 60528100 -
ggggtcataatctgcttcga

SEQ ID NO: 191906 - DNA, 20 bp, Artificial Sequence
  Synthetic oligonucleotide; GGAAGTTT chr2 60528028 60528047 60528031 -
aggcatgctggaaacttgag

SEQ ID NO: 191907 - DNA, 20 bp, Artificial Sequence
  Synthetic oligonucleotide; TGTGGCTT chr2 60527981 60528000 60527984 -
acagctccatatgatccgca

SEQ ID NO: 191908 - DNA, 20 bp, Artificial Sequence
  Synthetic oligonucleotide; GCAAGTTT chr2 60527965 60527984 60527968 -
cgcatgtggcttccccagag

SEQ ID NO: 191909 - DNA, 20 bp, Artificial Sequence
  Synthetic oligonucleotide; GATGGATT chr2 60527869 60527888 60527872 -
aagacctgaggttcgttgca

SEQ ID NO: 191910 - DNA, 20 bp, Artificial Sequence
  Synthetic oligonucleotide; TACTGTTT chr2 60527835 60527854 60527838 -
tgtattccaaaaccaaatgt

SEQ ID NO: 191911 - DNA, 20 bp, Artificial Sequence
  Synthetic oligonucleotide; CTGAGTTT chr2 60527577 60527596 60527580 -
ggtcacatccaggttgtctt

SEQ ID NO: 191912 - DNA, 20 bp, Artificial Sequence
  Synthetic oligonucleotide; CAAAGCTT chr2 60527521 60527540 60527524 -
tccatgtgggtcaagagctc

SEQ ID NO: 191913 - DNA, 20 bp, Artificial Sequence
  Synthetic oligonucleotide; CTTAGTTT chr2 60527355 60527374 60527358 -
gtcaccctggaagagaagct

SEQ ID NO: 191914 - DNA, 20 bp, Artificial Sequence
  Synthetic oligonucleotide; CATGGCTT chr2 60527292 60527311 60527295 -
tgaaatgataaaaggcgtat

SEQ ID NO: 191915 - DNA, 20 bp, Artificial Sequence
  Synthetic oligonucleotide; CCTAGTTT chr2 60527252 60527271 60527255 -
tatttccctcgctcgcaccc

SEQ ID NO: 191916 - DNA, 20 bp, Artificial Sequence
  Synthetic oligonucleotide; TTTTGTTT chr2 60527189 60527208 60527192 -
ccacatctctgatgatggcc

SEQ ID NO: 191917 - DNA, 20 bp, Artificial Sequence
  Synthetic oligonucleotide; TTCTGTTT chr2 60527171 60527190 60527174 -
ccttttgtttctttttcttt

SEQ ID NO: 191918 - DNA, 20 bp, Artificial Sequence
  Synthetic oligonucleotide; ACCTGATT chr2 60526956 60526975 60526959 -
cgggtagtatttctacttca

SEQ ID NO: 191919 - DNA, 20 bp, Artificial Sequence
  Synthetic oligonucleotide; CCCCGCTT chr2 60526880 60526899 60526883 -
gttcctggtgctaagtagtt

SEQ ID NO: 191920 - DNA, 20 bp, Artificial Sequence
  Synthetic oligonucleotide; CAGAGATT chr2 60526854 60526873 60526857 -
ttaagaatgcgttggctggg

SEQ ID NO: 191921 - DNA, 20 bp, Artificial Sequence
  Synthetic oligonucleotide; ATTTGTTT chr2 60526790 60526809 60526793 -
gcattataggtcagcccttt

SEQ ID NO: 191922 - DNA, 20 bp, Artificial Sequence
  Synthetic oligonucleotide; GGCTGCTT chr2 60526747 60526766 60526750 -
acagttgtcatgtaatttat

SEQ ID NO: 191923 - DNA, 20 bp, Artificial Sequence
  Synthetic oligonucleotide; GAAGGCTT chr2 60526671 60526690 60526674 -
gacatagacacactgcactt

SEQ ID NO: 191924 - DNA, 20 bp, Artificial Sequence
  Synthetic oligonucleotide; TATTGTTT chr2 60526661 60526680 60526664 -
cactgcacttgaaggcttgg

SEQ ID NO: 191925 - DNA, 20 bp, Artificial Sequence
  Synthetic oligonucleotide; TGCAGATT chr2 60526589 60526608 60526592 -
ttgggctaatctaaatgcgc

SEQ ID NO: 191926 - DNA, 20 bp, Artificial Sequence
  Synthetic oligonucleotide; TGCTGCTT chr2 60526384 60526403 60526387 -
aatggtaaaggataaacata

SEQ ID NO: 191927 - DNA, 20 bp, Artificial Sequence
  Synthetic oligonucleotide; CTTTGTTT chr2 60526379 60526398 60526382 -
taaaggataaacatatgctg

SEQ ID NO: 191928 - DNA, 20 bp, Artificial Sequence
  Synthetic oligonucleotide; TATTGATT chr2 60526359 60526378 60526362 -
ctttgtttgtcttatttatt

SEQ ID NO: 191929 - DNA, 20 bp, Artificial Sequence
  Synthetic oligonucleotide; AATAGCTT chr2 60526244 60526263 60526247 -
agagcaaaatatagccaacc

SEQ ID NO: 191930 - DNA, 20 bp, Artificial Sequence
  Synthetic oligonucleotide; ATGGGATT chr2 60526210 60526229 60526213 -
agaacacatcatcccaaaat

SEQ ID NO: 191931 - DNA, 20 bp, Artificial Sequence
  Synthetic oligonucleotide; ACCAGTTT chr2 60526185 60526204 60526188 -
attctgaatttgatcaaatc

SEQ ID NO: 191932 - DNA, 20 bp, Artificial Sequence
  Synthetic oligonucleotide; TCTAGATT chr2 60526162 60526181 60526165 -
agtttctgaatttgatcaaa

SEQ ID NO: 191933 - DNA, 20 bp, Artificial Sequence
  Synthetic oligonucleotide; GCCTGTTT chr2 60526125 60526144 60526128 -
ttcagggtgagagaaaccat

SEQ ID NO: 191934 - DNA, 20 bp, Artificial Sequence
  Synthetic oligonucleotide; TTTTGATT chr2 60525957 60525976 60525960 -
agagcattatgataaactat

SEQ ID NO: 191935 - DNA, 20 bp, Artificial Sequence
  Synthetic oligonucleotide; ACTGGTTT chr2 60525851 60525870 60525854 -
gccatggagaaattaccaag

SEQ ID NO: 191936 - DNA, 20 bp, Artificial Sequence
  Synthetic oligonucleotide; TACAGATT chr2 60525812 60525831 60525815 -
atttaaggtcttttgggcat

SEQ ID NO: 191937 - DNA, 20 bp, Artificial Sequence
  Synthetic oligonucleotide; GTGAGATT chr2 60525712 60525731 60525715 -
gacccttattgtatcatgct

SEQ ID NO: 191938 - DNA, 20 bp, Artificial Sequence
  Synthetic oligonucleotide; ATTTGTTT chr2 60525681 60525700 60525684 -
ggctcccttcacctgttagc

SEQ ID NO: 191939 - DNA, 20 bp, Artificial Sequence
  Synthetic oligonucleotide; GATAGTTT chr2 60525647 60525666 60525650 -
cttgtaaagtaggtaaaata

SEQ ID NO: 191940 - DNA, 20 bp, Artificial Sequence
  Synthetic oligonucleotide; ACCAGTTT chr2 60525583 60525602 60525586 -
gcatagtatgaacaccactg

SEQ ID NO: 191941 - DNA, 20 bp, Artificial Sequence
  Synthetic oligonucleotide; TCTTGATT chr2 60525506 60525525 60525509 -
aagacagcagaatattattt

SEQ ID NO: 191942 - DNA, 20 bp, Artificial Sequence
  Synthetic oligonucleotide; TGGAGATT chr2 60525475 60525494 60525478 -
ctcaaagatggaagctatgg

SEQ ID NO: 191943 - DNA, 20 bp, Artificial Sequence
  Synthetic oligonucleotide; TAAGGCTT chr2 60525468 60525487 60525471 -
atggaagctatggtggagat

SEQ ID NO: 191944 - DNA, 20 bp, Artificial Sequence
  Synthetic oligonucleotide; CTTGGATT chr2 60525463 60525482 60525466 -
agctatggtggagattaagg

SEQ ID NO: 191945 - DNA, 20 bp, Artificial Sequence
  Synthetic oligonucleotide; TCGTGATT chr2 60525456 60525475 60525459 -
gtggagattaaggcttggat

SEQ ID NO: 191946 - DNA, 20 bp, Artificial Sequence
  Synthetic oligonucleotide; GAAAGCTT chr2 60525440 60525459 60525443 -
ggattcgtgattccccaaca

SEQ ID NO: 191947 - DNA, 20 bp, Artificial Sequence
  Synthetic oligonucleotide; AGAAGTTT chr2 60525366 60525385 60525369 -
atggaatggtgataattcac

SEQ ID NO: 191948 - DNA, 20 bp, Artificial Sequence
  Synthetic oligonucleotide; ATAAGATT chr2 60525350 60525369 60525353 -
tcacagaagtttccagcctt

SEQ ID NO: 191949 - DNA, 20 bp, Artificial Sequence
  Synthetic oligonucleotide; AGCTGTTT chr2 60525320 60525339 60525323 -
tccatcttttaattgttgca

SEQ ID NO: 191950 - DNA, 20 bp, Artificial Sequence
  Synthetic oligonucleotide; CCAAGTTT chr2 60525274 60525293 60525277 -
gaatgtaatgtgtattttct

SEQ ID NO: 191951 - DNA, 20 bp, Artificial Sequence
  Synthetic oligonucleotide; GTTTGCTT chr2 60525270 60525289 60525273 -
gtaatgtgtattttctccaa

SEQ ID NO: 191952 - DNA, 20 bp, Artificial Sequence
  Synthetic oligonucleotide; GTACGTTT chr2 60525230 60525249 60525233 -
gtaactacatcaaaatagaa

SEQ ID NO: 191953 - DNA, 20 bp, Artificial Sequence
  Synthetic oligonucleotide; GCTGGTTT chr2 60525127 60525146 60525130 -
cctccttcctcctcccaaaa

SEQ ID NO: 191954 - DNA, 20 bp, Artificial Sequence
  Synthetic oligonucleotide; TTTTGCTT chr2 60525071 60525090 60525074 -
gagtccctggagttaggaat

SEQ ID NO: 191955 - DNA, 20 bp, Artificial Sequence
  Synthetic oligonucleotide; ACATGTTT chr2 60525044 60525063 60525047 -
tgttaaaggcatccgatgca

SEQ ID NO: 191956 - DNA, 20 bp, Artificial Sequence
  Synthetic oligonucleotide; TGGTGTTT chr2 60524903 60524922 60524906 -
tgcaatccattttttaaact

SEQ ID NO: 191957 - DNA, 20 bp, Artificial Sequence
  Synthetic oligonucleotide; ATTGGCTT chr2 60524892 60524911 60524895 -
ttttaaacttggtgtttacc

SEQ ID NO: 191958 - DNA, 20 bp, Artificial Sequence
  Synthetic oligonucleotide; GGATGTTT chr2 60524877 60524896 60524880 -
ttaccattggcttttagcac

SEQ ID NO: 191959 - DNA, 20 bp, Artificial Sequence
  Synthetic oligonucleotide; TTCTGTTT chr2 60524871 60524890 60524874 -
ttggcttttagcacggatgt

SEQ ID NO: 191960 - DNA, 20 bp, Artificial Sequence
  Synthetic oligonucleotide; AAATGTTT chr2 60524813 60524832 60524816 -
gtggcattgaatgagatatg

SEQ ID NO: 191961 - DNA, 20 bp, Artificial Sequence
  Synthetic oligonucleotide; TATAGCTT chr2 60524653 60524672 60524656 -
acacaggcactcttgagatc

SEQ ID NO: 191962 - DNA, 20 bp, Artificial Sequence
  Synthetic oligonucleotide; TAATGTTT chr2 60524602 60524621 60524605 -
attactgcctctttaattta

SEQ ID NO: 191963 - DNA, 20 bp, Artificial Sequence
  Synthetic oligonucleotide; TGGGGATT chr2 60524594 60524613 60524597 -
ctctttaatttataatgttt

SEQ ID NO: 191964 - DNA, 20 bp, Artificial Sequence
  Synthetic oligonucleotide; AGCTGTTT chr2 60524551 60524570 60524554 -
ctgtaagggcactggtaatc

SEQ ID NO: 191965 - DNA, 20 bp, Artificial Sequence
  Synthetic oligonucleotide; TTCTGATT chr2 60524545 60524564 60524548 -
gggcactggtaatcagctgt

SEQ ID NO: 191966 - DNA, 20 bp, Artificial Sequence
  Synthetic oligonucleotide; TAAAGTTT chr2 60524451 60524470 60524454 -
aaaaacaaaaacaaggaaca

SEQ ID NO: 191967 - DNA, 20 bp, Artificial Sequence
  Synthetic oligonucleotide; TGAAGTTT chr2 60524298 60524317 60524301 -
caaaattatgtattcagaca

SEQ ID NO: 191968 - DNA, 20 bp, Artificial Sequence
  Synthetic oligonucleotide; TTAGGATT chr2 60524292 60524311 60524295 -
tatgtattcagacatgaagt

SEQ ID NO: 191969 - DNA, 20 bp, Artificial Sequence
  Synthetic oligonucleotide; TATAGATT chr2 60524140 60524159 60524143 -
agctgtgtcacaatgtgata

SEQ ID NO: 191970 - DNA, 20 bp, Artificial Sequence
  Synthetic oligonucleotide; TTTTGTTT chr2 60524115 60524134 60524118 -
attatatttaccatggcata

SEQ ID NO: 191971 - DNA, 20 bp, Artificial Sequence
  Synthetic oligonucleotide; TCCAGTTT chr2 60524073 60524092 60524076 -
gatgataaatgaagataccc

SEQ ID NO: 191972 - DNA, 20 bp, Artificial Sequence
  Synthetic oligonucleotide; CAAAGTTT chr2 60523979 60523998 60523982 -
tatgggaacataattgactt

SEQ ID NO: 191973 - DNA, 20 bp, Artificial Sequence
  Synthetic oligonucleotide; TGAAGTTT chr2 60523959 60523978 60523962 -
caaagttttagatctctggc

SEQ ID NO: 191974 - DNA, 20 bp, Artificial Sequence
  Synthetic oligonucleotide; CTGTGCTT chr2 60523923 60523942 60523926 -
atagtccattacattaatgt

SEQ ID NO: 191975 - DNA, 20 bp, Artificial Sequence
  Synthetic oligonucleotide; TTTGGCTT chr2 60523905 60523924 60523908 -
gtctgtgcttaaagctccta

SEQ ID NO: 191976 - DNA, 20 bp, Artificial Sequence
  Synthetic oligonucleotide; TAGGGTTT chr2 60523885 60523904 60523888 -
tttggcttaaataaattatt

SEQ ID NO: 191977 - DNA, 20 bp, Artificial Sequence
  Synthetic oligonucleotide; TACTGCTT chr2 60523878 60523897 60523881 -
taaataaattatttagggtt

SEQ ID NO: 191978 - DNA, 20 bp, Artificial Sequence
  Synthetic oligonucleotide; GAACGTTT chr2 60523852 60523871 60523855 -
ttaaaccttggtcaattctt

SEQ ID NO: 191979 - DNA, 20 bp, Artificial Sequence
  Synthetic oligonucleotide; TGGTGATT chr2 60523806 60523825 60523809 -
tccagtgactttctgtgcct

SEQ ID NO: 191980 - DNA, 20 bp, Artificial Sequence
  Synthetic oligonucleotide; ACTTGATT chr2 60523793 60523812 60523796 -
tgtgccttggtgattcattt

SEQ ID NO: 191981 - DNA, 20 bp, Artificial Sequence
  Synthetic oligonucleotide; GTATGATT chr2 60523769 60523788 60523772 -
gattgagctcctgtgtgctc

SEQ ID NO: 191982 - DNA, 20 bp, Artificial Sequence
  Synthetic oligonucleotide; TCAAGTTT chr2 60523747 60523766 60523750 -
atgatttctaaatgtatttc

SEQ ID NO: 191983 - DNA, 20 bp, Artificial Sequence
  Synthetic oligonucleotide; GAATGATT chr2 60523728 60523747 60523731 -
ctcaagttttgcctggcaat

SEQ ID NO: 191984 - DNA, 20 bp, Artificial Sequence
  Synthetic oligonucleotide; TTTTGCTT chr2 60523722 60523741 60523725 -
ttttgcctggcaatgaatga

SEQ ID NO: 191985 - DNA, 20 bp, Artificial Sequence
  Synthetic oligonucleotide; AAAGGCTT chr2 60523687 60523706 60523690 -
tcttgtgtggtacacctata

SEQ ID NO: 191986 - DNA, 20 bp, Artificial Sequence
  Synthetic oligonucleotide; CCATGATT chr2 60523466 60523485 60523469 -
aggaaagtctttagaattca

SEQ ID NO: 191987 - DNA, 20 bp, Artificial Sequence
  Synthetic oligonucleotide; AGAAGTTT chr2 60523443 60523462 60523446 -
tgattccatcaaatcaatat

SEQ ID NO: 191988 - DNA, 20 bp, Artificial Sequence
  Synthetic oligonucleotide; GCTGGATT chr2 60523339 60523358 60523342 -
aagtctgttgttcacatagc

SEQ ID NO: 191989 - DNA, 20 bp, Artificial Sequence
  Synthetic oligonucleotide; TGGTGTTT chr2 60523239 60523258 60523242 -
ctcccctgagttgagaagac

SEQ ID NO: 191990 - DNA, 20 bp, Artificial Sequence
  Synthetic oligonucleotide; ACAAGCTT chr2 60523064 60523083 60523067 -
cctgaaagatattaagtcca

SEQ ID NO: 191991 - DNA, 20 bp, Artificial Sequence
  Synthetic oligonucleotide; TTTTGTTT chr2 60523019 60523038 60523022 -
agagaaaacggccaggcaat

SEQ ID NO: 191992 - DNA, 20 bp, Artificial Sequence
  Synthetic oligonucleotide; ATAGGTTT chr2 60522967 60522986 60522970 -
ctagttccagaggctgatca

SEQ ID NO: 191993 - DNA, 20 bp, Artificial Sequence
  Synthetic oligonucleotide; ACCTGCTT chr2 60522729 60522748 60522732 -
gttctgaacactgggagtgc

SEQ ID NO: 191994 - DNA, 20 bp, Artificial Sequence
  Synthetic oligonucleotide; AGGAGCTT chr2 60522584 60522603 60522587 -
ggcaaaggactgcaaggggc

SEQ ID NO: 191995 - DNA, 20 bp, Artificial Sequence
  Synthetic oligonucleotide; GGTGGCTT chr2 60522562 60522581 60522565 -
gagcttgggctgacatgcaa

SEQ ID NO: 191996 - DNA, 20 bp, Artificial Sequence
  Synthetic oligonucleotide; GTGTGATT chr2 60522532 60522551 60522535 -
cacaaggccctttttagaga

SEQ ID NO: 191997 - DNA, 20 bp, Artificial Sequence
  Synthetic oligonucleotide; TGAAGCTT chr2 60522521 60522540 60522524 -
ttttagagagtgtgattctc

SEQ ID NO: 191998 - DNA, 20 bp, Artificial Sequence
  Synthetic oligonucleotide; GGCAGCTT chr2 60522508 60522527 60522511 -
gattctctgaagcttttctt

SEQ ID NO: 191999 - DNA, 20 bp, Artificial Sequence
  Synthetic oligonucleotide; CTGAGTTT chr2 60522439 60522458 60522442 -
ccagatggaaagaagtattt

SEQ ID NO: 192000 - DNA, 20 bp, Artificial Sequence
  Synthetic oligonucleotide; AATGGTTT chr2 60522367 60522386 60522370 -
ttattatttttaggtgtgat

SEQ ID NO: 192001 - DNA, 20 bp, Artificial Sequence
  Synthetic oligonucleotide; CTATGTTT chr2 60522326 60522345 60522329 -
aaaagaaaaaaaacgagttc

SEQ ID NO: 192002 - DNA, 20 bp, Artificial Sequence
  Synthetic oligonucleotide; AGGTGTTT chr2 60522303 60522322 60522306 -
tgtttaaaaaatacatacag

SEQ ID NO: 192003 - DNA, 20 bp, Artificial Sequence
  Synthetic oligonucleotide; GACTGATT chr2 60522168 60522187 60522171 -
ctggaagatgtggacttggg

SEQ ID NO: 192004 - DNA, 20 bp, Artificial Sequence
  Synthetic oligonucleotide; TTGAGATT chr2 60522132 60522151 60522135 -
tctctctacttttgtagtat

SEQ ID NO: 192005 - DNA, 20 bp, Artificial Sequence
  Synthetic oligonucleotide; CCTTGTTT chr2 60522078 60522097 60522081 -
actggtggagagcagtatgg

SEQ ID NO: 192006 - DNA, 20 bp, Artificial Sequence
  Synthetic oligonucleotide; TGTTGTTT chr2 60522064 60522083 60522067 -
gtatggccttgtttagtcgg

SEQ ID NO: 192007 - DNA, 20 bp, Artificial Sequence
  Synthetic oligonucleotide; AAGGGTTT chr2 60522049 60522068 60522052 -
gtcggtgttgtttcttcacc

SEQ ID NO: 192008 - DNA, 20 bp, Artificial Sequence
  Synthetic oligonucleotide; TGGCGTTT chr2 60521858 60521877 60521861 -
gcatgaggcagagtcagatg

SEQ ID NO: 192009 - DNA, 20 bp, Artificial Sequence
  Synthetic oligonucleotide; GTTTGCTT chr2 60521854 60521873 60521857 -
gaggcagagtcagatgtggc

SEQ ID NO: 192010 - DNA, 20 bp, Artificial Sequence
  Synthetic oligonucleotide; TTGAGTTT chr2 60521848 60521867 60521851 -
gagtcagatgtggcgtttgc

SEQ ID NO: 192011 - DNA, 20 bp, Artificial Sequence
  Synthetic oligonucleotide; CAAGGCTT chr2 60521756 60521775 60521759 -
ggctggtagtgttatgaaga

SEQ ID NO: 192012 - DNA, 20 bp, Artificial Sequence
  Synthetic oligonucleotide; AGATGATT chr2 60521706 60521725 60521709 -
gagccctggctattagagaa

SEQ ID NO: 192013 - DNA, 20 bp, Artificial Sequence
  Synthetic oligonucleotide; AGGAGATT chr2 60521690 60521709 60521693 -
agaaagatgatttgcctgag

SEQ ID NO: 192014 - DNA, 20 bp, Artificial Sequence
  Synthetic oligonucleotide; GTGGGCTT chr2 60521487 60521506 60521490 -
acttgaaagctaggtcactg

SEQ ID NO: 192015 - DNA, 20 bp, Artificial Sequence
  Synthetic oligonucleotide; TCTGGTTT chr2 60521352 60521371 60521355 -
caggcccaggcccgggtccc

SEQ ID NO: 192016 - DNA, 20 bp, Artificial Sequence
  Synthetic oligonucleotide; TCTCGCTT chr2 60521326 60521345 60521329 -
tttacaaaatgtccgctctc

SEQ ID NO: 192017 - DNA, 20 bp, Artificial Sequence
  Synthetic oligonucleotide; TGGCGCTT chr2 60521273 60521292 60521276 -
gtcactcagttatctgagag

SEQ ID NO: 192018 - DNA, 20 bp, Artificial Sequence
  Synthetic oligonucleotide; TTGGGTTT chr2 60521239 60521258 60521242 -
gccatctaagtgcctgatac

SEQ ID NO: 192019 - DNA, 20 bp, Artificial Sequence
  Synthetic oligonucleotide; AGCAGATT chr2 60521229 60521248 60521232 -
tgcctgatacttgggtttac

SEQ ID NO: 192020 - DNA, 20 bp, Artificial Sequence
  Synthetic oligonucleotide; GCTGGTTT chr2 60521207 60521226 60521210 -
cagattaaattaaattttag

SEQ ID NO: 192021 - DNA, 20 bp, Artificial Sequence
  Synthetic oligonucleotide; TTTGGCTT chr2 60521202 60521221 60521205 -
taaattaaattttaggctgg

SEQ ID NO: 192022 - DNA, 20 bp, Artificial Sequence
  Synthetic oligonucleotide; CAAGGATT chr2 60521140 60521159 60521143 -
gaaatgtaacctggcaccct

SEQ ID NO: 192023 - DNA, 20 bp, Artificial Sequence
  Synthetic oligonucleotide; AAGTGTTT chr2 60521012 60521031 60521015 -
ccatttcatccctttccaaa

SEQ ID NO: 192024 - DNA, 20 bp, Artificial Sequence
  Synthetic oligonucleotide; AATAGTTT chr2 60520999 60521018 60521002 -
ttccaaaaagtgtttagaca

SEQ ID NO: 192025 - DNA, 20 bp, Artificial Sequence
  Synthetic oligonucleotide; CTTGGTTT chr2 60520985 60521004 60520988 -
tagacaaatagtttcccaga

SEQ ID NO: 192026 - DNA, 20 bp, Artificial Sequence
  Synthetic oligonucleotide; CTAAGCTT chr2 60520878 60520897 60520881 -
ttttttctgcaaagaagggg

SEQ ID NO: 192027 - DNA, 20 bp, Artificial Sequence
  Synthetic oligonucleotide; GGTGGTTT chr2 60520830 60520849 60520833 -
acccactggagaagggcatg

SEQ ID NO: 192028 - DNA, 20 bp, Artificial Sequence
  Synthetic oligonucleotide; TTCAGATT chr2 60520765 60520784 60520768 -
gcagaatgtctggctgcccc

SEQ ID NO: 192029 - DNA, 20 bp, Artificial Sequence
  Synthetic oligonucleotide; TGTAGATT chr2 60520755 60520774 60520758 -
tggctgccccttcagattcc

SEQ ID NO: 192030 - DNA, 20 bp, Artificial Sequence
  Synthetic oligonucleotide; TGGTGCTT chr2 60520675 60520694 60520678 -
gcaaatatcttcactctcct

SEQ ID NO: 192031 - DNA, 20 bp, Artificial Sequence
  Synthetic oligonucleotide; AACAGTTT chr2 60520610 60520629 60520613 -
atagtgttgagtcagagcaa

SEQ ID NO: 192032 - DNA, 20 bp, Artificial Sequence
  Synthetic oligonucleotide; TCTAGATT chr2 60520467 60520486 60520470 -
gatgctctttacttttataa

SEQ ID NO: 192033 - DNA, 20 bp, Artificial Sequence
  Synthetic oligonucleotide; ACTTGATT chr2 60520442 60520461 60520445 -
attttaaaaaatttggtggc

SEQ ID NO: 192034 - DNA, 20 bp, Artificial Sequence
  Synthetic oligonucleotide; CACTGATT chr2 60520405 60520424 60520408 -
cagactccagaatttatact

SEQ ID NO: 192035 - DNA, 20 bp, Artificial Sequence
  Synthetic oligonucleotide; TTCAGTTT chr2 60520376 60520395 60520379 -
gtaatgcattatgcaaataa

SEQ ID NO: 192036 - DNA, 20 bp, Artificial Sequence
  Synthetic oligonucleotide; TACTGTTT chr2 60520357 60520376 60520360 -
attcagtttacatatccaaa

SEQ ID NO: 192037 - DNA, 20 bp, Artificial Sequence
  Synthetic oligonucleotide; AAATGTTT chr2 60520312 60520331 60520315 -
atgtcttgaaaaaaaaagtg

SEQ ID NO: 192038 - DNA, 20 bp, Artificial Sequence
  Synthetic oligonucleotide; AAGAGTTT chr2 60520280 60520299 60520283 -
aaaataaacaaaacctgcag

SEQ ID NO: 192039 - DNA, 20 bp, Artificial Sequence
  Synthetic oligonucleotide; TTTTGATT chr2 60520181 60520200 60520184 -
ataaataattttgcaattat

SEQ ID NO: 192040 - DNA, 20 bp, Artificial Sequence
  Synthetic oligonucleotide; TTTGGCTT chr2 60520127 60520146 60520130 -
gcaaggtatattctattatc

SEQ ID NO: 192041 - DNA, 20 bp, Artificial Sequence
  Synthetic oligonucleotide; AATTGCTT chr2 60520002 60520021 60520005 -
ttatttgaagaggatacaat

SEQ ID NO: 192042 - DNA, 20 bp, Artificial Sequence
  Synthetic oligonucleotide; ACATGATT chr2 60519987 60520006 60519990 -
acaataattgcttgccagtg

SEQ ID NO: 192043 - DNA, 20 bp, Artificial Sequence
  Synthetic oligonucleotide; TATGGATT chr2 60519885 60519904 60519888 -
atagccatgaattcctgagt

SEQ ID NO: 192044 - DNA, 20 bp, Artificial Sequence
  Synthetic oligonucleotide; CTGAGTTT chr2 60519836 60519855 60519839 -
aaacgatctctttgtcttca

SEQ ID NO: 192045 - DNA, 20 bp, Artificial Sequence
  Synthetic oligonucleotide; ACAAGATT chr2 60519686 60519705 60519689 -
agaactggcctcagaaatct

SEQ ID NO: 192046 - DNA, 20 bp, Artificial Sequence
  Synthetic oligonucleotide; GTCAGATT chr2 60519622 60519641 60519625 -
ttactgctgttgcaaagcac

SEQ ID NO: 192047 - DNA, 20 bp, Artificial Sequence
  Synthetic oligonucleotide; GAGCGATT chr2 60519610 60519629 60519613 -
caaagcacgtcagatttcag

SEQ ID NO: 192048 - DNA, 20 bp, Artificial Sequence
  Synthetic oligonucleotide; ACATGTTT chr2 60519417 60519436 60519420 -
tgcataaagtaagcgttcca

SEQ ID NO: 192049 - DNA, 20 bp, Artificial Sequence
  Synthetic oligonucleotide; CTGTGTTT chr2 60519314 60519333 60519317 -
cacctgacaggtgtaatgtt

SEQ ID NO: 192050 - DNA, 20 bp, Artificial Sequence
  Synthetic oligonucleotide; CCCCGCTT chr2 60519200 60519219 60519203 -
tcctcaggttccctttcttg

SEQ ID NO: 192051 - DNA, 20 bp, Artificial Sequence
  Synthetic oligonucleotide; AGAAGCTT chr2 60519127 60519146 60519130 -
cctggtgtacttgggagaaa

SEQ ID NO: 192052 - DNA, 20 bp, Artificial Sequence
  Synthetic oligonucleotide; CTTGGTTT chr2 60519119 60519138 60519122 -
acttgggagaaaagaagctt

SEQ ID NO: 192053 - DNA, 20 bp, Artificial Sequence
  Synthetic oligonucleotide; CCCTGTTT chr2 60519091 60519110 60519094 -
ggtagtacctaccagagact

SEQ ID NO: 192054 - DNA, 20 bp, Artificial Sequence
  Synthetic oligonucleotide; TCAGGATT chr2 60519073 60519092 60519076 -
ctccctgtttcctgctggta

SEQ ID NO: 192055 - DNA, 20 bp, Artificial Sequence
  Synthetic oligonucleotide; TGTGGATT chr2 60518981 60519000 60518984 -
agaaggaactctccttttgc

SEQ ID NO: 192056 - DNA, 20 bp, Artificial Sequence
  Synthetic oligonucleotide; AGCAGATT chr2 60518967 60518986 60518970 -
ttttgctgtggattgtaggg

SEQ ID NO: 192057 - DNA, 20 bp, Artificial Sequence
  Synthetic oligonucleotide; TGGTGCTT chr2 60518959 60518978 60518962 -
tggattgtagggagcagatt

SEQ ID NO: 192058 - DNA, 20 bp, Artificial Sequence
  Synthetic oligonucleotide; TGTGGCTT chr2 60518949 60518968 60518952 -
ggagcagatttggtgcttac

SEQ ID NO: 192059 - DNA, 20 bp, Artificial Sequence
  Synthetic oligonucleotide; TCCAGCTT chr2 60518823 60518842 60518826 -
caccatgtggatggtgtcca

SEQ ID NO: 192060 - DNA, 20 bp, Artificial Sequence
  Synthetic oligonucleotide; TTCTGATT chr2 60518733 60518752 60518736 -
ttggggcaccccatcccacg

SEQ ID NO: 192061 - DNA, 20 bp, Artificial Sequence
  Synthetic oligonucleotide; CTGGGTTT chr2 60518658 60518677 60518661 -
ctctttctcaacgttctctg

SEQ ID NO: 192062 - DNA, 20 bp, Artificial Sequence
  Synthetic oligonucleotide; TGGTGATT chr2 60518619 60518638 60518622 -
cccatgccctctctggtgtg

SEQ ID NO: 192063 - DNA, 20 bp, Artificial Sequence
  Synthetic oligonucleotide; CAATGCTT chr2 60518598 60518617 60518601 -
ggtgattctcagatctagag

SEQ ID NO: 192064 - DNA, 20 bp, Artificial Sequence
  Synthetic oligonucleotide; GTCTGCTT chr2 60518365 60518384 60518368 -
gtagtagccaaattctctga

SEQ ID NO: 192065 - DNA, 20 bp, Artificial Sequence
  Synthetic oligonucleotide; TGATGTTT chr2 60518295 60518314 60518298 -
tcctgtgactcctttatcta

SEQ ID NO: 192066 - DNA, 20 bp, Artificial Sequence
  Synthetic oligonucleotide; AGATGATT chr2 60518241 60518260 60518244 -
ttgacagagggaatgagaca

SEQ ID NO: 192067 - DNA, 20 bp, Artificial Sequence
  Synthetic oligonucleotide; CTAGGTTT chr2 60518227 60518246 60518230 -
gagacaagatgattttaggt

SEQ ID NO: 192068 - DNA, 20 bp, Artificial Sequence
  Synthetic oligonucleotide; TTAAGCTT chr2 60518140 60518159 60518143 -
caattattttattttattta

SEQ ID NO: 192069 - DNA, 20 bp, Artificial Sequence
  Synthetic oligonucleotide; CAGGGTTT chr2 60518122 60518141 60518125 -
tattaagctttttgtagaga

SEQ ID NO: 192070 - DNA, 20 bp, Artificial Sequence
  Synthetic oligonucleotide; CCTAGCTT chr2 60518085 60518104 60518088 -
gcccaggctggtcttgaact

SEQ ID NO: 192071 - DNA, 20 bp, Artificial Sequence
  Synthetic oligonucleotide; CTGAGATT chr2 60518044 60518063 60518047 -
ctctgtggccttccaaattt

SEQ ID NO: 192072 - DNA, 20 bp, Artificial Sequence
  Synthetic oligonucleotide; TTGGGTTT chr2 60517959 60517978 60517962 -
ttttctctcctcccctaaaa

SEQ ID NO: 192073 - DNA, 20 bp, Artificial Sequence
  Synthetic oligonucleotide; AAGAGTTT chr2 60517921 60517940 60517924 -
ttcttgttcctctagtcgac

SEQ ID NO: 192074 - DNA, 20 bp, Artificial Sequence
  Synthetic oligonucleotide; GATAGTTT chr2 60517874 60517893 60517877 -
agcacagctctttgagcata

SEQ ID NO: 192075 - DNA, 20 bp, Artificial Sequence
  Synthetic oligonucleotide; TGGGGCTT chr2 60517697 60517716 60517700 -
ggtagacttggcccagagcc

SEQ ID NO: 192076 - DNA, 20 bp, Artificial Sequence
  Synthetic oligonucleotide; ATGTGCTT chr2 60517613 60517632 60517616 -
aggagccagaggtggcccgc

SEQ ID NO: 192077 - DNA, 20 bp, Artificial Sequence
  Synthetic oligonucleotide; CCACGCTT chr2 60517588 60517607 60517591 -
ctttgcagaggaacttgcac

SEQ ID NO: 192078 - DNA, 20 bp, Artificial Sequence
  Synthetic oligonucleotide; GAATGCTT chr2 60517564 60517583 60517567 -
gcttttatcggtgatggctg

SEQ ID NO: 192079 - DNA, 20 bp, Artificial Sequence
  Synthetic oligonucleotide; TGGAGCTT chr2 60517548 60517567 60517551 -
gctggaatgcttttcttaac

SEQ ID NO: 192080 - DNA, 20 bp, Artificial Sequence
  Synthetic oligonucleotide; TGGTGCTT chr2 60517528 60517547 60517531 -
tggagctttgttgaagagcc

SEQ ID NO: 192081 - DNA, 20 bp, Artificial Sequence
  Synthetic oligonucleotide; CCCTGTTT chr2 60517402 60517421 60517405 -
tcttcttgccttgttccttt

SEQ ID NO: 192082 - DNA, 20 bp, Artificial Sequence
  Synthetic oligonucleotide; TGGGGTTT chr2 60517325 60517344 60517328 -
ctcccaaagtgtggcccttc

SEQ ID NO: 192083 - DNA, 20 bp, Artificial Sequence
  Synthetic oligonucleotide; AATAGCTT chr2 60517300 60517319 60517303 -
tttacatggtgtgcccaggg

SEQ ID NO: 192084 - DNA, 20 bp, Artificial Sequence
  Synthetic oligonucleotide; CTTGGCTT chr2 60517295 60517314 60517298 -
atggtgtgcccagggaatag

SEQ ID NO: 192085 - DNA, 20 bp, Artificial Sequence
  Synthetic oligonucleotide; TTATGCTT chr2 60517102 60517121 60517105 -
ttttgtctaccttcgatccc

SEQ ID NO: 192086 - DNA, 20 bp, Artificial Sequence
  Synthetic oligonucleotide; ACCAGCTT chr2 60517044 60517063 60517047 -
agacgacaaagtatctcatc

SEQ ID NO: 192087 - DNA, 20 bp, Artificial Sequence
  Synthetic oligonucleotide; AAATGCTT chr2 60517029 60517048 60517032 -
tcatcaccagctttgggctg

SEQ ID NO: 192088 - DNA, 20 bp, Artificial Sequence
  Synthetic oligonucleotide; TATTGTTT chr2 60516922 60516941 60516925 -
ctattatcttgtaacccatt

SEQ ID NO: 192089 - DNA, 20 bp, Artificial Sequence
  Synthetic oligonucleotide; GCTGGTTT chr2 60516893 60516912 60516896 -
tatgcctctctttagaatct

SEQ ID NO: 192090 - DNA, 20 bp, Artificial Sequence
  Synthetic oligonucleotide; TAGTGTTT chr2 60516826 60516845 60516829 -
agtccaatggcaagatatct

SEQ ID NO: 192091 - DNA, 20 bp, Artificial Sequence
  Synthetic oligonucleotide; TCCTGCTT chr2 60516783 60516802 60516786 -
cttatgtctgcactcttatg

SEQ ID NO: 192092 - DNA, 20 bp, Artificial Sequence
  Synthetic oligonucleotide; GCTTGCTT chr2 60516779 60516798 60516782 -
tgtctgcactcttatgtcct

SEQ ID NO: 192093 - DNA, 20 bp, Artificial Sequence
  Synthetic oligonucleotide; CAGTGCTT chr2 60516761 60516780 60516764 -
ctgcttgcttttttaaaaac

SEQ ID NO: 192094 - DNA, 20 bp, Artificial Sequence
  Synthetic oligonucleotide; CTCAGCTT chr2 60516738 60516757 60516741 -
tgcttcattgatgactcatg

SEQ ID NO: 192095 - DNA, 20 bp, Artificial Sequence
  Synthetic oligonucleotide; TTGAGCTT chr2 60516608 60516627 60516611 -
cctctctgtccttgtccata

SEQ ID NO: 192096 - DNA, 20 bp, Artificial Sequence
  Synthetic oligonucleotide; AAAGGTTT chr2 60516372 60516391 60516375 -
tgcactgacatctggagaac

SEQ ID NO: 192097 - DNA, 20 bp, Artificial Sequence
  Synthetic oligonucleotide; CCCAGATT chr2 60516351 60516370 60516354 -
aaggttttggaagagcggag

SEQ ID NO: 192098 - DNA, 20 bp, Artificial Sequence
  Synthetic oligonucleotide; TTGAGTTT chr2 60516314 60516333 60516317 -
ccagcagagccaagtctttt

SEQ ID NO: 192099 - DNA, 20 bp, Artificial Sequence
  Synthetic oligonucleotide; CTGTGTTT chr2 60516296 60516315 60516299 -
ttttgagtttccagcaaaac

SEQ ID NO: 192100 - DNA, 20 bp, Artificial Sequence
  Synthetic oligonucleotide; TTGTGTTT chr2 60516269 60516288 60516272 -
ttaataataggagtgggtca

SEQ ID NO: 192101 - DNA, 20 bp, Artificial Sequence
  Synthetic oligonucleotide; ACAGGCTT chr2 60516110 60516129 60516113 -
caaagctggcatgagtcatc

SEQ ID NO: 192102 - DNA, 20 bp, Artificial Sequence
  Synthetic oligonucleotide; GCTAGATT chr2 60516091 60516110 60516094 -
cacaggcttatggccacaag

SEQ ID NO: 192103 - DNA, 20 bp, Artificial Sequence
  Synthetic oligonucleotide; CCCTGCTT chr2 60516077 60516096 60516080 -
cacaaggctagattttcaat

SEQ ID NO: 192104 - DNA, 20 bp, Artificial Sequence
  Synthetic oligonucleotide; CTGTGTTT chr2 60515684 60515703 60515687 -
ccctgcctgaaagcactggg

SEQ ID NO: 192105 - DNA, 20 bp, Artificial Sequence
  Synthetic oligonucleotide; GAGGGCTT chr2 60515643 60515662 60515646 -
gggtcccacagatatttatg

SEQ ID NO: 192106 - DNA, 20 bp, Artificial Sequence
  Synthetic oligonucleotide; GCTTGTTT chr2 60515639 60515658 60515642 -
cccacagatatttatggagg

SEQ ID NO: 192107 - DNA, 20 bp, Artificial Sequence
  Synthetic oligonucleotide; CTTGGCTT chr2 60515554 60515573 60515557 -
aggcctgactctgtcagcaa

SEQ ID NO: 192108 - DNA, 20 bp, Artificial Sequence
  Synthetic oligonucleotide; CTGGGATT chr2 60515526 60515545 60515529 -
tctttggaggaggtgtcact

SEQ ID NO: 192109 - DNA, 20 bp, Artificial Sequence
  Synthetic oligonucleotide; TCATGTTT chr2 60515434 60515453 60515437 -
aaccttttggagggcaggag

SEQ ID NO: 192110 - DNA, 20 bp, Artificial Sequence
  Synthetic oligonucleotide; CGCTGCTT chr2 60515355 60515374 60515358 -
tttaatctgtactttgctca

SEQ ID NO: 192111 - DNA, 20 bp, Artificial Sequence
  Synthetic oligonucleotide; GCTTGATT chr2 60515351 60515370 60515354 -
atctgtactttgctcacgct

SEQ ID NO: 192112 - DNA, 20 bp, Artificial Sequence
  Synthetic oligonucleotide; CCGGGCTT chr2 60515330 60515349 60515333 -
cttgattgaacagagaaaga

SEQ ID NO: 192113 - DNA, 20 bp, Artificial Sequence
  Synthetic oligonucleotide; GCAAGTTT chr2 60515278 60515297 60515281 -
cagggaaggtgtgaggctgg

SEQ ID NO: 192114 - DNA, 20 bp, Artificial Sequence
  Synthetic oligonucleotide; TGTGGCTT chr2 60515198 60515217 60515201 -
gggatagctggtggtgtctt

SEQ ID NO: 192115 - DNA, 20 bp, Artificial Sequence
  Synthetic oligonucleotide; CTCTGCTT chr2 60515167 60515186 60515170 -
ccccatggtcaagcagtgaa

SEQ ID NO: 192116 - DNA, 20 bp, Artificial Sequence
  Synthetic oligonucleotide; TGCAGATT chr2 60515160 60515179 60515163 -
gtcaagcagtgaactctgct

SEQ ID NO: 192117 - DNA, 20 bp, Artificial Sequence
  Synthetic oligonucleotide; GCCTGCTT chr2 60514969 60514988 60514972 -
tgagttcggaagggactggg

SEQ ID NO: 192118 - DNA, 20 bp, Artificial Sequence
  Synthetic oligonucleotide; GGTGGCTT chr2 60514954 60514973 60514957 -
ctggggcctgctttcctttg

SEQ ID NO: 192119 - DNA, 20 bp, Artificial Sequence
  Synthetic oligonucleotide; ATGAGTTT chr2 60514932 60514951 60514935 -
tggctttgactggctcttgg

SEQ ID NO: 192120 - DNA, 20 bp, Artificial Sequence
  Synthetic oligonucleotide; AGGTGATT chr2 60514921 60514940 60514924 -
ggctcttggatgagtttaaa

SEQ ID NO: 192121 - DNA, 20 bp, Artificial Sequence
  Synthetic oligonucleotide; TTCTGTTT chr2 60514869 60514888 60514872 -
tctttttttttttttctttt

SEQ ID NO: 192122 - DNA, 20 bp, Artificial Sequence
  Synthetic oligonucleotide; ACTAGATT chr2 60514742 60514761 60514745 -
ttgtaaagacagtcagacca

SEQ ID NO: 192123 - DNA, 20 bp, Artificial Sequence
  Synthetic oligonucleotide; CTCTGATT chr2 60514723 60514742 60514726 -
aactagatttatttgcacaa

SEQ ID NO: 192124 - DNA, 20 bp, Artificial Sequence
  Synthetic oligonucleotide; AAGTGATT chr2 60514587 60514606 60514590 -
agcctccgcctcccaggttc

SEQ ID NO: 192125 - DNA, 20 bp, Artificial Sequence
  Synthetic oligonucleotide; CTGGGATT chr2 60514555 60514574 60514558 -
tgcctcagcctcccaagtag

SEQ ID NO: 192126 - DNA, 20 bp, Artificial Sequence
  Synthetic oligonucleotide; GGCTGATT chr2 60514525 60514544 60514528 -
aggtgcatgccatcacacct

SEQ ID NO: 192127 - DNA, 20 bp, Artificial Sequence
  Synthetic oligonucleotide; TGGGGTTT chr2 60514487 60514506 60514490 -
tttttttttttaagtagaga

SEQ ID NO: 192128 - DNA, 20 bp, Artificial Sequence
  Synthetic oligonucleotide; CTGAGATT chr2 60514409 60514428 60514412 -
cgcctcggcctcccaaaatg

SEQ ID NO: 192129 - DNA, 20 bp, Artificial Sequence
  Synthetic oligonucleotide; GATGGCTT chr2 60514358 60514377 60514361 -
gctatttaattctattttca

SEQ ID NO: 192130 - DNA, 20 bp, Artificial Sequence
  Synthetic oligonucleotide; CTGGGCTT chr2 60514232 60514251 60514235 -
ctagttcagttgtggccctt

SEQ ID NO: 192131 - DNA, 20 bp, Artificial Sequence
  Synthetic oligonucleotide; ACCAGTTT chr2 60514216 60514235 60514219 -
ccttctgggcttcctttgct

SEQ ID NO: 192132 - DNA, 20 bp, Artificial Sequence
  Synthetic oligonucleotide; GAGTGCTT chr2 60514141 60514160 60514144 -
cagcctggaagcctctcaga

SEQ ID NO: 192133 - DNA, 20 bp, Artificial Sequence
  Synthetic oligonucleotide; TGAGGATT chr2 60514001 60514020 60514004 -
ccctcaagtctgtccttctc

SEQ ID NO: 192134 - DNA, 20 bp, Artificial Sequence
  Synthetic oligonucleotide; GGGAGTTT chr2 60513930 60513949 60513933 -
ccaggtctcgactcaatcca

SEQ ID NO: 192135 - DNA, 20 bp, Artificial Sequence
  Synthetic oligonucleotide; AACAGCTT chr2 60513904 60513923 60513907 -
tttgctcaccacaagccagg

SEQ ID NO: 192136 - DNA, 20 bp, Artificial Sequence
  Synthetic oligonucleotide; TCTGGCTT chr2 60513859 60513878 60513862 -
tgtctggaaggcagagaatc

SEQ ID NO: 192137 - DNA, 20 bp, Artificial Sequence
  Synthetic oligonucleotide; TTGGGTTT chr2 60513667 60513686 60513670 -
tcagggatgagtccgtgctg

SEQ ID NO: 192138 - DNA, 20 bp, Artificial Sequence
  Synthetic oligonucleotide; GATGGATT chr2 60513630 60513649 60513633 -
ctttagcgtgtgagtgggga

SEQ ID NO: 192139 - DNA, 20 bp, Artificial Sequence
  Synthetic oligonucleotide; GGAAGATT chr2 60513598 60513617 60513601 -
agcaggcccttggaagggtg

SEQ ID NO: 192140 - DNA, 20 bp, Artificial Sequence
  Synthetic oligonucleotide; TGAAGATT chr2 60513549 60513568 60513552 -
gggaagatccagacaggaca

SEQ ID NO: 192141 - DNA, 20 bp, Artificial Sequence
  Synthetic oligonucleotide; GCTGGCTT chr2 60513457 60513476 60513460 -
aaaggggttcccatggggtg

SEQ ID NO: 192142 - DNA, 20 bp, Artificial Sequence
  Synthetic oligonucleotide; GCTGGTTT chr2 60513435 60513454 60513438 -
tggcttgaggggatctgggc

SEQ ID NO: 192143 - DNA, 20 bp, Artificial Sequence
  Synthetic oligonucleotide; CATGGATT chr2 60513129 60513148 60513132 -
ccctcacaggctagactatc

SEQ ID NO: 192144 - DNA, 20 bp, Artificial Sequence
  Synthetic oligonucleotide; TTGGGTTT chr2 60512880 60512899 60512883 -
catgtgggtgggcaaagtgg

SEQ ID NO: 192145 - DNA, 20 bp, Artificial Sequence
  Synthetic oligonucleotide; ACCTGCTT chr2 60512840 60512859 60512843 -
taggtgtgtattgtagtaaa

SEQ ID NO: 192146 - DNA, 20 bp, Artificial Sequence
  Synthetic oligonucleotide; GCCAGATT chr2 60512751 60512770 60512754 -
ttcataaggctgtgaacgtc

SEQ ID NO: 192147 - DNA, 20 bp, Artificial Sequence
  Synthetic oligonucleotide; GGGGGCTT chr2 60512657 60512676 60512660 -
atatgcaaaatggagttgct

SEQ ID NO: 192148 - DNA, 20 bp, Artificial Sequence
  Synthetic oligonucleotide; TTCAGTTT chr2 60512651 60512670 60512654 -
aaaatggagttgctgggggc

SEQ ID NO: 192149 - DNA, 20 bp, Artificial Sequence
  Synthetic oligonucleotide; ATTGGATT chr2 60512572 60512591 60512575 -
ctcactttttacaatttagc

SEQ ID NO: 192150 - DNA, 20 bp, Artificial Sequence
  Synthetic oligonucleotide; GAATGATT chr2 60512300 60512319 60512303 -
gctcagccacaagcccaaat

SEQ ID NO: 192151 - DNA, 20 bp, Artificial Sequence
  Synthetic oligonucleotide; GGTGGCTT chr2 60512226 60512245 60512229 -
cagtgacaggtggggctcta

SEQ ID NO: 192152 - DNA, 20 bp, Artificial Sequence
  Synthetic oligonucleotide; GCAGGCTT chr2 60512197 60512216 60512200 -
ctttaaaacatctgaggaaa

SEQ ID NO: 192153 - DNA, 20 bp, Artificial Sequence
  Synthetic oligonucleotide; AGTTGTTT chr2 60512109 60512128 60512112 -
cagtgctccttagccttcca

SEQ ID NO: 192154 - DNA, 20 bp, Artificial Sequence
  Synthetic oligonucleotide; TACTGATT chr2 60511882 60511901 60511885 -
gaggaagcacctcatcattt

SEQ ID NO: 192155 - DNA, 20 bp, Artificial Sequence
  Synthetic oligonucleotide; GAAAGCTT chr2 60511820 60511839 60511823 -
cttcatagaaacagagtgtt

SEQ ID NO: 192156 - DNA, 20 bp, Artificial Sequence
  Synthetic oligonucleotide; AGCTGCTT chr2 60511766 60511785 60511769 -
ccttagtgtcttacatgact

SEQ ID NO: 192157 - DNA, 20 bp, Artificial Sequence
  Synthetic oligonucleotide; TGTGGCTT chr2 60511718 60511737 60511721 -
acttatttcaacttattttc

SEQ ID NO: 192158 - DNA, 20 bp, Artificial Sequence
  Synthetic oligonucleotide; TGATGATT chr2 60511691 60511710 60511694 -
tggaaaatacgttgactgag

SEQ ID NO: 192159 - DNA, 20 bp, Artificial Sequence
  Synthetic oligonucleotide; GATTGTTT chr2 60511687 60511706 60511690 -
aaatacgttgactgagtgat

SEQ ID NO: 192160 - DNA, 20 bp, Artificial Sequence
  Synthetic oligonucleotide; TTCAGTTT chr2 60511604 60511623 60511607 -
agagtgtagctctttgagtc

SEQ ID NO: 192161 - DNA, 20 bp, Artificial Sequence
  Synthetic oligonucleotide; ATCAGATT chr2 60511593 60511612 60511596 -
ctttgagtcttcagttttga

SEQ ID NO: 192162 - DNA, 20 bp, Artificial Sequence
  Synthetic oligonucleotide; AAGTGTTT chr2 60511444 60511463 60511447 -
tctgcatgaatagcatcttt

SEQ ID NO: 192163 - DNA, 20 bp, Artificial Sequence
  Synthetic oligonucleotide; TTTAGCTT chr2 60511289 60511308 60511292 -
gctagggtgggaaagggtat

SEQ ID NO: 192164 - DNA, 20 bp, Artificial Sequence
  Synthetic oligonucleotide; AAGGGATT chr2 60511252 60511271 60511255 -
catcccgggctctcaggtag

SEQ ID NO: 192165 - DNA, 20 bp, Artificial Sequence
  Synthetic oligonucleotide; CTGGGATT chr2 60511137 60511156 60511140 -
gagtaatgccgtggaggcag

SEQ ID NO: 192166 - DNA, 20 bp, Artificial Sequence
  Synthetic oligonucleotide; TTTCGTTT chr2 60510949 60510968 60510952 -
acctaagccttaggaaagac

SEQ ID NO: 192167 - DNA, 20 bp, Artificial Sequence
  Synthetic oligonucleotide; TTTGGTTT chr2 60510944 60510963 60510947 -
agccttaggaaagactttcg

SEQ ID NO: 192168 - DNA, 20 bp, Artificial Sequence
  Synthetic oligonucleotide; GACAGTTT chr2 60510777 60510796 60510780 -
gcccccaggttgggctgcct

SEQ ID NO: 192169 - DNA, 20 bp, Artificial Sequence
  Synthetic oligonucleotide; GGCAGTTT chr2 60510742 60510761 60510745 -
atggcattgagtggcctcct

SEQ ID NO: 192170 - DNA, 20 bp, Artificial Sequence
  Synthetic oligonucleotide; CCAGGCTT chr2 60510487 60510506 60510490 -
gggtaaggggtgcatggtga

SEQ ID NO: 192171 - DNA, 20 bp, Artificial Sequence
  Synthetic oligonucleotide; CAGGGATT chr2 60510247 60510266 60510250 -
gctccttgaaggacgtagag

SEQ ID NO: 192172 - DNA, 20 bp, Artificial Sequence
  Synthetic oligonucleotide; TTGCGCTT chr2 60510184 60510203 60510187 -
gaggagtgatgtcatatgac

SEQ ID NO: 192173 - DNA, 20 bp, Artificial Sequence
  Synthetic oligonucleotide; GCTGGATT chr2 60510052 60510071 60510055 -
tggtggggacgtgagaaggg

SEQ ID NO: 192174 - DNA, 20 bp, Artificial Sequence
  Synthetic oligonucleotide; GCAGGATT chr2 60510018 60510037 60510021 -
atacttcgaagggaaaaccg

SEQ ID NO: 192175 - DNA, 20 bp, Artificial Sequence
  Synthetic oligonucleotide; TGCTGTTT chr2 60509921 60509940 60509924 -
ggtgactgggagaatagaat

SEQ ID NO: 192176 - DNA, 20 bp, Artificial Sequence
  Synthetic oligonucleotide; CCCCGATT chr2 60509778 60509797 60509781 -
tgaggggaaagagagtagcc

SEQ ID NO: 192177 - DNA, 20 bp, Artificial Sequence
  Synthetic oligonucleotide; AGATGATT chr2 60509731 60509750 60509734 -
cagttgactgcctatagctg

SEQ ID NO: 192178 - DNA, 20 bp, Artificial Sequence
  Synthetic oligonucleotide; AGGTGTTT chr2 60509698 60509717 60509701 -
cgagttctttggggagggcc

SEQ ID NO: 192179 - DNA, 20 bp, Artificial Sequence
  Synthetic oligonucleotide; ATGCGCTT chr2 60509604 60509623 60509607 -
tgatcttttgatccagaaag

SEQ ID NO: 192180 - DNA, 20 bp, Artificial Sequence
  Synthetic oligonucleotide; CTTTGTTT chr2 60509599 60509618 60509602 -
ttttgatccagaaagatgcg

SEQ ID NO: 192181 - DNA, 20 bp, Artificial Sequence
  Synthetic oligonucleotide; CTTCGTTT chr2 60509576 60509595 60509579 -
tgtttcttgcatttctttcc

SEQ ID NO: 192182 - DNA, 20 bp, Artificial Sequence
  Synthetic oligonucleotide; GTTTGTTT chr2 60509572 60509591 60509575 -
tcttgcatttctttcccttc

SEQ ID NO: 192183 - DNA, 20 bp, Artificial Sequence
  Synthetic oligonucleotide; TTGTGCTT chr2 60509455 60509474 60509458 -
gactctcactgccacgtgtc

SEQ ID NO: 192184 - DNA, 20 bp, Artificial Sequence
  Synthetic oligonucleotide; AACCGTTT chr2 60509441 60509460 60509444 -
cgtgtcttgtgcttccacag

SEQ ID NO: 192185 - DNA, 20 bp, Artificial Sequence
  Synthetic oligonucleotide; CCTGGCTT chr2 60509386 60509405 60509389 -
gctcaggtccacggttagcc

SEQ ID NO: 192186 - DNA, 20 bp, Artificial Sequence
  Synthetic oligonucleotide; AATTGCTT chr2 60509146 60509165 60509149 -
gcaagggcctgaatcaaaca

SEQ ID NO: 192187 - DNA, 20 bp, Artificial Sequence
  Synthetic oligonucleotide; TCTTGTTT chr2 60509138 60509157 60509141 -
ctgaatcaaacaaattgctt

SEQ ID NO: 192188 - DNA, 20 bp, Artificial Sequence
  Synthetic oligonucleotide; CTCAGCTT chr2 60509130 60509149 60509133 -
aacaaattgctttcttgttt

SEQ ID NO: 192189 - DNA, 20 bp, Artificial Sequence
  Synthetic oligonucleotide; CTGTGATT chr2 60509103 60509122 60509106 -
tgaatctttagaccagaagc

SEQ ID NO: 192190 - DNA, 20 bp, Artificial Sequence
  Synthetic oligonucleotide; CAGTGTTT chr2 60509070 60509089 60509073 -
gtctgatgagaaataagagt

SEQ ID NO: 192191 - DNA, 20 bp, Artificial Sequence
  Synthetic oligonucleotide; CTAGGCTT chr2 60509029 60509048 60509032 -
ttttctttggaggaggtcct

SEQ ID NO: 192192 - DNA, 20 bp, Artificial Sequence
  Synthetic oligonucleotide; TCAGGATT chr2 60508964 60508983 60508967 -
ataggagagctccttggtcc

SEQ ID NO: 192193 - DNA, 20 bp, Artificial Sequence
  Synthetic oligonucleotide; GTAAGTTT chr2 60508924 60508943 60508927 -
taagtagcagtgggtagggc

SEQ ID NO: 192194 - DNA, 20 bp, Artificial Sequence
  Synthetic oligonucleotide; TTAGGTTT chr2 60508896 60508915 60508899 -
aacatccctcaaggtaggcc

SEQ ID NO: 192195 - DNA, 20 bp, Artificial Sequence
  Synthetic oligonucleotide; GCTGGCTT chr2 60508868 60508887 60508871 -
ccctctgtcccctctatggt

SEQ ID NO: 192196 - DNA, 20 bp, Artificial Sequence
  Synthetic oligonucleotide; GCCAGCTT chr2 60508700 60508719 60508703 -
cacggcccctgtagctgagc

SEQ ID NO: 192197 - DNA, 20 bp, Artificial Sequence
  Synthetic oligonucleotide; GGCTGTTT chr2 60508674 60508693 60508677 -
ttcttcctgggccaagctga

SEQ ID NO: 192198 - DNA, 20 bp, Artificial Sequence
  Synthetic oligonucleotide; CAACGCTT chr2 60508644 60508663 60508647 -
tgccgtgtccattctcctag

SEQ ID NO: 192199 - DNA, 20 bp, Artificial Sequence
  Synthetic oligonucleotide; GCCAGTTT chr2 60508629 60508648 60508632 -
cctagcaacgcttctctttg

SEQ ID NO: 192200 - DNA, 20 bp, Artificial Sequence
  Synthetic oligonucleotide; GTAAGTTT chr2 60508606 60508625 60508609 -
agtttgccatagtacctgag

SEQ ID NO: 192201 - DNA, 20 bp, Artificial Sequence
  Synthetic oligonucleotide; AAATGCTT chr2 60508583 60508602 60508586 -
agttttgtcctttgcctgcc

SEQ ID NO: 192202 - DNA, 20 bp, Artificial Sequence
  Synthetic oligonucleotide; CCCTGTTT chr2 60508429 60508448 60508432 -
tctcgcagcaactggcaacc

SEQ ID NO: 192203 - DNA, 20 bp, Artificial Sequence
  Synthetic oligonucleotide; CAGTGCTT chr2 60508391 60508410 60508394 -
cagactcagggacccggctg

SEQ ID NO: 192204 - DNA, 20 bp, Artificial Sequence
  Synthetic oligonucleotide; GGAAGCTT chr2 60508330 60508349 60508333 -
ggtgtaattctgcacaccca

SEQ ID NO: 192205 - DNA, 20 bp, Artificial Sequence
  Synthetic oligonucleotide; ATGAGTTT chr2 60508270 60508289 60508273 -
gtgtcctgaaccaagtgtgg

SEQ ID NO: 192206 - DNA, 20 bp, Artificial Sequence
  Synthetic oligonucleotide; TTGAGCTT chr2 60508264 60508283 60508267 -
tgaaccaagtgtggatgagt

SEQ ID NO: 192207 - DNA, 20 bp, Artificial Sequence
  Synthetic oligonucleotide; CCTAGTTT chr2 60508253 60508272 60508256 -
tggatgagtttgagcttcct

SEQ ID NO: 192208 - DNA, 20 bp, Artificial Sequence
  Synthetic oligonucleotide; TGTTGTTT chr2 60508219 60508238 60508222 -
gtgtaatttgttgttgttgt

SEQ ID NO: 192209 - DNA, 20 bp, Artificial Sequence
  Synthetic oligonucleotide; TTTTGTTT chr2 60508125 60508144 60508128 -
cttagctgttgctcaactac

SEQ ID NO: 192210 - DNA, 20 bp, Artificial Sequence
  Synthetic oligonucleotide; TCAGGTTT chr2 60508077 60508096 60508080 -
caccatgacatgagagaatt

SEQ ID NO: 192211 - DNA, 20 bp, Artificial Sequence
  Synthetic oligonucleotide; TTGTGATT chr2 60508068 60508087 60508071 -
atgagagaatttcaggttta

SEQ ID NO: 192212 - DNA, 20 bp, Artificial Sequence
  Synthetic oligonucleotide; TTGTGTTT chr2 60508054 60508073 60508057 -
ggtttattgtgatttctttt

SEQ ID NO: 192213 - DNA, 20 bp, Artificial Sequence
  Synthetic oligonucleotide; ATATGATT chr2 60507985 60508004 60507988 -
aggaaccaacaccgaagacc

SEQ ID NO: 192214 - DNA, 20 bp, Artificial Sequence
  Synthetic oligonucleotide; TAAAGCTT chr2 60507976 60507995 60507979 -
caccgaagaccatatgattt

SEQ ID NO: 192215 - DNA, 20 bp, Artificial Sequence
  Synthetic oligonucleotide; TTTTGCTT chr2 60507921 60507940 60507924 -
ttgtgaatttttttttgttc

SEQ ID NO: 192216 - DNA, 20 bp, Artificial Sequence
  Synthetic oligonucleotide; ATTGGATT chr2 60507850 60507869 60507853 -
ctgtcctttgttacaggagc

SEQ ID NO: 192217 - DNA, 20 bp, Artificial Sequence
  Synthetic oligonucleotide; TACAGTTT chr2 60507821 60507840 60507824 -
ctgtgaagacgtgtcctgta

SEQ ID NO: 192218 - DNA, 20 bp, Artificial Sequence
  Synthetic oligonucleotide; AACAGCTT chr2 60507812 60507831 60507815 -
cgtgtcctgtatacagtttc

SEQ ID NO: 192219 - DNA, 20 bp, Artificial Sequence
  Synthetic oligonucleotide; GCTTGTTT chr2 60507808 60507827 60507811 -
tcctgtatacagtttcaaca

SEQ ID NO: 192220 - DNA, 20 bp, Artificial Sequence
  Synthetic oligonucleotide; ACCCGCTT chr2 60507759 60507778 60507762 -
cacccgtcgccccccacccc

SEQ ID NO: 192221 - DNA, 20 bp, Artificial Sequence
  Synthetic oligonucleotide; TGCTGTTT chr2 60507742 60507761 60507745 -
cccacccgctttctgtcttg

SEQ ID NO: 192222 - DNA, 20 bp, Artificial Sequence
  Synthetic oligonucleotide; CAAGGTTT chr2 60507506 60507525 60507509 -
gaaaatgtaaaagcacttca

SEQ ID NO: 192223 - DNA, 20 bp, Artificial Sequence
  Synthetic oligonucleotide; TCTGGCTT chr2 60507491 60507510 60507494 -
cttcacaaggttttaacttt

SEQ ID NO: 192224 - DNA, 20 bp, Artificial Sequence
  Synthetic oligonucleotide; AGCAGCTT chr2 60507476 60507495 60507479 -
acttttctggcttgaacgga

SEQ ID NO: 192225 - DNA, 20 bp, Artificial Sequence
  Synthetic oligonucleotide; GTAGGTTT chr2 60507441 60507460 60507444 -
acaagagcacaatagtcttt

SEQ ID NO: 192226 - DNA, 20 bp, Artificial Sequence
  Synthetic oligonucleotide; CACAGTTT chr2 60507429 60507448 60507432 -
tagtctttgtaggttttgga

SEQ ID NO: 192227 - DNA, 20 bp, Artificial Sequence
  Synthetic oligonucleotide; TCTAGCTT chr2 60507421 60507440 60507424 -
gtaggttttggacacagttt

SEQ ID NO: 192228 - DNA, 20 bp, Artificial Sequence
  Synthetic oligonucleotide; TCTTGCTT chr2 60507199 60507218 60507202 -
cttccttcctttcttccttg

SEQ ID NO: 192229 - DNA, 20 bp, Artificial Sequence
  Synthetic oligonucleotide; TTATGTTT chr2 60507135 60507154 60507138 -
gccctctgtctgttgggata

SEQ ID NO: 192230 - DNA, 20 bp, Artificial Sequence
  Synthetic oligonucleotide; TAGTGCTT chr2 60507121 60507140 60507124 -
gggatattatgtttttttaa

SEQ ID NO: 192231 - DNA, 20 bp, Artificial Sequence
  Synthetic oligonucleotide; GCTTGTTT chr2 60507117 60507136 60507120 -
tattatgtttttttaatagt

SEQ ID NO: 192232 - DNA, 20 bp, Artificial Sequence
  Synthetic oligonucleotide; TACTGTTT chr2 60507038 60507057 60507041 -
aattgagtacatatgtacgt

SEQ ID NO: 192233 - DNA, 20 bp, Artificial Sequence
  Synthetic oligonucleotide; TATAGTTT chr2 60507025 60507044 60507028 -
tgtacgttactgtttatttt

SEQ ID NO: 192234 - DNA, 20 bp, Artificial Sequence
  Synthetic oligonucleotide; ACATGTTT chr2 60506984 60507003 60506987 -
taaacagctcagttacgcca

SEQ ID NO: 192235 - DNA, 20 bp, Artificial Sequence
  Synthetic oligonucleotide; ACATGCTT chr2 60506930 60506949 60506933 -
cagtcagggtgttaaaaggc

SEQ ID NO: 192236 - DNA, 20 bp, Artificial Sequence
  Synthetic oligonucleotide; AATAGTTT chr2 60506919 60506938 60506922 -
ttaaaaggcacatgcttttc

SEQ ID NO: 192237 - DNA, 20 bp, Artificial Sequence
  Synthetic oligonucleotide; GAATGTTT chr2 60506856 60506875 60506859 -
gcaatttaattacattaatt

SEQ ID NO: 192238 - DNA, 20 bp, Artificial Sequence
  Synthetic oligonucleotide; GGTAGTTT chr2 60506839 60506858 60506842 -
attgaatgtttaggcggaaa

SEQ ID NO: 192239 - DNA, 20 bp, Artificial Sequence
  Synthetic oligonucleotide; AGGCGTTT chr2 60506731 60506750 60506734 -
cagaaaaatggatatatatc

SEQ ID NO: 192240 - DNA, 20 bp, Artificial Sequence
  Synthetic oligonucleotide; GGTCGTTT chr2 60506652 60506671 60506655 -
tttaggagactgctgggcac

SEQ ID NO: 192241 - DNA, 20 bp, Artificial Sequence
  Synthetic oligonucleotide; CTGTGTTT chr2 60506583 60506602 60506586 -
tgcacaaaggcacgtgggtg

SEQ ID NO: 192242 - DNA, 20 bp, Artificial Sequence
  Synthetic oligonucleotide; CAGGGCTT chr2 60506567 60506586 60506570 -
ggtgctgtgttttgtatagc

SEQ ID NO: 192243 - DNA, 20 bp, Artificial Sequence
  Synthetic oligonucleotide; TGAAGTTT chr2 60506395 60506414 60506398 -
tggatctgaggaacactgtc

SEQ ID NO: 192244 - DNA, 20 bp, Artificial Sequence
  Synthetic oligonucleotide; AGGGGTTT chr2 60506384 60506403 60506387 -
aacactgtctgaagttttcc

SEQ ID NO: 192245 - DNA, 20 bp, Artificial Sequence
  Synthetic oligonucleotide; CTGTGATT chr2 60506149 60506168 60506152 -
aggtgttctttctgacctct

SEQ ID NO: 192246 - DNA, 20 bp, Artificial Sequence
  Synthetic oligonucleotide; AGGGGATT chr2 60506110 60506129 60506113 -
tgtcaaaggatggctgggaa

SEQ ID NO: 192247 - DNA, 20 bp, Artificial Sequence
  Synthetic oligonucleotide; GAGTGATT chr2 60506074 60506093 60506077 -
tgctaacatcccttgcctat

SEQ ID NO: 192248 - DNA, 20 bp, Artificial Sequence
  Synthetic oligonucleotide; TCTGGTTT chr2 60506048 60506067 60506051 -
ttcactatcttctcgcacca

SEQ ID NO: 192249 - DNA, 20 bp, Artificial Sequence
  Synthetic oligonucleotide; TATTGCTT chr2 60505921 60505940 60505924 -
gacgaaccaggtggggctgc

SEQ ID NO: 192250 - DNA, 20 bp, Artificial Sequence
  Synthetic oligonucleotide; TGCAGATT chr2 60505897 60505916 60505900 -
gcttctgggtatttacggga

SEQ ID NO: 192251 - DNA, 20 bp, Artificial Sequence
  Synthetic oligonucleotide; CGTTGTTT chr2 60505878 60505897 60505881 -
atgcagatttttctgcccac

SEQ ID NO: 192252 - DNA, 20 bp, Artificial Sequence
  Synthetic oligonucleotide; GAGGGATT chr2 60505867 60505886 60505870 -
tctgcccaccgttgttttgg

SEQ ID NO: 192253 - DNA, 20 bp, Artificial Sequence
  Synthetic oligonucleotide; GAATGATT chr2 60505788 60505807 60505791 -
cccatttaagagtcagccac

SEQ ID NO: 192254 - DNA, 20 bp, Artificial Sequence
  Synthetic oligonucleotide; CCCTGCTT chr2 60505713 60505732 60505716 -
acagagtggccagctgtgtc

SEQ ID NO: 192255 - DNA, 20 bp, Artificial Sequence
  Synthetic oligonucleotide; AACAGCTT chr2 60505620 60505639 60505623 -
gagctgtctgtgccctgaac

SEQ ID NO: 192256 - DNA, 20 bp, Artificial Sequence
  Synthetic oligonucleotide; GCTGGTTT chr2 60505534 60505553 60505537 -
ggacaagaaggtaaaagagg

SEQ ID NO: 192257 - DNA, 20 bp, Artificial Sequence
  Synthetic oligonucleotide; ACCCGCTT chr2 60505500 60505519 60505503 -
taagggaaggacaggaaagc

SEQ ID NO: 192258 - DNA, 20 bp, Artificial Sequence
  Synthetic oligonucleotide; CAGTGTTT chr2 60505476 60505495 60505479 -
gcttgttccctgtgtggatg

SEQ ID NO: 192259 - DNA, 20 bp, Artificial Sequence
  Synthetic oligonucleotide; GAGTGATT chr2 60505429 60505448 60505432 -
cactcggctgactacctgat

SEQ ID NO: 192260 - DNA, 20 bp, Artificial Sequence
  Synthetic oligonucleotide; AGCCGTTT chr2 60505285 60505304 60505288 -
gtgccaaaggacacccttga

SEQ ID NO: 192261 - DNA, 20 bp, Artificial Sequence
  Synthetic oligonucleotide; TCTAGCTT chr2 60505244 60505263 60505247 -
ccttcttttctctccgatcc

SEQ ID NO: 192262 - DNA, 20 bp, Artificial Sequence
  Synthetic oligonucleotide; TTTGGCTT chr2 60505235 60505254 60505238 -
ctctccgatcctctagcttt

SEQ ID NO: 192263 - DNA, 20 bp, Artificial Sequence
  Synthetic oligonucleotide; TGAAGCTT chr2 60505066 60505085 60505069 -
gaggcaggagaaagggtagt

SEQ ID NO: 192264 - DNA, 20 bp, Artificial Sequence
  Synthetic oligonucleotide; TAGGGATT chr2 60505010 60505029 60505013 -
atgcagccgcaggggtagac

SEQ ID NO: 192265 - DNA, 20 bp, Artificial Sequence
  Synthetic oligonucleotide; CCACGCTT chr2 60504968 60504987 60504971 -
cttatacttctgggtccacc

SEQ ID NO: 192266 - DNA, 20 bp, Artificial Sequence
  Synthetic oligonucleotide; TGTGGCTT chr2 60504932 60504951 60504935 -
tgcacacagggtagggaagt

SEQ ID NO: 192267 - DNA, 20 bp, Artificial Sequence
  Synthetic oligonucleotide; GGCTGTTT chr2 60504918 60504937 60504921 -
ggaagttgtggcttgcagaa

SEQ ID NO: 192268 - DNA, 20 bp, Artificial Sequence
  Synthetic oligonucleotide; CTCTGTTT chr2 60504897 60504916 60504900 -
gctgtttttttggggggacg

SEQ ID NO: 192269 - DNA, 20 bp, Artificial Sequence
  Synthetic oligonucleotide; AATAGTTT chr2 60504888 60504907 60504891 -
ttggggggacgctctgtttt

SEQ ID NO: 192270 - DNA, 20 bp, Artificial Sequence
  Synthetic oligonucleotide; ATCAGTTT chr2 60504826 60504845 60504829 -
aggggaggcatgtgatagga

SEQ ID NO: 192271 - DNA, 20 bp, Artificial Sequence
  Synthetic oligonucleotide; ACTTGATT chr2 60504753 60504772 60504756 -
cctctctatataatttcaag

SEQ ID NO: 192272 - DNA, 20 bp, Artificial Sequence
  Synthetic oligonucleotide; GAAAGCTT chr2 60504722 60504741 60504725 -
attgtccctaagcaccagta

SEQ ID NO: 192273 - DNA, 20 bp, Artificial Sequence
  Synthetic oligonucleotide; AGAAGCTT chr2 60504712 60504731 60504715 -
agcaccagtagaaagcttga

SEQ ID NO: 192274 - DNA, 20 bp, Artificial Sequence
  Synthetic oligonucleotide; GAGGGCTT chr2 60504632 60504651 60504635 -
tgagagaacgttctgactag

SEQ ID NO: 192275 - DNA, 20 bp, Artificial Sequence
  Synthetic oligonucleotide; GGCTGTTT chr2 60504603 60504622 60504606 -
ggggagacagagacagagtt

SEQ ID NO: 192276 - DNA, 20 bp, Artificial Sequence
  Synthetic oligonucleotide; ATTTGCTT chr2 60504577 60504596 60504580 -
ttcagcagactcattctgct

SEQ ID NO: 192277 - DNA, 20 bp, Artificial Sequence
  Synthetic oligonucleotide; TGGAGATT chr2 60504562 60504581 60504565 -
ctgctatttgctttttgcct

SEQ ID NO: 192278 - DNA, 20 bp, Artificial Sequence
  Synthetic oligonucleotide; TTCTGTTT chr2 60504166 60504185 60504169 -
tgcccggctgagcatctctg

SEQ ID NO: 192279 - DNA, 20 bp, Artificial Sequence
  Synthetic oligonucleotide; GTAGGCTT chr2 60504042 60504061 60504045 -
aatgtgccgctcgaagccat

SEQ ID NO: 192280 - DNA, 20 bp, Artificial Sequence
  Synthetic oligonucleotide; GCAGGCTT chr2 60504031 60504050 60504034 -
cgaagccatgtaggcttcca

SEQ ID NO: 192281 - DNA, 20 bp, Artificial Sequence
  Synthetic oligonucleotide; TGGGGTTT chr2 60504015 60504034 60504018 -
tccagcaggcttctagcaga

SEQ ID NO: 192282 - DNA, 20 bp, Artificial Sequence
  Synthetic oligonucleotide; TCTTGCTT chr2 60503938 60503957 60503941 -
cctcgttcctttcctgcatt

SEQ ID NO: 192283 - DNA, 20 bp, Artificial Sequence
  Synthetic oligonucleotide; GGAGGTTT chr2 60503885 60503904 60503888 -
cagccaataaccaattttca

SEQ ID NO: 192284 - DNA, 20 bp, Artificial Sequence
  Synthetic oligonucleotide; TGCTGTTT chr2 60503863 60503882 60503866 -
aggtttagatgaatgtgaat

SEQ ID NO: 192285 - DNA, 20 bp, Artificial Sequence
  Synthetic oligonucleotide; GTGGGCTT chr2 60503792 60503811 60503795 -
ccagaatattgtcccttgca

SEQ ID NO: 192286 - DNA, 20 bp, Artificial Sequence
  Synthetic oligonucleotide; ATAGGTTT chr2 60503706 60503725 60503709 -
gtcacatttccctggcagct

SEQ ID NO: 192287 - DNA, 20 bp, Artificial Sequence
  Synthetic oligonucleotide; GGGTGTTT chr2 60503673 60503692 60503676 -
agggtgaacaagggccatct

SEQ ID NO: 192288 - DNA, 20 bp, Artificial Sequence
  Synthetic oligonucleotide; GAGGGCTT chr2 60503662 60503681 60503665 -
gggccatctgggtgtttgct

SEQ ID NO: 192289 - DNA, 20 bp, Artificial Sequence
  Synthetic oligonucleotide; CAAGGCTT chr2 60503616 60503635 60503619 -
ctgctgggtgtggaaaccac

SEQ ID NO: 192290 - DNA, 20 bp, Artificial Sequence
  Synthetic oligonucleotide; GGGAGCTT chr2 60503581 60503600 60503584 -
ctgaaagagccactggtatt

SEQ ID NO: 192291 - DNA, 20 bp, Artificial Sequence
  Synthetic oligonucleotide; CCCAGATT chr2 60503537 60503556 60503540 -
tgagcgccacacattatttt

SEQ ID NO: 192292 - DNA, 20 bp, Artificial Sequence
  Synthetic oligonucleotide; AAGGGTTT chr2 60503360 60503379 60503363 -
ctgcggtgggtggcatgggt

SEQ ID NO: 192293 - DNA, 20 bp, Artificial Sequence
  Synthetic oligonucleotide; TCTGGCTT chr2 60503266 60503285 60503269 -
gtctcctggttggaccccat

SEQ ID NO: 192294 - DNA, 20 bp, Artificial Sequence
  Synthetic oligonucleotide; TGTGGCTT chr2 60503201 60503220 60503204 -
gctaacatgatcaagggtga

SEQ ID NO: 192295 - DNA, 20 bp, Artificial Sequence
  Synthetic oligonucleotide; CCAGGTTT chr2 60503170 60503189 60503173 -
catcttgggactaggagtga

SEQ ID NO: 192296 - DNA, 20 bp, Artificial Sequence
  Synthetic oligonucleotide; GTTGGTTT chr2 60503040 60503059 60503043 -
tgtattaagatgacagacac

SEQ ID NO: 192297 - DNA, 20 bp, Artificial Sequence
  Synthetic oligonucleotide; AGGTGTTT chr2 60502979 60502998 60502982 -
ccaggccttaaaagacaagg

SEQ ID NO: 192298 - DNA, 20 bp, Artificial Sequence
  Synthetic oligonucleotide; ACTTGATT chr2 60502864 60502883 60502867 -
gctcattttacccactcgag

SEQ ID NO: 192299 - DNA, 20 bp, Artificial Sequence
  Synthetic oligonucleotide; TAGAGATT chr2 60502852 60502871 60502855 -
cactcgagacttgattctct

SEQ ID NO: 192300 - DNA, 20 bp, Artificial Sequence
  Synthetic oligonucleotide; CATAGTTT chr2 60502826 60502845 60502829 -
ttaagtacctcccctggtca

SEQ ID NO: 192301 - DNA, 20 bp, Artificial Sequence
  Synthetic oligonucleotide; ATTTGTTT chr2 60502733 60502752 60502736 -
gctaccatgatcagaggtaa

SEQ ID NO: 192302 - DNA, 20 bp, Artificial Sequence
  Synthetic oligonucleotide; TGATGATT chr2 60502717 60502736 60502720 -
gtaaatttgtttttctctga

SEQ ID NO: 192303 - DNA, 20 bp, Artificial Sequence
  Synthetic oligonucleotide; AACAGTTT chr2 60502706 60502725 60502709 -
tttctctgatgatgattgaa

SEQ ID NO: 192304 - DNA, 20 bp, Artificial Sequence
  Synthetic oligonucleotide; AAGAGTTT chr2 60502669 60502688 60502672 -
atcaagaacattacaacaca

SEQ ID NO: 192305 - DNA, 20 bp, Artificial Sequence
  Synthetic oligonucleotide; TCTGGTTT chr2 60502662 60502681 60502665 -
acattacaacacaaagagtt

SEQ ID NO: 192306 - DNA, 20 bp, Artificial Sequence
  Synthetic oligonucleotide; ATGGGATT chr2 60502600 60502619 60502603 -
atattttaatattagaaagc

SEQ ID NO: 192307 - DNA, 20 bp, Artificial Sequence
  Synthetic oligonucleotide; CACTGCTT chr2 60502583 60502602 60502586 -
agcatgggattgggtgtgaa

SEQ ID NO: 192308 - DNA, 20 bp, Artificial Sequence
  Synthetic oligonucleotide; TGCAGTTT chr2 60502408 60502427 60502411 -
tgaagaagttattctgtctg

SEQ ID NO: 192309 - DNA, 20 bp, Artificial Sequence
  Synthetic oligonucleotide; GATGGTTT chr2 60502379 60502398 60502382 -
attaggctgagactttttcc

SEQ ID NO: 192310 - DNA, 20 bp, Artificial Sequence
  Synthetic oligonucleotide; TTCCGTTT chr2 60502367 60502386 60502370 -
ctttttccgatggtttattt

SEQ ID NO: 192311 - DNA, 20 bp, Artificial Sequence
  Synthetic oligonucleotide; CACTGTTT chr2 60502314 60502333 60502317 -
ggagggagctgacacgttca

SEQ ID NO: 192312 - DNA, 20 bp, Artificial Sequence
  Synthetic oligonucleotide; TTTTGTTT chr2 60502262 60502281 60502265 -
agcaaatctgctatccatca

SEQ ID NO: 192313 - DNA, 20 bp, Artificial Sequence
  Synthetic oligonucleotide; ACCAGCTT chr2 60502253 60502272 60502256 -
gctatccatcattttgtttc

SEQ ID NO: 192314 - DNA, 20 bp, Artificial Sequence
  Synthetic oligonucleotide; CTCTGATT chr2 60502198 60502217 60502201 -
ctcatttggagggacctgat

SEQ ID NO: 192315 - DNA, 20 bp, Artificial Sequence
  Synthetic oligonucleotide; TGTTGCTT chr2 60502191 60502210 60502194 -
ggagggacctgatctctgat

SEQ ID NO: 192316 - DNA, 20 bp, Artificial Sequence
  Synthetic oligonucleotide; CTCAGTTT chr2 60502112 60502131 60502115 -
ttgttacaacatgcaaacct

SEQ ID NO: 192317 - DNA, 20 bp, Artificial Sequence
  Synthetic oligonucleotide; TACAGCTT chr2 60502087 60502106 60502090 -
ttttccaggacttctggtgg

SEQ ID NO: 192318 - DNA, 20 bp, Artificial Sequence
  Synthetic oligonucleotide; CTGAGATT chr2 60502022 60502041 60502025 -
ctccctgaagctctgttagc

SEQ ID NO: 192319 - DNA, 20 bp, Artificial Sequence
  Synthetic oligonucleotide; GGCTGTTT chr2 60501930 60501949 60501933 -
gtaaaataattagaataaaa

SEQ ID NO: 192320 - DNA, 20 bp, Artificial Sequence
  Synthetic oligonucleotide; TCCTGTTT chr2 60501873 60501892 60501876 -
taacttctcagaatgcatct

SEQ ID NO: 192321 - DNA, 20 bp, Artificial Sequence
  Synthetic oligonucleotide; AAGAGTTT chr2 60501734 60501753 60501737 -
tgggtagatcacctgaggtc

SEQ ID NO: 192322 - DNA, 20 bp, Artificial Sequence
  Synthetic oligonucleotide; AATTGCTT chr2 60501614 60501633 60501617 -
tcaggaggctgagggaggag

SEQ ID NO: 192323 - DNA, 20 bp, Artificial Sequence
  Synthetic oligonucleotide; AAGTGATT chr2 60501414 60501433 60501417 -
aaaccaggtaaagtatttgg

SEQ ID NO: 192324 - DNA, 20 bp, Artificial Sequence
  Synthetic oligonucleotide; CATGGCTT chr2 60501366 60501385 60501369 -
cttcatttcccccaaaggac

SEQ ID NO: 192325 - DNA, 20 bp, Artificial Sequence
  Synthetic oligonucleotide; ACAGGTTT chr2 60501246 60501265 60501249 -
ttgttctggcaagtagcact

SEQ ID NO: 192326 - DNA, 20 bp, Artificial Sequence
  Synthetic oligonucleotide; TAGTGTTT chr2 60501189 60501208 60501192 -
gaatcaaagcagaatgaagg

SEQ ID NO: 192327 - DNA, 20 bp, Artificial Sequence
  Synthetic oligonucleotide; GGATGTTT chr2 60501150 60501169 60501153 -
atataaataagtgcaaaatt

SEQ ID NO: 192328 - DNA, 20 bp, Artificial Sequence
  Synthetic oligonucleotide; TCTTGTTT chr2 60501119 60501138 60501122 -
aacaactttccagaaacagg

SEQ ID NO: 192329 - DNA, 20 bp, Artificial Sequence
  Synthetic oligonucleotide; AAATGCTT chr2 60500978 60500997 60500981 -
aggaggatgcagcgacccag

SEQ ID NO: 192330 - DNA, 20 bp, Artificial Sequence
  Synthetic oligonucleotide; CTAGGCTT chr2 60500956 60500975 60500959 -
atgcttgcaagcccacccag

SEQ ID NO: 192331 - DNA, 20 bp, Artificial Sequence
  Synthetic oligonucleotide; GCTTGCTT chr2 60500952 60500971 60500955 -
ttgcaagcccacccagctag

SEQ ID NO: 192332 - DNA, 20 bp, Artificial Sequence
  Synthetic oligonucleotide; TGAGGCTT chr2 60500860 60500879 60500863 -
cattttaccagtgaagaaac

SEQ ID NO: 192333 - DNA, 20 bp, Artificial Sequence
  Synthetic oligonucleotide; CAAGGCTT chr2 60500741 60500760 60500744 -
tgttcatcttacctatccac

SEQ ID NO: 192334 - DNA, 20 bp, Artificial Sequence
  Synthetic oligonucleotide; CCAGGTTT chr2 60500707 60500726 60500710 -
aggtgccccgactgtgagtt

SEQ ID NO: 192335 - DNA, 20 bp, Artificial Sequence
  Synthetic oligonucleotide; TCTGGTTT chr2 60500574 60500593 60500577 -
gagttgggaagtgtggggtg

SEQ ID NO: 192336 - DNA, 20 bp, Artificial Sequence
  Synthetic oligonucleotide; GGATGATT chr2 60500455 60500474 60500458 -
tctgatgtaagttcctgctg

SEQ ID NO: 192337 - DNA, 20 bp, Artificial Sequence
  Synthetic oligonucleotide; CTGGGCTT chr2 60500279 60500298 60500282 -
gccccctgtcccctccccgc

SEQ ID NO: 192338 - DNA, 20 bp, Artificial Sequence
  Synthetic oligonucleotide; CACAGCTT chr2 60500212 60500231 60500215 -
cacaggtcctgtgctgcccc

SEQ ID NO: 192339 - DNA, 20 bp, Artificial Sequence
  Synthetic oligonucleotide; GCTGGTTT chr2 60500196 60500215 60500199 -
cccccacagctttgcaggct

SEQ ID NO: 192340 - DNA, 20 bp, Artificial Sequence
  Synthetic oligonucleotide; TCCTGCTT chr2 60499909 60499928 60499912 -
ctgctctctccgaatcttag

SEQ ID NO: 192341 - DNA, 20 bp, Artificial Sequence
  Synthetic oligonucleotide; AGCAGCTT chr2 60499894 60499913 60499897 -
cttagtcctgcttgaggtct

SEQ ID NO: 192342 - DNA, 20 bp, Artificial Sequence
  Synthetic oligonucleotide; TGGGGCTT chr2 60499873 60499892 60499876 -
gcagcttccggagctgcaca

SEQ ID NO: 192343 - DNA, 20 bp, Artificial Sequence
  Synthetic oligonucleotide; TGGTGCTT chr2 60499859 60499878 60499862 -
tgcacatggggcttgaggtc

SEQ ID NO: 192344 - DNA, 20 bp, Artificial Sequence
  Synthetic oligonucleotide; TATGGATT chr2 60499852 60499871 60499855 -
ggggcttgaggtctggtgct

SEQ ID NO: 192345 - DNA, 20 bp, Artificial Sequence
  Synthetic oligonucleotide; GGCAGCTT chr2 60499812 60499831 60499815 -
agacagatggcagagtacca

SEQ ID NO: 192346 - DNA, 20 bp, Artificial Sequence
  Synthetic oligonucleotide; AGCTGTTT chr2 60499759 60499778 60499762 -
gtggcccaggtgctgcccag

SEQ ID NO: 192347 - DNA, 20 bp, Artificial Sequence
  Synthetic oligonucleotide; AGCGGTTT chr2 60499725 60499744 60499728 -
agcctctccactcaaggttg

SEQ ID NO: 192348 - DNA, 20 bp, Artificial Sequence
  Synthetic oligonucleotide; GGGAGCTT chr2 60499688 60499707 60499691 -
ctgtccacccctttggtccg

SEQ ID NO: 192349 - DNA, 20 bp, Artificial Sequence
  Synthetic oligonucleotide; AGGAGCTT chr2 60499560 60499579 60499563 -
ttgagaaagtgggacgttga

SEQ ID NO: 192350 - DNA, 20 bp, Artificial Sequence
  Synthetic oligonucleotide; ATGGGCTT chr2 60499347 60499366 60499350 -
tcctgaaggaataaggcacg

SEQ ID NO: 192351 - DNA, 20 bp, Artificial Sequence
  Synthetic oligonucleotide; TTTGGCTT chr2 60499172 60499191 60499175 -
cagatactgttctccagctc

SEQ ID NO: 192352 - DNA, 20 bp, Artificial Sequence
  Synthetic oligonucleotide; ACCTGCTT chr2 60498946 60498965 60498949 -
ccccaccacccaccaccacc

SEQ ID NO: 192353 - DNA, 20 bp, Artificial Sequence
  Synthetic oligonucleotide; CGTAGTTT chr2 60498920 60498939 60498923 -
ttcctgttctattagacaaa

SEQ ID NO: 192354 - DNA, 20 bp, Artificial Sequence
  Synthetic oligonucleotide; CTGAGTTT chr2 60498891 60498910 60498894 -
tggatgagttggacagtcat

SEQ ID NO: 192355 - DNA, 20 bp, Artificial Sequence
  Synthetic oligonucleotide; TCAAGATT chr2 60498881 60498900 60498884 -
ggacagtcatctgagtttga

SEQ ID NO: 192356 - DNA, 20 bp, Artificial Sequence
  Synthetic oligonucleotide; AGAGGCTT chr2 60498819 60498838 60498822 -
catattagtacatccatcag

SEQ ID NO: 192357 - DNA, 20 bp, Artificial Sequence
  Synthetic oligonucleotide; ACTGGTTT chr2 60498730 60498749 60498733 -
ttggacctatagatgacctc

SEQ ID NO: 192358 - DNA, 20 bp, Artificial Sequence
  Synthetic oligonucleotide; GCCTGCTT chr2 60498702 60498721 60498705 -
ctccccttgtcacctcatct

SEQ ID NO: 192359 - DNA, 20 bp, Artificial Sequence
  Synthetic oligonucleotide; CAATGCTT chr2 60498487 60498506 60498490 -
ttcctggtaccaggatgatg

SEQ ID NO: 192360 - DNA, 20 bp, Artificial Sequence
  Synthetic oligonucleotide; GTGTGCTT chr2 60498393 60498412 60498396 -
ccagcctgggtgtgcatctt

SEQ ID NO: 192361 - DNA, 20 bp, Artificial Sequence
  Synthetic oligonucleotide; TCCTGCTT chr2 60498167 60498186 60498170 -
cccgtctacatagaggccct

SEQ ID NO: 192362 - DNA, 20 bp, Artificial Sequence
  Synthetic oligonucleotide; CTTGGATT chr2 60498005 60498024 60498008 -
ctccccacctccatgggcct

SEQ ID NO: 192363 - DNA, 20 bp, Artificial Sequence
  Synthetic oligonucleotide; GGAAGCTT chr2 60497885 60497904 60497888 -
gctcacttccatcctgcaga

SEQ ID NO: 192364 - DNA, 20 bp, Artificial Sequence
  Synthetic oligonucleotide; CTTGGTTT chr2 60497880 60497899 60497883 -
cttccatcctgcagaggaag

SEQ ID NO: 192365 - DNA, 20 bp, Artificial Sequence
  Synthetic oligonucleotide; AGCCGATT chr2 60497561 60497580 60497564 -
cgtaggtagtgactggtaag

SEQ ID NO: 192366 - DNA, 20 bp, Artificial Sequence
  Synthetic oligonucleotide; TTGAGTTT chr2 60497555 60497574 60497558 -
tagtgactggtaagagccga

SEQ ID NO: 192367 - DNA, 20 bp, Artificial Sequence
  Synthetic oligonucleotide; AGCTGATT chr2 60497545 60497564 60497548 -
taagagccgattgagtttct

SEQ ID NO: 192368 - DNA, 20 bp, Artificial Sequence
  Synthetic oligonucleotide; GGCAGTTT chr2 60497479 60497498 60497482 -
ttctaattcaattcaggagc

SEQ ID NO: 192369 - DNA, 20 bp, Artificial Sequence
  Synthetic oligonucleotide; GCTAGTTT chr2 60497420 60497439 60497423 -
cttggcctgctaacctgagg

SEQ ID NO: 192370 - DNA, 20 bp, Artificial Sequence
  Synthetic oligonucleotide; TAGGGATT chr2 60497411 60497430 60497414 -
ctaacctgagggctagtttc

SEQ ID NO: 192371 - DNA, 20 bp, Artificial Sequence
  Synthetic oligonucleotide; GATTGATT chr2 60497407 60497426 60497410 -
cctgagggctagtttctagg

SEQ ID NO: 192372 - DNA, 20 bp, Artificial Sequence
  Synthetic oligonucleotide; ATATGCTT chr2 60497381 60497400 60497384 -
ttaacttaaagacagttcat

SEQ ID NO: 192373 - DNA, 20 bp, Artificial Sequence
  Synthetic oligonucleotide; CGATGCTT chr2 60497315 60497334 60497318 -
tcaaacagagcagttaaagg

SEQ ID NO: 192374 - DNA, 20 bp, Artificial Sequence
  Synthetic oligonucleotide; CTTCGTTT chr2 60497310 60497329 60497313 -
cagagcagttaaaggcgatg

SEQ ID NO: 192375 - DNA, 20 bp, Artificial Sequence
  Synthetic oligonucleotide; AAAAGATT chr2 60497299 60497318 60497302 -
aaggcgatgcttcgttttac

SEQ ID NO: 192376 - DNA, 20 bp, Artificial Sequence
  Synthetic oligonucleotide; GAATGTTT chr2 60497245 60497264 60497248 -
cagtggtattcctttcaatg

SEQ ID NO: 192377 - DNA, 20 bp, Artificial Sequence
  Synthetic oligonucleotide; AAGTGTTT chr2 60497225 60497244 60497228 -
gaatgtttctctagctcatt

SEQ ID NO: 192378 - DNA, 20 bp, Artificial Sequence
  Synthetic oligonucleotide; TCTAGCTT chr2 60497141 60497160 60497144 -
gaaatagctctagctctagc

SEQ ID NO: 192379 - DNA, 20 bp, Artificial Sequence
  Synthetic oligonucleotide; TCTTGCTT chr2 60497040 60497059 60497043 -
cactgggggaggagtagaga

SEQ ID NO: 192380 - DNA, 20 bp, Artificial Sequence
  Synthetic oligonucleotide; GAGAGCTT chr2 60497022 60497041 60497025 -
gatcttgcttccttccatgt

SEQ ID NO: 192381 - DNA, 20 bp, Artificial Sequence
  Synthetic oligonucleotide; TCCAGATT chr2 60496999 60497018 60497002 -
agcttatagtccctttggaa

SEQ ID NO: 192382 - DNA, 20 bp, Artificial Sequence
  Synthetic oligonucleotide; TCCTGCTT chr2 60496909 60496928 60496912 -
actgtccatggggaaatggg

SEQ ID NO: 192383 - DNA, 20 bp, Artificial Sequence
  Synthetic oligonucleotide; TTCAGTTT chr2 60496893 60496912 60496896 -
tgggtcctgctttacaaaaa

SEQ ID NO: 192384 - DNA, 20 bp, Artificial Sequence
  Synthetic oligonucleotide; TGCTGCTT chr2 60496882 60496901 60496885 -
ttacaaaaattcagtttgca

SEQ ID NO: 192385 - DNA, 20 bp, Artificial Sequence
  Synthetic oligonucleotide; GGGAGATT chr2 60496845 60496864 60496848 -
atgactgtgacatccagtga

SEQ ID NO: 192386 - DNA, 20 bp, Artificial Sequence
  Synthetic oligonucleotide; CAGGGCTT chr2 60496703 60496722 60496706 -
tgtaagtaagtctgtgtggt

SEQ ID NO: 192387 - DNA, 20 bp, Artificial Sequence
  Synthetic oligonucleotide; TCCTGCTT chr2 60496511 60496530 60496514 -
atcctcctctcttccctctt

SEQ ID NO: 192388 - DNA, 20 bp, Artificial Sequence
  Synthetic oligonucleotide; AATGGTTT chr2 60496393 60496412 60496396 -
tgctctgtctctgcctggga

SEQ ID NO: 192389 - DNA, 20 bp, Artificial Sequence
  Synthetic oligonucleotide; CATTGCTT chr2 60496226 60496245 60496229 -
gtaaacgtgtattggacttc

SEQ ID NO: 192390 - DNA, 20 bp, Artificial Sequence
  Synthetic oligonucleotide; TCATGATT chr2 60496215 60496234 60496218 -
ttggacttccattgcttaag

SEQ ID NO: 192391 - DNA, 20 bp, Artificial Sequence
  Synthetic oligonucleotide; ATTTGTTT chr2 60496210 60496229 60496213 -
cttccattgcttaagtcatg

SEQ ID NO: 192392 - DNA, 20 bp, Artificial Sequence
  Synthetic oligonucleotide; TCTGGTTT chr2 60496177 60496196 60496180 -
acttccagaactttcccggt

SEQ ID NO: 192393 - DNA, 20 bp, Artificial Sequence
  Synthetic oligonucleotide; CTGGGATT chr2 60496168 60496187 60496171 -
actttcccggttctggtttt

SEQ ID NO: 192394 - DNA, 20 bp, Artificial Sequence
  Synthetic oligonucleotide; CCCTGTTT chr2 60496148 60496167 60496151 -
ctgggatttcatgaacaatt

SEQ ID NO: 192395 - DNA, 20 bp, Artificial Sequence
  Synthetic oligonucleotide; CATTGCTT chr2 60496115 60496134 60496118 -
atccatttcctgcacaggtg

SEQ ID NO: 192396 - DNA, 20 bp, Artificial Sequence
  Synthetic oligonucleotide; TTTGGTTT chr2 60496023 60496042 60496026 -
tgacctctggatcccttctc

SEQ ID NO: 192397 - DNA, 20 bp, Artificial Sequence
  Synthetic oligonucleotide; GTTTGTTT chr2 60496019 60496038 60496022 -
ctctggatcccttctctttg

SEQ ID NO: 192398 - DNA, 20 bp, Artificial Sequence
  Synthetic oligonucleotide; GTATGTTT chr2 60495990 60496009 60495993 -
ttctcttttccagagctgca

SEQ ID NO: 192399 - DNA, 20 bp, Artificial Sequence
  Synthetic oligonucleotide; AGGTGTTT chr2 60495979 60495998 60495982 -
agagctgcagtatgtttctt

SEQ ID NO: 192400 - DNA, 20 bp, Artificial Sequence
  Synthetic oligonucleotide; TACAGTTT chr2 60495888 60495907 60495891 -
caccatttagagcctggaat

SEQ ID NO: 192401 - DNA, 20 bp, Artificial Sequence
  Synthetic oligonucleotide; AAGGGTTT chr2 60495839 60495858 60495842 -
ccccaggctcccatggtggc

SEQ ID NO: 192402 - DNA, 20 bp, Artificial Sequence
  Synthetic oligonucleotide; TACAGTTT chr2 60495780 60495799 60495783 -
tctttgagcaggaaaagaat

SEQ ID NO: 192403 - DNA, 20 bp, Artificial Sequence
  Synthetic oligonucleotide; TGCTGATT chr2 60495749 60495768 60495752 -
aggtaccttttgtgtgtatg

SEQ ID NO: 192404 - DNA, 20 bp, Artificial Sequence
  Synthetic oligonucleotide; ACTAGTTT chr2 60495568 60495587 60495571 -
gtgccccatgggcaaaccag

SEQ ID NO: 192405 - DNA, 20 bp, Artificial Sequence
  Synthetic oligonucleotide; AGCTGATT chr2 60495403 60495422 60495406 -
gtgcataagtaagagcagat

SEQ ID NO: 192406 - DNA, 20 bp, Artificial Sequence
  Synthetic oligonucleotide; AGTTGCTT chr2 60495279 60495298 60495282 -
ctagtctagtgcaagctaac

SEQ ID NO: 192407 - DNA, 20 bp, Artificial Sequence
  Synthetic oligonucleotide; AAGGGTTT chr2 60495254 60495273 60495257 -
cttttatcacaggctccagg

SEQ ID NO: 192408 - DNA, 20 bp, Artificial Sequence
  Synthetic oligonucleotide; CTCTGATT chr2 60495243 60495262 60495246 -
ggctccaggaagggtttggc

SEQ ID NO: 192409 - DNA, 20 bp, Artificial Sequence
  Synthetic oligonucleotide; GGCCGTTT chr2 60495183 60495202 60495186 -
tggcagacctctccatcggt

SEQ ID NO: 192410 - DNA, 20 bp, Artificial Sequence
  Synthetic oligonucleotide; ATTGGATT chr2 60495132 60495151 60495135 -
ggctctcttggtgatggaga

SEQ ID NO: 192411 - DNA, 20 bp, Artificial Sequence
  Synthetic oligonucleotide; TGAAGCTT chr2 60495056 60495075 60495059 -
tcccaaaattgtaaaggagg

SEQ ID NO: 192412 - DNA, 20 bp, Artificial Sequence
  Synthetic oligonucleotide; CTTTGTTT chr2 60494827 60494846 60494830 -
ttggggaaagggcctgataa

SEQ ID NO: 192413 - DNA, 20 bp, Artificial Sequence
  Synthetic oligonucleotide; TCTGGCTT chr2 60494557 60494576 60494560 -
ccagtctgtattgccccaag

SEQ ID NO: 192414 - DNA, 20 bp, Artificial Sequence
  Synthetic oligonucleotide; TGGAGATT chr2 60494542 60494561 60494545 -
ccaagtctggctttgccaat

SEQ ID NO: 192415 - DNA, 20 bp, Artificial Sequence
  Synthetic oligonucleotide; GGCCGTTT chr2 60494477 60494496 60494480 -
tctcatctcactgagctctg

SEQ ID NO: 192416 - DNA, 20 bp, Artificial Sequence
  Synthetic oligonucleotide; ATAAGATT chr2 60494428 60494447 60494431 -
cccatcttggcaaaaattgc

SEQ ID NO: 192417 - DNA, 20 bp, Artificial Sequence
  Synthetic oligonucleotide; CCTTGTTT chr2 60494380 60494399 60494383 -
gagataatttattacaacct

SEQ ID NO: 192418 - DNA, 20 bp, Artificial Sequence
  Synthetic oligonucleotide; CCCAGTTT chr2 60494319 60494338 60494322 -
tgaccaggccatggtcactg

SEQ ID NO: 192419 - DNA, 20 bp, Artificial Sequence
  Synthetic oligonucleotide; TCTTGCTT chr2 60494218 60494237 60494221 -
tcagcatcaccctctctcac

SEQ ID NO: 192420 - DNA, 20 bp, Artificial Sequence
  Synthetic oligonucleotide; TCAGGTTT chr2 60494160 60494179 60494163 -
ccctaggcgtaagaatgtgc

SEQ ID NO: 192421 - DNA, 20 bp, Artificial Sequence
  Synthetic oligonucleotide; TGGGGCTT chr2 60494124 60494143 60494127 -
atgtaggtgtgcctcaccca

SEQ ID NO: 192422 - DNA, 20 bp, Artificial Sequence
  Synthetic oligonucleotide; CTCTGTTT chr2 60494108 60494127 60494111 -
cccatggggcttcactttct

SEQ ID NO: 192423 - DNA, 20 bp, Artificial Sequence
  Synthetic oligonucleotide; TTCTGTTT chr2 60494080 60494099 60494083 -
attgccagtagtggtctctg

SEQ ID NO: 192424 - DNA, 20 bp, Artificial Sequence
  Synthetic oligonucleotide; TTCAGTTT chr2 60494070 60494089 60494073 -
gtggtctctgttctgttttc

SEQ ID NO: 192425 - DNA, 20 bp, Artificial Sequence
  Synthetic oligonucleotide; ATCAGCTT chr2 60493985 60494004 60493988 -
actccccgtaccttccttta

SEQ ID NO: 192426 - DNA, 20 bp, Artificial Sequence
  Synthetic oligonucleotide; TTCTGCTT chr2 60493914 60493933 60493917 -
cctgtctcccccaggggtcc

SEQ ID NO: 192427 - DNA, 20 bp, Artificial Sequence
  Synthetic oligonucleotide; TGAAGCTT chr2 60493817 60493836 60493820 -
ggaatcttaatttcctgcac

SEQ ID NO: 192428 - DNA, 20 bp, Artificial Sequence
  Synthetic oligonucleotide; GCCTGATT chr2 60493587 60493606 60493590 -
cccagagtccaatttatttg

SEQ ID NO: 192429 - DNA, 20 bp, Artificial Sequence
  Synthetic oligonucleotide; GAATGTTT chr2 60493559 60493578 60493562 -
caaatgaatgcccattttaa

SEQ ID NO: 192430 - DNA, 20 bp, Artificial Sequence
  Synthetic oligonucleotide; AGAGGTTT chr2 60493516 60493535 60493519 -
tcatttccttagtgtagtgg

SEQ ID NO: 192431 - DNA, 20 bp, Artificial Sequence
  Synthetic oligonucleotide; TAGGGTTT chr2 60493455 60493474 60493458 -
ccaaacagatagctgggata

SEQ ID NO: 192432 - DNA, 20 bp, Artificial Sequence
  Synthetic oligonucleotide; AGATGTTT chr2 60493336 60493355 60493339 -
ctgtgttctcgaaatgcctt

SEQ ID NO: 192433 - DNA, 20 bp, Artificial Sequence
  Synthetic oligonucleotide; AGGGGATT chr2 60492987 60493006 60492990 -
aggggtcagagggttaggga

SEQ ID NO: 192434 - DNA, 20 bp, Artificial Sequence
  Synthetic oligonucleotide; GGGGGCTT chr2 60492961 60492980 60492964 -
ttgacagcaaaggggcatga

SEQ ID NO: 192435 - DNA, 20 bp, Artificial Sequence
  Synthetic oligonucleotide; TCTTGATT chr2 60492928 60492947 60492931 -
actggtggacgtgttctgta

SEQ ID NO: 192436 - DNA, 20 bp, Artificial Sequence
  Synthetic oligonucleotide; AACTGTTT chr2 60492758 60492777 60492761 -
caagtctgtctgtaaccttt

SEQ ID NO: 192437 - DNA, 20 bp, Artificial Sequence
  Synthetic oligonucleotide; CTGAGATT chr2 60492672 60492691 60492675 -
atgagaatgccctttgtatt

SEQ ID NO: 192438 - DNA, 20 bp, Artificial Sequence
  Synthetic oligonucleotide; ATCTGTTT chr2 60492511 60492530 60492514 -
ggagagagcaaggggaggaa

SEQ ID NO: 192439 - DNA, 20 bp, Artificial Sequence
  Synthetic oligonucleotide; GCAGGCTT chr2 60492490 60492509 60492493 -
tctgttttcctagaattcca

SEQ ID NO: 192440 - DNA, 20 bp, Artificial Sequence
  Synthetic oligonucleotide; CTAAGTTT chr2 60492452 60492471 60492455 -
aaaggggagggagtacccaa

SEQ ID NO: 192441 - DNA, 20 bp, Artificial Sequence
  Synthetic oligonucleotide; TTTTGTTT chr2 60492393 60492412 60492396 -
cattagcccaattagttgtc

SEQ ID NO: 192442 - DNA, 20 bp, Artificial Sequence
  Synthetic oligonucleotide; GTTTGTTT chr2 60492389 60492408 60492392 -
agcccaattagttgtctttt

SEQ ID NO: 192443 - DNA, 20 bp, Artificial Sequence
  Synthetic oligonucleotide; GTTTGTTT chr2 60492385 60492404 60492388 -
caattagttgtcttttgttt

SEQ ID NO: 192444 - DNA, 20 bp, Artificial Sequence
  Synthetic oligonucleotide; GTTTGTTT chr2 60492381 60492400 60492384 -
tagttgtcttttgtttgttt

SEQ ID NO: 192445 - DNA, 20 bp, Artificial Sequence
  Synthetic oligonucleotide; GTTTGTTT chr2 60492377 60492396 60492380 -
tgtcttttgtttgtttgttt

SEQ ID NO: 192446 - DNA, 20 bp, Artificial Sequence
  Synthetic oligonucleotide; TGGAGTTT chr2 60492207 60492226 60492210 -
cctggctaattttgtagaga

SEQ ID NO: 192447 - DNA, 20 bp, Artificial Sequence
  Synthetic oligonucleotide; CTGGGATT chr2 60492129 60492148 60492132 -
tgccttgacctcccaaagtg

SEQ ID NO: 192448 - DNA, 20 bp, Artificial Sequence
  Synthetic oligonucleotide; GAGGGTTT chr2 60492008 60492027 60492011 -
gtgctgaattcctgtaaagt

SEQ ID NO: 192449 - DNA, 20 bp, Artificial Sequence
  Synthetic oligonucleotide; TTTTGTTT chr2 60492002 60492021 60492005 -
aattcctgtaaagtgagggt

SEQ ID NO: 192450 - DNA, 20 bp, Artificial Sequence
  Synthetic oligonucleotide; TCCAGATT chr2 60491974 60491993 60491977 -
ttcctacatccatcttcctc

SEQ ID NO: 192451 - DNA, 20 bp, Artificial Sequence
  Synthetic oligonucleotide; GGCAGATT chr2 60491910 60491929 60491913 -
tatctgaacttcatttattt

SEQ ID NO: 192452 - DNA, 20 bp, Artificial Sequence
  Synthetic oligonucleotide; TATGGATT chr2 60491858 60491877 60491861 -
tatttgggtgctaaggactg

SEQ ID NO: 192453 - DNA, 20 bp, Artificial Sequence
  Synthetic oligonucleotide; GGGTGTTT chr2 60491762 60491781 60491765 -
acacggagtgatgatgccta

SEQ ID NO: 192454 - DNA, 20 bp, Artificial Sequence
  Synthetic oligonucleotide; CGGAGATT chr2 60491668 60491687 60491671 -
tttttctttttttggtgaga

SEQ ID NO: 192455 - DNA, 20 bp, Artificial Sequence
  Synthetic oligonucleotide; CTGAGATT chr2 60491559 60491578 60491562 -
tgcctcagcctcccgagtag

SEQ ID NO: 192456 - DNA, 20 bp, Artificial Sequence
  Synthetic oligonucleotide; CGGGGTTT chr2 60491503 60491522 60491506 -
ttttgtatttttagtagaga

SEQ ID NO: 192457 - DNA, 20 bp, Artificial Sequence
  Synthetic oligonucleotide; CTGGGATT chr2 60491425 60491444 60491428 -
tgccccggcctcccaaagtg

SEQ ID NO: 192458 - DNA, 20 bp, Artificial Sequence
  Synthetic oligonucleotide; CCATGTTT chr2 60491322 60491341 60491325 -
ctgaagggggccaaaagtgt

SEQ ID NO: 192459 - DNA, 20 bp, Artificial Sequence
  Synthetic oligonucleotide; ATACGTTT chr2 60491251 60491270 60491254 -
catttaaaacagcattaaga

SEQ ID NO: 192460 - DNA, 20 bp, Artificial Sequence
  Synthetic oligonucleotide; CTTAGCTT chr2 60491237 60491256 60491240 -
ttaagaatacgtttttagaa

SEQ ID NO: 192461 - DNA, 20 bp, Artificial Sequence
  Synthetic oligonucleotide; TTGGGCTT chr2 60491139 60491158 60491142 -
agagttgcacaaccacgtag

SEQ ID NO: 192462 - DNA, 20 bp, Artificial Sequence
  Synthetic oligonucleotide; GGCTGTTT chr2 60491019 60491038 60491022 -
tcttctccagggtgtggggt

SEQ ID NO: 192463 - DNA, 20 bp, Artificial Sequence
  Synthetic oligonucleotide; ACTTGCTT chr2 60490959 60490978 60490962 -
tagcataacatgttactgca

SEQ ID NO: 192464 - DNA, 20 bp, Artificial Sequence
  Synthetic oligonucleotide; AAATGTTT chr2 60490911 60490930 60490914 -
tcaagtagatatcagaaggg

SEQ ID NO: 192465 - DNA, 20 bp, Artificial Sequence
  Synthetic oligonucleotide; ATGAGATT chr2 60490586 60490605 60490589 -
ttctatgaggttggagaagg

SEQ ID NO: 192466 - DNA, 20 bp, Artificial Sequence
  Synthetic oligonucleotide; GATTGATT chr2 60490582 60490601 60490585 -
atgaggttggagaaggatga

SEQ ID NO: 192467 - DNA, 20 bp, Artificial Sequence
  Synthetic oligonucleotide; GCAGGATT chr2 60490524 60490543 60490527 -
attgaggccttgaagtatga

SEQ ID NO: 192468 - DNA, 20 bp, Artificial Sequence
  Synthetic oligonucleotide; AAGGGATT chr2 60490467 60490486 60490470 -
caggaaggaaatgagaacgg

SEQ ID NO: 192469 - DNA, 20 bp, Artificial Sequence
  Synthetic oligonucleotide; GTTGGATT chr2 60490395 60490414 60490398 -
gactggaatagaaaattgga

SEQ ID NO: 192470 - DNA, 20 bp, Artificial Sequence
  Synthetic oligonucleotide; GATGGCTT chr2 60490372 60490391 60490375 -
ggattgtggagctctggaat

SEQ ID NO: 192471 - DNA, 20 bp, Artificial Sequence
  Synthetic oligonucleotide; TAGGGTTT chr2 60490165 60490184 60490168 -
aggatggagttggttgaccg

SEQ ID NO: 192472 - DNA, 20 bp, Artificial Sequence
  Synthetic oligonucleotide; GACTGTTT chr2 60490089 60490108 60490092 -
ggtctgttactaatatagag

SEQ ID NO: 192473 - DNA, 20 bp, Artificial Sequence
  Synthetic oligonucleotide; GAAAGCTT chr2 60490073 60490092 60490076 -
agaggactgtttaaatcttg

SEQ ID NO: 192474 - DNA, 20 bp, Artificial Sequence
  Synthetic oligonucleotide; TGGTGTTT chr2 60489930 60489949 60489933 -
tgggatactcagggcatgga

SEQ ID NO: 192475 - DNA, 20 bp, Artificial Sequence
  Synthetic oligonucleotide; TCCTGCTT chr2 60489833 60489852 60489836 -
atctctctttaatagtgtcc

SEQ ID NO: 192476 - DNA, 20 bp, Artificial Sequence
  Synthetic oligonucleotide; TTCAGCTT chr2 60489609 60489628 60489612 -
ttcaaatgtcagactttctt

SEQ ID NO: 192477 - DNA, 20 bp, Artificial Sequence
  Synthetic oligonucleotide; AGGTGCTT chr2 60489596 60489615 60489599 -
ctttcttttcagcttccttc

SEQ ID NO: 192478 - DNA, 20 bp, Artificial Sequence
  Synthetic oligonucleotide; ACAAGCTT chr2 60489545 60489564 60489548 -
ttgagataggtgctggtcaa

SEQ ID NO: 192479 - DNA, 20 bp, Artificial Sequence
  Synthetic oligonucleotide; TTTTGTTT chr2 60489539 60489558 60489542 -
taggtgctggtcaaacaagc

SEQ ID NO: 192480 - DNA, 20 bp, Artificial Sequence
  Synthetic oligonucleotide; GGCTGTTT chr2 60489505 60489524 60489508 -
ggtcacttggcacacagtgt

SEQ ID NO: 192481 - DNA, 20 bp, Artificial Sequence
  Synthetic oligonucleotide; GTGTGTTT chr2 60489449 60489468 60489452 -
taatggcacgcagggccgcc

SEQ ID NO: 192482 - DNA, 20 bp, Artificial Sequence
  Synthetic oligonucleotide; AAGGGCTT chr2 60489428 60489447 60489431 -
tgtgtttactgccaagaaat

SEQ ID NO: 192483 - DNA, 20 bp, Artificial Sequence
  Synthetic oligonucleotide; GGTGGCTT chr2 60489409 60489428 60489412 -
taagggcttctaggagactt

SEQ ID NO: 192484 - DNA, 20 bp, Artificial Sequence
  Synthetic oligonucleotide; AGGTGTTT chr2 60489201 60489220 60489204 -
ctcacagtgtgaatttagtt

SEQ ID NO: 192485 - DNA, 20 bp, Artificial Sequence
  Synthetic oligonucleotide; AACAGTTT chr2 60489165 60489184 60489168 -
ttttccccaaactctaaagc

SEQ ID NO: 192486 - DNA, 20 bp, Artificial Sequence
  Synthetic oligonucleotide; ATTTGTTT chr2 60489075 60489094 60489078 -
ttttttttctttgaagataa

SEQ ID NO: 192487 - DNA, 20 bp, Artificial Sequence
  Synthetic oligonucleotide; GGTAGCTT chr2 60489050 60489069 60489053 -
ttttgggtatggctgggtgt

SEQ ID NO: 192488 - DNA, 20 bp, Artificial Sequence
  Synthetic oligonucleotide; GGGAGTTT chr2 60488988 60489007 60488991 -
tgggtggatcacctaaggtc

SEQ ID NO: 192489 - DNA, 20 bp, Artificial Sequence
  Synthetic oligonucleotide; AATCGCTT chr2 60488867 60488886 60488870 -
ttgggaggctgaggcaggag

SEQ ID NO: 192490 - DNA, 20 bp, Artificial Sequence
  Synthetic oligonucleotide; CGGAGATT chr2 60488847 60488866 60488850 -
aatcgcttgaacccgggagg

SEQ ID NO: 192491 - DNA, 20 bp, Artificial Sequence
  Synthetic oligonucleotide; CCGAGATT chr2 60488831 60488850 60488834 -
gaggcggagattgcggtgag

SEQ ID NO: 192492 - DNA, 20 bp, Artificial Sequence
  Synthetic oligonucleotide; AATCGTTT chr2 60488738 60488757 60488741 -
acaaacaaacaaacaaacaa

SEQ ID NO: 192493 - DNA, 20 bp, Artificial Sequence
  Synthetic oligonucleotide; AGTGGCTT chr2 60488722 60488741 60488725 -
acaaaatcgttttgggtagc

SEQ ID NO: 192494 - DNA, 20 bp, Artificial Sequence
  Synthetic oligonucleotide; GGCTGTTT chr2 60488712 60488731 60488715 -
tttgggtagcagtggcttta

SEQ ID NO: 192495 - DNA, 20 bp, Artificial Sequence
  Synthetic oligonucleotide; TACTGATT chr2 60488685 60488704 60488688 -
tttggatctttggctattga

SEQ ID NO: 192496 - DNA, 20 bp, Artificial Sequence
  Synthetic oligonucleotide; GAAAGTTT chr2 60488638 60488657 60488641 -
tttcatgttaagcaaaacta

SEQ ID NO: 192497 - DNA, 20 bp, Artificial Sequence
  Synthetic oligonucleotide; CAGGGTTT chr2 60488561 60488580 60488564 -
caaactatttacagccataa

SEQ ID NO: 192498 - DNA, 20 bp, Artificial Sequence
  Synthetic oligonucleotide; ACTGGATT chr2 60488368 60488387 60488371 -
ttaaatgctgtcaaattgta

SEQ ID NO: 192499 - DNA, 20 bp, Artificial Sequence
  Synthetic oligonucleotide; ACAGGCTT chr2 60488223 60488242 60488226 -
tcatgactcaggtatctttt

SEQ ID NO: 192500 - DNA, 20 bp, Artificial Sequence
  Synthetic oligonucleotide; GTCAGATT chr2 60488205 60488224 60488208 -
ttacaggctttgatgaaata

SEQ ID NO: 192501 - DNA, 20 bp, Artificial Sequence
  Synthetic oligonucleotide; AAATGTTT chr2 60488120 60488139 60488123 -
aaactcttccaggataattt

SEQ ID NO: 192502 - DNA, 20 bp, Artificial Sequence
  Synthetic oligonucleotide; CTGTGTTT chr2 60488082 60488101 60488085 -
agaataaattgtaagtgtta

SEQ ID NO: 192503 - DNA, 20 bp, Artificial Sequence
  Synthetic oligonucleotide; TATTGCTT chr2 60488006 60488025 60488009 -
ttaatatctaattgttcata

SEQ ID NO: 192504 - DNA, 20 bp, Artificial Sequence
  Synthetic oligonucleotide; CCAGGTTT chr2 60487996 60488015 60487999 -
attgttcatatattgcttcc

SEQ ID NO: 192505 - DNA, 20 bp, Artificial Sequence
  Synthetic oligonucleotide; TTGTGTTT chr2 60487895 60487914 60487898 -
ggagttggagtacttgcatt

SEQ ID NO: 192506 - DNA, 20 bp, Artificial Sequence
  Synthetic oligonucleotide; TCCAGATT chr2 60487840 60487859 60487843 -
atatttagaccaaattctta

SEQ ID NO: 192507 - DNA, 20 bp, Artificial Sequence
  Synthetic oligonucleotide; TCCAGTTT chr2 60487810 60487829 60487813 -
ccattaaaggttcataaatt

SEQ ID NO: 192508 - DNA, 20 bp, Artificial Sequence
  Synthetic oligonucleotide; TGCAGCTT chr2 60487793 60487812 60487796 -
atttccagttttcacctttc

SEQ ID NO: 192509 - DNA, 20 bp, Artificial Sequence
  Synthetic oligonucleotide; TCTTGCTT chr2 60487737 60487756 60487740 -
taccgcattaaaattaagcc

SEQ ID NO: 192510 - DNA, 20 bp, Artificial Sequence
  Synthetic oligonucleotide; TTTTGTTT chr2 60487596 60487615 60487599 -
gccttctttttcatgccttt

SEQ ID NO: 192511 - DNA, 20 bp, Artificial Sequence
  Synthetic oligonucleotide; TTTTGTTT chr2 60487591 60487610 60487594 -
ctttttcatgcctttttttg

SEQ ID NO: 192512 - DNA, 20 bp, Artificial Sequence
  Synthetic oligonucleotide; TCTGGATT chr2 60487580 60487599 60487583 -
ctttttttgttttgttttgt

SEQ ID NO: 192513 - DNA, 20 bp, Artificial Sequence
  Synthetic oligonucleotide; TTTAGTTT chr2 60487558 60487577 60487561 -
tggattttataaaggcatca

SEQ ID NO: 192514 - DNA, 20 bp, Artificial Sequence
  Synthetic oligonucleotide; TGTTGATT chr2 60487511 60487530 60487514 -
attcatttttaaatatctaa

SEQ ID NO: 192515 - DNA, 20 bp, Artificial Sequence
  Synthetic oligonucleotide; AGACGATT chr2 60487440 60487459 60487443 -
aagataatctacatttgaga

SEQ ID NO: 192516 - DNA, 20 bp, Artificial Sequence
  Synthetic oligonucleotide; AAGAGCTT chr2 60487276 60487295 60487279 -
gctctgctgacattagcatg

SEQ ID NO: 192517 - DNA, 20 bp, Artificial Sequence
  Synthetic oligonucleotide; GGGAGTTT chr2 60487240 60487259 60487243 -
gacttgcaaaatataggtta

SEQ ID NO: 192518 - DNA, 20 bp, Artificial Sequence
  Synthetic oligonucleotide; CATTGATT chr2 60487204 60487223 60487207 -
atcaaattatcttactcttt

SEQ ID NO: 192519 - DNA, 20 bp, Artificial Sequence
  Synthetic oligonucleotide; CTTCGCTT chr2 60487004 60487023 60487007 -
cttaaaggaggggcatttgc

SEQ ID NO: 192520 - DNA, 20 bp, Artificial Sequence
  Synthetic oligonucleotide; TTCTGATT chr2 60486934 60486953 60486937 -
taaaattaaatattaatttg

SEQ ID NO: 192521 - DNA, 20 bp, Artificial Sequence
  Synthetic oligonucleotide; CCAGGTTT chr2 60486868 60486887 60486871 -
gggcgtgggctgagccatgg

SEQ ID NO: 192522 - DNA, 20 bp, Artificial Sequence
  Synthetic oligonucleotide; GAGTGATT chr2 60486852 60486871 60486855 -
atggccaggtttgagagaca

SEQ ID NO: 192523 - DNA, 20 bp, Artificial Sequence
  Synthetic oligonucleotide; AGAAGTTT chr2 60486708 60486727 60486711 -
gctatcaaggccttcctgag

SEQ ID NO: 192524 - DNA, 20 bp, Artificial Sequence
  Synthetic oligonucleotide; CAAGGCTT chr2 60486545 60486564 60486548 -
tctgtggatagggaaaattt

SEQ ID NO: 192525 - DNA, 20 bp, Artificial Sequence
  Synthetic oligonucleotide; CTTAGATT chr2 60486503 60486522 60486506 -
tagccattttctttcagtat

SEQ ID NO: 192526 - DNA, 20 bp, Artificial Sequence
  Synthetic oligonucleotide; TATAGTTT chr2 60486446 60486465 60486449 -
tgtgtgtgtgtgtgcctaag

SEQ ID NO: 192527 - DNA, 20 bp, Artificial Sequence
  Synthetic oligonucleotide; CTGTGATT chr2 60486297 60486316 60486300 -
ggcaaggtgggccagtagag

SEQ ID NO: 192528 - DNA, 20 bp, Artificial Sequence
  Synthetic oligonucleotide; AACAGCTT chr2 60486124 60486143 60486127 -
aaatccatttcagaatggag

SEQ ID NO: 192529 - DNA, 20 bp, Artificial Sequence
  Synthetic oligonucleotide; AGGGGCTT chr2 60486080 60486099 60486083 -
cttgacctgctgatagaaca

SEQ ID NO: 192530 - DNA, 20 bp, Artificial Sequence
  Synthetic oligonucleotide; TGGAGATT chr2 60486073 60486092 60486076 -
tgctgatagaacaaggggct

SEQ ID NO: 192531 - DNA, 20 bp, Artificial Sequence
  Synthetic oligonucleotide; AAAAGATT chr2 60486029 60486048 60486032 -
atagatccctaaacatacta

SEQ ID NO: 192532 - DNA, 20 bp, Artificial Sequence
  Synthetic oligonucleotide; CTGTGTTT chr2 60485734 60485753 60485737 -
gcattgctggtatttataga

SEQ ID NO: 192533 - DNA, 20 bp, Artificial Sequence
  Synthetic oligonucleotide; CGTTGTTT chr2 60485677 60485696 60485680 -
tctcaccccagaatagcaag

SEQ ID NO: 192534 - DNA, 20 bp, Artificial Sequence
  Synthetic oligonucleotide; GACAGCTT chr2 60485650 60485669 60485653 -
tctcatatctaggttgctgg

SEQ ID NO: 192535 - DNA, 20 bp, Artificial Sequence
  Synthetic oligonucleotide; AGCAGCTT chr2 60485624 60485643 60485627 -
ttcccaggaacctaatattc

SEQ ID NO: 192536 - DNA, 20 bp, Artificial Sequence
  Synthetic oligonucleotide; GAGGGTTT chr2 60485602 60485621 60485605 -
cagcttcgtgacgttggatg

SEQ ID NO: 192537 - DNA, 20 bp, Artificial Sequence
  Synthetic oligonucleotide; AGTTGATT chr2 60485581 60485600 60485584 -
agggtttttctttttaaatg

SEQ ID NO: 192538 - DNA, 20 bp, Artificial Sequence
  Synthetic oligonucleotide; ATTGGCTT chr2 60485576 60485595 60485579 -
ttttctttttaaatgagttg

SEQ ID NO: 192539 - DNA, 20 bp, Artificial Sequence
  Synthetic oligonucleotide; CATTGTTT chr2 60485555 60485574 60485558 -
ttggcttttgccactttaca

SEQ ID NO: 192540 - DNA, 20 bp, Artificial Sequence
  Synthetic oligonucleotide; CTAGGTTT chr2 60485540 60485559 60485543 -
ttacacattgttttccaggt

SEQ ID NO: 192541 - DNA, 20 bp, Artificial Sequence
  Synthetic oligonucleotide; TTCTGTTT chr2 60485475 60485494 60485478 -
gtctgccctggctcacaccg

SEQ ID NO: 192542 - DNA, 20 bp, Artificial Sequence
  Synthetic oligonucleotide; GTTAGCTT chr2 60485462 60485481 60485465 -
cacaccgttctgtttttgca

SEQ ID NO: 192543 - DNA, 20 bp, Artificial Sequence
  Synthetic oligonucleotide; GCCTGTTT chr2 60485157 60485176 60485160 -
gtgacttcaaggaagaaggg

SEQ ID NO: 192544 - DNA, 20 bp, Artificial Sequence
  Synthetic oligonucleotide; AATTGTTT chr2 60485040 60485059 60485043 -
ggtggtggtgagggtgtaca

SEQ ID NO: 192545 - DNA, 20 bp, Artificial Sequence
  Synthetic oligonucleotide; TTTTGATT chr2 60485019 60485038 60485022 -
attgttttttgtatttccta

SEQ ID NO: 192546 - DNA, 20 bp, Artificial Sequence
  Synthetic oligonucleotide; TACTGTTT chr2 60485007 60485026 60485010 -
atttcctattttgatttaaa

SEQ ID NO: 192547 - DNA, 20 bp, Artificial Sequence
  Synthetic oligonucleotide; TTTTGTTT chr2 60485000 60485019 60485003 -
attttgatttaaatactgtt

SEQ ID NO: 192548 - DNA, 20 bp, Artificial Sequence
  Synthetic oligonucleotide; GTTGGTTT chr2 60484987 60485006 60484990 -
tactgttttttgtttggttg

SEQ ID NO: 192549 - DNA, 20 bp, Artificial Sequence
  Synthetic oligonucleotide; AGAGGATT chr2 60484944 60484963 60484947 -
aagtcctaaacaagtgccac

SEQ ID NO: 192550 - DNA, 20 bp, Artificial Sequence
  Synthetic oligonucleotide; TTTGGCTT chr2 60484932 60484951 60484935 -
agtgccacagaggatttctt

SEQ ID NO: 192551 - DNA, 20 bp, Artificial Sequence
  Synthetic oligonucleotide; ACAAGTTT chr2 60484901 60484920 60484904 -
cttgataaaatttggagcac

SEQ ID NO: 192552 - DNA, 20 bp, Artificial Sequence
  Synthetic oligonucleotide; TGAGGTTT chr2 60484793 60484812 60484796 -
aagtgagaattcccataatt

SEQ ID NO: 192553 - DNA, 20 bp, Artificial Sequence
  Synthetic oligonucleotide; GAGAGTTT chr2 60484554 60484573 60484557 -
tatttaaaaggcagggaggg

SEQ ID NO: 192554 - DNA, 20 bp, Artificial Sequence
  Synthetic oligonucleotide; TGCTGTTT chr2 60484531 60484550 60484534 -
agtttctgttccacaatcac

SEQ ID NO: 192555 - DNA, 20 bp, Artificial Sequence
  Synthetic oligonucleotide; CCCGGTTT chr2 60484510 60484529 60484513 -
gctgtttcagtgaaaagcaa

SEQ ID NO: 192556 - DNA, 20 bp, Artificial Sequence
  Synthetic oligonucleotide; GGCTGTTT chr2 60484468 60484487 60484471 -
cttccctttctggtgaatgt

SEQ ID NO: 192557 - DNA, 20 bp, Artificial Sequence
  Synthetic oligonucleotide; TGCAGATT chr2 60484286 60484305 60484289 -
tattttcagctgaatgtgag

SEQ ID NO: 192558 - DNA, 20 bp, Artificial Sequence
  Synthetic oligonucleotide; TCAGGCTT chr2 60484275 60484294 60484278 -
gaatgtgagtgcagatttca

SEQ ID NO: 192559 - DNA, 20 bp, Artificial Sequence
  Synthetic oligonucleotide; GAGGGCTT chr2 60484072 60484091 60484075 -
cctgcatttgcagaaaatct

SEQ ID NO: 192560 - DNA, 20 bp, Artificial Sequence
  Synthetic oligonucleotide; ACAAGCTT chr2 60483969 60483988 60483972 -
gcagataatcattacatcta

SEQ ID NO: 192561 - DNA, 20 bp, Artificial Sequence
  Synthetic oligonucleotide; TTCTGATT chr2 60483963 60483982 60483966 -
aatcattacatctaacaagc

SEQ ID NO: 192562 - DNA, 20 bp, Artificial Sequence
  Synthetic oligonucleotide; TTCAGTTT chr2 60483918 60483937 60483921 -
gaccaactcatttataatgg

SEQ ID NO: 192563 - DNA, 20 bp, Artificial Sequence
  Synthetic oligonucleotide; TAGTGCTT chr2 60483785 60483804 60483788 -
ataaaaagaaatcctccttc

SEQ ID NO: 192564 - DNA, 20 bp, Artificial Sequence
  Synthetic oligonucleotide; GAGTGCTT chr2 60483772 60483791 60483775 -
ctccttctagtgctttgggc

SEQ ID NO: 192565 - DNA, 20 bp, Artificial Sequence
  Synthetic oligonucleotide; TTCTGTTT chr2 60483710 60483729 60483713 -
ctgaagcatccagatacatc

SEQ ID NO: 192566 - DNA, 20 bp, Artificial Sequence
  Synthetic oligonucleotide; TTTAGATT chr2 60483704 60483723 60483707 -
catccagatacatcttctgt

SEQ ID NO: 192567 - DNA, 20 bp, Artificial Sequence
  Synthetic oligonucleotide; TGATGTTT chr2 60483651 60483670 60483654 -
aatatgccagctcattcatt

SEQ ID NO: 192568 - DNA, 20 bp, Artificial Sequence
  Synthetic oligonucleotide; AGTTGATT chr2 60483522 60483541 60483525 -
aaacacatgacatagacagc

SEQ ID NO: 192569 - DNA, 20 bp, Artificial Sequence
  Synthetic oligonucleotide; CATCGATT chr2 60483354 60483373 60483357 -
atttgagtcccaatttgagg

SEQ ID NO: 192570 - DNA, 20 bp, Artificial Sequence
  Synthetic oligonucleotide; AGCTGATT chr2 60483319 60483338 60483322 -
cttttcaaaggcctgaatgg

SEQ ID NO: 192571 - DNA, 20 bp, Artificial Sequence
  Synthetic oligonucleotide; CCCTGATT chr2 60483223 60483242 60483226 -
gaggggaaaacggctgtaaa

SEQ ID NO: 192572 - DNA, 20 bp, Artificial Sequence
  Synthetic oligonucleotide; TGTTGATT chr2 60483159 60483178 60483162 -
agcaacacttctctcgcctg

SEQ ID NO: 192573 - DNA, 20 bp, Artificial Sequence
  Synthetic oligonucleotide; GCCTGATT chr2 60483091 60483110 60483094 -
gaaataatataaatcacact

SEQ ID NO: 192574 - DNA, 20 bp, Artificial Sequence
  Synthetic oligonucleotide; GCAGGTTT chr2 60483045 60483064 60483048 -
aagtaatcatgggctgaagt

SEQ ID NO: 192575 - DNA, 20 bp, Artificial Sequence
  Synthetic oligonucleotide; ATCAGATT chr2 60483014 60483033 60483017 -
tgcagtgcctttatcagtaa

SEQ ID NO: 192576 - DNA, 20 bp, Artificial Sequence
  Synthetic oligonucleotide; TAATGTTT chr2 60482960 60482979 60482963 -
cttaaacatcatcatttctg

SEQ ID NO: 192577 - DNA, 20 bp, Artificial Sequence
  Synthetic oligonucleotide; GAAAGATT chr2 60482948 60482967 60482951 -
catttctgtaatgtttgaaa

SEQ ID NO: 192578 - DNA, 20 bp, Artificial Sequence
  Synthetic oligonucleotide; ATTTGTTT chr2 60482943 60482962 60482946 -
ctgtaatgtttgaaagaaag

SEQ ID NO: 192579 - DNA, 20 bp, Artificial Sequence
  Synthetic oligonucleotide; TCCAGCTT chr2 60482907 60482926 60482910 -
actctgccaatcaatgatct

SEQ ID NO: 192580 - DNA, 20 bp, Artificial Sequence
  Synthetic oligonucleotide; AGATGATT chr2 60482834 60482853 60482837 -
tttaaaatgtcatcagaaag

SEQ ID NO: 192581 - DNA, 20 bp, Artificial Sequence
  Synthetic oligonucleotide; CCCTGTTT chr2 60482704 60482723 60482707 -
actgaagcagcagtcttctg

SEQ ID NO: 192582 - DNA, 20 bp, Artificial Sequence
  Synthetic oligonucleotide; GTGTGCTT chr2 60482666 60482685 60482669 -
gatcttaaccttgggatgca

SEQ ID NO: 192583 - DNA, 20 bp, Artificial Sequence
  Synthetic oligonucleotide; TCTTGCTT chr2 60482524 60482543 60482527 -
ataagcagtccctctattct

SEQ ID NO: 192584 - DNA, 20 bp, Artificial Sequence
  Synthetic oligonucleotide; TGTGGATT chr2 60482514 60482533 60482517 -
cctctattcttcttgcttcc

SEQ ID NO: 192585 - DNA, 20 bp, Artificial Sequence
  Synthetic oligonucleotide; TCCTGATT chr2 60482495 60482514 60482498 -
ctgtggatttaaatgccaaa

SEQ ID NO: 192586 - DNA, 20 bp, Artificial Sequence
  Synthetic oligonucleotide; AACTGTTT chr2 60482408 60482427 60482411 -
gcagtggcagtggaaattac

SEQ ID NO: 192587 - DNA, 20 bp, Artificial Sequence
  Synthetic oligonucleotide; GTGGGTTT chr2 60481934 60481953 60481937 -
gagaaggtctctatacctag

SEQ ID NO: 192588 - DNA, 20 bp, Artificial Sequence
  Synthetic oligonucleotide; TGAGGCTT chr2 60481888 60481907 60481891 -
ccatggggctgtctgtgtgt

SEQ ID NO: 192589 - DNA, 20 bp, Artificial Sequence
  Synthetic oligonucleotide; CACTGTTT chr2 60481609 60481628 60481612 -
ccatggaaatggagaagaaa

SEQ ID NO: 192590 - DNA, 20 bp, Artificial Sequence
  Synthetic oligonucleotide; GCCAGCTT chr2 60481529 60481548 60481532 -
atccctgtcctccttcacct

SEQ ID NO: 192591 - DNA, 20 bp, Artificial Sequence
  Synthetic oligonucleotide; GGTGGCTT chr2 60481513 60481532 60481516 -
acctgccagcttgtgggctg

SEQ ID NO: 192592 - DNA, 20 bp, Artificial Sequence
  Synthetic oligonucleotide; ATGTGCTT chr2 60481461 60481480 60481464 -
tgactcctgagagcatgtgt

SEQ ID NO: 192593 - DNA, 20 bp, Artificial Sequence
  Synthetic oligonucleotide; GAATGTTT chr2 60481359 60481378 60481362 -
gagagaaggccctgggttct

SEQ ID NO: 192594 - DNA, 20 bp, Artificial Sequence
  Synthetic oligonucleotide; CCCTGCTT chr2 60481335 60481354 60481338 -
gtttttacttttcctaggat

SEQ ID NO: 192595 - DNA, 20 bp, Artificial Sequence
  Synthetic oligonucleotide; TTTTGTTT chr2 60481324 60481343 60481327 -
tcctaggatccctgcttcat

SEQ ID NO: 192596 - DNA, 20 bp, Artificial Sequence
  Synthetic oligonucleotide; ACTTGTTT chr2 60481306 60481325 60481309 -
atttttgttttcaaggagtt

SEQ ID NO: 192597 - DNA, 20 bp, Artificial Sequence
  Synthetic oligonucleotide; CTAGGTTT chr2 60481255 60481274 60481258 -
tcccaagcagagatgggtgg

SEQ ID NO: 192598 - DNA, 20 bp, Artificial Sequence
  Synthetic oligonucleotide; CCCAGTTT chr2 60481199 60481218 60481202 -
tatcccattccagggccctt

SEQ ID NO: 192599 - DNA, 20 bp, Artificial Sequence
  Synthetic oligonucleotide; CAGGGCTT chr2 60481157 60481176 60481160 -
ctcaatctccttgagcacag

SEQ ID NO: 192600 - DNA, 20 bp, Artificial Sequence
  Synthetic oligonucleotide; GGGGGCTT chr2 60481028 60481047 60481031 -
tctgaggcagggaggcagct

SEQ ID NO: 192601 - DNA, 20 bp, Artificial Sequence
  Synthetic oligonucleotide; TCTAGCTT chr2 60480992 60481011 60480995 -
cctgtaatgcccctcccagg

SEQ ID NO: 192602 - DNA, 20 bp, Artificial Sequence
  Synthetic oligonucleotide; ATAGGATT chr2 60480922 60480941 60480925 -
ttagaactatgagttcaaaa

SEQ ID NO: 192603 - DNA, 20 bp, Artificial Sequence
  Synthetic oligonucleotide; GGAGGATT chr2 60480830 60480849 60480833 -
atgagaatagaggaaaatgt

SEQ ID NO: 192604 - DNA, 20 bp, Artificial Sequence
  Synthetic oligonucleotide; GAATGATT chr2 60480688 60480707 60480691 -
ttacacagcatttggaaagt

SEQ ID NO: 192605 - DNA, 20 bp, Artificial Sequence
  Synthetic oligonucleotide; ACCTGATT chr2 60480679 60480698 60480682 -
atttggaaagtgaatgatta

SEQ ID NO: 192606 - DNA, 20 bp, Artificial Sequence
  Synthetic oligonucleotide; TACAGATT chr2 60480640 60480659 60480643 -
ccattgagtaaatacactat

SEQ ID NO: 192607 - DNA, 20 bp, Artificial Sequence
  Synthetic oligonucleotide; GAAGGTTT chr2 60480520 60480539 60480523 -
ttagtgaatcatttactagg

SEQ ID NO: 192608 - DNA, 20 bp, Artificial Sequence
  Synthetic oligonucleotide; CAGCGCTT chr2 60480426 60480445 60480429 -
aggaagaaaagttcactgca

SEQ ID NO: 192609 - DNA, 20 bp, Artificial Sequence
  Synthetic oligonucleotide; TGCTGATT chr2 60480292 60480311 60480295 -
gagaaccagtggtagataca

SEQ ID NO: 192610 - DNA, 20 bp, Artificial Sequence
  Synthetic oligonucleotide; CACAGCTT chr2 60480074 60480093 60480077 -
ggcctcctcccggggaagtc

SEQ ID NO: 192611 - DNA, 20 bp, Artificial Sequence
  Synthetic oligonucleotide; GTATGATT chr2 60480009 60480028 60480012 -
ccgcaggccataaatgcaaa

SEQ ID NO: 192612 - DNA, 20 bp, Artificial Sequence
  Synthetic oligonucleotide; AGCAGCTT chr2 60479994 60480013 60479997 -
gcaaagtatgatttaacaaa

SEQ ID NO: 192613 - DNA, 20 bp, Artificial Sequence
  Synthetic oligonucleotide; TTCAGATT chr2 60479945 60479964 60479948 -
agttgtcccaacctgtcaac

SEQ ID NO: 192614 - DNA, 20 bp, Artificial Sequence
  Synthetic oligonucleotide; AAGCGTTT chr2 60479886 60479905 60479889 -
ttggtggaagggagggacag

SEQ ID NO: 192615 - DNA, 20 bp, Artificial Sequence
  Synthetic oligonucleotide; TTCAGATT chr2 60479874 60479893 60479877 -
agggacagaagcgtttcatt

SEQ ID NO: 192616 - DNA, 20 bp, Artificial Sequence
  Synthetic oligonucleotide; CCAGGTTT chr2 60479810 60479829 60479813 -
ccacgctgataccttacatg

SEQ ID NO: 192617 - DNA, 20 bp, Artificial Sequence
  Synthetic oligonucleotide; CAGGGTTT chr2 60479606 60479625 60479609 -
ccacactctccaccgcctga

SEQ ID NO: 192618 - DNA, 20 bp, Artificial Sequence
  Synthetic oligonucleotide; GGGGGCTT chr2 60479559 60479578 60479562 -
atctgtgggccggtgacaga

SEQ ID NO: 192619 - DNA, 20 bp, Artificial Sequence
  Synthetic oligonucleotide; AAAGGATT chr2 60479515 60479534 60479518 -
aggttgaggccctggaagca

SEQ ID NO: 192620 - DNA, 20 bp, Artificial Sequence
  Synthetic oligonucleotide; AGGGGCTT chr2 60479499 60479518 60479502 -
agcaaaaggatttcagcctg

SEQ ID NO: 192621 - DNA, 20 bp, Artificial Sequence
  Synthetic oligonucleotide; GAGAGCTT chr2 60479450 60479469 60479453 -
cctgttcctagtagacctga

SEQ ID NO: 192622 - DNA, 20 bp, Artificial Sequence
  Synthetic oligonucleotide; AGGAGCTT chr2 60479210 60479229 60479213 -
gatgttgtgctgttggttgg

SEQ ID NO: 192623 - DNA, 20 bp, Artificial Sequence
  Synthetic oligonucleotide; TCCAGATT chr2 60479044 60479063 60479047 -
aatttgctcagggaactctt

SEQ ID NO: 192624 - DNA, 20 bp, Artificial Sequence
  Synthetic oligonucleotide; GAAGGATT chr2 60479020 60479039 60479023 -
gattggtcagtggtataaat

SEQ ID NO: 192625 - DNA, 20 bp, Artificial Sequence
  Synthetic oligonucleotide; CTGTGTTT chr2 60478940 60478959 60478943 -
aagcacgtcaaagccaaggc

SEQ ID NO: 192626 - DNA, 20 bp, Artificial Sequence
  Synthetic oligonucleotide; GCCTGTTT chr2 60478816 60478835 60478819 -
gcagcatgccccgggcagag

SEQ ID NO: 192627 - DNA, 20 bp, Artificial Sequence
  Synthetic oligonucleotide; CCTAGTTT chr2 60478716 60478735 60478719 -
cacctcaggcgagagggcag

SEQ ID NO: 192628 - DNA, 20 bp, Artificial Sequence
  Synthetic oligonucleotide; TAGAGCTT chr2 60478659 60478678 60478662 -
tgctagaccattttttttgg

SEQ ID NO: 192629 - DNA, 20 bp, Artificial Sequence
  Synthetic oligonucleotide; ATAGGTTT chr2 60478592 60478611 60478595 -
tgtgttaaccataggacata

SEQ ID NO: 192630 - DNA, 20 bp, Artificial Sequence
  Synthetic oligonucleotide; CCACGCTT chr2 60478502 60478521 60478505 -
ttaggcctgtgaagtgcctt

SEQ ID NO: 192631 - DNA, 20 bp, Artificial Sequence
  Synthetic oligonucleotide; AGGAGATT chr2 60478445 60478464 60478448 -
tagtgccagaaaggcaagtg

SEQ ID NO: 192632 - DNA, 20 bp, Artificial Sequence
  Synthetic oligonucleotide; ACAGGTTT chr2 60478403 60478422 60478406 -
gtatgaccagtgtccagacg

SEQ ID NO: 192633 - DNA, 20 bp, Artificial Sequence
  Synthetic oligonucleotide; AGGGGTTT chr2 60478368 60478387 60478371 -
ggccctgaggtggcagtggg

SEQ ID NO: 192634 - DNA, 20 bp, Artificial Sequence
  Synthetic oligonucleotide; GACTGCTT chr2 60478070 60478089 60478073 -
cttgagagctgaggcaggag

SEQ ID NO: 192635 - DNA, 20 bp, Artificial Sequence
  Synthetic oligonucleotide; CCAAGATT chr2 60478034 60478053 60478037 -
gaggcggaggttgcagtgag

SEQ ID NO: 192636 - DNA, 20 bp, Artificial Sequence
  Synthetic oligonucleotide; AAAAGCTT chr2 60477963 60477982 60477966 -
tcaattaaaaaaaaaaaaaa

SEQ ID NO: 192637 - DNA, 20 bp, Artificial Sequence
  Synthetic oligonucleotide; ATGTGCTT chr2 60477936 60477955 60477939 -
ttccataaaggccaggacag

SEQ ID NO: 192638 - DNA, 20 bp, Artificial Sequence
  Synthetic oligonucleotide; CTGGGCTT chr2 60477891 60477910 60477894 -
gttggaggccttgccctcct

SEQ ID NO: 192639 - DNA, 20 bp, Artificial Sequence
  Synthetic oligonucleotide; CCCTGTTT chr2 60477692 60477711 60477695 -
gtctctcacagcaccactgc

SEQ ID NO: 192640 - DNA, 20 bp, Artificial Sequence
  Synthetic oligonucleotide; CCATGTTT chr2 60477641 60477660 60477644 -
tcaggagtctcttggaaaca

SEQ ID NO: 192641 - DNA, 20 bp, Artificial Sequence
  Synthetic oligonucleotide; GTTTGATT chr2 60477637 60477656 60477640 -
gagtctcttggaaacaccat

SEQ ID NO: 192642 - DNA, 20 bp, Artificial Sequence
  Synthetic oligonucleotide; GCAGGTTT chr2 60477564 60477583 60477567 -
gggatacatgtgcagaatgt

SEQ ID NO: 192643 - DNA, 20 bp, Artificial Sequence
  Synthetic oligonucleotide; GGTGGTTT chr2 60477532 60477551 60477535 -
cataagtatacatgtaccat

SEQ ID NO: 192644 - DNA, 20 bp, Artificial Sequence
  Synthetic oligonucleotide; CCATGTTT chr2 60477454 60477473 60477457 -
ccctccccttgcccctccac

SEQ ID NO: 192645 - DNA, 20 bp, Artificial Sequence
  Synthetic oligonucleotide; TTTGGTTT chr2 60477449 60477468 60477452 -
cccttgcccctccacccatg

SEQ ID NO: 192646 - DNA, 20 bp, Artificial Sequence
  Synthetic oligonucleotide; TTTAGCTT chr2 60477439 60477458 60477442 -
tccacccatgtttggttttc

SEQ ID NO: 192647 - DNA, 20 bp, Artificial Sequence
  Synthetic oligonucleotide; AAAGGCTT chr2 60477352 60477371 60477355 -
ttgtgagttgatgcagataa

SEQ ID NO: 192648 - DNA, 20 bp, Artificial Sequence
  Synthetic oligonucleotide; GCTGGCTT chr2 60477306 60477325 60477309 -
atttgggagttgtgtgttct

SEQ ID NO: 192649 - DNA, 20 bp, Artificial Sequence
  Synthetic oligonucleotide; AAACGTTT chr2 60477254 60477273 60477257 -
tggcaggtgttatcagaatc

SEQ ID NO: 192650 - DNA, 20 bp, Artificial Sequence
  Synthetic oligonucleotide; TGTGGTTT chr2 60477125 60477144 60477128 -
taacctgggagaaacgcaag

SEQ ID NO: 192651 - DNA, 20 bp, Artificial Sequence
  Synthetic oligonucleotide; CAAGGCTT chr2 60477116 60477135 60477119 -
agaaacgcaagtgtggtttg

SEQ ID NO: 192652 - DNA, 20 bp, Artificial Sequence
  Synthetic oligonucleotide; TGATGATT chr2 60477094 60477113 60477097 -
aggctttccaggtgtccaaa

SEQ ID NO: 192653 - DNA, 20 bp, Artificial Sequence
  Synthetic oligonucleotide; GGGTGTTT chr2 60477042 60477061 60477045 -
agtggggcagggaggcatcg

SEQ ID NO: 192654 - DNA, 20 bp, Artificial Sequence
  Synthetic oligonucleotide; ATACGTTT chr2 60477031 60477050 60477034 -
gaggcatcggggtgtttgtg

SEQ ID NO: 192655 - DNA, 20 bp, Artificial Sequence
  Synthetic oligonucleotide; CATGGATT chr2 60476947 60476966 60476950 -
gtcccttctaactacaaagg

SEQ ID NO: 192656 - DNA, 20 bp, Artificial Sequence
  Synthetic oligonucleotide; GAGTGATT chr2 60476869 60476888 60476872 -
atggaaactgataaattaga

SEQ ID NO: 192657 - DNA, 20 bp, Artificial Sequence
  Synthetic oligonucleotide; GAAAGATT chr2 60476849 60476868 60476852 -
gagtgatttttcacattaca

SEQ ID NO: 192658 - DNA, 20 bp, Artificial Sequence
  Synthetic oligonucleotide; AAAGGTTT chr2 60476829 60476848 60476832 -
gaaagattgttaacttttca

SEQ ID NO: 192659 - DNA, 20 bp, Artificial Sequence
  Synthetic oligonucleotide; CAGGGTTT chr2 60476816 60476835 60476819 -
cttttcaaaaggtttcacca

SEQ ID NO: 192660 - DNA, 20 bp, Artificial Sequence
  Synthetic oligonucleotide; AAGTGTTT chr2 60476777 60476796 60476780 -
gagctcccccactgaattta

SEQ ID NO: 192661 - DNA, 20 bp, Artificial Sequence
  Synthetic oligonucleotide; GTTTGTTT chr2 60476773 60476792 60476776 -
tcccccactgaatttaaagt

SEQ ID NO: 192662 - DNA, 20 bp, Artificial Sequence
  Synthetic oligonucleotide; ATATGATT chr2 60476620 60476639 60476623 -
gaaattatgttggttagcaa

SEQ ID NO: 192663 - DNA, 20 bp, Artificial Sequence
  Synthetic oligonucleotide; CATGGCTT chr2 60476588 60476607 60476591 -
ttacagaaattcattttaca

SEQ ID NO: 192664 - DNA, 20 bp, Artificial Sequence
  Synthetic oligonucleotide; CTGGGCTT chr2 60476525 60476544 60476528 -
aggtcaaggaccacagggtg

SEQ ID NO: 192665 - DNA, 20 bp, Artificial Sequence
  Synthetic oligonucleotide; CCTGGTTT chr2 60476511 60476530 60476514 -
agggtgctgggctttgctgt

SEQ ID NO: 192666 - DNA, 20 bp, Artificial Sequence
  Synthetic oligonucleotide; CCGAGCTT chr2 60476420 60476439 60476423 -
tgccaggctctggcatgagg

SEQ ID NO: 192667 - DNA, 20 bp, Artificial Sequence
  Synthetic oligonucleotide; CTGGGTTT chr2 60476359 60476378 60476362 -
cttttcccttgacatttagc

SEQ ID NO: 192668 - DNA, 20 bp, Artificial Sequence
  Synthetic oligonucleotide; GGAAGTTT chr2 60476349 60476368 60476352 -
gacatttagcctgggtttgg

SEQ ID NO: 192669 - DNA, 20 bp, Artificial Sequence
  Synthetic oligonucleotide; CTAGGTTT chr2 60476297 60476316 60476300 -
ctcattggctcaggacacac

SEQ ID NO: 192670 - DNA, 20 bp, Artificial Sequence
  Synthetic oligonucleotide; TAAGGATT chr2 60476206 60476225 60476209 -
tcaggctcactctctaagcc

SEQ ID NO: 192671 - DNA, 20 bp, Artificial Sequence
  Synthetic oligonucleotide; GCCAGCTT chr2 60476112 60476131 60476115 -
aggggaacaggtgtatcctg

SEQ ID NO: 192672 - DNA, 20 bp, Artificial Sequence
  Synthetic oligonucleotide; AAAGGATT chr2 60475971 60475990 60475974 -
aaacacttagggccagaaag

SEQ ID NO: 192673 - DNA, 20 bp, Artificial Sequence
  Synthetic oligonucleotide; CCCTGCTT chr2 60475867 60475886 60475870 -
gtctctccagaggaacaagt

SEQ ID NO: 192674 - DNA, 20 bp, Artificial Sequence
  Synthetic oligonucleotide; CATGGCTT chr2 60475660 60475679 60475663 -
aagggcacccctatcctccc

SEQ ID NO: 192675 - DNA, 20 bp, Artificial Sequence
  Synthetic oligonucleotide; TGATGATT chr2 60475611 60475630 60475614 -
atttggagggatggtcaagt

SEQ ID NO: 192676 - DNA, 20 bp, Artificial Sequence
  Synthetic oligonucleotide; CAATGTTT chr2 60475575 60475594 60475578 -
aaagtagtgtaggaaaatct

SEQ ID NO: 192677 - DNA, 20 bp, Artificial Sequence
  Synthetic oligonucleotide; AATAGATT chr2 60475496 60475515 60475499 -
actggcaatgagacatctga

SEQ ID NO: 192678 - DNA, 20 bp, Artificial Sequence
  Synthetic oligonucleotide; ACTTGTTT chr2 60475441 60475460 60475444 -
ggaagaacatggctatcaac

SEQ ID NO: 192679 - DNA, 20 bp, Artificial Sequence
  Synthetic oligonucleotide; TGGAGTTT chr2 60475323 60475342 60475326 -
acagaacagatgaaccttca

SEQ ID NO: 192680 - DNA, 20 bp, Artificial Sequence
  Synthetic oligonucleotide; AGAGGATT chr2 60475221 60475240 60475224 -
aagatgtcacagaaatcttc

SEQ ID NO: 192681 - DNA, 20 bp, Artificial Sequence
  Synthetic oligonucleotide; TTGGGCTT chr2 60475110 60475129 60475113 -
ccatttactctgtgcccacc

SEQ ID NO: 192682 - DNA, 20 bp, Artificial Sequence
  Synthetic oligonucleotide; CTTTGCTT chr2 60475105 60475124 60475108 -
tactctgtgcccaccttggg

SEQ ID NO: 192683 - DNA, 20 bp, Artificial Sequence
  Synthetic oligonucleotide; ACCTGCTT chr2 60475081 60475100 60475084 -
gcttctctctaagcatcttt

SEQ ID NO: 192684 - DNA, 20 bp, Artificial Sequence
  Synthetic oligonucleotide; CCAGGTTT chr2 60475037 60475056 60475040 -
atatcctttctcttggctct

SEQ ID NO: 192685 - DNA, 20 bp, Artificial Sequence
  Synthetic oligonucleotide; ATAAGTTT chr2 60475024 60475043 60475027 -
tggctctccaggtttaactc

SEQ ID NO: 192686 - DNA, 20 bp, Artificial Sequence
  Synthetic oligonucleotide; CCGTGTTT chr2 60474835 60474854 60474838 -
gctgtgggagaaatctgtgt

SEQ ID NO: 192687 - DNA, 20 bp, Artificial Sequence
  Synthetic oligonucleotide; CATTGCTT chr2 60474800 60474819 60474803 -
actgcccacagcggctagcc

SEQ ID NO: 192688 - DNA, 20 bp, Artificial Sequence
  Synthetic oligonucleotide; ATGTGATT chr2 60474673 60474692 60474676 -
cacattttgcatagtgaggt

SEQ ID NO: 192689 - DNA, 20 bp, Artificial Sequence
  Synthetic oligonucleotide; AAAAGCTT chr2 60474575 60474594 60474578 -
aagttccgccattctaaggc

SEQ ID NO: 192690 - DNA, 20 bp, Artificial Sequence
  Synthetic oligonucleotide; GAAGGATT chr2 60474413 60474432 60474416 -
cctattcaaccttttgaaat

SEQ ID NO: 192691 - DNA, 20 bp, Artificial Sequence
  Synthetic oligonucleotide; TTTGGCTT chr2 60474354 60474373 60474357 -
caaagatggaacacaatgtc

SEQ ID NO: 192692 - DNA, 20 bp, Artificial Sequence
  Synthetic oligonucleotide; AGTTGCTT chr2 60474346 60474365 60474349 -
gaacacaatgtctttggctt

SEQ ID NO: 192693 - DNA, 20 bp, Artificial Sequence
  Synthetic oligonucleotide; GCAAGATT chr2 60474329 60474348 60474332 -
cttagttgcttttcagaaaa

SEQ ID NO: 192694 - DNA, 20 bp, Artificial Sequence
  Synthetic oligonucleotide; ATATGCTT chr2 60474305 60474324 60474308 -
gattttttttttttggaatt

SEQ ID NO: 192695 - DNA, 20 bp, Artificial Sequence
  Synthetic oligonucleotide; CTTTGCTT chr2 60474300 60474319 60474303 -
tttttttttggaattatatg

SEQ ID NO: 192696 - DNA, 20 bp, Artificial Sequence
  Synthetic oligonucleotide; CACAGCTT chr2 60474282 60474301 60474285 -
tgctttgcttatgttaaaga

SEQ ID NO: 192697 - DNA, 20 bp, Artificial Sequence
  Synthetic oligonucleotide; TTTTGTTT chr2 60474265 60474284 60474268 -
agacacagcttgcagaaaaa

SEQ ID NO: 192698 - DNA, 20 bp, Artificial Sequence
  Synthetic oligonucleotide; GACAGATT chr2 60474251 60474270 60474254 -
gaaaaattttgtttaggcct

SEQ ID NO: 192699 - DNA, 20 bp, Artificial Sequence
  Synthetic oligonucleotide; TGTTGTTT chr2 60474132 60474151 60474135 -
aaaaggtgaagttagtaacc

SEQ ID NO: 192700 - DNA, 20 bp, Artificial Sequence
  Synthetic oligonucleotide; AAGAGTTT chr2 60474086 60474105 60474089 -
gaggatagcattgatcaaaa

SEQ ID NO: 192701 - DNA, 20 bp, Artificial Sequence
  Synthetic oligonucleotide; GAGTGATT chr2 60474072 60474091 60474075 -
tcaaaaaagagttttaaaat

SEQ ID NO: 192702 - DNA, 20 bp, Artificial Sequence
  Synthetic oligonucleotide; GAGAGTTT chr2 60474015 60474034 60474018 -
aaggaatctaaggaccatga

SEQ ID NO: 192703 - DNA, 20 bp, Artificial Sequence
  Synthetic oligonucleotide; TATTGCTT chr2 60473973 60473992 60473976 -
tatattgtagtgtctataat

SEQ ID NO: 192704 - DNA, 20 bp, Artificial Sequence
  Synthetic oligonucleotide; TTTTGTTT chr2 60473963 60473982 60473966 -
tgtctataattattgctttc

SEQ ID NO: 192705 - DNA, 20 bp, Artificial Sequence
  Synthetic oligonucleotide; TCAGGATT chr2 60473929 60473948 60473932 -
aatacactttttaaagaaca

SEQ ID NO: 192706 - DNA, 20 bp, Artificial Sequence
  Synthetic oligonucleotide; GTGCGATT chr2 60473845 60473864 60473848 -
catttctagaacaaaagaga

SEQ ID NO: 192707 - DNA, 20 bp, Artificial Sequence
  Synthetic oligonucleotide; TACAGATT chr2 60473774 60473793 60473777 -
taaagctggcacattttcat

SEQ ID NO: 192708 - DNA, 20 bp, Artificial Sequence
  Synthetic oligonucleotide; TAATGTTT chr2 60473740 60473759 60473743 -
actcaagtcacaggcatagc

SEQ ID NO: 192709 - DNA, 20 bp, Artificial Sequence
  Synthetic oligonucleotide; TGTGGCTT chr2 60473571 60473590 60473574 -
agctgcactgttgttatttg

SEQ ID NO: 192710 - DNA, 20 bp, Artificial Sequence
  Synthetic oligonucleotide; ATCGGATT chr2 60473553 60473572 60473556 -
tgtgtggcttgaacctagta

SEQ ID NO: 192711 - DNA, 20 bp, Artificial Sequence
  Synthetic oligonucleotide; TGAGGATT chr2 60473449 60473468 60473452 -
catggaagagctgagggact

SEQ ID NO: 192712 - DNA, 20 bp, Artificial Sequence
  Synthetic oligonucleotide; TACTGCTT chr2 60473281 60473300 60473284 -
cattccacgtgggacagctc

SEQ ID NO: 192713 - DNA, 20 bp, Artificial Sequence
  Synthetic oligonucleotide; ATATGTTT chr2 60473221 60473240 60473224 -
cagggaaattatctaaaaac

SEQ ID NO: 192714 - DNA, 20 bp, Artificial Sequence
  Synthetic oligonucleotide; AAATGCTT chr2 60473007 60473026 60473010 -
taacacacatatgtacacat

SEQ ID NO: 192715 - DNA, 20 bp, Artificial Sequence
  Synthetic oligonucleotide; TGTGGTTT chr2 60472935 60472954 60472938 -
tgtactcctgtggagagtcc

SEQ ID NO: 192716 - DNA, 20 bp, Artificial Sequence
  Synthetic oligonucleotide; TGATGCTT chr2 60472877 60472896 60472880 -
agtcattaaacgtgttggaa

SEQ ID NO: 192717 - DNA, 20 bp, Artificial Sequence
  Synthetic oligonucleotide; TTTTGCTT chr2 60472870 60472889 60472873 -
aaacgtgttggaatgatgct

SEQ ID NO: 192718 - DNA, 20 bp, Artificial Sequence
  Synthetic oligonucleotide; AGCTGTTT chr2 60472862 60472881 60472865 -
tggaatgatgctttttgctt

SEQ ID NO: 192719 - DNA, 20 bp, Artificial Sequence
  Synthetic oligonucleotide; TGTTGATT chr2 60472825 60472844 60472828 -
tggaaatctgcagtattacc

SEQ ID NO: 192720 - DNA, 20 bp, Artificial Sequence
  Synthetic oligonucleotide; CAGTGATT chr2 60472786 60472805 60472789 -
atgtggctgtattacacacc

SEQ ID NO: 192721 - DNA, 20 bp, Artificial Sequence
  Synthetic oligonucleotide; ATTAGTTT chr2 60472781 60472800 60472784 -
gctgtattacacacccagtg

SEQ ID NO: 192722 - DNA, 20 bp, Artificial Sequence
  Synthetic oligonucleotide; ACTTGATT chr2 60472711 60472730 60472714 -
gttcttgaggaaaccaaaaa

SEQ ID NO: 192723 - DNA, 20 bp, Artificial Sequence
  Synthetic oligonucleotide; CTGGGCTT chr2 60472675 60472694 60472678 -
taaattccaggaacatccca

SEQ ID NO: 192724 - DNA, 20 bp, Artificial Sequence
  Synthetic oligonucleotide; CCCAGTTT chr2 60472586 60472605 60472589 -
aacattaaatcaaagccatt

SEQ ID NO: 192725 - DNA, 20 bp, Artificial Sequence
  Synthetic oligonucleotide; AAAAGATT chr2 60472387 60472406 60472390 -
aaaagtgtaagacatttgaa

SEQ ID NO: 192726 - DNA, 20 bp, Artificial Sequence
  Synthetic oligonucleotide; GTCGGCTT chr2 60472275 60472294 60472278 -
acagctgcgttcgctgacat

SEQ ID NO: 192727 - DNA, 20 bp, Artificial Sequence
  Synthetic oligonucleotide; GCTGGTTT chr2 60472230 60472249 60472233 -
acacaatctgtctggcacaa

SEQ ID NO: 192728 - DNA, 20 bp, Artificial Sequence
  Synthetic oligonucleotide; TAGGGATT chr2 60472107 60472126 60472110 -
tttcctaatggagggatcct

SEQ ID NO: 192729 - DNA, 20 bp, Artificial Sequence
  Synthetic oligonucleotide; CTAAGCTT chr2 60472097 60472116 60472100 -
gagggatccttagggattcc

SEQ ID NO: 192730 - DNA, 20 bp, Artificial Sequence
  Synthetic oligonucleotide; ATTTGTTT chr2 60472088 60472107 60472091 -
ttagggattccctaagctta

SEQ ID NO: 192731 - DNA, 20 bp, Artificial Sequence
  Synthetic oligonucleotide; CAAAGCTT chr2 60471995 60472014 60471998 -
ggtctctgcccagggaattt

SEQ ID NO: 192732 - DNA, 20 bp, Artificial Sequence
  Synthetic oligonucleotide; TGCTGATT chr2 60471952 60471971 60471955 -
cccttaccctaagacagcag

SEQ ID NO: 192733 - DNA, 20 bp, Artificial Sequence
  Synthetic oligonucleotide; TTCAGCTT chr2 60471946 60471965 60471949 -
ccctaagacagcagtgctga

SEQ ID NO: 192734 - DNA, 20 bp, Artificial Sequence
  Synthetic oligonucleotide; GGCTGCTT chr2 60471895 60471914 60471898 -
agaatttattcaacatagaa

SEQ ID NO: 192735 - DNA, 20 bp, Artificial Sequence
  Synthetic oligonucleotide; TTCTGATT chr2 60471874 60471893 60471877 -
gctgcttccccaccctcaat

SEQ ID NO: 192736 - DNA, 20 bp, Artificial Sequence
  Synthetic oligonucleotide; TCGAGTTT chr2 60471591 60471610 60471594 -
tgggaaggcagagctgctcc

SEQ ID NO: 192737 - DNA, 20 bp, Artificial Sequence
  Synthetic oligonucleotide; TGTCGATT chr2 60471453 60471472 60471456 -
atttccagttcatgtgggaa

SEQ ID NO: 192738 - DNA, 20 bp, Artificial Sequence
  Synthetic oligonucleotide; ATGTGTTT chr2 60471420 60471439 60471423 -
taccaaagagaatattatgg

SEQ ID NO: 192739 - DNA, 20 bp, Artificial Sequence
  Synthetic oligonucleotide; GTTGGCTT chr2 60471377 60471396 60471380 -
agaatcagctggggtcccca

SEQ ID NO: 192740 - DNA, 20 bp, Artificial Sequence
  Synthetic oligonucleotide; CTTTGCTT chr2 60471372 60471391 60471375 -
cagctggggtccccagttgg

SEQ ID NO: 192741 - DNA, 20 bp, Artificial Sequence
  Synthetic oligonucleotide; GTGTGCTT chr2 60471313 60471332 60471316 -
gggtgagtctcacaaagaca

SEQ ID NO: 192742 - DNA, 20 bp, Artificial Sequence
  Synthetic oligonucleotide; AATAGCTT chr2 60471292 60471311 60471295 -
tgtgctttttttctaaagta

SEQ ID NO: 192743 - DNA, 20 bp, Artificial Sequence
  Synthetic oligonucleotide; AAATGTTT chr2 60471271 60471290 60471274 -
atagcttcttaggctgatag

SEQ ID NO: 192744 - DNA, 20 bp, Artificial Sequence
  Synthetic oligonucleotide; CCTTGTTT chr2 60471178 60471197 60471181 -
ggcccaggcagcagagcagg

SEQ ID NO: 192745 - DNA, 20 bp, Artificial Sequence
  Synthetic oligonucleotide; TACTGCTT chr2 60471081 60471100 60471084 -
cctcccccaagacggttaag

SEQ ID NO: 192746 - DNA, 20 bp, Artificial Sequence
  Synthetic oligonucleotide; AGGAGATT chr2 60470967 60470986 60470970 -
agaccactggatcaggagtc

SEQ ID NO: 192747 - DNA, 20 bp, Artificial Sequence
  Synthetic oligonucleotide; CTCAGTTT chr2 60470891 60470910 60470894 -
gtcacttaatttctcatggc

SEQ ID NO: 192748 - DNA, 20 bp, Artificial Sequence
  Synthetic oligonucleotide; TAGGGTTT chr2 60470845 60470864 60470848 -
gggacagacttgatgatagc

SEQ ID NO: 192749 - DNA, 20 bp, Artificial Sequence
  Synthetic oligonucleotide; GTCAGCTT chr2 60470721 60470740 60470724 -
tgtagagatctggtcctgcc

SEQ ID NO: 192750 - DNA, 20 bp, Artificial Sequence
  Synthetic oligonucleotide; GCTTGTTT chr2 60470717 60470736 60470720 -
gagatctggtcctgccgtca

SEQ ID NO: 192751 - DNA, 20 bp, Artificial Sequence
  Synthetic oligonucleotide; ATGGGTTT chr2 60470702 60470721 60470705 -
cgtcagcttgtttagggcta

SEQ ID NO: 192752 - DNA, 20 bp, Artificial Sequence
  Synthetic oligonucleotide; ACAAGTTT chr2 60470690 60470709 60470693 -
tagggctaatgggtttgtag

SEQ ID NO: 192753 - DNA, 20 bp, Artificial Sequence
  Synthetic oligonucleotide; AAGAGATT chr2 60470676 60470695 60470679 -
ttgtagacaagtttgccaac

SEQ ID NO: 192754 - DNA, 20 bp, Artificial Sequence
  Synthetic oligonucleotide; CATGGATT chr2 60470652 60470671 60470655 -
gattcatgcgaggggctagg

SEQ ID NO: 192755 - DNA, 20 bp, Artificial Sequence
  Synthetic oligonucleotide; TTGCGTTT chr2 60470524 60470543 60470527 -
tacaaggatccaagtacctg

SEQ ID NO: 192756 - DNA, 20 bp, Artificial Sequence
  Synthetic oligonucleotide; CTGTGTTT chr2 60470486 60470505 60470489 -
cacagagatacctgggttgc

SEQ ID NO: 192757 - DNA, 20 bp, Artificial Sequence
  Synthetic oligonucleotide; GTCTGTTT chr2 60470464 60470483 60470467 -
gtgtttcctaagaaaaggat

SEQ ID NO: 192758 - DNA, 20 bp, Artificial Sequence
  Synthetic oligonucleotide; GATGGATT chr2 60470412 60470431 60470415 -
gaggcaaaaacaagtgcaaa

SEQ ID NO: 192759 - DNA, 20 bp, Artificial Sequence
  Synthetic oligonucleotide; CTCAGATT chr2 60470404 60470423 60470407 -
aacaagtgcaaagatggatt

SEQ ID NO: 192760 - DNA, 20 bp, Artificial Sequence
  Synthetic oligonucleotide; ACTTGTTT chr2 60470309 60470328 60470312 -
aaacagtcaaatgtagacat

SEQ ID NO: 192761 - DNA, 20 bp, Artificial Sequence
  Synthetic oligonucleotide; TCCTGCTT chr2 60470287 60470306 60470290 -
ttgtttgttaagtccggtct

SEQ ID NO: 192762 - DNA, 20 bp, Artificial Sequence
  Synthetic oligonucleotide; TGGTGTTT chr2 60470263 60470282 60470266 -
gcttgtgttggttcactttg

SEQ ID NO: 192763 - DNA, 20 bp, Artificial Sequence
  Synthetic oligonucleotide; TTTTGTTT chr2 60470254 60470273 60470257 -
ggttcactttgtggtgttta

SEQ ID NO: 192764 - DNA, 20 bp, Artificial Sequence
  Synthetic oligonucleotide; TGGTGCTT chr2 60470200 60470219 60470203 -
gtagatgttctcaggctagg

SEQ ID NO: 192765 - DNA, 20 bp, Artificial Sequence
  Synthetic oligonucleotide; CAGGGCTT chr2 60470188 60470207 60470191 -
aggctaggtggtgcttccac

SEQ ID NO: 192766 - DNA, 20 bp, Artificial Sequence
  Synthetic oligonucleotide; CTGTGCTT chr2 60470062 60470081 60470065 -
tcttgtcccaactgccttgg

SEQ ID NO: 192767 - DNA, 20 bp, Artificial Sequence
  Synthetic oligonucleotide; TACTGTTT chr2 60469941 60469960 60469944 -
tattaagctaatggaaaaca

SEQ ID NO: 192768 - DNA, 20 bp, Artificial Sequence
  Synthetic oligonucleotide; GTCTGTTT chr2 60469920 60469939 60469923 -
actgtttgttcaccatcaaa

SEQ ID NO: 192769 - DNA, 20 bp, Artificial Sequence
  Synthetic oligonucleotide; CCCAGATT chr2 60469742 60469761 60469745 -
accacataaaccgtaaaatc

SEQ ID NO: 192770 - DNA, 20 bp, Artificial Sequence
  Synthetic oligonucleotide; AAATGTTT chr2 60469690 60469709 60469693 -
caaaaaaatctcagtgctac

SEQ ID NO: 192771 - DNA, 20 bp, Artificial Sequence
  Synthetic oligonucleotide; ATTAGATT chr2 60469674 60469693 60469677 -
ctacaaatgtttcattgact

SEQ ID NO: 192772 - DNA, 20 bp, Artificial Sequence
  Synthetic oligonucleotide; CAGGGTTT chr2 60469593 60469612 60469596 -
gtaaaatggtgaagatgggt

SEQ ID NO: 192773 - DNA, 20 bp, Artificial Sequence
  Synthetic oligonucleotide; CATTGCTT chr2 60469495 60469514 60469498 -
gaagtctaatctttatcttc

SEQ ID NO: 192774 - DNA, 20 bp, Artificial Sequence
  Synthetic oligonucleotide; TAAGGTTT chr2 60469462 60469481 60469465 -
tgtgagaagccacatctgtg

SEQ ID NO: 192775 - DNA, 20 bp, Artificial Sequence
  Synthetic oligonucleotide; ACAGGATT chr2 60469447 60469466 60469450 -
ctgtgtaaggtttccagttg

SEQ ID NO: 192776 - DNA, 20 bp, Artificial Sequence
  Synthetic oligonucleotide; CCAGGTTT chr2 60469407 60469426 60469410 -
ccagctcagtccagaaatgc

SEQ ID NO: 192777 - DNA, 20 bp, Artificial Sequence
  Synthetic oligonucleotide; AAACGATT chr2 60469309 60469328 60469312 -
gtgggactctgtcccataaa

SEQ ID NO: 192778 - DNA, 20 bp, Artificial Sequence
  Synthetic oligonucleotide; TTTTGCTT chr2 60469274 60469293 60469277 -
ctactcatttcctatcagca

SEQ ID NO: 192779 - DNA, 20 bp, Artificial Sequence
  Synthetic oligonucleotide; TTTTGCTT chr2 60469267 60469286 60469270 -
tttcctatcagcattttgct

SEQ ID NO: 192780 - DNA, 20 bp, Artificial Sequence
  Synthetic oligonucleotide; TTGGGTTT chr2 60469261 60469280 60469264 -
atcagcattttgctttttgc

SEQ ID NO: 192781 - DNA, 20 bp, Artificial Sequence
  Synthetic oligonucleotide; CCATGTTT chr2 60469197 60469216 60469200 -
gccttgcagataaaatcccc

SEQ ID NO: 192782 - DNA, 20 bp, Artificial Sequence
  Synthetic oligonucleotide; ACCAGTTT chr2 60469170 60469189 60469173 -
tccaggctacccacaatatt

SEQ ID NO: 192783 - DNA, 20 bp, Artificial Sequence
  Synthetic oligonucleotide; TGCTGCTT chr2 60469156 60469175 60469159 -
aatattaccagttttcccct

SEQ ID NO: 192784 - DNA, 20 bp, Artificial Sequence
  Synthetic oligonucleotide; TTTTGTTT chr2 60468984 60469003 60468987 -
gaaataactcaccactcttc

SEQ ID NO: 192785 - DNA, 20 bp, Artificial Sequence
  Synthetic oligonucleotide; TGTGGTTT chr2 60468894 60468913 60468897 -
ggaattgaaatgtgatatcc

SEQ ID NO: 192786 - DNA, 20 bp, Artificial Sequence
  Synthetic oligonucleotide; CGTTGTTT chr2 60468878 60468897 60468881 -
atcctgtggtttatgatgca

SEQ ID NO: 192787 - DNA, 20 bp, Artificial Sequence
  Synthetic oligonucleotide; TAGTGCTT chr2 60468863 60468882 60468866 -
atgcacgttgtttgtagctg

SEQ ID NO: 192788 - DNA, 20 bp, Artificial Sequence
  Synthetic oligonucleotide; GCTTGATT chr2 60468859 60468878 60468862 -
acgttgtttgtagctgtagt

SEQ ID NO: 192789 - DNA, 20 bp, Artificial Sequence
  Synthetic oligonucleotide; TTGGGTTT chr2 60468851 60468870 60468854 -
tgtagctgtagtgcttgatt

SEQ ID NO: 192790 - DNA, 20 bp, Artificial Sequence
  Synthetic oligonucleotide; AATAGATT chr2 60468631 60468650 60468634 -
actgaaggagttacttccaa

SEQ ID NO: 192791 - DNA, 20 bp, Artificial Sequence
  Synthetic oligonucleotide; TAGTGATT chr2 60468460 60468479 60468463 -
gtcttgtcttgctccgtggc

SEQ ID NO: 192792 - DNA, 20 bp, Artificial Sequence
  Synthetic oligonucleotide; GTCAGTTT chr2 60468333 60468352 60468336 -
caaggccagaatcaaaagga

SEQ ID NO: 192793 - DNA, 20 bp, Artificial Sequence
  Synthetic oligonucleotide; CCTGGTTT chr2 60468214 60468233 60468217 -
taattttgactaatttttct

SEQ ID NO: 192794 - DNA, 20 bp, Artificial Sequence
  Synthetic oligonucleotide; GTGAGCTT chr2 60467048 60467067 60467051 -
accaccatttacttgttcaa

SEQ ID NO: 192795 - DNA, 20 bp, Artificial Sequence
  Synthetic oligonucleotide; AAATGTTT chr2 60466994 60467013 60466997 -
ttaaatttgtccatttatac

SEQ ID NO: 192796 - DNA, 20 bp, Artificial Sequence
  Synthetic oligonucleotide; TACTGTTT chr2 60466977 60466996 60466980 -
tacaaatgttttctgaaaga

SEQ ID NO: 192797 - DNA, 20 bp, Artificial Sequence
  Synthetic oligonucleotide; TACAGTTT chr2 60466959 60466978 60466962 -
gatactgttttagaaaataa

SEQ ID NO: 192798 - DNA, 20 bp, Artificial Sequence
  Synthetic oligonucleotide; GTTTGCTT chr2 60466955 60466974 60466958 -
ctgttttagaaaataataca

SEQ ID NO: 192799 - DNA, 20 bp, Artificial Sequence
  Synthetic oligonucleotide; CAGTGATT chr2 60466891 60466910 60466894 -
ctaaaaggttagggggtggg

SEQ ID NO: 192800 - DNA, 20 bp, Artificial Sequence
  Synthetic oligonucleotide; GACTGTTT chr2 60466712 60466731 60466715 -
agagttaaggctctaagggg

SEQ ID NO: 192801 - DNA, 20 bp, Artificial Sequence
  Synthetic oligonucleotide; ACCAGATT chr2 60466634 60466653 60466637 -
agcagggcatgcaccctgag

SEQ ID NO: 192802 - DNA, 20 bp, Artificial Sequence
  Synthetic oligonucleotide; AGTTGTTT chr2 60466619 60466638 60466622 -
ctgagaccagattcaaagcc

SEQ ID NO: 192803 - DNA, 20 bp, Artificial Sequence
  Synthetic oligonucleotide; CACAGATT chr2 60466462 60466481 60466465 -
ggcctaagcctgggttaggt

SEQ ID NO: 192804 - DNA, 20 bp, Artificial Sequence
  Synthetic oligonucleotide; GAAGGTTT chr2 60466451 60466470 60466454 -
gggttaggtcacagattgca

SEQ ID NO: 192805 - DNA, 20 bp, Artificial Sequence
  Synthetic oligonucleotide; CACGGTTT chr2 60466430 60466449 60466433 -
aaggtttaggaggttgggct

SEQ ID NO: 192806 - DNA, 20 bp, Artificial Sequence
  Synthetic oligonucleotide; GGGAGTTT chr2 60466215 60466234 60466218 -
gcctggtcttcctgagggct

SEQ ID NO: 192807 - DNA, 20 bp, Artificial Sequence
  Synthetic oligonucleotide; GTTTGATT chr2 60466211 60466230 60466214 -
ggtcttcctgagggctggga

SEQ ID NO: 192808 - DNA, 20 bp, Artificial Sequence
  Synthetic oligonucleotide; CTGAGCTT chr2 60466187 60466206 60466190 -
gatttgactggtaggaaagt

SEQ ID NO: 192809 - DNA, 20 bp, Artificial Sequence
  Synthetic oligonucleotide; CATAGTTT chr2 60466133 60466152 60466136 -
cttcccacaaagggagggta

SEQ ID NO: 192810 - DNA, 20 bp, Artificial Sequence
  Synthetic oligonucleotide; CCTGGCTT chr2 60465994 60466013 60465997 -
ggcggcattaacctgctgcc

SEQ ID NO: 192811 - DNA, 20 bp, Artificial Sequence
  Synthetic oligonucleotide; GATAGTTT chr2 60465781 60465800 60465784 -
ctcacattcacattcgacct

SEQ ID NO: 192812 - DNA, 20 bp, Artificial Sequence
  Synthetic oligonucleotide; GAGGGCTT chr2 60465770 60465789 60465773 -
attcgacctgatagtttaca

SEQ ID NO: 192813 - DNA, 20 bp, Artificial Sequence
  Synthetic oligonucleotide; TACTGTTT chr2 60465719 60465738 60465722 -
ttcccaacaattcttacagg

SEQ ID NO: 192814 - DNA, 20 bp, Artificial Sequence
  Synthetic oligonucleotide; TGAGGCTT chr2 60465587 60465606 60465590 -
ctccttgttcttctgaatct

SEQ ID NO: 192815 - DNA, 20 bp, Artificial Sequence
  Synthetic oligonucleotide; AGCTGATT chr2 60465478 60465497 60465481 -
aagccagtaggtgggctaat

SEQ ID NO: 192816 - DNA, 20 bp, Artificial Sequence
  Synthetic oligonucleotide; CTATGCTT chr2 60465445 60465464 60465448 -
ccttttgatgtctcaagttc

SEQ ID NO: 192817 - DNA, 20 bp, Artificial Sequence
  Synthetic oligonucleotide; GTCAGTTT chr2 60465426 60465445 60465429 -
cctatgcttaggggccaggt

SEQ ID NO: 192818 - DNA, 20 bp, Artificial Sequence
  Synthetic oligonucleotide; AGTTGATT chr2 60465362 60465381 60465365 -
atgaggctctcaaattgaga

SEQ ID NO: 192819 - DNA, 20 bp, Artificial Sequence
  Synthetic oligonucleotide; TGCAGTTT chr2 60465189 60465208 60465192 -
gtaacacatttattgatgac

SEQ ID NO: 192820 - DNA, 20 bp, Artificial Sequence
  Synthetic oligonucleotide; TACAGATT chr2 60465119 60465138 60465122 -
ccggcatgagctgagtgaaa

SEQ ID NO: 192821 - DNA, 20 bp, Artificial Sequence
  Synthetic oligonucleotide; ACCAGTTT chr2 60465060 60465079 60465063 -
ttagtggactggtaataatt

SEQ ID NO: 192822 - DNA, 20 bp, Artificial Sequence
  Synthetic oligonucleotide; TTATGATT chr2 60464993 60465012 60464996 -
aacagcccttctcattgaca

SEQ ID NO: 192823 - DNA, 20 bp, Artificial Sequence
  Synthetic oligonucleotide; AAAAGTTT chr2 60464796 60464815 60464799 -
tcacataactggctctgaaa

SEQ ID NO: 192824 - DNA, 20 bp, Artificial Sequence
  Synthetic oligonucleotide; CACAGATT chr2 60464696 60464715 60464699 -
cttgatgtagtgctgtatgc

SEQ ID NO: 192825 - DNA, 20 bp, Artificial Sequence
  Synthetic oligonucleotide; CCTGGATT chr2 60464621 60464640 60464624 -
ccactaattatgagtctagt

SEQ ID NO: 192826 - DNA, 20 bp, Artificial Sequence
  Synthetic oligonucleotide; CGATGTTT chr2 60464608 60464627 60464611 -
gtctagtcctggatttcaat

SEQ ID NO: 192827 - DNA, 20 bp, Artificial Sequence
  Synthetic oligonucleotide; CTTGGATT chr2 60464548 60464567 60464551 -
agtgatgaacgtgttaagga

SEQ ID NO: 192828 - DNA, 20 bp, Artificial Sequence
  Synthetic oligonucleotide; GATAGTTT chr2 60464422 60464441 60464425 -
ggatcatgtagttggaacca

SEQ ID NO: 192829 - DNA, 20 bp, Artificial Sequence
  Synthetic oligonucleotide; TGAAGCTT chr2 60464345 60464364 60464348 -
atttataaaaatgttctcaa

SEQ ID NO: 192830 - DNA, 20 bp, Artificial Sequence
  Synthetic oligonucleotide; CAGCGTTT chr2 60464277 60464296 60464280 -
agataatgtgatactaatgt

SEQ ID NO: 192831 - DNA, 20 bp, Artificial Sequence
  Synthetic oligonucleotide; AAATGTTT chr2 60464225 60464244 60464228 -
ttcccccttccacattagac

SEQ ID NO: 192832 - DNA, 20 bp, Artificial Sequence
  Synthetic oligonucleotide; TCTTGTTT chr2 60464187 60464206 60464190 -
tttggtatcttaccatctaa

SEQ ID NO: 192833 - DNA, 20 bp, Artificial Sequence
  Synthetic oligonucleotide; AAGAGATT chr2 60464179 60464198 60464182 -
cttaccatctaatcttgttt

SEQ ID NO: 192834 - DNA, 20 bp, Artificial Sequence
  Synthetic oligonucleotide; GTGGGATT chr2 60464148 60464167 60464151 -
ccaggagtgagatatattga

SEQ ID NO: 192835 - DNA, 20 bp, Artificial Sequence
  Synthetic oligonucleotide; AAGTGCTT chr2 60464085 60464104 60464088 -
caggagtccattatttagac

SEQ ID NO: 192836 - DNA, 20 bp, Artificial Sequence
  Synthetic oligonucleotide; GCTGGCTT chr2 60464070 60464089 60464073 -
tagacaagtgcttgagcgag

SEQ ID NO: 192837 - DNA, 20 bp, Artificial Sequence
  Synthetic oligonucleotide; CAGTGTTT chr2 60464050 60464069 60464053 -
gctggcttattttggaatac

SEQ ID NO: 192838 - DNA, 20 bp, Artificial Sequence
  Synthetic oligonucleotide; GCCGGCTT chr2 60464021 60464040 60464024 -
ggggctcctgagaagaccct

SEQ ID NO: 192839 - DNA, 20 bp, Artificial Sequence
  Synthetic oligonucleotide; AATTGATT chr2 60463980 60463999 60463983 -
gctaaatggaggcatcatat

SEQ ID NO: 192840 - DNA, 20 bp, Artificial Sequence
  Synthetic oligonucleotide; GGTAGATT chr2 60463943 60463962 60463946 -
ttctcactcttaacctccct

SEQ ID NO: 192841 - DNA, 20 bp, Artificial Sequence
  Synthetic oligonucleotide; AAAAGTTT chr2 60463847 60463866 60463850 -
ccttcttttaaaagaaggag

SEQ ID NO: 192842 - DNA, 20 bp, Artificial Sequence
  Synthetic oligonucleotide; TAAGGCTT chr2 60463819 60463838 60463822 -
gttatttctcagttatattt

SEQ ID NO: 192843 - DNA, 20 bp, Artificial Sequence
  Synthetic oligonucleotide; GGAAGTTT chr2 60463793 60463812 60463796 -
tttttttttcagaatctctg

SEQ ID NO: 192844 - DNA, 20 bp, Artificial Sequence
  Synthetic oligonucleotide; TTTTGTTT chr2 60463788 60463807 60463791 -
ttttcagaatctctgggaag

SEQ ID NO: 192845 - DNA, 20 bp, Artificial Sequence
  Synthetic oligonucleotide; GACGGCTT chr2 60463524 60463543 60463527 -
ttaagcagggcccctctcca

SEQ ID NO: 192846 - DNA, 20 bp, Artificial Sequence
  Synthetic oligonucleotide; TTCTGTTT chr2 60463480 60463499 60463483 -
tgactagctgaactgtatct

SEQ ID NO: 192847 - DNA, 20 bp, Artificial Sequence
  Synthetic oligonucleotide; GGCTGTTT chr2 60463340 60463359 60463343 -
ctgctgcctgtcatggcgct

SEQ ID NO: 192848 - DNA, 20 bp, Artificial Sequence
  Synthetic oligonucleotide; GTCTGCTT chr2 60463305 60463324 60463308 -
tccttaaactaggatgctgt

SEQ ID NO: 192849 - DNA, 20 bp, Artificial Sequence
  Synthetic oligonucleotide; TAAAGATT chr2 60463231 60463250 60463234 -
tctgaccgggggacaactcc

SEQ ID NO: 192850 - DNA, 20 bp, Artificial Sequence
  Synthetic oligonucleotide; TGAAGTTT chr2 60463196 60463215 60463199 -
gcctatccgttaaatctgaa

SEQ ID NO: 192851 - DNA, 20 bp, Artificial Sequence
  Synthetic oligonucleotide; TTCAGATT chr2 60463184 60463203 60463187 -
aatctgaatgaagtttttct

SEQ ID NO: 192852 - DNA, 20 bp, Artificial Sequence
  Synthetic oligonucleotide; GTGTGTTT chr2 60463010 60463029 60463013 -
tttaacaatatcaacaatta

SEQ ID NO: 192853 - DNA, 20 bp, Artificial Sequence
  Synthetic oligonucleotide; AAATGTTT chr2 60462921 60462940 60462924 -
ccttttttgatacctctatg

SEQ ID NO: 192854 - DNA, 20 bp, Artificial Sequence
  Synthetic oligonucleotide; CTGGGATT chr2 60462869 60462888 60462872 -
acccaggggggaatagaaag

SEQ ID NO: 192855 - DNA, 20 bp, Artificial Sequence
  Synthetic oligonucleotide; AAAAGTTT chr2 60462851 60462870 60462854 -
agctgggatttaggaagcca

SEQ ID NO: 192856 - DNA, 20 bp, Artificial Sequence
  Synthetic oligonucleotide; CCAAGTTT chr2 60462827 60462846 60462830 -
gtttccttgggtcaccttgt

SEQ ID NO: 192857 - DNA, 20 bp, Artificial Sequence
  Synthetic oligonucleotide; GATGGCTT chr2 60462780 60462799 60462783 -
acagaggcacatggagatga

SEQ ID NO: 192858 - DNA, 20 bp, Artificial Sequence
  Synthetic oligonucleotide; GAAAGTTT chr2 60462746 60462765 60462749 -
aactacagctgatggaactg

SEQ ID NO: 192859 - DNA, 20 bp, Artificial Sequence
  Synthetic oligonucleotide; TCAGGATT chr2 60462679 60462698 60462682 -
catcctcaagccagaactgg

SEQ ID NO: 192860 - DNA, 20 bp, Artificial Sequence
  Synthetic oligonucleotide; TTCTGCTT chr2 60462670 60462689 60462673 -
gccagaactggtcaggattt

SEQ ID NO: 192861 - DNA, 20 bp, Artificial Sequence
  Synthetic oligonucleotide; TGGGGATT chr2 60462662 60462681 60462665 -
tggtcaggatttttctgctt

SEQ ID NO: 192862 - DNA, 20 bp, Artificial Sequence
  Synthetic oligonucleotide; CTGAGTTT chr2 60462635 60462654 60462638 -
tggatataaaatttctagaa

SEQ ID NO: 192863 - DNA, 20 bp, Artificial Sequence
  Synthetic oligonucleotide; GAGGGCTT chr2 60462549 60462568 60462552 -
ggcacagggggtaggtcagt

SEQ ID NO: 192864 - DNA, 20 bp, Artificial Sequence
  Synthetic oligonucleotide; CAGTGATT chr2 60462466 60462485 60462469 -
gcaattgctgatgcccgcct

SEQ ID NO: 192865 - DNA, 20 bp, Artificial Sequence
  Synthetic oligonucleotide; CATGGTTT chr2 60462368 60462387 60462371 -
caaacagccattcaccagtg

SEQ ID NO: 192866 - DNA, 20 bp, Artificial Sequence
  Synthetic oligonucleotide; CATGGATT chr2 60462336 60462355 60462339 -
tgcaacacgcacagaacact

SEQ ID NO: 192867 - DNA, 20 bp, Artificial Sequence
  Synthetic oligonucleotide; ATGGGATT chr2 60462230 60462249 60462233 -
tccttcccagccacctctcc

SEQ ID NO: 192868 - DNA, 20 bp, Artificial Sequence
  Synthetic oligonucleotide; AGAGGCTT chr2 60462166 60462185 60462169 -
ataccaggatcagtatcgag

SEQ ID NO: 192869 - DNA, 20 bp, Artificial Sequence
  Synthetic oligonucleotide; GGGCGCTT chr2 60462144 60462163 60462147 -
aggcttccggcctggcagaa

SEQ ID NO: 192870 - DNA, 20 bp, Artificial Sequence
  Synthetic oligonucleotide; CCCTGTTT chr2 60462122 60462141 60462125 -
gcgctttccacccactcccc

SEQ ID NO: 192871 - DNA, 20 bp, Artificial Sequence
  Synthetic oligonucleotide; CATGGATT chr2 60461977 60461996 60461980 -
atggctatggagcctcccgc

SEQ ID NO: 192872 - DNA, 20 bp, Artificial Sequence
  Synthetic oligonucleotide; TACGGCTT chr2 60461376 60461395 60461379 -
cggagagcgagagggtggac

SEQ ID NO: 192873 - DNA, 20 bp, Artificial Sequence
  Synthetic oligonucleotide; CTTAGCTT chr2 60460893 60460912 60460896 -
ggcagctcaaagatcccttc

SEQ ID NO: 192874 - DNA, 20 bp, Artificial Sequence
  Synthetic oligonucleotide; GGGAGTTT chr2 60460830 60460849 60460833 -
cggagcactcctcggagaac

SEQ ID NO: 192875 - DNA, 20 bp, Artificial Sequence
  Synthetic oligonucleotide; TTGCGCTT chr2 60460824 60460843 60460827 -
actcctcggagaacgggagt

SEQ ID NO: 192876 - DNA, 20 bp, Artificial Sequence
  Synthetic oligonucleotide; GGACGTTT chr2 60460522 60460541 60460525 -
acgcatggccaggtggggaa

SEQ ID NO: 192877 - DNA, 20 bp, Artificial Sequence
  Synthetic oligonucleotide; GTAGGATT chr2 60460317 60460336 60460320 -
gccctccagccccactccct

SEQ ID NO: 192878 - DNA, 20 bp, Artificial Sequence
  Synthetic oligonucleotide; ATGTGATT chr2 60460296 60460315 60460299 -
taggatttttttctagtccc

SEQ ID NO: 192879 - DNA, 20 bp, Artificial Sequence
  Synthetic oligonucleotide; GAGTGCTT chr2 60460242 60460261 60460245 -
taacgaagctaagaatatga

SEQ ID NO: 192880 - DNA, 20 bp, Artificial Sequence
  Synthetic oligonucleotide; ACCTGTTT chr2 60460223 60460242 60460226 -
agagtgcttgtcaccagcac

SEQ ID NO: 192881 - DNA, 20 bp, Artificial Sequence
  Synthetic oligonucleotide; CACCGTTT chr2 60460157 60460176 60460160 -
ttttttttcctttatgttct

SEQ ID NO: 192882 - DNA, 20 bp, Artificial Sequence
  Synthetic oligonucleotide; GTATGTTT chr2 60460066 60460085 60460069 -
tgcaataatttacatgttgt

SEQ ID NO: 192883 - DNA, 20 bp, Artificial Sequence
  Synthetic oligonucleotide; TGCTGTTT chr2 60459980 60459999 60459983 -
tcgttgctgagcaaacatgt

SEQ ID NO: 192884 - DNA, 20 bp, Artificial Sequence
  Synthetic oligonucleotide; TACAGTTT chr2 60459896 60459915 60459899 -
attctgtaatacatatcatg

SEQ ID NO: 192885 - DNA, 20 bp, Artificial Sequence
  Synthetic oligonucleotide; TTTGGATT chr2 60459858 60459877 60459861 -
cgtgaggaggaaaaacagtc

SEQ ID NO: 192886 - DNA, 20 bp, Artificial Sequence
  Synthetic oligonucleotide; ACAAGTTT chr2 60459716 60459735 60459719 -
caaattaacagaaaaacaga

SEQ ID NO: 192887 - DNA, 20 bp, Artificial Sequence
  Synthetic oligonucleotide; TTTGGTTT chr2 60459699 60459718 60459702 -
agaacaagtttattctatca

SEQ ID NO: 192888 - DNA, 20 bp, Artificial Sequence
  Synthetic oligonucleotide; TGTAGCTT chr2 60459627 60459646 60459630 -
ctttctacttgttataaact

SEQ ID NO: 192889 - DNA, 20 bp, Artificial Sequence
  Synthetic oligonucleotide; TTTAGTTT chr2 60459497 60459516 60459500 -
tagttaatcatcatttttcc

SEQ ID NO: 192890 - DNA, 20 bp, Artificial Sequence
  Synthetic oligonucleotide; AACTGATT chr2 60459475 60459494 60459478 -
tagtttaattttataaacaa

SEQ ID NO: 192891 - DNA, 20 bp, Artificial Sequence
  Synthetic oligonucleotide; GAGAGCTT chr2 60459436 60459455 60459439 -
aaagctactttgctcctggt

SEQ ID NO: 192892 - DNA, 20 bp, Artificial Sequence
  Synthetic oligonucleotide; GGCTGTTT chr2 60459418 60459437 60459421 -
gtgagagcttaaaagaaatg

SEQ ID NO: 192893 - DNA, 20 bp, Artificial Sequence
  Synthetic oligonucleotide; CAAAGTTT chr2 60459406 60459425 60459409 -
aagaaatgggctgttttgcc

SEQ ID NO: 192894 - DNA, 20 bp, Artificial Sequence
  Synthetic oligonucleotide; CAATGATT chr2 60459385 60459404 60459388 -
aaagttttattttttttaaa

SEQ ID NO: 192895 - DNA, 20 bp, Artificial Sequence
  Synthetic oligonucleotide; ATTTGCTT chr2 60459303 60459322 60459306 -
ggagttcattttatgaagat

SEQ ID NO: 192896 - DNA, 20 bp, Artificial Sequence
  Synthetic oligonucleotide; TAAGGTTT chr2 60459168 60459187 60459171 -
tgaaaggaagaggctgacaa

SEQ ID NO: 192897 - DNA, 20 bp, Artificial Sequence
  Synthetic oligonucleotide; ATATGATT chr2 60459136 60459155 60459139 -
gaggggaacagaagaaaata

SEQ ID NO: 192898 - DNA, 20 bp, Artificial Sequence
  Synthetic oligonucleotide; TGATGATT chr2 60459060 60459079 60459063 -
ataagctaatattgatacaa

SEQ ID NO: 192899 - DNA, 20 bp, Artificial Sequence
  Synthetic oligonucleotide; AGAGGATT chr2 60458900 60458919 60458903 -
gctatttgtgttaacatgga

SEQ ID NO: 192900 - DNA, 20 bp, Artificial Sequence
  Synthetic oligonucleotide; CATTGTTT chr2 60458892 60458911 60458895 -
tgttaacatggaagaggatt

SEQ ID NO: 192901 - DNA, 20 bp, Artificial Sequence
  Synthetic oligonucleotide; CCCAGTTT chr2 60458707 60458726 60458710 -
taagtgcactgtacaatttt

SEQ ID NO: 192902 - DNA, 20 bp, Artificial Sequence
  Synthetic oligonucleotide; TTGAGCTT chr2 60458578 60458597 60458581 -
gccagccatttacttgacta

SEQ ID NO: 192903 - DNA, 20 bp, Artificial Sequence
  Synthetic oligonucleotide; GAATGATT chr2 60458507 60458526 60458510 -
aatacacttaacatagaaat

SEQ ID NO: 192904 - DNA, 20 bp, Artificial Sequence
  Synthetic oligonucleotide; GATTGCTT chr2 60458503 60458522 60458506 -
cacttaacatagaaatgaat

SEQ ID NO: 192905 - DNA, 20 bp, Artificial Sequence
  Synthetic oligonucleotide; TTTCGCTT chr2 60458497 60458516 60458500 -
acatagaaatgaatgattgc

SEQ ID NO: 192906 - DNA, 20 bp, Artificial Sequence
  Synthetic oligonucleotide; CAAGGATT chr2 60458481 60458500 60458484 -
ttgctttcgcttctacagtg

SEQ ID NO: 192907 - DNA, 20 bp, Artificial Sequence
  Synthetic oligonucleotide; TTATGTTT chr2 60458411 60458430 60458414 -
tttttttaaaaaacacttca

SEQ ID NO: 192908 - DNA, 20 bp, Artificial Sequence
  Synthetic oligonucleotide; AAAGGTTT chr2 60458263 60458282 60458266 -
aaaaaaaacatacattgggg

SEQ ID NO: 192909 - DNA, 20 bp, Artificial Sequence
  Synthetic oligonucleotide; TTAAGATT chr2 60458257 60458276 60458260 -
aacatacattggggaaaggt

SEQ ID NO: 192910 - DNA, 20 bp, Artificial Sequence
  Synthetic oligonucleotide; TGTTGATT chr2 60458215 60458234 60458218 -
tataggaaaatgcacactca

SEQ ID NO: 192911 - DNA, 20 bp, Artificial Sequence
  Synthetic oligonucleotide; TGAAGCTT chr2 60458111 60458130 60458114 -
aggcactatagtatttatat

SEQ ID NO: 192912 - DNA, 20 bp, Artificial Sequence
  Synthetic oligonucleotide; TGTTGCTT chr2 60458092 60458111 60458095 -
ttgaagcttgtatttttaac

SEQ ID NO: 192913 - DNA, 20 bp, Artificial Sequence
  Synthetic oligonucleotide; GTATGCTT chr2 60457976 60457995 60457979 -
taatatagtgcaaattattt

SEQ ID NO: 192914 - DNA, 20 bp, Artificial Sequence
  Synthetic oligonucleotide; GGCGGTTT chr2 60457907 60457926 60457910 -
cagatgagaagccatataat

SEQ ID NO: 192915 - DNA, 20 bp, Artificial Sequence
  Synthetic oligonucleotide; GTTGGTTT chr2 60457789 60457808 60457792 -
cagtactgcaagctaataac

SEQ ID NO: 192916 - DNA, 20 bp, Artificial Sequence
  Synthetic oligonucleotide; GTGTGCTT chr2 60457773 60457792 60457776 -
taacgttggtttgttatgta

SEQ ID NO: 192917 - DNA, 20 bp, Artificial Sequence
  Synthetic oligonucleotide; CAATGTTT chr2 60457670 60457689 60457673 -
aaggaaaaaaaaaaaaaaac

SEQ ID NO: 192918 - DNA, 20 bp, Artificial Sequence
  Synthetic oligonucleotide; TGCAGTTT chr2 60457662 60457681 60457665 -
aaaaaaaaaaaccaatgttt

SEQ ID NO: 192919 - DNA, 20 bp, Artificial Sequence
  Synthetic oligonucleotide; TGGTGCTT chr2 60457633 60457652 60457636 -
tttcattgccaaaaactaaa

SEQ ID NO: 192920 - DNA, 20 bp, Artificial Sequence
  Synthetic oligonucleotide; TTTAGATT chr2 60457621 60457640 60457624 -
aaactaaatggtgctttata

SEQ ID NO: 192921 - DNA, 20 bp, Artificial Sequence
  Synthetic oligonucleotide; GCCCGCTT chr2 60457576 60457595 60457579 -
caaagcatattaaagagaaa

SEQ ID NO: 192922 - DNA, 20 bp, Artificial Sequence
  Synthetic oligonucleotide; AGCTGTTT chr2 60457498 60457517 60457501 -
ttttctattcctgtaatgaa

SEQ ID NO: 192923 - DNA, 20 bp, Artificial Sequence
  Synthetic oligonucleotide; TATTGCTT chr2 60457444 60457463 60457447 -
ctatgggagtcactatttat

SEQ ID NO: 192924 - DNA, 20 bp, Artificial Sequence
  Synthetic oligonucleotide; CTTTGTTT chr2 60457389 60457408 60457392 -
taatttgatcttttattttt

SEQ ID NO: 192925 - DNA, 20 bp, Artificial Sequence
  Synthetic oligonucleotide; CCTGGCTT chr2 60457341 60457360 60457344 -
atgaccaaaggtcattacaa

SEQ ID NO: 192926 - DNA, 20 bp, Artificial Sequence
  Synthetic oligonucleotide; ATTTGTTT chr2 60457325 60457344 60457328 -
acaacctggctttttattgt

SEQ ID NO: 192927 - DNA, 20 bp, Artificial Sequence
  Synthetic oligonucleotide; CTGTGTTT chr2 60457281 60457300 60457284 -
tctattggaaaaaccactgt

SEQ ID NO: 192928 - DNA, 20 bp, Artificial Sequence
  Synthetic oligonucleotide; GTAAGCTT chr2 60457190 60457209 60457193 -
aaaaaattaaagtacacatt

SEQ ID NO: 192929 - DNA, 20 bp, Artificial Sequence
  Synthetic oligonucleotide; ACAGGTTT chr2 60457135 60457154 60457138 -
aaattacttgcaagaaaata

SEQ ID NO: 192930 - DNA, 20 bp, Artificial Sequence
  Synthetic oligonucleotide; TCAGGATT chr2 60457103 60457122 60457106 -
agaaggccagtcagtctttt

SEQ ID NO: 192931 - DNA, 20 bp, Artificial Sequence
  Synthetic oligonucleotide; CATAGTTT chr2 60457006 60457025 60457009 -
gacatatctcaaaccctgga

SEQ ID NO: 192932 - DNA, 20 bp, Artificial Sequence
  Synthetic oligonucleotide; TAAGGCTT chr2 60456998 60457017 60457001 -
tcaaaccctggacatagttt

SEQ ID NO: 192933 - DNA, 20 bp, Artificial Sequence
  Synthetic oligonucleotide; TCCAGTTT chr2 60456990 60457009 60456993 -
tggacatagttttaaggctt

SEQ ID NO: 192934 - DNA, 20 bp, Artificial Sequence
  Synthetic oligonucleotide; AATAGTTT chr2 60456980 60456999 60456983 -
tttaaggctttccagtttag

SEQ ID NO: 192935 - DNA, 20 bp, Artificial Sequence
  Synthetic oligonucleotide; AGGTGTTT chr2 60456960 60456979 60456963 -
aatagttttcaagaaatgga

SEQ ID NO: 192936 - DNA, 20 bp, Artificial Sequence
  Synthetic oligonucleotide; CCTTGCTT chr2 60456801 60456820 60456804 -
gttcttttctattctcccat

SEQ ID NO: 192937 - DNA, 20 bp, Artificial Sequence
  Synthetic oligonucleotide; AAAAGATT chr2 60456773 60456792 60456776 -
tatcttagaacataatgtaa

SEQ ID NO: 192938 - DNA, 20 bp, Artificial Sequence
  Synthetic oligonucleotide; TTTGGTTT chr2 60456745 60456764 60456748 -
tttttaaaaaaaatcagctc

SEQ ID NO: 192939 - DNA, 20 bp, Artificial Sequence
  Synthetic oligonucleotide; TCAGGTTT chr2 60456667 60456686 60456670 -
aaaatctggaaacaaaggca

SEQ ID NO: 192940 - DNA, 20 bp, Artificial Sequence
  Synthetic oligonucleotide; TTTTGTTT chr2 60456662 60456681 60456665 -
ctggaaacaaaggcatcagg

SEQ ID NO: 192941 - DNA, 20 bp, Artificial Sequence
  Synthetic oligonucleotide; TTTTGTTT chr2 60456657 60456676 60456660 -
aacaaaggcatcaggttttg

SEQ ID NO: 192942 - DNA, 20 bp, Artificial Sequence
  Synthetic oligonucleotide; TTTTGTTT chr2 60456652 60456671 60456655 -
aggcatcaggttttgttttg

SEQ ID NO: 192943 - DNA, 20 bp, Artificial Sequence
  Synthetic oligonucleotide; TTTTGTTT chr2 60456647 60456666 60456650 -
tcaggttttgttttgttttg

SEQ ID NO: 192944 - DNA, 20 bp, Artificial Sequence
  Synthetic oligonucleotide; TTTTGTTT chr2 60456642 60456661 60456645 -
ttttgttttgttttgttttg

SEQ ID NO: 192945 - DNA, 20 bp, Artificial Sequence
  Synthetic oligonucleotide; CACTGATT chr2 60456544 60456563 60456547 -
gtgaaatctttggaatcagc

SEQ ID NO: 192946 - DNA, 20 bp, Artificial Sequence
  Synthetic oligonucleotide; AGTGGTTT chr2 60456523 60456542 60456526 -
actgatttcctgagatgcat

SEQ ID NO: 192947 - DNA, 20 bp, Artificial Sequence
  Synthetic oligonucleotide; TACAGATT chr2 60456479 60456498 60456482 -
atcccaggaaccctagatgc

SEQ ID NO: 192948 - DNA, 20 bp, Artificial Sequence
  Synthetic oligonucleotide; AGGTGTTT chr2 60456466 60456485 60456469 -
tagatgctacagattacttt

SEQ ID NO: 192949 - DNA, 20 bp, Artificial Sequence
  Synthetic oligonucleotide; ATTTGCTT chr2 60456319 60456338 60456322 -
tactgcatgttgcagcatct

SEQ ID NO: 192950 - DNA, 20 bp, Artificial Sequence
  Synthetic oligonucleotide; AATAGTTT chr2 60456111 60456130 60456114 -
tgccttttatctgaggcaag

SEQ ID NO: 192951 - DNA, 20 bp, Artificial Sequence
  Synthetic oligonucleotide; CAATGTTT chr2 60456078 60456097 60456081 -
ttctaaagtataaagaaagt

SEQ ID NO: 192952 - DNA, 20 bp, Artificial Sequence
  Synthetic oligonucleotide; GCCAGTTT chr2 60456062 60456081 60456065 -
aagtcaatgttttctgaaaa

SEQ ID NO: 192953 - DNA, 20 bp, Artificial Sequence
  Synthetic oligonucleotide; TGATGTTT chr2 60455950 60455969 60455953 -
cgtgcggtaccttgagaact

SEQ ID NO: 192954 - DNA, 20 bp, Artificial Sequence
  Synthetic oligonucleotide; ATGTGTTT chr2 60455914 60455933 60455917 -
acttagaaaagatatactgt

SEQ ID NO: 192955 - DNA, 20 bp, Artificial Sequence
  Synthetic oligonucleotide; TTTGGATT chr2 60455908 60455927 60455911 -
aaaagatatactgtatgtgt

SEQ ID NO: 192956 - DNA, 20 bp, Artificial Sequence
  Synthetic oligonucleotide; TTAGGTTT chr2 60455902 60455921 60455905 -
tatactgtatgtgttttgga

SEQ ID NO: 192957 - DNA, 20 bp, Artificial Sequence
  Synthetic oligonucleotide; GCCAGCTT chr2 60455835 60455854 60455838 -
aaataattccccagtgccat

SEQ ID NO: 192958 - DNA, 20 bp, Artificial Sequence
  Synthetic oligonucleotide; GTAGGTTT chr2 60455733 60455752 60455736 -
ggagctatgagtgcaactgt

SEQ ID NO: 192959 - DNA, 20 bp, Artificial Sequence
  Synthetic oligonucleotide; TTAGGTTT chr2 60455675 60455694 60455678 -
atatgctgctcttagcgtaa

SEQ ID NO: 192960 - DNA, 20 bp, Artificial Sequence
  Synthetic oligonucleotide; CACAGATT chr2 60455562 60455581 60455565 -
gcaaacatctggtgataaat

SEQ ID NO: 192961 - DNA, 20 bp, Artificial Sequence
  Synthetic oligonucleotide; TTATGTTT chr2 60455556 60455575 60455559 -
atctggtgataaatcacaga

SEQ ID NO: 192962 - DNA, 20 bp, Artificial Sequence
  Synthetic oligonucleotide; GTTTGATT chr2 60455552 60455571 60455555 -
ggtgataaatcacagattat

SEQ ID NO: 192963 - DNA, 20 bp, Artificial Sequence
  Synthetic oligonucleotide; GTAAGTTT chr2 60455249 60455268 60455252 -
atgtctcttaaaatcctcaa

SEQ ID NO: 192964 - DNA, 20 bp, Artificial Sequence
  Synthetic oligonucleotide; ACAGGCTT chr2 60455236 60455255 60455239 -
tcctcaagtaagtttttgta

SEQ ID NO: 192965 - DNA, 20 bp, Artificial Sequence
  Synthetic oligonucleotide; TGATGCTT chr2 60455193 60455212 60455196 -
tgttctctacatacctgaac

SEQ ID NO: 192966 - DNA, 20 bp, Artificial Sequence
  Synthetic oligonucleotide; CACAGATT chr2 60455118 60455137 60455121 -
ataccgcaaattctatttct

SEQ ID NO: 192967 - DNA, 20 bp, Artificial Sequence
  Synthetic oligonucleotide; CTTTGTTT chr2 60455048 60455067 60455051 -
gaacccatttgctatcctct

SEQ ID NO: 192968 - DNA, 20 bp, Artificial Sequence
  Synthetic oligonucleotide; TTGAGTTT chr2 60454936 60454955 60454939 -
tggcagaaagtgtgaagtag

SEQ ID NO: 192969 - DNA, 20 bp, Artificial Sequence
  Synthetic oligonucleotide; AACTGTTT chr2 60454903 60454922 60454906 -
agggcattctgtagatatag

SEQ ID NO: 192970 - DNA, 20 bp, Artificial Sequence
  Synthetic oligonucleotide; GATGGCTT chr2 60454807 60454826 60454810 -
cttgaaaggaagtggcggga

SEQ ID NO: 192971 - DNA, 20 bp, Artificial Sequence
  Synthetic oligonucleotide; GGTGGTTT chr2 60454765 60454784 60454768 -
ttggagaaataaggaaatga

SEQ ID NO: 192972 - DNA, 20 bp, Artificial Sequence
  Synthetic oligonucleotide; CACAGTTT chr2 60454748 60454767 60454751 -
tgaggtggtttattcacaga

SEQ ID NO: 192973 - DNA, 20 bp, Artificial Sequence
  Synthetic oligonucleotide; CTGGGATT chr2 60454729 60454748 60454732 -
acacagtttgctgaaaggta

SEQ ID NO: 192974 - DNA, 20 bp, Artificial Sequence
  Synthetic oligonucleotide; TCCTGCTT chr2 60454672 60454691 60454675 -
aagcctcaggccccatcctc

SEQ ID NO: 192975 - DNA, 20 bp, Artificial Sequence
  Synthetic oligonucleotide; CAGTGTTT chr2 60454628 60454647 60454631 -
agagactgagggaggaaata

SEQ ID NO: 192976 - DNA, 20 bp, Artificial Sequence
  Synthetic oligonucleotide; TCTTGTTT chr2 60454620 60454639 60454623 -
agggaggaaatacagtgttt

SEQ ID NO: 192977 - DNA, 20 bp, Artificial Sequence
  Synthetic oligonucleotide; TTACGATT chr2 60454539 60454558 60454542 -
ttgtaactgtgtgttcctca

SEQ ID NO: 192978 - DNA, 20 bp, Artificial Sequence
  Synthetic oligonucleotide; ATGGGATT chr2 60454417 60454436 60454420 -
ggaactttgccgatatgagg

SEQ ID NO: 192979 - DNA, 20 bp, Artificial Sequence
  Synthetic oligonucleotide; ACCTGCTT chr2 60454394 60454413 60454397 -
ggattggcagagttctctca

SEQ ID NO: 192980 - DNA, 20 bp, Artificial Sequence
  Synthetic oligonucleotide; AAATGTTT chr2 60454382 60454401 60454385 -
ttctctcaacctgcttggaa

SEQ ID NO: 192981 - DNA, 20 bp, Artificial Sequence
  Synthetic oligonucleotide; AGCAGATT chr2 60454335 60454354 60454338 -
ttaaaaggcatgagccatct

SEQ ID NO: 192982 - DNA, 20 bp, Artificial Sequence
  Synthetic oligonucleotide; TTCTGCTT chr2 60454163 60454182 60454166 -
atgggttgtccggtctgcac

SEQ ID NO: 192983 - DNA, 20 bp, Artificial Sequence
  Synthetic oligonucleotide; CGCTGTTT chr2 60454129 60454148 60454132 -
atctcgttatcccattagcc

SEQ ID NO: 192984 - DNA, 20 bp, Artificial Sequence
  Synthetic oligonucleotide; GGCTGTTT chr2 60454071 60454090 60454074 -
ctcagcctttaggggaatgg

SEQ ID NO: 192985 - DNA, 20 bp, Artificial Sequence
  Synthetic oligonucleotide; ATACGTTT chr2 60453896 60453915 60453899 -
cagctcgatggttgatccaa

SEQ ID NO: 192986 - DNA, 20 bp, Artificial Sequence
  Synthetic oligonucleotide; CTGTGCTT chr2 60453752 60453771 60453755 -
cccctaaacccatagggggg

SEQ ID NO: 192987 - DNA, 20 bp, Artificial Sequence
  Synthetic oligonucleotide; AAGGGTTT chr2 60453665 60453684 60453668 -
attggtagcaggttggacga

SEQ ID NO: 192988 - DNA, 20 bp, Artificial Sequence
  Synthetic oligonucleotide; GTTTGATT chr2 60453661 60453680 60453664 -
gtagcaggttggacgaaagg

SEQ ID NO: 192989 - DNA, 20 bp, Artificial Sequence
  Synthetic oligonucleotide; ATGGGATT chr2 60453601 60453620 60453604 -
gacttagcgctggactggga

SEQ ID NO: 192990 - DNA, 20 bp, Artificial Sequence
  Synthetic oligonucleotide; CCCTGCTT chr2 60453453 60453472 60453456 -
ggggagaggaggccccaggc

SEQ ID NO: 192991 - DNA, 20 bp, Artificial Sequence
  Synthetic oligonucleotide; TGCTGCTT chr2 60453370 60453389 60453373 -
cacatccggactcccagttc

SEQ ID NO: 192992 - DNA, 20 bp, Artificial Sequence
  Synthetic oligonucleotide; GCATGTTT chr2 60453261 60453280 60453264 -
ccaaaaaagaaaagaaaact

SEQ ID NO: 192993 - DNA, 20 bp, Artificial Sequence
  Synthetic oligonucleotide; GGCAGTTT chr2 60453240 60453259 60453243 -
catgtttgaaagaaactaca

SEQ ID NO: 192994 - DNA, 20 bp, Artificial Sequence
  Synthetic oligonucleotide; TCTGGTTT chr2 60453201 60453220 60453204 -
tgagagcaactcttttgggt

SEQ ID NO: 192995 - DNA, 20 bp, Artificial Sequence
  Synthetic oligonucleotide; CAGAGATT chr2 60453187 60453206 60453190 -
ttgggttctggttttctctt

SEQ ID NO: 192996 - DNA, 20 bp, Artificial Sequence
  Synthetic oligonucleotide; GGCTGCTT chr2 60453157 60453176 60453160 -
ttcgcctcttgtaaatcatt

SEQ ID NO: 192997 - DNA, 20 bp, Artificial Sequence
  Synthetic oligonucleotide; TCATGTTT chr2 60453127 60453146 60453130 -
acgttgaacttgatgacatt

SEQ ID NO: 192998 - DNA, 20 bp, Artificial Sequence
  Synthetic oligonucleotide; TGCTGCTT chr2 60453113 60453132 60453116 -
gacatttcatgttttcgttg

SEQ ID NO: 192999 - DNA, 20 bp, Artificial Sequence
  Synthetic oligonucleotide; ATCAGTTT chr2 60453101 60453120 60453104 -
tttcgttgtgctgcttttac

SEQ ID NO: 193000 - DNA, 20 bp, Artificial Sequence
  Synthetic oligonucleotide; TTTTGATT chr2 60453096 60453115 60453099 -
ttgtgctgcttttacatcag

SEQ ID NO: 193001 - DNA, 20 bp, Artificial Sequence
  Synthetic oligonucleotide; TTTTGTTT chr2 60453088 60453107 60453091 -
cttttacatcagttttgatt

SEQ ID NO: 193002 - DNA, 20 bp, Artificial Sequence
  Synthetic oligonucleotide; GACTGTTT chr2 60453007 60453026 60453010 -
cccgctctcctcaaccaaag

SEQ ID NO: 193003 - DNA, 20 bp, Artificial Sequence
  Synthetic oligonucleotide; CTAAGTTT chr2 60452995 60453014 60452998 -
aaccaaaggactgtttctta

SEQ ID NO: 193004 - DNA, 20 bp, Artificial Sequence
  Synthetic oligonucleotide; AAGTGTTT chr2 60452971 60452990 60452974 -
gttttctcagtcataagggc

SEQ ID NO: 193005 - DNA, 20 bp, Artificial Sequence
  Synthetic oligonucleotide; CCGAGTTT chr2 60452948 60452967 60452951 -
tgtttccttccaggtgtgtc

SEQ ID NO: 193006 - DNA, 20 bp, Artificial Sequence
  Synthetic oligonucleotide; CTGAGTTT chr2 60452822 60452841 60452825 -
agatacttggggaggggagg

SEQ ID NO: 193007 - DNA, 20 bp, Artificial Sequence
  Synthetic oligonucleotide; TCATGCTT chr2 60452810 60452829 60452813 -
aggggaggctgagtttgaaa

SEQ ID NO: 193008 - DNA, 20 bp, Artificial Sequence
  Synthetic oligonucleotide; GTTGGTTT chr2 60452778 60452797 60452781 -
tgccagtggctcgacctgtg

SEQ ID NO: 193009 - DNA, 20 bp, Artificial Sequence
  Synthetic oligonucleotide; GGCAGTTT chr2 60452616 60452635 60452619 -
ccagagagctcaagatgtgt

SEQ ID NO: 193010 - DNA, 20 bp, Artificial Sequence
  Synthetic oligonucleotide; GCTAGTTT chr2 60452504 60452523 60452507 -
tcagcgtggtctgtcatcct

SEQ ID NO: 193011 - DNA, 20 bp, Artificial Sequence
  Synthetic oligonucleotide; TGATGTTT chr2 60452495 60452514 60452498 -
tctgtcatcctgctagtttg

SEQ ID NO: 193012 - DNA, 20 bp, Artificial Sequence
  Synthetic oligonucleotide; CCTTGTTT chr2 60452232 60452251 60452235 -
atgcgcatgagtccccaacc

SEQ ID NO: 193013 - DNA, 20 bp, Artificial Sequence
  Synthetic oligonucleotide; GTGTGCTT chr2 60452196 60452215 60452199 -
tctatgttgtcttttaaaaa

SEQ ID NO: 193014 - DNA, 20 bp, Artificial Sequence
  Synthetic oligonucleotide; TGGAGCTT chr2 60452168 60452187 60452171 -
aacattgacacaataaatgt

SEQ ID NO: 193015 - DNA, 20 bp, Artificial Sequence
  Synthetic oligonucleotide; TGGTGTTT chr2 60452156 60452175 60452159 -
ataaatgttggagctttagg

SEQ ID NO: 193016 - DNA, 20 bp, Artificial Sequence
  Synthetic oligonucleotide; GTTTGCTT chr2 60452152 60452171 60452155 -
atgttggagctttaggtggt

SEQ ID NO: 193017 - DNA, 20 bp, Artificial Sequence
  Synthetic oligonucleotide; TAATGCTT chr2 60452131 60452150 60452134 -
tttgcttgttctttaatttt

SEQ ID NO: 193018 - DNA, 20 bp, Artificial Sequence
  Synthetic oligonucleotide; GGCTGCTT chr2 60452111 60452130 60452114 -
taatgcttataagacaatga

SEQ ID NO: 193019 - DNA, 20 bp, Artificial Sequence
  Synthetic oligonucleotide; TTATGATT chr2 60452105 60452124 60452108 -
ttataagacaatgaggctgc

SEQ ID NO: 193020 - DNA, 20 bp, Artificial Sequence
  Synthetic oligonucleotide; ACCTGTTT chr2 60452085 60452104 60452088 -
ttatgattttgtacttctgt

SEQ ID NO: 193021 - DNA, 20 bp, Artificial Sequence
  Synthetic oligonucleotide; AACAGATT chr2 60452047 60452066 60452050 -
cccatcgggtgggtaggagg

SEQ ID NO: 193022 - DNA, 20 bp, Artificial Sequence
  Synthetic oligonucleotide; TACCGCTT chr2 60452002 60452021 60452005 -
atgtaggaggggaactaggt

SEQ ID NO: 193023 - DNA, 20 bp, Artificial Sequence
  Synthetic oligonucleotide; TGCTGTTT chr2 60451906 60451925 60451909 -
aattaatgtagtagtaatat

SEQ ID NO: 193024 - DNA, 20 bp, Artificial Sequence
  Synthetic oligonucleotide; TGTGGTTT chr2 60451885 60451904 60451888 -
gctgtttattaatgctgaag

SEQ ID NO: 193025 - DNA, 20 bp, Artificial Sequence
  Synthetic oligonucleotide; TCCTGTTT chr2 60451816 60451835 60451819 -
gcataatatggcacgccgaa

SEQ ID NO: 193026 - DNA, 20 bp, Artificial Sequence
  Synthetic oligonucleotide; ATATGCTT chr2 60451801 60451820 60451804 -
ccgaatcctgtttttcaaat

SEQ ID NO: 193027 - DNA, 20 bp, Artificial Sequence
  Synthetic oligonucleotide; GCAGGATT chr2 60451779 60451798 60451782 -
atgcttttggtggctaccat

SEQ ID NO: 193028 - DNA, 20 bp, Artificial Sequence
  Synthetic oligonucleotide; TTTAGCTT chr2 60451755 60451774 60451758 -
gatttgaatttgtcttttaa

SEQ ID NO: 193029 - DNA, 20 bp, Artificial Sequence
  Synthetic oligonucleotide; AGTAGTTT chr2 60451694 60451713 60451697 -
taaagaaggtgataaatgtc

SEQ ID NO: 193030 - DNA, 20 bp, Artificial Sequence
  Synthetic oligonucleotide; GGCAGATT chr2 60451582 60451601 60451585 -
acttacatcaggaaatttgg

SEQ ID NO: 193031 - DNA, 20 bp, Artificial Sequence
  Synthetic oligonucleotide; CTCAGTTT chr2 60451419 60451438 60451422 -
ttaatttgcacagaactttt

SEQ ID NO: 193032 - DNA, 20 bp, Artificial Sequence
  Synthetic oligonucleotide; TACTGCTT chr2 60451402 60451421 60451405 -
tttctcagtttggtattttt

SEQ ID NO: 193033 - DNA, 20 bp, Artificial Sequence
  Synthetic oligonucleotide; ATAGGTTT chr2 60451353 60451372 60451356 -
aaacaacatagcaaattaaa

SEQ ID NO: 193034 - DNA, 20 bp, Artificial Sequence
  Synthetic oligonucleotide; TGTAGATT chr2 60451315 60451334 60451318 -
gagctcagacacctgtgtgc

SEQ ID NO: 193035 - DNA, 20 bp, Artificial Sequence
  Synthetic oligonucleotide; GCTAGATT chr2 60451255 60451274 60451258 -
tcctacctatccaccttctg

SEQ ID NO: 193036 - DNA, 20 bp, Artificial Sequence
  Synthetic oligonucleotide; CCTAGCTT chr2 60451246 60451265 60451249 -
tccaccttctggctagatta

SEQ ID NO: 193037 - DNA, 20 bp, Artificial Sequence
  Synthetic oligonucleotide; TCCTGCTT chr2 60451200 60451219 60451203 -
taattggcatgtgaattatt

SEQ ID NO: 193038 - DNA, 20 bp, Artificial Sequence
  Synthetic oligonucleotide; TGGAGATT chr2 60451072 60451091 60451075 -
cgacttctactttatggagg

SEQ ID NO: 193039 - DNA, 20 bp, Artificial Sequence
  Synthetic oligonucleotide; TGAGGCTT chr2 60451065 60451084 60451068 -
tactttatggaggtggagat

SEQ ID NO: 193040 - DNA, 20 bp, Artificial Sequence
  Synthetic oligonucleotide; AAGGGCTT chr2 60451048 60451067 60451051 -
gattgaggcttaccaaggtt

SEQ ID NO: 193041 - DNA, 20 bp, Artificial Sequence
  Synthetic oligonucleotide; CCAGGTTT chr2 60451003 60451022 60451006 -
taagagagaaagcagagaag

SEQ ID NO: 193042 - DNA, 20 bp, Artificial Sequence
  Synthetic oligonucleotide; TCTGGTTT chr2 60450995 60451014 60450998 -
aaagcagagaagccaggttt

SEQ ID NO: 193043 - DNA, 20 bp, Artificial Sequence
  Synthetic oligonucleotide; CTCTGTTT chr2 60450962 60450981 60450965 -
ccagagctaatttcaccaaa

SEQ ID NO: 193044 - DNA, 20 bp, Artificial Sequence
  Synthetic oligonucleotide; TGTGGCTT chr2 60450887 60450906 60450890 -
aatgttcacagacacacaca

SEQ ID NO: 193045 - DNA, 20 bp, Artificial Sequence
  Synthetic oligonucleotide; TGTGGCTT chr2 60450764 60450783 60450767 -
ccttgccatcacctttcccc

SEQ ID NO: 193046 - DNA, 20 bp, Artificial Sequence
  Synthetic oligonucleotide; CCCTGATT chr2 60450741 60450760 60450744 -
ggcttttccatgacaaataa

SEQ ID NO: 193047 - DNA, 20 bp, Artificial Sequence
  Synthetic oligonucleotide; GCCTGTTT chr2 60450724 60450743 60450727 -
taaccctgattgcacgagtg

SEQ ID NO: 193048 - DNA, 20 bp, Artificial Sequence
  Synthetic oligonucleotide; TAGGGTTT chr2 60450609 60450628 60450612 -
ttgctgaaacataagaccat

SEQ ID NO: 193049 - DNA, 20 bp, Artificial Sequence
  Synthetic oligonucleotide; GATGGCTT chr2 60450597 60450616 60450600 -
aagaccattagggtttctgt

SEQ ID NO: 193050 - DNA, 20 bp, Artificial Sequence
  Synthetic oligonucleotide; CTGTGTTT chr2 60450438 60450457 60450441 -
actacactttcatttctggt

SEQ ID NO: 193051 - DNA, 20 bp, Artificial Sequence
  Synthetic oligonucleotide; GTCAGTTT chr2 60450398 60450417 60450401 -
tttatatatttcttctcaga

SEQ ID NO: 193052 - DNA, 20 bp, Artificial Sequence
  Synthetic oligonucleotide; GTGGGATT chr2 60450366 60450385 60450369 -
ataagtggatatctctaaaa

SEQ ID NO: 193053 - DNA, 20 bp, Artificial Sequence
  Synthetic oligonucleotide; TATTGTTT chr2 60450321 60450340 60450324 -
taacagaagtggataaagga

SEQ ID NO: 193054 - DNA, 20 bp, Artificial Sequence
  Synthetic oligonucleotide; CATGGCTT chr2 60450250 60450269 60450253 -
acaaaaagactgtcttttcc

SEQ ID NO: 193055 - DNA, 20 bp, Artificial Sequence
  Synthetic oligonucleotide; CTCAGCTT chr2 60450050 60450069 60450053 -
ggttcaagggatcctcctgc

SEQ ID NO: 193056 - DNA, 20 bp, Artificial Sequence
  Synthetic oligonucleotide; CGGCGTTT chr2 60449973 60449992 60449976 -
ttttgtatttttagtagata

SEQ ID NO: 193057 - DNA, 20 bp, Artificial Sequence
  Synthetic oligonucleotide; CTGGGATT chr2 60449897 60449916 60449900 -
ctcctaggcctcccatagtg

SEQ ID NO: 193058 - DNA, 20 bp, Artificial Sequence
  Synthetic oligonucleotide; ACAAGATT chr2 60449837 60449856 60449840 -
ctagacttttgaaaccccat

SEQ ID NO: 193059 - DNA, 20 bp, Artificial Sequence
  Synthetic oligonucleotide; TTCAGATT chr2 60449702 60449721 60449705 -
tcctctctgcagagtggaac

SEQ ID NO: 193060 - DNA, 20 bp, Artificial Sequence
  Synthetic oligonucleotide; CATTGTTT chr2 60449608 60449627 60449611 -
ggaggagaccaaatacaggg

SEQ ID NO: 193061 - DNA, 20 bp, Artificial Sequence
  Synthetic oligonucleotide; TTCAGATT chr2 60449573 60449592 60449576 -
cccaagccttttgtgggctg

SEQ ID NO: 193062 - DNA, 20 bp, Artificial Sequence
  Synthetic oligonucleotide; CTGGGATT chr2 60449404 60449423 60449407 -
tgcctcagcctcctgagtgg

SEQ ID NO: 193063 - DNA, 20 bp, Artificial Sequence
  Synthetic oligonucleotide; CGGGGTTT chr2 60449352 60449371 60449355 -
ttttgtatttttagtagaga

SEQ ID NO: 193064 - DNA, 20 bp, Artificial Sequence
  Synthetic oligonucleotide; CTGGGATT chr2 60449276 60449295 60449279 -
tgcctcggcctcccaaagtg

SEQ ID NO: 193065 - DNA, 20 bp, Artificial Sequence
  Synthetic oligonucleotide; GACAGATT chr2 60449245 60449264 60449248 -
ggtgtaagccaccgcgcccg

SEQ ID NO: 193066 - DNA, 20 bp, Artificial Sequence
  Synthetic oligonucleotide; GCCTGTTT chr2 60449135 60449154 60449138 -
atccagcatgttgaatatca

SEQ ID NO: 193067 - DNA, 20 bp, Artificial Sequence
  Synthetic oligonucleotide; AATTGTTT chr2 60449120 60449139 60449123 -
tatcagcctgtttgagaaat

SEQ ID NO: 193068 - DNA, 20 bp, Artificial Sequence
  Synthetic oligonucleotide; TTTTGCTT chr2 60449003 60449022 60449006 -
gcagcatattttctgggcac

SEQ ID NO: 193069 - DNA, 20 bp, Artificial Sequence
  Synthetic oligonucleotide; TGGAGTTT chr2 60448996 60449015 60448999 -
attttctgggcacttttgct

SEQ ID NO: 193070 - DNA, 20 bp, Artificial Sequence
  Synthetic oligonucleotide; TTCAGATT chr2 60448979 60448998 60448982 -
gcttggagtttccaagagca

SEQ ID NO: 193071 - DNA, 20 bp, Artificial Sequence
  Synthetic oligonucleotide; TCAGGTTT chr2 60448937 60448956 60448940 -
caagtggtcaggaatatctt

SEQ ID NO: 193072 - DNA, 20 bp, Artificial Sequence
  Synthetic oligonucleotide; ACATGATT chr2 60448918 60448937 60448921 -
ttcaggttttgtatgcgttg

SEQ ID NO: 193073 - DNA, 20 bp, Artificial Sequence
  Synthetic oligonucleotide; GTAGGATT chr2 60448793 60448812 60448796 -
cagtgtccccggaagtaata

SEQ ID NO: 193074 - DNA, 20 bp, Artificial Sequence
  Synthetic oligonucleotide; CATAGCTT chr2 60448736 60448755 60448739 -
tctgttcttacagtatgcca

SEQ ID NO: 193075 - DNA, 20 bp, Artificial Sequence
  Synthetic oligonucleotide; AGCAGATT chr2 60448699 60448718 60448702 -
ttggagtatagtgtgaagga

SEQ ID NO: 193076 - DNA, 20 bp, Artificial Sequence
  Synthetic oligonucleotide; TTCAGTTT chr2 60448545 60448564 60448548 -
gcctaggagagacagtactc

SEQ ID NO: 193077 - DNA, 20 bp, Artificial Sequence
  Synthetic oligonucleotide; GTCTGTTT chr2 60448470 60448489 60448473 -
aaaatccagaagcagtcatt

SEQ ID NO: 193078 - DNA, 20 bp, Artificial Sequence
  Synthetic oligonucleotide; CTTAGTTT chr2 60448456 60448475 60448459 -
gtcattgtctgtttttctat

SEQ ID NO: 193079 - DNA, 20 bp, Artificial Sequence
  Synthetic oligonucleotide; TTTTGCTT chr2 60448410 60448429 60448413 -
acgaaccacatggcctttct

SEQ ID NO: 193080 - DNA, 20 bp, Artificial Sequence
  Synthetic oligonucleotide; TTAAGCTT chr2 60448372 60448391 60448375 -
aaaatgctcccaggaagtac

SEQ ID NO: 193081 - DNA, 20 bp, Artificial Sequence
  Synthetic oligonucleotide; TTGTGATT chr2 60448325 60448344 60448328 -
catgatagaatcaattttcc

SEQ ID NO: 193082 - DNA, 20 bp, Artificial Sequence
  Synthetic oligonucleotide; CAAAGATT chr2 60448232 60448251 60448235 -
agatcagaataataagggcc

SEQ ID NO: 193083 - DNA, 20 bp, Artificial Sequence
  Synthetic oligonucleotide; CCAAGCTT chr2 60448182 60448201 60448185 -
gtgtgaaaaaaacatcatag

SEQ ID NO: 193084 - DNA, 22 bp, Artificial Sequence
  Synthetic oligonucleotide; TTT chr2 60448173 60448194 60448190 60448195 +
caagcttggctatgatgttttt

SEQ ID NO: 193085 - DNA, 22 bp, Artificial Sequence
  Synthetic oligonucleotide; TTC chr2 60448174 60448195 60448191 60448196 +
aagcttggctatgatgtttttt

SEQ ID NO: 193086 - DNA, 22 bp, Artificial Sequence
  Synthetic oligonucleotide; CTT chr2 60448180 60448201 60448197 60448202 +
ggctatgatgtttttttcacac

SEQ ID NO: 193087 - DNA, 22 bp, Artificial Sequence
  Synthetic oligonucleotide; TTG chr2 60448181 60448202 60448198 60448203 +
gctatgatgtttttttcacact

SEQ ID NO: 193088 - DNA, 22 bp, Artificial Sequence
  Synthetic oligonucleotide; CTA chr2 60448185 60448206 60448202 60448207 +
tgatgtttttttcacactgtga

SEQ ID NO: 193089 - DNA, 22 bp, Artificial Sequence
  Synthetic oligonucleotide; TTT chr2 60448193 60448214 60448210 60448215 +
ttttcacactgtgatcttaggt

SEQ ID NO: 193090 - DNA, 22 bp, Artificial Sequence
  Synthetic oligonucleotide; TTT chr2 60448194 60448215 60448211 60448216 +
tttcacactgtgatcttaggta

SEQ ID NO: 193091 - DNA, 22 bp, Artificial Sequence
  Synthetic oligonucleotide; TTT chr2 60448195 60448216 60448212 60448217 +
ttcacactgtgatcttaggtac

SEQ ID NO: 193092 - DNA, 22 bp, Artificial Sequence
  Synthetic oligonucleotide; TTT chr2 60448196 60448217 60448213 60448218 +
tcacactgtgatcttaggtact

SEQ ID NO: 193093 - DNA, 22 bp, Artificial Sequence
  Synthetic oligonucleotide; TTT chr2 60448197 60448218 60448214 60448219 +
cacactgtgatcttaggtactt

SEQ ID NO: 193094 - DNA, 22 bp, Artificial Sequence
  Synthetic oligonucleotide; TTC chr2 60448198 60448219 60448215 60448220 +
acactgtgatcttaggtacttc

SEQ ID NO: 193095 - DNA, 22 bp, Artificial Sequence
  Synthetic oligonucleotide; CTG chr2 60448204 60448225 60448221 60448226 +
tgatcttaggtacttcacttaa

SEQ ID NO: 193096 - DNA, 22 bp, Artificial Sequence
  Synthetic oligonucleotide; CTT chr2 60448211 60448232 60448228 60448233 +
aggtacttcacttaatctttgg

SEQ ID NO: 193097 - DNA, 22 bp, Artificial Sequence
  Synthetic oligonucleotide; TTA chr2 60448212 60448233 60448229 60448234 +
ggtacttcacttaatctttggg

SEQ ID NO: 193098 - DNA, 22 bp, Artificial Sequence
  Synthetic oligonucleotide; CTT chr2 60448219 60448240 60448236 60448241 +
cacttaatctttgggcccttat

SEQ ID NO: 193099 - DNA, 22 bp, Artificial Sequence
  Synthetic oligonucleotide; TTC chr2 60448220 60448241 60448237 60448242 +
acttaatctttgggcccttatt

SEQ ID NO: 193100 - DNA, 22 bp, Artificial Sequence
  Synthetic oligonucleotide; CTT chr2 60448224 60448245 60448241 60448246 +
aatctttgggcccttattattc

SEQ ID NO: 193101 - DNA, 22 bp, Artificial Sequence
  Synthetic oligonucleotide; TTA chr2 60448225 60448246 60448242 60448247 +
atctttgggcccttattattct

SEQ ID NO: 193102 - DNA, 22 bp, Artificial Sequence
  Synthetic oligonucleotide; CTT chr2 60448230 60448251 60448247 60448252 +
tgggcccttattattctgatct

SEQ ID NO: 193103 - DNA, 22 bp, Artificial Sequence
  Synthetic oligonucleotide; TTT chr2 60448231 60448252 60448248 60448253 +
gggcccttattattctgatctc

SEQ ID NO: 193104 - DNA, 22 bp, Artificial Sequence
  Synthetic oligonucleotide; TTG chr2 60448232 60448253 60448249 60448254 +
ggcccttattattctgatctct

SEQ ID NO: 193105 - DNA, 22 bp, Artificial Sequence
  Synthetic oligonucleotide; CTT chr2 60448239 60448260 60448256 60448261 +
attattctgatctctaaaatga

SEQ ID NO: 193106 - DNA, 22 bp, Artificial Sequence
  Synthetic oligonucleotide; TTA chr2 60448240 60448261 60448257 60448262 +
ttattctgatctctaaaatgag

SEQ ID NO: 193107 - DNA, 22 bp, Artificial Sequence
  Synthetic oligonucleotide; TTA chr2 60448243 60448264 60448260 60448265 +
ttctgatctctaaaatgagtga

SEQ ID NO: 193108 - DNA, 22 bp, Artificial Sequence
  Synthetic oligonucleotide; TTC chr2 60448246 60448267 60448263 60448268 +
tgatctctaaaatgagtgatta

SEQ ID NO: 193109 - DNA, 22 bp, Artificial Sequence
  Synthetic oligonucleotide; CTG chr2 60448248 60448269 60448265 60448270 +
atctctaaaatgagtgattact

SEQ ID NO: 193110 - DNA, 22 bp, Artificial Sequence
  Synthetic oligonucleotide; CTC chr2 60448253 60448274 60448270 60448275 +
taaaatgagtgattactaggat

SEQ ID NO: 193111 - DNA, 22 bp, Artificial Sequence
  Synthetic oligonucleotide; CTA chr2 60448255 60448276 60448272 60448277 +
aaatgagtgattactaggattc

SEQ ID NO: 193112 - DNA, 22 bp, Artificial Sequence
  Synthetic oligonucleotide; TTA chr2 60448268 60448289 60448285 60448290 +
ctaggattcctttcaacttcag

SEQ ID NO: 193113 - DNA, 22 bp, Artificial Sequence
  Synthetic oligonucleotide; CTA chr2 60448271 60448292 60448288 60448293 +
ggattcctttcaacttcagtct

SEQ ID NO: 193114 - DNA, 22 bp, Artificial Sequence
  Synthetic oligonucleotide; TTC chr2 60448277 60448298 60448294 60448299 +
ctttcaacttcagtctattctt

SEQ ID NO: 193115 - DNA, 22 bp, Artificial Sequence
  Synthetic oligonucleotide; CTT chr2 60448280 60448301 60448297 60448302 +
tcaacttcagtctattcttttc

SEQ ID NO: 193116 - DNA, 22 bp, Artificial Sequence
  Synthetic oligonucleotide; TTT chr2 60448281 60448302 60448298 60448303 +
caacttcagtctattcttttct

SEQ ID NO: 193117 - DNA, 22 bp, Artificial Sequence
  Synthetic oligonucleotide; TTC chr2 60448282 60448303 60448299 60448304 +
aacttcagtctattcttttctt

SEQ ID NO: 193118 - DNA, 22 bp, Artificial Sequence
  Synthetic oligonucleotide; CTT chr2 60448287 60448308 60448304 60448309 +
cagtctattcttttcttatcta

SEQ ID NO: 193119 - DNA, 22 bp, Artificial Sequence
  Synthetic oligonucleotide; TTC chr2 60448288 60448309 60448305 60448310 +
agtctattcttttcttatctaa

SEQ ID NO: 193120 - DNA, 22 bp, Artificial Sequence
  Synthetic oligonucleotide; CTA chr2 60448294 60448315 60448311 60448316 +
ttcttttcttatctaatttata

SEQ ID NO: 193121 - DNA, 22 bp, Artificial Sequence
  Synthetic oligonucleotide; TTC chr2 60448297 60448318 60448314 60448319 +
ttttcttatctaatttatagaa

SEQ ID NO: 193122 - DNA, 22 bp, Artificial Sequence
  Synthetic oligonucleotide; CTT chr2 60448299 60448320 60448316 60448321 +
ttcttatctaatttatagaatc

SEQ ID NO: 193123 - DNA, 22 bp, Artificial Sequence
  Synthetic oligonucleotide; TTT chr2 60448300 60448321 60448317 60448322 +
tcttatctaatttatagaatca

SEQ ID NO: 193124 - DNA, 22 bp, Artificial Sequence
  Synthetic oligonucleotide; TTT chr2 60448301 60448322 60448318 60448323 +
cttatctaatttatagaatcac

SEQ ID NO: 193125 - DNA, 22 bp, Artificial Sequence
  Synthetic oligonucleotide; TTC chr2 60448302 60448323 60448319 60448324 +
ttatctaatttatagaatcaca

SEQ ID NO: 193126 - DNA, 22 bp, Artificial Sequence
  Synthetic oligonucleotide; CTT chr2 60448304 60448325 60448321 60448326 +
atctaatttatagaatcacaag

SEQ ID NO: 193127 - DNA, 22 bp, Artificial Sequence
  Synthetic oligonucleotide; TTA chr2 60448305 60448326 60448322 60448327 +
tctaatttatagaatcacaagg

SEQ ID NO: 193128 - DNA, 22 bp, Artificial Sequence
  Synthetic oligonucleotide; CTA chr2 60448309 60448330 60448326 60448331 +
atttatagaatcacaaggaaaa

SEQ ID NO: 193129 - DNA, 22 bp, Artificial Sequence
  Synthetic oligonucleotide; TTT chr2 60448313 60448334 60448330 60448335 +
atagaatcacaaggaaaattga

SEQ ID NO: 193130 - DNA, 22 bp, Artificial Sequence
  Synthetic oligonucleotide; TTA chr2 60448314 60448335 60448331 60448336 +
tagaatcacaaggaaaattgat

SEQ ID NO: 193131 - DNA, 22 bp, Artificial Sequence
  Synthetic oligonucleotide; TTG chr2 60448334 60448355 60448351 60448356 +
attctatcatgtatataaaagt

SEQ ID NO: 193132 - DNA, 22 bp, Artificial Sequence
  Synthetic oligonucleotide; TTC chr2 60448338 60448359 60448355 60448360 +
tatcatgtatataaaagtattc

SEQ ID NO: 193133 - DNA, 22 bp, Artificial Sequence
  Synthetic oligonucleotide; CTA chr2 60448340 60448361 60448357 60448362 +
tcatgtatataaaagtattcta

SEQ ID NO: 193134 - DNA, 22 bp, Artificial Sequence
  Synthetic oligonucleotide; TTC chr2 60448360 60448381 60448377 60448382 +
tataaagcttaagtacttcctg

SEQ ID NO: 193135 - DNA, 22 bp, Artificial Sequence
  Synthetic oligonucleotide; CTA chr2 60448362 60448383 60448379 60448384 +
taaagcttaagtacttcctggg

SEQ ID NO: 193136 - DNA, 22 bp, Artificial Sequence
  Synthetic oligonucleotide; CTT chr2 60448370 60448391 60448387 60448392 +
aagtacttcctgggagcatttt

SEQ ID NO: 193137 - DNA, 22 bp, Artificial Sequence
  Synthetic oligonucleotide; TTA chr2 60448371 60448392 60448388 60448393 +
agtacttcctgggagcattttt

SEQ ID NO: 193138 - DNA, 22 bp, Artificial Sequence
  Synthetic oligonucleotide; CTT chr2 60448378 60448399 60448395 60448400 +
cctgggagcattttttaaaata

SEQ ID NO: 193139 - DNA, 22 bp, Artificial Sequence
  Synthetic oligonucleotide; TTC chr2 60448379 60448400 60448396 60448401 +
ctgggagcattttttaaaatac

SEQ ID NO: 193140 - DNA, 22 bp, Artificial Sequence
  Synthetic oligonucleotide; CTG chr2 60448382 60448403 60448399 60448404 +
ggagcattttttaaaatacaaa

SEQ ID NO: 193141 - DNA, 22 bp, Artificial Sequence
  Synthetic oligonucleotide; TTT chr2 60448391 60448412 60448408 60448413 +
tttaaaatacaaagcaaaaaga

SEQ ID NO: 193142 - DNA, 22 bp, Artificial Sequence
  Synthetic oligonucleotide; TTT chr2 60448392 60448413 60448409 60448414 +
ttaaaatacaaagcaaaaagaa

SEQ ID NO: 193143 - DNA, 22 bp, Artificial Sequence
  Synthetic oligonucleotide; TTT chr2 60448393 60448414 60448410 60448415 +
taaaatacaaagcaaaaagaaa

SEQ ID NO: 193144 - DNA, 22 bp, Artificial Sequence
  Synthetic oligonucleotide; TTT chr2 60448394 60448415 60448411 60448416 +
aaaatacaaagcaaaaagaaag

SEQ ID NO: 193145 - DNA, 22 bp, Artificial Sequence
  Synthetic oligonucleotide; TTA chr2 60448395 60448416 60448412 60448417 +
aaatacaaagcaaaaagaaagg

SEQ ID NO: 193146 - DNA, 22 bp, Artificial Sequence
  Synthetic oligonucleotide; TTC chr2 60448428 60448449 60448445 60448450 +
gtaataagatatcctaatttaa

SEQ ID NO: 193147 - DNA, 22 bp, Artificial Sequence
  Synthetic oligonucleotide; CTA chr2 60448444 60448465 60448461 60448466 +
atttaaactaagatagaaaaac

SEQ ID NO: 193148 - DNA, 22 bp, Artificial Sequence
  Synthetic oligonucleotide; TTT chr2 60448448 60448469 60448465 60448470 +
aaactaagatagaaaaacagac

SEQ ID NO: 193149 - DNA, 22 bp, Artificial Sequence
  Synthetic oligonucleotide; TTA chr2 60448449 60448470 60448466 60448471 +
aactaagatagaaaaacagaca

SEQ ID NO: 193150 - DNA, 22 bp, Artificial Sequence
  Synthetic oligonucleotide; CTA chr2 60448454 60448475 60448471 60448476 +
agatagaaaaacagacaatgac

SEQ ID NO: 193151 - DNA, 22 bp, Artificial Sequence
  Synthetic oligonucleotide; CTG chr2 60448478 60448499 60448495 60448500 +
cttctggattttactggaagtg

SEQ ID NO: 193152 - DNA, 22 bp, Artificial Sequence
  Synthetic oligonucleotide; CTT chr2 60448481 60448502 60448498 60448503 +
ctggattttactggaagtgaga

SEQ ID NO: 193153 - DNA, 22 bp, Artificial Sequence
  Synthetic oligonucleotide; TTC chr2 60448482 60448503 60448499 60448504 +
tggattttactggaagtgagaa

SEQ ID NO: 193154 - DNA, 22 bp, Artificial Sequence
  Synthetic oligonucleotide; CTG chr2 60448484 60448505 60448501 60448506 +
gattttactggaagtgagaagt

SEQ ID NO: 193155 - DNA, 22 bp, Artificial Sequence
  Synthetic oligonucleotide; TTT chr2 60448489 60448510 60448506 60448511 +
tactggaagtgagaagttccat

SEQ ID NO: 193156 - DNA, 22 bp, Artificial Sequence
  Synthetic oligonucleotide; TTT chr2 60448490 60448511 60448507 60448512 +
actggaagtgagaagttccatg

SEQ ID NO: 193157 - DNA, 22 bp, Artificial Sequence
  Synthetic oligonucleotide; TTA chr2 60448491 60448512 60448508 60448513 +
ctggaagtgagaagttccatga

SEQ ID NO: 193158 - DNA, 22 bp, Artificial Sequence
  Synthetic oligonucleotide; CTG chr2 60448494 60448515 60448511 60448516 +
gaagtgagaagttccatgactt

SEQ ID NO: 193159 - DNA, 22 bp, Artificial Sequence
  Synthetic oligonucleotide; TTC chr2 60448508 60448529 60448525 60448530 +
catgacttaatgtaactccagg

SEQ ID NO: 193160 - DNA, 22 bp, Artificial Sequence
  Synthetic oligonucleotide; CTT chr2 60448516 60448537 60448533 60448538 +
aatgtaactccaggggaatgca

SEQ ID NO: 193161 - DNA, 22 bp, Artificial Sequence
  Synthetic oligonucleotide; TTA chr2 60448517 60448538 60448534 60448539 +
atgtaactccaggggaatgcaa

SEQ ID NO: 193162 - DNA, 22 bp, Artificial Sequence
  Synthetic oligonucleotide; CTC chr2 60448526 60448547 60448543 60448548 +
caggggaatgcaaactgaagag

SEQ ID NO: 193163 - DNA, 22 bp, Artificial Sequence
  Synthetic oligonucleotide; CTG chr2 60448543 60448564 60448560 60448565 +
aagagtactgtctctcctaggc

SEQ ID NO: 193164 - DNA, 22 bp, Artificial Sequence
  Synthetic oligonucleotide; CTG chr2 60448553 60448574 60448570 60448575 +
tctctcctaggcagtcagagga

SEQ ID NO: 193165 - DNA, 22 bp, Artificial Sequence
  Synthetic oligonucleotide; CTC chr2 60448557 60448578 60448574 60448579 +
tcctaggcagtcagaggaaaga

SEQ ID NO: 193166 - DNA, 22 bp, Artificial Sequence
  Synthetic oligonucleotide; CTC chr2 60448559 60448580 60448576 60448581 +
ctaggcagtcagaggaaagaaa

SEQ ID NO: 193167 - DNA, 22 bp, Artificial Sequence
  Synthetic oligonucleotide; CTA chr2 60448562 60448583 60448579 60448584 +
ggcagtcagaggaaagaaatat

SEQ ID NO: 193168 - DNA, 22 bp, Artificial Sequence
  Synthetic oligonucleotide; TTG chr2 60448591 60448612 60448608 60448613 +
tttctctgctggttaggaactc

SEQ ID NO: 193169 - DNA, 22 bp, Artificial Sequence
  Synthetic oligonucleotide; TTT chr2 60448594 60448615 60448611 60448616 +
ctctgctggttaggaactcaag

SEQ ID NO: 193170 - DNA, 22 bp, Artificial Sequence
  Synthetic oligonucleotide; TTC chr2 60448595 60448616 60448612 60448617 +
tctgctggttaggaactcaaga

SEQ ID NO: 193171 - DNA, 22 bp, Artificial Sequence
  Synthetic oligonucleotide; CTC chr2 60448597 60448618 60448614 60448619 +
tgctggttaggaactcaagatg

SEQ ID NO: 193172 - DNA, 22 bp, Artificial Sequence
  Synthetic oligonucleotide; CTG chr2 60448599 60448620 60448616 60448621 +
ctggttaggaactcaagatgaa

SEQ ID NO: 193173 - DNA, 22 bp, Artificial Sequence
  Synthetic oligonucleotide; CTG chr2 60448602 60448623 60448619 60448624 +
gttaggaactcaagatgaactc

SEQ ID NO: 193174 - DNA, 22 bp, Artificial Sequence
  Synthetic oligonucleotide; TTA chr2 60448606 60448627 60448623 60448628 +
ggaactcaagatgaactcttga

SEQ ID NO: 193175 - DNA, 22 bp, Artificial Sequence
  Synthetic oligonucleotide; CTC chr2 60448613 60448634 60448630 60448635 +
aagatgaactcttgaagaagga

SEQ ID NO: 193176 - DNA, 22 bp, Artificial Sequence
  Synthetic oligonucleotide; CTC chr2 60448624 60448645 60448641 60448646 +
ttgaagaaggaaggtgtgcttg

SEQ ID NO: 193177 - DNA, 22 bp, Artificial Sequence
  Synthetic oligonucleotide; CTT chr2 60448626 60448647 60448643 60448648 +
gaagaaggaaggtgtgcttgca

SEQ ID NO: 193178 - DNA, 22 bp, Artificial Sequence
  Synthetic oligonucleotide; TTG chr2 60448627 60448648 60448644 60448649 +
aagaaggaaggtgtgcttgcat

SEQ ID NO: 193179 - DNA, 22 bp, Artificial Sequence
  Synthetic oligonucleotide; CTT chr2 60448645 60448666 60448662 60448667 +
gcatcaccagttattttggaac

SEQ ID NO: 193180 - DNA, 22 bp, Artificial Sequence
  Synthetic oligonucleotide; TTG chr2 60448646 60448667 60448663 60448668 +
catcaccagttattttggaact

SEQ ID NO: 193181 - DNA, 22 bp, Artificial Sequence
  Synthetic oligonucleotide; TTA chr2 60448658 60448679 60448675 60448680 +
ttttggaacttccaccagactc

SEQ ID NO: 193182 - DNA, 22 bp, Artificial Sequence
  Synthetic oligonucleotide; TTT chr2 60448661 60448682 60448678 60448683 +
tggaacttccaccagactcaaa

SEQ ID NO: 193183 - DNA, 22 bp, Artificial Sequence
  Synthetic oligonucleotide; TTT chr2 60448662 60448683 60448679 60448684 +
ggaacttccaccagactcaaaa

SEQ ID NO: 193184 - DNA, 22 bp, Artificial Sequence
  Synthetic oligonucleotide; TTG chr2 60448663 60448684 60448680 60448685 +
gaacttccaccagactcaaaat

SEQ ID NO: 193185 - DNA, 22 bp, Artificial Sequence
  Synthetic oligonucleotide; CTT chr2 60448669 60448690 60448686 60448691 +
ccaccagactcaaaattcctca

SEQ ID NO: 193186 - DNA, 22 bp, Artificial Sequence
  Synthetic oligonucleotide; TTC chr2 60448670 60448691 60448687 60448692 +
caccagactcaaaattcctcaa

SEQ ID NO: 193187 - DNA, 22 bp, Artificial Sequence
  Synthetic oligonucleotide; CTC chr2 60448680 60448701 60448697 60448702 +
aaaattcctcaaatctgcttcc

SEQ ID NO: 193188 - DNA, 22 bp, Artificial Sequence
  Synthetic oligonucleotide; TTC chr2 60448687 60448708 60448704 60448709 +
ctcaaatctgcttccttcacac

SEQ ID NO: 193189 - DNA, 22 bp, Artificial Sequence
  Synthetic oligonucleotide; CTC chr2 60448690 60448711 60448707 60448712 +
aaatctgcttccttcacactat

SEQ ID NO: 193190 - DNA, 22 bp, Artificial Sequence
  Synthetic oligonucleotide; CTG chr2 60448697 60448718 60448714 60448719 +
cttccttcacactatactccaa

SEQ ID NO: 193191 - DNA, 22 bp, Artificial Sequence
  Synthetic oligonucleotide; CTT chr2 60448700 60448721 60448717 60448722 +
ccttcacactatactccaaaag

SEQ ID NO: 193192 - DNA, 22 bp, Artificial Sequence
  Synthetic oligonucleotide; TTC chr2 60448701 60448722 60448718 60448723 +
cttcacactatactccaaaagg

SEQ ID NO: 193193 - DNA, 22 bp, Artificial Sequence
  Synthetic oligonucleotide; CTT chr2 60448704 60448725 60448721 60448726 +
cacactatactccaaaaggagt

SEQ ID NO: 193194 - DNA, 22 bp, Artificial Sequence
  Synthetic oligonucleotide; TTC chr2 60448705 60448726 60448722 60448727 +
acactatactccaaaaggagtc

SEQ ID NO: 193195 - DNA, 22 bp, Artificial Sequence
  Synthetic oligonucleotide; CTA chr2 60448711 60448732 60448728 60448733 +
tactccaaaaggagtcaaagct

SEQ ID NO: 193196 - DNA, 22 bp, Artificial Sequence
  Synthetic oligonucleotide; CTC chr2 60448716 60448737 60448733 60448738 +
caaaaggagtcaaagctatgtg

SEQ ID NO: 193197 - DNA, 22 bp, Artificial Sequence
  Synthetic oligonucleotide; CTA chr2 60448734 60448755 60448751 60448756 +
tgtggcatactgtaagaacaga

SEQ ID NO: 193198 - DNA, 22 bp, Artificial Sequence
  Synthetic oligonucleotide; CTG chr2 60448746 60448767 60448763 60448768 +
taagaacagaaccaacagccta

SEQ ID NO: 193199 - DNA, 22 bp, Artificial Sequence
  Synthetic oligonucleotide; CTA chr2 60448768 60448789 60448785 60448790 +
caaaatacttccattctaatcc

SEQ ID NO: 193200 - DNA, 22 bp, Artificial Sequence
  Synthetic oligonucleotide; CTT chr2 60448778 60448799 60448795 60448800 +
ccattctaatcctactattact

SEQ ID NO: 193201 - DNA, 22 bp, Artificial Sequence
  Synthetic oligonucleotide; TTC chr2 60448779 60448800 60448796 60448801 +
cattctaatcctactattactt

SEQ ID NO: 193202 - DNA, 22 bp, Artificial Sequence
  Synthetic oligonucleotide; TTC chr2 60448784 60448805 60448801 60448806 +
taatcctactattacttccggg

SEQ ID NO: 193203 - DNA, 22 bp, Artificial Sequence
  Synthetic oligonucleotide; CTA chr2 60448786 60448807 60448803 60448808 +
atcctactattacttccgggga

SEQ ID NO: 193204 - DNA, 22 bp, Artificial Sequence
  Synthetic oligonucleotide; CTA chr2 60448792 60448813 60448809 60448814 +
ctattacttccggggacactga

SEQ ID NO: 193205 - DNA, 22 bp, Artificial Sequence
  Synthetic oligonucleotide; CTA chr2 60448795 60448816 60448812 60448817 +
ttacttccggggacactgattt

SEQ ID NO: 193206 - DNA, 22 bp, Artificial Sequence
  Synthetic oligonucleotide; TTA chr2 60448798 60448819 60448815 60448820 +
cttccggggacactgatttata

SEQ ID NO: 193207 - DNA, 22 bp, Artificial Sequence
  Synthetic oligonucleotide; CTT chr2 60448801 60448822 60448818 60448823 +
ccggggacactgatttataaaa

SEQ ID NO: 193208 - DNA, 22 bp, Artificial Sequence
  Synthetic oligonucleotide; TTC chr2 60448802 60448823 60448819 60448824 +
cggggacactgatttataaaat

SEQ ID NO: 193209 - DNA, 22 bp, Artificial Sequence
  Synthetic oligonucleotide; CTG chr2 60448813 60448834 60448830 60448835 +
atttataaaataagaattataa

SEQ ID NO: 193210 - DNA, 22 bp, Artificial Sequence
  Synthetic oligonucleotide; TTT chr2 60448817 60448838 60448834 60448839 +
ataaaataagaattataaaata

SEQ ID NO: 193211 - DNA, 22 bp, Artificial Sequence
  Synthetic oligonucleotide; TTA chr2 60448818 60448839 60448835 60448840 +
taaaataagaattataaaataa

SEQ ID NO: 193212 - DNA, 22 bp, Artificial Sequence
  Synthetic oligonucleotide; TTA chr2 60448832 60448853 60448849 60448854 +
taaaataagaatttttaaaaat

SEQ ID NO: 193213 - DNA, 22 bp, Artificial Sequence
  Synthetic oligonucleotide; TTT chr2 60448846 60448867 60448863 60448868 +
ttaaaaataggaataaatatag

SEQ ID NO: 193214 - DNA, 22 bp, Artificial Sequence
  Synthetic oligonucleotide; TTT chr2 60448847 60448868 60448864 60448869 +
taaaaataggaataaatatagc

SEQ ID NO: 193215 - DNA, 22 bp, Artificial Sequence
  Synthetic oligonucleotide; TTT chr2 60448848 60448869 60448865 60448870 +
aaaaataggaataaatatagcc

SEQ ID NO: 193216 - DNA, 22 bp, Artificial Sequence
  Synthetic oligonucleotide; TTA chr2 60448849 60448870 60448866 60448871 +
aaaataggaataaatatagcca

SEQ ID NO: 193217 - DNA, 22 bp, Artificial Sequence
  Synthetic oligonucleotide; CTT chr2 60448875 60448896 60448892 60448897 +
cgtcaatgttaacctcactatc

SEQ ID NO: 193218 - DNA, 22 bp, Artificial Sequence
  Synthetic oligonucleotide; TTC chr2 60448876 60448897 60448893 60448898 +
gtcaatgttaacctcactatca

SEQ ID NO: 193219 - DNA, 22 bp, Artificial Sequence
  Synthetic oligonucleotide; TTA chr2 60448886 60448907 60448903 60448908 +
acctcactatcaaaaaaaaaaa

SEQ ID NO: 193220 - DNA, 22 bp, Artificial Sequence
  Synthetic oligonucleotide; CTC chr2 60448891 60448912 60448908 60448913 +
actatcaaaaaaaaaaaaaaat

SEQ ID NO: 193221 - DNA, 22 bp, Artificial Sequence
  Synthetic oligonucleotide; CTA chr2 60448895 60448916 60448912 60448917 +
tcaaaaaaaaaaaaaaatcatg

SEQ ID NO: 193222 - DNA, 22 bp, Artificial Sequence
  Synthetic oligonucleotide; CTG chr2 60448936 60448957 60448953 60448958 +
aaagatattcctgaccacttga

SEQ ID NO: 193223 - DNA, 22 bp, Artificial Sequence
  Synthetic oligonucleotide; TTC chr2 60448946 60448967 60448963 60448968 +
ctgaccacttgaagggcttggt

SEQ ID NO: 193224 - DNA, 22 bp, Artificial Sequence
  Synthetic oligonucleotide; CTG chr2 60448949 60448970 60448966 60448971 +
accacttgaagggcttggtttt

SEQ ID NO: 193225 - DNA, 22 bp, Artificial Sequence
  Synthetic oligonucleotide; CTT chr2 60448956 60448977 60448973 60448978 +
gaagggcttggttttaatctga

SEQ ID NO: 193226 - DNA, 22 bp, Artificial Sequence
  Synthetic oligonucleotide; TTG chr2 60448957 60448978 60448974 60448979 +
aagggcttggttttaatctgaa

SEQ ID NO: 193227 - DNA, 22 bp, Artificial Sequence
  Synthetic oligonucleotide; CTT chr2 60448965 60448986 60448982 60448987 +
ggttttaatctgaatgctcttg

SEQ ID NO: 193228 - DNA, 22 bp, Artificial Sequence
  Synthetic oligonucleotide; TTG chr2 60448966 60448987 60448983 60448988 +
gttttaatctgaatgctcttgg

SEQ ID NO: 193229 - DNA, 22 bp, Artificial Sequence
  Synthetic oligonucleotide; TTT chr2 60448970 60448991 60448987 60448992 +
taatctgaatgctcttggaaac

SEQ ID NO: 193230 - DNA, 22 bp, Artificial Sequence
  Synthetic oligonucleotide; TTT chr2 60448971 60448992 60448988 60448993 +
aatctgaatgctcttggaaact

SEQ ID NO: 193231 - DNA, 22 bp, Artificial Sequence
  Synthetic oligonucleotide; TTA chr2 60448972 60448993 60448989 60448994 +
atctgaatgctcttggaaactc

SEQ ID NO: 193232 - DNA, 22 bp, Artificial Sequence
  Synthetic oligonucleotide; CTG chr2 60448977 60448998 60448994 60448999 +
aatgctcttggaaactccaagc

SEQ ID NO: 193233 - DNA, 22 bp, Artificial Sequence
  Synthetic oligonucleotide; CTC chr2 60448984 60449005 60449001 60449006 +
ttggaaactccaagcaaaagtg

SEQ ID NO: 193234 - DNA, 22 bp, Artificial Sequence
  Synthetic oligonucleotide; CTT chr2 60448986 60449007 60449003 60449008 +
ggaaactccaagcaaaagtgcc

SEQ ID NO: 193235 - DNA, 22 bp, Artificial Sequence
  Synthetic oligonucleotide; TTG chr2 60448987 60449008 60449004 60449009 +
gaaactccaagcaaaagtgccc

SEQ ID NO: 193236 - DNA, 22 bp, Artificial Sequence
  Synthetic oligonucleotide; CTC chr2 60448994 60449015 60449011 60449016 +
caagcaaaagtgcccagaaaat

SEQ ID NO: 193237 - DNA, 22 bp, Artificial Sequence
  Synthetic oligonucleotide; CTG chr2 60449022 60449043 60449039 60449044 +
ccaaggtttggggcactcagtt

SEQ ID NO: 193238 - DNA, 22 bp, Artificial Sequence
  Synthetic oligonucleotide; TTT chr2 60449031 60449052 60449048 60449053 +
ggggcactcagttagacctcag

SEQ ID NO: 193239 - DNA, 22 bp, Artificial Sequence
  Synthetic oligonucleotide; TTG chr2 60449032 60449053 60449049 60449054 +
gggcactcagttagacctcagc

SEQ ID NO: 193240 - DNA, 22 bp, Artificial Sequence
  Synthetic oligonucleotide; CTC chr2 60449040 60449061 60449057 60449062 +
agttagacctcagcagattcca

SEQ ID NO: 193241 - DNA, 22 bp, Artificial Sequence
  Synthetic oligonucleotide; TTA chr2 60449045 60449066 60449062 60449067 +
gacctcagcagattccaagatt

SEQ ID NO: 193242 - DNA, 22 bp, Artificial Sequence
  Synthetic oligonucleotide; CTC chr2 60449051 60449072 60449068 60449073 +
agcagattccaagattgcactc

SEQ ID NO: 193243 - DNA, 22 bp, Artificial Sequence
  Synthetic oligonucleotide; TTC chr2 60449060 60449081 60449077 60449082 +
caagattgcactccttgcctaa

SEQ ID NO: 193244 - DNA, 22 bp, Artificial Sequence
  Synthetic oligonucleotide; TTG chr2 60449068 60449089 60449085 60449090 +
cactccttgcctaagagttttc

SEQ ID NO: 193245 - DNA, 22 bp, Artificial Sequence
  Synthetic oligonucleotide; CTC chr2 60449073 60449094 60449090 60449095 +
cttgcctaagagttttctttaa

SEQ ID NO: 193246 - DNA, 22 bp, Artificial Sequence
  Synthetic oligonucleotide; CTT chr2 60449076 60449097 60449093 60449098 +
gcctaagagttttctttaaatg

SEQ ID NO: 193247 - DNA, 22 bp, Artificial Sequence
  Synthetic oligonucleotide; TTG chr2 60449077 60449098 60449094 60449099 +
cctaagagttttctttaaatga

SEQ ID NO: 193248 - DNA, 22 bp, Artificial Sequence
  Synthetic oligonucleotide; CTA chr2 60449081 60449102 60449098 60449103 +
agagttttctttaaatgatcac

SEQ ID NO: 193249 - DNA, 22 bp, Artificial Sequence
  Synthetic oligonucleotide; TTT chr2 60449088 60449109 60449105 60449110 +
tctttaaatgatcactggtttt

SEQ ID NO: 193250 - DNA, 22 bp, Artificial Sequence
  Synthetic oligonucleotide; TTT chr2 60449089 60449110 60449106 60449111 +
ctttaaatgatcactggttttt

SEQ ID NO: 193251 - DNA, 22 bp, Artificial Sequence
  Synthetic oligonucleotide; TTC chr2 60449090 60449111 60449107 60449112 +
tttaaatgatcactggtttttg

SEQ ID NO: 193252 - DNA, 22 bp, Artificial Sequence
  Synthetic oligonucleotide; CTT chr2 60449092 60449113 60449109 60449114 +
taaatgatcactggtttttgaa

SEQ ID NO: 193253 - DNA, 22 bp, Artificial Sequence
  Synthetic oligonucleotide; TTT chr2 60449093 60449114 60449110 60449115 +
aaatgatcactggtttttgaaa

SEQ ID NO: 193254 - DNA, 22 bp, Artificial Sequence
  Synthetic oligonucleotide; TTA chr2 60449094 60449115 60449111 60449116 +
aatgatcactggtttttgaaac

SEQ ID NO: 193255 - DNA, 22 bp, Artificial Sequence
  Synthetic oligonucleotide; CTG chr2 60449105 60449126 60449122 60449127 +
gtttttgaaacaattatttctc

SEQ ID NO: 193256 - DNA, 22 bp, Artificial Sequence
  Synthetic oligonucleotide; TTT chr2 60449109 60449130 60449126 60449131 +
ttgaaacaattatttctcaaac

SEQ ID NO: 193257 - DNA, 22 bp, Artificial Sequence
  Synthetic oligonucleotide; TTT chr2 60449110 60449131 60449127 60449132 +
tgaaacaattatttctcaaaca

SEQ ID NO: 193258 - DNA, 22 bp, Artificial Sequence
  Synthetic oligonucleotide; TTT chr2 60449111 60449132 60449128 60449133 +
gaaacaattatttctcaaacag

SEQ ID NO: 193259 - DNA, 22 bp, Artificial Sequence
  Synthetic oligonucleotide; TTG chr2 60449112 60449133 60449129 60449134 +
aaacaattatttctcaaacagg

SEQ ID NO: 193260 - DNA, 22 bp, Artificial Sequence
  Synthetic oligonucleotide; TTA chr2 60449121 60449142 60449138 60449143 +
tttctcaaacaggctgatattc

SEQ ID NO: 193261 - DNA, 22 bp, Artificial Sequence
  Synthetic oligonucleotide; TTT chr2 60449124 60449145 60449141 60449146 +
ctcaaacaggctgatattcaac

SEQ ID NO: 193262 - DNA, 22 bp, Artificial Sequence
  Synthetic oligonucleotide; TTC chr2 60449125 60449146 60449142 60449147 +
tcaaacaggctgatattcaaca

SEQ ID NO: 193263 - DNA, 22 bp, Artificial Sequence
  Synthetic oligonucleotide; CTC chr2 60449127 60449148 60449144 60449149 +
aaacaggctgatattcaacatg

SEQ ID NO: 193264 - DNA, 22 bp, Artificial Sequence
  Synthetic oligonucleotide; CTG chr2 60449137 60449158 60449154 60449159 +
atattcaacatgctggatgctg

SEQ ID NO: 193265 - DNA, 22 bp, Artificial Sequence
  Synthetic oligonucleotide; TTC chr2 60449143 60449164 60449160 60449165 +
aacatgctggatgctgggtgct

SEQ ID NO: 193266 - DNA, 22 bp, Artificial Sequence
  Synthetic oligonucleotide; CTG chr2 60449152 60449173 60449169 60449174 +
gatgctgggtgctgcaggggct

SEQ ID NO: 193267 - DNA, 22 bp, Artificial Sequence
  Synthetic oligonucleotide; CTG chr2 60449159 60449180 60449176 60449181 +
ggtgctgcaggggctttgagtg

SEQ ID NO: 193268 - DNA, 22 bp, Artificial Sequence
  Synthetic oligonucleotide; CTG chr2 60449166 60449187 60449183 60449188 +
caggggctttgagtgtctttct

SEQ ID NO: 193269 - DNA, 22 bp, Artificial Sequence
  Synthetic oligonucleotide; CTT chr2 60449175 60449196 60449192 60449197 +
tgagtgtctttctctcccatca

SEQ ID NO: 193270 - DNA, 22 bp, Artificial Sequence
  Synthetic oligonucleotide; TTT chr2 60449176 60449197 60449193 60449198 +
gagtgtctttctctcccatcat

SEQ ID NO: 193271 - DNA, 22 bp, Artificial Sequence
  Synthetic oligonucleotide; TTG chr2 60449177 60449198 60449194 60449199 +
agtgtctttctctcccatcatg

SEQ ID NO: 193272 - DNA, 22 bp, Artificial Sequence
  Synthetic oligonucleotide; CTT chr2 60449185 60449206 60449202 60449207 +
tctctcccatcatggaccccaa

SEQ ID NO: 193273 - DNA, 22 bp, Artificial Sequence
  Synthetic oligonucleotide; TTT chr2 60449186 60449207 60449203 60449208 +
ctctcccatcatggaccccaat

SEQ ID NO: 193274 - DNA, 22 bp, Artificial Sequence
  Synthetic oligonucleotide; TTC chr2 60449187 60449208 60449204 60449209 +
tctcccatcatggaccccaatt

SEQ ID NO: 193275 - DNA, 22 bp, Artificial Sequence
  Synthetic oligonucleotide; CTC chr2 60449189 60449210 60449206 60449211 +
tcccatcatggaccccaattct

SEQ ID NO: 193276 - DNA, 22 bp, Artificial Sequence
  Synthetic oligonucleotide; CTC chr2 60449191 60449212 60449208 60449213 +
ccatcatggaccccaattctaa

SEQ ID NO: 193277 - DNA, 22 bp, Artificial Sequence
  Synthetic oligonucleotide; TTC chr2 60449210 60449231 60449227 60449232 +
taacagaccttttttatacagt

SEQ ID NO: 193278 - DNA, 22 bp, Artificial Sequence
  Synthetic oligonucleotide; CTA chr2 60449212 60449233 60449229 60449234 +
acagaccttttttatacagtgt

SEQ ID NO: 193279 - DNA, 22 bp, Artificial Sequence
  Synthetic oligonucleotide; CTT chr2 60449221 60449242 60449238 60449243 +
ttttatacagtgtaataatctg

SEQ ID NO: 193280 - DNA, 22 bp, Artificial Sequence
  Synthetic oligonucleotide; TTT chr2 60449222 60449243 60449239 60449244 +
tttatacagtgtaataatctgt

SEQ ID NO: 193281 - DNA, 22 bp, Artificial Sequence
  Synthetic oligonucleotide; TTT chr2 60449223 60449244 60449240 60449245 +
ttatacagtgtaataatctgtc

SEQ ID NO: 193282 - DNA, 22 bp, Artificial Sequence
  Synthetic oligonucleotide; TTT chr2 60449224 60449245 60449241 60449246 +
tatacagtgtaataatctgtcc

SEQ ID NO: 193283 - DNA, 22 bp, Artificial Sequence
  Synthetic oligonucleotide; TTT chr2 60449225 60449246 60449242 60449247 +
atacagtgtaataatctgtccg

SEQ ID NO: 193284 - DNA, 22 bp, Artificial Sequence
  Synthetic oligonucleotide; TTA chr2 60449226 60449247 60449243 60449248 +
tacagtgtaataatctgtccgg

SEQ ID NO: 193285 - DNA, 22 bp, Artificial Sequence
  Synthetic oligonucleotide; CTG chr2 60449243 60449264 60449260 60449265 +
tccgggcgcggtggcttacacc

SEQ ID NO: 193286 - DNA, 22 bp, Artificial Sequence
  Synthetic oligonucleotide; CTT chr2 60449260 60449281 60449277 60449282 +
acacctgtaatcccagcacttt

SEQ ID NO: 193287 - DNA, 22 bp, Artificial Sequence
  Synthetic oligonucleotide; TTA chr2 60449261 60449282 60449278 60449283 +
cacctgtaatcccagcactttg

SEQ ID NO: 193288 - DNA, 22 bp, Artificial Sequence
  Synthetic oligonucleotide; CTG chr2 60449267 60449288 60449284 60449289 +
taatcccagcactttgggaggc

SEQ ID NO: 193289 - DNA, 22 bp, Artificial Sequence
  Synthetic oligonucleotide; CTT chr2 60449281 60449302 60449298 60449303 +
tgggaggccgaggcaggtggct

SEQ ID NO: 193290 - DNA, 22 bp, Artificial Sequence
  Synthetic oligonucleotide; TTT chr2 60449282 60449303 60449299 60449304 +
gggaggccgaggcaggtggctc

SEQ ID NO: 193291 - DNA, 22 bp, Artificial Sequence
  Synthetic oligonucleotide; TTG chr2 60449283 60449304 60449300 60449305 +
ggaggccgaggcaggtggctca

SEQ ID NO: 193292 - DNA, 22 bp, Artificial Sequence
  Synthetic oligonucleotide; CTC chr2 60449304 60449325 60449321 60449326 +
atgaggtcaggagttcgagacc

SEQ ID NO: 193293 - DNA, 22 bp, Artificial Sequence
  Synthetic oligonucleotide; TTC chr2 60449320 60449341 60449337 60449342 +
gagaccagcctgaccaacatgg

SEQ ID NO: 193294 - DNA, 22 bp, Artificial Sequence
  Synthetic oligonucleotide; CTG chr2 60449332 60449353 60449349 60449354 +
accaacatggtgaaaccccgtc

SEQ ID NO: 193295 - DNA, 22 bp, Artificial Sequence
  Synthetic oligonucleotide; CTC chr2 60449356 60449377 60449373 60449378 +
tactaaaaatacaaaaattagc

SEQ ID NO: 193296 - DNA, 22 bp, Artificial Sequence
  Synthetic oligonucleotide; CTA chr2 60449358 60449379 60449375 60449380 +
ctaaaaatacaaaaattagcca

SEQ ID NO: 193297 - DNA, 22 bp, Artificial Sequence
  Synthetic oligonucleotide; CTA chr2 60449361 60449382 60449378 60449383 +
aaaatacaaaaattagccaggt

SEQ ID NO: 193298 - DNA, 22 bp, Artificial Sequence
  Synthetic oligonucleotide; TTA chr2 60449376 60449397 60449393 60449398 +
gccaggtggtacgcacctgtaa

SEQ ID NO: 193299 - DNA, 22 bp, Artificial Sequence
  Synthetic oligonucleotide; CTG chr2 60449395 60449416 60449412 60449417 +
taatcccagccactcaggaggc

SEQ ID NO: 193300 - DNA, 22 bp, Artificial Sequence
  Synthetic oligonucleotide; CTC chr2 60449410 60449431 60449427 60449432 +
aggaggctgaggcaggagaacc

SEQ ID NO: 193301 - DNA, 22 bp, Artificial Sequence
  Synthetic oligonucleotide; CTG chr2 60449419 60449440 60449436 60449441 +
aggcaggagaaccacttgaacc

SEQ ID NO: 193302 - DNA, 22 bp, Artificial Sequence
  Synthetic oligonucleotide; CTT chr2 60449436 60449457 60449453 60449458 +
gaacccgggaggtagaggttgc

SEQ ID NO: 193303 - DNA, 22 bp, Artificial Sequence
  Synthetic oligonucleotide; TTG chr2 60449437 60449458 60449454 60449459 +
aacccgggaggtagaggttgca

SEQ ID NO: 193304 - DNA, 22 bp, Artificial Sequence
  Synthetic oligonucleotide; TTG chr2 60449457 60449478 60449474 60449479 +
cagtgagccaagatcgtgccat

SEQ ID NO: 193305 - DNA, 22 bp, Artificial Sequence
  Synthetic oligonucleotide; TTG chr2 60449481 60449502 60449498 60449503 +
cactccagcctgggcaatagag

SEQ ID NO: 193306 - DNA, 22 bp, Artificial Sequence
  Synthetic oligonucleotide; CTC chr2 60449486 60449507 60449503 60449508 +
cagcctgggcaatagagtgaga

SEQ ID NO: 193307 - DNA, 22 bp, Artificial Sequence
  Synthetic oligonucleotide; CTG chr2 60449493 60449514 60449510 60449515 +
ggcaatagagtgagactccatc

SEQ ID NO: 193308 - DNA, 22 bp, Artificial Sequence
  Synthetic oligonucleotide; CTC chr2 60449511 60449532 60449528 60449533 +
catctcaacaataataataata

SEQ ID NO: 193309 - DNA, 22 bp, Artificial Sequence
  Synthetic oligonucleotide; CTC chr2 60449517 60449538 60449534 60449539 +
aacaataataataataataata

SEQ ID NO: 193310 - DNA, 22 bp, Artificial Sequence
  Synthetic oligonucleotide; CTG chr2 60449571 60449592 60449588 60449593 +
aacagcccacaaaaggcttggg

SEQ ID NO: 193311 - DNA, 22 bp, Artificial Sequence
  Synthetic oligonucleotide; CTT chr2 60449590 60449611 60449607 60449612 +
gggaaagtaaaaacaatgccct

SEQ ID NO: 193312 - DNA, 22 bp, Artificial Sequence
  Synthetic oligonucleotide; TTG chr2 60449591 60449612 60449608 60449613 +
ggaaagtaaaaacaatgccctg

SEQ ID NO: 193313 - DNA, 22 bp, Artificial Sequence
  Synthetic oligonucleotide; CTG chr2 60449613 60449634 60449630 60449635 +
tatttggtctcctccatccaag

SEQ ID NO: 193314 - DNA, 22 bp, Artificial Sequence
  Synthetic oligonucleotide; TTT chr2 60449618 60449639 60449635 60449640 +
ggtctcctccatccaagtggct

SEQ ID NO: 193315 - DNA, 22 bp, Artificial Sequence
  Synthetic oligonucleotide; TTG chr2 60449619 60449640 60449636 60449641 +
gtctcctccatccaagtggctg

SEQ ID NO: 193316 - DNA, 22 bp, Artificial Sequence
  Synthetic oligonucleotide; CTC chr2 60449624 60449645 60449641 60449646 +
ctccatccaagtggctgggact

SEQ ID NO: 193317 - DNA, 22 bp, Artificial Sequence
  Synthetic oligonucleotide; CTC chr2 60449627 60449648 60449644 60449649 +
catccaagtggctgggactctg

SEQ ID NO: 193318 - DNA, 22 bp, Artificial Sequence
  Synthetic oligonucleotide; CTG chr2 60449641 60449662 60449658 60449663 +
ggactctgtcctctagtctgtg

SEQ ID NO: 193319 - DNA, 22 bp, Artificial Sequence
  Synthetic oligonucleotide; CTC chr2 60449647 60449668 60449664 60449669 +
tgtcctctagtctgtgctcatg

SEQ ID NO: 193320 - DNA, 22 bp, Artificial Sequence
  Synthetic oligonucleotide; CTG chr2 60449649 60449670 60449666 60449671 +
tcctctagtctgtgctcatgtc

SEQ ID NO: 193321 - DNA, 22 bp, Artificial Sequence
  Synthetic oligonucleotide; CTC chr2 60449654 60449675 60449671 60449676 +
tagtctgtgctcatgtcaggca

SEQ ID NO: 193322 - DNA, 22 bp, Artificial Sequence
  Synthetic oligonucleotide; CTA chr2 60449656 60449677 60449673 60449678 +
gtctgtgctcatgtcaggcaac

SEQ ID NO: 193323 - DNA, 22 bp, Artificial Sequence
  Synthetic oligonucleotide; CTG chr2 60449661 60449682 60449678 60449683 +
tgctcatgtcaggcaaccaatt

SEQ ID NO: 193324 - DNA, 22 bp, Artificial Sequence
  Synthetic oligonucleotide; CTC chr2 60449666 60449687 60449683 60449688 +
atgtcaggcaaccaatttatct

SEQ ID NO: 193325 - DNA, 22 bp, Artificial Sequence
  Synthetic oligonucleotide; TTT chr2 60449684 60449705 60449701 60449706 +
atctctctgcaatctgaagttc

SEQ ID NO: 193326 - DNA, 22 bp, Artificial Sequence
  Synthetic oligonucleotide; TTA chr2 60449685 60449706 60449702 60449707 +
tctctctgcaatctgaagttcc

SEQ ID NO: 193327 - DNA, 22 bp, Artificial Sequence
  Synthetic oligonucleotide; CTC chr2 60449689 60449710 60449706 60449711 +
tctgcaatctgaagttccactc

SEQ ID NO: 193328 - DNA, 22 bp, Artificial Sequence
  Synthetic oligonucleotide; CTC chr2 60449691 60449712 60449708 60449713 +
tgcaatctgaagttccactctg

SEQ ID NO: 193329 - DNA, 22 bp, Artificial Sequence
  Synthetic oligonucleotide; CTG chr2 60449693 60449714 60449710 60449715 +
caatctgaagttccactctgca

SEQ ID NO: 193330 - DNA, 22 bp, Artificial Sequence
  Synthetic oligonucleotide; CTG chr2 60449700 60449721 60449717 60449722 +
aagttccactctgcagagagga

SEQ ID NO: 193331 - DNA, 22 bp, Artificial Sequence
  Synthetic oligonucleotide; TTC chr2 60449706 60449727 60449723 60449728 +
cactctgcagagaggacacagt

SEQ ID NO: 193332 - DNA, 22 bp, Artificial Sequence
  Synthetic oligonucleotide; CTC chr2 60449711 60449732 60449728 60449733 +
tgcagagaggacacagtgagaa

SEQ ID NO: 193333 - DNA, 22 bp, Artificial Sequence
  Synthetic oligonucleotide; CTG chr2 60449713 60449734 60449730 60449735 +
cagagaggacacagtgagaacc

SEQ ID NO: 193334 - DNA, 22 bp, Artificial Sequence
  Synthetic oligonucleotide; CTG chr2 60449739 60449760 60449756 60449761 +
gcagatttgtgagcctcttccc

SEQ ID NO: 193335 - DNA, 22 bp, Artificial Sequence
  Synthetic oligonucleotide; TTT chr2 60449747 60449768 60449764 60449769 +
gtgagcctcttccctgcttctg

SEQ ID NO: 193336 - DNA, 22 bp, Artificial Sequence
  Synthetic oligonucleotide; TTG chr2 60449748 60449769 60449765 60449770 +
tgagcctcttccctgcttctgc

SEQ ID NO: 193337 - DNA, 22 bp, Artificial Sequence
  Synthetic oligonucleotide; CTC chr2 60449756 60449777 60449773 60449778 +
ttccctgcttctgccattcatg

SEQ ID NO: 193338 - DNA, 22 bp, Artificial Sequence
  Synthetic oligonucleotide; CTT chr2 60449758 60449779 60449775 60449780 +
ccctgcttctgccattcatgga

SEQ ID NO: 193339 - DNA, 22 bp, Artificial Sequence
  Synthetic oligonucleotide; TTC chr2 60449759 60449780 60449776 60449781 +
cctgcttctgccattcatggat

SEQ ID NO: 193340 - DNA, 22 bp, Artificial Sequence
  Synthetic oligonucleotide; CTG chr2 60449763 60449784 60449780 60449785 +
cttctgccattcatggataacc

SEQ ID NO: 193341 - DNA, 22 bp, Artificial Sequence
  Synthetic oligonucleotide; CTT chr2 60449766 60449787 60449783 60449788 +
ctgccattcatggataaccatg

SEQ ID NO: 193342 - DNA, 22 bp, Artificial Sequence
  Synthetic oligonucleotide; TTC chr2 60449767 60449788 60449784 60449789 +
tgccattcatggataaccatga

SEQ ID NO: 193343 - DNA, 22 bp, Artificial Sequence
  Synthetic oligonucleotide; CTG chr2 60449769 60449790 60449786 60449791 +
ccattcatggataaccatgatc

SEQ ID NO: 193344 - DNA, 22 bp, Artificial Sequence
  Synthetic oligonucleotide; TTC chr2 60449775 60449796 60449792 60449797 +
atggataaccatgatcttgact

SEQ ID NO: 193345 - DNA, 22 bp, Artificial Sequence
  Synthetic oligonucleotide; CTT chr2 60449793 60449814 60449810 60449815 +
gactcatcacacagagagatgt

SEQ ID NO: 193346 - DNA, 22 bp, Artificial Sequence
  Synthetic oligonucleotide; TTG chr2 60449794 60449815 60449811 60449816 +
actcatcacacagagagatgtc

SEQ ID NO: 193347 - DNA, 22 bp, Artificial Sequence
  Synthetic oligonucleotide; CTC chr2 60449798 60449819 60449815 60449820 +
atcacacagagagatgtcttcc

SEQ ID NO: 193348 - DNA, 22 bp, Artificial Sequence
  Synthetic oligonucleotide; CTT chr2 60449818 60449839 60449835 60449840 +
cccaaattgtcaatcttgtatg

SEQ ID NO: 193349 - DNA, 22 bp, Artificial Sequence
  Synthetic oligonucleotide; TTC chr2 60449819 60449840 60449836 60449841 +
ccaaattgtcaatcttgtatgg

SEQ ID NO: 193350 - DNA, 22 bp, Artificial Sequence
  Synthetic oligonucleotide; TTG chr2 60449827 60449848 60449844 60449849 +
tcaatcttgtatggggtttcaa

SEQ ID NO: 193351 - DNA, 22 bp, Artificial Sequence
  Synthetic oligonucleotide; CTT chr2 60449835 60449856 60449852 60449857 +
gtatggggtttcaaaagtctag

SEQ ID NO: 193352 - DNA, 22 bp, Artificial Sequence
  Synthetic oligonucleotide; TTG chr2 60449836 60449857 60449853 60449858 +
tatggggtttcaaaagtctagc

SEQ ID NO: 193353 - DNA, 22 bp, Artificial Sequence
  Synthetic oligonucleotide; TTT chr2 60449846 60449867 60449863 60449868 +
caaaagtctagccctaggccag

SEQ ID NO: 193354 - DNA, 22 bp, Artificial Sequence
  Synthetic oligonucleotide; TTC chr2 60449847 60449868 60449864 60449869 +
aaaagtctagccctaggccagg

SEQ ID NO: 193355 - DNA, 22 bp, Artificial Sequence
  Synthetic oligonucleotide; CTA chr2 60449856 60449877 60449873 60449878 +
gccctaggccaggtgaggtagt

SEQ ID NO: 193356 - DNA, 22 bp, Artificial Sequence
  Synthetic oligonucleotide; CTA chr2 60449862 60449883 60449879 60449884 +
ggccaggtgaggtagtgcaatg

SEQ ID NO: 193357 - DNA, 22 bp, Artificial Sequence
  Synthetic oligonucleotide; CTC chr2 60449888 60449909 60449905 60449910 +
taatcccagcactatgggaggc

SEQ ID NO: 193358 - DNA, 22 bp, Artificial Sequence
  Synthetic oligonucleotide; CTA chr2 60449890 60449911 60449907 60449912 +
atcccagcactatgggaggcct

SEQ ID NO: 193359 - DNA, 22 bp, Artificial Sequence
  Synthetic oligonucleotide; CTA chr2 60449902 60449923 60449919 60449924 +
tgggaggcctaggagggtggat

SEQ ID NO: 193360 - DNA, 22 bp, Artificial Sequence
  Synthetic oligonucleotide; CTA chr2 60449913 60449934 60449930 60449935 +
ggagggtggatcacgagatcag

SEQ ID NO: 193361 - DNA, 22 bp, Artificial Sequence
  Synthetic oligonucleotide; CTG chr2 60449953 60449974 60449970 60449975 +
gctaacacggtgaaacgccgta

SEQ ID NO: 193362 - DNA, 22 bp, Artificial Sequence
  Synthetic oligonucleotide; CTA chr2 60449957 60449978 60449974 60449979 +
acacggtgaaacgccgtatcta

SEQ ID NO: 193363 - DNA, 22 bp, Artificial Sequence
  Synthetic oligonucleotide; CTA chr2 60449979 60450000 60449996 60450001 +
ctaaaaatacaaaaaatattag

SEQ ID NO: 193364 - DNA, 22 bp, Artificial Sequence
  Synthetic oligonucleotide; CTA chr2 60449982 60450003 60449999 60450004 +
aaaatacaaaaaatattagctg

SEQ ID NO: 193365 - DNA, 22 bp, Artificial Sequence
  Synthetic oligonucleotide; TTA chr2 60450000 60450021 60450017 60450022 +
gctgggcgtggtggcgcgtgcc

SEQ ID NO: 193366 - DNA, 22 bp, Artificial Sequence
  Synthetic oligonucleotide; CTG chr2 60450004 60450025 60450021 60450026 +
ggcgtggtggcgcgtgcctgta

SEQ ID NO: 193367 - DNA, 22 bp, Artificial Sequence
  Synthetic oligonucleotide; CTG chr2 60450024 60450045 60450041 60450046 +
tagtcccagctacttgggaagc

SEQ ID NO: 193368 - DNA, 22 bp, Artificial Sequence
  Synthetic oligonucleotide; CTA chr2 60450036 60450057 60450053 60450058 +
cttgggaagctgaggcaggagg

SEQ ID NO: 193369 - DNA, 22 bp, Artificial Sequence
  Synthetic oligonucleotide; CTT chr2 60450039 60450060 60450056 60450061 +
gggaagctgaggcaggaggatc

SEQ ID NO: 193370 - DNA, 22 bp, Artificial Sequence
  Synthetic oligonucleotide; TTG chr2 60450040 60450061 60450057 60450062 +
ggaagctgaggcaggaggatcc

SEQ ID NO: 193371 - DNA, 22 bp, Artificial Sequence
  Synthetic oligonucleotide; CTG chr2 60450048 60450069 60450065 60450070 +
aggcaggaggatcccttgaacc

SEQ ID NO: 193372 - DNA, 22 bp, Artificial Sequence
  Synthetic oligonucleotide; CTT chr2 60450065 60450086 60450082 60450087 +
gaacccagtaggcggaggttgt

SEQ ID NO: 193373 - DNA, 22 bp, Artificial Sequence
  Synthetic oligonucleotide; TTG chr2 60450066 60450087 60450083 60450088 +
aacccagtaggcggaggttgtg

SEQ ID NO: 193374 - DNA, 22 bp, Artificial Sequence
  Synthetic oligonucleotide; TTG chr2 60450086 60450107 60450103 60450108 +
tggtgagctgagtccttgccac

SEQ ID NO: 193375 - DNA, 22 bp, Artificial Sequence
  Synthetic oligonucleotide; CTG chr2 60450096 60450117 60450113 60450118 +
agtccttgccactgcactccag

SEQ ID NO: 193376 - DNA, 22 bp, Artificial Sequence
  Synthetic oligonucleotide; CTT chr2 60450103 60450124 60450120 60450125 +
gccactgcactccagcctgggt

SEQ ID NO: 193377 - DNA, 22 bp, Artificial Sequence
  Synthetic oligonucleotide; TTG chr2 60450104 60450125 60450121 60450126 +
ccactgcactccagcctgggtg

SEQ ID NO: 193378 - DNA, 22 bp, Artificial Sequence
  Synthetic oligonucleotide; CTG chr2 60450110 60450131 60450127 60450132 +
cactccagcctgggtgacagag

SEQ ID NO: 193379 - DNA, 22 bp, Artificial Sequence
  Synthetic oligonucleotide; CTC chr2 60450115 60450136 60450132 60450137 +
cagcctgggtgacagagcgaga

SEQ ID NO: 193380 - DNA, 22 bp, Artificial Sequence
  Synthetic oligonucleotide; CTG chr2 60450122 60450143 60450139 60450144 +
ggtgacagagcgagattctgtc

SEQ ID NO: 193381 - DNA, 22 bp, Artificial Sequence
  Synthetic oligonucleotide; TTC chr2 60450140 60450161 60450157 60450162 +
tgtcttaaaaaaaaaaaaaaaa

SEQ ID NO: 193382 - DNA, 22 bp, Artificial Sequence
  Synthetic oligonucleotide; CTG chr2 60450142 60450163 60450159 60450164 +
tcttaaaaaaaaaaaaaaaaaa

SEQ ID NO: 193383 - DNA, 22 bp, Artificial Sequence
  Synthetic oligonucleotide; CTT chr2 60450146 60450167 60450163 60450168 +
aaaaaaaaaaaaaaaaaaaaaa

SEQ ID NO: 193384 - DNA, 22 bp, Artificial Sequence
  Synthetic oligonucleotide; TTA chr2 60450147 60450168 60450164 60450169 +
aaaaaaaaaaaaaaaaaaaaaa

SEQ ID NO: 193385 - DNA, 22 bp, Artificial Sequence
  Synthetic oligonucleotide; CTA chr2 60450177 60450198 60450194 60450199 +
gccctaacacaataccgtttcc

SEQ ID NO: 193386 - DNA, 22 bp, Artificial Sequence
  Synthetic oligonucleotide; CTA chr2 60450183 60450204 60450200 60450205 +
acacaataccgtttcctaataa

SEQ ID NO: 193387 - DNA, 22 bp, Artificial Sequence
  Synthetic oligonucleotide; TTT chr2 60450197 60450218 60450214 60450219 +
cctaataaattctgtaaataaa

SEQ ID NO: 193388 - DNA, 22 bp, Artificial Sequence
  Synthetic oligonucleotide; TTC chr2 60450198 60450219 60450215 60450220 +
ctaataaattctgtaaataaat

SEQ ID NO: 193389 - DNA, 22 bp, Artificial Sequence
  Synthetic oligonucleotide; CTA chr2 60450201 60450222 60450218 60450223 +
ataaattctgtaaataaatttt

SEQ ID NO: 193390 - DNA, 22 bp, Artificial Sequence
  Synthetic oligonucleotide; TTC chr2 60450209 60450230 60450226 60450231 +
tgtaaataaatttttgttgtct

SEQ ID NO: 193391 - DNA, 22 bp, Artificial Sequence
  Synthetic oligonucleotide; CTG chr2 60450211 60450232 60450228 60450233 +
taaataaatttttgttgtcttt

SEQ ID NO: 193392 - DNA, 22 bp, Artificial Sequence
  Synthetic oligonucleotide; TTT chr2 60450222 60450243 60450239 60450244 +
ttgttgtctttcaactttaaaa

SEQ ID NO: 193393 - DNA, 22 bp, Artificial Sequence
  Synthetic oligonucleotide; TTT chr2 60450223 60450244 60450240 60450245 +
tgttgtctttcaactttaaaag

SEQ ID NO: 193394 - DNA, 22 bp, Artificial Sequence
  Synthetic oligonucleotide; TTT chr2 60450224 60450245 60450241 60450246 +
gttgtctttcaactttaaaagc

SEQ ID NO: 193395 - DNA, 22 bp, Artificial Sequence
  Synthetic oligonucleotide; TTG chr2 60450225 60450246 60450242 60450247 +
ttgtctttcaactttaaaagcc

SEQ ID NO: 193396 - DNA, 22 bp, Artificial Sequence
  Synthetic oligonucleotide; TTG chr2 60450228 60450249 60450245 60450250 +
tctttcaactttaaaagccatg

SEQ ID NO: 193397 - DNA, 22 bp, Artificial Sequence
  Synthetic oligonucleotide; CTT chr2 60450232 60450253 60450249 60450254 +
tcaactttaaaagccatgggaa

SEQ ID NO: 193398 - DNA, 22 bp, Artificial Sequence
  Synthetic oligonucleotide; TTT chr2 60450233 60450254 60450250 60450255 +
caactttaaaagccatgggaaa

SEQ ID NO: 193399 - DNA, 22 bp, Artificial Sequence
  Synthetic oligonucleotide; TTC chr2 60450234 60450255 60450251 60450256 +
aactttaaaagccatgggaaaa

SEQ ID NO: 193400 - DNA, 22 bp, Artificial Sequence
  Synthetic oligonucleotide; CTT chr2 60450239 60450260 60450256 60450261 +
taaaagccatgggaaaagacag

SEQ ID NO: 193401 - DNA, 22 bp, Artificial Sequence
  Synthetic oligonucleotide; TTT chr2 60450240 60450261 60450257 60450262 +
aaaagccatgggaaaagacagt

SEQ ID NO: 193402 - DNA, 22 bp, Artificial Sequence
  Synthetic oligonucleotide; TTA chr2 60450241 60450262 60450258 60450263 +
aaagccatgggaaaagacagtc

SEQ ID NO: 193403 - DNA, 22 bp, Artificial Sequence
  Synthetic oligonucleotide; CTT chr2 60450265 60450286 60450282 60450287 +
tttgttctgtttgttttgaggg

SEQ ID NO: 193404 - DNA, 22 bp, Artificial Sequence
  Synthetic oligonucleotide; TTT chr2 60450266 60450287 60450283 60450288 +
ttgttctgtttgttttgagggg

SEQ ID NO: 193405 - DNA, 22 bp, Artificial Sequence
  Synthetic oligonucleotide; TTT chr2 60450267 60450288 60450284 60450289 +
tgttctgtttgttttgaggggg

SEQ ID NO: 193406 - DNA, 22 bp, Artificial Sequence
  Synthetic oligonucleotide; TTT chr2 60450268 60450289 60450285 60450290 +
gttctgtttgttttgagggggt

SEQ ID NO: 193407 - DNA, 22 bp, Artificial Sequence
  Synthetic oligonucleotide; TTG chr2 60450269 60450290 60450286 60450291 +
ttctgtttgttttgagggggtt

SEQ ID NO: 193408 - DNA, 22 bp, Artificial Sequence
  Synthetic oligonucleotide; TTC chr2 60450272 60450293 60450289 60450294 +
tgtttgttttgagggggttctt

SEQ ID NO: 193409 - DNA, 22 bp, Artificial Sequence
  Synthetic oligonucleotide; CTG chr2 60450274 60450295 60450291 60450296 +
tttgttttgagggggttcttct

SEQ ID NO: 193410 - DNA, 22 bp, Artificial Sequence
  Synthetic oligonucleotide; TTT chr2 60450277 60450298 60450294 60450299 +
gttttgagggggttcttctcca

SEQ ID NO: 193411 - DNA, 22 bp, Artificial Sequence
  Synthetic oligonucleotide; TTG chr2 60450278 60450299 60450295 60450300 +
ttttgagggggttcttctccac

SEQ ID NO: 193412 - DNA, 22 bp, Artificial Sequence
  Synthetic oligonucleotide; TTT chr2 60450281 60450302 60450298 60450303 +
tgagggggttcttctccacagt

SEQ ID NO: 193413 - DNA, 22 bp, Artificial Sequence
  Synthetic oligonucleotide; TTT chr2 60450282 60450303 60450299 60450304 +
gagggggttcttctccacagtg

SEQ ID NO: 193414 - DNA, 22 bp, Artificial Sequence
  Synthetic oligonucleotide; TTG chr2 60450283 60450304 60450300 60450305 +
agggggttcttctccacagtga

SEQ ID NO: 193415 - DNA, 22 bp, Artificial Sequence
  Synthetic oligonucleotide; TTC chr2 60450292 60450313 60450309 60450314 +
ttctccacagtgaagaggataa

SEQ ID NO: 193416 - DNA, 22 bp, Artificial Sequence
  Synthetic oligonucleotide; CTT chr2 60450294 60450315 60450311 60450316 +
ctccacagtgaagaggataaaa

SEQ ID NO: 193417 - DNA, 22 bp, Artificial Sequence
  Synthetic oligonucleotide; TTC chr2 60450295 60450316 60450312 60450317 +
tccacagtgaagaggataaaac

SEQ ID NO: 193418 - DNA, 22 bp, Artificial Sequence
  Synthetic oligonucleotide; CTC chr2 60450297 60450318 60450314 60450319 +
cacagtgaagaggataaaacaa

SEQ ID NO: 193419 - DNA, 22 bp, Artificial Sequence
  Synthetic oligonucleotide; CTT chr2 60450326 60450347 60450343 60450348 +
tatccacttctgttatcctctt

SEQ ID NO: 193420 - DNA, 22 bp, Artificial Sequence
  Synthetic oligonucleotide; TTT chr2 60450327 60450348 60450344 60450349 +
atccacttctgttatcctcttg

SEQ ID NO: 193421 - DNA, 22 bp, Artificial Sequence
  Synthetic oligonucleotide; TTA chr2 60450328 60450349 60450345 60450350 +
tccacttctgttatcctcttgc

SEQ ID NO: 193422 - DNA, 22 bp, Artificial Sequence
  Synthetic oligonucleotide; CTT chr2 60450335 60450356 60450352 60450357 +
ctgttatcctcttgccccttaa

SEQ ID NO: 193423 - DNA, 22 bp, Artificial Sequence
  Synthetic oligonucleotide; TTC chr2 60450336 60450357 60450353 60450358 +
tgttatcctcttgccccttaaa

SEQ ID NO: 193424 - DNA, 22 bp, Artificial Sequence
  Synthetic oligonucleotide; CTG chr2 60450338 60450359 60450355 60450360 +
ttatcctcttgccccttaaaaa

SEQ ID NO: 193425 - DNA, 22 bp, Artificial Sequence
  Synthetic oligonucleotide; TTA chr2 60450341 60450362 60450358 60450363 +
tcctcttgccccttaaaaatcc

SEQ ID NO: 193426 - DNA, 22 bp, Artificial Sequence
  Synthetic oligonucleotide; CTC chr2 60450346 60450367 60450363 60450368 +
ttgccccttaaaaatcccactt

SEQ ID NO: 193427 - DNA, 22 bp, Artificial Sequence
  Synthetic oligonucleotide; CTT chr2 60450348 60450369 60450365 60450370 +
gccccttaaaaatcccactttt

SEQ ID NO: 193428 - DNA, 22 bp, Artificial Sequence
  Synthetic oligonucleotide; TTG chr2 60450349 60450370 60450366 60450371 +
ccccttaaaaatcccactttta

SEQ ID NO: 193429 - DNA, 22 bp, Artificial Sequence
  Synthetic oligonucleotide; CTT chr2 60450355 60450376 60450372 60450377 +
aaaaatcccacttttagagata

SEQ ID NO: 193430 - DNA, 22 bp, Artificial Sequence
  Synthetic oligonucleotide; TTA chr2 60450356 60450377 60450373 60450378 +
aaaatcccacttttagagatat

SEQ ID NO: 193431 - DNA, 22 bp, Artificial Sequence
  Synthetic oligonucleotide; CTT chr2 60450368 60450389 60450385 60450390 +
ttagagatatccacttatttac

SEQ ID NO: 193432 - DNA, 22 bp, Artificial Sequence
  Synthetic oligonucleotide; TTT chr2 60450369 60450390 60450386 60450391 +
tagagatatccacttatttaca

SEQ ID NO: 193433 - DNA, 22 bp, Artificial Sequence
  Synthetic oligonucleotide; TTT chr2 60450370 60450391 60450387 60450392 +
agagatatccacttatttacaa

SEQ ID NO: 193434 - DNA, 22 bp, Artificial Sequence
  Synthetic oligonucleotide; TTA chr2 60450371 60450392 60450388 60450393 +
gagatatccacttatttacaaa

SEQ ID NO: 193435 - DNA, 22 bp, Artificial Sequence
  Synthetic oligonucleotide; CTT chr2 60450384 60450405 60450401 60450406 +
atttacaaactgactctgagaa

SEQ ID NO: 193436 - DNA, 22 bp, Artificial Sequence
  Synthetic oligonucleotide; TTA chr2 60450385 60450406 60450402 60450407 +
tttacaaactgactctgagaag

SEQ ID NO: 193437 - DNA, 22 bp, Artificial Sequence
  Synthetic oligonucleotide; TTT chr2 60450388 60450409 60450405 60450410 +
acaaactgactctgagaagaaa

SEQ ID NO: 193438 - DNA, 22 bp, Artificial Sequence
  Synthetic oligonucleotide; TTA chr2 60450389 60450410 60450406 60450411 +
caaactgactctgagaagaaat

SEQ ID NO: 193439 - DNA, 22 bp, Artificial Sequence
  Synthetic oligonucleotide; CTG chr2 60450396 60450417 60450413 60450418 +
actctgagaagaaatatataaa

SEQ ID NO: 193440 - DNA, 22 bp, Artificial Sequence
  Synthetic oligonucleotide; CTC chr2 60450400 60450421 60450417 60450422 +
tgagaagaaatatataaaaagt

SEQ ID NO: 193441 - DNA, 22 bp, Artificial Sequence
  Synthetic oligonucleotide; CTG chr2 60450402 60450423 60450419 60450424 +
agaagaaatatataaaaagtgg

SEQ ID NO: 193442 - DNA, 22 bp, Artificial Sequence
  Synthetic oligonucleotide; TTA chr2 60450476 60450497 60450493 60450498 +
caaaggctgaacttgtctcaag

SEQ ID NO: 193443 - DNA, 22 bp, Artificial Sequence
  Synthetic oligonucleotide; CTG chr2 60450485 60450506 60450502 60450507 +
aacttgtctcaagacccaggat

SEQ ID NO: 193444 - DNA, 22 bp, Artificial Sequence
  Synthetic oligonucleotide; CTT chr2 60450490 60450511 60450507 60450512 +
gtctcaagacccaggattgttg

SEQ ID NO: 193445 - DNA, 22 bp, Artificial Sequence
  Synthetic oligonucleotide; TTG chr2 60450491 60450512 60450508 60450513 +
tctcaagacccaggattgttgt

SEQ ID NO: 193446 - DNA, 22 bp, Artificial Sequence
  Synthetic oligonucleotide; CTC chr2 60450495 60450516 60450512 60450517 +
aagacccaggattgttgtttca

SEQ ID NO: 193447 - DNA, 22 bp, Artificial Sequence
  Synthetic oligonucleotide; TTG chr2 60450509 60450530 60450526 60450531 +
ttgtttcagttctggcctccct

SEQ ID NO: 193448 - DNA, 22 bp, Artificial Sequence
  Synthetic oligonucleotide; TTG chr2 60450512 60450533 60450529 60450534 +
tttcagttctggcctccctttg

SEQ ID NO: 193449 - DNA, 22 bp, Artificial Sequence
  Synthetic oligonucleotide; TTT chr2 60450515 60450536 60450532 60450537 +
cagttctggcctccctttggaa

SEQ ID NO: 193450 - DNA, 22 bp, Artificial Sequence
  Synthetic oligonucleotide; TTC chr2 60450516 60450537 60450533 60450538 +
agttctggcctccctttggaag

SEQ ID NO: 193451 - DNA, 22 bp, Artificial Sequence
  Synthetic oligonucleotide; TTC chr2 60450521 60450542 60450538 60450543 +
tggcctccctttggaagtggtg

SEQ ID NO: 193452 - DNA, 22 bp, Artificial Sequence
  Synthetic oligonucleotide; CTG chr2 60450523 60450544 60450540 60450545 +
gcctccctttggaagtggtgtc

SEQ ID NO: 193453 - DNA, 22 bp, Artificial Sequence
  Synthetic oligonucleotide; CTC chr2 60450528 60450549 60450545 60450550 +
cctttggaagtggtgtcactct

SEQ ID NO: 193454 - DNA, 22 bp, Artificial Sequence
  Synthetic oligonucleotide; CTT chr2 60450532 60450553 60450549 60450554 +
tggaagtggtgtcactctttct

SEQ ID NO: 193455 - DNA, 22 bp, Artificial Sequence
  Synthetic oligonucleotide; TTT chr2 60450533 60450554 60450550 60450555 +
ggaagtggtgtcactctttcta

SEQ ID NO: 193456 - DNA, 22 bp, Artificial Sequence
  Synthetic oligonucleotide; TTG chr2 60450534 60450555 60450551 60450556 +
gaagtggtgtcactctttctag

SEQ ID NO: 193457 - DNA, 22 bp, Artificial Sequence
  Synthetic oligonucleotide; CTC chr2 60450549 60450570 60450566 60450571 +
tttctaggcatcagcaaggagt

SEQ ID NO: 193458 - DNA, 22 bp, Artificial Sequence
  Synthetic oligonucleotide; CTT chr2 60450551 60450572 60450568 60450573 +
tctaggcatcagcaaggagttc

SEQ ID NO: 193459 - DNA, 22 bp, Artificial Sequence
  Synthetic oligonucleotide; TTT chr2 60450552 60450573 60450569 60450574 +
ctaggcatcagcaaggagttca

SEQ ID NO: 193460 - DNA, 22 bp, Artificial Sequence
  Synthetic oligonucleotide; TTC chr2 60450553 60450574 60450570 60450575 +
taggcatcagcaaggagttcag

SEQ ID NO: 193461 - DNA, 22 bp, Artificial Sequence
  Synthetic oligonucleotide; CTA chr2 60450555 60450576 60450572 60450577 +
ggcatcagcaaggagttcagca

SEQ ID NO: 193462 - DNA, 22 bp, Artificial Sequence
  Synthetic oligonucleotide; TTC chr2 60450573 60450594 60450590 60450595 +
agcacatttagggaggaagcca

SEQ ID NO: 193463 - DNA, 22 bp, Artificial Sequence
  Synthetic oligonucleotide; TTT chr2 60450582 60450603 60450599 60450604 +
agggaggaagccatcacagaaa

SEQ ID NO: 193464 - DNA, 22 bp, Artificial Sequence
  Synthetic oligonucleotide; TTA chr2 60450583 60450604 60450600 60450605 +
gggaggaagccatcacagaaac

SEQ ID NO: 193465 - DNA, 22 bp, Artificial Sequence
  Synthetic oligonucleotide; CTA chr2 60450609 60450630 60450626 60450631 +
atggtcttatgtttcagcaaca

SEQ ID NO: 193466 - DNA, 22 bp, Artificial Sequence
  Synthetic oligonucleotide; CTT chr2 60450617 60450638 60450634 60450639 +
atgtttcagcaacacataggca

SEQ ID NO: 193467 - DNA, 22 bp, Artificial Sequence
  Synthetic oligonucleotide; TTA chr2 60450618 60450639 60450635 60450640 +
tgtttcagcaacacataggcag

SEQ ID NO: 193468 - DNA, 22 bp, Artificial Sequence
  Synthetic oligonucleotide; TTT chr2 60450623 60450644 60450640 60450645 +
cagcaacacataggcagagcat

SEQ ID NO: 193469 - DNA, 22 bp, Artificial Sequence
  Synthetic oligonucleotide; TTC chr2 60450624 60450645 60450641 60450646 +
agcaacacataggcagagcatg

SEQ ID NO: 193470 - DNA, 22 bp, Artificial Sequence
  Synthetic oligonucleotide; TTT chr2 60450663 60450684 60450680 60450685 +
ctttatgaaataacttcttgtc

SEQ ID NO: 193471 - DNA, 22 bp, Artificial Sequence
  Synthetic oligonucleotide; TTC chr2 60450664 60450685 60450681 60450686 +
tttatgaaataacttcttgtct

SEQ ID NO: 193472 - DNA, 22 bp, Artificial Sequence
  Synthetic oligonucleotide; CTT chr2 60450666 60450687 60450683 60450688 +
tatgaaataacttcttgtctgg

SEQ ID NO: 193473 - DNA, 22 bp, Artificial Sequence
  Synthetic oligonucleotide; TTT chr2 60450667 60450688 60450684 60450689 +
atgaaataacttcttgtctgga

SEQ ID NO: 193474 - DNA, 22 bp, Artificial Sequence
  Synthetic oligonucleotide; TTA chr2 60450668 60450689 60450685 60450690 +
tgaaataacttcttgtctggaa

SEQ ID NO: 193475 - DNA, 22 bp, Artificial Sequence
  Synthetic oligonucleotide; CTT chr2 60450679 60450700 60450696 60450701 +
cttgtctggaagtcccaactaa

SEQ ID NO: 193476 - DNA, 22 bp, Artificial Sequence
  Synthetic oligonucleotide; TTC chr2 60450680 60450701 60450697 60450702 +
ttgtctggaagtcccaactaat

SEQ ID NO: 193477 - DNA, 22 bp, Artificial Sequence
  Synthetic oligonucleotide; CTT chr2 60450682 60450703 60450699 60450704 +
gtctggaagtcccaactaattg

SEQ ID NO: 193478 - DNA, 22 bp, Artificial Sequence
  Synthetic oligonucleotide; TTG chr2 60450683 60450704 60450700 60450705 +
tctggaagtcccaactaattga

SEQ ID NO: 193479 - DNA, 22 bp, Artificial Sequence
  Synthetic oligonucleotide; CTG chr2 60450687 60450708 60450704 60450709 +
gaagtcccaactaattgatagg

SEQ ID NO: 193480 - DNA, 22 bp, Artificial Sequence
  Synthetic oligonucleotide; CTA chr2 60450700 60450721 60450717 60450722 +
attgataggaagtcacaaacag

SEQ ID NO: 193481 - DNA, 22 bp, Artificial Sequence
  Synthetic oligonucleotide; TTG chr2 60450704 60450725 60450721 60450726 +
ataggaagtcacaaacaggcca

SEQ ID NO: 193482 - DNA, 22 bp, Artificial Sequence
  Synthetic oligonucleotide; CTC chr2 60450729 60450750 60450746 60450751 +
gtgcaatcagggttatttgtca

SEQ ID NO: 193483 - DNA, 22 bp, Artificial Sequence
  Synthetic oligonucleotide; TTA chr2 60450744 60450765 60450761 60450766 +
tttgtcatggaaaagccacagg

SEQ ID NO: 193484 - DNA, 22 bp, Artificial Sequence
  Synthetic oligonucleotide; TTT chr2 60450747 60450768 60450764 60450769 +
gtcatggaaaagccacagggga

SEQ ID NO: 193485 - DNA, 22 bp, Artificial Sequence
  Synthetic oligonucleotide; TTG chr2 60450748 60450769 60450765 60450770 +
tcatggaaaagccacaggggaa

SEQ ID NO: 193486 - DNA, 22 bp, Artificial Sequence
  Synthetic oligonucleotide; CTG chr2 60450790 60450811 60450807 60450812 +
caacctccctttctcagtgcac

SEQ ID NO: 193487 - DNA, 22 bp, Artificial Sequence
  Synthetic oligonucleotide; CTC chr2 60450797 60450818 60450814 60450819 +
cctttctcagtgcacacatctg

SEQ ID NO: 193488 - DNA, 22 bp, Artificial Sequence
  Synthetic oligonucleotide; CTT chr2 60450801 60450822 60450818 60450823 +
tctcagtgcacacatctgttgg

SEQ ID NO: 193489 - DNA, 22 bp, Artificial Sequence
  Synthetic oligonucleotide; TTT chr2 60450802 60450823 60450819 60450824 +
ctcagtgcacacatctgttggt

SEQ ID NO: 193490 - DNA, 22 bp, Artificial Sequence
  Synthetic oligonucleotide; TTC chr2 60450803 60450824 60450820 60450825 +
tcagtgcacacatctgttggta

SEQ ID NO: 193491 - DNA, 22 bp, Artificial Sequence
  Synthetic oligonucleotide; CTC chr2 60450805 60450826 60450822 60450827 +
agtgcacacatctgttggtagg

SEQ ID NO: 193492 - DNA, 22 bp, Artificial Sequence
  Synthetic oligonucleotide; CTG chr2 60450819 60450840 60450836 60450841 +
ttggtaggaagaggcaactctg

SEQ ID NO: 193493 - DNA, 22 bp, Artificial Sequence
  Synthetic oligonucleotide; TTG chr2 60450822 60450843 60450839 60450844 +
gtaggaagaggcaactctgcat

SEQ ID NO: 193494 - DNA, 22 bp, Artificial Sequence
  Synthetic oligonucleotide; CTC chr2 60450839 60450860 60450856 60450861 +
tgcatgcctttaccaaaggcca

SEQ ID NO: 193495 - DNA, 22 bp, Artificial Sequence
  Synthetic oligonucleotide; CTG chr2 60450841 60450862 60450858 60450863 +
catgcctttaccaaaggccatc

SEQ ID NO: 193496 - DNA, 22 bp, Artificial Sequence
  Synthetic oligonucleotide; CTT chr2 60450849 60450870 60450866 60450871 +
taccaaaggccatcctgggtct

SEQ ID NO: 193497 - DNA, 22 bp, Artificial Sequence
  Synthetic oligonucleotide; TTT chr2 60450850 60450871 60450867 60450872 +
accaaaggccatcctgggtctg

SEQ ID NO: 193498 - DNA, 22 bp, Artificial Sequence
  Synthetic oligonucleotide; TTA chr2 60450851 60450872 60450868 60450873 +
ccaaaggccatcctgggtctgt

SEQ ID NO: 193499 - DNA, 22 bp, Artificial Sequence
  Synthetic oligonucleotide; CTG chr2 60450866 60450887 60450883 60450888 +
ggtctgtatgtgtaagccacat

SEQ ID NO: 193500 - DNA, 22 bp, Artificial Sequence
  Synthetic oligonucleotide; CTG chr2 60450872 60450893 60450889 60450894 +
tatgtgtaagccacatgtgtgt

SEQ ID NO: 193501 - DNA, 22 bp, Artificial Sequence
  Synthetic oligonucleotide; CTG chr2 60450899 60450920 60450916 60450921 +
tgaacatttatgacttatgtgc

SEQ ID NO: 193502 - DNA, 22 bp, Artificial Sequence
  Synthetic oligonucleotide; TTT chr2 60450908 60450929 60450925 60450930 +
atgacttatgtgctaacacagg

SEQ ID NO: 193503 - DNA, 22 bp, Artificial Sequence
  Synthetic oligonucleotide; TTA chr2 60450909 60450930 60450926 60450931 +
tgacttatgtgctaacacagga

SEQ ID NO: 193504 - DNA, 22 bp, Artificial Sequence
  Synthetic oligonucleotide; CTT chr2 60450915 60450936 60450932 60450937 +
atgtgctaacacaggaaaagat

SEQ ID NO: 193505 - DNA, 22 bp, Artificial Sequence
  Synthetic oligonucleotide; TTA chr2 60450916 60450937 60450933 60450938 +
tgtgctaacacaggaaaagata

SEQ ID NO: 193506 - DNA, 22 bp, Artificial Sequence
  Synthetic oligonucleotide; CTA chr2 60450923 60450944 60450940 60450945 +
acacaggaaaagatactccctt

SEQ ID NO: 193507 - DNA, 22 bp, Artificial Sequence
  Synthetic oligonucleotide; CTC chr2 60450941 60450962 60450958 60450963 +
cctttgatcagttaaacagagt

SEQ ID NO: 193508 - DNA, 22 bp, Artificial Sequence
  Synthetic oligonucleotide; CTT chr2 60450945 60450966 60450962 60450967 +
tgatcagttaaacagagtttgg

SEQ ID NO: 193509 - DNA, 22 bp, Artificial Sequence
  Synthetic oligonucleotide; TTT chr2 60450946 60450967 60450963 60450968 +
gatcagttaaacagagtttggt

SEQ ID NO: 193510 - DNA, 22 bp, Artificial Sequence
  Synthetic oligonucleotide; TTG chr2 60450947 60450968 60450964 60450969 +
atcagttaaacagagtttggtg

SEQ ID NO: 193511 - DNA, 22 bp, Artificial Sequence
  Synthetic oligonucleotide; TTA chr2 60450955 60450976 60450972 60450977 +
aacagagtttggtgaaattagc

SEQ ID NO: 193512 - DNA, 22 bp, Artificial Sequence
  Synthetic oligonucleotide; TTT chr2 60450965 60450986 60450982 60450987 +
ggtgaaattagctctggacaag

SEQ ID NO: 193513 - DNA, 22 bp, Artificial Sequence
  Synthetic oligonucleotide; TTG chr2 60450966 60450987 60450983 60450988 +
gtgaaattagctctggacaaga

SEQ ID NO: 193514 - DNA, 22 bp, Artificial Sequence
  Synthetic oligonucleotide; TTA chr2 60450975 60450996 60450992 60450997 +
gctctggacaagaaaccagaaa

SEQ ID NO: 193515 - DNA, 22 bp, Artificial Sequence
  Synthetic oligonucleotide; CTC chr2 60450979 60451000 60450996 60451001 +
tggacaagaaaccagaaaacct

SEQ ID NO: 193516 - DNA, 22 bp, Artificial Sequence
  Synthetic oligonucleotide; CTG chr2 60450981 60451002 60450998 60451003 +
gacaagaaaccagaaaacctgg

SEQ ID NO: 193517 - DNA, 22 bp, Artificial Sequence
  Synthetic oligonucleotide; CTG chr2 60451002 60451023 60451019 60451024 +
gcttctctgctttctctcttac

SEQ ID NO: 193518 - DNA, 22 bp, Artificial Sequence
  Synthetic oligonucleotide; CTT chr2 60451006 60451027 60451023 60451028 +
ctctgctttctctcttactgat

SEQ ID NO: 193519 - DNA, 22 bp, Artificial Sequence
  Synthetic oligonucleotide; TTC chr2 60451007 60451028 60451024 60451029 +
tctgctttctctcttactgatg

SEQ ID NO: 193520 - DNA, 22 bp, Artificial Sequence
  Synthetic oligonucleotide; CTC chr2 60451009 60451030 60451026 60451031 +
tgctttctctcttactgatgtg

SEQ ID NO: 193521 - DNA, 22 bp, Artificial Sequence
  Synthetic oligonucleotide; CTG chr2 60451011 60451032 60451028 60451033 +
ctttctctcttactgatgtggc

SEQ ID NO: 193522 - DNA, 22 bp, Artificial Sequence
  Synthetic oligonucleotide; CTT chr2 60451014 60451035 60451031 60451036 +
tctctcttactgatgtggcctc

SEQ ID NO: 193523 - DNA, 22 bp, Artificial Sequence
  Synthetic oligonucleotide; TTT chr2 60451015 60451036 60451032 60451037 +
ctctcttactgatgtggcctct

SEQ ID NO: 193524 - DNA, 22 bp, Artificial Sequence
  Synthetic oligonucleotide; TTC chr2 60451016 60451037 60451033 60451038 +
tctcttactgatgtggcctctg

SEQ ID NO: 193525 - DNA, 22 bp, Artificial Sequence
  Synthetic oligonucleotide; CTC chr2 60451018 60451039 60451035 60451040 +
tcttactgatgtggcctctggc

SEQ ID NO: 193526 - DNA, 22 bp, Artificial Sequence
  Synthetic oligonucleotide; CTC chr2 60451020 60451041 60451037 60451042 +
ttactgatgtggcctctggcaa

SEQ ID NO: 193527 - DNA, 22 bp, Artificial Sequence
  Synthetic oligonucleotide; CTT chr2 60451022 60451043 60451039 60451044 +
actgatgtggcctctggcaagc

SEQ ID NO: 193528 - DNA, 22 bp, Artificial Sequence
  Synthetic oligonucleotide; TTA chr2 60451023 60451044 60451040 60451045 +
ctgatgtggcctctggcaagcc

SEQ ID NO: 193529 - DNA, 22 bp, Artificial Sequence
  Synthetic oligonucleotide; CTG chr2 60451026 60451047 60451043 60451048 +
atgtggcctctggcaagccctt

SEQ ID NO: 193530 - DNA, 22 bp, Artificial Sequence
  Synthetic oligonucleotide; CTC chr2 60451036 60451057 60451053 60451058 +
tggcaagcccttaaccttggta

SEQ ID NO: 193531 - DNA, 22 bp, Artificial Sequence
  Synthetic oligonucleotide; CTG chr2 60451038 60451059 60451055 60451060 +
gcaagcccttaaccttggtaag

SEQ ID NO: 193532 - DNA, 22 bp, Artificial Sequence
  Synthetic oligonucleotide; CTT chr2 60451048 60451069 60451065 60451070 +
aaccttggtaagcctcaatctc

SEQ ID NO: 193533 - DNA, 22 bp, Artificial Sequence
  Synthetic oligonucleotide; TTA chr2 60451049 60451070 60451066 60451071 +
accttggtaagcctcaatctcc

SEQ ID NO: 193534 - DNA, 22 bp, Artificial Sequence
  Synthetic oligonucleotide; CTT chr2 60451054 60451075 60451071 60451076 +
ggtaagcctcaatctccacctc

SEQ ID NO: 193535 - DNA, 22 bp, Artificial Sequence
  Synthetic oligonucleotide; TTG chr2 60451055 60451076 60451072 60451077 +
gtaagcctcaatctccacctcc

SEQ ID NO: 193536 - DNA, 22 bp, Artificial Sequence
  Synthetic oligonucleotide; CTC chr2 60451064 60451085 60451081 60451086 +
aatctccacctccataaagtag

SEQ ID NO: 193537 - DNA, 22 bp, Artificial Sequence
  Synthetic oligonucleotide; CTC chr2 60451070 60451091 60451087 60451092 +
cacctccataaagtagaagtcg

SEQ ID NO: 193538 - DNA, 22 bp, Artificial Sequence
  Synthetic oligonucleotide; CTC chr2 60451076 60451097 60451093 60451098 +
cataaagtagaagtcgtgagat

SEQ ID NO: 193539 - DNA, 22 bp, Artificial Sequence
  Synthetic oligonucleotide; CTG chr2 60451101 60451122 60451118 60451123 +
tcccagagagcaggtgaaataa

SEQ ID NO: 193540 - DNA, 22 bp, Artificial Sequence
  Synthetic oligonucleotide; CTG chr2 60451140 60451161 60451157 60451162 +
tatacagtataaggtagttcac

SEQ ID NO: 193541 - DNA, 22 bp, Artificial Sequence
  Synthetic oligonucleotide; TTC chr2 60451160 60451181 60451177 60451182 +
actactgtagacagtcattatt

SEQ ID NO: 193542 - DNA, 22 bp, Artificial Sequence
  Synthetic oligonucleotide; CTA chr2 60451164 60451185 60451181 60451186 +
ctgtagacagtcattatttatt

SEQ ID NO: 193543 - DNA, 22 bp, Artificial Sequence
  Synthetic oligonucleotide; CTG chr2 60451167 60451188 60451184 60451189 +
tagacagtcattatttattatg

SEQ ID NO: 193544 - DNA, 22 bp, Artificial Sequence
  Synthetic oligonucleotide; TTA chr2 60451180 60451201 60451197 60451202 +
tttattatgaataagcaggaaa

SEQ ID NO: 193545 - DNA, 22 bp, Artificial Sequence
  Synthetic oligonucleotide; TTT chr2 60451183 60451204 60451200 60451205 +
attatgaataagcaggaaataa

SEQ ID NO: 193546 - DNA, 22 bp, Artificial Sequence
  Synthetic oligonucleotide; TTA chr2 60451184 60451205 60451201 60451206 +
ttatgaataagcaggaaataat

SEQ ID NO: 193547 - DNA, 22 bp, Artificial Sequence
  Synthetic oligonucleotide; TTA chr2 60451187 60451208 60451204 60451209 +
tgaataagcaggaaataattca

SEQ ID NO: 193548 - DNA, 22 bp, Artificial Sequence
  Synthetic oligonucleotide; TTC chr2 60451208 60451229 60451225 60451230 +
acatgccaattatttggctatc

SEQ ID NO: 193549 - DNA, 22 bp, Artificial Sequence
  Synthetic oligonucleotide; TTA chr2 60451220 60451241 60451237 60451242 +
tttggctatcttttcactaagc

SEQ ID NO: 193550 - DNA, 22 bp, Artificial Sequence
  Synthetic oligonucleotide; TTT chr2 60451223 60451244 60451240 60451245 +
ggctatcttttcactaagctag

SEQ ID NO: 193551 - DNA, 22 bp, Artificial Sequence
  Synthetic oligonucleotide; TTG chr2 60451224 60451245 60451241 60451246 +
gctatcttttcactaagctagg

SEQ ID NO: 193552 - DNA, 22 bp, Artificial Sequence
  Synthetic oligonucleotide; CTA chr2 60451228 60451249 60451245 60451250 +
tcttttcactaagctaggtaat

SEQ ID NO: 193553 - DNA, 22 bp, Artificial Sequence
  Synthetic oligonucleotide; CTT chr2 60451232 60451253 60451249 60451254 +
ttcactaagctaggtaatctag

SEQ ID NO: 193554 - DNA, 22 bp, Artificial Sequence
  Synthetic oligonucleotide; TTT chr2 60451233 60451254 60451250 60451255 +
tcactaagctaggtaatctagc

SEQ ID NO: 193555 - DNA, 22 bp, Artificial Sequence
  Synthetic oligonucleotide; TTT chr2 60451234 60451255 60451251 60451256 +
cactaagctaggtaatctagcc

SEQ ID NO: 193556 - DNA, 22 bp, Artificial Sequence
  Synthetic oligonucleotide; TTC chr2 60451235 60451256 60451252 60451257 +
actaagctaggtaatctagcca

SEQ ID NO: 193557 - DNA, 22 bp, Artificial Sequence
  Synthetic oligonucleotide; CTA chr2 60451239 60451260 60451256 60451261 +
agctaggtaatctagccagaag

SEQ ID NO: 193558 - DNA, 22 bp, Artificial Sequence
  Synthetic oligonucleotide; CTA chr2 60451244 60451265 60451261 60451266 +
ggtaatctagccagaaggtgga

SEQ ID NO: 193559 - DNA, 22 bp, Artificial Sequence
  Synthetic oligonucleotide; CTA chr2 60451253 60451274 60451270 60451275 +
gccagaaggtggataggtagga

SEQ ID NO: 193560 - DNA, 22 bp, Artificial Sequence
  Synthetic oligonucleotide; TTT chr2 60451278 60451299 60451295 60451300 +
tccccacttaggttcacggcct

SEQ ID NO: 193561 - DNA, 22 bp, Artificial Sequence
  Synthetic oligonucleotide; TTT chr2 60451279 60451300 60451296 60451301 +
ccccacttaggttcacggcctg

SEQ ID NO: 193562 - DNA, 22 bp, Artificial Sequence
  Synthetic oligonucleotide; TTC chr2 60451280 60451301 60451297 60451302 +
cccacttaggttcacggcctgt

SEQ ID NO: 193563 - DNA, 22 bp, Artificial Sequence
  Synthetic oligonucleotide; CTT chr2 60451287 60451308 60451304 60451309 +
aggttcacggcctgtatgtgaa

SEQ ID NO: 193564 - DNA, 22 bp, Artificial Sequence
  Synthetic oligonucleotide; TTA chr2 60451288 60451309 60451305 60451310 +
ggttcacggcctgtatgtgaat

SEQ ID NO: 193565 - DNA, 22 bp, Artificial Sequence
  Synthetic oligonucleotide; TTC chr2 60451293 60451314 60451310 60451315 +
acggcctgtatgtgaatctaca

SEQ ID NO: 193566 - DNA, 22 bp, Artificial Sequence
  Synthetic oligonucleotide; CTG chr2 60451301 60451322 60451318 60451323 +
tatgtgaatctacagcacacag

SEQ ID NO: 193567 - DNA, 22 bp, Artificial Sequence
  Synthetic oligonucleotide; CTA chr2 60451313 60451334 60451330 60451335 +
cagcacacaggtgtctgagctc

SEQ ID NO: 193568 - DNA, 22 bp, Artificial Sequence
  Synthetic oligonucleotide; CTG chr2 60451330 60451351 60451347 60451352 +
agctctattattgacaaaccta

SEQ ID NO: 193569 - DNA, 22 bp, Artificial Sequence
  Synthetic oligonucleotide; CTC chr2 60451335 60451356 60451352 60451357 +
tattattgacaaacctatttta

SEQ ID NO: 193570 - DNA, 22 bp, Artificial Sequence
  Synthetic oligonucleotide; CTA chr2 60451337 60451358 60451354 60451359 +
ttattgacaaacctattttaat

SEQ ID NO: 193571 - DNA, 22 bp, Artificial Sequence
  Synthetic oligonucleotide; TTA chr2 60451340 60451361 60451357 60451362 +
ttgacaaacctattttaatttg

SEQ ID NO: 193572 - DNA, 22 bp, Artificial Sequence
  Synthetic oligonucleotide; TTG chr2 60451343 60451364 60451360 60451365 +
acaaacctattttaatttgcta

SEQ ID NO: 193573 - DNA, 22 bp, Artificial Sequence
  Synthetic oligonucleotide; CTA chr2 60451352 60451373 60451369 60451374 +
ttttaatttgctatgttgtttc

SEQ ID NO: 193574 - DNA, 22 bp, Artificial Sequence
  Synthetic oligonucleotide; TTT chr2 60451355 60451376 60451372 60451377 +
taatttgctatgttgtttctaa

SEQ ID NO: 193575 - DNA, 22 bp, Artificial Sequence
  Synthetic oligonucleotide; TTT chr2 60451356 60451377 60451373 60451378 +
aatttgctatgttgtttctaat

SEQ ID NO: 193576 - DNA, 22 bp, Artificial Sequence
  Synthetic oligonucleotide; TTA chr2 60451357 60451378 60451374 60451379 +
atttgctatgttgtttctaatt

SEQ ID NO: 193577 - DNA, 22 bp, Artificial Sequence
  Synthetic oligonucleotide; TTT chr2 60451361 60451382 60451378 60451383 +
gctatgttgtttctaattctct

SEQ ID NO: 193578 - DNA, 22 bp, Artificial Sequence
  Synthetic oligonucleotide; TTG chr2 60451362 60451383 60451379 60451384 +
ctatgttgtttctaattctctt

SEQ ID NO: 193579 - DNA, 22 bp, Artificial Sequence
  Synthetic oligonucleotide; CTA chr2 60451365 60451386 60451382 60451387 +
tgttgtttctaattctcttctg

SEQ ID NO: 193580 - DNA, 22 bp, Artificial Sequence
  Synthetic oligonucleotide; TTG chr2 60451370 60451391 60451387 60451392 +
tttctaattctcttctggatct

SEQ ID NO: 193581 - DNA, 22 bp, Artificial Sequence
  Synthetic oligonucleotide; TTT chr2 60451373 60451394 60451390 60451395 +
ctaattctcttctggatctcca

SEQ ID NO: 193582 - DNA, 22 bp, Artificial Sequence
  Synthetic oligonucleotide; TTC chr2 60451374 60451395 60451391 60451396 +
taattctcttctggatctccaa

SEQ ID NO: 193583 - DNA, 22 bp, Artificial Sequence
  Synthetic oligonucleotide; CTA chr2 60451376 60451397 60451393 60451398 +
attctcttctggatctccaagc

SEQ ID NO: 193584 - DNA, 22 bp, Artificial Sequence
  Synthetic oligonucleotide; TTC chr2 60451380 60451401 60451397 60451402 +
tcttctggatctccaagcagta

SEQ ID NO: 193585 - DNA, 22 bp, Artificial Sequence
  Synthetic oligonucleotide; CTC chr2 60451382 60451403 60451399 60451404 +
ttctggatctccaagcagtaaa

SEQ ID NO: 193586 - DNA, 22 bp, Artificial Sequence
  Synthetic oligonucleotide; CTT chr2 60451384 60451405 60451401 60451406 +
ctggatctccaagcagtaaaaa

SEQ ID NO: 193587 - DNA, 22 bp, Artificial Sequence
  Synthetic oligonucleotide; TTC chr2 60451385 60451406 60451402 60451407 +
tggatctccaagcagtaaaaaa

SEQ ID NO: 193588 - DNA, 22 bp, Artificial Sequence
  Synthetic oligonucleotide; CTG chr2 60451387 60451408 60451404 60451409 +
gatctccaagcagtaaaaaata

SEQ ID NO: 193589 - DNA, 22 bp, Artificial Sequence
  Synthetic oligonucleotide; CTC chr2 60451393 60451414 60451410 60451415 +
caagcagtaaaaaataccaaac

SEQ ID NO: 193590 - DNA, 22 bp, Artificial Sequence
  Synthetic oligonucleotide; CTG chr2 60451417 60451438 60451434 60451439 +
agaaaagttctgtgcaaattaa

SEQ ID NO: 193591 - DNA, 22 bp, Artificial Sequence
  Synthetic oligonucleotide; TTC chr2 60451427 60451448 60451444 60451449 +
tgtgcaaattaactgggccaga

SEQ ID NO: 193592 - DNA, 22 bp, Artificial Sequence
  Synthetic oligonucleotide; CTG chr2 60451429 60451450 60451446 60451451 +
tgcaaattaactgggccagaaa

SEQ ID NO: 193593 - DNA, 22 bp, Artificial Sequence
  Synthetic oligonucleotide; TTA chr2 60451438 60451459 60451455 60451460 +
actgggccagaaagaattttta

SEQ ID NO: 193594 - DNA, 22 bp, Artificial Sequence
  Synthetic oligonucleotide; CTG chr2 60451442 60451463 60451459 60451464 +
ggccagaaagaatttttaccac

SEQ ID NO: 193595 - DNA, 22 bp, Artificial Sequence
  Synthetic oligonucleotide; TTT chr2 60451457 60451478 60451474 60451479 +
ttaccacctgtttgtagatgta

SEQ ID NO: 193596 - DNA, 22 bp, Artificial Sequence
  Synthetic oligonucleotide; TTT chr2 60451458 60451479 60451475 60451480 +
taccacctgtttgtagatgtaa

SEQ ID NO: 193597 - DNA, 22 bp, Artificial Sequence
  Synthetic oligonucleotide; TTT chr2 60451459 60451480 60451476 60451481 +
accacctgtttgtagatgtaac

SEQ ID NO: 193598 - DNA, 22 bp, Artificial Sequence
  Synthetic oligonucleotide; TTA chr2 60451460 60451481 60451477 60451482 +
ccacctgtttgtagatgtaact

SEQ ID NO: 193599 - DNA, 22 bp, Artificial Sequence
  Synthetic oligonucleotide; CTG chr2 60451467 60451488 60451484 60451489 +
tttgtagatgtaacttatttgt

SEQ ID NO: 193600 - DNA, 22 bp, Artificial Sequence
  Synthetic oligonucleotide; TTT chr2 60451470 60451491 60451487 60451492 +
gtagatgtaacttatttgtggc

SEQ ID NO: 193601 - DNA, 22 bp, Artificial Sequence
  Synthetic oligonucleotide; TTG chr2 60451471 60451492 60451488 60451493 +
tagatgtaacttatttgtggca

SEQ ID NO: 193602 - DNA, 22 bp, Artificial Sequence
  Synthetic oligonucleotide; CTT chr2 60451483 60451504 60451500 60451505 +
atttgtggcactaatttctaag

SEQ ID NO: 193603 - DNA, 22 bp, Artificial Sequence
  Synthetic oligonucleotide; TTA chr2 60451484 60451505 60451501 60451506 +
tttgtggcactaatttctaagg

SEQ ID NO: 193604 - DNA, 22 bp, Artificial Sequence
  Synthetic oligonucleotide; TTT chr2 60451487 60451508 60451504 60451509 +
gtggcactaatttctaaggaat

SEQ ID NO: 193605 - DNA, 22 bp, Artificial Sequence
  Synthetic oligonucleotide; TTG chr2 60451488 60451509 60451505 60451510 +
tggcactaatttctaaggaata

SEQ ID NO: 193606 - DNA, 22 bp, Artificial Sequence
  Synthetic oligonucleotide; CTA chr2 60451496 60451517 60451513 60451518 +
atttctaaggaatagagcattg

SEQ ID NO: 193607 - DNA, 22 bp, Artificial Sequence
  Synthetic oligonucleotide; TTT chr2 60451500 60451521 60451517 60451522 +
ctaaggaatagagcattgctgt

SEQ ID NO: 193608 - DNA, 22 bp, Artificial Sequence
  Synthetic oligonucleotide; TTC chr2 60451501 60451522 60451518 60451523 +
taaggaatagagcattgctgtg

SEQ ID NO: 193609 - DNA, 22 bp, Artificial Sequence
  Synthetic oligonucleotide; CTA chr2 60451503 60451524 60451520 60451525 +
aggaatagagcattgctgtgat

SEQ ID NO: 193610 - DNA, 22 bp, Artificial Sequence
  Synthetic oligonucleotide; TTG chr2 60451518 60451539 60451535 60451540 +
ctgtgattgtctgttctgatgt

SEQ ID NO: 193611 - DNA, 22 bp, Artificial Sequence
  Synthetic oligonucleotide; CTG chr2 60451521 60451542 60451538 60451543 +
tgattgtctgttctgatgtgaa

SEQ ID NO: 193612 - DNA, 22 bp, Artificial Sequence
  Synthetic oligonucleotide; TTG chr2 60451527 60451548 60451544 60451549 +
tctgttctgatgtgaacttctt

SEQ ID NO: 193613 - DNA, 22 bp, Artificial Sequence
  Synthetic oligonucleotide; CTG chr2 60451531 60451552 60451548 60451553 +
ttctgatgtgaacttctttcct

SEQ ID NO: 193614 - DNA, 22 bp, Artificial Sequence
  Synthetic oligonucleotide; TTC chr2 60451534 60451555 60451551 60451556 +
tgatgtgaacttctttcctcct

SEQ ID NO: 193615 - DNA, 22 bp, Artificial Sequence
  Synthetic oligonucleotide; CTG chr2 60451536 60451557 60451553 60451558 +
atgtgaacttctttcctcctat

SEQ ID NO: 193616 - DNA, 22 bp, Artificial Sequence
  Synthetic oligonucleotide; CTT chr2 60451546 60451567 60451563 60451568 +
ctttcctcctataatttccccc

SEQ ID NO: 193617 - DNA, 22 bp, Artificial Sequence
  Synthetic oligonucleotide; TTC chr2 60451547 60451568 60451564 60451569 +
tttcctcctataatttcccccc

SEQ ID NO: 193618 - DNA, 22 bp, Artificial Sequence
  Synthetic oligonucleotide; CTT chr2 60451549 60451570 60451566 60451571 +
tcctcctataatttcccccctc

SEQ ID NO: 193619 - DNA, 22 bp, Artificial Sequence
  Synthetic oligonucleotide; TTT chr2 60451550 60451571 60451567 60451572 +
cctcctataatttcccccctct

SEQ ID NO: 193620 - DNA, 22 bp, Artificial Sequence
  Synthetic oligonucleotide; TTC chr2 60451551 60451572 60451568 60451573 +
ctcctataatttcccccctcta

SEQ ID NO: 193621 - DNA, 22 bp, Artificial Sequence
  Synthetic oligonucleotide; CTC chr2 60451554 60451575 60451571 60451576 +
ctataatttcccccctctaaaa

SEQ ID NO: 193622 - DNA, 22 bp, Artificial Sequence
  Synthetic oligonucleotide; CTA chr2 60451557 60451578 60451574 60451579 +
taatttcccccctctaaaatct

SEQ ID NO: 193623 - DNA, 22 bp, Artificial Sequence
  Synthetic oligonucleotide; TTT chr2 60451563 60451584 60451580 60451585 +
cccccctctaaaatctgcccca

SEQ ID NO: 193624 - DNA, 22 bp, Artificial Sequence
  Synthetic oligonucleotide; TTC chr2 60451564 60451585 60451581 60451586 +
ccccctctaaaatctgccccaa

SEQ ID NO: 193625 - DNA, 22 bp, Artificial Sequence
  Synthetic oligonucleotide; CTC chr2 60451571 60451592 60451588 60451593 +
taaaatctgccccaaatttcct

SEQ ID NO: 193626 - DNA, 22 bp, Artificial Sequence
  Synthetic oligonucleotide; CTA chr2 60451573 60451594 60451590 60451595 +
aaatctgccccaaatttcctga

SEQ ID NO: 193627 - DNA, 22 bp, Artificial Sequence
  Synthetic oligonucleotide; CTG chr2 60451580 60451601 60451597 60451602 +
ccccaaatttcctgatgtaagt

SEQ ID NO: 193628 - DNA, 22 bp, Artificial Sequence
  Synthetic oligonucleotide; TTT chr2 60451590 60451611 60451607 60451612 +
cctgatgtaagtactaaagaag

SEQ ID NO: 193629 - DNA, 22 bp, Artificial Sequence
  Synthetic oligonucleotide; TTC chr2 60451591 60451612 60451608 60451613 +
ctgatgtaagtactaaagaagt

SEQ ID NO: 193630 - DNA, 22 bp, Artificial Sequence
  Synthetic oligonucleotide; CTG chr2 60451594 60451615 60451611 60451616 +
atgtaagtactaaagaagtttt

SEQ ID NO: 193631 - DNA, 22 bp, Artificial Sequence
  Synthetic oligonucleotide; CTA chr2 60451606 60451627 60451623 60451628 +
aagaagttttatgtttgtttgt

SEQ ID NO: 193632 - DNA, 22 bp, Artificial Sequence
  Synthetic oligonucleotide; TTT chr2 60451615 60451636 60451632 60451637 +
tatgtttgtttgtctgcattaa

SEQ ID NO: 193633 - DNA, 22 bp, Artificial Sequence
  Synthetic oligonucleotide; TTT chr2 60451616 60451637 60451633 60451638 +
atgtttgtttgtctgcattaag

SEQ ID NO: 193634 - DNA, 22 bp, Artificial Sequence
  Synthetic oligonucleotide; TTA chr2 60451617 60451638 60451634 60451639 +
tgtttgtttgtctgcattaaga

SEQ ID NO: 193635 - DNA, 22 bp, Artificial Sequence
  Synthetic oligonucleotide; TTT chr2 60451622 60451643 60451639 60451644 +
gtttgtctgcattaagatatat

SEQ ID NO: 193636 - DNA, 22 bp, Artificial Sequence
  Synthetic oligonucleotide; TTG chr2 60451623 60451644 60451640 60451645 +
tttgtctgcattaagatatatt

SEQ ID NO: 193637 - DNA, 22 bp, Artificial Sequence
  Synthetic oligonucleotide; TTT chr2 60451626 60451647 60451643 60451648 +
gtctgcattaagatatatttcc

SEQ ID NO: 193638 - DNA, 22 bp, Artificial Sequence
  Synthetic oligonucleotide; TTG chr2 60451627 60451648 60451644 60451649 +
tctgcattaagatatatttcct

SEQ ID NO: 193639 - DNA, 22 bp, Artificial Sequence
  Synthetic oligonucleotide; CTG chr2 60451631 60451652 60451648 60451653 +
cattaagatatatttcctgaag

SEQ ID NO: 193640 - DNA, 22 bp, Artificial Sequence
  Synthetic oligonucleotide; TTA chr2 60451636 60451657 60451653 60451658 +
agatatatttcctgaaggtttg

SEQ ID NO: 193641 - DNA, 22 bp, Artificial Sequence
  Synthetic oligonucleotide; TTT chr2 60451646 60451667 60451663 60451668 +
cctgaaggtttgggaacctaaa

SEQ ID NO: 193642 - DNA, 22 bp, Artificial Sequence
  Synthetic oligonucleotide; TTC chr2 60451647 60451668 60451664 60451669 +
ctgaaggtttgggaacctaaaa

SEQ ID NO: 193643 - DNA, 22 bp, Artificial Sequence
  Synthetic oligonucleotide; CTG chr2 60451650 60451671 60451667 60451672 +
aaggtttgggaacctaaaatta

SEQ ID NO: 193644 - DNA, 22 bp, Artificial Sequence
  Synthetic oligonucleotide; TTT chr2 60451657 60451678 60451674 60451679 +
gggaacctaaaattagaatatt

SEQ ID NO: 193645 - DNA, 22 bp, Artificial Sequence
  Synthetic oligonucleotide; TTG chr2 60451658 60451679 60451675 60451680 +
ggaacctaaaattagaatattt

SEQ ID NO: 193646 - DNA, 22 bp, Artificial Sequence
  Synthetic oligonucleotide; CTA chr2 60451666 60451687 60451683 60451688 +
aaattagaatatttaataagaa

SEQ ID NO: 193647 - DNA, 22 bp, Artificial Sequence
  Synthetic oligonucleotide; TTA chr2 60451672 60451693 60451689 60451694 +
gaatatttaataagaaactact

SEQ ID NO: 193648 - DNA, 22 bp, Artificial Sequence
  Synthetic oligonucleotide; TTT chr2 60451680 60451701 60451697 60451702 +
aataagaaactactgacattta

SEQ ID NO: 193649 - DNA, 22 bp, Artificial Sequence
  Synthetic oligonucleotide; TTA chr2 60451681 60451702 60451698 60451703 +
ataagaaactactgacatttat

SEQ ID NO: 193650 - DNA, 22 bp, Artificial Sequence
  Synthetic oligonucleotide; CTA chr2 60451692 60451713 60451709 60451714 +
ctgacatttatcaccttcttta

SEQ ID NO: 193651 - DNA, 22 bp, Artificial Sequence
  Synthetic oligonucleotide; CTG chr2 60451695 60451716 60451712 60451717 +
acatttatcaccttctttagga

SEQ ID NO: 193652 - DNA, 22 bp, Artificial Sequence
  Synthetic oligonucleotide; TTT chr2 60451701 60451722 60451718 60451723 +
atcaccttctttaggatttacc

SEQ ID NO: 193653 - DNA, 22 bp, Artificial Sequence
  Synthetic oligonucleotide; TTA chr2 60451702 60451723 60451719 60451724 +
tcaccttctttaggatttaccg

SEQ ID NO: 193654 - DNA, 22 bp, Artificial Sequence
  Synthetic oligonucleotide; CTT chr2 60451709 60451730 60451726 60451731 +
ctttaggatttaccgctcgccc

SEQ ID NO: 193655 - DNA, 22 bp, Artificial Sequence
  Synthetic oligonucleotide; TTC chr2 60451710 60451731 60451727 60451732 +
tttaggatttaccgctcgccca

SEQ ID NO: 193656 - DNA, 22 bp, Artificial Sequence
  Synthetic oligonucleotide; CTT chr2 60451712 60451733 60451729 60451734 +
taggatttaccgctcgcccagt

SEQ ID NO: 193657 - DNA, 22 bp, Artificial Sequence
  Synthetic oligonucleotide; TTT chr2 60451713 60451734 60451730 60451735 +
aggatttaccgctcgcccagtg

SEQ ID NO: 193658 - DNA, 22 bp, Artificial Sequence
  Synthetic oligonucleotide; TTA chr2 60451714 60451735 60451731 60451736 +
ggatttaccgctcgcccagtga

SEQ ID NO: 193659 - DNA, 22 bp, Artificial Sequence
  Synthetic oligonucleotide; TTT chr2 60451720 60451741 60451737 60451742 +
accgctcgcccagtgatgttct

SEQ ID NO: 193660 - DNA, 22 bp, Artificial Sequence
  Synthetic oligonucleotide; TTA chr2 60451721 60451742 60451738 60451743 +
ccgctcgcccagtgatgttctt

SEQ ID NO: 193661 - DNA, 22 bp, Artificial Sequence
  Synthetic oligonucleotide; CTC chr2 60451727 60451748 60451744 60451749 +
gcccagtgatgttctttcctaa

SEQ ID NO: 193662 - DNA, 22 bp, Artificial Sequence
  Synthetic oligonucleotide; TTC chr2 60451741 60451762 60451758 60451763 +
tttcctaagctaaattaaaaga

SEQ ID NO: 193663 - DNA, 22 bp, Artificial Sequence
  Synthetic oligonucleotide; CTT chr2 60451743 60451764 60451760 60451765 +
tcctaagctaaattaaaagaca

SEQ ID NO: 193664 - DNA, 22 bp, Artificial Sequence
  Synthetic oligonucleotide; TTT chr2 60451744 60451765 60451761 60451766 +
cctaagctaaattaaaagacaa

SEQ ID NO: 193665 - DNA, 22 bp, Artificial Sequence
  Synthetic oligonucleotide; TTC chr2 60451745 60451766 60451762 60451767 +
ctaagctaaattaaaagacaaa

SEQ ID NO: 193666 - DNA, 22 bp, Artificial Sequence
  Synthetic oligonucleotide; CTA chr2 60451748 60451769 60451765 60451770 +
agctaaattaaaagacaaattc

SEQ ID NO: 193667 - DNA, 22 bp, Artificial Sequence
  Synthetic oligonucleotide; CTA chr2 60451753 60451774 60451770 60451775 +
aattaaaagacaaattcaaatc

SEQ ID NO: 193668 - DNA, 22 bp, Artificial Sequence
  Synthetic oligonucleotide; TTA chr2 60451758 60451779 60451775 60451780 +
aaagacaaattcaaatcctgca

SEQ ID NO: 193669 - DNA, 22 bp, Artificial Sequence
  Synthetic oligonucleotide; TTC chr2 60451770 60451791 60451787 60451792 +
aaatcctgcatggtagccacca

SEQ ID NO: 193670 - DNA, 22 bp, Artificial Sequence
  Synthetic oligonucleotide; CTG chr2 60451778 60451799 60451795 60451800 +
catggtagccaccaaaagcata

SEQ ID NO: 193671 - DNA, 22 bp, Artificial Sequence
  Synthetic oligonucleotide; TTT chr2 60451805 60451826 60451822 60451827 +
gaaaaacaggattcggcgtgcc

SEQ ID NO: 193672 - DNA, 22 bp, Artificial Sequence
  Synthetic oligonucleotide; TTG chr2 60451806 60451827 60451823 60451828 +
aaaaacaggattcggcgtgcca

SEQ ID NO: 193673 - DNA, 22 bp, Artificial Sequence
  Synthetic oligonucleotide; TTC chr2 60451819 60451840 60451836 60451841 +
ggcgtgccatattatgcattat

SEQ ID NO: 193674 - DNA, 22 bp, Artificial Sequence
  Synthetic oligonucleotide; TTA chr2 60451833 60451854 60451850 60451855 +
tgcattatttaatggtatgcaa

SEQ ID NO: 193675 - DNA, 22 bp, Artificial Sequence
  Synthetic oligonucleotide; TTA chr2 60451840 60451861 60451857 60451862 +
tttaatggtatgcaaattataa

SEQ ID NO: 193676 - DNA, 22 bp, Artificial Sequence
  Synthetic oligonucleotide; TTT chr2 60451843 60451864 60451860 60451865 +
aatggtatgcaaattataagtc

SEQ ID NO: 193677 - DNA, 22 bp, Artificial Sequence
  Synthetic oligonucleotide; TTA chr2 60451844 60451865 60451861 60451866 +
atggtatgcaaattataagtca

SEQ ID NO: 193678 - DNA, 22 bp, Artificial Sequence
  Synthetic oligonucleotide; TTA chr2 60451859 60451880 60451876 60451881 +
taagtcagacagttaggaaaac

SEQ ID NO: 193679 - DNA, 22 bp, Artificial Sequence
  Synthetic oligonucleotide; TTA chr2 60451874 60451895 60451891 60451896 +
ggaaaaccacacttcagcatta

SEQ ID NO: 193680 - DNA, 22 bp, Artificial Sequence
  Synthetic oligonucleotide; CTT chr2 60451888 60451909 60451905 60451910 +
cagcattaataaacagcaatat

SEQ ID NO: 193681 - DNA, 22 bp, Artificial Sequence
  Synthetic oligonucleotide; TTC chr2 60451889 60451910 60451906 60451911 +
agcattaataaacagcaatatt

SEQ ID NO: 193682 - DNA, 22 bp, Artificial Sequence
  Synthetic oligonucleotide; TTA chr2 60451896 60451917 60451913 60451918 +
ataaacagcaatattactacta

SEQ ID NO: 193683 - DNA, 22 bp, Artificial Sequence
  Synthetic oligonucleotide; TTA chr2 60451912 60451933 60451929 60451934 +
ctactacattaattatgatatt

SEQ ID NO: 193684 - DNA, 22 bp, Artificial Sequence
  Synthetic oligonucleotide; CTA chr2 60451915 60451936 60451932 60451937 +
ctacattaattatgatattgct

SEQ ID NO: 193685 - DNA, 22 bp, Artificial Sequence
  Synthetic oligonucleotide; CTA chr2 60451918 60451939 60451935 60451940 +
cattaattatgatattgctatg

SEQ ID NO: 193686 - DNA, 22 bp, Artificial Sequence
  Synthetic oligonucleotide; TTA chr2 60451923 60451944 60451940 60451945 +
attatgatattgctatgattta

SEQ ID NO: 193687 - DNA, 22 bp, Artificial Sequence
  Synthetic oligonucleotide; TTA chr2 60451927 60451948 60451944 60451949 +
tgatattgctatgatttattcc

SEQ ID NO: 193688 - DNA, 22 bp, Artificial Sequence
  Synthetic oligonucleotide; TTG chr2 60451935 60451956 60451952 60451957 +
ctatgatttattcccaagtttt

SEQ ID NO: 193689 - DNA, 22 bp, Artificial Sequence
  Synthetic oligonucleotide; CTA chr2 60451938 60451959 60451955 60451960 +
tgatttattcccaagttttgca

SEQ ID NO: 193690 - DNA, 22 bp, Artificial Sequence
  Synthetic oligonucleotide; TTT chr2 60451944 60451965 60451961 60451966 +
attcccaagttttgcattttga

SEQ ID NO: 193691 - DNA, 22 bp, Artificial Sequence
  Synthetic oligonucleotide; TTA chr2 60451945 60451966 60451962 60451967 +
ttcccaagttttgcattttgat

SEQ ID NO: 193692 - DNA, 22 bp, Artificial Sequence
  Synthetic oligonucleotide; TTC chr2 60451948 60451969 60451965 60451970 +
ccaagttttgcattttgattct

SEQ ID NO: 193693 - DNA, 22 bp, Artificial Sequence
  Synthetic oligonucleotide; TTT chr2 60451956 60451977 60451973 60451978 +
tgcattttgattctccttgaaa

SEQ ID NO: 193694 - DNA, 22 bp, Artificial Sequence
  Synthetic oligonucleotide; TTT chr2 60451957 60451978 60451974 60451979 +
gcattttgattctccttgaaaa

SEQ ID NO: 193695 - DNA, 22 bp, Artificial Sequence
  Synthetic oligonucleotide; TTG chr2 60451958 60451979 60451975 60451980 +
cattttgattctccttgaaaat

SEQ ID NO: 193696 - DNA, 22 bp, Artificial Sequence
  Synthetic oligonucleotide; TTT chr2 60451963 60451984 60451980 60451985 +
tgattctccttgaaaatttatg

SEQ ID NO: 193697 - DNA, 22 bp, Artificial Sequence
  Synthetic oligonucleotide; TTT chr2 60451964 60451985 60451981 60451986 +
gattctccttgaaaatttatgc

SEQ ID NO: 193698 - DNA, 22 bp, Artificial Sequence
  Synthetic oligonucleotide; TTG chr2 60451965 60451986 60451982 60451987 +
attctccttgaaaatttatgcc

SEQ ID NO: 193699 - DNA, 22 bp, Artificial Sequence
  Synthetic oligonucleotide; TTC chr2 60451969 60451990 60451986 60451991 +
tccttgaaaatttatgccatct

SEQ ID NO: 193700 - DNA, 22 bp, Artificial Sequence
  Synthetic oligonucleotide; CTC chr2 60451971 60451992 60451988 60451993 +
cttgaaaatttatgccatctga

SEQ ID NO: 193701 - DNA, 22 bp, Artificial Sequence
  Synthetic oligonucleotide; CTT chr2 60451974 60451995 60451991 60451996 +
gaaaatttatgccatctgataa

SEQ ID NO: 193702 - DNA, 22 bp, Artificial Sequence
  Synthetic oligonucleotide; TTG chr2 60451975 60451996 60451992 60451997 +
aaaatttatgccatctgataag

SEQ ID NO: 193703 - DNA, 22 bp, Artificial Sequence
  Synthetic oligonucleotide; TTT chr2 60451982 60452003 60451999 60452004 +
atgccatctgataagcggtaac

SEQ ID NO: 193704 - DNA, 22 bp, Artificial Sequence
  Synthetic oligonucleotide; TTA chr2 60451983 60452004 60452000 60452005 +
tgccatctgataagcggtaacc

SEQ ID NO: 193705 - DNA, 22 bp, Artificial Sequence
  Synthetic oligonucleotide; CTG chr2 60451992 60452013 60452009 60452014 +
ataagcggtaacctagttcccc

SEQ ID NO: 193706 - DNA, 22 bp, Artificial Sequence
  Synthetic oligonucleotide; CTA chr2 60452007 60452028 60452024 60452029 +
gttcccctcctacatctcctgc

SEQ ID NO: 193707 - DNA, 22 bp, Artificial Sequence
  Synthetic oligonucleotide; TTC chr2 60452011 60452032 60452028 60452033 +
ccctcctacatctcctgcccat

SEQ ID NO: 193708 - DNA, 22 bp, Artificial Sequence
  Synthetic oligonucleotide; CTC chr2 60452016 60452037 60452033 60452038 +
ctacatctcctgcccatttctc

SEQ ID NO: 193709 - DNA, 22 bp, Artificial Sequence
  Synthetic oligonucleotide; CTA chr2 60452019 60452040 60452036 60452041 +
catctcctgcccatttctcaaa

SEQ ID NO: 193710 - DNA, 22 bp, Artificial Sequence
  Synthetic oligonucleotide; CTC chr2 60452025 60452046 60452042 60452047 +
ctgcccatttctcaaatctgtt

SEQ ID NO: 193711 - DNA, 22 bp, Artificial Sequence
  Synthetic oligonucleotide; CTG chr2 60452028 60452049 60452045 60452050 +
cccatttctcaaatctgttcct

SEQ ID NO: 193712 - DNA, 22 bp, Artificial Sequence
  Synthetic oligonucleotide; TTT chr2 60452035 60452056 60452052 60452057 +
ctcaaatctgttcctcctaccc

SEQ ID NO: 193713 - DNA, 22 bp, Artificial Sequence
  Synthetic oligonucleotide; TTC chr2 60452036 60452057 60452053 60452058 +
tcaaatctgttcctcctaccca

SEQ ID NO: 193714 - DNA, 22 bp, Artificial Sequence
  Synthetic oligonucleotide; CTC chr2 60452038 60452059 60452055 60452060 +
aaatctgttcctcctacccacc

SEQ ID NO: 193715 - DNA, 22 bp, Artificial Sequence
  Synthetic oligonucleotide; CTG chr2 60452045 60452066 60452062 60452067 +
ttcctcctacccacccgatggg

SEQ ID NO: 193716 - DNA, 22 bp, Artificial Sequence
  Synthetic oligonucleotide; TTC chr2 60452048 60452069 60452065 60452070 +
ctcctacccacccgatgggtgt

SEQ ID NO: 193717 - DNA, 22 bp, Artificial Sequence
  Synthetic oligonucleotide; CTC chr2 60452051 60452072 60452068 60452073 +
ctacccacccgatgggtgtctg

SEQ ID NO: 193718 - DNA, 22 bp, Artificial Sequence
  Synthetic oligonucleotide; CTA chr2 60452054 60452075 60452071 60452076 +
cccacccgatgggtgtctgtag

SEQ ID NO: 193719 - DNA, 22 bp, Artificial Sequence
  Synthetic oligonucleotide; CTG chr2 60452073 60452094 60452090 60452095 +
taggaaacaggtacagaagtac

SEQ ID NO: 193720 - DNA, 22 bp, Artificial Sequence
  Synthetic oligonucleotide; CTC chr2 60452113 60452134 60452130 60452135 +
attgtcttataagcattaaaaa

SEQ ID NO: 193721 - DNA, 22 bp, Artificial Sequence
  Synthetic oligonucleotide; TTG chr2 60452117 60452138 60452134 60452139 +
tcttataagcattaaaaattaa

SEQ ID NO: 193722 - DNA, 22 bp, Artificial Sequence
  Synthetic oligonucleotide; CTT chr2 60452121 60452142 60452138 60452143 +
ataagcattaaaaattaaagaa

SEQ ID NO: 193723 - DNA, 22 bp, Artificial Sequence
  Synthetic oligonucleotide; TTA chr2 60452122 60452143 60452139 60452144 +
taagcattaaaaattaaagaac

SEQ ID NO: 193724 - DNA, 22 bp, Artificial Sequence
  Synthetic oligonucleotide; TTA chr2 60452131 60452152 60452148 60452153 +
aaaattaaagaacaagcaaaca

SEQ ID NO: 193725 - DNA, 22 bp, Artificial Sequence
  Synthetic oligonucleotide; TTA chr2 60452138 60452159 60452155 60452160 +
aagaacaagcaaacaccaccta

SEQ ID NO: 193726 - DNA, 22 bp, Artificial Sequence
  Synthetic oligonucleotide; CTA chr2 60452160 60452181 60452177 60452182 +
aagctccaacatttattgtgtc

SEQ ID NO: 193727 - DNA, 22 bp, Artificial Sequence
  Synthetic oligonucleotide; CTC chr2 60452166 60452187 60452183 60452188 +
caacatttattgtgtcaatgtt

SEQ ID NO: 193728 - DNA, 22 bp, Artificial Sequence
  Synthetic oligonucleotide; TTT chr2 60452174 60452195 60452191 60452196 +
attgtgtcaatgttaagcacac

SEQ ID NO: 193729 - DNA, 22 bp, Artificial Sequence
  Synthetic oligonucleotide; TTA chr2 60452175 60452196 60452192 60452197 +
ttgtgtcaatgttaagcacact

SEQ ID NO: 193730 - DNA, 22 bp, Artificial Sequence
  Synthetic oligonucleotide; TTG chr2 60452178 60452199 60452195 60452200 +
tgtcaatgttaagcacactttt

SEQ ID NO: 193731 - DNA, 22 bp, Artificial Sequence
  Synthetic oligonucleotide; TTA chr2 60452189 60452210 60452206 60452211 +
agcacactttttaaaagacaac

SEQ ID NO: 193732 - DNA, 22 bp, Artificial Sequence
  Synthetic oligonucleotide; CTT chr2 60452198 60452219 60452215 60452220 +
tttaaaagacaacatagaatgt

SEQ ID NO: 193733 - DNA, 22 bp, Artificial Sequence
  Synthetic oligonucleotide; TTT chr2 60452199 60452220 60452216 60452221 +
ttaaaagacaacatagaatgta

SEQ ID NO: 193734 - DNA, 22 bp, Artificial Sequence
  Synthetic oligonucleotide; TTT chr2 60452200 60452221 60452217 60452222 +
taaaagacaacatagaatgtat

SEQ ID NO: 193735 - DNA, 22 bp, Artificial Sequence
  Synthetic oligonucleotide; TTT chr2 60452201 60452222 60452218 60452223 +
aaaagacaacatagaatgtata

SEQ ID NO: 193736 - DNA, 22 bp, Artificial Sequence
  Synthetic oligonucleotide; TTA chr2 60452202 60452223 60452219 60452224 +
aaagacaacatagaatgtatag

SEQ ID NO: 193737 - DNA, 22 bp, Artificial Sequence
  Synthetic oligonucleotide; TTG chr2 60452237 60452258 60452254 60452259 +
gggactcatgcgcatttccaca

SEQ ID NO: 193738 - DNA, 22 bp, Artificial Sequence
  Synthetic oligonucleotide; CTC chr2 60452244 60452265 60452261 60452266 +
atgcgcatttccacaatacagg

SEQ ID NO: 193739 - DNA, 22 bp, Artificial Sequence
  Synthetic oligonucleotide; TTT chr2 60452254 60452275 60452271 60452276 +
ccacaatacaggtaattaggtt

SEQ ID NO: 193740 - DNA, 22 bp, Artificial Sequence
  Synthetic oligonucleotide; TTC chr2 60452255 60452276 60452272 60452277 +
cacaatacaggtaattaggttg

SEQ ID NO: 193741 - DNA, 22 bp, Artificial Sequence
  Synthetic oligonucleotide; TTA chr2 60452272 60452293 60452289 60452294 +
ggttggctggtttcagaagggc

SEQ ID NO: 193742 - DNA, 22 bp, Artificial Sequence
  Synthetic oligonucleotide; TTG chr2 60452277 60452298 60452294 60452299 +
gctggtttcagaagggccaggg

SEQ ID NO: 193743 - DNA, 22 bp, Artificial Sequence
  Synthetic oligonucleotide; CTG chr2 60452281 60452302 60452298 60452303 +
gtttcagaagggccagggcatc

SEQ ID NO: 193744 - DNA, 22 bp, Artificial Sequence
  Synthetic oligonucleotide; TTT chr2 60452285 60452306 60452302 60452307 +
cagaagggccagggcatcactc

SEQ ID NO: 193745 - DNA, 22 bp, Artificial Sequence
  Synthetic oligonucleotide; TTC chr2 60452286 60452307 60452303 60452308 +
agaagggccagggcatcactca

SEQ ID NO: 193746 - DNA, 22 bp, Artificial Sequence
  Synthetic oligonucleotide; CTC chr2 60452307 60452328 60452324 60452329 +
atgacagcgatggtccacgggc

SEQ ID NO: 193747 - DNA, 22 bp, Artificial Sequence
  Synthetic oligonucleotide; CTC chr2 60452333 60452354 60452350 60452355 +
tctatgggactgattcactgtt

SEQ ID NO: 193748 - DNA, 22 bp, Artificial Sequence
  Synthetic oligonucleotide; CTC chr2 60452335 60452356 60452352 60452357 +
tatgggactgattcactgttcc

SEQ ID NO: 193749 - DNA, 22 bp, Artificial Sequence
  Synthetic oligonucleotide; CTA chr2 60452337 60452358 60452354 60452359 +
tgggactgattcactgttccaa

SEQ ID NO: 193750 - DNA, 22 bp, Artificial Sequence
  Synthetic oligonucleotide; CTG chr2 60452345 60452366 60452362 60452367 +
attcactgttccaatgtgggtc

SEQ ID NO: 193751 - DNA, 22 bp, Artificial Sequence
  Synthetic oligonucleotide; TTC chr2 60452349 60452370 60452366 60452371 +
actgttccaatgtgggtctgtt

SEQ ID NO: 193752 - DNA, 22 bp, Artificial Sequence
  Synthetic oligonucleotide; CTG chr2 60452353 60452374 60452370 60452375 +
ttccaatgtgggtctgtttttt

SEQ ID NO: 193753 - DNA, 22 bp, Artificial Sequence
  Synthetic oligonucleotide; TTC chr2 60452356 60452377 60452373 60452378 +
caatgtgggtctgtttttttgt

SEQ ID NO: 193754 - DNA, 22 bp, Artificial Sequence
  Synthetic oligonucleotide; CTG chr2 60452369 60452390 60452386 60452391 +
tttttttgtttttactttttat

SEQ ID NO: 193755 - DNA, 22 bp, Artificial Sequence
  Synthetic oligonucleotide; TTT chr2 60452372 60452393 60452389 60452394 +
ttttgtttttactttttattaa

SEQ ID NO: 193756 - DNA, 22 bp, Artificial Sequence
  Synthetic oligonucleotide; TTT chr2 60452373 60452394 60452390 60452395 +
tttgtttttactttttattaaa

SEQ ID NO: 193757 - DNA, 22 bp, Artificial Sequence
  Synthetic oligonucleotide; TTT chr2 60452374 60452395 60452391 60452396 +
ttgtttttactttttattaaaa

SEQ ID NO: 193758 - DNA, 22 bp, Artificial Sequence
  Synthetic oligonucleotide; TTT chr2 60452375 60452396 60452392 60452397 +
tgtttttactttttattaaaaa

SEQ ID NO: 193759 - DNA, 22 bp, Artificial Sequence
  Synthetic oligonucleotide; TTT chr2 60452376 60452397 60452393 60452398 +
gtttttactttttattaaaaaa

SEQ ID NO: 193760 - DNA, 22 bp, Artificial Sequence
  Synthetic oligonucleotide; TTG chr2 60452377 60452398 60452394 60452399 +
tttttactttttattaaaaaat

SEQ ID NO: 193761 - DNA, 22 bp, Artificial Sequence
  Synthetic oligonucleotide; TTT chr2 60452380 60452401 60452397 60452402 +
ttactttttattaaaaaatata

SEQ ID NO: 193762 - DNA, 22 bp, Artificial Sequence
  Synthetic oligonucleotide; TTT chr2 60452381 60452402 60452398 60452403 +
tactttttattaaaaaatataa

SEQ ID NO: 193763 - DNA, 22 bp, Artificial Sequence
  Synthetic oligonucleotide; TTT chr2 60452382 60452403 60452399 60452404 +
actttttattaaaaaatataaa

SEQ ID NO: 193764 - DNA, 22 bp, Artificial Sequence
  Synthetic oligonucleotide; TTA chr2 60452383 60452404 60452400 60452405 +
ctttttattaaaaaatataaat

SEQ ID NO: 193765 - DNA, 22 bp, Artificial Sequence
  Synthetic oligonucleotide; CTT chr2 60452386 60452407 60452403 60452408 +
tttattaaaaaatataaataaa

SEQ ID NO: 193766 - DNA, 22 bp, Artificial Sequence
  Synthetic oligonucleotide; TTT chr2 60452387 60452408 60452404 60452409 +
ttattaaaaaatataaataaaa

SEQ ID NO: 193767 - DNA, 22 bp, Artificial Sequence
  Synthetic oligonucleotide; TTT chr2 60452388 60452409 60452405 60452410 +
tattaaaaaatataaataaaat

SEQ ID NO: 193768 - DNA, 22 bp, Artificial Sequence
  Synthetic oligonucleotide; TTT chr2 60452389 60452410 60452406 60452411 +
attaaaaaatataaataaaatg

SEQ ID NO: 193769 - DNA, 22 bp, Artificial Sequence
  Synthetic oligonucleotide; TTA chr2 60452390 60452411 60452407 60452412 +
ttaaaaaatataaataaaatgg

SEQ ID NO: 193770 - DNA, 22 bp, Artificial Sequence
  Synthetic oligonucleotide; TTA chr2 60452393 60452414 60452410 60452415 +
aaaaatataaataaaatggcgc

SEQ ID NO: 193771 - DNA, 22 bp, Artificial Sequence
  Synthetic oligonucleotide; CTG chr2 60452417 60452438 60452434 60452439 +
caggcctaggctggaaggactc

SEQ ID NO: 193772 - DNA, 22 bp, Artificial Sequence
  Synthetic oligonucleotide; CTA chr2 60452425 60452446 60452442 60452447 +
ggctggaaggactctgcaggac

SEQ ID NO: 193773 - DNA, 22 bp, Artificial Sequence
  Synthetic oligonucleotide; CTG chr2 60452430 60452451 60452447 60452452 +
gaaggactctgcaggactctgt

SEQ ID NO: 193774 - DNA, 22 bp, Artificial Sequence
  Synthetic oligonucleotide; CTC chr2 60452439 60452460 60452456 60452461 +
tgcaggactctgtcttcgcaca

SEQ ID NO: 193775 - DNA, 22 bp, Artificial Sequence
  Synthetic oligonucleotide; CTG chr2 60452441 60452462 60452458 60452463 +
caggactctgtcttcgcacaac

SEQ ID NO: 193776 - DNA, 22 bp, Artificial Sequence
  Synthetic oligonucleotide; CTC chr2 60452449 60452470 60452466 60452471 +
tgtcttcgcacaacggcttctt

SEQ ID NO: 193777 - DNA, 22 bp, Artificial Sequence
  Synthetic oligonucleotide; CTG chr2 60452451 60452472 60452468 60452473 +
tcttcgcacaacggcttcttgg

SEQ ID NO: 193778 - DNA, 22 bp, Artificial Sequence
  Synthetic oligonucleotide; CTT chr2 60452455 60452476 60452472 60452477 +
cgcacaacggcttcttggaggc

SEQ ID NO: 193779 - DNA, 22 bp, Artificial Sequence
  Synthetic oligonucleotide; TTC chr2 60452456 60452477 60452473 60452478 +
gcacaacggcttcttggaggct

SEQ ID NO: 193780 - DNA, 22 bp, Artificial Sequence
  Synthetic oligonucleotide; CTT chr2 60452468 60452489 60452485 60452490 +
cttggaggctactgtcagaaaa

SEQ ID NO: 193781 - DNA, 22 bp, Artificial Sequence
  Synthetic oligonucleotide; TTC chr2 60452469 60452490 60452486 60452491 +
ttggaggctactgtcagaaaac

SEQ ID NO: 193782 - DNA, 22 bp, Artificial Sequence
  Synthetic oligonucleotide; CTT chr2 60452471 60452492 60452488 60452493 +
ggaggctactgtcagaaaacat

SEQ ID NO: 193783 - DNA, 22 bp, Artificial Sequence
  Synthetic oligonucleotide; TTG chr2 60452472 60452493 60452489 60452494 +
gaggctactgtcagaaaacatc

SEQ ID NO: 193784 - DNA, 22 bp, Artificial Sequence
  Synthetic oligonucleotide; CTA chr2 60452479 60452500 60452496 60452501 +
ctgtcagaaaacatcacaaact

SEQ ID NO: 193785 - DNA, 22 bp, Artificial Sequence
  Synthetic oligonucleotide; CTG chr2 60452482 60452503 60452499 60452504 +
tcagaaaacatcacaaactagc

SEQ ID NO: 193786 - DNA, 22 bp, Artificial Sequence
  Synthetic oligonucleotide; CTA chr2 60452502 60452523 60452519 60452524 +
gcaggatgacagaccacgctga

SEQ ID NO: 193787 - DNA, 22 bp, Artificial Sequence
  Synthetic oligonucleotide; CTG chr2 60452523 60452544 60452540 60452545 +
acgtcgactgggcggcacgcgt

SEQ ID NO: 193788 - DNA, 22 bp, Artificial Sequence
  Synthetic oligonucleotide; CTG chr2 60452533 60452554 60452550 60452555 +
ggcggcacgcgtccaccccacc

SEQ ID NO: 193789 - DNA, 22 bp, Artificial Sequence
  Synthetic oligonucleotide; CTG chr2 60452559 60452580 60452576 60452581 +
ggggcttcaaattttctcagaa

SEQ ID NO: 193790 - DNA, 22 bp, Artificial Sequence
  Synthetic oligonucleotide; CTT chr2 60452566 60452587 60452583 60452588 +
caaattttctcagaacttaagg

SEQ ID NO: 193791 - DNA, 22 bp, Artificial Sequence
  Synthetic oligonucleotide; TTC chr2 60452567 60452588 60452584 60452589 +
aaattttctcagaacttaaggg

SEQ ID NO: 193792 - DNA, 22 bp, Artificial Sequence
  Synthetic oligonucleotide; TTT chr2 60452573 60452594 60452590 60452595 +
tctcagaacttaagggctctcg

SEQ ID NO: 193793 - DNA, 22 bp, Artificial Sequence
  Synthetic oligonucleotide; TTT chr2 60452574 60452595 60452591 60452596 +
ctcagaacttaagggctctcga

SEQ ID NO: 193794 - DNA, 22 bp, Artificial Sequence
  Synthetic oligonucleotide; TTC chr2 60452575 60452596 60452592 60452597 +
tcagaacttaagggctctcgag

SEQ ID NO: 193795 - DNA, 22 bp, Artificial Sequence
  Synthetic oligonucleotide; CTC chr2 60452577 60452598 60452594 60452599 +
agaacttaagggctctcgagct

SEQ ID NO: 193796 - DNA, 22 bp, Artificial Sequence
  Synthetic oligonucleotide; CTT chr2 60452584 60452605 60452601 60452606 +
aagggctctcgagcttccatcc

SEQ ID NO: 193797 - DNA, 22 bp, Artificial Sequence
  Synthetic oligonucleotide; TTA chr2 60452585 60452606 60452602 60452607 +
agggctctcgagcttccatccg

SEQ ID NO: 193798 - DNA, 22 bp, Artificial Sequence
  Synthetic oligonucleotide; CTC chr2 60452592 60452613 60452609 60452614 +
tcgagcttccatccgaaaactg

SEQ ID NO: 193799 - DNA, 22 bp, Artificial Sequence
  Synthetic oligonucleotide; CTC chr2 60452594 60452615 60452611 60452616 +
gagcttccatccgaaaactgcc

SEQ ID NO: 193800 - DNA, 22 bp, Artificial Sequence
  Synthetic oligonucleotide; CTT chr2 60452600 60452621 60452617 60452622 +
ccatccgaaaactgccacacat

SEQ ID NO: 193801 - DNA, 22 bp, Artificial Sequence
  Synthetic oligonucleotide; TTC chr2 60452601 60452622 60452618 60452623 +
catccgaaaactgccacacatc

SEQ ID NO: 193802 - DNA, 22 bp, Artificial Sequence
  Synthetic oligonucleotide; CTG chr2 60452614 60452635 60452631 60452636 +
ccacacatcttgagctctctgg

SEQ ID NO: 193803 - DNA, 22 bp, Artificial Sequence
  Synthetic oligonucleotide; CTT chr2 60452625 60452646 60452642 60452647 +
gagctctctgggtactacgccg

SEQ ID NO: 193804 - DNA, 22 bp, Artificial Sequence
  Synthetic oligonucleotide; TTG chr2 60452626 60452647 60452643 60452648 +
agctctctgggtactacgccga

SEQ ID NO: 193805 - DNA, 22 bp, Artificial Sequence
  Synthetic oligonucleotide; CTC chr2 60452631 60452652 60452648 60452653 +
tctgggtactacgccgaatggg

SEQ ID NO: 193806 - DNA, 22 bp, Artificial Sequence
  Synthetic oligonucleotide; CTC chr2 60452633 60452654 60452650 60452655 +
tgggtactacgccgaatggggg

SEQ ID NO: 193807 - DNA, 22 bp, Artificial Sequence
  Synthetic oligonucleotide; CTG chr2 60452635 60452656 60452652 60452657 +
ggtactacgccgaatgggggtg

SEQ ID NO: 193808 - DNA, 22 bp, Artificial Sequence
  Synthetic oligonucleotide; CTA chr2 60452642 60452663 60452659 60452664 +
cgccgaatgggggtgtgtgaag

SEQ ID NO: 193809 - DNA, 22 bp, Artificial Sequence
  Synthetic oligonucleotide; CTA chr2 60452670 60452691 60452687 60452692 +
gaaagaggttggagacagagga

SEQ ID NO: 193810 - DNA, 22 bp, Artificial Sequence
  Synthetic oligonucleotide; TTG chr2 60452681 60452702 60452698 60452703 +
gagacagaggagggggaaaaaa

SEQ ID NO: 193811 - DNA, 22 bp, Artificial Sequence
  Synthetic oligonucleotide; CTT chr2 60452721 60452742 60452738 60452743 +
ggcccaatgattttctgttctc

SEQ ID NO: 193812 - DNA, 22 bp, Artificial Sequence
  Synthetic oligonucleotide; TTG chr2 60452722 60452743 60452739 60452744 +
gcccaatgattttctgttctct

SEQ ID NO: 193813 - DNA, 22 bp, Artificial Sequence
  Synthetic oligonucleotide; TTT chr2 60452734 60452755 60452751 60452756 +
tctgttctctaactagcttttt

SEQ ID NO: 193814 - DNA, 22 bp, Artificial Sequence
  Synthetic oligonucleotide; TTT chr2 60452735 60452756 60452752 60452757 +
ctgttctctaactagcttttta

SEQ ID NO: 193815 - DNA, 22 bp, Artificial Sequence
  Synthetic oligonucleotide; TTC chr2 60452736 60452757 60452753 60452758 +
tgttctctaactagctttttaa

SEQ ID NO: 193816 - DNA, 22 bp, Artificial Sequence
  Synthetic oligonucleotide; CTG chr2 60452738 60452759 60452755 60452760 +
ttctctaactagctttttaaaa

SEQ ID NO: 193817 - DNA, 22 bp, Artificial Sequence
  Synthetic oligonucleotide; TTC chr2 60452741 60452762 60452758 60452763 +
tctaactagctttttaaaaatt

SEQ ID NO: 193818 - DNA, 22 bp, Artificial Sequence
  Synthetic oligonucleotide; CTC chr2 60452743 60452764 60452760 60452765 +
taactagctttttaaaaattag

SEQ ID NO: 193819 - DNA, 22 bp, Artificial Sequence
  Synthetic oligonucleotide; CTA chr2 60452745 60452766 60452762 60452767 +
actagctttttaaaaattagaa

SEQ ID NO: 193820 - DNA, 22 bp, Artificial Sequence
  Synthetic oligonucleotide; CTA chr2 60452749 60452770 60452766 60452771 +
gctttttaaaaattagaactta

SEQ ID NO: 193821 - DNA, 22 bp, Artificial Sequence
  Synthetic oligonucleotide; CTT chr2 60452753 60452774 60452770 60452775 +
tttaaaaattagaacttaaacc

SEQ ID NO: 193822 - DNA, 22 bp, Artificial Sequence
  Synthetic oligonucleotide; TTT chr2 60452754 60452775 60452771 60452776 +
ttaaaaattagaacttaaacca

SEQ ID NO: 193823 - DNA, 22 bp, Artificial Sequence
  Synthetic oligonucleotide; TTT chr2 60452755 60452776 60452772 60452777 +
taaaaattagaacttaaaccaa

SEQ ID NO: 193824 - DNA, 22 bp, Artificial Sequence
  Synthetic oligonucleotide; TTT chr2 60452756 60452777 60452773 60452778 +
aaaaattagaacttaaaccaac

SEQ ID NO: 193825 - DNA, 22 bp, Artificial Sequence
  Synthetic oligonucleotide; TTA chr2 60452757 60452778 60452774 60452779 +
aaaattagaacttaaaccaacc

SEQ ID NO: 193826 - DNA, 22 bp, Artificial Sequence
  Synthetic oligonucleotide; TTA chr2 60452764 60452785 60452781 60452786 +
gaacttaaaccaaccacaggtc

SEQ ID NO: 193827 - DNA, 22 bp, Artificial Sequence
  Synthetic oligonucleotide; CTT chr2 60452770 60452791 60452787 60452792 +
aaaccaaccacaggtcgagcca

SEQ ID NO: 193828 - DNA, 22 bp, Artificial Sequence
  Synthetic oligonucleotide; TTA chr2 60452771 60452792 60452788 60452793 +
aaccaaccacaggtcgagccac

SEQ ID NO: 193829 - DNA, 22 bp, Artificial Sequence
  Synthetic oligonucleotide; CTG chr2 60452795 60452816 60452812 60452817 +
gcatcttaagcatgatttcaaa

SEQ ID NO: 193830 - DNA, 22 bp, Artificial Sequence
  Synthetic oligonucleotide; CTT chr2 60452802 60452823 60452819 60452824 +
aagcatgatttcaaactcagcc

SEQ ID NO: 193831 - DNA, 22 bp, Artificial Sequence
  Synthetic oligonucleotide; TTA chr2 60452803 60452824 60452820 60452825 +
agcatgatttcaaactcagcct

SEQ ID NO: 193832 - DNA, 22 bp, Artificial Sequence
  Synthetic oligonucleotide; TTT chr2 60452813 60452834 60452830 60452835 +
caaactcagcctcccctcccca

SEQ ID NO: 193833 - DNA, 22 bp, Artificial Sequence
  Synthetic oligonucleotide; TTC chr2 60452814 60452835 60452831 60452836 +
aaactcagcctcccctccccaa

SEQ ID NO: 193834 - DNA, 22 bp, Artificial Sequence
  Synthetic oligonucleotide; CTC chr2 60452820 60452841 60452837 60452842 +
agcctcccctccccaagtatct

SEQ ID NO: 193835 - DNA, 22 bp, Artificial Sequence
  Synthetic oligonucleotide; CTC chr2 60452826 60452847 60452843 60452848 +
ccctccccaagtatctctgacc

SEQ ID NO: 193836 - DNA, 22 bp, Artificial Sequence
  Synthetic oligonucleotide; CTC chr2 60452831 60452852 60452848 60452853 +
cccaagtatctctgacctctga

SEQ ID NO: 193837 - DNA, 22 bp, Artificial Sequence
  Synthetic oligonucleotide; CTC chr2 60452843 60452864 60452860 60452865 +
tgacctctgagtcgtcttccca

SEQ ID NO: 193838 - DNA, 22 bp, Artificial Sequence
  Synthetic oligonucleotide; CTG chr2 60452845 60452866 60452862 60452867 +
acctctgagtcgtcttcccatg

SEQ ID NO: 193839 - DNA, 22 bp, Artificial Sequence
  Synthetic oligonucleotide; CTC chr2 60452850 60452871 60452867 60452872 +
tgagtcgtcttcccatgcctcc

SEQ ID NO: 193840 - DNA, 22 bp, Artificial Sequence
  Synthetic oligonucleotide; CTG chr2 60452852 60452873 60452869 60452874 +
agtcgtcttcccatgcctccct

SEQ ID NO: 193841 - DNA, 22 bp, Artificial Sequence
  Synthetic oligonucleotide; CTT chr2 60452861 60452882 60452878 60452883 +
cccatgcctccctcccttccgt

SEQ ID NO: 193842 - DNA, 22 bp, Artificial Sequence
  Synthetic oligonucleotide; TTC chr2 60452862 60452883 60452879 60452884 +
ccatgcctccctcccttccgtc

SEQ ID NO: 193843 - DNA, 22 bp, Artificial Sequence
  Synthetic oligonucleotide; CTC chr2 60452871 60452892 60452888 60452893 +
cctcccttccgtccccccaagg

SEQ ID NO: 193844 - DNA, 22 bp, Artificial Sequence
  Synthetic oligonucleotide; CTC chr2 60452875 60452896 60452892 60452897 +
ccttccgtccccccaaggagga

SEQ ID NO: 193845 - DNA, 22 bp, Artificial Sequence
  Synthetic oligonucleotide; CTT chr2 60452879 60452900 60452896 60452901 +
ccgtccccccaaggaggaccca

SEQ ID NO: 193846 - DNA, 22 bp, Artificial Sequence
  Synthetic oligonucleotide; TTC chr2 60452880 60452901 60452897 60452902 +
cgtccccccaaggaggacccag

SEQ ID NO: 193847 - DNA, 22 bp, Artificial Sequence
  Synthetic oligonucleotide; CTG chr2 60452917 60452938 60452934 60452939 +
cccaattgtatgatagtcctaa

SEQ ID NO: 193848 - DNA, 22 bp, Artificial Sequence
  Synthetic oligonucleotide; TTG chr2 60452925 60452946 60452942 60452947 +
tatgatagtcctaataaactcg

SEQ ID NO: 193849 - DNA, 22 bp, Artificial Sequence
  Synthetic oligonucleotide; CTA chr2 60452938 60452959 60452955 60452960 +
ataaactcgggacacacctgga

SEQ ID NO: 193850 - DNA, 22 bp, Artificial Sequence
  Synthetic oligonucleotide; CTC chr2 60452946 60452967 60452963 60452968 +
gggacacacctggaaggaaaca

SEQ ID NO: 193851 - DNA, 22 bp, Artificial Sequence
  Synthetic oligonucleotide; CTG chr2 60452958 60452979 60452975 60452980 +
gaaggaaacacttgcccttatg

SEQ ID NO: 193852 - DNA, 22 bp, Artificial Sequence
  Synthetic oligonucleotide; CTT chr2 60452971 60452992 60452988 60452993 +
gcccttatgactgagaaaactt

SEQ ID NO: 193853 - DNA, 22 bp, Artificial Sequence
  Synthetic oligonucleotide; TTG chr2 60452972 60452993 60452989 60452994 +
cccttatgactgagaaaactta

SEQ ID NO: 193854 - DNA, 22 bp, Artificial Sequence
  Synthetic oligonucleotide; CTT chr2 60452977 60452998 60452994 60452999 +
atgactgagaaaacttagtaag

SEQ ID NO: 193855 - DNA, 22 bp, Artificial Sequence
  Synthetic oligonucleotide; TTA chr2 60452978 60452999 60452995 60453000 +
tgactgagaaaacttagtaaga

SEQ ID NO: 193856 - DNA, 22 bp, Artificial Sequence
  Synthetic oligonucleotide; CTG chr2 60452984 60453005 60453001 60453006 +
agaaaacttagtaagaaacagt

SEQ ID NO: 193857 - DNA, 22 bp, Artificial Sequence
  Synthetic oligonucleotide; CTT chr2 60452993 60453014 60453010 60453015 +
agtaagaaacagtcctttggtt

SEQ ID NO: 193858 - DNA, 22 bp, Artificial Sequence
  Synthetic oligonucleotide; TTA chr2 60452994 60453015 60453011 60453016 +
gtaagaaacagtcctttggttg

SEQ ID NO: 193859 - DNA, 22 bp, Artificial Sequence
  Synthetic oligonucleotide; CTT chr2 60453010 60453031 60453027 60453032 +
tggttgaggagagcgggagagg

SEQ ID NO: 193860 - DNA, 22 bp, Artificial Sequence
  Synthetic oligonucleotide; TTT chr2 60453011 60453032 60453028 60453033 +
ggttgaggagagcgggagaggg

SEQ ID NO: 193861 - DNA, 22 bp, Artificial Sequence
  Synthetic oligonucleotide; TTG chr2 60453012 60453033 60453029 60453034 +
gttgaggagagcgggagaggga

SEQ ID NO: 193862 - DNA, 22 bp, Artificial Sequence
  Synthetic oligonucleotide; TTG chr2 60453016 60453037 60453033 60453038 +
aggagagcgggagagggaggag

SEQ ID NO: 193863 - DNA, 22 bp, Artificial Sequence
  Synthetic oligonucleotide; CTT chr2 60453054 60453075 60453071 60453076 +
ctcaaaataataataaaattat

SEQ ID NO: 193864 - DNA, 22 bp, Artificial Sequence
  Synthetic oligonucleotide; TTC chr2 60453055 60453076 60453072 60453077 +
tcaaaataataataaaattata

SEQ ID NO: 193865 - DNA, 22 bp, Artificial Sequence
  Synthetic oligonucleotide; CTC chr2 60453057 60453078 60453074 60453079 +
aaaataataataaaattataaa

SEQ ID NO: 193866 - DNA, 22 bp, Artificial Sequence
  Synthetic oligonucleotide; TTA chr2 60453075 60453096 60453092 60453097 +
taaagaaacaaaaaatcaaaac

SEQ ID NO: 193867 - DNA, 22 bp, Artificial Sequence
  Synthetic oligonucleotide; CTG chr2 60453099 60453120 60453116 60453121 +
atgtaaaagcagcacaacgaaa

SEQ ID NO: 193868 - DNA, 22 bp, Artificial Sequence
  Synthetic oligonucleotide; TTC chr2 60453142 60453163 60453159 60453164 +
aacgtcaaagcagccaatgatt

SEQ ID NO: 193869 - DNA, 22 bp, Artificial Sequence
  Synthetic oligonucleotide; TTT chr2 60453165 60453186 60453182 60453187 +
acaagaggcgaacaaatctctg

SEQ ID NO: 193870 - DNA, 22 bp, Artificial Sequence
  Synthetic oligonucleotide; TTA chr2 60453166 60453187 60453183 60453188 +
caagaggcgaacaaatctctga

SEQ ID NO: 193871 - DNA, 22 bp, Artificial Sequence
  Synthetic oligonucleotide; CTC chr2 60453185 60453206 60453202 60453207 +
tgaagagaaaaccagaacccaa

SEQ ID NO: 193872 - DNA, 22 bp, Artificial Sequence
  Synthetic oligonucleotide; CTG chr2 60453187 60453208 60453204 60453209 +
aagagaaaaccagaacccaaaa

SEQ ID NO: 193873 - DNA, 22 bp, Artificial Sequence
  Synthetic oligonucleotide; TTG chr2 60453215 60453236 60453232 60453237 +
ctctcaaattgcaccaaaaact

SEQ ID NO: 193874 - DNA, 22 bp, Artificial Sequence
  Synthetic oligonucleotide; CTC chr2 60453218 60453239 60453235 60453240 +
tcaaattgcaccaaaaactgcc

SEQ ID NO: 193875 - DNA, 22 bp, Artificial Sequence
  Synthetic oligonucleotide; CTC chr2 60453220 60453241 60453237 60453242 +
aaattgcaccaaaaactgcctg

SEQ ID NO: 193876 - DNA, 22 bp, Artificial Sequence
  Synthetic oligonucleotide; TTG chr2 60453226 60453247 60453243 60453248 +
caccaaaaactgcctgtagttt

SEQ ID NO: 193877 - DNA, 22 bp, Artificial Sequence
  Synthetic oligonucleotide; CTG chr2 60453238 60453259 60453255 60453260 +
cctgtagtttctttcaaacatg

SEQ ID NO: 193878 - DNA, 22 bp, Artificial Sequence
  Synthetic oligonucleotide; CTG chr2 60453242 60453263 60453259 60453264 +
tagtttctttcaaacatgcagt

SEQ ID NO: 193879 - DNA, 22 bp, Artificial Sequence
  Synthetic oligonucleotide; TTT chr2 60453248 60453269 60453265 60453270 +
ctttcaaacatgcagttttctt

SEQ ID NO: 193880 - DNA, 22 bp, Artificial Sequence
  Synthetic oligonucleotide; TTC chr2 60453249 60453270 60453266 60453271 +
tttcaaacatgcagttttcttt

SEQ ID NO: 193881 - DNA, 22 bp, Artificial Sequence
  Synthetic oligonucleotide; CTT chr2 60453251 60453272 60453268 60453273 +
tcaaacatgcagttttcttttc

SEQ ID NO: 193882 - DNA, 22 bp, Artificial Sequence
  Synthetic oligonucleotide; TTT chr2 60453252 60453273 60453269 60453274 +
caaacatgcagttttcttttct

SEQ ID NO: 193883 - DNA, 22 bp, Artificial Sequence
  Synthetic oligonucleotide; TTC chr2 60453253 60453274 60453270 60453275 +
aaacatgcagttttcttttctt

SEQ ID NO: 193884 - DNA, 22 bp, Artificial Sequence
  Synthetic oligonucleotide; TTT chr2 60453266 60453287 60453283 60453288 +
tcttttcttttttggaaggggg

SEQ ID NO: 193885 - DNA, 22 bp, Artificial Sequence
  Synthetic oligonucleotide; TTT chr2 60453267 60453288 60453284 60453289 +
cttttcttttttggaaggggga

SEQ ID NO: 193886 - DNA, 22 bp, Artificial Sequence
  Synthetic oligonucleotide; TTC chr2 60453268 60453289 60453285 60453290 +
ttttcttttttggaagggggaa

SEQ ID NO: 193887 - DNA, 22 bp, Artificial Sequence
  Synthetic oligonucleotide; CTT chr2 60453270 60453291 60453287 60453292 +
ttcttttttggaagggggaagg

SEQ ID NO: 193888 - DNA, 22 bp, Artificial Sequence
  Synthetic oligonucleotide; TTT chr2 60453271 60453292 60453288 60453293 +
tcttttttggaagggggaaggc

SEQ ID NO: 193889 - DNA, 22 bp, Artificial Sequence
  Synthetic oligonucleotide; TTT chr2 60453272 60453293 60453289 60453294 +
cttttttggaagggggaaggca

SEQ ID NO: 193890 - DNA, 22 bp, Artificial Sequence
  Synthetic oligonucleotide; TTC chr2 60453273 60453294 60453290 60453295 +
ttttttggaagggggaaggcaa

SEQ ID NO: 193891 - DNA, 22 bp, Artificial Sequence
  Synthetic oligonucleotide; CTT chr2 60453275 60453296 60453292 60453297 +
ttttggaagggggaaggcaatg

SEQ ID NO: 193892 - DNA, 22 bp, Artificial Sequence
  Synthetic oligonucleotide; TTT chr2 60453276 60453297 60453293 60453298 +
tttggaagggggaaggcaatgg

SEQ ID NO: 193893 - DNA, 22 bp, Artificial Sequence
  Synthetic oligonucleotide; TTT chr2 60453277 60453298 60453294 60453299 +
ttggaagggggaaggcaatggt

SEQ ID NO: 193894 - DNA, 22 bp, Artificial Sequence
  Synthetic oligonucleotide; TTT chr2 60453278 60453299 60453295 60453300 +
tggaagggggaaggcaatggtg

SEQ ID NO: 193895 - DNA, 22 bp, Artificial Sequence
  Synthetic oligonucleotide; TTT chr2 60453279 60453300 60453296 60453301 +
ggaagggggaaggcaatggtga

SEQ ID NO: 193896 - DNA, 22 bp, Artificial Sequence
  Synthetic oligonucleotide; TTG chr2 60453280 60453301 60453297 60453302 +
gaagggggaaggcaatggtgaa

SEQ ID NO: 193897 - DNA, 22 bp, Artificial Sequence
  Synthetic oligonucleotide; TTA chr2 60453321 60453342 60453338 60453343 +
ttttcctccggggttcctccct

SEQ ID NO: 193898 - DNA, 22 bp, Artificial Sequence
  Synthetic oligonucleotide; TTT chr2 60453324 60453345 60453341 60453346 +
tcctccggggttcctcccttgc

SEQ ID NO: 193899 - DNA, 22 bp, Artificial Sequence
  Synthetic oligonucleotide; TTT chr2 60453325 60453346 60453342 60453347 +
cctccggggttcctcccttgct

SEQ ID NO: 193900 - DNA, 22 bp, Artificial Sequence
  Synthetic oligonucleotide; TTC chr2 60453326 60453347 60453343 60453348 +
ctccggggttcctcccttgctg

SEQ ID NO: 193901 - DNA, 22 bp, Artificial Sequence
  Synthetic oligonucleotide; CTC chr2 60453329 60453350 60453346 60453351 +
cggggttcctcccttgctgtgg

SEQ ID NO: 193902 - DNA, 22 bp, Artificial Sequence
  Synthetic oligonucleotide; TTC chr2 60453337 60453358 60453354 60453359 +
ctcccttgctgtggacattgac

SEQ ID NO: 193903 - DNA, 22 bp, Artificial Sequence
  Synthetic oligonucleotide; CTC chr2 60453340 60453361 60453357 60453362 +
ccttgctgtggacattgacttg

SEQ ID NO: 193904 - DNA, 22 bp, Artificial Sequence
  Synthetic oligonucleotide; CTT chr2 60453344 60453365 60453361 60453366 +
gctgtggacattgacttgaagc

SEQ ID NO: 193905 - DNA, 22 bp, Artificial Sequence
  Synthetic oligonucleotide; TTG chr2 60453345 60453366 60453362 60453367 +
ctgtggacattgacttgaagca

SEQ ID NO: 193906 - DNA, 22 bp, Artificial Sequence
  Synthetic oligonucleotide; CTG chr2 60453348 60453369 60453365 60453370 +
tggacattgacttgaagcagca

SEQ ID NO: 193907 - DNA, 22 bp, Artificial Sequence
  Synthetic oligonucleotide; TTG chr2 60453357 60453378 60453374 60453379 +
acttgaagcagcagaactggga

SEQ ID NO: 193908 - DNA, 22 bp, Artificial Sequence
  Synthetic oligonucleotide; CTT chr2 60453361 60453382 60453378 60453383 +
gaagcagcagaactgggagtcc

SEQ ID NO: 193909 - DNA, 22 bp, Artificial Sequence
  Synthetic oligonucleotide; TTG chr2 60453362 60453383 60453379 60453384 +
aagcagcagaactgggagtccg

SEQ ID NO: 193910 - DNA, 22 bp, Artificial Sequence
  Synthetic oligonucleotide; CTG chr2 60453376 60453397 60453393 60453398 +
ggagtccggatgtgccgaggaa

SEQ ID NO: 193911 - DNA, 22 bp, Artificial Sequence
  Synthetic oligonucleotide; CTA chr2 60453406 60453427 60453423 60453428 +
ccactgtggcattccaggcctc

SEQ ID NO: 193912 - DNA, 22 bp, Artificial Sequence
  Synthetic oligonucleotide; CTG chr2 60453412 60453433 60453429 60453434 +
tggcattccaggcctcgttgcc

SEQ ID NO: 193913 - DNA, 22 bp, Artificial Sequence
  Synthetic oligonucleotide; TTC chr2 60453420 60453441 60453437 60453442 +
caggcctcgttgccatggcgac

SEQ ID NO: 193914 - DNA, 22 bp, Artificial Sequence
  Synthetic oligonucleotide; CTC chr2 60453428 60453449 60453445 60453450 +
gttgccatggcgacccgaagca

SEQ ID NO: 193915 - DNA, 22 bp, Artificial Sequence
  Synthetic oligonucleotide; TTG chr2 60453432 60453453 60453449 60453454 +
ccatggcgacccgaagcagggg

SEQ ID NO: 193916 - DNA, 22 bp, Artificial Sequence
  Synthetic oligonucleotide; CTG chr2 60453458 60453479 60453475 60453480 +
gggcctcctctcccctgacttg

SEQ ID NO: 193917 - DNA, 22 bp, Artificial Sequence
  Synthetic oligonucleotide; CTC chr2 60453465 60453486 60453482 60453487 +
ctctcccctgacttggcgccgc

SEQ ID NO: 193918 - DNA, 22 bp, Artificial Sequence
  Synthetic oligonucleotide; CTC chr2 60453468 60453489 60453485 60453490 +
tcccctgacttggcgccgcagg

SEQ ID NO: 193919 - DNA, 22 bp, Artificial Sequence
  Synthetic oligonucleotide; CTC chr2 60453470 60453491 60453487 60453492 +
ccctgacttggcgccgcaggag

SEQ ID NO: 193920 - DNA, 22 bp, Artificial Sequence
  Synthetic oligonucleotide; CTG chr2 60453475 60453496 60453492 60453497 +
acttggcgccgcaggaggcccg

SEQ ID NO: 193921 - DNA, 22 bp, Artificial Sequence
  Synthetic oligonucleotide; CTT chr2 60453479 60453500 60453496 60453501 +
ggcgccgcaggaggcccggggt

SEQ ID NO: 193922 - DNA, 22 bp, Artificial Sequence
  Synthetic oligonucleotide; TTG chr2 60453480 60453501 60453497 60453502 +
gcgccgcaggaggcccggggtc

SEQ ID NO: 193923 - DNA, 22 bp, Artificial Sequence
  Synthetic oligonucleotide; CTG chr2 60453504 60453525 60453521 60453526 +
gatctcagctgctctcacgcat

SEQ ID NO: 193924 - DNA, 22 bp, Artificial Sequence
  Synthetic oligonucleotide; CTC chr2 60453510 60453531 60453527 60453532 +
agctgctctcacgcatcccacc

SEQ ID NO: 193925 - DNA, 22 bp, Artificial Sequence
  Synthetic oligonucleotide; CTG chr2 60453515 60453536 60453532 60453537 +
ctctcacgcatcccacccctga

SEQ ID NO: 193926 - DNA, 22 bp, Artificial Sequence
  Synthetic oligonucleotide; CTC chr2 60453518 60453539 60453535 60453540 +
tcacgcatcccacccctgagca

SEQ ID NO: 193927 - DNA, 22 bp, Artificial Sequence
  Synthetic oligonucleotide; CTC chr2 60453520 60453541 60453537 60453542 +
acgcatcccacccctgagcaga

SEQ ID NO: 193928 - DNA, 22 bp, Artificial Sequence
  Synthetic oligonucleotide; CTG chr2 60453536 60453557 60453553 60453558 +
agcagagcagcggagacctggg

SEQ ID NO: 193929 - DNA, 22 bp, Artificial Sequence
  Synthetic oligonucleotide; CTG chr2 60453556 60453577 60453573 60453578 +
ggctgaggggcatgctgcgtcc

SEQ ID NO: 193930 - DNA, 22 bp, Artificial Sequence
  Synthetic oligonucleotide; CTG chr2 60453561 60453582 60453578 60453583 +
aggggcatgctgcgtccaggtg

SEQ ID NO: 193931 - DNA, 22 bp, Artificial Sequence
  Synthetic oligonucleotide; CTG chr2 60453573 60453594 60453590 60453595 +
cgtccaggtgggttctggggaa

SEQ ID NO: 193932 - DNA, 22 bp, Artificial Sequence
  Synthetic oligonucleotide; TTC chr2 60453588 60453609 60453605 60453610 +
tggggaatcccattcccagtcc

SEQ ID NO: 193933 - DNA, 22 bp, Artificial Sequence
  Synthetic oligonucleotide; CTG chr2 60453590 60453611 60453607 60453612 +
gggaatcccattcccagtccag

SEQ ID NO: 193934 - DNA, 22 bp, Artificial Sequence
  Synthetic oligonucleotide; TTC chr2 60453603 60453624 60453620 60453625 +
ccagtccagcgctaagtcactg

SEQ ID NO: 193935 - DNA, 22 bp, Artificial Sequence
  Synthetic oligonucleotide; CTA chr2 60453617 60453638 60453634 60453639 +
agtcactgtcgtcgaggcccct

SEQ ID NO: 193936 - DNA, 22 bp, Artificial Sequence
  Synthetic oligonucleotide; CTG chr2 60453625 60453646 60453642 60453647 +
tcgtcgaggcccctttagctga

SEQ ID NO: 193937 - DNA, 22 bp, Artificial Sequence
  Synthetic oligonucleotide; CTT chr2 60453640 60453661 60453657 60453662 +
tagctgataccccaatcaaacc

SEQ ID NO: 193938 - DNA, 22 bp, Artificial Sequence
  Synthetic oligonucleotide; TTT chr2 60453641 60453662 60453658 60453663 +
agctgataccccaatcaaaccc

SEQ ID NO: 193939 - DNA, 22 bp, Artificial Sequence
  Synthetic oligonucleotide; TTA chr2 60453642 60453663 60453659 60453664 +
gctgataccccaatcaaaccct

SEQ ID NO: 193940 - DNA, 22 bp, Artificial Sequence
  Synthetic oligonucleotide; CTG chr2 60453646 60453667 60453663 60453668 +
ataccccaatcaaaccctttcg

SEQ ID NO: 193941 - DNA, 22 bp, Artificial Sequence
  Synthetic oligonucleotide; CTT chr2 60453665 60453686 60453682 60453687 +
tcgtccaacctgctaccaatat

SEQ ID NO: 193942 - DNA, 22 bp, Artificial Sequence
  Synthetic oligonucleotide; TTT chr2 60453666 60453687 60453683 60453688 +
cgtccaacctgctaccaatatt

SEQ ID NO: 193943 - DNA, 22 bp, Artificial Sequence
  Synthetic oligonucleotide; TTC chr2 60453667 60453688 60453684 60453689 +
gtccaacctgctaccaatattc

SEQ ID NO: 193944 - DNA, 22 bp, Artificial Sequence
  Synthetic oligonucleotide; CTG chr2 60453677 60453698 60453694 60453699 +
ctaccaatattcaaattctaat

SEQ ID NO: 193945 - DNA, 22 bp, Artificial Sequence
  Synthetic oligonucleotide; CTA chr2 60453680 60453701 60453697 60453702 +
ccaatattcaaattctaataga

SEQ ID NO: 193946 - DNA, 22 bp, Artificial Sequence
  Synthetic oligonucleotide; TTC chr2 60453689 60453710 60453706 60453711 +
aaattctaatagacaaagtata

SEQ ID NO: 193947 - DNA, 22 bp, Artificial Sequence
  Synthetic oligonucleotide; TTC chr2 60453695 60453716 60453712 60453717 +
taatagacaaagtatatcatgg

SEQ ID NO: 193948 - DNA, 22 bp, Artificial Sequence
  Synthetic oligonucleotide; CTA chr2 60453697 60453718 60453714 60453719 +
atagacaaagtatatcatgggc

SEQ ID NO: 193949 - DNA, 22 bp, Artificial Sequence
  Synthetic oligonucleotide; TTC chr2 60453732 60453753 60453749 60453754 +
acagctatttaaaagcacagcc

SEQ ID NO: 193950 - DNA, 22 bp, Artificial Sequence
  Synthetic oligonucleotide; CTA chr2 60453739 60453760 60453756 60453761 +
tttaaaagcacagcccccctat

SEQ ID NO: 193951 - DNA, 22 bp, Artificial Sequence
  Synthetic oligonucleotide; TTT chr2 60453742 60453763 60453759 60453764 +
aaaagcacagcccccctatggg

SEQ ID NO: 193952 - DNA, 22 bp, Artificial Sequence
  Synthetic oligonucleotide; TTA chr2 60453743 60453764 60453760 60453765 +
aaagcacagcccccctatgggt

SEQ ID NO: 193953 - DNA, 22 bp, Artificial Sequence
  Synthetic oligonucleotide; CTA chr2 60453760 60453781 60453777 60453782 +
tgggtttaggggctcccgcttt

SEQ ID NO: 193954 - DNA, 22 bp, Artificial Sequence
  Synthetic oligonucleotide; TTT chr2 60453767 60453788 60453784 60453789 +
aggggctcccgctttagaggat

SEQ ID NO: 193955 - DNA, 22 bp, Artificial Sequence
  Synthetic oligonucleotide; TTA chr2 60453768 60453789 60453785 60453790 +
ggggctcccgctttagaggata

SEQ ID NO: 193956 - DNA, 22 bp, Artificial Sequence
  Synthetic oligonucleotide; CTC chr2 60453775 60453796 60453792 60453797 +
ccgctttagaggatacttgggg

SEQ ID NO: 193957 - DNA, 22 bp, Artificial Sequence
  Synthetic oligonucleotide; CTT chr2 60453781 60453802 60453798 60453803 +
tagaggatacttggggaaatgg

SEQ ID NO: 193958 - DNA, 22 bp, Artificial Sequence
  Synthetic oligonucleotide; TTT chr2 60453782 60453803 60453799 60453804 +
agaggatacttggggaaatggc

SEQ ID NO: 193959 - DNA, 22 bp, Artificial Sequence
  Synthetic oligonucleotide; TTA chr2 60453783 60453804 60453800 60453805 +
gaggatacttggggaaatggct

SEQ ID NO: 193960 - DNA, 22 bp, Artificial Sequence
  Synthetic oligonucleotide; CTT chr2 60453793 60453814 60453810 60453815 +
ggggaaatggcttaatttgcct

SEQ ID NO: 193961 - DNA, 22 bp, Artificial Sequence
  Synthetic oligonucleotide; TTG chr2 60453794 60453815 60453811 60453816 +
gggaaatggcttaatttgcctt

SEQ ID NO: 193962 - DNA, 22 bp, Artificial Sequence
  Synthetic oligonucleotide; CTT chr2 60453806 60453827 60453823 60453828 +
aatttgccttttctaccatccc

SEQ ID NO: 193963 - DNA, 22 bp, Artificial Sequence
  Synthetic oligonucleotide; TTA chr2 60453807 60453828 60453824 60453829 +
atttgccttttctaccatccct

SEQ ID NO: 193964 - DNA, 22 bp, Artificial Sequence
  Synthetic oligonucleotide; TTT chr2 60453811 60453832 60453828 60453833 +
gccttttctaccatccctatga

SEQ ID NO: 193965 - DNA, 22 bp, Artificial Sequence
  Synthetic oligonucleotide; TTG chr2 60453812 60453833 60453829 60453834 +
ccttttctaccatccctatgaa

SEQ ID NO: 193966 - DNA, 22 bp, Artificial Sequence
  Synthetic oligonucleotide; CTT chr2 60453816 60453837 60453833 60453838 +
ttctaccatccctatgaaagat

SEQ ID NO: 193967 - DNA, 22 bp, Artificial Sequence
  Synthetic oligonucleotide; TTT chr2 60453817 60453838 60453834 60453839 +
tctaccatccctatgaaagatc

SEQ ID NO: 193968 - DNA, 22 bp, Artificial Sequence
  Synthetic oligonucleotide; TTT chr2 60453818 60453839 60453835 60453840 +
ctaccatccctatgaaagatct

SEQ ID NO: 193969 - DNA, 22 bp, Artificial Sequence
  Synthetic oligonucleotide; TTC chr2 60453819 60453840 60453836 60453841 +
taccatccctatgaaagatctg

SEQ ID NO: 193970 - DNA, 22 bp, Artificial Sequence
  Synthetic oligonucleotide; CTA chr2 60453821 60453842 60453838 60453843 +
ccatccctatgaaagatctgat

SEQ ID NO: 193971 - DNA, 22 bp, Artificial Sequence
  Synthetic oligonucleotide; CTA chr2 60453830 60453851 60453847 60453852 +
tgaaagatctgatacacgtgct

SEQ ID NO: 193972 - DNA, 22 bp, Artificial Sequence
  Synthetic oligonucleotide; CTG chr2 60453841 60453862 60453858 60453863 +
atacacgtgctcccttgaaata

SEQ ID NO: 193973 - DNA, 22 bp, Artificial Sequence
  Synthetic oligonucleotide; CTC chr2 60453853 60453874 60453870 60453875 +
ccttgaaatagtttttgccact

SEQ ID NO: 193974 - DNA, 22 bp, Artificial Sequence
  Synthetic oligonucleotide; CTT chr2 60453857 60453878 60453874 60453879 +
gaaatagtttttgccactttac

SEQ ID NO: 193975 - DNA, 22 bp, Artificial Sequence
  Synthetic oligonucleotide; TTG chr2 60453858 60453879 60453875 60453880 +
aaatagtttttgccactttaca

SEQ ID NO: 193976 - DNA, 22 bp, Artificial Sequence
  Synthetic oligonucleotide; TTT chr2 60453867 60453888 60453884 60453889 +
ttgccactttacagaaaggaaa

SEQ ID NO: 193977 - DNA, 22 bp, Artificial Sequence
  Synthetic oligonucleotide; TTT chr2 60453868 60453889 60453885 60453890 +
tgccactttacagaaaggaaaa

SEQ ID NO: 193978 - DNA, 22 bp, Artificial Sequence
  Synthetic oligonucleotide; TTT chr2 60453869 60453890 60453886 60453891 +
gccactttacagaaaggaaaaa

SEQ ID NO: 193979 - DNA, 22 bp, Artificial Sequence
  Synthetic oligonucleotide; TTG chr2 60453870 60453891 60453887 60453892 +
ccactttacagaaaggaaaaac

SEQ ID NO: 193980 - DNA, 22 bp, Artificial Sequence
  Synthetic oligonucleotide; CTT chr2 60453876 60453897 60453893 60453898 +
tacagaaaggaaaaacgtattt

SEQ ID NO: 193981 - DNA, 22 bp, Artificial Sequence
  Synthetic oligonucleotide; TTT chr2 60453877 60453898 60453894 60453899 +
acagaaaggaaaaacgtatttg

SEQ ID NO: 193982 - DNA, 22 bp, Artificial Sequence
  Synthetic oligonucleotide; TTA chr2 60453878 60453899 60453895 60453900 +
cagaaaggaaaaacgtatttgg

SEQ ID NO: 193983 - DNA, 22 bp, Artificial Sequence
  Synthetic oligonucleotide; TTT chr2 60453898 60453919 60453915 60453920 +
ggatcaaccatcgagctgtgtt

SEQ ID NO: 193984 - DNA, 22 bp, Artificial Sequence
  Synthetic oligonucleotide; TTG chr2 60453899 60453920 60453916 60453921 +
gatcaaccatcgagctgtgttc

SEQ ID NO: 193985 - DNA, 22 bp, Artificial Sequence
  Synthetic oligonucleotide; CTG chr2 60453916 60453937 60453933 60453938 +
tgttcagccaagtttaggttct

SEQ ID NO: 193986 - DNA, 22 bp, Artificial Sequence
  Synthetic oligonucleotide; TTC chr2 60453921 60453942 60453938 60453943 +
agccaagtttaggttctcaagt

SEQ ID NO: 193987 - DNA, 22 bp, Artificial Sequence
  Synthetic oligonucleotide; TTT chr2 60453931 60453952 60453948 60453953 +
aggttctcaagtacaatgaccc

SEQ ID NO: 193988 - DNA, 22 bp, Artificial Sequence
  Synthetic oligonucleotide; TTA chr2 60453932 60453953 60453949 60453954 +
ggttctcaagtacaatgacccg

SEQ ID NO: 193989 - DNA, 22 bp, Artificial Sequence
  Synthetic oligonucleotide; TTC chr2 60453937 60453958 60453954 60453959 +
tcaagtacaatgacccgtgtga

SEQ ID NO: 193990 - DNA, 22 bp, Artificial Sequence
  Synthetic oligonucleotide; CTC chr2 60453939 60453960 60453956 60453961 +
aagtacaatgacccgtgtgaac

SEQ ID NO: 193991 - DNA, 22 bp, Artificial Sequence
  Synthetic oligonucleotide; CTG chr2 60453963 60453984 60453980 60453985 +
gattggtctctttcccatttgg

SEQ ID NO: 193992 - DNA, 22 bp, Artificial Sequence
  Synthetic oligonucleotide; TTG chr2 60453968 60453989 60453985 60453990 +
gtctctttcccatttggaaggg

SEQ ID NO: 193993 - DNA, 22 bp, Artificial Sequence
  Synthetic oligonucleotide; CTC chr2 60453973 60453994 60453990 60453995 +
tttcccatttggaagggaggaa

SEQ ID NO: 193994 - DNA, 22 bp, Artificial Sequence
  Synthetic oligonucleotide; CTT chr2 60453975 60453996 60453992 60453997 +
tcccatttggaagggaggaatt

SEQ ID NO: 193995 - DNA, 22 bp, Artificial Sequence
  Synthetic oligonucleotide; TTT chr2 60453976 60453997 60453993 60453998 +
cccatttggaagggaggaatta

SEQ ID NO: 193996 - DNA, 22 bp, Artificial Sequence
  Synthetic oligonucleotide; TTC chr2 60453977 60453998 60453994 60453999 +
ccatttggaagggaggaattaa

SEQ ID NO: 193997 - DNA, 22 bp, Artificial Sequence
  Synthetic oligonucleotide; TTT chr2 60453983 60454004 60454000 60454005 +
ggaagggaggaattaatggtat

SEQ ID NO: 193998 - DNA, 22 bp, Artificial Sequence
  Synthetic oligonucleotide; TTG chr2 60453984 60454005 60454001 60454006 +
gaagggaggaattaatggtatc

SEQ ID NO: 193999 - DNA, 22 bp, Artificial Sequence
  Synthetic oligonucleotide; TTA chr2 60453998 60454019 60454015 60454020 +
atggtatcccatgaccgtagat

SEQ ID NO: 194000 - DNA, 22 bp, Artificial Sequence
  Synthetic oligonucleotide; CTG chr2 60454027 60454048 60454044 60454049 +
ggaaatagagagagagaaagag

SEQ ID NO: 194001 - DNA, 22 bp, Artificial Sequence
  Synthetic oligonucleotide; TTC chr2 60454077 60454098 60454094 60454099 +
ccctaaaggctgagtcactggc

SEQ ID NO: 194002 - DNA, 22 bp, Artificial Sequence
  Synthetic oligonucleotide; CTA chr2 60454082 60454103 60454099 60454104 +
aaggctgagtcactggcctcgt

SEQ ID NO: 194003 - DNA, 22 bp, Artificial Sequence
  Synthetic oligonucleotide; CTG chr2 60454089 60454110 60454106 60454111 +
agtcactggcctcgtgctgtat

SEQ ID NO: 194004 - DNA, 22 bp, Artificial Sequence
  Synthetic oligonucleotide; CTG chr2 60454097 60454118 60454114 60454119 +
gcctcgtgctgtatgtagtaaa

SEQ ID NO: 194005 - DNA, 22 bp, Artificial Sequence
  Synthetic oligonucleotide; CTC chr2 60454102 60454123 60454119 60454124 +
gtgctgtatgtagtaaattaaa

SEQ ID NO: 194006 - DNA, 22 bp, Artificial Sequence
  Synthetic oligonucleotide; CTG chr2 60454108 60454129 60454125 60454130 +
tatgtagtaaattaaacagcgg

SEQ ID NO: 194007 - DNA, 22 bp, Artificial Sequence
  Synthetic oligonucleotide; TTA chr2 60454122 60454143 60454139 60454144 +
aacagcgggctaatgggataac

SEQ ID NO: 194008 - DNA, 22 bp, Artificial Sequence
  Synthetic oligonucleotide; CTA chr2 60454134 60454155 60454151 60454156 +
atgggataacgagatgccagca

SEQ ID NO: 194009 - DNA, 22 bp, Artificial Sequence
  Synthetic oligonucleotide; TTC chr2 60454194 60454215 60454211 60454216 +
atagctatagcagccctagagt

SEQ ID NO: 194010 - DNA, 22 bp, Artificial Sequence
  Synthetic oligonucleotide; CTA chr2 60454201 60454222 60454218 60454223 +
tagcagccctagagtaaataca

SEQ ID NO: 194011 - DNA, 22 bp, Artificial Sequence
  Synthetic oligonucleotide; CTA chr2 60454212 60454233 60454229 60454234 +
gagtaaatacacatcataccaa

SEQ ID NO: 194012 - DNA, 22 bp, Artificial Sequence
  Synthetic oligonucleotide; TTC chr2 60454237 60454258 60454254 60454259 +
cctctatgtgttctgatgtcca

SEQ ID NO: 194013 - DNA, 22 bp, Artificial Sequence
  Synthetic oligonucleotide; CTC chr2 60454241 60454262 60454258 60454263 +
tatgtgttctgatgtccatttc

SEQ ID NO: 194014 - DNA, 22 bp, Artificial Sequence
  Synthetic oligonucleotide; CTA chr2 60454243 60454264 60454260 60454265 +
tgtgttctgatgtccatttctc

SEQ ID NO: 194015 - DNA, 22 bp, Artificial Sequence
  Synthetic oligonucleotide; TTC chr2 60454250 60454271 60454267 60454272 +
tgatgtccatttctctaacaat

SEQ ID NO: 194016 - DNA, 22 bp, Artificial Sequence
  Synthetic oligonucleotide; CTG chr2 60454252 60454273 60454269 60454274 +
atgtccatttctctaacaatgg

SEQ ID NO: 194017 - DNA, 22 bp, Artificial Sequence
  Synthetic oligonucleotide; TTT chr2 60454262 60454283 60454279 60454284 +
ctctaacaatgggttcgtttat

SEQ ID NO: 194018 - DNA, 22 bp, Artificial Sequence
  Synthetic oligonucleotide; TTC chr2 60454263 60454284 60454280 60454285 +
tctaacaatgggttcgtttatt

SEQ ID NO: 194019 - DNA, 22 bp, Artificial Sequence
  Synthetic oligonucleotide; CTC chr2 60454265 60454286 60454282 60454287 +
taacaatgggttcgtttatttt

SEQ ID NO: 194020 - DNA, 22 bp, Artificial Sequence
  Synthetic oligonucleotide; CTA chr2 60454267 60454288 60454284 60454289 +
acaatgggttcgtttattttct

SEQ ID NO: 194021 - DNA, 22 bp, Artificial Sequence
  Synthetic oligonucleotide; TTC chr2 60454278 60454299 60454295 60454300 +
gtttattttctattgggaaata

SEQ ID NO: 194022 - DNA, 22 bp, Artificial Sequence
  Synthetic oligonucleotide; TTT chr2 60454282 60454303 60454299 60454304 +
attttctattgggaaatatgca

SEQ ID NO: 194023 - DNA, 22 bp, Artificial Sequence
  Synthetic oligonucleotide; TTA chr2 60454283 60454304 60454300 60454305 +
ttttctattgggaaatatgcag

SEQ ID NO: 194024 - DNA, 22 bp, Artificial Sequence
  Synthetic oligonucleotide; TTT chr2 60454286 60454307 60454303 60454308 +
tctattgggaaatatgcagggc

SEQ ID NO: 194025 - DNA, 22 bp, Artificial Sequence
  Synthetic oligonucleotide; TTT chr2 60454287 60454308 60454304 60454309 +
ctattgggaaatatgcagggct

SEQ ID NO: 194026 - DNA, 22 bp, Artificial Sequence
  Synthetic oligonucleotide; TTC chr2 60454288 60454309 60454305 60454310 +
tattgggaaatatgcagggctt

SEQ ID NO: 194027 - DNA, 22 bp, Artificial Sequence
  Synthetic oligonucleotide; CTA chr2 60454290 60454311 60454307 60454312 +
ttgggaaatatgcagggcttta

SEQ ID NO: 194028 - DNA, 22 bp, Artificial Sequence
  Synthetic oligonucleotide; TTG chr2 60454293 60454314 60454310 60454315 +
ggaaatatgcagggctttagga

SEQ ID NO: 194029 - DNA, 22 bp, Artificial Sequence
  Synthetic oligonucleotide; CTT chr2 60454310 60454331 60454327 60454332 +
taggagacaactaggaaaatct

SEQ ID NO: 194030 - DNA, 22 bp, Artificial Sequence
  Synthetic oligonucleotide; TTT chr2 60454311 60454332 60454328 60454333 +
aggagacaactaggaaaatctg

SEQ ID NO: 194031 - DNA, 22 bp, Artificial Sequence
  Synthetic oligonucleotide; TTA chr2 60454312 60454333 60454329 60454334 +
ggagacaactaggaaaatctgc

SEQ ID NO: 194032 - DNA, 22 bp, Artificial Sequence
  Synthetic oligonucleotide; CTA chr2 60454323 60454344 60454340 60454345 +
ggaaaatctgctagatggctca

SEQ ID NO: 194033 - DNA, 22 bp, Artificial Sequence
  Synthetic oligonucleotide; CTG chr2 60454333 60454354 60454350 60454355 +
ctagatggctcatgccttttaa

SEQ ID NO: 194034 - DNA, 22 bp, Artificial Sequence
  Synthetic oligonucleotide; CTA chr2 60454336 60454357 60454353 60454358 +
gatggctcatgccttttaaaag

SEQ ID NO: 194035 - DNA, 22 bp, Artificial Sequence
  Synthetic oligonucleotide; CTC chr2 60454344 60454365 60454361 60454366 +
atgccttttaaaagttagcagt

SEQ ID NO: 194036 - DNA, 22 bp, Artificial Sequence
  Synthetic oligonucleotide; CTT chr2 60454351 60454372 60454368 60454373 +
ttaaaagttagcagtcttttaa

SEQ ID NO: 194037 - DNA, 22 bp, Artificial Sequence
  Synthetic oligonucleotide; TTT chr2 60454352 60454373 60454369 60454374 +
taaaagttagcagtcttttaag

SEQ ID NO: 194038 - DNA, 22 bp, Artificial Sequence
  Synthetic oligonucleotide; TTT chr2 60454353 60454374 60454370 60454375 +
aaaagttagcagtcttttaaga

SEQ ID NO: 194039 - DNA, 22 bp, Artificial Sequence
  Synthetic oligonucleotide; TTA chr2 60454354 60454375 60454371 60454376 +
aaagttagcagtcttttaagaa

SEQ ID NO: 194040 - DNA, 22 bp, Artificial Sequence
  Synthetic oligonucleotide; TTA chr2 60454361 60454382 60454378 60454383 +
gcagtcttttaagaaacatttt

SEQ ID NO: 194041 - DNA, 22 bp, Artificial Sequence
  Synthetic oligonucleotide; CTT chr2 60454369 60454390 60454386 60454391 +
ttaagaaacatttttccaagca

SEQ ID NO: 194042 - DNA, 22 bp, Artificial Sequence
  Synthetic oligonucleotide; TTT chr2 60454370 60454391 60454387 60454392 +
taagaaacatttttccaagcag

SEQ ID NO: 194043 - DNA, 22 bp, Artificial Sequence
  Synthetic oligonucleotide; TTT chr2 60454371 60454392 60454388 60454393 +
aagaaacatttttccaagcagg

SEQ ID NO: 194044 - DNA, 22 bp, Artificial Sequence
  Synthetic oligonucleotide; TTA chr2 60454372 60454393 60454389 60454394 +
agaaacatttttccaagcaggt

SEQ ID NO: 194045 - DNA, 22 bp, Artificial Sequence
  Synthetic oligonucleotide; TTT chr2 60454382 60454403 60454399 60454404 +
ttccaagcaggttgagagaact

SEQ ID NO: 194046 - DNA, 22 bp, Artificial Sequence
  Synthetic oligonucleotide; TTT chr2 60454383 60454404 60454400 60454405 +
tccaagcaggttgagagaactc

SEQ ID NO: 194047 - DNA, 22 bp, Artificial Sequence
  Synthetic oligonucleotide; TTT chr2 60454384 60454405 60454401 60454406 +
ccaagcaggttgagagaactct

SEQ ID NO: 194048 - DNA, 22 bp, Artificial Sequence
  Synthetic oligonucleotide; TTC chr2 60454385 60454406 60454402 60454407 +
caagcaggttgagagaactctg

SEQ ID NO: 194049 - DNA, 22 bp, Artificial Sequence
  Synthetic oligonucleotide; TTG chr2 60454396 60454417 60454413 60454418 +
agagaactctgccaatcccatc

SEQ ID NO: 194050 - DNA, 22 bp, Artificial Sequence
  Synthetic oligonucleotide; CTC chr2 60454405 60454426 60454422 60454427 +
tgccaatcccatcctcatatcg

SEQ ID NO: 194051 - DNA, 22 bp, Artificial Sequence
  Synthetic oligonucleotide; CTG chr2 60454407 60454428 60454424 60454429 +
ccaatcccatcctcatatcggc

SEQ ID NO: 194052 - DNA, 22 bp, Artificial Sequence
  Synthetic oligonucleotide; CTC chr2 60454421 60454442 60454438 60454443 +
atatcggcaaagttcccacaat

SEQ ID NO: 194053 - DNA, 22 bp, Artificial Sequence
  Synthetic oligonucleotide; TTC chr2 60454436 60454457 60454453 60454458 +
ccacaattttttttttatggga

SEQ ID NO: 194054 - DNA, 22 bp, Artificial Sequence
  Synthetic oligonucleotide; TTT chr2 60454445 60454466 60454462 60454467 +
tttttttatgggaagttgtctg

SEQ ID NO: 194055 - DNA, 22 bp, Artificial Sequence
  Synthetic oligonucleotide; TTT chr2 60454446 60454467 60454463 60454468 +
ttttttatgggaagttgtctga

SEQ ID NO: 194056 - DNA, 22 bp, Artificial Sequence
  Synthetic oligonucleotide; TTT chr2 60454447 60454468 60454464 60454469 +
tttttatgggaagttgtctgaa

SEQ ID NO: 194057 - DNA, 22 bp, Artificial Sequence
  Synthetic oligonucleotide; TTT chr2 60454448 60454469 60454465 60454470 +
ttttatgggaagttgtctgaaa

SEQ ID NO: 194058 - DNA, 22 bp, Artificial Sequence
  Synthetic oligonucleotide; TTT chr2 60454449 60454470 60454466 60454471 +
tttatgggaagttgtctgaaaa

SEQ ID NO: 194059 - DNA, 22 bp, Artificial Sequence
  Synthetic oligonucleotide; TTT chr2 60454450 60454471 60454467 60454472 +
ttatgggaagttgtctgaaaaa

SEQ ID NO: 194060 - DNA, 22 bp, Artificial Sequence
  Synthetic oligonucleotide; TTT chr2 60454451 60454472 60454468 60454473 +
tatgggaagttgtctgaaaaaa

SEQ ID NO: 194061 - DNA, 22 bp, Artificial Sequence
  Synthetic oligonucleotide; TTT chr2 60454452 60454473 60454469 60454474 +
atgggaagttgtctgaaaaaaa

SEQ ID NO: 194062 - DNA, 22 bp, Artificial Sequence
  Synthetic oligonucleotide; TTA chr2 60454453 60454474 60454470 60454475 +
tgggaagttgtctgaaaaaaag

SEQ ID NO: 194063 - DNA, 22 bp, Artificial Sequence
  Synthetic oligonucleotide; TTG chr2 60454463 60454484 60454480 60454485 +
tctgaaaaaaagagaatgggat

SEQ ID NO: 194064 - DNA, 22 bp, Artificial Sequence
  Synthetic oligonucleotide; CTG chr2 60454467 60454488 60454484 60454489 +
aaaaaaagagaatgggatgggt

SEQ ID NO: 194065 - DNA, 22 bp, Artificial Sequence
  Synthetic oligonucleotide; TTC chr2 60454495 60454516 60454512 60454517 +
ctgaacacaccaggcccaggga

SEQ ID NO: 194066 - DNA, 22 bp, Artificial Sequence
  Synthetic oligonucleotide; CTG chr2 60454498 60454519 60454515 60454520 +
aacacaccaggcccagggacaa

SEQ ID NO: 194067 - DNA, 22 bp, Artificial Sequence
  Synthetic oligonucleotide; TTA chr2 60454556 60454577 60454573 60454578 +
caacacagtcataagaagtcat

SEQ ID NO: 194068 - DNA, 22 bp, Artificial Sequence
  Synthetic oligonucleotide; TTC chr2 60454582 60454603 60454599 60454604 +
atgtgtgtacggagggggaaaa

SEQ ID NO: 194069 - DNA, 22 bp, Artificial Sequence
  Synthetic oligonucleotide; CTT chr2 60454611 60454632 60454628 60454633 +
aaaacaagaaaacactgtattt

SEQ ID NO: 194070 - DNA, 22 bp, Artificial Sequence
  Synthetic oligonucleotide; TTA chr2 60454612 60454633 60454629 60454634 +
aaacaagaaaacactgtatttc

SEQ ID NO: 194071 - DNA, 22 bp, Artificial Sequence
  Synthetic oligonucleotide; CTG chr2 60454628 60454649 60454645 60454650 +
tatttcctccctcagtctctgt

SEQ ID NO: 194072 - DNA, 22 bp, Artificial Sequence
  Synthetic oligonucleotide; TTT chr2 60454633 60454654 60454650 60454655 +
cctccctcagtctctgtgagca

SEQ ID NO: 194073 - DNA, 22 bp, Artificial Sequence
  Synthetic oligonucleotide; TTC chr2 60454634 60454655 60454651 60454656 +
ctccctcagtctctgtgagcaa

SEQ ID NO: 194074 - DNA, 22 bp, Artificial Sequence
  Synthetic oligonucleotide; CTC chr2 60454637 60454658 60454654 60454659 +
cctcagtctctgtgagcaaagt

SEQ ID NO: 194075 - DNA, 22 bp, Artificial Sequence
  Synthetic oligonucleotide; CTC chr2 60454641 60454662 60454658 60454663 +
agtctctgtgagcaaagtacta

SEQ ID NO: 194076 - DNA, 22 bp, Artificial Sequence
  Synthetic oligonucleotide; CTC chr2 60454647 60454668 60454664 60454669 +
tgtgagcaaagtactacaagca

SEQ ID NO: 194077 - DNA, 22 bp, Artificial Sequence
  Synthetic oligonucleotide; CTG chr2 60454649 60454670 60454666 60454671 +
tgagcaaagtactacaagcagg

SEQ ID NO: 194078 - DNA, 22 bp, Artificial Sequence
  Synthetic oligonucleotide; CTA chr2 60454663 60454684 60454680 60454685 +
caagcaggagaggatggggcct

SEQ ID NO: 194079 - DNA, 22 bp, Artificial Sequence
  Synthetic oligonucleotide; CTG chr2 60454686 60454707 60454703 60454708 +
aggcttctcaactccttttcag

SEQ ID NO: 194080 - DNA, 22 bp, Artificial Sequence
  Synthetic oligonucleotide; CTT chr2 60454692 60454713 60454709 60454714 +
ctcaactccttttcaggaaggc

SEQ ID NO: 194081 - DNA, 22 bp, Artificial Sequence
  Synthetic oligonucleotide; TTC chr2 60454693 60454714 60454710 60454715 +
tcaactccttttcaggaaggcc

SEQ ID NO: 194082 - DNA, 22 bp, Artificial Sequence
  Synthetic oligonucleotide; CTC chr2 60454695 60454716 60454712 60454717 +
aactccttttcaggaaggcccg

SEQ ID NO: 194083 - DNA, 22 bp, Artificial Sequence
  Synthetic oligonucleotide; CTC chr2 60454700 60454721 60454717 60454722 +
cttttcaggaaggcccgaaata

SEQ ID NO: 194084 - DNA, 22 bp, Artificial Sequence
  Synthetic oligonucleotide; CTT chr2 60454703 60454724 60454720 60454725 +
ttcaggaaggcccgaaataatc

SEQ ID NO: 194085 - DNA, 22 bp, Artificial Sequence
  Synthetic oligonucleotide; TTT chr2 60454704 60454725 60454721 60454726 +
tcaggaaggcccgaaataatcc

SEQ ID NO: 194086 - DNA, 22 bp, Artificial Sequence
  Synthetic oligonucleotide; TTT chr2 60454705 60454726 60454722 60454727 +
caggaaggcccgaaataatccc

SEQ ID NO: 194087 - DNA, 22 bp, Artificial Sequence
  Synthetic oligonucleotide; TTC chr2 60454706 60454727 60454723 60454728 +
aggaaggcccgaaataatccca

SEQ ID NO: 194088 - DNA, 22 bp, Artificial Sequence
  Synthetic oligonucleotide; CTT chr2 60454735 60454756 60454752 60454757 +
tcagcaaactgtgtctgtgaat

SEQ ID NO: 194089 - DNA, 22 bp, Artificial Sequence
  Synthetic oligonucleotide; TTT chr2 60454736 60454757 60454753 60454758 +
cagcaaactgtgtctgtgaata

SEQ ID NO: 194090 - DNA, 22 bp, Artificial Sequence
  Synthetic oligonucleotide; TTC chr2 60454737 60454758 60454754 60454759 +
agcaaactgtgtctgtgaataa

SEQ ID NO: 194091 - DNA, 22 bp, Artificial Sequence
  Synthetic oligonucleotide; CTG chr2 60454746 60454767 60454763 60454768 +
tgtctgtgaataaaccacctca

SEQ ID NO: 194092 - DNA, 22 bp, Artificial Sequence
  Synthetic oligonucleotide; CTG chr2 60454752 60454773 60454769 60454774 +
tgaataaaccacctcatttcct

SEQ ID NO: 194093 - DNA, 22 bp, Artificial Sequence
  Synthetic oligonucleotide; CTC chr2 60454767 60454788 60454784 60454789 +
atttccttatttctccaattgg

SEQ ID NO: 194094 - DNA, 22 bp, Artificial Sequence
  Synthetic oligonucleotide; TTT chr2 60454771 60454792 60454788 60454793 +
ccttatttctccaattggaatt

SEQ ID NO: 194095 - DNA, 22 bp, Artificial Sequence
  Synthetic oligonucleotide; TTC chr2 60454772 60454793 60454789 60454794 +
cttatttctccaattggaatta

SEQ ID NO: 194096 - DNA, 22 bp, Artificial Sequence
  Synthetic oligonucleotide; CTT chr2 60454775 60454796 60454792 60454797 +
atttctccaattggaattatac

SEQ ID NO: 194097 - DNA, 22 bp, Artificial Sequence
  Synthetic oligonucleotide; TTA chr2 60454776 60454797 60454793 60454798 +
tttctccaattggaattatacc

SEQ ID NO: 194098 - DNA, 22 bp, Artificial Sequence
  Synthetic oligonucleotide; TTT chr2 60454779 60454800 60454796 60454801 +
ctccaattggaattatacctaa

SEQ ID NO: 194099 - DNA, 22 bp, Artificial Sequence
  Synthetic oligonucleotide; TTC chr2 60454780 60454801 60454797 60454802 +
tccaattggaattatacctaag

SEQ ID NO: 194100 - DNA, 22 bp, Artificial Sequence
  Synthetic oligonucleotide; CTC chr2 60454782 60454803 60454799 60454804 +
caattggaattatacctaagcc

SEQ ID NO: 194101 - DNA, 22 bp, Artificial Sequence
  Synthetic oligonucleotide; TTG chr2 60454788 60454809 60454805 60454810 +
gaattatacctaagccatctcc

SEQ ID NO: 194102 - DNA, 22 bp, Artificial Sequence
  Synthetic oligonucleotide; TTA chr2 60454794 60454815 60454811 60454816 +
tacctaagccatctcccgccac

SEQ ID NO: 194103 - DNA, 22 bp, Artificial Sequence
  Synthetic oligonucleotide; CTA chr2 60454800 60454821 60454817 60454822 +
agccatctcccgccacttcctt

SEQ ID NO: 194104 - DNA, 22 bp, Artificial Sequence
  Synthetic oligonucleotide; CTC chr2 60454809 60454830 60454826 60454831 +
ccgccacttcctttcaagttct

SEQ ID NO: 194105 - DNA, 22 bp, Artificial Sequence
  Synthetic oligonucleotide; CTT chr2 60454818 60454839 60454835 60454840 +
cctttcaagttctcacttctag

SEQ ID NO: 194106 - DNA, 22 bp, Artificial Sequence
  Synthetic oligonucleotide; TTC chr2 60454819 60454840 60454836 60454841 +
ctttcaagttctcacttctagc

SEQ ID NO: 194107 - DNA, 22 bp, Artificial Sequence
  Synthetic oligonucleotide; CTT chr2 60454822 60454843 60454839 60454844 +
tcaagttctcacttctagcatt

SEQ ID NO: 194108 - DNA, 22 bp, Artificial Sequence
  Synthetic oligonucleotide; TTT chr2 60454823 60454844 60454840 60454845 +
caagttctcacttctagcatta

SEQ ID NO: 194109 - DNA, 22 bp, Artificial Sequence
  Synthetic oligonucleotide; TTC chr2 60454824 60454845 60454841 60454846 +
aagttctcacttctagcattat

SEQ ID NO: 194110 - DNA, 22 bp, Artificial Sequence
  Synthetic oligonucleotide; TTC chr2 60454830 60454851 60454847 60454852 +
tcacttctagcattatgattat

SEQ ID NO: 194111 - DNA, 22 bp, Artificial Sequence
  Synthetic oligonucleotide; CTC chr2 60454832 60454853 60454849 60454854 +
acttctagcattatgattatat

SEQ ID NO: 194112 - DNA, 22 bp, Artificial Sequence
  Synthetic oligonucleotide; CTT chr2 60454836 60454857 60454853 60454858 +
ctagcattatgattatatacaa

SEQ ID NO: 194113 - DNA, 22 bp, Artificial Sequence
  Synthetic oligonucleotide; TTC chr2 60454837 60454858 60454854 60454859 +
tagcattatgattatatacaat

SEQ ID NO: 194114 - DNA, 22 bp, Artificial Sequence
  Synthetic oligonucleotide; CTA chr2 60454839 60454860 60454856 60454861 +
gcattatgattatatacaatat

SEQ ID NO: 194115 - DNA, 22 bp, Artificial Sequence
  Synthetic oligonucleotide; TTA chr2 60454845 60454866 60454862 60454867 +
tgattatatacaatatgtactt

SEQ ID NO: 194116 - DNA, 22 bp, Artificial Sequence
  Synthetic oligonucleotide; TTA chr2 60454851 60454872 60454868 60454873 +
tatacaatatgtacttattgca

SEQ ID NO: 194117 - DNA, 22 bp, Artificial Sequence
  Synthetic oligonucleotide; CTT chr2 60454867 60454888 60454884 60454889 +
attgcatatacaaaaatggtat

SEQ ID NO: 194118 - DNA, 22 bp, Artificial Sequence
  Synthetic oligonucleotide; TTA chr2 60454868 60454889 60454885 60454890 +
ttgcatatacaaaaatggtatt

SEQ ID NO: 194119 - DNA, 22 bp, Artificial Sequence
  Synthetic oligonucleotide; TTG chr2 60454871 60454892 60454888 60454893 +
catatacaaaaatggtatttaa

SEQ ID NO: 194120 - DNA, 22 bp, Artificial Sequence
  Synthetic oligonucleotide; TTT chr2 60454891 60454912 60454908 60454913 +
aaataaacagttctatatctac

SEQ ID NO: 194121 - DNA, 22 bp, Artificial Sequence
  Synthetic oligonucleotide; TTA chr2 60454892 60454913 60454909 60454914 +
aataaacagttctatatctaca

SEQ ID NO: 194122 - DNA, 22 bp, Artificial Sequence
  Synthetic oligonucleotide; TTC chr2 60454904 60454925 60454921 60454926 +
tatatctacagaatgccctggg

SEQ ID NO: 194123 - DNA, 22 bp, Artificial Sequence
  Synthetic oligonucleotide; CTA chr2 60454906 60454927 60454923 60454928 +
tatctacagaatgccctgggaa

SEQ ID NO: 194124 - DNA, 22 bp, Artificial Sequence
  Synthetic oligonucleotide; CTA chr2 60454912 60454933 60454929 60454934 +
cagaatgccctgggaaaaactc

SEQ ID NO: 194125 - DNA, 22 bp, Artificial Sequence
  Synthetic oligonucleotide; CTG chr2 60454924 60454945 60454941 60454946 +
ggaaaaactcaactacttcaca

SEQ ID NO: 194126 - DNA, 22 bp, Artificial Sequence
  Synthetic oligonucleotide; CTC chr2 60454934 60454955 60454951 60454956 +
aactacttcacactttctgcca

SEQ ID NO: 194127 - DNA, 22 bp, Artificial Sequence
  Synthetic oligonucleotide; CTA chr2 60454939 60454960 60454956 60454961 +
cttcacactttctgccatggcc

SEQ ID NO: 194128 - DNA, 22 bp, Artificial Sequence
  Synthetic oligonucleotide; CTT chr2 60454942 60454963 60454959 60454964 +
cacactttctgccatggccagt

SEQ ID NO: 194129 - DNA, 22 bp, Artificial Sequence
  Synthetic oligonucleotide; TTC chr2 60454943 60454964 60454960 60454965 +
acactttctgccatggccagtg

SEQ ID NO: 194130 - DNA, 22 bp, Artificial Sequence
  Synthetic oligonucleotide; CTT chr2 60454949 60454970 60454966 60454971 +
tctgccatggccagtgcaaatg

SEQ ID NO: 194131 - DNA, 22 bp, Artificial Sequence
  Synthetic oligonucleotide; TTT chr2 60454950 60454971 60454967 60454972 +
ctgccatggccagtgcaaatga

SEQ ID NO: 194132 - DNA, 22 bp, Artificial Sequence
  Synthetic oligonucleotide; TTC chr2 60454951 60454972 60454968 60454973 +
tgccatggccagtgcaaatgaa

SEQ ID NO: 194133 - DNA, 22 bp, Artificial Sequence
  Synthetic oligonucleotide; CTG chr2 60454953 60454974 60454970 60454975 +
ccatggccagtgcaaatgaaga

SEQ ID NO: 194134 - DNA, 22 bp, Artificial Sequence
  Synthetic oligonucleotide; CTG chr2 60454979 60455000 60454996 60455001 +
tgttcacctcacttcttagcaa

SEQ ID NO: 194135 - DNA, 22 bp, Artificial Sequence
  Synthetic oligonucleotide; TTC chr2 60454984 60455005 60455001 60455006 +
acctcacttcttagcaaccttt

SEQ ID NO: 194136 - DNA, 22 bp, Artificial Sequence
  Synthetic oligonucleotide; CTC chr2 60454989 60455010 60455006 60455011 +
acttcttagcaacctttgtaat

SEQ ID NO: 194137 - DNA, 22 bp, Artificial Sequence
  Synthetic oligonucleotide; CTT chr2 60454993 60455014 60455010 60455015 +
cttagcaacctttgtaatgtgt

SEQ ID NO: 194138 - DNA, 22 bp, Artificial Sequence
  Synthetic oligonucleotide; TTC chr2 60454994 60455015 60455011 60455016 +
ttagcaacctttgtaatgtgtt

SEQ ID NO: 194139 - DNA, 22 bp, Artificial Sequence
  Synthetic oligonucleotide; CTT chr2 60454996 60455017 60455013 60455018 +
agcaacctttgtaatgtgttgg

SEQ ID NO: 194140 - DNA, 22 bp, Artificial Sequence
  Synthetic oligonucleotide; TTA chr2 60454997 60455018 60455014 60455019 +
gcaacctttgtaatgtgttggt

SEQ ID NO: 194141 - DNA, 22 bp, Artificial Sequence
  Synthetic oligonucleotide; CTT chr2 60455005 60455026 60455022 60455027 +
tgtaatgtgttggttccagcct

SEQ ID NO: 194142 - DNA, 22 bp, Artificial Sequence
  Synthetic oligonucleotide; TTT chr2 60455006 60455027 60455023 60455028 +
gtaatgtgttggttccagcctt

SEQ ID NO: 194143 - DNA, 22 bp, Artificial Sequence
  Synthetic oligonucleotide; TTG chr2 60455007 60455028 60455024 60455029 +
taatgtgttggttccagccttt

SEQ ID NO: 194144 - DNA, 22 bp, Artificial Sequence
  Synthetic oligonucleotide; TTG chr2 60455017 60455038 60455034 60455039 +
gttccagcctttttgtaggtcc

SEQ ID NO: 194145 - DNA, 22 bp, Artificial Sequence
  Synthetic oligonucleotide; TTC chr2 60455021 60455042 60455038 60455043 +
cagcctttttgtaggtcctaaa

SEQ ID NO: 194146 - DNA, 22 bp, Artificial Sequence
  Synthetic oligonucleotide; CTT chr2 60455028 60455049 60455045 60455050 +
tttgtaggtcctaaacaaagag

SEQ ID NO: 194147 - DNA, 22 bp, Artificial Sequence
  Synthetic oligonucleotide; TTT chr2 60455029 60455050 60455046 60455051 +
ttgtaggtcctaaacaaagaga

SEQ ID NO: 194148 - DNA, 22 bp, Artificial Sequence
  Synthetic oligonucleotide; TTT chr2 60455030 60455051 60455047 60455052 +
tgtaggtcctaaacaaagagag

SEQ ID NO: 194149 - DNA, 22 bp, Artificial Sequence
  Synthetic oligonucleotide; TTT chr2 60455031 60455052 60455048 60455053 +
gtaggtcctaaacaaagagagg

SEQ ID NO: 194150 - DNA, 22 bp, Artificial Sequence
  Synthetic oligonucleotide; TTG chr2 60455032 60455053 60455049 60455054 +
taggtcctaaacaaagagagga

SEQ ID NO: 194151 - DNA, 22 bp, Artificial Sequence
  Synthetic oligonucleotide; CTA chr2 60455041 60455062 60455058 60455063 +
aacaaagagaggatagcaaatg

SEQ ID NO: 194152 - DNA, 22 bp, Artificial Sequence
  Synthetic oligonucleotide; TTC chr2 60455068 60455089 60455085 60455090 +
aggaaggaggtaatataggcac

SEQ ID NO: 194153 - DNA, 22 bp, Artificial Sequence
  Synthetic oligonucleotide; CTG chr2 60455092 60455113 60455109 60455114 +
gaagagtttctggtttaaaatc

SEQ ID NO: 194154 - DNA, 22 bp, Artificial Sequence
  Synthetic oligonucleotide; TTT chr2 60455101 60455122 60455118 60455123 +
ctggtttaaaatctgtgagaaa

SEQ ID NO: 194155 - DNA, 22 bp, Artificial Sequence
  Synthetic oligonucleotide; TTC chr2 60455102 60455123 60455119 60455124 +
tggtttaaaatctgtgagaaat

SEQ ID NO: 194156 - DNA, 22 bp, Artificial Sequence
  Synthetic oligonucleotide; CTG chr2 60455104 60455125 60455121 60455126 +
gtttaaaatctgtgagaaatag

SEQ ID NO: 194157 - DNA, 22 bp, Artificial Sequence
  Synthetic oligonucleotide; TTT chr2 60455108 60455129 60455125 60455130 +
aaaatctgtgagaaatagaatt

SEQ ID NO: 194158 - DNA, 22 bp, Artificial Sequence
  Synthetic oligonucleotide; TTA chr2 60455109 60455130 60455126 60455131 +
aaatctgtgagaaatagaattt

SEQ ID NO: 194159 - DNA, 22 bp, Artificial Sequence
  Synthetic oligonucleotide; CTG chr2 60455116 60455137 60455133 60455138 +
tgagaaatagaatttgcggtat

SEQ ID NO: 194160 - DNA, 22 bp, Artificial Sequence
  Synthetic oligonucleotide; TTT chr2 60455131 60455152 60455148 60455153 +
gcggtattcctgtttattaagt

SEQ ID NO: 194161 - DNA, 22 bp, Artificial Sequence
  Synthetic oligonucleotide; TTG chr2 60455132 60455153 60455149 60455154 +
cggtattcctgtttattaagtt

SEQ ID NO: 194162 - DNA, 22 bp, Artificial Sequence
  Synthetic oligonucleotide; TTC chr2 60455140 60455161 60455157 60455162 +
ctgtttattaagttgttctcaa

SEQ ID NO: 194163 - DNA, 22 bp, Artificial Sequence
  Synthetic oligonucleotide; CTG chr2 60455143 60455164 60455160 60455165 +
tttattaagttgttctcaaatg

SEQ ID NO: 194164 - DNA, 22 bp, Artificial Sequence
  Synthetic oligonucleotide; TTT chr2 60455146 60455167 60455163 60455168 +
attaagttgttctcaaatgaag

SEQ ID NO: 194165 - DNA, 22 bp, Artificial Sequence
  Synthetic oligonucleotide; TTA chr2 60455147 60455168 60455164 60455169 +
ttaagttgttctcaaatgaaga

SEQ ID NO: 194166 - DNA, 22 bp, Artificial Sequence
  Synthetic oligonucleotide; TTA chr2 60455150 60455171 60455167 60455172 +
agttgttctcaaatgaagatta

SEQ ID NO: 194167 - DNA, 22 bp, Artificial Sequence
  Synthetic oligonucleotide; TTG chr2 60455155 60455176 60455172 60455177 +
ttctcaaatgaagattaaaaag

SEQ ID NO: 194168 - DNA, 22 bp, Artificial Sequence
  Synthetic oligonucleotide; TTC chr2 60455158 60455179 60455175 60455180 +
tcaaatgaagattaaaaagaac

SEQ ID NO: 194169 - DNA, 22 bp, Artificial Sequence
  Synthetic oligonucleotide; CTC chr2 60455160 60455181 60455177 60455182 +
aaatgaagattaaaaagaacat

SEQ ID NO: 194170 - DNA, 22 bp, Artificial Sequence
  Synthetic oligonucleotide; TTA chr2 60455172 60455193 60455189 60455194 +
aaaagaacattttaagcatcag

SEQ ID NO: 194171 - DNA, 22 bp, Artificial Sequence
  Synthetic oligonucleotide; TTT chr2 60455184 60455205 60455201 60455206 +
taagcatcagttcaggtatgta

SEQ ID NO: 194172 - DNA, 22 bp, Artificial Sequence
  Synthetic oligonucleotide; TTT chr2 60455185 60455206 60455202 60455207 +
aagcatcagttcaggtatgtag

SEQ ID NO: 194173 - DNA, 22 bp, Artificial Sequence
  Synthetic oligonucleotide; TTA chr2 60455186 60455207 60455203 60455208 +
agcatcagttcaggtatgtaga

SEQ ID NO: 194174 - DNA, 22 bp, Artificial Sequence
  Synthetic oligonucleotide; TTC chr2 60455197 60455218 60455214 60455219 +
aggtatgtagagaacattccat

SEQ ID NO: 194175 - DNA, 22 bp, Artificial Sequence
  Synthetic oligonucleotide; TTC chr2 60455216 60455237 60455233 60455238 +
catcagcacgtcaagcctgtta

SEQ ID NO: 194176 - DNA, 22 bp, Artificial Sequence
  Synthetic oligonucleotide; CTG chr2 60455235 60455256 60455252 60455257 +
ttacaaaaacttacttgaggat

SEQ ID NO: 194177 - DNA, 22 bp, Artificial Sequence
  Synthetic oligonucleotide; TTA chr2 60455238 60455259 60455255 60455260 +
caaaaacttacttgaggatttt

SEQ ID NO: 194178 - DNA, 22 bp, Artificial Sequence
  Synthetic oligonucleotide; CTT chr2 60455247 60455268 60455264 60455269 +
acttgaggattttaagagacat

SEQ ID NO: 194179 - DNA, 22 bp, Artificial Sequence
  Synthetic oligonucleotide; TTA chr2 60455248 60455269 60455265 60455270 +
cttgaggattttaagagacatt

SEQ ID NO: 194180 - DNA, 22 bp, Artificial Sequence
  Synthetic oligonucleotide; CTT chr2 60455251 60455272 60455268 60455273 +
gaggattttaagagacattaat

SEQ ID NO: 194181 - DNA, 22 bp, Artificial Sequence
  Synthetic oligonucleotide; TTG chr2 60455252 60455273 60455269 60455274 +
aggattttaagagacattaatg

SEQ ID NO: 194182 - DNA, 22 bp, Artificial Sequence
  Synthetic oligonucleotide; TTT chr2 60455259 60455280 60455276 60455281 +
taagagacattaatgttcttag

SEQ ID NO: 194183 - DNA, 22 bp, Artificial Sequence
  Synthetic oligonucleotide; TTT chr2 60455260 60455281 60455277 60455282 +
aagagacattaatgttcttagt

SEQ ID NO: 194184 - DNA, 22 bp, Artificial Sequence
  Synthetic oligonucleotide; TTA chr2 60455261 60455282 60455278 60455283 +
agagacattaatgttcttagta

SEQ ID NO: 194185 - DNA, 22 bp, Artificial Sequence
  Synthetic oligonucleotide; TTA chr2 60455271 60455292 60455288 60455293 +
atgttcttagtagttcctcatt

SEQ ID NO: 194186 - DNA, 22 bp, Artificial Sequence
  Synthetic oligonucleotide; TTC chr2 60455277 60455298 60455294 60455299 +
ttagtagttcctcatttaaaaa

SEQ ID NO: 194187 - DNA, 22 bp, Artificial Sequence
  Synthetic oligonucleotide; CTT chr2 60455279 60455300 60455296 60455301 +
agtagttcctcatttaaaaaaa

SEQ ID NO: 194188 - DNA, 22 bp, Artificial Sequence
  Synthetic oligonucleotide; TTA chr2 60455280 60455301 60455297 60455302 +
gtagttcctcatttaaaaaaaa

SEQ ID NO: 194189 - DNA, 22 bp, Artificial Sequence
  Synthetic oligonucleotide; TTC chr2 60455287 60455308 60455304 60455309 +
ctcatttaaaaaaaaaagatca

SEQ ID NO: 194190 - DNA, 22 bp, Artificial Sequence
  Synthetic oligonucleotide; CTC chr2 60455290 60455311 60455307 60455312 +
atttaaaaaaaaaagatcatga

SEQ ID NO: 194191 - DNA, 22 bp, Artificial Sequence
  Synthetic oligonucleotide; TTT chr2 60455294 60455315 60455311 60455316 +
aaaaaaaaaagatcatgaattc

SEQ ID NO: 194192 - DNA, 22 bp, Artificial Sequence
  Synthetic oligonucleotide; TTA chr2 60455295 60455316 60455312 60455317 +
aaaaaaaaagatcatgaattca

SEQ ID NO: 194193 - DNA, 22 bp, Artificial Sequence
  Synthetic oligonucleotide; TTC chr2 60455316 60455337 60455333 60455338 +
atcttactattggaaatgtgca

SEQ ID NO: 194194 - DNA, 22 bp, Artificial Sequence
  Synthetic oligonucleotide; CTT chr2 60455321 60455342 60455338 60455343 +
actattggaaatgtgcatgtta

SEQ ID NO: 194195 - DNA, 22 bp, Artificial Sequence
  Synthetic oligonucleotide; TTA chr2 60455322 60455343 60455339 60455344 +
ctattggaaatgtgcatgttat

SEQ ID NO: 194196 - DNA, 22 bp, Artificial Sequence
  Synthetic oligonucleotide; CTA chr2 60455325 60455346 60455342 60455347 +
ttggaaatgtgcatgttatttt

SEQ ID NO: 194197 - DNA, 22 bp, Artificial Sequence
  Synthetic oligonucleotide; TTG chr2 60455328 60455349 60455345 60455350 +
gaaatgtgcatgttattttata

SEQ ID NO: 194198 - DNA, 22 bp, Artificial Sequence
  Synthetic oligonucleotide; TTA chr2 60455343 60455364 60455360 60455365 +
ttttatattaagattttaaatt

SEQ ID NO: 194199 - DNA, 22 bp, Artificial Sequence
  Synthetic oligonucleotide; TTT chr2 60455346 60455367 60455363 60455368 +
tatattaagattttaaatttta

SEQ ID NO: 194200 - DNA, 22 bp, Artificial Sequence
  Synthetic oligonucleotide; TTT chr2 60455347 60455368 60455364 60455369 +
atattaagattttaaattttag

SEQ ID NO: 194201 - DNA, 22 bp, Artificial Sequence
  Synthetic oligonucleotide; TTA chr2 60455348 60455369 60455365 60455370 +
tattaagattttaaattttaga

SEQ ID NO: 194202 - DNA, 22 bp, Artificial Sequence
  Synthetic oligonucleotide; TTA chr2 60455353 60455374 60455370 60455375 +
agattttaaattttagagttct

SEQ ID NO: 194203 - DNA, 22 bp, Artificial Sequence
  Synthetic oligonucleotide; TTT chr2 60455359 60455380 60455376 60455381 +
taaattttagagttctggatac

SEQ ID NO: 194204 - DNA, 22 bp, Artificial Sequence
  Synthetic oligonucleotide; TTT chr2 60455360 60455381 60455377 60455382 +
aaattttagagttctggataca

SEQ ID NO: 194205 - DNA, 22 bp, Artificial Sequence
  Synthetic oligonucleotide; TTA chr2 60455361 60455382 60455378 60455383 +
aattttagagttctggatacaa

SEQ ID NO: 194206 - DNA, 22 bp, Artificial Sequence
  Synthetic oligonucleotide; TTT chr2 60455366 60455387 60455383 60455388 +
tagagttctggatacaaaatat

SEQ ID NO: 194207 - DNA, 22 bp, Artificial Sequence
  Synthetic oligonucleotide; TTT chr2 60455367 60455388 60455384 60455389 +
agagttctggatacaaaatatc

SEQ ID NO: 194208 - DNA, 22 bp, Artificial Sequence
  Synthetic oligonucleotide; TTA chr2 60455368 60455389 60455385 60455390 +
gagttctggatacaaaatatca

SEQ ID NO: 194209 - DNA, 22 bp, Artificial Sequence
  Synthetic oligonucleotide; TTC chr2 60455374 60455395 60455391 60455396 +
tggatacaaaatatcatttata

SEQ ID NO: 194210 - DNA, 22 bp, Artificial Sequence
  Synthetic oligonucleotide; CTG chr2 60455376 60455397 60455393 60455398 +
gatacaaaatatcatttataag

SEQ ID NO: 194211 - DNA, 22 bp, Artificial Sequence
  Synthetic oligonucleotide; TTT chr2 60455393 60455414 60455410 60455415 +
ataagtgatatcatgttggcta

SEQ ID NO: 194212 - DNA, 22 bp, Artificial Sequence
  Synthetic oligonucleotide; TTA chr2 60455394 60455415 60455411 60455416 +
taagtgatatcatgttggctag

SEQ ID NO: 194213 - DNA, 22 bp, Artificial Sequence
  Synthetic oligonucleotide; TTG chr2 60455411 60455432 60455428 60455433 +
gctaggttctcatgtttctatt

SEQ ID NO: 194214 - DNA, 22 bp, Artificial Sequence
  Synthetic oligonucleotide; CTA chr2 60455415 60455436 60455432 60455437 +
ggttctcatgtttctattgttc

SEQ ID NO: 194215 - DNA, 22 bp, Artificial Sequence
  Synthetic oligonucleotide; TTC chr2 60455420 60455441 60455437 60455442 +
tcatgtttctattgttcatcag

SEQ ID NO: 194216 - DNA, 22 bp, Artificial Sequence
  Synthetic oligonucleotide; CTC chr2 60455422 60455443 60455439 60455444 +
atgtttctattgttcatcagct

SEQ ID NO: 194217 - DNA, 22 bp, Artificial Sequence
  Synthetic oligonucleotide; TTT chr2 60455428 60455449 60455445 60455450 +
ctattgttcatcagcttcagaa

SEQ ID NO: 194218 - DNA, 22 bp, Artificial Sequence
  Synthetic oligonucleotide; TTC chr2 60455429 60455450 60455446 60455451 +
tattgttcatcagcttcagaaa

SEQ ID NO: 194219 - DNA, 22 bp, Artificial Sequence
  Synthetic oligonucleotide; CTA chr2 60455431 60455452 60455448 60455453 +
ttgttcatcagcttcagaaata

SEQ ID NO: 194220 - DNA, 22 bp, Artificial Sequence
  Synthetic oligonucleotide; TTG chr2 60455434 60455455 60455451 60455456 +
ttcatcagcttcagaaataata

SEQ ID NO: 194221 - DNA, 22 bp, Artificial Sequence
  Synthetic oligonucleotide; TTC chr2 60455437 60455458 60455454 60455459 +
atcagcttcagaaataatattt

SEQ ID NO: 194222 - DNA, 22 bp, Artificial Sequence
  Synthetic oligonucleotide; CTT chr2 60455445 60455466 60455462 60455467 +
cagaaataatattttatcagaa

SEQ ID NO: 194223 - DNA, 22 bp, Artificial Sequence
  Synthetic oligonucleotide; TTC chr2 60455446 60455467 60455463 60455468 +
agaaataatattttatcagaag

SEQ ID NO: 194224 - DNA, 22 bp, Artificial Sequence
  Synthetic oligonucleotide; TTT chr2 60455459 60455480 60455476 60455481 +
tatcagaaggcgtcaataagtc

SEQ ID NO: 194225 - DNA, 22 bp, Artificial Sequence
  Synthetic oligonucleotide; TTT chr2 60455460 60455481 60455477 60455482 +
atcagaaggcgtcaataagtca

SEQ ID NO: 194226 - DNA, 22 bp, Artificial Sequence
  Synthetic oligonucleotide; TTA chr2 60455461 60455482 60455478 60455483 +
tcagaaggcgtcaataagtcag

SEQ ID NO: 194227 - DNA, 22 bp, Artificial Sequence
  Synthetic oligonucleotide; CTA chr2 60455490 60455511 60455507 60455512 +
agtaacctgaagaacccatctc

SEQ ID NO: 194228 - DNA, 22 bp, Artificial Sequence
  Synthetic oligonucleotide; CTG chr2 60455499 60455520 60455516 60455521 +
aagaacccatctcccagtaaat

SEQ ID NO: 194229 - DNA, 22 bp, Artificial Sequence
  Synthetic oligonucleotide; CTC chr2 60455512 60455533 60455529 60455534 +
ccagtaaatttatttaactttg

SEQ ID NO: 194230 - DNA, 22 bp, Artificial Sequence
  Synthetic oligonucleotide; TTT chr2 60455523 60455544 60455540 60455545 +
atttaactttgggaccatgtaa

SEQ ID NO: 194231 - DNA, 22 bp, Artificial Sequence
  Synthetic oligonucleotide; TTA chr2 60455524 60455545 60455541 60455546 +
tttaactttgggaccatgtaaa

SEQ ID NO: 194232 - DNA, 22 bp, Artificial Sequence
  Synthetic oligonucleotide; TTT chr2 60455527 60455548 60455544 60455549 +
aactttgggaccatgtaaatca

SEQ ID NO: 194233 - DNA, 22 bp, Artificial Sequence
  Synthetic oligonucleotide; TTA chr2 60455528 60455549 60455545 60455550 +
actttgggaccatgtaaatcaa

SEQ ID NO: 194234 - DNA, 22 bp, Artificial Sequence
  Synthetic oligonucleotide; CTT chr2 60455532 60455553 60455549 60455554 +
tgggaccatgtaaatcaaacat

SEQ ID NO: 194235 - DNA, 22 bp, Artificial Sequence
  Synthetic oligonucleotide; TTT chr2 60455533 60455554 60455550 60455555 +
gggaccatgtaaatcaaacata

SEQ ID NO: 194236 - DNA, 22 bp, Artificial Sequence
  Synthetic oligonucleotide; TTG chr2 60455534 60455555 60455551 60455556 +
ggaccatgtaaatcaaacataa

SEQ ID NO: 194237 - DNA, 22 bp, Artificial Sequence
  Synthetic oligonucleotide; CTG chr2 60455560 60455581 60455577 60455582 +
tgatttatcaccagatgtttgc

SEQ ID NO: 194238 - DNA, 22 bp, Artificial Sequence
  Synthetic oligonucleotide; TTT chr2 60455566 60455587 60455583 60455588 +
atcaccagatgtttgcactcct

SEQ ID NO: 194239 - DNA, 22 bp, Artificial Sequence
  Synthetic oligonucleotide; TTA chr2 60455567 60455588 60455584 60455589 +
tcaccagatgtttgcactcctc

SEQ ID NO: 194240 - DNA, 22 bp, Artificial Sequence
  Synthetic oligonucleotide; TTT chr2 60455580 60455601 60455597 60455602 +
gcactcctccccattccccatt

SEQ ID NO: 194241 - DNA, 22 bp, Artificial Sequence
  Synthetic oligonucleotide; TTG chr2 60455581 60455602 60455598 60455603 +
cactcctccccattccccattt

SEQ ID NO: 194242 - DNA, 22 bp, Artificial Sequence
  Synthetic oligonucleotide; CTC chr2 60455586 60455607 60455603 60455608 +
ctccccattccccatttgattt

SEQ ID NO: 194243 - DNA, 22 bp, Artificial Sequence
  Synthetic oligonucleotide; CTC chr2 60455589 60455610 60455606 60455611 +
cccattccccatttgatttaag

SEQ ID NO: 194244 - DNA, 22 bp, Artificial Sequence
  Synthetic oligonucleotide; TTC chr2 60455596 60455617 60455613 60455618 +
cccatttgatttaagaaatttg

SEQ ID NO: 194245 - DNA, 22 bp, Artificial Sequence
  Synthetic oligonucleotide; TTT chr2 60455603 60455624 60455620 60455625 +
gatttaagaaatttgaacagac

SEQ ID NO: 194246 - DNA, 22 bp, Artificial Sequence
  Synthetic oligonucleotide; TTG chr2 60455604 60455625 60455621 60455626 +
atttaagaaatttgaacagaca

SEQ ID NO: 194247 - DNA, 22 bp, Artificial Sequence
  Synthetic oligonucleotide; TTT chr2 60455608 60455629 60455625 60455630 +
aagaaatttgaacagacaagtg

SEQ ID NO: 194248 - DNA, 22 bp, Artificial Sequence
  Synthetic oligonucleotide; TTA chr2 60455609 60455630 60455626 60455631 +
agaaatttgaacagacaagtgt

SEQ ID NO: 194249 - DNA, 22 bp, Artificial Sequence
  Synthetic oligonucleotide; TTT chr2 60455617 60455638 60455634 60455639 +
gaacagacaagtgtacagtatc

SEQ ID NO: 194250 - DNA, 22 bp, Artificial Sequence
  Synthetic oligonucleotide; TTG chr2 60455618 60455639 60455635 60455640 +
aacagacaagtgtacagtatcc

SEQ ID NO: 194251 - DNA, 22 bp, Artificial Sequence
  Synthetic oligonucleotide; TTA chr2 60455647 60455668 60455664 60455669 +
attctgtctgtcaggatgcaaa

SEQ ID NO: 194252 - DNA, 22 bp, Artificial Sequence
  Synthetic oligonucleotide; TTC chr2 60455651 60455672 60455668 60455673 +
tgtctgtcaggatgcaaaacct

SEQ ID NO: 194253 - DNA, 22 bp, Artificial Sequence
  Synthetic oligonucleotide; CTG chr2 60455653 60455674 60455670 60455675 +
tctgtcaggatgcaaaacctaa

SEQ ID NO: 194254 - DNA, 22 bp, Artificial Sequence
  Synthetic oligonucleotide; CTG chr2 60455657 60455678 60455674 60455679 +
tcaggatgcaaaacctaattac

SEQ ID NO: 194255 - DNA, 22 bp, Artificial Sequence
  Synthetic oligonucleotide; CTA chr2 60455674 60455695 60455691 60455696 +
attacgctaagagcagcatata

SEQ ID NO: 194256 - DNA, 22 bp, Artificial Sequence
  Synthetic oligonucleotide; TTA chr2 60455678 60455699 60455695 60455700 +
cgctaagagcagcatatactga

SEQ ID NO: 194257 - DNA, 22 bp, Artificial Sequence
  Synthetic oligonucleotide; CTA chr2 60455683 60455704 60455700 60455705 +
agagcagcatatactgagaaat

SEQ ID NO: 194258 - DNA, 22 bp, Artificial Sequence
  Synthetic oligonucleotide; CTG chr2 60455699 60455720 60455716 60455721 +
agaaattaaaatgaatactgta

SEQ ID NO: 194259 - DNA, 22 bp, Artificial Sequence
  Synthetic oligonucleotide; TTA chr2 60455707 60455728 60455724 60455729 +
aaatgaatactgtatataaaac

SEQ ID NO: 194260 - DNA, 22 bp, Artificial Sequence
  Synthetic oligonucleotide; CTG chr2 60455719 60455740 60455736 60455741 +
tatataaaacctacacagttgc

SEQ ID NO: 194261 - DNA, 22 bp, Artificial Sequence
  Synthetic oligonucleotide; CTA chr2 60455732 60455753 60455749 60455754 +
cacagttgcactcatagctcct

SEQ ID NO: 194262 - DNA, 22 bp, Artificial Sequence
  Synthetic oligonucleotide; TTG chr2 60455740 60455761 60455757 60455762 +
cactcatagctcctaataaaag

SEQ ID NO: 194263 - DNA, 22 bp, Artificial Sequence
  Synthetic oligonucleotide; CTC chr2 60455745 60455766 60455762 60455767 +
atagctcctaataaaagagtaa

SEQ ID NO: 194264 - DNA, 22 bp, Artificial Sequence
  Synthetic oligonucleotide; CTC chr2 60455752 60455773 60455769 60455774 +
ctaataaaagagtaatagggac

SEQ ID NO: 194265 - DNA, 22 bp, Artificial Sequence
  Synthetic oligonucleotide; CTA chr2 60455755 60455776 60455772 60455777 +
ataaaagagtaatagggacaca

SEQ ID NO: 194266 - DNA, 22 bp, Artificial Sequence
  Synthetic oligonucleotide; TTT chr2 60455786 60455807 60455803 60455808 +
tatggacatttaatagggtgga

SEQ ID NO: 194267 - DNA, 22 bp, Artificial Sequence
  Synthetic oligonucleotide; TTT chr2 60455787 60455808 60455804 60455809 +
atggacatttaatagggtggag

SEQ ID NO: 194268 - DNA, 22 bp, Artificial Sequence
  Synthetic oligonucleotide; TTA chr2 60455788 60455809 60455805 60455810 +
tggacatttaatagggtggagt

SEQ ID NO: 194269 - DNA, 22 bp, Artificial Sequence
  Synthetic oligonucleotide; TTT chr2 60455797 60455818 60455814 60455819 +
aatagggtggagtcgaagtcac

SEQ ID NO: 194270 - DNA, 22 bp, Artificial Sequence
  Synthetic oligonucleotide; TTA chr2 60455798 60455819 60455815 60455820 +
atagggtggagtcgaagtcacc

SEQ ID NO: 194271 - DNA, 22 bp, Artificial Sequence
  Synthetic oligonucleotide; CTA chr2 60455827 60455848 60455844 60455849 +
aagctggcatggcactggggaa

SEQ ID NO: 194272 - DNA, 22 bp, Artificial Sequence
  Synthetic oligonucleotide; CTG chr2 60455833 60455854 60455850 60455855 +
gcatggcactggggaattattt

SEQ ID NO: 194273 - DNA, 22 bp, Artificial Sequence
  Synthetic oligonucleotide; CTG chr2 60455844 60455865 60455861 60455866 +
gggaattatttctatctgtctt

SEQ ID NO: 194274 - DNA, 22 bp, Artificial Sequence
  Synthetic oligonucleotide; TTA chr2 60455852 60455873 60455869 60455874 +
tttctatctgtcttgagcagca

SEQ ID NO: 194275 - DNA, 22 bp, Artificial Sequence
  Synthetic oligonucleotide; TTT chr2 60455855 60455876 60455872 60455877 +
ctatctgtcttgagcagcattt

SEQ ID NO: 194276 - DNA, 22 bp, Artificial Sequence
  Synthetic oligonucleotide; TTC chr2 60455856 60455877 60455873 60455878 +
tatctgtcttgagcagcatttt

SEQ ID NO: 194277 - DNA, 22 bp, Artificial Sequence
  Synthetic oligonucleotide; CTA chr2 60455858 60455879 60455875 60455880 +
tctgtcttgagcagcattttgg

SEQ ID NO: 194278 - DNA, 22 bp, Artificial Sequence
  Synthetic oligonucleotide; CTG chr2 60455862 60455883 60455879 60455884 +
tcttgagcagcattttggattc

SEQ ID NO: 194279 - DNA, 22 bp, Artificial Sequence
  Synthetic oligonucleotide; CTT chr2 60455866 60455887 60455883 60455888 +
gagcagcattttggattcagtt

SEQ ID NO: 194280 - DNA, 22 bp, Artificial Sequence
  Synthetic oligonucleotide; TTG chr2 60455867 60455888 60455884 60455889 +
agcagcattttggattcagttt

SEQ ID NO: 194281 - DNA, 22 bp, Artificial Sequence
  Synthetic oligonucleotide; TTT chr2 60455877 60455898 60455894 60455899 +
tggattcagttttggagaaacc

SEQ ID NO: 194282 - DNA, 22 bp, Artificial Sequence
  Synthetic oligonucleotide; TTT chr2 60455878 60455899 60455895 60455900 +
ggattcagttttggagaaacct

SEQ ID NO: 194283 - DNA, 22 bp, Artificial Sequence
  Synthetic oligonucleotide; TTG chr2 60455879 60455900 60455896 60455901 +
gattcagttttggagaaaccta

SEQ ID NO: 194284 - DNA, 22 bp, Artificial Sequence
  Synthetic oligonucleotide; TTC chr2 60455884 60455905 60455901 60455906 +
agttttggagaaacctaatcca

SEQ ID NO: 194285 - DNA, 22 bp, Artificial Sequence
  Synthetic oligonucleotide; TTT chr2 60455889 60455910 60455906 60455911 +
tggagaaacctaatccaaaaca

SEQ ID NO: 194286 - DNA, 22 bp, Artificial Sequence
  Synthetic oligonucleotide; TTT chr2 60455890 60455911 60455907 60455912 +
ggagaaacctaatccaaaacac

SEQ ID NO: 194287 - DNA, 22 bp, Artificial Sequence
  Synthetic oligonucleotide; TTG chr2 60455891 60455912 60455908 60455913 +
gagaaacctaatccaaaacaca

SEQ ID NO: 194288 - DNA, 22 bp, Artificial Sequence
  Synthetic oligonucleotide; CTA chr2 60455901 60455922 60455918 60455923 +
atccaaaacacatacagtatat

SEQ ID NO: 194289 - DNA, 22 bp, Artificial Sequence
  Synthetic oligonucleotide; CTT chr2 60455926 60455947 60455943 60455948 +
ttctaagttcagtgacaaacat

SEQ ID NO: 194290 - DNA, 22 bp, Artificial Sequence
  Synthetic oligonucleotide; TTT chr2 60455927 60455948 60455944 60455949 +
tctaagttcagtgacaaacatc

SEQ ID NO: 194291 - DNA, 22 bp, Artificial Sequence
  Synthetic oligonucleotide; TTT chr2 60455928 60455949 60455945 60455950 +
ctaagttcagtgacaaacatca

SEQ ID NO: 194292 - DNA, 22 bp, Artificial Sequence
  Synthetic oligonucleotide; TTC chr2 60455929 60455950 60455946 60455951 +
taagttcagtgacaaacatcaa

SEQ ID NO: 194293 - DNA, 22 bp, Artificial Sequence
  Synthetic oligonucleotide; CTA chr2 60455931 60455952 60455948 60455953 +
agttcagtgacaaacatcaagt

SEQ ID NO: 194294 - DNA, 22 bp, Artificial Sequence
  Synthetic oligonucleotide; TTC chr2 60455936 60455957 60455953 60455958 +
agtgacaaacatcaagttctca

SEQ ID NO: 194295 - DNA, 22 bp, Artificial Sequence
  Synthetic oligonucleotide; TTC chr2 60455955 60455976 60455972 60455977 +
tcaaggtaccgcacgcccaccc

SEQ ID NO: 194296 - DNA, 22 bp, Artificial Sequence
  Synthetic oligonucleotide; CTC chr2 60455957 60455978 60455974 60455979 +
aaggtaccgcacgcccacccca

SEQ ID NO: 194297 - DNA, 22 bp, Artificial Sequence
  Synthetic oligonucleotide; CTC chr2 60455988 60456009 60456005 60456010 +
ctatgtaatattctccaacatc

SEQ ID NO: 194298 - DNA, 22 bp, Artificial Sequence
  Synthetic oligonucleotide; CTA chr2 60455991 60456012 60456008 60456013 +
tgtaatattctccaacatcctt

SEQ ID NO: 194299 - DNA, 22 bp, Artificial Sequence
  Synthetic oligonucleotide; TTC chr2 60456001 60456022 60456018 60456023 +
tccaacatcctttctcagtgga

SEQ ID NO: 194300 - DNA, 22 bp, Artificial Sequence
  Synthetic oligonucleotide; CTC chr2 60456003 60456024 60456020 60456025 +
caacatcctttctcagtggatt

SEQ ID NO: 194301 - DNA, 22 bp, Artificial Sequence
  Synthetic oligonucleotide; CTT chr2 60456013 60456034 60456030 60456035 +
tctcagtggattcctctagccc

SEQ ID NO: 194302 - DNA, 22 bp, Artificial Sequence
  Synthetic oligonucleotide; TTT chr2 60456014 60456035 60456031 60456036 +
ctcagtggattcctctagcccc

SEQ ID NO: 194303 - DNA, 22 bp, Artificial Sequence
  Synthetic oligonucleotide; TTC chr2 60456015 60456036 60456032 60456037 +
tcagtggattcctctagcccca

SEQ ID NO: 194304 - DNA, 22 bp, Artificial Sequence
  Synthetic oligonucleotide; CTC chr2 60456017 60456038 60456034 60456039 +
agtggattcctctagccccact

SEQ ID NO: 194305 - DNA, 22 bp, Artificial Sequence
  Synthetic oligonucleotide; TTC chr2 60456026 60456047 60456043 60456048 +
ctctagccccactctctccttc

SEQ ID NO: 194306 - DNA, 22 bp, Artificial Sequence
  Synthetic oligonucleotide; CTC chr2 60456029 60456050 60456046 60456051 +
tagccccactctctccttccca

SEQ ID NO: 194307 - DNA, 22 bp, Artificial Sequence
  Synthetic oligonucleotide; CTA chr2 60456031 60456052 60456048 60456053 +
gccccactctctccttcccacc

SEQ ID NO: 194308 - DNA, 22 bp, Artificial Sequence
  Synthetic oligonucleotide; CTC chr2 60456040 60456061 60456057 60456062 +
tctccttcccacccaaactggc

SEQ ID NO: 194309 - DNA, 22 bp, Artificial Sequence
  Synthetic oligonucleotide; CTC chr2 60456042 60456063 60456059 60456064 +
tccttcccacccaaactggctt

SEQ ID NO: 194310 - DNA, 22 bp, Artificial Sequence
  Synthetic oligonucleotide; CTC chr2 60456044 60456065 60456061 60456066 +
cttcccacccaaactggctttt

SEQ ID NO: 194311 - DNA, 22 bp, Artificial Sequence
  Synthetic oligonucleotide; CTT chr2 60456047 60456068 60456064 60456069 +
cccacccaaactggcttttcag

SEQ ID NO: 194312 - DNA, 22 bp, Artificial Sequence
  Synthetic oligonucleotide; TTC chr2 60456048 60456069 60456065 60456070 +
ccacccaaactggcttttcaga

SEQ ID NO: 194313 - DNA, 22 bp, Artificial Sequence
  Synthetic oligonucleotide; CTG chr2 60456060 60456081 60456077 60456082 +
gcttttcagaaaacattgactt

SEQ ID NO: 194314 - DNA, 22 bp, Artificial Sequence
  Synthetic oligonucleotide; CTT chr2 60456064 60456085 60456081 60456086 +
ttcagaaaacattgactttctt

SEQ ID NO: 194315 - DNA, 22 bp, Artificial Sequence
  Synthetic oligonucleotide; TTT chr2 60456065 60456086 60456082 60456087 +
tcagaaaacattgactttcttt

SEQ ID NO: 194316 - DNA, 22 bp, Artificial Sequence
  Synthetic oligonucleotide; TTT chr2 60456066 60456087 60456083 60456088 +
cagaaaacattgactttcttta

SEQ ID NO: 194317 - DNA, 22 bp, Artificial Sequence
  Synthetic oligonucleotide; TTC chr2 60456067 60456088 60456084 60456089 +
agaaaacattgactttctttat

SEQ ID NO: 194318 - DNA, 22 bp, Artificial Sequence
  Synthetic oligonucleotide; TTG chr2 60456078 60456099 60456095 60456100 +
actttctttatactttagaaag

SEQ ID NO: 194319 - DNA, 22 bp, Artificial Sequence
  Synthetic oligonucleotide; CTT chr2 60456082 60456103 60456099 60456104 +
tctttatactttagaaagataa

SEQ ID NO: 194320 - DNA, 22 bp, Artificial Sequence
  Synthetic oligonucleotide; TTT chr2 60456083 60456104 60456100 60456105 +
ctttatactttagaaagataaa

SEQ ID NO: 194321 - DNA, 22 bp, Artificial Sequence
  Synthetic oligonucleotide; TTC chr2 60456084 60456105 60456101 60456106 +
tttatactttagaaagataaaa

SEQ ID NO: 194322 - DNA, 22 bp, Artificial Sequence
  Synthetic oligonucleotide; CTT chr2 60456086 60456107 60456103 60456108 +
tatactttagaaagataaaact

SEQ ID NO: 194323 - DNA, 22 bp, Artificial Sequence
  Synthetic oligonucleotide; TTT chr2 60456087 60456108 60456104 60456109 +
atactttagaaagataaaacta

SEQ ID NO: 194324 - DNA, 22 bp, Artificial Sequence
  Synthetic oligonucleotide; TTA chr2 60456088 60456109 60456105 60456110 +
tactttagaaagataaaactat

SEQ ID NO: 194325 - DNA, 22 bp, Artificial Sequence
  Synthetic oligonucleotide; CTT chr2 60456093 60456114 60456110 60456115 +
tagaaagataaaactattcttg

SEQ ID NO: 194326 - DNA, 22 bp, Artificial Sequence
  Synthetic oligonucleotide; TTT chr2 60456094 60456115 60456111 60456116 +
agaaagataaaactattcttgc

SEQ ID NO: 194327 - DNA, 22 bp, Artificial Sequence
  Synthetic oligonucleotide; TTA chr2 60456095 60456116 60456112 60456117 +
gaaagataaaactattcttgcc

SEQ ID NO: 194328 - DNA, 22 bp, Artificial Sequence
  Synthetic oligonucleotide; CTA chr2 60456109 60456130 60456126 60456131 +
ttcttgcctcagataaaaggca

SEQ ID NO: 194329 - DNA, 22 bp, Artificial Sequence
  Synthetic oligonucleotide; TTC chr2 60456112 60456133 60456129 60456134 +
ttgcctcagataaaaggcatga

SEQ ID NO: 194330 - DNA, 22 bp, Artificial Sequence
  Synthetic oligonucleotide; CTT chr2 60456114 60456135 60456131 60456136 +
gcctcagataaaaggcatgaca

SEQ ID NO: 194331 - DNA, 22 bp, Artificial Sequence
  Synthetic oligonucleotide; TTG chr2 60456115 60456136 60456132 60456137 +
cctcagataaaaggcatgacat

SEQ ID NO: 194332 - DNA, 22 bp, Artificial Sequence
  Synthetic oligonucleotide; CTC chr2 60456119 60456140 60456136 60456141 +
agataaaaggcatgacatgaaa

SEQ ID NO: 194333 - DNA, 22 bp, Artificial Sequence
  Synthetic oligonucleotide; CTC chr2 60456151 60456172 60456168 60456173 +
acaggcactagggcataagaac

SEQ ID NO: 194334 - DNA, 22 bp, Artificial Sequence
  Synthetic oligonucleotide; CTA chr2 60456161 60456182 60456178 60456183 +
gggcataagaactgagcgacaa

SEQ ID NO: 194335 - DNA, 22 bp, Artificial Sequence
  Synthetic oligonucleotide; CTG chr2 60456175 60456196 60456192 60456197 +
agcgacaaaaaatgctaccaca

SEQ ID NO: 194336 - DNA, 22 bp, Artificial Sequence
  Synthetic oligonucleotide; CTA chr2 60456192 60456213 60456209 60456214 +
ccacaagaagacaacagaacgg

SEQ ID NO: 194337 - DNA, 22 bp, Artificial Sequence
  Synthetic oligonucleotide; CTT chr2 60456217 60456238 60456234 60456239 +
ttgttttggttttttacaaaaa

SEQ ID NO: 194338 - DNA, 22 bp, Artificial Sequence
  Synthetic oligonucleotide; TTT chr2 60456218 60456239 60456235 60456240 +
tgttttggttttttacaaaaat

SEQ ID NO: 194339 - DNA, 22 bp, Artificial Sequence
  Synthetic oligonucleotide; TTT chr2 60456219 60456240 60456236 60456241 +
gttttggttttttacaaaaata

SEQ ID NO: 194340 - DNA, 22 bp, Artificial Sequence
  Synthetic oligonucleotide; TTG chr2 60456220 60456241 60456237 60456242 +
ttttggttttttacaaaaataa

SEQ ID NO: 194341 - DNA, 22 bp, Artificial Sequence
  Synthetic oligonucleotide; TTT chr2 60456223 60456244 60456240 60456245 +
tggttttttacaaaaataagaa

SEQ ID NO: 194342 - DNA, 22 bp, Artificial Sequence
  Synthetic oligonucleotide; TTT chr2 60456224 60456245 60456241 60456246 +
ggttttttacaaaaataagaac

SEQ ID NO: 194343 - DNA, 22 bp, Artificial Sequence
  Synthetic oligonucleotide; TTG chr2 60456225 60456246 60456242 60456247 +
gttttttacaaaaataagaaca

SEQ ID NO: 194344 - DNA, 22 bp, Artificial Sequence
  Synthetic oligonucleotide; TTT chr2 60456229 60456250 60456246 60456251 +
tttacaaaaataagaacaatgt

SEQ ID NO: 194345 - DNA, 22 bp, Artificial Sequence
  Synthetic oligonucleotide; TTT chr2 60456230 60456251 60456247 60456252 +
ttacaaaaataagaacaatgtc

SEQ ID NO: 194346 - DNA, 22 bp, Artificial Sequence
  Synthetic oligonucleotide; TTT chr2 60456231 60456252 60456248 60456253 +
tacaaaaataagaacaatgtcg

SEQ ID NO: 194347 - DNA, 22 bp, Artificial Sequence
  Synthetic oligonucleotide; TTT chr2 60456232 60456253 60456249 60456254 +
acaaaaataagaacaatgtcgt

SEQ ID NO: 194348 - DNA, 22 bp, Artificial Sequence
  Synthetic oligonucleotide; TTA chr2 60456233 60456254 60456250 60456255 +
caaaaataagaacaatgtcgta

SEQ ID NO: 194349 - DNA, 22 bp, Artificial Sequence
  Synthetic oligonucleotide; TTC chr2 60456258 60456279 60456275 60456280 +
attcatctacactgggaacagg

SEQ ID NO: 194350 - DNA, 22 bp, Artificial Sequence
  Synthetic oligonucleotide; TTC chr2 60456262 60456283 60456279 60456284 +
atctacactgggaacagggaca

SEQ ID NO: 194351 - DNA, 22 bp, Artificial Sequence
  Synthetic oligonucleotide; CTA chr2 60456267 60456288 60456284 60456289 +
cactgggaacagggacacgata

SEQ ID NO: 194352 - DNA, 22 bp, Artificial Sequence
  Synthetic oligonucleotide; CTG chr2 60456272 60456293 60456289 60456294 +
ggaacagggacacgatatcaca

SEQ ID NO: 194353 - DNA, 22 bp, Artificial Sequence
  Synthetic oligonucleotide; TTT chr2 60456307 60456328 60456324 60456329 +
agtaaagcaaatagatgctgca

SEQ ID NO: 194354 - DNA, 22 bp, Artificial Sequence
  Synthetic oligonucleotide; TTA chr2 60456308 60456329 60456325 60456330 +
gtaaagcaaatagatgctgcaa

SEQ ID NO: 194355 - DNA, 22 bp, Artificial Sequence
  Synthetic oligonucleotide; CTG chr2 60456327 60456348 60456344 60456349 +
caacatgcagtatttgtaaaag

SEQ ID NO: 194356 - DNA, 22 bp, Artificial Sequence
  Synthetic oligonucleotide; TTT chr2 60456342 60456363 60456359 60456364 +
gtaaaagtgacaacacagattt

SEQ ID NO: 194357 - DNA, 22 bp, Artificial Sequence
  Synthetic oligonucleotide; TTG chr2 60456343 60456364 60456360 60456365 +
taaaagtgacaacacagatttc

SEQ ID NO: 194358 - DNA, 22 bp, Artificial Sequence
  Synthetic oligonucleotide; TTT chr2 60456364 60456385 60456381 60456386 +
ctaaggatttttaaaatagacc

SEQ ID NO: 194359 - DNA, 22 bp, Artificial Sequence
  Synthetic oligonucleotide; TTC chr2 60456365 60456386 60456382 60456387 +
taaggatttttaaaatagacct

SEQ ID NO: 194360 - DNA, 22 bp, Artificial Sequence
  Synthetic oligonucleotide; CTA chr2 60456367 60456388 60456384 60456389 +
aggatttttaaaatagacctaa

SEQ ID NO: 194361 - DNA, 22 bp, Artificial Sequence
  Synthetic oligonucleotide; TTT chr2 60456374 60456395 60456391 60456396 +
ttaaaatagacctaactggctg

SEQ ID NO: 194362 - DNA, 22 bp, Artificial Sequence
  Synthetic oligonucleotide; TTT chr2 60456375 60456396 60456392 60456397 +
taaaatagacctaactggctgg

SEQ ID NO: 194363 - DNA, 22 bp, Artificial Sequence
  Synthetic oligonucleotide; TTT chr2 60456376 60456397 60456393 60456398 +
aaaatagacctaactggctggt

SEQ ID NO: 194364 - DNA, 22 bp, Artificial Sequence
  Synthetic oligonucleotide; TTA chr2 60456377 60456398 60456394 60456399 +
aaatagacctaactggctggtc

SEQ ID NO: 194365 - DNA, 22 bp, Artificial Sequence
  Synthetic oligonucleotide; CTA chr2 60456388 60456409 60456405 60456410 +
actggctggtcagaagataatt

SEQ ID NO: 194366 - DNA, 22 bp, Artificial Sequence
  Synthetic oligonucleotide; CTG chr2 60456392 60456413 60456409 60456414 +
gctggtcagaagataattgaag

SEQ ID NO: 194367 - DNA, 22 bp, Artificial Sequence
  Synthetic oligonucleotide; CTG chr2 60456396 60456417 60456413 60456418 +
gtcagaagataattgaagggta

SEQ ID NO: 194368 - DNA, 22 bp, Artificial Sequence
  Synthetic oligonucleotide; TTG chr2 60456411 60456432 60456428 60456433 +
aagggtattcccgcccttattt

SEQ ID NO: 194369 - DNA, 22 bp, Artificial Sequence
  Synthetic oligonucleotide; TTC chr2 60456421 60456442 60456438 60456443 +
ccgcccttatttgctgtcatcc

SEQ ID NO: 194370 - DNA, 22 bp, Artificial Sequence
  Synthetic oligonucleotide; CTT chr2 60456429 60456450 60456446 60456451 +
atttgctgtcatccaggaagac

SEQ ID NO: 194371 - DNA, 22 bp, Artificial Sequence
  Synthetic oligonucleotide; TTA chr2 60456430 60456451 60456447 60456452 +
tttgctgtcatccaggaagacc

SEQ ID NO: 194372 - DNA, 22 bp, Artificial Sequence
  Synthetic oligonucleotide; TTT chr2 60456433 60456454 60456450 60456455 +
gctgtcatccaggaagacccta

SEQ ID NO: 194373 - DNA, 22 bp, Artificial Sequence
  Synthetic oligonucleotide; TTG chr2 60456434 60456455 60456451 60456456 +
ctgtcatccaggaagaccctat

SEQ ID NO: 194374 - DNA, 22 bp, Artificial Sequence
  Synthetic oligonucleotide; CTG chr2 60456437 60456458 60456454 60456459 +
tcatccaggaagaccctatcaa

SEQ ID NO: 194375 - DNA, 22 bp, Artificial Sequence
  Synthetic oligonucleotide; CTA chr2 60456455 60456476 60456472 60456477 +
tcaaaacacctaaagtaatctg

SEQ ID NO: 194376 - DNA, 22 bp, Artificial Sequence
  Synthetic oligonucleotide; CTA chr2 60456467 60456488 60456484 60456489 +
aagtaatctgtagcatctaggg

SEQ ID NO: 194377 - DNA, 22 bp, Artificial Sequence
  Synthetic oligonucleotide; CTG chr2 60456477 60456498 60456494 60456499 +
tagcatctagggttcctgggat

SEQ ID NO: 194378 - DNA, 22 bp, Artificial Sequence
  Synthetic oligonucleotide; CTA chr2 60456486 60456507 60456503 60456508 +
gggttcctgggatctcagaacc

SEQ ID NO: 194379 - DNA, 22 bp, Artificial Sequence
  Synthetic oligonucleotide; TTC chr2 60456492 60456513 60456509 60456514 +
ctgggatctcagaaccacaagg

SEQ ID NO: 194380 - DNA, 22 bp, Artificial Sequence
  Synthetic oligonucleotide; CTG chr2 60456495 60456516 60456512 60456517 +
ggatctcagaaccacaaggcaa

SEQ ID NO: 194381 - DNA, 22 bp, Artificial Sequence
  Synthetic oligonucleotide; CTC chr2 60456502 60456523 60456519 60456524 +
agaaccacaaggcaaaccacta

SEQ ID NO: 194382 - DNA, 22 bp, Artificial Sequence
  Synthetic oligonucleotide; CTA chr2 60456524 60456545 60456541 60456546 +
tgcatctcaggaaatcagtggc

SEQ ID NO: 194383 - DNA, 22 bp, Artificial Sequence
  Synthetic oligonucleotide; CTC chr2 60456532 60456553 60456549 60456554 +
aggaaatcagtggctgattcca

SEQ ID NO: 194384 - DNA, 22 bp, Artificial Sequence
  Synthetic oligonucleotide; CTG chr2 60456548 60456569 60456565 60456570 +
attccaaagatttcactatgtc

SEQ ID NO: 194385 - DNA, 22 bp, Artificial Sequence
  Synthetic oligonucleotide; TTC chr2 60456552 60456573 60456569 60456574 +
caaagatttcactatgtctggc

SEQ ID NO: 194386 - DNA, 22 bp, Artificial Sequence
  Synthetic oligonucleotide; TTT chr2 60456561 60456582 60456578 60456583 +
cactatgtctggctacacccct

SEQ ID NO: 194387 - DNA, 22 bp, Artificial Sequence
  Synthetic oligonucleotide; TTC chr2 60456562 60456583 60456579 60456584 +
actatgtctggctacaccccta

SEQ ID NO: 194388 - DNA, 22 bp, Artificial Sequence
  Synthetic oligonucleotide; CTA chr2 60456566 60456587 60456583 60456588 +
tgtctggctacacccctagtgg

SEQ ID NO: 194389 - DNA, 22 bp, Artificial Sequence
  Synthetic oligonucleotide; CTG chr2 60456572 60456593 60456589 60456594 +
gctacacccctagtggctgctt

SEQ ID NO: 194390 - DNA, 22 bp, Artificial Sequence
  Synthetic oligonucleotide; CTA chr2 60456576 60456597 60456593 60456598 +
cacccctagtggctgctttctt

SEQ ID NO: 194391 - DNA, 22 bp, Artificial Sequence
  Synthetic oligonucleotide; CTA chr2 60456584 60456605 60456601 60456606 +
gtggctgctttcttttctttcg

SEQ ID NO: 194392 - DNA, 22 bp, Artificial Sequence
  Synthetic oligonucleotide; CTG chr2 60456591 60456612 60456608 60456613 +
ctttcttttctttcgtctctct

SEQ ID NO: 194393 - DNA, 22 bp, Artificial Sequence
  Synthetic oligonucleotide; CTT chr2 60456594 60456615 60456611 60456616 +
tcttttctttcgtctctctctt

SEQ ID NO: 194394 - DNA, 22 bp, Artificial Sequence
  Synthetic oligonucleotide; TTT chr2 60456595 60456616 60456612 60456617 +
cttttctttcgtctctctcttt

SEQ ID NO: 194395 - DNA, 22 bp, Artificial Sequence
  Synthetic oligonucleotide; TTC chr2 60456596 60456617 60456613 60456618 +
ttttctttcgtctctctctttt

SEQ ID NO: 194396 - DNA, 22 bp, Artificial Sequence
  Synthetic oligonucleotide; CTT chr2 60456598 60456619 60456615 60456620 +
ttctttcgtctctctctttttt

SEQ ID NO: 194397 - DNA, 22 bp, Artificial Sequence
  Synthetic oligonucleotide; TTT chr2 60456599 60456620 60456616 60456621 +
tctttcgtctctctcttttttt

SEQ ID NO: 194398 - DNA, 22 bp, Artificial Sequence
  Synthetic oligonucleotide; TTT chr2 60456600 60456621 60456617 60456622 +
ctttcgtctctctctttttttc

SEQ ID NO: 194399 - DNA, 22 bp, Artificial Sequence
  Synthetic oligonucleotide; TTC chr2 60456601 60456622 60456618 60456623 +
tttcgtctctctctttttttct

SEQ ID NO: 194400 - DNA, 22 bp, Artificial Sequence
  Synthetic oligonucleotide; CTT chr2 60456603 60456624 60456620 60456625 +
tcgtctctctctttttttctcc

SEQ ID NO: 194401 - DNA, 22 bp, Artificial Sequence
  Synthetic oligonucleotide; TTT chr2 60456604 60456625 60456621 60456626 +
cgtctctctctttttttctccc

SEQ ID NO: 194402 - DNA, 22 bp, Artificial Sequence
  Synthetic oligonucleotide; TTC chr2 60456605 60456626 60456622 60456627 +
gtctctctctttttttctccct

SEQ ID NO: 194403 - DNA, 22 bp, Artificial Sequence
  Synthetic oligonucleotide; CTC chr2 60456610 60456631 60456627 60456632 +
tctctttttttctccctctttt

SEQ ID NO: 194404 - DNA, 22 bp, Artificial Sequence
  Synthetic oligonucleotide; CTC chr2 60456612 60456633 60456629 60456634 +
tctttttttctccctctttttt

SEQ ID NO: 194405 - DNA, 22 bp, Artificial Sequence
  Synthetic oligonucleotide; CTC chr2 60456614 60456635 60456631 60456636 +
tttttttctccctcttttttaa

SEQ ID NO: 194406 - DNA, 22 bp, Artificial Sequence
  Synthetic oligonucleotide; CTT chr2 60456616 60456637 60456633 60456638 +
tttttctccctcttttttaaac

SEQ ID NO: 194407 - DNA, 22 bp, Artificial Sequence
  Synthetic oligonucleotide; TTT chr2 60456617 60456638 60456634 60456639 +
ttttctccctcttttttaaaca

SEQ ID NO: 194408 - DNA, 22 bp, Artificial Sequence
  Synthetic oligonucleotide; TTT chr2 60456618 60456639 60456635 60456640 +
tttctccctcttttttaaacaa

SEQ ID NO: 194409 - DNA, 22 bp, Artificial Sequence
  Synthetic oligonucleotide; TTT chr2 60456619 60456640 60456636 60456641 +
ttctccctcttttttaaacaaa

SEQ ID NO: 194410 - DNA, 22 bp, Artificial Sequence
  Synthetic oligonucleotide; TTT chr2 60456620 60456641 60456637 60456642 +
tctccctcttttttaaacaaaa

SEQ ID NO: 194411 - DNA, 22 bp, Artificial Sequence
  Synthetic oligonucleotide; TTT chr2 60456621 60456642 60456638 60456643 +
ctccctcttttttaaacaaaac

SEQ ID NO: 194412 - DNA, 22 bp, Artificial Sequence
  Synthetic oligonucleotide; TTC chr2 60456622 60456643 60456639 60456644 +
tccctcttttttaaacaaaaca

SEQ ID NO: 194413 - DNA, 22 bp, Artificial Sequence
  Synthetic oligonucleotide; CTC chr2 60456624 60456645 60456641 60456646 +
cctcttttttaaacaaaacaaa

SEQ ID NO: 194414 - DNA, 22 bp, Artificial Sequence
  Synthetic oligonucleotide; CTC chr2 60456628 60456649 60456645 60456650 +
ttttttaaacaaaacaaaacaa

SEQ ID NO: 194415 - DNA, 22 bp, Artificial Sequence
  Synthetic oligonucleotide; CTT chr2 60456630 60456651 60456647 60456652 +
ttttaaacaaaacaaaacaaaa

SEQ ID NO: 194416 - DNA, 22 bp, Artificial Sequence
  Synthetic oligonucleotide; TTT chr2 60456631 60456652 60456648 60456653 +
tttaaacaaaacaaaacaaaac

SEQ ID NO: 194417 - DNA, 22 bp, Artificial Sequence
  Synthetic oligonucleotide; TTT chr2 60456632 60456653 60456649 60456654 +
ttaaacaaaacaaaacaaaaca

SEQ ID NO: 194418 - DNA, 22 bp, Artificial Sequence
  Synthetic oligonucleotide; TTT chr2 60456633 60456654 60456650 60456655 +
taaacaaaacaaaacaaaacaa

SEQ ID NO: 194419 - DNA, 22 bp, Artificial Sequence
  Synthetic oligonucleotide; TTT chr2 60456634 60456655 60456651 60456656 +
aaacaaaacaaaacaaaacaaa

SEQ ID NO: 194420 - DNA, 22 bp, Artificial Sequence
  Synthetic oligonucleotide; TTA chr2 60456635 60456656 60456652 60456657 +
aacaaaacaaaacaaaacaaaa

SEQ ID NO: 194421 - DNA, 22 bp, Artificial Sequence
  Synthetic oligonucleotide; CTG chr2 60456666 60456687 60456683 60456688 +
atgcctttgtttccagattttt

SEQ ID NO: 194422 - DNA, 22 bp, Artificial Sequence
  Synthetic oligonucleotide; CTT chr2 60456673 60456694 60456690 60456695 +
tgtttccagatttttagatttc

SEQ ID NO: 194423 - DNA, 22 bp, Artificial Sequence
  Synthetic oligonucleotide; TTT chr2 60456674 60456695 60456691 60456696 +
gtttccagatttttagatttca

SEQ ID NO: 194424 - DNA, 22 bp, Artificial Sequence
  Synthetic oligonucleotide; TTG chr2 60456675 60456696 60456692 60456697 +
tttccagatttttagatttcaa

SEQ ID NO: 194425 - DNA, 22 bp, Artificial Sequence
  Synthetic oligonucleotide; TTT chr2 60456678 60456699 60456695 60456700 +
ccagatttttagatttcaaaag

SEQ ID NO: 194426 - DNA, 22 bp, Artificial Sequence
  Synthetic oligonucleotide; TTC chr2 60456679 60456700 60456696 60456701 +
cagatttttagatttcaaaagt

SEQ ID NO: 194427 - DNA, 22 bp, Artificial Sequence
  Synthetic oligonucleotide; TTT chr2 60456686 60456707 60456703 60456708 +
ttagatttcaaaagtggggtta

SEQ ID NO: 194428 - DNA, 22 bp, Artificial Sequence
  Synthetic oligonucleotide; TTT chr2 60456687 60456708 60456704 60456709 +
tagatttcaaaagtggggttat

SEQ ID NO: 194429 - DNA, 22 bp, Artificial Sequence
  Synthetic oligonucleotide; TTT chr2 60456688 60456709 60456705 60456710 +
agatttcaaaagtggggttatt

SEQ ID NO: 194430 - DNA, 22 bp, Artificial Sequence
  Synthetic oligonucleotide; TTA chr2 60456689 60456710 60456706 60456711 +
gatttcaaaagtggggttattt

SEQ ID NO: 194431 - DNA, 22 bp, Artificial Sequence
  Synthetic oligonucleotide; TTT chr2 60456694 60456715 60456711 60456716 +
caaaagtggggttattttgtta

SEQ ID NO: 194432 - DNA, 22 bp, Artificial Sequence
  Synthetic oligonucleotide; TTC chr2 60456695 60456716 60456712 60456717 +
aaaagtggggttattttgttat

SEQ ID NO: 194433 - DNA, 22 bp, Artificial Sequence
  Synthetic oligonucleotide; TTA chr2 60456708 60456729 60456725 60456730 +
ttttgttatgagaaaagactct

SEQ ID NO: 194434 - DNA, 22 bp, Artificial Sequence
  Synthetic oligonucleotide; TTT chr2 60456711 60456732 60456728 60456733 +
tgttatgagaaaagactcttac

SEQ ID NO: 194435 - DNA, 22 bp, Artificial Sequence
  Synthetic oligonucleotide; TTT chr2 60456712 60456733 60456729 60456734 +
gttatgagaaaagactcttaca

SEQ ID NO: 194436 - DNA, 22 bp, Artificial Sequence
  Synthetic oligonucleotide; TTG chr2 60456713 60456734 60456730 60456735 +
ttatgagaaaagactcttacat

SEQ ID NO: 194437 - DNA, 22 bp, Artificial Sequence
  Synthetic oligonucleotide; TTA chr2 60456716 60456737 60456733 60456738 +
tgagaaaagactcttacatgga

SEQ ID NO: 194438 - DNA, 22 bp, Artificial Sequence
  Synthetic oligonucleotide; CTC chr2 60456729 60456750 60456746 60456751 +
ttacatggaaaccaaagagctg

SEQ ID NO: 194439 - DNA, 22 bp, Artificial Sequence
  Synthetic oligonucleotide; CTT chr2 60456731 60456752 60456748 60456753 +
acatggaaaccaaagagctgat

SEQ ID NO: 194440 - DNA, 22 bp, Artificial Sequence
  Synthetic oligonucleotide; TTA chr2 60456732 60456753 60456749 60456754 +
catggaaaccaaagagctgatt

SEQ ID NO: 194441 - DNA, 22 bp, Artificial Sequence
  Synthetic oligonucleotide; CTG chr2 60456751 60456772 60456768 60456773 +
attttttttaaaaaaatctttt

SEQ ID NO: 194442 - DNA, 22 bp, Artificial Sequence
  Synthetic oligonucleotide; TTT chr2 60456755 60456776 60456772 60456777 +
tttttaaaaaaatcttttttac

SEQ ID NO: 194443 - DNA, 22 bp, Artificial Sequence
  Synthetic oligonucleotide; TTT chr2 60456756 60456777 60456773 60456778 +
ttttaaaaaaatcttttttaca

SEQ ID NO: 194444 - DNA, 22 bp, Artificial Sequence
  Synthetic oligonucleotide; TTT chr2 60456757 60456778 60456774 60456779 +
tttaaaaaaatcttttttacat

SEQ ID NO: 194445 - DNA, 22 bp, Artificial Sequence
  Synthetic oligonucleotide; TTT chr2 60456758 60456779 60456775 60456780 +
ttaaaaaaatcttttttacatt

SEQ ID NO: 194446 - DNA, 22 bp, Artificial Sequence
  Synthetic oligonucleotide; TTT chr2 60456759 60456780 60456776 60456781 +
taaaaaaatcttttttacatta

SEQ ID NO: 194447 - DNA, 22 bp, Artificial Sequence
  Synthetic oligonucleotide; TTT chr2 60456760 60456781 60456777 60456782 +
aaaaaaatcttttttacattat

SEQ ID NO: 194448 - DNA, 22 bp, Artificial Sequence
  Synthetic oligonucleotide; TTA chr2 60456761 60456782 60456778 60456783 +
aaaaaatcttttttacattatg

SEQ ID NO: 194449 - DNA, 22 bp, Artificial Sequence
  Synthetic oligonucleotide; CTT chr2 60456771 60456792 60456788 60456793 +
ttttacattatgttctaagata

SEQ ID NO: 194450 - DNA, 22 bp, Artificial Sequence
  Synthetic oligonucleotide; TTT chr2 60456772 60456793 60456789 60456794 +
tttacattatgttctaagataa

SEQ ID NO: 194451 - DNA, 22 bp, Artificial Sequence
  Synthetic oligonucleotide; TTT chr2 60456773 60456794 60456790 60456795 +
ttacattatgttctaagataaa

SEQ ID NO: 194452 - DNA, 22 bp, Artificial Sequence
  Synthetic oligonucleotide; TTT chr2 60456774 60456795 60456791 60456796 +
tacattatgttctaagataaag

SEQ ID NO: 194453 - DNA, 22 bp, Artificial Sequence
  Synthetic oligonucleotide; TTT chr2 60456775 60456796 60456792 60456797 +
acattatgttctaagataaagc

SEQ ID NO: 194454 - DNA, 22 bp, Artificial Sequence
  Synthetic oligonucleotide; TTA chr2 60456776 60456797 60456793 60456798 +
cattatgttctaagataaagca

SEQ ID NO: 194455 - DNA, 22 bp, Artificial Sequence
  Synthetic oligonucleotide; TTA chr2 60456781 60456802 60456798 60456803 +
tgttctaagataaagcaaggat

SEQ ID NO: 194456 - DNA, 22 bp, Artificial Sequence
  Synthetic oligonucleotide; TTC chr2 60456786 60456807 60456803 60456808 +
taagataaagcaaggatgggag

SEQ ID NO: 194457 - DNA, 22 bp, Artificial Sequence
  Synthetic oligonucleotide; CTA chr2 60456788 60456809 60456805 60456810 +
agataaagcaaggatgggagaa

SEQ ID NO: 194458 - DNA, 22 bp, Artificial Sequence
  Synthetic oligonucleotide; CTT chr2 60456823 60456844 60456840 60456845 +
ttagacaacaagaacagcaaaa

SEQ ID NO: 194459 - DNA, 22 bp, Artificial Sequence
  Synthetic oligonucleotide; TTT chr2 60456824 60456845 60456841 60456846 +
tagacaacaagaacagcaaaaa

SEQ ID NO: 194460 - DNA, 22 bp, Artificial Sequence
  Synthetic oligonucleotide; TTT chr2 60456825 60456846 60456842 60456847 +
agacaacaagaacagcaaaaaa

SEQ ID NO: 194461 - DNA, 22 bp, Artificial Sequence
  Synthetic oligonucleotide; TTA chr2 60456826 60456847 60456843 60456848 +
gacaacaagaacagcaaaaaat

SEQ ID NO: 194462 - DNA, 22 bp, Artificial Sequence
  Synthetic oligonucleotide; TTT chr2 60456850 60456871 60456867 60456872 +
aaaggaaataaaagtttaagat

SEQ ID NO: 194463 - DNA, 22 bp, Artificial Sequence
  Synthetic oligonucleotide; TTA chr2 60456851 60456872 60456868 60456873 +
aaggaaataaaagtttaagatg

SEQ ID NO: 194464 - DNA, 22 bp, Artificial Sequence
  Synthetic oligonucleotide; TTT chr2 60456867 60456888 60456884 60456889 +
aagatgctattaccagcaagtt

SEQ ID NO: 194465 - DNA, 22 bp, Artificial Sequence
  Synthetic oligonucleotide; TTA chr2 60456868 60456889 60456885 60456890 +
agatgctattaccagcaagttt

SEQ ID NO: 194466 - DNA, 22 bp, Artificial Sequence
  Synthetic oligonucleotide; CTA chr2 60456876 60456897 60456893 60456898 +
ttaccagcaagttttttcactt

SEQ ID NO: 194467 - DNA, 22 bp, Artificial Sequence
  Synthetic oligonucleotide; TTA chr2 60456879 60456900 60456896 60456901 +
ccagcaagttttttcacttatg

SEQ ID NO: 194468 - DNA, 22 bp, Artificial Sequence
  Synthetic oligonucleotide; TTT chr2 60456890 60456911 60456907 60456912 +
tttcacttatgtttgaatggat

SEQ ID NO: 194469 - DNA, 22 bp, Artificial Sequence
  Synthetic oligonucleotide; TTT chr2 60456891 60456912 60456908 60456913 +
ttcacttatgtttgaatggatt

SEQ ID NO: 194470 - DNA, 22 bp, Artificial Sequence
  Synthetic oligonucleotide; TTT chr2 60456892 60456913 60456909 60456914 +
tcacttatgtttgaatggattt

SEQ ID NO: 194471 - DNA, 22 bp, Artificial Sequence
  Synthetic oligonucleotide; TTT chr2 60456893 60456914 60456910 60456915 +
cacttatgtttgaatggatttc

SEQ ID NO: 194472 - DNA, 22 bp, Artificial Sequence
  Synthetic oligonucleotide; TTC chr2 60456894 60456915 60456911 60456916 +
acttatgtttgaatggatttct

SEQ ID NO: 194473 - DNA, 22 bp, Artificial Sequence
  Synthetic oligonucleotide; CTT chr2 60456898 60456919 60456915 60456920 +
atgtttgaatggatttctgcta

SEQ ID NO: 194474 - DNA, 22 bp, Artificial Sequence
  Synthetic oligonucleotide; TTA chr2 60456899 60456920 60456916 60456921 +
tgtttgaatggatttctgctaa

SEQ ID NO: 194475 - DNA, 22 bp, Artificial Sequence
  Synthetic oligonucleotide; TTT chr2 60456904 60456925 60456921 60456926 +
gaatggatttctgctaagagat

SEQ ID NO: 194476 - DNA, 22 bp, Artificial Sequence
  Synthetic oligonucleotide; TTG chr2 60456905 60456926 60456922 60456927 +
aatggatttctgctaagagatg

SEQ ID NO: 194477 - DNA, 22 bp, Artificial Sequence
  Synthetic oligonucleotide; TTT chr2 60456914 60456935 60456931 60456936 +
ctgctaagagatggagtaagtt

SEQ ID NO: 194478 - DNA, 22 bp, Artificial Sequence
  Synthetic oligonucleotide; TTC chr2 60456915 60456936 60456932 60456937 +
tgctaagagatggagtaagttt

SEQ ID NO: 194479 - DNA, 22 bp, Artificial Sequence
  Synthetic oligonucleotide; CTG chr2 60456917 60456938 60456934 60456939 +
ctaagagatggagtaagttttt

SEQ ID NO: 194480 - DNA, 22 bp, Artificial Sequence
  Synthetic oligonucleotide; CTA chr2 60456920 60456941 60456937 60456942 +
agagatggagtaagtttttaac

SEQ ID NO: 194481 - DNA, 22 bp, Artificial Sequence
  Synthetic oligonucleotide; TTT chr2 60456937 60456958 60456954 60456959 +
ttaacatcagactgaaaacacc

SEQ ID NO: 194482 - DNA, 22 bp, Artificial Sequence
  Synthetic oligonucleotide; TTT chr2 60456938 60456959 60456955 60456960 +
taacatcagactgaaaacacct

SEQ ID NO: 194483 - DNA, 22 bp, Artificial Sequence
  Synthetic oligonucleotide; TTT chr2 60456939 60456960 60456956 60456961 +
aacatcagactgaaaacacctt

SEQ ID NO: 194484 - DNA, 22 bp, Artificial Sequence
  Synthetic oligonucleotide; TTA chr2 60456940 60456961 60456957 60456962 +
acatcagactgaaaacaccttc

SEQ ID NO: 194485 - DNA, 22 bp, Artificial Sequence
  Synthetic oligonucleotide; CTG chr2 60456951 60456972 60456968 60456973 +
aaaacaccttccatttcttgaa

SEQ ID NO: 194486 - DNA, 22 bp, Artificial Sequence
  Synthetic oligonucleotide; CTT chr2 60456961 60456982 60456978 60456983 +
ccatttcttgaaaactattcta

SEQ ID NO: 194487 - DNA, 22 bp, Artificial Sequence
  Synthetic oligonucleotide; TTC chr2 60456962 60456983 60456979 60456984 +
catttcttgaaaactattctaa

SEQ ID NO: 194488 - DNA, 22 bp, Artificial Sequence
  Synthetic oligonucleotide; TTT chr2 60456967 60456988 60456984 60456989 +
cttgaaaactattctaaactgg

SEQ ID NO: 194489 - DNA, 22 bp, Artificial Sequence
  Synthetic oligonucleotide; TTC chr2 60456968 60456989 60456985 60456990 +
ttgaaaactattctaaactgga

SEQ ID NO: 194490 - DNA, 22 bp, Artificial Sequence
  Synthetic oligonucleotide; CTT chr2 60456970 60456991 60456987 60456992 +
gaaaactattctaaactggaaa

SEQ ID NO: 194491 - DNA, 22 bp, Artificial Sequence
  Synthetic oligonucleotide; TTG chr2 60456971 60456992 60456988 60456993 +
aaaactattctaaactggaaag

SEQ ID NO: 194492 - DNA, 22 bp, Artificial Sequence
  Synthetic oligonucleotide; CTA chr2 60456978 60456999 60456995 60457000 +
ttctaaactggaaagccttaaa

SEQ ID NO: 194493 - DNA, 22 bp, Artificial Sequence
  Synthetic oligonucleotide; TTC chr2 60456981 60457002 60456998 60457003 +
taaactggaaagccttaaaact

SEQ ID NO: 194494 - DNA, 22 bp, Artificial Sequence
  Synthetic oligonucleotide; CTA chr2 60456983 60457004 60457000 60457005 +
aactggaaagccttaaaactat

SEQ ID NO: 194495 - DNA, 22 bp, Artificial Sequence
  Synthetic oligonucleotide; CTG chr2 60456988 60457009 60457005 60457010 +
gaaagccttaaaactatgtcca

SEQ ID NO: 194496 - DNA, 22 bp, Artificial Sequence
  Synthetic oligonucleotide; CTT chr2 60456997 60457018 60457014 60457019 +
aaaactatgtccagggtttgag

SEQ ID NO: 194497 - DNA, 22 bp, Artificial Sequence
  Synthetic oligonucleotide; TTA chr2 60456998 60457019 60457015 60457020 +
aaactatgtccagggtttgaga

SEQ ID NO: 194498 - DNA, 22 bp, Artificial Sequence
  Synthetic oligonucleotide; CTA chr2 60457004 60457025 60457021 60457026 +
tgtccagggtttgagatatgtc

SEQ ID NO: 194499 - DNA, 22 bp, Artificial Sequence
  Synthetic oligonucleotide; TTT chr2 60457016 60457037 60457033 60457038 +
gagatatgtctattttaatata

SEQ ID NO: 194500 - DNA, 22 bp, Artificial Sequence
  Synthetic oligonucleotide; TTG chr2 60457017 60457038 60457034 60457039 +
agatatgtctattttaatatag

SEQ ID NO: 194501 - DNA, 22 bp, Artificial Sequence
  Synthetic oligonucleotide; CTA chr2 60457028 60457049 60457045 60457050 +
ttttaatatagtaagtacttta

SEQ ID NO: 194502 - DNA, 22 bp, Artificial Sequence
  Synthetic oligonucleotide; TTT chr2 60457031 60457052 60457048 60457053 +
taatatagtaagtactttatgt

SEQ ID NO: 194503 - DNA, 22 bp, Artificial Sequence
  Synthetic oligonucleotide; TTT chr2 60457032 60457053 60457049 60457054 +
aatatagtaagtactttatgtt

SEQ ID NO: 194504 - DNA, 22 bp, Artificial Sequence
  Synthetic oligonucleotide; TTA chr2 60457033 60457054 60457050 60457055 +
atatagtaagtactttatgttc

SEQ ID NO: 194505 - DNA, 22 bp, Artificial Sequence
  Synthetic oligonucleotide; CTT chr2 60457048 60457069 60457065 60457070 +
tatgttcctttagggtataata

SEQ ID NO: 194506 - DNA, 22 bp, Artificial Sequence
  Synthetic oligonucleotide; TTT chr2 60457049 60457070 60457066 60457071 +
atgttcctttagggtataatac

SEQ ID NO: 194507 - DNA, 22 bp, Artificial Sequence
  Synthetic oligonucleotide; TTA chr2 60457050 60457071 60457067 60457072 +
tgttcctttagggtataataca

SEQ ID NO: 194508 - DNA, 22 bp, Artificial Sequence
  Synthetic oligonucleotide; TTC chr2 60457055 60457076 60457072 60457077 +
ctttagggtataatacacgcat

SEQ ID NO: 194509 - DNA, 22 bp, Artificial Sequence
  Synthetic oligonucleotide; CTT chr2 60457058 60457079 60457075 60457080 +
tagggtataatacacgcatcag

SEQ ID NO: 194510 - DNA, 22 bp, Artificial Sequence
  Synthetic oligonucleotide; TTT chr2 60457059 60457080 60457076 60457081 +
agggtataatacacgcatcaga

SEQ ID NO: 194511 - DNA, 22 bp, Artificial Sequence
  Synthetic oligonucleotide; TTA chr2 60457060 60457081 60457077 60457082 +
gggtataatacacgcatcagaa

SEQ ID NO: 194512 - DNA, 22 bp, Artificial Sequence
  Synthetic oligonucleotide; CTG chr2 60457102 60457123 60457119 60457124 +
aaaaagactgactggccttctc

SEQ ID NO: 194513 - DNA, 22 bp, Artificial Sequence
  Synthetic oligonucleotide; CTG chr2 60457112 60457133 60457129 60457134 +
actggccttctcttaaaacctg

SEQ ID NO: 194514 - DNA, 22 bp, Artificial Sequence
  Synthetic oligonucleotide; CTG chr2 60457116 60457137 60457133 60457138 +
gccttctcttaaaacctgttat

SEQ ID NO: 194515 - DNA, 22 bp, Artificial Sequence
  Synthetic oligonucleotide; CTT chr2 60457121 60457142 60457138 60457143 +
ctcttaaaacctgttattttct

SEQ ID NO: 194516 - DNA, 22 bp, Artificial Sequence
  Synthetic oligonucleotide; TTC chr2 60457122 60457143 60457139 60457144 +
tcttaaaacctgttattttctt

SEQ ID NO: 194517 - DNA, 22 bp, Artificial Sequence
  Synthetic oligonucleotide; CTC chr2 60457124 60457145 60457141 60457146 +
ttaaaacctgttattttcttgc

SEQ ID NO: 194518 - DNA, 22 bp, Artificial Sequence
  Synthetic oligonucleotide; CTT chr2 60457126 60457147 60457143 60457148 +
aaaacctgttattttcttgcaa

SEQ ID NO: 194519 - DNA, 22 bp, Artificial Sequence
  Synthetic oligonucleotide; TTA chr2 60457127 60457148 60457144 60457149 +
aaacctgttattttcttgcaag

SEQ ID NO: 194520 - DNA, 22 bp, Artificial Sequence
  Synthetic oligonucleotide; CTG chr2 60457134 60457155 60457151 60457156 +
ttattttcttgcaagtaattta

SEQ ID NO: 194521 - DNA, 22 bp, Artificial Sequence
  Synthetic oligonucleotide; TTA chr2 60457137 60457158 60457154 60457159 +
ttttcttgcaagtaatttacag

SEQ ID NO: 194522 - DNA, 22 bp, Artificial Sequence
  Synthetic oligonucleotide; TTT chr2 60457140 60457161 60457157 60457162 +
tcttgcaagtaatttacagagt

SEQ ID NO: 194523 - DNA, 22 bp, Artificial Sequence
  Synthetic oligonucleotide; TTT chr2 60457141 60457162 60457158 60457163 +
cttgcaagtaatttacagagtg

SEQ ID NO: 194524 - DNA, 22 bp, Artificial Sequence
  Synthetic oligonucleotide; TTC chr2 60457142 60457163 60457159 60457164 +
ttgcaagtaatttacagagtgt

SEQ ID NO: 194525 - DNA, 22 bp, Artificial Sequence
  Synthetic oligonucleotide; CTT chr2 60457144 60457165 60457161 60457166 +
gcaagtaatttacagagtgtgt

SEQ ID NO: 194526 - DNA, 22 bp, Artificial Sequence
  Synthetic oligonucleotide; TTG chr2 60457145 60457166 60457162 60457167 +
caagtaatttacagagtgtgtc

SEQ ID NO: 194527 - DNA, 22 bp, Artificial Sequence
  Synthetic oligonucleotide; TTT chr2 60457155 60457176 60457172 60457177 +
acagagtgtgtcaaatgaggac

SEQ ID NO: 194528 - DNA, 22 bp, Artificial Sequence
  Synthetic oligonucleotide; TTA chr2 60457156 60457177 60457173 60457178 +
cagagtgtgtcaaatgaggaca

SEQ ID NO: 194529 - DNA, 22 bp, Artificial Sequence
  Synthetic oligonucleotide; CTT chr2 60457188 60457209 60457205 60457210 +
acaatgtgtactttaatttttt

SEQ ID NO: 194530 - DNA, 22 bp, Artificial Sequence
  Synthetic oligonucleotide; TTA chr2 60457189 60457210 60457206 60457211 +
caatgtgtactttaattttttt

SEQ ID NO: 194531 - DNA, 22 bp, Artificial Sequence
  Synthetic oligonucleotide; CTT chr2 60457201 60457222 60457218 60457223 +
taattttttttattttttcaat

SEQ ID NO: 194532 - DNA, 22 bp, Artificial Sequence
  Synthetic oligonucleotide; TTT chr2 60457202 60457223 60457219 60457224 +
aattttttttattttttcaata

SEQ ID NO: 194533 - DNA, 22 bp, Artificial Sequence
  Synthetic oligonucleotide; TTA chr2 60457203 60457224 60457220 60457225 +
attttttttattttttcaataa

SEQ ID NO: 194534 - DNA, 22 bp, Artificial Sequence
  Synthetic oligonucleotide; TTT chr2 60457207 60457228 60457224 60457229 +
tttttattttttcaataaaggg

SEQ ID NO: 194535 - DNA, 22 bp, Artificial Sequence
  Synthetic oligonucleotide; TTT chr2 60457208 60457229 60457225 60457230 +
ttttattttttcaataaaggga

SEQ ID NO: 194536 - DNA, 22 bp, Artificial Sequence
  Synthetic oligonucleotide; TTT chr2 60457209 60457230 60457226 60457231 +
tttattttttcaataaagggac

SEQ ID NO: 194537 - DNA, 22 bp, Artificial Sequence
  Synthetic oligonucleotide; TTT chr2 60457210 60457231 60457227 60457232 +
ttattttttcaataaagggaca

SEQ ID NO: 194538 - DNA, 22 bp, Artificial Sequence
  Synthetic oligonucleotide; TTT chr2 60457211 60457232 60457228 60457233 +
tattttttcaataaagggacaa

SEQ ID NO: 194539 - DNA, 22 bp, Artificial Sequence
  Synthetic oligonucleotide; TTT chr2 60457212 60457233 60457229 60457234 +
attttttcaataaagggacaaa

SEQ ID NO: 194540 - DNA, 22 bp, Artificial Sequence
  Synthetic oligonucleotide; TTA chr2 60457213 60457234 60457230 60457235 +
ttttttcaataaagggacaaaa

SEQ ID NO: 194541 - DNA, 22 bp, Artificial Sequence
  Synthetic oligonucleotide; TTT chr2 60457216 60457237 60457233 60457238 +
tttcaataaagggacaaaatgg

SEQ ID NO: 194542 - DNA, 22 bp, Artificial Sequence
  Synthetic oligonucleotide; TTT chr2 60457217 60457238 60457234 60457239 +
ttcaataaagggacaaaatggg

SEQ ID NO: 194543 - DNA, 22 bp, Artificial Sequence
  Synthetic oligonucleotide; TTT chr2 60457218 60457239 60457235 60457240 +
tcaataaagggacaaaatgggt

SEQ ID NO: 194544 - DNA, 22 bp, Artificial Sequence
  Synthetic oligonucleotide; TTT chr2 60457219 60457240 60457236 60457241 +
caataaagggacaaaatgggtg

SEQ ID NO: 194545 - DNA, 22 bp, Artificial Sequence
  Synthetic oligonucleotide; TTC chr2 60457220 60457241 60457237 60457242 +
aataaagggacaaaatgggtgt

SEQ ID NO: 194546 - DNA, 22 bp, Artificial Sequence
  Synthetic oligonucleotide; TTA chr2 60457254 60457275 60457271 60457276 +
atgcagacaactgccaaaaaaa

SEQ ID NO: 194547 - DNA, 22 bp, Artificial Sequence
  Synthetic oligonucleotide; CTG chr2 60457267 60457288 60457284 60457289 +
ccaaaaaaacacagacagtggt

SEQ ID NO: 194548 - DNA, 22 bp, Artificial Sequence
  Synthetic oligonucleotide; TTT chr2 60457291 60457312 60457308 60457313 +
ttccaatagaacttaacaaaga

SEQ ID NO: 194549 - DNA, 22 bp, Artificial Sequence
  Synthetic oligonucleotide; TTT chr2 60457292 60457313 60457309 60457314 +
tccaatagaacttaacaaagac

SEQ ID NO: 194550 - DNA, 22 bp, Artificial Sequence
  Synthetic oligonucleotide; TTT chr2 60457293 60457314 60457310 60457315 +
ccaatagaacttaacaaagacc

SEQ ID NO: 194551 - DNA, 22 bp, Artificial Sequence
  Synthetic oligonucleotide; TTC chr2 60457294 60457315 60457311 60457316 +
caatagaacttaacaaagacca

SEQ ID NO: 194552 - DNA, 22 bp, Artificial Sequence
  Synthetic oligonucleotide; CTT chr2 60457305 60457326 60457322 60457327 +
aacaaagaccagaaacaaatac

SEQ ID NO: 194553 - DNA, 22 bp, Artificial Sequence
  Synthetic oligonucleotide; TTA chr2 60457306 60457327 60457323 60457328 +
acaaagaccagaaacaaataca

SEQ ID NO: 194554 - DNA, 22 bp, Artificial Sequence
  Synthetic oligonucleotide; TTG chr2 60457344 60457365 60457361 60457366 +
taatgacctttggtcatctaaa

SEQ ID NO: 194555 - DNA, 22 bp, Artificial Sequence
  Synthetic oligonucleotide; CTT chr2 60457354 60457375 60457371 60457376 +
tggtcatctaaataaaaaaaaa

SEQ ID NO: 194556 - DNA, 22 bp, Artificial Sequence
  Synthetic oligonucleotide; TTT chr2 60457355 60457376 60457372 60457377 +
ggtcatctaaataaaaaaaaaa

SEQ ID NO: 194557 - DNA, 22 bp, Artificial Sequence
  Synthetic oligonucleotide; TTG chr2 60457356 60457377 60457373 60457378 +
gtcatctaaataaaaaaaaaaa

SEQ ID NO: 194558 - DNA, 22 bp, Artificial Sequence
  Synthetic oligonucleotide; CTA chr2 60457364 60457385 60457381 60457386 +
aataaaaaaaaaaataaaaaca

SEQ ID NO: 194559 - DNA, 22 bp, Artificial Sequence
  Synthetic oligonucleotide; TTA chr2 60457409 60457430 60457426 60457431 +
agtgcctctgttttgaacaggg

SEQ ID NO: 194560 - DNA, 22 bp, Artificial Sequence
  Synthetic oligonucleotide; CTC chr2 60457417 60457438 60457434 60457439 +
tgttttgaacagggcacataag

SEQ ID NO: 194561 - DNA, 22 bp, Artificial Sequence
  Synthetic oligonucleotide; CTG chr2 60457419 60457440 60457436 60457441 +
ttttgaacagggcacataagca

SEQ ID NO: 194562 - DNA, 22 bp, Artificial Sequence
  Synthetic oligonucleotide; TTT chr2 60457422 60457443 60457439 60457444 +
tgaacagggcacataagcaata

SEQ ID NO: 194563 - DNA, 22 bp, Artificial Sequence
  Synthetic oligonucleotide; TTT chr2 60457423 60457444 60457440 60457445 +
gaacagggcacataagcaataa

SEQ ID NO: 194564 - DNA, 22 bp, Artificial Sequence
  Synthetic oligonucleotide; TTG chr2 60457424 60457445 60457441 60457446 +
aacagggcacataagcaataat

SEQ ID NO: 194565 - DNA, 22 bp, Artificial Sequence
  Synthetic oligonucleotide; CTC chr2 60457458 60457479 60457475 60457480 +
ccatagtaaaagataaaatttc

SEQ ID NO: 194566 - DNA, 22 bp, Artificial Sequence
  Synthetic oligonucleotide; TTT chr2 60457479 60457500 60457496 60457501 +
caagttacgacaaacagctttc

SEQ ID NO: 194567 - DNA, 22 bp, Artificial Sequence
  Synthetic oligonucleotide; TTC chr2 60457480 60457501 60457497 60457502 +
aagttacgacaaacagctttca

SEQ ID NO: 194568 - DNA, 22 bp, Artificial Sequence
  Synthetic oligonucleotide; TTA chr2 60457486 60457507 60457503 60457508 +
cgacaaacagctttcattacag

SEQ ID NO: 194569 - DNA, 22 bp, Artificial Sequence
  Synthetic oligonucleotide; CTT chr2 60457499 60457520 60457516 60457521 +
tcattacaggaatagaaaaggc

SEQ ID NO: 194570 - DNA, 22 bp, Artificial Sequence
  Synthetic oligonucleotide; TTT chr2 60457500 60457521 60457517 60457522 +
cattacaggaatagaaaaggcc

SEQ ID NO: 194571 - DNA, 22 bp, Artificial Sequence
  Synthetic oligonucleotide; TTC chr2 60457501 60457522 60457518 60457523 +
attacaggaatagaaaaggcca

SEQ ID NO: 194572 - DNA, 22 bp, Artificial Sequence
  Synthetic oligonucleotide; TTA chr2 60457505 60457526 60457522 60457527 +
caggaatagaaaaggccaataa

SEQ ID NO: 194573 - DNA, 22 bp, Artificial Sequence
  Synthetic oligonucleotide; TTC chr2 60457537 60457558 60457554 60457559 +
tgcattgccatttacaaaaaag

SEQ ID NO: 194574 - DNA, 22 bp, Artificial Sequence
  Synthetic oligonucleotide; CTG chr2 60457539 60457560 60457556 60457561 +
cattgccatttacaaaaaagta

SEQ ID NO: 194575 - DNA, 22 bp, Artificial Sequence
  Synthetic oligonucleotide; TTG chr2 60457544 60457565 60457561 60457566 +
ccatttacaaaaaagtattgac

SEQ ID NO: 194576 - DNA, 22 bp, Artificial Sequence
  Synthetic oligonucleotide; TTT chr2 60457550 60457571 60457567 60457572 +
acaaaaaagtattgactaaagc

SEQ ID NO: 194577 - DNA, 22 bp, Artificial Sequence
  Synthetic oligonucleotide; TTA chr2 60457551 60457572 60457568 60457573 +
caaaaaagtattgactaaagcg

SEQ ID NO: 194578 - DNA, 22 bp, Artificial Sequence
  Synthetic oligonucleotide; TTG chr2 60457564 60457585 60457581 60457586 +
actaaagcgggctttctcttta

SEQ ID NO: 194579 - DNA, 22 bp, Artificial Sequence
  Synthetic oligonucleotide; CTA chr2 60457568 60457589 60457585 60457590 +
aagcgggctttctctttaatat

SEQ ID NO: 194580 - DNA, 22 bp, Artificial Sequence
  Synthetic oligonucleotide; CTT chr2 60457578 60457599 60457595 60457600 +
tctctttaatatgctttgcata

SEQ ID NO: 194581 - DNA, 22 bp, Artificial Sequence
  Synthetic oligonucleotide; TTT chr2 60457579 60457600 60457596 60457601 +
ctctttaatatgctttgcatat

SEQ ID NO: 194582 - DNA, 22 bp, Artificial Sequence
  Synthetic oligonucleotide; TTC chr2 60457580 60457601 60457597 60457602 +
tctttaatatgctttgcatatg

SEQ ID NO: 194583 - DNA, 22 bp, Artificial Sequence
  Synthetic oligonucleotide; CTC chr2 60457582 60457603 60457599 60457604 +
tttaatatgctttgcatatgaa

SEQ ID NO: 194584 - DNA, 22 bp, Artificial Sequence
  Synthetic oligonucleotide; CTT chr2 60457584 60457605 60457601 60457606 +
taatatgctttgcatatgaaat

SEQ ID NO: 194585 - DNA, 22 bp, Artificial Sequence
  Synthetic oligonucleotide; TTT chr2 60457585 60457606 60457602 60457607 +
aatatgctttgcatatgaaatt

SEQ ID NO: 194586 - DNA, 22 bp, Artificial Sequence
  Synthetic oligonucleotide; TTA chr2 60457586 60457607 60457603 60457608 +
atatgctttgcatatgaaattc

SEQ ID NO: 194587 - DNA, 22 bp, Artificial Sequence
  Synthetic oligonucleotide; CTT chr2 60457594 60457615 60457611 60457616 +
tgcatatgaaattctttccaat

SEQ ID NO: 194588 - DNA, 22 bp, Artificial Sequence
  Synthetic oligonucleotide; TTT chr2 60457595 60457616 60457612 60457617 +
gcatatgaaattctttccaatc

SEQ ID NO: 194589 - DNA, 22 bp, Artificial Sequence
  Synthetic oligonucleotide; TTG chr2 60457596 60457617 60457613 60457618 +
catatgaaattctttccaatct

SEQ ID NO: 194590 - DNA, 22 bp, Artificial Sequence
  Synthetic oligonucleotide; TTC chr2 60457608 60457629 60457625 60457630 +
tttccaatctaaatataaagca

SEQ ID NO: 194591 - DNA, 22 bp, Artificial Sequence
  Synthetic oligonucleotide; CTT chr2 60457610 60457631 60457627 60457632 +
tccaatctaaatataaagcacc

SEQ ID NO: 194592 - DNA, 22 bp, Artificial Sequence
  Synthetic oligonucleotide; TTT chr2 60457611 60457632 60457628 60457633 +
ccaatctaaatataaagcacca

SEQ ID NO: 194593 - DNA, 22 bp, Artificial Sequence
  Synthetic oligonucleotide; TTC chr2 60457612 60457633 60457629 60457634 +
caatctaaatataaagcaccat

SEQ ID NO: 194594 - DNA, 22 bp, Artificial Sequence
  Synthetic oligonucleotide; CTA chr2 60457619 60457640 60457636 60457641 +
aatataaagcaccatttagttt

SEQ ID NO: 194595 - DNA, 22 bp, Artificial Sequence
  Synthetic oligonucleotide; TTT chr2 60457636 60457657 60457653 60457658 +
agtttttggcaatgaaaaaaac

SEQ ID NO: 194596 - DNA, 22 bp, Artificial Sequence
  Synthetic oligonucleotide; TTA chr2 60457637 60457658 60457654 60457659 +
gtttttggcaatgaaaaaaact

SEQ ID NO: 194597 - DNA, 22 bp, Artificial Sequence
  Synthetic oligonucleotide; TTT chr2 60457641 60457662 60457658 60457663 +
ttggcaatgaaaaaaactgcaa

SEQ ID NO: 194598 - DNA, 22 bp, Artificial Sequence
  Synthetic oligonucleotide; TTT chr2 60457642 60457663 60457659 60457664 +
tggcaatgaaaaaaactgcaaa

SEQ ID NO: 194599 - DNA, 22 bp, Artificial Sequence
  Synthetic oligonucleotide; TTT chr2 60457643 60457664 60457660 60457665 +
ggcaatgaaaaaaactgcaaaa

SEQ ID NO: 194600 - DNA, 22 bp, Artificial Sequence
  Synthetic oligonucleotide; TTG chr2 60457644 60457665 60457661 60457666 +
gcaatgaaaaaaactgcaaaac

SEQ ID NO: 194601 - DNA, 22 bp, Artificial Sequence
  Synthetic oligonucleotide; CTG chr2 60457660 60457681 60457677 60457682 +
caaaacattggttttttttttt

SEQ ID NO: 194602 - DNA, 22 bp, Artificial Sequence
  Synthetic oligonucleotide; TTG chr2 60457670 60457691 60457687 60457692 +
gtttttttttttttttcctttt

SEQ ID NO: 194603 - DNA, 22 bp, Artificial Sequence
  Synthetic oligonucleotide; TTT chr2 60457674 60457695 60457691 60457696 +
ttttttttttttcctttttttt

SEQ ID NO: 194604 - DNA, 22 bp, Artificial Sequence
  Synthetic oligonucleotide; TTT chr2 60457675 60457696 60457692 60457697 +
tttttttttttccttttttttt

SEQ ID NO: 194605 - DNA, 22 bp, Artificial Sequence
  Synthetic oligonucleotide; TTT chr2 60457676 60457697 60457693 60457698 +
ttttttttttcctttttttttc

SEQ ID NO: 194606 - DNA, 22 bp, Artificial Sequence
  Synthetic oligonucleotide; TTT chr2 60457677 60457698 60457694 60457699 +
tttttttttcctttttttttct

SEQ ID NO: 194607 - DNA, 22 bp, Artificial Sequence
  Synthetic oligonucleotide; TTT chr2 60457678 60457699 60457695 60457700 +
ttttttttcctttttttttctt

SEQ ID NO: 194608 - DNA, 22 bp, Artificial Sequence
  Synthetic oligonucleotide; TTT chr2 60457679 60457700 60457696 60457701 +
tttttttcctttttttttcttt

SEQ ID NO: 194609 - DNA, 22 bp, Artificial Sequence
  Synthetic oligonucleotide; TTT chr2 60457680 60457701 60457697 60457702 +
ttttttcctttttttttctttc

SEQ ID NO: 194610 - DNA, 22 bp, Artificial Sequence
  Synthetic oligonucleotide; TTT chr2 60457681 60457702 60457698 60457703 +
tttttcctttttttttctttct

SEQ ID NO: 194611 - DNA, 22 bp, Artificial Sequence
  Synthetic oligonucleotide; TTT chr2 60457682 60457703 60457699 60457704 +
ttttcctttttttttctttctt

SEQ ID NO: 194612 - DNA, 22 bp, Artificial Sequence
  Synthetic oligonucleotide; TTT chr2 60457683 60457704 60457700 60457705 +
tttcctttttttttctttcttt

SEQ ID NO: 194613 - DNA, 22 bp, Artificial Sequence
  Synthetic oligonucleotide; TTT chr2 60457684 60457705 60457701 60457706 +
ttcctttttttttctttctttc

SEQ ID NO: 194614 - DNA, 22 bp, Artificial Sequence
  Synthetic oligonucleotide; TTT chr2 60457685 60457706 60457702 60457707 +
tcctttttttttctttctttct

SEQ ID NO: 194615 - DNA, 22 bp, Artificial Sequence
  Synthetic oligonucleotide; TTT chr2 60457686 60457707 60457703 60457708 +
cctttttttttctttctttctt

SEQ ID NO: 194616 - DNA, 22 bp, Artificial Sequence
  Synthetic oligonucleotide; TTC chr2 60457687 60457708 60457704 60457709 +
ctttttttttctttctttcttt

SEQ ID NO: 194617 - DNA, 22 bp, Artificial Sequence
  Synthetic oligonucleotide; CTT chr2 60457690 60457711 60457707 60457712 +
tttttttctttctttcttttac

SEQ ID NO: 194618 - DNA, 22 bp, Artificial Sequence
  Synthetic oligonucleotide; TTT chr2 60457691 60457712 60457708 60457713 +
ttttttctttctttcttttact

SEQ ID NO: 194619 - DNA, 22 bp, Artificial Sequence
  Synthetic oligonucleotide; TTT chr2 60457692 60457713 60457709 60457714 +
tttttctttctttcttttactg

SEQ ID NO: 194620 - DNA, 22 bp, Artificial Sequence
  Synthetic oligonucleotide; TTT chr2 60457693 60457714 60457710 60457715 +
ttttctttctttcttttactgc

SEQ ID NO: 194621 - DNA, 22 bp, Artificial Sequence
  Synthetic oligonucleotide; TTT chr2 60457694 60457715 60457711 60457716 +
tttctttctttcttttactgca

SEQ ID NO: 194622 - DNA, 22 bp, Artificial Sequence
  Synthetic oligonucleotide; TTT chr2 60457695 60457716 60457712 60457717 +
ttctttctttcttttactgcat

SEQ ID NO: 194623 - DNA, 22 bp, Artificial Sequence
  Synthetic oligonucleotide; TTT chr2 60457696 60457717 60457713 60457718 +
tctttctttcttttactgcata

SEQ ID NO: 194624 - DNA, 22 bp, Artificial Sequence
  Synthetic oligonucleotide; TTT chr2 60457697 60457718 60457714 60457719 +
ctttctttcttttactgcatat

SEQ ID NO: 194625 - DNA, 22 bp, Artificial Sequence
  Synthetic oligonucleotide; TTC chr2 60457698 60457719 60457715 60457720 +
tttctttcttttactgcatatg

SEQ ID NO: 194626 - DNA, 22 bp, Artificial Sequence
  Synthetic oligonucleotide; CTT chr2 60457700 60457721 60457717 60457722 +
tctttcttttactgcatatgaa

SEQ ID NO: 194627 - DNA, 22 bp, Artificial Sequence
  Synthetic oligonucleotide; TTT chr2 60457701 60457722 60457718 60457723 +
ctttcttttactgcatatgaag

SEQ ID NO: 194628 - DNA, 22 bp, Artificial Sequence
  Synthetic oligonucleotide; TTC chr2 60457702 60457723 60457719 60457724 +
tttcttttactgcatatgaagg

SEQ ID NO: 194629 - DNA, 22 bp, Artificial Sequence
  Synthetic oligonucleotide; CTT chr2 60457704 60457725 60457721 60457726 +
tcttttactgcatatgaaggta

SEQ ID NO: 194630 - DNA, 22 bp, Artificial Sequence
  Synthetic oligonucleotide; TTT chr2 60457705 60457726 60457722 60457727 +
cttttactgcatatgaaggtaa

SEQ ID NO: 194631 - DNA, 22 bp, Artificial Sequence
  Synthetic oligonucleotide; TTC chr2 60457706 60457727 60457723 60457728 +
ttttactgcatatgaaggtaag

SEQ ID NO: 194632 - DNA, 22 bp, Artificial Sequence
  Synthetic oligonucleotide; CTT chr2 60457708 60457729 60457725 60457730 +
ttactgcatatgaaggtaagat

SEQ ID NO: 194633 - DNA, 22 bp, Artificial Sequence
  Synthetic oligonucleotide; TTT chr2 60457709 60457730 60457726 60457731 +
tactgcatatgaaggtaagatg

SEQ ID NO: 194634 - DNA, 22 bp, Artificial Sequence
  Synthetic oligonucleotide; TTT chr2 60457710 60457731 60457727 60457732 +
actgcatatgaaggtaagatgc

SEQ ID NO: 194635 - DNA, 22 bp, Artificial Sequence
  Synthetic oligonucleotide; TTA chr2 60457711 60457732 60457728 60457733 +
ctgcatatgaaggtaagatgct

SEQ ID NO: 194636 - DNA, 22 bp, Artificial Sequence
  Synthetic oligonucleotide; CTG chr2 60457714 60457735 60457731 60457736 +
catatgaaggtaagatgctgga

SEQ ID NO: 194637 - DNA, 22 bp, Artificial Sequence
  Synthetic oligonucleotide; CTG chr2 60457734 60457755 60457751 60457756 +
gaatgtagggtgatagaaggaa

SEQ ID NO: 194638 - DNA, 22 bp, Artificial Sequence
  Synthetic oligonucleotide; CTA chr2 60457775 60457796 60457792 60457797 +
cataacaaaccaacgttattag

SEQ ID NO: 194639 - DNA, 22 bp, Artificial Sequence
  Synthetic oligonucleotide; TTA chr2 60457793 60457814 60457810 60457815 +
ttagcttgcagtactgcataca

SEQ ID NO: 194640 - DNA, 22 bp, Artificial Sequence
  Synthetic oligonucleotide; TTA chr2 60457796 60457817 60457813 60457818 +
gcttgcagtactgcatacagta

SEQ ID NO: 194641 - DNA, 22 bp, Artificial Sequence
  Synthetic oligonucleotide; CTT chr2 60457800 60457821 60457817 60457822 +
gcagtactgcatacagtatggc

SEQ ID NO: 194642 - DNA, 22 bp, Artificial Sequence
  Synthetic oligonucleotide; TTG chr2 60457801 60457822 60457818 60457823 +
cagtactgcatacagtatggca

SEQ ID NO: 194643 - DNA, 22 bp, Artificial Sequence
  Synthetic oligonucleotide; CTG chr2 60457809 60457830 60457826 60457831 +
catacagtatggcagcaggaaa

SEQ ID NO: 194644 - DNA, 22 bp, Artificial Sequence
  Synthetic oligonucleotide; CTA chr2 60457862 60457883 60457879 60457884 +
tgacagccatccatgtgacatt

SEQ ID NO: 194645 - DNA, 22 bp, Artificial Sequence
  Synthetic oligonucleotide; TTC chr2 60457885 60457906 60457902 60457907 +
tagcaggctcccccaaaccgcc

SEQ ID NO: 194646 - DNA, 22 bp, Artificial Sequence
  Synthetic oligonucleotide; CTA chr2 60457887 60457908 60457904 60457909 +
gcaggctcccccaaaccgccat

SEQ ID NO: 194647 - DNA, 22 bp, Artificial Sequence
  Synthetic oligonucleotide; CTC chr2 60457895 60457916 60457912 60457917 +
ccccaaaccgccattatatggc

SEQ ID NO: 194648 - DNA, 22 bp, Artificial Sequence
  Synthetic oligonucleotide; TTA chr2 60457911 60457932 60457928 60457933 +
tatggcttctcatctgtaatgt

SEQ ID NO: 194649 - DNA, 22 bp, Artificial Sequence
  Synthetic oligonucleotide; CTT chr2 60457919 60457940 60457936 60457941 +
ctcatctgtaatgtcacacttt

SEQ ID NO: 194650 - DNA, 22 bp, Artificial Sequence
  Synthetic oligonucleotide; TTC chr2 60457920 60457941 60457937 60457942 +
tcatctgtaatgtcacactttt

SEQ ID NO: 194651 - DNA, 22 bp, Artificial Sequence
  Synthetic oligonucleotide; CTC chr2 60457922 60457943 60457939 60457944 +
atctgtaatgtcacactttttt

SEQ ID NO: 194652 - DNA, 22 bp, Artificial Sequence
  Synthetic oligonucleotide; CTG chr2 60457927 60457948 60457944 60457949 +
taatgtcacacttttttgtttc

SEQ ID NO: 194653 - DNA, 22 bp, Artificial Sequence
  Synthetic oligonucleotide; CTT chr2 60457940 60457961 60457957 60457962 +
ttttgtttctctcttttttttt

SEQ ID NO: 194654 - DNA, 22 bp, Artificial Sequence
  Synthetic oligonucleotide; TTT chr2 60457941 60457962 60457958 60457963 +
tttgtttctctctttttttttt

SEQ ID NO: 194655 - DNA, 22 bp, Artificial Sequence
  Synthetic oligonucleotide; TTT chr2 60457942 60457963 60457959 60457964 +
ttgtttctctcttttttttttt

SEQ ID NO: 194656 - DNA, 22 bp, Artificial Sequence
  Synthetic oligonucleotide; TTT chr2 60457943 60457964 60457960 60457965 +
tgtttctctctttttttttttt

SEQ ID NO: 194657 - DNA, 22 bp, Artificial Sequence
  Synthetic oligonucleotide; TTT chr2 60457944 60457965 60457961 60457966 +
gtttctctcttttttttttttt

SEQ ID NO: 194658 - DNA, 22 bp, Artificial Sequence
  Synthetic oligonucleotide; TTG chr2 60457945 60457966 60457962 60457967 +
tttctctctttttttttttttt

SEQ ID NO: 194659 - DNA, 22 bp, Artificial Sequence
  Synthetic oligonucleotide; TTT chr2 60457948 60457969 60457965 60457970 +
ctctcttttttttttttttgaa

SEQ ID NO: 194660 - DNA, 22 bp, Artificial Sequence
  Synthetic oligonucleotide; TTC chr2 60457949 60457970 60457966 60457971 +
tctcttttttttttttttgaag

SEQ ID NO: 194661 - DNA, 22 bp, Artificial Sequence
  Synthetic oligonucleotide; CTC chr2 60457951 60457972 60457968 60457973 +
tcttttttttttttttgaagca

SEQ ID NO: 194662 - DNA, 22 bp, Artificial Sequence
  Synthetic oligonucleotide; CTC chr2 60457953 60457974 60457970 60457975 +
ttttttttttttttgaagcata

SEQ ID NO: 194663 - DNA, 22 bp, Artificial Sequence
  Synthetic oligonucleotide; CTT chr2 60457955 60457976 60457972 60457977 +
ttttttttttttgaagcataca

SEQ ID NO: 194664 - DNA, 22 bp, Artificial Sequence
  Synthetic oligonucleotide; TTT chr2 60457956 60457977 60457973 60457978 +
tttttttttttgaagcatacaa

SEQ ID NO: 194665 - DNA, 22 bp, Artificial Sequence
  Synthetic oligonucleotide; TTT chr2 60457957 60457978 60457974 60457979 +
ttttttttttgaagcatacaaa

SEQ ID NO: 194666 - DNA, 22 bp, Artificial Sequence
  Synthetic oligonucleotide; TTT chr2 60457958 60457979 60457975 60457980 +
tttttttttgaagcatacaaat

SEQ ID NO: 194667 - DNA, 22 bp, Artificial Sequence
  Synthetic oligonucleotide; TTT chr2 60457959 60457980 60457976 60457981 +
ttttttttgaagcatacaaata

SEQ ID NO: 194668 - DNA, 22 bp, Artificial Sequence
  Synthetic oligonucleotide; TTT chr2 60457960 60457981 60457977 60457982 +
tttttttgaagcatacaaataa

SEQ ID NO: 194669 - DNA, 22 bp, Artificial Sequence
  Synthetic oligonucleotide; TTT chr2 60457961 60457982 60457978 60457983 +
ttttttgaagcatacaaataat

SEQ ID NO: 194670 - DNA, 22 bp, Artificial Sequence
  Synthetic oligonucleotide; TTT chr2 60457962 60457983 60457979 60457984 +
tttttgaagcatacaaataatt

SEQ ID NO: 194671 - DNA, 22 bp, Artificial Sequence
  Synthetic oligonucleotide; TTT chr2 60457963 60457984 60457980 60457985 +
ttttgaagcatacaaataattt

SEQ ID NO: 194672 - DNA, 22 bp, Artificial Sequence
  Synthetic oligonucleotide; TTT chr2 60457964 60457985 60457981 60457986 +
tttgaagcatacaaataatttg

SEQ ID NO: 194673 - DNA, 22 bp, Artificial Sequence
  Synthetic oligonucleotide; TTT chr2 60457965 60457986 60457982 60457987 +
ttgaagcatacaaataatttgc

SEQ ID NO: 194674 - DNA, 22 bp, Artificial Sequence
  Synthetic oligonucleotide; TTT chr2 60457966 60457987 60457983 60457988 +
tgaagcatacaaataatttgca

SEQ ID NO: 194675 - DNA, 22 bp, Artificial Sequence
  Synthetic oligonucleotide; TTT chr2 60457967 60457988 60457984 60457989 +
gaagcatacaaataatttgcac

SEQ ID NO: 194676 - DNA, 22 bp, Artificial Sequence
  Synthetic oligonucleotide; TTG chr2 60457968 60457989 60457985 60457990 +
aagcatacaaataatttgcact

SEQ ID NO: 194677 - DNA, 22 bp, Artificial Sequence
  Synthetic oligonucleotide; TTT chr2 60457985 60458006 60458002 60458007 +
gcactatattatcctgccaaat

SEQ ID NO: 194678 - DNA, 22 bp, Artificial Sequence
  Synthetic oligonucleotide; TTG chr2 60457986 60458007 60458003 60458008 +
cactatattatcctgccaaatt

SEQ ID NO: 194679 - DNA, 22 bp, Artificial Sequence
  Synthetic oligonucleotide; CTA chr2 60457991 60458012 60458008 60458013 +
tattatcctgccaaattaaaaa

SEQ ID NO: 194680 - DNA, 22 bp, Artificial Sequence
  Synthetic oligonucleotide; TTA chr2 60457996 60458017 60458013 60458018 +
tcctgccaaattaaaaaaatat

SEQ ID NO: 194681 - DNA, 22 bp, Artificial Sequence
  Synthetic oligonucleotide; CTG chr2 60458001 60458022 60458018 60458023 +
ccaaattaaaaaaatatactgt

SEQ ID NO: 194682 - DNA, 22 bp, Artificial Sequence
  Synthetic oligonucleotide; TTA chr2 60458009 60458030 60458026 60458031 +
aaaaaatatactgtggcagcct

SEQ ID NO: 194683 - DNA, 22 bp, Artificial Sequence
  Synthetic oligonucleotide; CTG chr2 60458022 60458043 60458039 60458044 +
tggcagcctgtctttttttttt

SEQ ID NO: 194684 - DNA, 22 bp, Artificial Sequence
  Synthetic oligonucleotide; CTG chr2 60458032 60458053 60458049 60458054 +
tcttttttttttccactaccaa

SEQ ID NO: 194685 - DNA, 22 bp, Artificial Sequence
  Synthetic oligonucleotide; CTT chr2 60458036 60458057 60458053 60458058 +
ttttttttccactaccaaaaaa

SEQ ID NO: 194686 - DNA, 22 bp, Artificial Sequence
  Synthetic oligonucleotide; TTT chr2 60458037 60458058 60458054 60458059 +
tttttttccactaccaaaaaag

SEQ ID NO: 194687 - DNA, 22 bp, Artificial Sequence
  Synthetic oligonucleotide; TTT chr2 60458038 60458059 60458055 60458060 +
ttttttccactaccaaaaaagg

SEQ ID NO: 194688 - DNA, 22 bp, Artificial Sequence
  Synthetic oligonucleotide; TTT chr2 60458039 60458060 60458056 60458061 +
tttttccactaccaaaaaaggt

SEQ ID NO: 194689 - DNA, 22 bp, Artificial Sequence
  Synthetic oligonucleotide; TTT chr2 60458040 60458061 60458057 60458062 +
ttttccactaccaaaaaaggta

SEQ ID NO: 194690 - DNA, 22 bp, Artificial Sequence
  Synthetic oligonucleotide; TTT chr2 60458041 60458062 60458058 60458063 +
tttccactaccaaaaaaggtac

SEQ ID NO: 194691 - DNA, 22 bp, Artificial Sequence
  Synthetic oligonucleotide; TTT chr2 60458042 60458063 60458059 60458064 +
ttccactaccaaaaaaggtaca

SEQ ID NO: 194692 - DNA, 22 bp, Artificial Sequence
  Synthetic oligonucleotide; TTT chr2 60458043 60458064 60458060 60458065 +
tccactaccaaaaaaggtacat

SEQ ID NO: 194693 - DNA, 22 bp, Artificial Sequence
  Synthetic oligonucleotide; TTT chr2 60458044 60458065 60458061 60458066 +
ccactaccaaaaaaggtacatt

SEQ ID NO: 194694 - DNA, 22 bp, Artificial Sequence
  Synthetic oligonucleotide; TTC chr2 60458045 60458066 60458062 60458067 +
cactaccaaaaaaggtacattg

SEQ ID NO: 194695 - DNA, 22 bp, Artificial Sequence
  Synthetic oligonucleotide; CTA chr2 60458050 60458071 60458067 60458072 +
ccaaaaaaggtacattgatacc

SEQ ID NO: 194696 - DNA, 22 bp, Artificial Sequence
  Synthetic oligonucleotide; TTG chr2 60458067 60458088 60458084 60458089 +
ataccttttaagagaacaagca

SEQ ID NO: 194697 - DNA, 22 bp, Artificial Sequence
  Synthetic oligonucleotide; CTT chr2 60458074 60458095 60458091 60458096 +
ttaagagaacaagcaacagtta

SEQ ID NO: 194698 - DNA, 22 bp, Artificial Sequence
  Synthetic oligonucleotide; TTT chr2 60458075 60458096 60458092 60458097 +
taagagaacaagcaacagttaa

SEQ ID NO: 194699 - DNA, 22 bp, Artificial Sequence
  Synthetic oligonucleotide; TTT chr2 60458076 60458097 60458093 60458098 +
aagagaacaagcaacagttaaa

SEQ ID NO: 194700 - DNA, 22 bp, Artificial Sequence
  Synthetic oligonucleotide; TTA chr2 60458077 60458098 60458094 60458099 +
agagaacaagcaacagttaaaa

SEQ ID NO: 194701 - DNA, 22 bp, Artificial Sequence
  Synthetic oligonucleotide; TTA chr2 60458096 60458117 60458113 60458118 +
aaaatacaagcttcaatataaa

SEQ ID NO: 194702 - DNA, 22 bp, Artificial Sequence
  Synthetic oligonucleotide; CTT chr2 60458109 60458130 60458126 60458131 +
caatataaatactatagtgcct

SEQ ID NO: 194703 - DNA, 22 bp, Artificial Sequence
  Synthetic oligonucleotide; TTC chr2 60458110 60458131 60458127 60458132 +
aatataaatactatagtgccta

SEQ ID NO: 194704 - DNA, 22 bp, Artificial Sequence
  Synthetic oligonucleotide; CTA chr2 60458123 60458144 60458140 60458145 +
tagtgcctaacactagatgaac

SEQ ID NO: 194705 - DNA, 22 bp, Artificial Sequence
  Synthetic oligonucleotide; CTA chr2 60458132 60458153 60458149 60458154 +
acactagatgaacatttaattc

SEQ ID NO: 194706 - DNA, 22 bp, Artificial Sequence
  Synthetic oligonucleotide; CTA chr2 60458138 60458159 60458155 60458160 +
gatgaacatttaattcaaatac

SEQ ID NO: 194707 - DNA, 22 bp, Artificial Sequence
  Synthetic oligonucleotide; TTT chr2 60458149 60458170 60458166 60458171 +
aattcaaataccattctagaaa

SEQ ID NO: 194708 - DNA, 22 bp, Artificial Sequence
  Synthetic oligonucleotide; TTA chr2 60458150 60458171 60458167 60458172 +
attcaaataccattctagaaat

SEQ ID NO: 194709 - DNA, 22 bp, Artificial Sequence
  Synthetic oligonucleotide; TTC chr2 60458154 60458175 60458171 60458176 +
aaataccattctagaaatacag

SEQ ID NO: 194710 - DNA, 22 bp, Artificial Sequence
  Synthetic oligonucleotide; TTC chr2 60458165 60458186 60458182 60458187 +
tagaaatacagaaaaaagacca

SEQ ID NO: 194711 - DNA, 22 bp, Artificial Sequence
  Synthetic oligonucleotide; CTA chr2 60458167 60458188 60458184 60458189 +
gaaatacagaaaaaagaccata

SEQ ID NO: 194712 - DNA, 22 bp, Artificial Sequence
  Synthetic oligonucleotide; TTT chr2 60458198 60458219 60458215 60458220 +
tagcataggaatcaacatgagt

SEQ ID NO: 194713 - DNA, 22 bp, Artificial Sequence
  Synthetic oligonucleotide; TTT chr2 60458199 60458220 60458216 60458221 +
agcataggaatcaacatgagtg

SEQ ID NO: 194714 - DNA, 22 bp, Artificial Sequence
  Synthetic oligonucleotide; TTA chr2 60458200 60458221 60458217 60458222 +
gcataggaatcaacatgagtgt

SEQ ID NO: 194715 - DNA, 22 bp, Artificial Sequence
  Synthetic oligonucleotide; TTT chr2 60458228 60458249 60458245 60458250 +
tcctatatttaagtactatata

SEQ ID NO: 194716 - DNA, 22 bp, Artificial Sequence
  Synthetic oligonucleotide; TTT chr2 60458229 60458250 60458246 60458251 +
cctatatttaagtactatataa

SEQ ID NO: 194717 - DNA, 22 bp, Artificial Sequence
  Synthetic oligonucleotide; TTC chr2 60458230 60458251 60458247 60458252 +
ctatatttaagtactatataat

SEQ ID NO: 194718 - DNA, 22 bp, Artificial Sequence
  Synthetic oligonucleotide; CTA chr2 60458233 60458254 60458250 60458255 +
tatttaagtactatataatctt

SEQ ID NO: 194719 - DNA, 22 bp, Artificial Sequence
  Synthetic oligonucleotide; TTT chr2 60458238 60458259 60458255 60458260 +
aagtactatataatcttaaacc

SEQ ID NO: 194720 - DNA, 22 bp, Artificial Sequence
  Synthetic oligonucleotide; TTA chr2 60458239 60458260 60458256 60458261 +
agtactatataatcttaaacct

SEQ ID NO: 194721 - DNA, 22 bp, Artificial Sequence
  Synthetic oligonucleotide; CTA chr2 60458246 60458267 60458263 60458268 +
tataatcttaaacctttcccca

SEQ ID NO: 194722 - DNA, 22 bp, Artificial Sequence
  Synthetic oligonucleotide; CTT chr2 60458255 60458276 60458272 60458277 +
aaacctttccccaatgtatgtt

SEQ ID NO: 194723 - DNA, 22 bp, Artificial Sequence
  Synthetic oligonucleotide; TTA chr2 60458256 60458277 60458273 60458278 +
aacctttccccaatgtatgttt

SEQ ID NO: 194724 - DNA, 22 bp, Artificial Sequence
  Synthetic oligonucleotide; CTT chr2 60458262 60458283 60458279 60458284 +
tccccaatgtatgttttttttt

SEQ ID NO: 194725 - DNA, 22 bp, Artificial Sequence
  Synthetic oligonucleotide; TTT chr2 60458263 60458284 60458280 60458285 +
ccccaatgtatgtttttttttt

SEQ ID NO: 194726 - DNA, 22 bp, Artificial Sequence
  Synthetic oligonucleotide; TTC chr2 60458264 60458285 60458281 60458286 +
cccaatgtatgttttttttttt

SEQ ID NO: 194727 - DNA, 22 bp, Artificial Sequence
  Synthetic oligonucleotide; TTT chr2 60458278 60458299 60458295 60458300 +
tttttttttacaacctgaagag

SEQ ID NO: 194728 - DNA, 22 bp, Artificial Sequence
  Synthetic oligonucleotide; TTT chr2 60458279 60458300 60458296 60458301 +
ttttttttacaacctgaagagc

SEQ ID NO: 194729 - DNA, 22 bp, Artificial Sequence
  Synthetic oligonucleotide; TTT chr2 60458280 60458301 60458297 60458302 +
tttttttacaacctgaagagcg

SEQ ID NO: 194730 - DNA, 22 bp, Artificial Sequence
  Synthetic oligonucleotide; TTT chr2 60458281 60458302 60458298 60458303 +
ttttttacaacctgaagagcgg

SEQ ID NO: 194731 - DNA, 22 bp, Artificial Sequence
  Synthetic oligonucleotide; TTT chr2 60458282 60458303 60458299 60458304 +
tttttacaacctgaagagcggt

SEQ ID NO: 194732 - DNA, 22 bp, Artificial Sequence
  Synthetic oligonucleotide; TTT chr2 60458283 60458304 60458300 60458305 +
ttttacaacctgaagagcggtg

SEQ ID NO: 194733 - DNA, 22 bp, Artificial Sequence
  Synthetic oligonucleotide; TTT chr2 60458284 60458305 60458301 60458306 +
tttacaacctgaagagcggtgt

SEQ ID NO: 194734 - DNA, 22 bp, Artificial Sequence
  Synthetic oligonucleotide; TTT chr2 60458285 60458306 60458302 60458307 +
ttacaacctgaagagcggtgtg

SEQ ID NO: 194735 - DNA, 22 bp, Artificial Sequence
  Synthetic oligonucleotide; TTT chr2 60458286 60458307 60458303 60458308 +
tacaacctgaagagcggtgtgt

SEQ ID NO: 194736 - DNA, 22 bp, Artificial Sequence
  Synthetic oligonucleotide; TTT chr2 60458287 60458308 60458304 60458309 +
acaacctgaagagcggtgtgta

SEQ ID NO: 194737 - DNA, 22 bp, Artificial Sequence
  Synthetic oligonucleotide; TTA chr2 60458288 60458309 60458305 60458310 +
caacctgaagagcggtgtgtat

SEQ ID NO: 194738 - DNA, 22 bp, Artificial Sequence
  Synthetic oligonucleotide; CTG chr2 60458295 60458316 60458312 60458317 +
aagagcggtgtgtatccaaggc

SEQ ID NO: 194739 - DNA, 22 bp, Artificial Sequence
  Synthetic oligonucleotide; TTT chr2 60458326 60458347 60458343 60458348 +
ccactaccatttttaaatggat

SEQ ID NO: 194740 - DNA, 22 bp, Artificial Sequence
  Synthetic oligonucleotide; TTC chr2 60458327 60458348 60458344 60458349 +
cactaccatttttaaatggata

SEQ ID NO: 194741 - DNA, 22 bp, Artificial Sequence
  Synthetic oligonucleotide; CTA chr2 60458332 60458353 60458349 60458354 +
ccatttttaaatggataacaag

SEQ ID NO: 194742 - DNA, 22 bp, Artificial Sequence
  Synthetic oligonucleotide; TTT chr2 60458338 60458359 60458355 60458360 +
ttaaatggataacaagtcttgt

SEQ ID NO: 194743 - DNA, 22 bp, Artificial Sequence
  Synthetic oligonucleotide; TTT chr2 60458339 60458360 60458356 60458361 +
taaatggataacaagtcttgta

SEQ ID NO: 194744 - DNA, 22 bp, Artificial Sequence
  Synthetic oligonucleotide; TTT chr2 60458340 60458361 60458357 60458362 +
aaatggataacaagtcttgtaa

SEQ ID NO: 194745 - DNA, 22 bp, Artificial Sequence
  Synthetic oligonucleotide; TTA chr2 60458341 60458362 60458358 60458363 +
aatggataacaagtcttgtaac

SEQ ID NO: 194746 - DNA, 22 bp, Artificial Sequence
  Synthetic oligonucleotide; CTT chr2 60458358 60458379 60458375 60458380 +
gtaacaccaccaagacaatgga

SEQ ID NO: 194747 - DNA, 22 bp, Artificial Sequence
  Synthetic oligonucleotide; TTG chr2 60458359 60458380 60458376 60458381 +
taacaccaccaagacaatggaa

SEQ ID NO: 194748 - DNA, 22 bp, Artificial Sequence
  Synthetic oligonucleotide; CTA chr2 60458386 60458407 60458403 60458408 +
aaatgcagttcccccctaaaca

SEQ ID NO: 194749 - DNA, 22 bp, Artificial Sequence
  Synthetic oligonucleotide; TTC chr2 60458397 60458418 60458414 60458419 +
ccccctaaacataatgaagtgt

SEQ ID NO: 194750 - DNA, 22 bp, Artificial Sequence
  Synthetic oligonucleotide; CTA chr2 60458404 60458425 60458421 60458426 +
aacataatgaagtgttttttaa

SEQ ID NO: 194751 - DNA, 22 bp, Artificial Sequence
  Synthetic oligonucleotide; TTT chr2 60458421 60458442 60458438 60458443 +
tttaaaaaaaatttttcttaac

SEQ ID NO: 194752 - DNA, 22 bp, Artificial Sequence
  Synthetic oligonucleotide; TTT chr2 60458422 60458443 60458439 60458444 +
ttaaaaaaaatttttcttaaca

SEQ ID NO: 194753 - DNA, 22 bp, Artificial Sequence
  Synthetic oligonucleotide; TTT chr2 60458423 60458444 60458440 60458445 +
taaaaaaaatttttcttaacat

SEQ ID NO: 194754 - DNA, 22 bp, Artificial Sequence
  Synthetic oligonucleotide; TTT chr2 60458424 60458445 60458441 60458446 +
aaaaaaaatttttcttaacatt

SEQ ID NO: 194755 - DNA, 22 bp, Artificial Sequence
  Synthetic oligonucleotide; TTA chr2 60458425 60458446 60458442 60458447 +
aaaaaaatttttcttaacattt

SEQ ID NO: 194756 - DNA, 22 bp, Artificial Sequence
  Synthetic oligonucleotide; TTT chr2 60458435 60458456 60458452 60458457 +
ttcttaacatttatatttaaaa

SEQ ID NO: 194757 - DNA, 22 bp, Artificial Sequence
  Synthetic oligonucleotide; TTT chr2 60458436 60458457 60458453 60458458 +
tcttaacatttatatttaaaaa

SEQ ID NO: 194758 - DNA, 22 bp, Artificial Sequence
  Synthetic oligonucleotide; TTT chr2 60458437 60458458 60458454 60458459 +
cttaacatttatatttaaaaaa

SEQ ID NO: 194759 - DNA, 22 bp, Artificial Sequence
  Synthetic oligonucleotide; TTC chr2 60458438 60458459 60458455 60458460 +
ttaacatttatatttaaaaaag

SEQ ID NO: 194760 - DNA, 22 bp, Artificial Sequence
  Synthetic oligonucleotide; CTT chr2 60458440 60458461 60458457 60458462 +
aacatttatatttaaaaaagtt

SEQ ID NO: 194761 - DNA, 22 bp, Artificial Sequence
  Synthetic oligonucleotide; TTA chr2 60458441 60458462 60458458 60458463 +
acatttatatttaaaaaagttt

SEQ ID NO: 194762 - DNA, 22 bp, Artificial Sequence
  Synthetic oligonucleotide; TTT chr2 60458447 60458468 60458464 60458469 +
atatttaaaaaagttttgtaca

SEQ ID NO: 194763 - DNA, 22 bp, Artificial Sequence
  Synthetic oligonucleotide; TTA chr2 60458448 60458469 60458465 60458470 +
tatttaaaaaagttttgtacaa

SEQ ID NO: 194764 - DNA, 22 bp, Artificial Sequence
  Synthetic oligonucleotide; TTT chr2 60458453 60458474 60458470 60458475 +
aaaaaagttttgtacaaaaaaa

SEQ ID NO: 194765 - DNA, 22 bp, Artificial Sequence
  Synthetic oligonucleotide; TTA chr2 60458454 60458475 60458471 60458476 +
aaaaagttttgtacaaaaaaat

SEQ ID NO: 194766 - DNA, 22 bp, Artificial Sequence
  Synthetic oligonucleotide; TTT chr2 60458463 60458484 60458480 60458485 +
tgtacaaaaaaatccttgcact

SEQ ID NO: 194767 - DNA, 22 bp, Artificial Sequence
  Synthetic oligonucleotide; TTT chr2 60458464 60458485 60458481 60458486 +
gtacaaaaaaatccttgcactg

SEQ ID NO: 194768 - DNA, 22 bp, Artificial Sequence
  Synthetic oligonucleotide; TTG chr2 60458465 60458486 60458482 60458487 +
tacaaaaaaatccttgcactgt

SEQ ID NO: 194769 - DNA, 22 bp, Artificial Sequence
  Synthetic oligonucleotide; CTT chr2 60458480 60458501 60458497 60458502 +
gcactgtagaagcgaaagcaat

SEQ ID NO: 194770 - DNA, 22 bp, Artificial Sequence
  Synthetic oligonucleotide; TTG chr2 60458481 60458502 60458498 60458503 +
cactgtagaagcgaaagcaatc

SEQ ID NO: 194771 - DNA, 22 bp, Artificial Sequence
  Synthetic oligonucleotide; CTG chr2 60458486 60458507 60458503 60458508 +
tagaagcgaaagcaatcattca

SEQ ID NO: 194772 - DNA, 22 bp, Artificial Sequence
  Synthetic oligonucleotide; TTC chr2 60458507 60458528 60458524 60458529 +
atttctatgttaagtgtattct

SEQ ID NO: 194773 - DNA, 22 bp, Artificial Sequence
  Synthetic oligonucleotide; TTT chr2 60458511 60458532 60458528 60458533 +
ctatgttaagtgtattctgttt

SEQ ID NO: 194774 - DNA, 22 bp, Artificial Sequence
  Synthetic oligonucleotide; TTC chr2 60458512 60458533 60458529 60458534 +
tatgttaagtgtattctgtttc

SEQ ID NO: 194775 - DNA, 22 bp, Artificial Sequence
  Synthetic oligonucleotide; CTA chr2 60458514 60458535 60458531 60458536 +
tgttaagtgtattctgtttcca

SEQ ID NO: 194776 - DNA, 22 bp, Artificial Sequence
  Synthetic oligonucleotide; TTA chr2 60458519 60458540 60458536 60458541 +
agtgtattctgtttccattcac

SEQ ID NO: 194777 - DNA, 22 bp, Artificial Sequence
  Synthetic oligonucleotide; TTC chr2 60458528 60458549 60458545 60458550 +
tgtttccattcacagcgcttgc

SEQ ID NO: 194778 - DNA, 22 bp, Artificial Sequence
  Synthetic oligonucleotide; CTG chr2 60458530 60458551 60458547 60458552 +
tttccattcacagcgcttgcaa

SEQ ID NO: 194779 - DNA, 22 bp, Artificial Sequence
  Synthetic oligonucleotide; TTT chr2 60458533 60458554 60458550 60458555 +
ccattcacagcgcttgcaatgt

SEQ ID NO: 194780 - DNA, 22 bp, Artificial Sequence
  Synthetic oligonucleotide; TTC chr2 60458534 60458555 60458551 60458556 +
cattcacagcgcttgcaatgtt

SEQ ID NO: 194781 - DNA, 22 bp, Artificial Sequence
  Synthetic oligonucleotide; TTC chr2 60458539 60458560 60458556 60458561 +
acagcgcttgcaatgttgcgtc

SEQ ID NO: 194782 - DNA, 22 bp, Artificial Sequence
  Synthetic oligonucleotide; CTT chr2 60458548 60458569 60458565 60458570 +
gcaatgttgcgtccaagtaagt

SEQ ID NO: 194783 - DNA, 22 bp, Artificial Sequence
  Synthetic oligonucleotide; TTG chr2 60458549 60458570 60458566 60458571 +
caatgttgcgtccaagtaagta

SEQ ID NO: 194784 - DNA, 22 bp, Artificial Sequence
  Synthetic oligonucleotide; TTG chr2 60458557 60458578 60458574 60458579 +
cgtccaagtaagtaagctcaat

SEQ ID NO: 194785 - DNA, 22 bp, Artificial Sequence
  Synthetic oligonucleotide; CTC chr2 60458576 60458597 60458593 60458598 +
aatagtcaagtaaatggctggc

SEQ ID NO: 194786 - DNA, 22 bp, Artificial Sequence
  Synthetic oligonucleotide; CTG chr2 60458596 60458617 60458613 60458618 +
gcaaagtttttttttttttagt

SEQ ID NO: 194787 - DNA, 22 bp, Artificial Sequence
  Synthetic oligonucleotide; TTT chr2 60458605 60458626 60458622 60458627 +
ttttttttttagtttttaaaaa

SEQ ID NO: 194788 - DNA, 22 bp, Artificial Sequence
  Synthetic oligonucleotide; TTT chr2 60458606 60458627 60458623 60458628 +
tttttttttagtttttaaaaaa

SEQ ID NO: 194789 - DNA, 22 bp, Artificial Sequence
  Synthetic oligonucleotide; TTT chr2 60458607 60458628 60458624 60458629 +
ttttttttagtttttaaaaaat

SEQ ID NO: 194790 - DNA, 22 bp, Artificial Sequence
  Synthetic oligonucleotide; TTT chr2 60458608 60458629 60458625 60458630 +
tttttttagtttttaaaaaatg

SEQ ID NO: 194791 - DNA, 22 bp, Artificial Sequence
  Synthetic oligonucleotide; TTT chr2 60458609 60458630 60458626 60458631 +
ttttttagtttttaaaaaatgc

SEQ ID NO: 194792 - DNA, 22 bp, Artificial Sequence
  Synthetic oligonucleotide; TTT chr2 60458610 60458631 60458627 60458632 +
tttttagtttttaaaaaatgct

SEQ ID NO: 194793 - DNA, 22 bp, Artificial Sequence
  Synthetic oligonucleotide; TTT chr2 60458611 60458632 60458628 60458633 +
ttttagtttttaaaaaatgctc

SEQ ID NO: 194794 - DNA, 22 bp, Artificial Sequence
  Synthetic oligonucleotide; TTT chr2 60458612 60458633 60458629 60458634 +
tttagtttttaaaaaatgctcc

SEQ ID NO: 194795 - DNA, 22 bp, Artificial Sequence
  Synthetic oligonucleotide; TTT chr2 60458613 60458634 60458630 60458635 +
ttagtttttaaaaaatgctcct

SEQ ID NO: 194796 - DNA, 22 bp, Artificial Sequence
  Synthetic oligonucleotide; TTT chr2 60458614 60458635 60458631 60458636 +
tagtttttaaaaaatgctcctc

SEQ ID NO: 194797 - DNA, 22 bp, Artificial Sequence
  Synthetic oligonucleotide; TTT chr2 60458615 60458636 60458632 60458637 +
agtttttaaaaaatgctcctca

SEQ ID NO: 194798 - DNA, 22 bp, Artificial Sequence
  Synthetic oligonucleotide; TTA chr2 60458616 60458637 60458633 60458638 +
gtttttaaaaaatgctcctcaa

SEQ ID NO: 194799 - DNA, 22 bp, Artificial Sequence
  Synthetic oligonucleotide; TTT chr2 60458620 60458641 60458637 60458642 +
ttaaaaaatgctcctcaatgag

SEQ ID NO: 194800 - DNA, 22 bp, Artificial Sequence
  Synthetic oligonucleotide; TTT chr2 60458621 60458642 60458638 60458643 +
taaaaaatgctcctcaatgaga

SEQ ID NO: 194801 - DNA, 22 bp, Artificial Sequence
  Synthetic oligonucleotide; TTT chr2 60458622 60458643 60458639 60458644 +
aaaaaatgctcctcaatgagat

SEQ ID NO: 194802 - DNA, 22 bp, Artificial Sequence
  Synthetic oligonucleotide; TTA chr2 60458623 60458644 60458640 60458645 +
aaaaatgctcctcaatgagatt

SEQ ID NO: 194803 - DNA, 22 bp, Artificial Sequence
  Synthetic oligonucleotide; CTC chr2 60458633 60458654 60458650 60458655 +
ctcaatgagattgtgttcaatt

SEQ ID NO: 194804 - DNA, 22 bp, Artificial Sequence
  Synthetic oligonucleotide; CTC chr2 60458636 60458657 60458653 60458658 +
aatgagattgtgttcaattttt

SEQ ID NO: 194805 - DNA, 22 bp, Artificial Sequence
  Synthetic oligonucleotide; TTG chr2 60458646 60458667 60458663 60458668 +
tgttcaattttttttcagcatt

SEQ ID NO: 194806 - DNA, 22 bp, Artificial Sequence
  Synthetic oligonucleotide; TTC chr2 60458651 60458672 60458668 60458673 +
aattttttttcagcattcttgc

SEQ ID NO: 194807 - DNA, 22 bp, Artificial Sequence
  Synthetic oligonucleotide; TTT chr2 60458656 60458677 60458673 60458678 +
tttttcagcattcttgcaactt

SEQ ID NO: 194808 - DNA, 22 bp, Artificial Sequence
  Synthetic oligonucleotide; TTT chr2 60458657 60458678 60458674 60458679 +
ttttcagcattcttgcaacttt

SEQ ID NO: 194809 - DNA, 22 bp, Artificial Sequence
  Synthetic oligonucleotide; TTT chr2 60458658 60458679 60458675 60458680 +
tttcagcattcttgcaactttt

SEQ ID NO: 194810 - DNA, 22 bp, Artificial Sequence
  Synthetic oligonucleotide; TTT chr2 60458659 60458680 60458676 60458681 +
ttcagcattcttgcaacttttc

SEQ ID NO: 194811 - DNA, 22 bp, Artificial Sequence
  Synthetic oligonucleotide; TTT chr2 60458660 60458681 60458677 60458682 +
tcagcattcttgcaacttttcc

SEQ ID NO: 194812 - DNA, 22 bp, Artificial Sequence
  Synthetic oligonucleotide; TTT chr2 60458661 60458682 60458678 60458683 +
cagcattcttgcaacttttccc

SEQ ID NO: 194813 - DNA, 22 bp, Artificial Sequence
  Synthetic oligonucleotide; TTC chr2 60458662 60458683 60458679 60458684 +
agcattcttgcaacttttccct

SEQ ID NO: 194814 - DNA, 22 bp, Artificial Sequence
  Synthetic oligonucleotide; TTC chr2 60458669 60458690 60458686 60458691 +
ttgcaacttttcccttaagtat

SEQ ID NO: 194815 - DNA, 22 bp, Artificial Sequence
  Synthetic oligonucleotide; CTT chr2 60458671 60458692 60458688 60458693 +
gcaacttttcccttaagtatag

SEQ ID NO: 194816 - DNA, 22 bp, Artificial Sequence
  Synthetic oligonucleotide; TTG chr2 60458672 60458693 60458689 60458694 +
caacttttcccttaagtataga

SEQ ID NO: 194817 - DNA, 22 bp, Artificial Sequence
  Synthetic oligonucleotide; CTT chr2 60458678 60458699 60458695 60458700 +
ttcccttaagtatagacctgta

SEQ ID NO: 194818 - DNA, 22 bp, Artificial Sequence
  Synthetic oligonucleotide; TTT chr2 60458679 60458700 60458696 60458701 +
tcccttaagtatagacctgtaa

SEQ ID NO: 194819 - DNA, 22 bp, Artificial Sequence
  Synthetic oligonucleotide; TTT chr2 60458680 60458701 60458697 60458702 +
cccttaagtatagacctgtaaa

SEQ ID NO: 194820 - DNA, 22 bp, Artificial Sequence
  Synthetic oligonucleotide; TTC chr2 60458681 60458702 60458698 60458703 +
ccttaagtatagacctgtaaac

SEQ ID NO: 194821 - DNA, 22 bp, Artificial Sequence
  Synthetic oligonucleotide; CTT chr2 60458685 60458706 60458702 60458707 +
aagtatagacctgtaaactggg

SEQ ID NO: 194822 - DNA, 22 bp, Artificial Sequence
  Synthetic oligonucleotide; TTA chr2 60458686 60458707 60458703 60458708 +
agtatagacctgtaaactggga

SEQ ID NO: 194823 - DNA, 22 bp, Artificial Sequence
  Synthetic oligonucleotide; CTG chr2 60458698 60458719 60458715 60458720 +
taaactgggaaaattgtacagt

SEQ ID NO: 194824 - DNA, 22 bp, Artificial Sequence
  Synthetic oligonucleotide; CTG chr2 60458705 60458726 60458722 60458727 +
ggaaaattgtacagtgcactta

SEQ ID NO: 194825 - DNA, 22 bp, Artificial Sequence
  Synthetic oligonucleotide; TTG chr2 60458714 60458735 60458731 60458736 +
tacagtgcacttaattgtccta

SEQ ID NO: 194826 - DNA, 22 bp, Artificial Sequence
  Synthetic oligonucleotide; CTT chr2 60458726 60458747 60458743 60458748 +
aattgtcctatctgagcaggtt

SEQ ID NO: 194827 - DNA, 22 bp, Artificial Sequence
  Synthetic oligonucleotide; TTA chr2 60458727 60458748 60458744 60458749 +
attgtcctatctgagcaggttt

SEQ ID NO: 194828 - DNA, 22 bp, Artificial Sequence
  Synthetic oligonucleotide; TTG chr2 60458731 60458752 60458748 60458753 +
tcctatctgagcaggtttattt

SEQ ID NO: 194829 - DNA, 22 bp, Artificial Sequence
  Synthetic oligonucleotide; CTA chr2 60458736 60458757 60458753 60458758 +
tctgagcaggtttattttatac

SEQ ID NO: 194830 - DNA, 22 bp, Artificial Sequence
  Synthetic oligonucleotide; CTG chr2 60458740 60458761 60458757 60458762 +
agcaggtttattttatactcaa

SEQ ID NO: 194831 - DNA, 22 bp, Artificial Sequence
  Synthetic oligonucleotide; TTT chr2 60458749 60458770 60458766 60458771 +
attttatactcaacctctgtat

SEQ ID NO: 194832 - DNA, 22 bp, Artificial Sequence
  Synthetic oligonucleotide; TTA chr2 60458750 60458771 60458767 60458772 +
ttttatactcaacctctgtatc

SEQ ID NO: 194833 - DNA, 22 bp, Artificial Sequence
  Synthetic oligonucleotide; TTT chr2 60458753 60458774 60458770 60458775 +
tatactcaacctctgtatctct

SEQ ID NO: 194834 - DNA, 22 bp, Artificial Sequence
  Synthetic oligonucleotide; TTT chr2 60458754 60458775 60458771 60458776 +
atactcaacctctgtatctctg

SEQ ID NO: 194835 - DNA, 22 bp, Artificial Sequence
  Synthetic oligonucleotide; TTA chr2 60458755 60458776 60458772 60458777 +
tactcaacctctgtatctctga

SEQ ID NO: 194836 - DNA, 22 bp, Artificial Sequence
  Synthetic oligonucleotide; CTC chr2 60458760 60458781 60458777 60458782 +
aacctctgtatctctgattaga

SEQ ID NO: 194837 - DNA, 22 bp, Artificial Sequence
  Synthetic oligonucleotide; CTC chr2 60458766 60458787 60458783 60458788 +
tgtatctctgattagagaaaag

SEQ ID NO: 194838 - DNA, 22 bp, Artificial Sequence
  Synthetic oligonucleotide; CTG chr2 60458768 60458789 60458785 60458790 +
tatctctgattagagaaaagat

SEQ ID NO: 194839 - DNA, 22 bp, Artificial Sequence
  Synthetic oligonucleotide; CTC chr2 60458774 60458795 60458791 60458796 +
tgattagagaaaagatacagat

SEQ ID NO: 194840 - DNA, 22 bp, Artificial Sequence
  Synthetic oligonucleotide; CTG chr2 60458776 60458797 60458793 60458798 +
attagagaaaagatacagatat

SEQ ID NO: 194841 - DNA, 22 bp, Artificial Sequence
  Synthetic oligonucleotide; TTA chr2 60458780 60458801 60458797 60458802 +
gagaaaagatacagatatcaca

SEQ ID NO: 194842 - DNA, 22 bp, Artificial Sequence
  Synthetic oligonucleotide; CTA chr2 60458819 60458840 60458836 60458841 +
tttgaacaccaactggggcaga

SEQ ID NO: 194843 - DNA, 22 bp, Artificial Sequence
  Synthetic oligonucleotide; TTT chr2 60458822 60458843 60458839 60458844 +
gaacaccaactggggcagatgc

SEQ ID NO: 194844 - DNA, 22 bp, Artificial Sequence
  Synthetic oligonucleotide; TTG chr2 60458823 60458844 60458840 60458845 +
aacaccaactggggcagatgct

SEQ ID NO: 194845 - DNA, 22 bp, Artificial Sequence
  Synthetic oligonucleotide; CTG chr2 60458834 60458855 60458851 60458856 +
gggcagatgctagcttaataaa

SEQ ID NO: 194846 - DNA, 22 bp, Artificial Sequence
  Synthetic oligonucleotide; CTA chr2 60458846 60458867 60458863 60458868 +
gcttaataaaaaagaaaaaatt

SEQ ID NO: 194847 - DNA, 22 bp, Artificial Sequence
  Synthetic oligonucleotide; CTT chr2 60458850 60458871 60458867 60458872 +
aataaaaaagaaaaaattaaaa

SEQ ID NO: 194848 - DNA, 22 bp, Artificial Sequence
  Synthetic oligonucleotide; TTA chr2 60458851 60458872 60458868 60458873 +
ataaaaaagaaaaaattaaaaa

SEQ ID NO: 194849 - DNA, 22 bp, Artificial Sequence
  Synthetic oligonucleotide; TTA chr2 60458869 60458890 60458886 60458891 +
aaaaaataaaaataaaaacaat

SEQ ID NO: 194850 - DNA, 22 bp, Artificial Sequence
  Synthetic oligonucleotide; CTC chr2 60458899 60458920 60458916 60458921 +
ttccatgttaacacaaatagca

SEQ ID NO: 194851 - DNA, 22 bp, Artificial Sequence
  Synthetic oligonucleotide; CTT chr2 60458901 60458922 60458918 60458923 +
ccatgttaacacaaatagcaca

SEQ ID NO: 194852 - DNA, 22 bp, Artificial Sequence
  Synthetic oligonucleotide; TTC chr2 60458902 60458923 60458919 60458924 +
catgttaacacaaatagcacac

SEQ ID NO: 194853 - DNA, 22 bp, Artificial Sequence
  Synthetic oligonucleotide; TTA chr2 60458909 60458930 60458926 60458931 +
acacaaatagcacacagtgtat

SEQ ID NO: 194854 - DNA, 22 bp, Artificial Sequence
  Synthetic oligonucleotide; CTT chr2 60458954 60458975 60458971 60458976 +
ttagggagcacagacatatata

SEQ ID NO: 194855 - DNA, 22 bp, Artificial Sequence
  Synthetic oligonucleotide; TTT chr2 60458955 60458976 60458972 60458977 +
tagggagcacagacatatatac

SEQ ID NO: 194856 - DNA, 22 bp, Artificial Sequence
  Synthetic oligonucleotide; TTT chr2 60458956 60458977 60458973 60458978 +
agggagcacagacatatatact

SEQ ID NO: 194857 - DNA, 22 bp, Artificial Sequence
  Synthetic oligonucleotide; TTA chr2 60458957 60458978 60458974 60458979 +
gggagcacagacatatatactg

SEQ ID NO: 194858 - DNA, 22 bp, Artificial Sequence
  Synthetic oligonucleotide; CTG chr2 60458979 60459000 60458996 60459001 +
ctactcttaaaattctttctct

SEQ ID NO: 194859 - DNA, 22 bp, Artificial Sequence
  Synthetic oligonucleotide; CTA chr2 60458982 60459003 60458999 60459004 +
ctcttaaaattctttctcttct

SEQ ID NO: 194860 - DNA, 22 bp, Artificial Sequence
  Synthetic oligonucleotide; CTC chr2 60458985 60459006 60459002 60459007 +
ttaaaattctttctcttctttt

SEQ ID NO: 194861 - DNA, 22 bp, Artificial Sequence
  Synthetic oligonucleotide; CTT chr2 60458987 60459008 60459004 60459009 +
aaaattctttctcttctttttt

SEQ ID NO: 194862 - DNA, 22 bp, Artificial Sequence
  Synthetic oligonucleotide; TTA chr2 60458988 60459009 60459005 60459010 +
aaattctttctcttcttttttt

SEQ ID NO: 194863 - DNA, 22 bp, Artificial Sequence
  Synthetic oligonucleotide; TTC chr2 60458994 60459015 60459011 60459016 +
tttctcttctttttttaagaat

SEQ ID NO: 194864 - DNA, 22 bp, Artificial Sequence
  Synthetic oligonucleotide; CTT chr2 60458996 60459017 60459013 60459018 +
tctcttctttttttaagaatgt

SEQ ID NO: 194865 - DNA, 22 bp, Artificial Sequence
  Synthetic oligonucleotide; TTT chr2 60458997 60459018 60459014 60459019 +
ctcttctttttttaagaatgtc

SEQ ID NO: 194866 - DNA, 22 bp, Artificial Sequence
  Synthetic oligonucleotide; TTC chr2 60458998 60459019 60459015 60459020 +
tcttctttttttaagaatgtca

SEQ ID NO: 194867 - DNA, 22 bp, Artificial Sequence
  Synthetic oligonucleotide; CTC chr2 60459000 60459021 60459017 60459022 +
ttctttttttaagaatgtcaca

SEQ ID NO: 194868 - DNA, 22 bp, Artificial Sequence
  Synthetic oligonucleotide; CTT chr2 60459002 60459023 60459019 60459024 +
ctttttttaagaatgtcacatt

SEQ ID NO: 194869 - DNA, 22 bp, Artificial Sequence
  Synthetic oligonucleotide; TTC chr2 60459003 60459024 60459020 60459025 +
tttttttaagaatgtcacattt

SEQ ID NO: 194870 - DNA, 22 bp, Artificial Sequence
  Synthetic oligonucleotide; CTT chr2 60459005 60459026 60459022 60459027 +
tttttaagaatgtcacatttaa

SEQ ID NO: 194871 - DNA, 22 bp, Artificial Sequence
  Synthetic oligonucleotide; TTT chr2 60459006 60459027 60459023 60459028 +
ttttaagaatgtcacatttaaa

SEQ ID NO: 194872 - DNA, 22 bp, Artificial Sequence
  Synthetic oligonucleotide; TTT chr2 60459007 60459028 60459024 60459029 +
tttaagaatgtcacatttaaat

SEQ ID NO: 194873 - DNA, 22 bp, Artificial Sequence
  Synthetic oligonucleotide; TTT chr2 60459008 60459029 60459025 60459030 +
ttaagaatgtcacatttaaatg

SEQ ID NO: 194874 - DNA, 22 bp, Artificial Sequence
  Synthetic oligonucleotide; TTT chr2 60459009 60459030 60459026 60459031 +
taagaatgtcacatttaaatgc

SEQ ID NO: 194875 - DNA, 22 bp, Artificial Sequence
  Synthetic oligonucleotide; TTT chr2 60459010 60459031 60459027 60459032 +
aagaatgtcacatttaaatgca

SEQ ID NO: 194876 - DNA, 22 bp, Artificial Sequence
  Synthetic oligonucleotide; TTA chr2 60459011 60459032 60459028 60459033 +
agaatgtcacatttaaatgcaa

SEQ ID NO: 194877 - DNA, 22 bp, Artificial Sequence
  Synthetic oligonucleotide; TTT chr2 60459025 60459046 60459042 60459047 +
aaatgcaagtcttaagaattca

SEQ ID NO: 194878 - DNA, 22 bp, Artificial Sequence
  Synthetic oligonucleotide; TTA chr2 60459026 60459047 60459043 60459048 +
aatgcaagtcttaagaattcat

SEQ ID NO: 194879 - DNA, 22 bp, Artificial Sequence
  Synthetic oligonucleotide; CTT chr2 60459038 60459059 60459055 60459060 +
aagaattcatagttaatcatca

SEQ ID NO: 194880 - DNA, 22 bp, Artificial Sequence
  Synthetic oligonucleotide; TTA chr2 60459039 60459060 60459056 60459061 +
agaattcatagttaatcatcat

SEQ ID NO: 194881 - DNA, 22 bp, Artificial Sequence
  Synthetic oligonucleotide; TTC chr2 60459046 60459067 60459063 60459068 +
atagttaatcatcattgtatca

SEQ ID NO: 194882 - DNA, 22 bp, Artificial Sequence
  Synthetic oligonucleotide; TTA chr2 60459053 60459074 60459070 60459075 +
atcatcattgtatcaatattag

SEQ ID NO: 194883 - DNA, 22 bp, Artificial Sequence
  Synthetic oligonucleotide; TTG chr2 60459063 60459084 60459080 60459085 +
tatcaatattagcttatatacc

SEQ ID NO: 194884 - DNA, 22 bp, Artificial Sequence
  Synthetic oligonucleotide; TTA chr2 60459074 60459095 60459091 60459096 +
gcttatatacctgttctagttt

SEQ ID NO: 194885 - DNA, 22 bp, Artificial Sequence
  Synthetic oligonucleotide; CTT chr2 60459078 60459099 60459095 60459100 +
atatacctgttctagttttaaa

SEQ ID NO: 194886 - DNA, 22 bp, Artificial Sequence
  Synthetic oligonucleotide; TTA chr2 60459079 60459100 60459096 60459101 +
tatacctgttctagttttaaat

SEQ ID NO: 194887 - DNA, 22 bp, Artificial Sequence
  Synthetic oligonucleotide; CTG chr2 60459087 60459108 60459104 60459109 +
ttctagttttaaatggcaaata

SEQ ID NO: 194888 - DNA, 22 bp, Artificial Sequence
  Synthetic oligonucleotide; TTC chr2 60459090 60459111 60459107 60459112 +
tagttttaaatggcaaatagta

SEQ ID NO: 194889 - DNA, 22 bp, Artificial Sequence
  Synthetic oligonucleotide; CTA chr2 60459092 60459113 60459109 60459114 +
gttttaaatggcaaatagtacc

SEQ ID NO: 194890 - DNA, 22 bp, Artificial Sequence
  Synthetic oligonucleotide; TTT chr2 60459096 60459117 60459113 60459118 +
taaatggcaaatagtaccacgt

SEQ ID NO: 194891 - DNA, 22 bp, Artificial Sequence
  Synthetic oligonucleotide; TTT chr2 60459097 60459118 60459114 60459119 +
aaatggcaaatagtaccacgtt

SEQ ID NO: 194892 - DNA, 22 bp, Artificial Sequence
  Synthetic oligonucleotide; TTA chr2 60459098 60459119 60459115 60459120 +
aatggcaaatagtaccacgttg

SEQ ID NO: 194893 - DNA, 22 bp, Artificial Sequence
  Synthetic oligonucleotide; TTG chr2 60459120 60459141 60459137 60459142 +
tgctaataaatcatattatttt

SEQ ID NO: 194894 - DNA, 22 bp, Artificial Sequence
  Synthetic oligonucleotide; CTA chr2 60459125 60459146 60459142 60459147 +
ataaatcatattattttcttct

SEQ ID NO: 194895 - DNA, 22 bp, Artificial Sequence
  Synthetic oligonucleotide; TTA chr2 60459138 60459159 60459155 60459160 +
ttttcttctgttcccctctgtc

SEQ ID NO: 194896 - DNA, 22 bp, Artificial Sequence
  Synthetic oligonucleotide; TTT chr2 60459141 60459162 60459158 60459163 +
tcttctgttcccctctgtcaaa

SEQ ID NO: 194897 - DNA, 22 bp, Artificial Sequence
  Synthetic oligonucleotide; TTT chr2 60459142 60459163 60459159 60459164 +
cttctgttcccctctgtcaaac

SEQ ID NO: 194898 - DNA, 22 bp, Artificial Sequence
  Synthetic oligonucleotide; TTC chr2 60459143 60459164 60459160 60459165 +
ttctgttcccctctgtcaaacc

SEQ ID NO: 194899 - DNA, 22 bp, Artificial Sequence
  Synthetic oligonucleotide; CTT chr2 60459145 60459166 60459162 60459167 +
ctgttcccctctgtcaaacctt

SEQ ID NO: 194900 - DNA, 22 bp, Artificial Sequence
  Synthetic oligonucleotide; TTC chr2 60459146 60459167 60459163 60459168 +
tgttcccctctgtcaaacctta

SEQ ID NO: 194901 - DNA, 22 bp, Artificial Sequence
  Synthetic oligonucleotide; CTG chr2 60459148 60459169 60459165 60459170 +
ttcccctctgtcaaaccttatt

SEQ ID NO: 194902 - DNA, 22 bp, Artificial Sequence
  Synthetic oligonucleotide; TTC chr2 60459151 60459172 60459168 60459173 +
ccctctgtcaaaccttattgtc

SEQ ID NO: 194903 - DNA, 22 bp, Artificial Sequence
  Synthetic oligonucleotide; CTC chr2 60459156 60459177 60459173 60459178 +
tgtcaaaccttattgtcagcct

SEQ ID NO: 194904 - DNA, 22 bp, Artificial Sequence
  Synthetic oligonucleotide; CTG chr2 60459158 60459179 60459175 60459180 +
tcaaaccttattgtcagcctct

SEQ ID NO: 194905 - DNA, 22 bp, Artificial Sequence
  Synthetic oligonucleotide; CTT chr2 60459167 60459188 60459184 60459189 +
attgtcagcctcttcctttcaa

SEQ ID NO: 194906 - DNA, 22 bp, Artificial Sequence
  Synthetic oligonucleotide; TTA chr2 60459168 60459189 60459185 60459190 +
ttgtcagcctcttcctttcaat

SEQ ID NO: 194907 - DNA, 22 bp, Artificial Sequence
  Synthetic oligonucleotide; TTG chr2 60459171 60459192 60459188 60459193 +
tcagcctcttcctttcaatatg

SEQ ID NO: 194908 - DNA, 22 bp, Artificial Sequence
  Synthetic oligonucleotide; CTC chr2 60459179 60459200 60459196 60459201 +
ttcctttcaatatggtatacaa

SEQ ID NO: 194909 - DNA, 22 bp, Artificial Sequence
  Synthetic oligonucleotide; CTT chr2 60459181 60459202 60459198 60459203 +
cctttcaatatggtatacaagg

SEQ ID NO: 194910 - DNA, 22 bp, Artificial Sequence
  Synthetic oligonucleotide; TTC chr2 60459182 60459203 60459199 60459204 +
ctttcaatatggtatacaaggt

SEQ ID NO: 194911 - DNA, 22 bp, Artificial Sequence
  Synthetic oligonucleotide; CTT chr2 60459185 60459206 60459202 60459207 +
tcaatatggtatacaaggtctt

SEQ ID NO: 194912 - DNA, 22 bp, Artificial Sequence
  Synthetic oligonucleotide; TTT chr2 60459186 60459207 60459203 60459208 +
caatatggtatacaaggtctta

SEQ ID NO: 194913 - DNA, 22 bp, Artificial Sequence
  Synthetic oligonucleotide; TTC chr2 60459187 60459208 60459204 60459209 +
aatatggtatacaaggtcttaa

SEQ ID NO: 194914 - DNA, 22 bp, Artificial Sequence
  Synthetic oligonucleotide; CTT chr2 60459207 60459228 60459224 60459229 +
aaagtttatcatttgattgtcc

SEQ ID NO: 194915 - DNA, 22 bp, Artificial Sequence
  Synthetic oligonucleotide; TTA chr2 60459208 60459229 60459225 60459230 +
aagtttatcatttgattgtcca

SEQ ID NO: 194916 - DNA, 22 bp, Artificial Sequence
  Synthetic oligonucleotide; TTT chr2 60459214 60459235 60459231 60459236 +
atcatttgattgtccacttgac

SEQ ID NO: 194917 - DNA, 22 bp, Artificial Sequence
  Synthetic oligonucleotide; TTA chr2 60459215 60459236 60459232 60459237 +
tcatttgattgtccacttgaca

SEQ ID NO: 194918 - DNA, 22 bp, Artificial Sequence
  Synthetic oligonucleotide; TTT chr2 60459221 60459242 60459238 60459243 +
gattgtccacttgacaaccaag

SEQ ID NO: 194919 - DNA, 22 bp, Artificial Sequence
  Synthetic oligonucleotide; TTG chr2 60459222 60459243 60459239 60459244 +
attgtccacttgacaaccaagt

SEQ ID NO: 194920 - DNA, 22 bp, Artificial Sequence
  Synthetic oligonucleotide; TTG chr2 60459226 60459247 60459243 60459248 +
tccacttgacaaccaagtagat

SEQ ID NO: 194921 - DNA, 22 bp, Artificial Sequence
  Synthetic oligonucleotide; CTT chr2 60459233 60459254 60459250 60459255 +
gacaaccaagtagatctggatc

SEQ ID NO: 194922 - DNA, 22 bp, Artificial Sequence
  Synthetic oligonucleotide; TTG chr2 60459234 60459255 60459251 60459256 +
acaaccaagtagatctggatct

SEQ ID NO: 194923 - DNA, 22 bp, Artificial Sequence
  Synthetic oligonucleotide; CTG chr2 60459251 60459272 60459268 60459273 +
gatctatttcttttggtgccag

SEQ ID NO: 194924 - DNA, 22 bp, Artificial Sequence
  Synthetic oligonucleotide; CTA chr2 60459257 60459278 60459274 60459279 +
tttcttttggtgccagtatttt

SEQ ID NO: 194925 - DNA, 22 bp, Artificial Sequence
  Synthetic oligonucleotide; TTT chr2 60459260 60459281 60459277 60459282 +
cttttggtgccagtatttttaa

SEQ ID NO: 194926 - DNA, 22 bp, Artificial Sequence
  Synthetic oligonucleotide; TTC chr2 60459261 60459282 60459278 60459283 +
ttttggtgccagtatttttaaa

SEQ ID NO: 194927 - DNA, 22 bp, Artificial Sequence
  Synthetic oligonucleotide; CTT chr2 60459263 60459284 60459280 60459285 +
ttggtgccagtatttttaaaaa

SEQ ID NO: 194928 - DNA, 22 bp, Artificial Sequence
  Synthetic oligonucleotide; TTT chr2 60459264 60459285 60459281 60459286 +
tggtgccagtatttttaaaaag

SEQ ID NO: 194929 - DNA, 22 bp, Artificial Sequence
  Synthetic oligonucleotide; TTT chr2 60459265 60459286 60459282 60459287 +
ggtgccagtatttttaaaaaga

SEQ ID NO: 194930 - DNA, 22 bp, Artificial Sequence
  Synthetic oligonucleotide; TTG chr2 60459266 60459287 60459283 60459288 +
gtgccagtatttttaaaaagac

SEQ ID NO: 194931 - DNA, 22 bp, Artificial Sequence
  Synthetic oligonucleotide; TTT chr2 60459278 60459299 60459295 60459300 +
ttaaaaagacattattaaagca

SEQ ID NO: 194932 - DNA, 22 bp, Artificial Sequence
  Synthetic oligonucleotide; TTT chr2 60459279 60459300 60459296 60459301 +
taaaaagacattattaaagcaa

SEQ ID NO: 194933 - DNA, 22 bp, Artificial Sequence
  Synthetic oligonucleotide; TTT chr2 60459280 60459301 60459297 60459302 +
aaaaagacattattaaagcaaa

SEQ ID NO: 194934 - DNA, 22 bp, Artificial Sequence
  Synthetic oligonucleotide; TTA chr2 60459281 60459302 60459298 60459303 +
aaaagacattattaaagcaaat

SEQ ID NO: 194935 - DNA, 22 bp, Artificial Sequence
  Synthetic oligonucleotide; TTA chr2 60459292 60459313 60459309 60459314 +
ttaaagcaaatatcttcataaa

SEQ ID NO: 194936 - DNA, 22 bp, Artificial Sequence
  Synthetic oligonucleotide; TTA chr2 60459295 60459316 60459312 60459317 +
aagcaaatatcttcataaaatg

SEQ ID NO: 194937 - DNA, 22 bp, Artificial Sequence
  Synthetic oligonucleotide; CTT chr2 60459308 60459329 60459325 60459330 +
cataaaatgaactccttactag

SEQ ID NO: 194938 - DNA, 22 bp, Artificial Sequence
  Synthetic oligonucleotide; TTC chr2 60459309 60459330 60459326 60459331 +
ataaaatgaactccttactagt

SEQ ID NO: 194939 - DNA, 22 bp, Artificial Sequence
  Synthetic oligonucleotide; CTC chr2 60459322 60459343 60459339 60459344 +
cttactagtgtatttaattgcg

SEQ ID NO: 194940 - DNA, 22 bp, Artificial Sequence
  Synthetic oligonucleotide; CTT chr2 60459325 60459346 60459342 60459347 +
actagtgtatttaattgcgttc

SEQ ID NO: 194941 - DNA, 22 bp, Artificial Sequence
  Synthetic oligonucleotide; TTA chr2 60459326 60459347 60459343 60459348 +
ctagtgtatttaattgcgttcc

SEQ ID NO: 194942 - DNA, 22 bp, Artificial Sequence
  Synthetic oligonucleotide; CTA chr2 60459329 60459350 60459346 60459351 +
gtgtatttaattgcgttccagg

SEQ ID NO: 194943 - DNA, 22 bp, Artificial Sequence
  Synthetic oligonucleotide; TTT chr2 60459337 60459358 60459354 60459359 +
aattgcgttccagggcttttgc

SEQ ID NO: 194944 - DNA, 22 bp, Artificial Sequence
  Synthetic oligonucleotide; TTA chr2 60459338 60459359 60459355 60459360 +
attgcgttccagggcttttgca

SEQ ID NO: 194945 - DNA, 22 bp, Artificial Sequence
  Synthetic oligonucleotide; TTG chr2 60459342 60459363 60459359 60459364 +
cgttccagggcttttgcacatt

SEQ ID NO: 194946 - DNA, 22 bp, Artificial Sequence
  Synthetic oligonucleotide; TTC chr2 60459347 60459368 60459364 60459369 +
cagggcttttgcacattacaca

SEQ ID NO: 194947 - DNA, 22 bp, Artificial Sequence
  Synthetic oligonucleotide; CTT chr2 60459355 60459376 60459372 60459377 +
ttgcacattacacattcaattt

SEQ ID NO: 194948 - DNA, 22 bp, Artificial Sequence
  Synthetic oligonucleotide; TTT chr2 60459356 60459377 60459373 60459378 +
tgcacattacacattcaattta

SEQ ID NO: 194949 - DNA, 22 bp, Artificial Sequence
  Synthetic oligonucleotide; TTT chr2 60459357 60459378 60459374 60459379 +
gcacattacacattcaatttaa

SEQ ID NO: 194950 - DNA, 22 bp, Artificial Sequence
  Synthetic oligonucleotide; TTG chr2 60459358 60459379 60459375 60459380 +
cacattacacattcaatttaat

SEQ ID NO: 194951 - DNA, 22 bp, Artificial Sequence
  Synthetic oligonucleotide; TTA chr2 60459365 60459386 60459382 60459387 +
cacattcaatttaatcattgtt

SEQ ID NO: 194952 - DNA, 22 bp, Artificial Sequence
  Synthetic oligonucleotide; TTC chr2 60459372 60459393 60459389 60459394 +
aatttaatcattgtttaaaaaa

SEQ ID NO: 194953 - DNA, 22 bp, Artificial Sequence
  Synthetic oligonucleotide; TTT chr2 60459377 60459398 60459394 60459399 +
aatcattgtttaaaaaaaataa

SEQ ID NO: 194954 - DNA, 22 bp, Artificial Sequence
  Synthetic oligonucleotide; TTA chr2 60459378 60459399 60459395 60459400 +
atcattgtttaaaaaaaataaa

SEQ ID NO: 194955 - DNA, 22 bp, Artificial Sequence
  Synthetic oligonucleotide; TTG chr2 60459385 60459406 60459402 60459407 +
tttaaaaaaaataaaactttgg

SEQ ID NO: 194956 - DNA, 22 bp, Artificial Sequence
  Synthetic oligonucleotide; TTT chr2 60459388 60459409 60459405 60459410 +
aaaaaaaataaaactttgggca

SEQ ID NO: 194957 - DNA, 22 bp, Artificial Sequence
  Synthetic oligonucleotide; TTA chr2 60459389 60459410 60459406 60459411 +
aaaaaaataaaactttgggcaa

SEQ ID NO: 194958 - DNA, 22 bp, Artificial Sequence
  Synthetic oligonucleotide; CTT chr2 60459404 60459425 60459421 60459426 +
tgggcaaaacagcccatttctt

SEQ ID NO: 194959 - DNA, 22 bp, Artificial Sequence
  Synthetic oligonucleotide; TTT chr2 60459405 60459426 60459422 60459427 +
gggcaaaacagcccatttcttt

SEQ ID NO: 194960 - DNA, 22 bp, Artificial Sequence
  Synthetic oligonucleotide; TTG chr2 60459406 60459427 60459423 60459428 +
ggcaaaacagcccatttctttt

SEQ ID NO: 194961 - DNA, 22 bp, Artificial Sequence
  Synthetic oligonucleotide; TTT chr2 60459423 60459444 60459440 60459445 +
cttttaagctctcaccaggagc

SEQ ID NO: 194962 - DNA, 22 bp, Artificial Sequence
  Synthetic oligonucleotide; TTC chr2 60459424 60459445 60459441 60459446 +
ttttaagctctcaccaggagca

SEQ ID NO: 194963 - DNA, 22 bp, Artificial Sequence
  Synthetic oligonucleotide; CTT chr2 60459426 60459447 60459443 60459448 +
ttaagctctcaccaggagcaaa

SEQ ID NO: 194964 - DNA, 22 bp, Artificial Sequence
  Synthetic oligonucleotide; TTT chr2 60459427 60459448 60459444 60459449 +
taagctctcaccaggagcaaag

SEQ ID NO: 194965 - DNA, 22 bp, Artificial Sequence
  Synthetic oligonucleotide; TTT chr2 60459428 60459449 60459445 60459450 +
aagctctcaccaggagcaaagt

SEQ ID NO: 194966 - DNA, 22 bp, Artificial Sequence
  Synthetic oligonucleotide; TTA chr2 60459429 60459450 60459446 60459451 +
agctctcaccaggagcaaagta

SEQ ID NO: 194967 - DNA, 22 bp, Artificial Sequence
  Synthetic oligonucleotide; CTC chr2 60459434 60459455 60459451 60459456 +
tcaccaggagcaaagtagcttt

SEQ ID NO: 194968 - DNA, 22 bp, Artificial Sequence
  Synthetic oligonucleotide; CTC chr2 60459436 60459457 60459453 60459458 +
accaggagcaaagtagctttta

SEQ ID NO: 194969 - DNA, 22 bp, Artificial Sequence
  Synthetic oligonucleotide; CTT chr2 60459455 60459476 60459472 60459477 +
ttatactggtataatcagtttt

SEQ ID NO: 194970 - DNA, 22 bp, Artificial Sequence
  Synthetic oligonucleotide; TTT chr2 60459456 60459477 60459473 60459478 +
tatactggtataatcagttttg

SEQ ID NO: 194971 - DNA, 22 bp, Artificial Sequence
  Synthetic oligonucleotide; TTT chr2 60459457 60459478 60459474 60459479 +
atactggtataatcagttttgt

SEQ ID NO: 194972 - DNA, 22 bp, Artificial Sequence
  Synthetic oligonucleotide; TTA chr2 60459458 60459479 60459475 60459480 +
tactggtataatcagttttgtt

SEQ ID NO: 194973 - DNA, 22 bp, Artificial Sequence
  Synthetic oligonucleotide; CTG chr2 60459463 60459484 60459480 60459485 +
gtataatcagttttgtttataa

SEQ ID NO: 194974 - DNA, 22 bp, Artificial Sequence
  Synthetic oligonucleotide; TTT chr2 60459476 60459497 60459493 60459498 +
tgtttataaaattaaactaaag

SEQ ID NO: 194975 - DNA, 22 bp, Artificial Sequence
  Synthetic oligonucleotide; TTT chr2 60459477 60459498 60459494 60459499 +
gtttataaaattaaactaaagg

SEQ ID NO: 194976 - DNA, 22 bp, Artificial Sequence
  Synthetic oligonucleotide; TTG chr2 60459478 60459499 60459495 60459500 +
tttataaaattaaactaaagga

SEQ ID NO: 194977 - DNA, 22 bp, Artificial Sequence
  Synthetic oligonucleotide; TTT chr2 60459481 60459502 60459498 60459503 +
ataaaattaaactaaaggaaaa

SEQ ID NO: 194978 - DNA, 22 bp, Artificial Sequence
  Synthetic oligonucleotide; TTA chr2 60459482 60459503 60459499 60459504 +
taaaattaaactaaaggaaaaa

SEQ ID NO: 194979 - DNA, 22 bp, Artificial Sequence
  Synthetic oligonucleotide; TTA chr2 60459490 60459511 60459507 60459512 +
aactaaaggaaaaatgatgatt

SEQ ID NO: 194980 - DNA, 22 bp, Artificial Sequence
  Synthetic oligonucleotide; CTA chr2 60459495 60459516 60459512 60459517 +
aaggaaaaatgatgattaacta

SEQ ID NO: 194981 - DNA, 22 bp, Artificial Sequence
  Synthetic oligonucleotide; TTA chr2 60459513 60459534 60459530 60459535 +
actaggacataatgggtcatct

SEQ ID NO: 194982 - DNA, 22 bp, Artificial Sequence
  Synthetic oligonucleotide; CTA chr2 60459517 60459538 60459534 60459539 +
ggacataatgggtcatcttttt

SEQ ID NO: 194983 - DNA, 22 bp, Artificial Sequence
  Synthetic oligonucleotide; CTT chr2 60459536 60459557 60459553 60459558 +
tttaggtagccattgttgtgag

SEQ ID NO: 194984 - DNA, 22 bp, Artificial Sequence
  Synthetic oligonucleotide; TTT chr2 60459537 60459558 60459554 60459559 +
ttaggtagccattgttgtgaga

SEQ ID NO: 194985 - DNA, 22 bp, Artificial Sequence
  Synthetic oligonucleotide; TTT chr2 60459538 60459559 60459555 60459560 +
taggtagccattgttgtgagaa

SEQ ID NO: 194986 - DNA, 22 bp, Artificial Sequence
  Synthetic oligonucleotide; TTT chr2 60459539 60459560 60459556 60459561 +
aggtagccattgttgtgagaaa

SEQ ID NO: 194987 - DNA, 22 bp, Artificial Sequence
  Synthetic oligonucleotide; TTA chr2 60459540 60459561 60459557 60459562 +
ggtagccattgttgtgagaaat

SEQ ID NO: 194988 - DNA, 22 bp, Artificial Sequence
  Synthetic oligonucleotide; TTG chr2 60459551 60459572 60459568 60459573 +
ttgtgagaaatacaatatagaa

SEQ ID NO: 194989 - DNA, 22 bp, Artificial Sequence
  Synthetic oligonucleotide; TTG chr2 60459554 60459575 60459571 60459576 +
tgagaaatacaatatagaatta

SEQ ID NO: 194990 - DNA, 22 bp, Artificial Sequence
  Synthetic oligonucleotide; TTA chr2 60459576 60459597 60459593 60459598 +
tatgctagttcctaaggtttat

SEQ ID NO: 194991 - DNA, 22 bp, Artificial Sequence
  Synthetic oligonucleotide; CTA chr2 60459583 60459604 60459600 60459605 +
gttcctaaggtttattacctca

SEQ ID NO: 194992 - DNA, 22 bp, Artificial Sequence
  Synthetic oligonucleotide; TTC chr2 60459587 60459608 60459604 60459609 +
ctaaggtttattacctcaccca

SEQ ID NO: 194993 - DNA, 22 bp, Artificial Sequence
  Synthetic oligonucleotide; CTA chr2 60459590 60459611 60459607 60459612 +
aggtttattacctcacccaatg

SEQ ID NO: 194994 - DNA, 22 bp, Artificial Sequence
  Synthetic oligonucleotide; TTT chr2 60459596 60459617 60459613 60459618 +
attacctcacccaatgctgaat

SEQ ID NO: 194995 - DNA, 22 bp, Artificial Sequence
  Synthetic oligonucleotide; TTA chr2 60459597 60459618 60459614 60459619 +
ttacctcacccaatgctgaatt

SEQ ID NO: 194996 - DNA, 22 bp, Artificial Sequence
  Synthetic oligonucleotide; TTA chr2 60459600 60459621 60459617 60459622 +
cctcacccaatgctgaattaag

SEQ ID NO: 194997 - DNA, 22 bp, Artificial Sequence
  Synthetic oligonucleotide; CTC chr2 60459604 60459625 60459621 60459626 +
acccaatgctgaattaagctac

SEQ ID NO: 194998 - DNA, 22 bp, Artificial Sequence
  Synthetic oligonucleotide; CTG chr2 60459615 60459636 60459632 60459637 +
aattaagctacaagtttataac

SEQ ID NO: 194999 - DNA, 22 bp, Artificial Sequence
  Synthetic oligonucleotide; TTA chr2 60459620 60459641 60459637 60459642 +
agctacaagtttataacaagta

SEQ ID NO: 195000 - DNA, 22 bp, Artificial Sequence
  Synthetic oligonucleotide; CTA chr2 60459625 60459646 60459642 60459647 +
caagtttataacaagtagaaag

SEQ ID NO: 195001 - DNA, 22 bp, Artificial Sequence
  Synthetic oligonucleotide; TTT chr2 60459632 60459653 60459649 60459654 +
ataacaagtagaaagaaccatc

SEQ ID NO: 195002 - DNA, 22 bp, Artificial Sequence
  Synthetic oligonucleotide; TTA chr2 60459633 60459654 60459650 60459655 +
taacaagtagaaagaaccatcg

SEQ ID NO: 195003 - DNA, 22 bp, Artificial Sequence
  Synthetic oligonucleotide; TTT chr2 60459664 60459685 60459681 60459686 +
taatagatccaaggcactcata

SEQ ID NO: 195004 - DNA, 22 bp, Artificial Sequence
  Synthetic oligonucleotide; TTT chr2 60459665 60459686 60459682 60459687 +
aatagatccaaggcactcatat

SEQ ID NO: 195005 - DNA, 22 bp, Artificial Sequence
  Synthetic oligonucleotide; TTA chr2 60459666 60459687 60459683 60459688 +
atagatccaaggcactcatatt

SEQ ID NO: 195006 - DNA, 22 bp, Artificial Sequence
  Synthetic oligonucleotide; CTC chr2 60459683 60459704 60459700 60459705 +
atattttaaaaccaaatgatag

SEQ ID NO: 195007 - DNA, 22 bp, Artificial Sequence
  Synthetic oligonucleotide; TTT chr2 60459689 60459710 60459706 60459711 +
taaaaccaaatgatagaataaa

SEQ ID NO: 195008 - DNA, 22 bp, Artificial Sequence
  Synthetic oligonucleotide; TTT chr2 60459690 60459711 60459707 60459712 +
aaaaccaaatgatagaataaac

SEQ ID NO: 195009 - DNA, 22 bp, Artificial Sequence
  Synthetic oligonucleotide; TTA chr2 60459691 60459712 60459708 60459713 +
aaaccaaatgatagaataaact

SEQ ID NO: 195010 - DNA, 22 bp, Artificial Sequence
  Synthetic oligonucleotide; CTT chr2 60459714 60459735 60459731 60459736 +
gttctgtttttctgttaatttg

SEQ ID NO: 195011 - DNA, 22 bp, Artificial Sequence
  Synthetic oligonucleotide; TTG chr2 60459715 60459736 60459732 60459737 +
ttctgtttttctgttaatttgt

SEQ ID NO: 195012 - DNA, 22 bp, Artificial Sequence
  Synthetic oligonucleotide; TTC chr2 60459718 60459739 60459735 60459740 +
tgtttttctgttaatttgtcaa

SEQ ID NO: 195013 - DNA, 22 bp, Artificial Sequence
  Synthetic oligonucleotide; CTG chr2 60459720 60459741 60459737 60459742 +
tttttctgttaatttgtcaatt

SEQ ID NO: 195014 - DNA, 22 bp, Artificial Sequence
  Synthetic oligonucleotide; TTT chr2 60459723 60459744 60459740 60459745 +
ttctgttaatttgtcaattcaa

SEQ ID NO: 195015 - DNA, 22 bp, Artificial Sequence
  Synthetic oligonucleotide; TTT chr2 60459724 60459745 60459741 60459746 +
tctgttaatttgtcaattcaag

SEQ ID NO: 195016 - DNA, 22 bp, Artificial Sequence
  Synthetic oligonucleotide; TTT chr2 60459725 60459746 60459742 60459747 +
ctgttaatttgtcaattcaagg

SEQ ID NO: 195017 - DNA, 22 bp, Artificial Sequence
  Synthetic oligonucleotide; TTC chr2 60459726 60459747 60459743 60459748 +
tgttaatttgtcaattcaaggc

SEQ ID NO: 195018 - DNA, 22 bp, Artificial Sequence
  Synthetic oligonucleotide; CTG chr2 60459728 60459749 60459745 60459750 +
ttaatttgtcaattcaaggcct

SEQ ID NO: 195019 - DNA, 22 bp, Artificial Sequence
  Synthetic oligonucleotide; TTA chr2 60459731 60459752 60459748 60459753 +
atttgtcaattcaaggcctttt

SEQ ID NO: 195020 - DNA, 22 bp, Artificial Sequence
  Synthetic oligonucleotide; TTT chr2 60459735 60459756 60459752 60459757 +
gtcaattcaaggccttttttct

SEQ ID NO: 195021 - DNA, 22 bp, Artificial Sequence
  Synthetic oligonucleotide; TTG chr2 60459736 60459757 60459753 60459758 +
tcaattcaaggccttttttctt

SEQ ID NO: 195022 - DNA, 22 bp, Artificial Sequence
  Synthetic oligonucleotide; TTC chr2 60459743 60459764 60459760 60459765 +
aaggccttttttcttcctttcc

SEQ ID NO: 195023 - DNA, 22 bp, Artificial Sequence
  Synthetic oligonucleotide; CTT chr2 60459751 60459772 60459768 60459773 +
ttttcttcctttccaattgata

SEQ ID NO: 195024 - DNA, 22 bp, Artificial Sequence
  Synthetic oligonucleotide; TTT chr2 60459752 60459773 60459769 60459774 +
tttcttcctttccaattgatac

SEQ ID NO: 195025 - DNA, 22 bp, Artificial Sequence
  Synthetic oligonucleotide; TTT chr2 60459753 60459774 60459770 60459775 +
ttcttcctttccaattgataca

SEQ ID NO: 195026 - DNA, 22 bp, Artificial Sequence
  Synthetic oligonucleotide; TTT chr2 60459754 60459775 60459771 60459776 +
tcttcctttccaattgatacat

SEQ ID NO: 195027 - DNA, 22 bp, Artificial Sequence
  Synthetic oligonucleotide; TTT chr2 60459755 60459776 60459772 60459777 +
cttcctttccaattgatacatt

SEQ ID NO: 195028 - DNA, 22 bp, Artificial Sequence
  Synthetic oligonucleotide; TTC chr2 60459756 60459777 60459773 60459778 +
ttcctttccaattgatacattt

SEQ ID NO: 195029 - DNA, 22 bp, Artificial Sequence
  Synthetic oligonucleotide; CTT chr2 60459758 60459779 60459775 60459780 +
cctttccaattgatacatttaa

SEQ ID NO: 195030 - DNA, 22 bp, Artificial Sequence
  Synthetic oligonucleotide; TTC chr2 60459759 60459780 60459776 60459781 +
ctttccaattgatacatttaac

SEQ ID NO: 195031 - DNA, 22 bp, Artificial Sequence
  Synthetic oligonucleotide; CTT chr2 60459762 60459783 60459779 60459784 +
tccaattgatacatttaaccct

SEQ ID NO: 195032 - DNA, 22 bp, Artificial Sequence
  Synthetic oligonucleotide; TTT chr2 60459763 60459784 60459780 60459785 +
ccaattgatacatttaaccctt

SEQ ID NO: 195033 - DNA, 22 bp, Artificial Sequence
  Synthetic oligonucleotide; TTC chr2 60459764 60459785 60459781 60459786 +
caattgatacatttaacccttt

SEQ ID NO: 195034 - DNA, 22 bp, Artificial Sequence
  Synthetic oligonucleotide; TTG chr2 60459770 60459791 60459787 60459792 +
atacatttaaccctttagagac

SEQ ID NO: 195035 - DNA, 22 bp, Artificial Sequence
  Synthetic oligonucleotide; TTT chr2 60459778 60459799 60459795 60459800 +
aaccctttagagacagacattt

SEQ ID NO: 195036 - DNA, 22 bp, Artificial Sequence
  Synthetic oligonucleotide; TTA chr2 60459779 60459800 60459796 60459801 +
accctttagagacagacattta

SEQ ID NO: 195037 - DNA, 22 bp, Artificial Sequence
  Synthetic oligonucleotide; CTT chr2 60459785 60459806 60459802 60459807 +
tagagacagacatttagctcat

SEQ ID NO: 195038 - DNA, 22 bp, Artificial Sequence
  Synthetic oligonucleotide; TTT chr2 60459786 60459807 60459803 60459808 +
agagacagacatttagctcata

SEQ ID NO: 195039 - DNA, 22 bp, Artificial Sequence
  Synthetic oligonucleotide; TTA chr2 60459787 60459808 60459804 60459809 +
gagacagacatttagctcatag

SEQ ID NO: 195040 - DNA, 22 bp, Artificial Sequence
  Synthetic oligonucleotide; TTT chr2 60459800 60459821 60459817 60459822 +
agctcatagagattttttttca

SEQ ID NO: 195041 - DNA, 22 bp, Artificial Sequence
  Synthetic oligonucleotide; TTA chr2 60459801 60459822 60459818 60459823 +
gctcatagagattttttttcag

SEQ ID NO: 195042 - DNA, 22 bp, Artificial Sequence
  Synthetic oligonucleotide; CTC chr2 60459805 60459826 60459822 60459827 +
atagagattttttttcagtgct

SEQ ID NO: 195043 - DNA, 22 bp, Artificial Sequence
  Synthetic oligonucleotide; TTT chr2 60459815 60459836 60459832 60459837 +
tttttcagtgctatctattctg

SEQ ID NO: 195044 - DNA, 22 bp, Artificial Sequence
  Synthetic oligonucleotide; TTT chr2 60459816 60459837 60459833 60459838 +
ttttcagtgctatctattctgt

SEQ ID NO: 195045 - DNA, 22 bp, Artificial Sequence
  Synthetic oligonucleotide; TTT chr2 60459817 60459838 60459834 60459839 +
tttcagtgctatctattctgtc

SEQ ID NO: 195046 - DNA, 22 bp, Artificial Sequence
  Synthetic oligonucleotide; TTT chr2 60459818 60459839 60459835 60459840 +
ttcagtgctatctattctgtct

SEQ ID NO: 195047 - DNA, 22 bp, Artificial Sequence
  Synthetic oligonucleotide; TTT chr2 60459819 60459840 60459836 60459841 +
tcagtgctatctattctgtcta

SEQ ID NO: 195048 - DNA, 22 bp, Artificial Sequence
  Synthetic oligonucleotide; TTT chr2 60459820 60459841 60459837 60459842 +
cagtgctatctattctgtctat

SEQ ID NO: 195049 - DNA, 22 bp, Artificial Sequence
  Synthetic oligonucleotide; TTC chr2 60459821 60459842 60459838 60459843 +
agtgctatctattctgtctata

SEQ ID NO: 195050 - DNA, 22 bp, Artificial Sequence
  Synthetic oligonucleotide; CTA chr2 60459828 60459849 60459845 60459850 +
tctattctgtctatagagggtt

SEQ ID NO: 195051 - DNA, 22 bp, Artificial Sequence
  Synthetic oligonucleotide; CTA chr2 60459832 60459853 60459849 60459854 +
ttctgtctatagagggttaatc

SEQ ID NO: 195052 - DNA, 22 bp, Artificial Sequence
  Synthetic oligonucleotide; TTC chr2 60459835 60459856 60459852 60459857 +
tgtctatagagggttaatccaa

SEQ ID NO: 195053 - DNA, 22 bp, Artificial Sequence
  Synthetic oligonucleotide; CTG chr2 60459837 60459858 60459854 60459859 +
tctatagagggttaatccaaag

SEQ ID NO: 195054 - DNA, 22 bp, Artificial Sequence
  Synthetic oligonucleotide; CTA chr2 60459841 60459862 60459858 60459863 +
tagagggttaatccaaagactg

SEQ ID NO: 195055 - DNA, 22 bp, Artificial Sequence
  Synthetic oligonucleotide; TTA chr2 60459851 60459872 60459868 60459873 +
atccaaagactgtttttcctcc

SEQ ID NO: 195056 - DNA, 22 bp, Artificial Sequence
  Synthetic oligonucleotide; CTG chr2 60459863 60459884 60459880 60459885 +
tttttcctcctcacgttataaa

SEQ ID NO: 195057 - DNA, 22 bp, Artificial Sequence
  Synthetic oligonucleotide; TTT chr2 60459866 60459887 60459883 60459888 +
ttcctcctcacgttataaaata

SEQ ID NO: 195058 - DNA, 22 bp, Artificial Sequence
  Synthetic oligonucleotide; TTT chr2 60459867 60459888 60459884 60459889 +
tcctcctcacgttataaaataa

SEQ ID NO: 195059 - DNA, 22 bp, Artificial Sequence
  Synthetic oligonucleotide; TTT chr2 60459868 60459889 60459885 60459890 +
cctcctcacgttataaaataaa

SEQ ID NO: 195060 - DNA, 22 bp, Artificial Sequence
  Synthetic oligonucleotide; TTC chr2 60459869 60459890 60459886 60459891 +
ctcctcacgttataaaataaaa

SEQ ID NO: 195061 - DNA, 22 bp, Artificial Sequence
  Synthetic oligonucleotide; CTC chr2 60459872 60459893 60459889 60459894 +
ctcacgttataaaataaaactg

SEQ ID NO: 195062 - DNA, 22 bp, Artificial Sequence
  Synthetic oligonucleotide; CTC chr2 60459875 60459896 60459892 60459897 +
acgttataaaataaaactgtac

SEQ ID NO: 195063 - DNA, 22 bp, Artificial Sequence
  Synthetic oligonucleotide; TTA chr2 60459881 60459902 60459898 60459903 +
taaaataaaactgtacatgata

SEQ ID NO: 195064 - DNA, 22 bp, Artificial Sequence
  Synthetic oligonucleotide; CTG chr2 60459894 60459915 60459911 60459916 +
tacatgatatgtattacagaat

SEQ ID NO: 195065 - DNA, 22 bp, Artificial Sequence
  Synthetic oligonucleotide; TTA chr2 60459910 60459931 60459927 60459932 +
cagaatgtatgcagcatggtct

SEQ ID NO: 195066 - DNA, 22 bp, Artificial Sequence
  Synthetic oligonucleotide; CTT chr2 60459933 60459954 60459950 60459955 +
tttctctctctctctctttttc

SEQ ID NO: 195067 - DNA, 22 bp, Artificial Sequence
  Synthetic oligonucleotide; TTT chr2 60459934 60459955 60459951 60459956 +
ttctctctctctctctttttct

SEQ ID NO: 195068 - DNA, 22 bp, Artificial Sequence
  Synthetic oligonucleotide; TTT chr2 60459935 60459956 60459952 60459957 +
tctctctctctctctttttctc

SEQ ID NO: 195069 - DNA, 22 bp, Artificial Sequence
  Synthetic oligonucleotide; TTT chr2 60459936 60459957 60459953 60459958 +
ctctctctctctctttttctct

SEQ ID NO: 195070 - DNA, 22 bp, Artificial Sequence
  Synthetic oligonucleotide; TTC chr2 60459937 60459958 60459954 60459959 +
tctctctctctctttttctctc

SEQ ID NO: 195071 - DNA, 22 bp, Artificial Sequence
  Synthetic oligonucleotide; CTC chr2 60459939 60459960 60459956 60459961 +
tctctctctctttttctctcag

SEQ ID NO: 195072 - DNA, 22 bp, Artificial Sequence
  Synthetic oligonucleotide; CTC chr2 60459941 60459962 60459958 60459963 +
tctctctctttttctctcagaa

SEQ ID NO: 195073 - DNA, 22 bp, Artificial Sequence
  Synthetic oligonucleotide; CTC chr2 60459943 60459964 60459960 60459965 +
tctctctttttctctcagaacg

SEQ ID NO: 195074 - DNA, 22 bp, Artificial Sequence
  Synthetic oligonucleotide; CTC chr2 60459945 60459966 60459962 60459967 +
tctctttttctctcagaacgga

SEQ ID NO: 195075 - DNA, 22 bp, Artificial Sequence
  Synthetic oligonucleotide; CTC chr2 60459947 60459968 60459964 60459969 +
tctttttctctcagaacggaac

SEQ ID NO: 195076 - DNA, 22 bp, Artificial Sequence
  Synthetic oligonucleotide; CTC chr2 60459949 60459970 60459966 60459971 +
tttttctctcagaacggaactg

SEQ ID NO: 195077 - DNA, 22 bp, Artificial Sequence
  Synthetic oligonucleotide; CTT chr2 60459951 60459972 60459968 60459973 +
tttctctcagaacggaactgga

SEQ ID NO: 195078 - DNA, 22 bp, Artificial Sequence
  Synthetic oligonucleotide; TTT chr2 60459952 60459973 60459969 60459974 +
ttctctcagaacggaactggaa

SEQ ID NO: 195079 - DNA, 22 bp, Artificial Sequence
  Synthetic oligonucleotide; TTT chr2 60459953 60459974 60459970 60459975 +
tctctcagaacggaactggaaa

SEQ ID NO: 195080 - DNA, 22 bp, Artificial Sequence
  Synthetic oligonucleotide; TTT chr2 60459954 60459975 60459971 60459976 +
ctctcagaacggaactggaaac

SEQ ID NO: 195081 - DNA, 22 bp, Artificial Sequence
  Synthetic oligonucleotide; TTC chr2 60459955 60459976 60459972 60459977 +
tctcagaacggaactggaaaca

SEQ ID NO: 195082 - DNA, 22 bp, Artificial Sequence
  Synthetic oligonucleotide; CTC chr2 60459957 60459978 60459974 60459979 +
tcagaacggaactggaaacagc

SEQ ID NO: 195083 - DNA, 22 bp, Artificial Sequence
  Synthetic oligonucleotide; CTC chr2 60459959 60459980 60459976 60459981 +
agaacggaactggaaacagcaa

SEQ ID NO: 195084 - DNA, 22 bp, Artificial Sequence
  Synthetic oligonucleotide; CTG chr2 60459971 60459992 60459988 60459993 +
gaaacagcaacatgtttgctca

SEQ ID NO: 195085 - DNA, 22 bp, Artificial Sequence
  Synthetic oligonucleotide; TTT chr2 60459988 60460009 60460005 60460010 +
gctcagcaacgaattagggaca

SEQ ID NO: 195086 - DNA, 22 bp, Artificial Sequence
  Synthetic oligonucleotide; TTG chr2 60459989 60460010 60460006 60460011 +
ctcagcaacgaattagggacaa

SEQ ID NO: 195087 - DNA, 22 bp, Artificial Sequence
  Synthetic oligonucleotide; CTC chr2 60459992 60460013 60460009 60460014 +
agcaacgaattagggacaattt

SEQ ID NO: 195088 - DNA, 22 bp, Artificial Sequence
  Synthetic oligonucleotide; TTA chr2 60460004 60460025 60460021 60460026 +
gggacaatttaaaatagccata

SEQ ID NO: 195089 - DNA, 22 bp, Artificial Sequence
  Synthetic oligonucleotide; TTT chr2 60460014 60460035 60460031 60460036 +
aaaatagccataacataccata

SEQ ID NO: 195090 - DNA, 22 bp, Artificial Sequence
  Synthetic oligonucleotide; TTA chr2 60460015 60460036 60460032 60460037 +
aaatagccataacataccatac

SEQ ID NO: 195091 - DNA, 22 bp, Artificial Sequence
  Synthetic oligonucleotide; CTG chr2 60460043 60460064 60460060 60460065 +
tctaagtttaaaaaaaaacata

SEQ ID NO: 195092 - DNA, 22 bp, Artificial Sequence
  Synthetic oligonucleotide; CTA chr2 60460047 60460068 60460064 60460069 +
agtttaaaaaaaaacatacaca

SEQ ID NO: 195093 - DNA, 22 bp, Artificial Sequence
  Synthetic oligonucleotide; TTT chr2 60460052 60460073 60460069 60460074 +
aaaaaaaaacatacacaacatg

SEQ ID NO: 195094 - DNA, 22 bp, Artificial Sequence
  Synthetic oligonucleotide; TTA chr2 60460053 60460074 60460070 60460075 +
aaaaaaaacatacacaacatgt

SEQ ID NO: 195095 - DNA, 22 bp, Artificial Sequence
  Synthetic oligonucleotide; TTA chr2 60460081 60460102 60460098 60460103 +
ttgcacaagagaaaggctcaaa

SEQ ID NO: 195096 - DNA, 22 bp, Artificial Sequence
  Synthetic oligonucleotide; TTG chr2 60460084 60460105 60460101 60460106 +
cacaagagaaaggctcaaagtt

SEQ ID NO: 195097 - DNA, 22 bp, Artificial Sequence
  Synthetic oligonucleotide; CTC chr2 60460100 60460121 60460117 60460122 +
aaagtttgcgtaaaatgcaata

SEQ ID NO: 195098 - DNA, 22 bp, Artificial Sequence
  Synthetic oligonucleotide; TTT chr2 60460107 60460128 60460124 60460129 +
gcgtaaaatgcaatagtattgc

SEQ ID NO: 195099 - DNA, 22 bp, Artificial Sequence
  Synthetic oligonucleotide; TTG chr2 60460108 60460129 60460125 60460130 +
cgtaaaatgcaatagtattgcc

SEQ ID NO: 195100 - DNA, 22 bp, Artificial Sequence
  Synthetic oligonucleotide; TTG chr2 60460128 60460149 60460145 60460150 +
ccccatacagatcatgcattca

SEQ ID NO: 195101 - DNA, 22 bp, Artificial Sequence
  Synthetic oligonucleotide; TTC chr2 60460149 60460170 60460166 60460171 +
aaacggtgagaacataaaggaa

SEQ ID NO: 195102 - DNA, 22 bp, Artificial Sequence
  Synthetic oligonucleotide; CTG chr2 60460229 60460250 60460246 60460251 +
gtgacaagcactctcatattct

SEQ ID NO: 195103 - DNA, 22 bp, Artificial Sequence
  Synthetic oligonucleotide; CTC chr2 60460242 60460263 60460259 60460264 +
tcatattcttagcttcgttact

SEQ ID NO: 195104 - DNA, 22 bp, Artificial Sequence
  Synthetic oligonucleotide; CTC chr2 60460244 60460265 60460261 60460266 +
atattcttagcttcgttacttc

SEQ ID NO: 195105 - DNA, 22 bp, Artificial Sequence
  Synthetic oligonucleotide; TTC chr2 60460250 60460271 60460267 60460272 +
ttagcttcgttacttctgtttg

SEQ ID NO: 195106 - DNA, 22 bp, Artificial Sequence
  Synthetic oligonucleotide; CTT chr2 60460252 60460273 60460269 60460274 +
agcttcgttacttctgtttgtt

SEQ ID NO: 195107 - DNA, 22 bp, Artificial Sequence
  Synthetic oligonucleotide; TTA chr2 60460253 60460274 60460270 60460275 +
gcttcgttacttctgtttgttt

SEQ ID NO: 195108 - DNA, 22 bp, Artificial Sequence
  Synthetic oligonucleotide; CTT chr2 60460257 60460278 60460274 60460279 +
cgttacttctgtttgtttgttt

SEQ ID NO: 195109 - DNA, 22 bp, Artificial Sequence
  Synthetic oligonucleotide; TTC chr2 60460258 60460279 60460275 60460280 +
gttacttctgtttgtttgtttg

SEQ ID NO: 195110 - DNA, 22 bp, Artificial Sequence
  Synthetic oligonucleotide; TTA chr2 60460262 60460283 60460279 60460284 +
cttctgtttgtttgtttgtttg

SEQ ID NO: 195111 - DNA, 22 bp, Artificial Sequence
  Synthetic oligonucleotide; CTT chr2 60460265 60460286 60460282 60460287 +
ctgtttgtttgtttgtttgttt

SEQ ID NO: 195112 - DNA, 22 bp, Artificial Sequence
  Synthetic oligonucleotide; TTC chr2 60460266 60460287 60460283 60460288 +
tgtttgtttgtttgtttgttta

SEQ ID NO: 195113 - DNA, 22 bp, Artificial Sequence
  Synthetic oligonucleotide; CTG chr2 60460268 60460289 60460285 60460290 +
tttgtttgtttgtttgtttaaa

SEQ ID NO: 195114 - DNA, 22 bp, Artificial Sequence
  Synthetic oligonucleotide; TTT chr2 60460271 60460292 60460288 60460293 +
gtttgtttgtttgtttaaatca

SEQ ID NO: 195115 - DNA, 22 bp, Artificial Sequence
  Synthetic oligonucleotide; TTG chr2 60460272 60460293 60460289 60460294 +
tttgtttgtttgtttaaatcac

SEQ ID NO: 195116 - DNA, 22 bp, Artificial Sequence
  Synthetic oligonucleotide; TTT chr2 60460275 60460296 60460292 60460297 +
gtttgtttgtttaaatcacatg

SEQ ID NO: 195117 - DNA, 22 bp, Artificial Sequence
  Synthetic oligonucleotide; TTG chr2 60460276 60460297 60460293 60460298 +
tttgtttgtttaaatcacatgg

SEQ ID NO: 195118 - DNA, 22 bp, Artificial Sequence
  Synthetic oligonucleotide; TTT chr2 60460279 60460300 60460296 60460301 +
gtttgtttaaatcacatgggac

SEQ ID NO: 195119 - DNA, 22 bp, Artificial Sequence
  Synthetic oligonucleotide; TTG chr2 60460280 60460301 60460297 60460302 +
tttgtttaaatcacatgggact

SEQ ID NO: 195120 - DNA, 22 bp, Artificial Sequence
  Synthetic oligonucleotide; TTT chr2 60460283 60460304 60460300 60460305 +
gtttaaatcacatgggactaga

SEQ ID NO: 195121 - DNA, 22 bp, Artificial Sequence
  Synthetic oligonucleotide; TTG chr2 60460284 60460305 60460301 60460306 +
tttaaatcacatgggactagaa

SEQ ID NO: 195122 - DNA, 22 bp, Artificial Sequence
  Synthetic oligonucleotide; TTT chr2 60460287 60460308 60460304 60460309 +
aaatcacatgggactagaaaaa

SEQ ID NO: 195123 - DNA, 22 bp, Artificial Sequence
  Synthetic oligonucleotide; TTA chr2 60460288 60460309 60460305 60460310 +
aatcacatgggactagaaaaaa

SEQ ID NO: 195124 - DNA, 22 bp, Artificial Sequence
  Synthetic oligonucleotide; CTA chr2 60460303 60460324 60460320 60460325 +
gaaaaaaatcctacagggagtg

SEQ ID NO: 195125 - DNA, 22 bp, Artificial Sequence
  Synthetic oligonucleotide; CTA chr2 60460316 60460337 60460333 60460338 +
cagggagtggggctggagggcg

SEQ ID NO: 195126 - DNA, 22 bp, Artificial Sequence
  Synthetic oligonucleotide; CTG chr2 60460331 60460352 60460348 60460353 +
gagggcgatggggaaggggagt

SEQ ID NO: 195127 - DNA, 22 bp, Artificial Sequence
  Synthetic oligonucleotide; TTA chr2 60460396 60460417 60460413 60460418 +
atatacctctattcagttttta

SEQ ID NO: 195128 - DNA, 22 bp, Artificial Sequence
  Synthetic oligonucleotide; CTC chr2 60460405 60460426 60460422 60460427 +
tattcagtttttatatcattat

SEQ ID NO: 195129 - DNA, 22 bp, Artificial Sequence
  Synthetic oligonucleotide; CTA chr2 60460407 60460428 60460424 60460429 +
ttcagtttttatatcattattc

SEQ ID NO: 195130 - DNA, 22 bp, Artificial Sequence
  Synthetic oligonucleotide; TTC chr2 60460410 60460431 60460427 60460432 +
agtttttatatcattattcaac

SEQ ID NO: 195131 - DNA, 22 bp, Artificial Sequence
  Synthetic oligonucleotide; TTT chr2 60460415 60460436 60460432 60460437 +
ttatatcattattcaacactcg

SEQ ID NO: 195132 - DNA, 22 bp, Artificial Sequence
  Synthetic oligonucleotide; TTT chr2 60460416 60460437 60460433 60460438 +
tatatcattattcaacactcga

SEQ ID NO: 195133 - DNA, 22 bp, Artificial Sequence
  Synthetic oligonucleotide; TTT chr2 60460417 60460438 60460434 60460439 +
atatcattattcaacactcgat

SEQ ID NO: 195134 - DNA, 22 bp, Artificial Sequence
  Synthetic oligonucleotide; TTA chr2 60460418 60460439 60460435 60460440 +
tatcattattcaacactcgatc

SEQ ID NO: 195135 - DNA, 22 bp, Artificial Sequence
  Synthetic oligonucleotide; TTA chr2 60460426 60460447 60460443 60460448 +
ttcaacactcgatcactgtgcc

SEQ ID NO: 195136 - DNA, 22 bp, Artificial Sequence
  Synthetic oligonucleotide; TTC chr2 60460429 60460450 60460446 60460451 +
aacactcgatcactgtgccatt

SEQ ID NO: 195137 - DNA, 22 bp, Artificial Sequence
  Synthetic oligonucleotide; CTC chr2 60460436 60460457 60460453 60460458 +
gatcactgtgccattttttcat

SEQ ID NO: 195138 - DNA, 22 bp, Artificial Sequence
  Synthetic oligonucleotide; CTG chr2 60460444 60460465 60460461 60460466 +
tgccattttttcatgtgtttct

SEQ ID NO: 195139 - DNA, 22 bp, Artificial Sequence
  Synthetic oligonucleotide; TTT chr2 60460452 60460473 60460469 60460474 +
tttcatgtgtttctccagggta

SEQ ID NO: 195140 - DNA, 22 bp, Artificial Sequence
  Synthetic oligonucleotide; TTT chr2 60460453 60460474 60460470 60460475 +
ttcatgtgtttctccagggtac

SEQ ID NO: 195141 - DNA, 22 bp, Artificial Sequence
  Synthetic oligonucleotide; TTT chr2 60460454 60460475 60460471 60460476 +
tcatgtgtttctccagggtact

SEQ ID NO: 195142 - DNA, 22 bp, Artificial Sequence
  Synthetic oligonucleotide; TTT chr2 60460455 60460476 60460472 60460477 +
catgtgtttctccagggtactg

SEQ ID NO: 195143 - DNA, 22 bp, Artificial Sequence
  Synthetic oligonucleotide; TTC chr2 60460456 60460477 60460473 60460478 +
atgtgtttctccagggtactgt

SEQ ID NO: 195144 - DNA, 22 bp, Artificial Sequence
  Synthetic oligonucleotide; TTT chr2 60460464 60460485 60460481 60460486 +
ctccagggtactgtacacgcta

SEQ ID NO: 195145 - DNA, 22 bp, Artificial Sequence
  Synthetic oligonucleotide; TTC chr2 60460465 60460486 60460482 60460487 +
tccagggtactgtacacgctaa

SEQ ID NO: 195146 - DNA, 22 bp, Artificial Sequence
  Synthetic oligonucleotide; CTC chr2 60460467 60460488 60460484 60460489 +
cagggtactgtacacgctaaaa

SEQ ID NO: 195147 - DNA, 22 bp, Artificial Sequence
  Synthetic oligonucleotide; CTG chr2 60460477 60460498 60460494 60460499 +
tacacgctaaaaggcatcttac

SEQ ID NO: 195148 - DNA, 22 bp, Artificial Sequence
  Synthetic oligonucleotide; CTA chr2 60460486 60460507 60460503 60460508 +
aaaggcatcttacaaatttcac

SEQ ID NO: 195149 - DNA, 22 bp, Artificial Sequence
  Synthetic oligonucleotide; CTT chr2 60460497 60460518 60460514 60460519 +
acaaatttcacatttgtaaacg

SEQ ID NO: 195150 - DNA, 22 bp, Artificial Sequence
  Synthetic oligonucleotide; TTA chr2 60460498 60460519 60460515 60460520 +
caaatttcacatttgtaaacgt

SEQ ID NO: 195151 - DNA, 22 bp, Artificial Sequence
  Synthetic oligonucleotide; TTT chr2 60460505 60460526 60460522 60460527 +
cacatttgtaaacgtccttccc

SEQ ID NO: 195152 - DNA, 22 bp, Artificial Sequence
  Synthetic oligonucleotide; TTC chr2 60460506 60460527 60460523 60460528 +
acatttgtaaacgtccttcccc

SEQ ID NO: 195153 - DNA, 22 bp, Artificial Sequence
  Synthetic oligonucleotide; TTT chr2 60460512 60460533 60460529 60460534 +
gtaaacgtccttccccacctgg

SEQ ID NO: 195154 - DNA, 22 bp, Artificial Sequence
  Synthetic oligonucleotide; TTG chr2 60460513 60460534 60460530 60460535 +
taaacgtccttccccacctggc

SEQ ID NO: 195155 - DNA, 22 bp, Artificial Sequence
  Synthetic oligonucleotide; CTT chr2 60460524 60460545 60460541 60460546 +
ccccacctggccatgcgttttc

SEQ ID NO: 195156 - DNA, 22 bp, Artificial Sequence
  Synthetic oligonucleotide; TTC chr2 60460525 60460546 60460542 60460547 +
cccacctggccatgcgttttca

SEQ ID NO: 195157 - DNA, 22 bp, Artificial Sequence
  Synthetic oligonucleotide; CTG chr2 60460533 60460554 60460550 60460555 +
gccatgcgttttcatgtgcctg

SEQ ID NO: 195158 - DNA, 22 bp, Artificial Sequence
  Synthetic oligonucleotide; TTT chr2 60460544 60460565 60460561 60460566 +
tcatgtgcctggtgagcttgct

SEQ ID NO: 195159 - DNA, 22 bp, Artificial Sequence
  Synthetic oligonucleotide; TTT chr2 60460545 60460566 60460562 60460567 +
catgtgcctggtgagcttgcta

SEQ ID NO: 195160 - DNA, 22 bp, Artificial Sequence
  Synthetic oligonucleotide; TTC chr2 60460546 60460567 60460563 60460568 +
atgtgcctggtgagcttgctac

SEQ ID NO: 195161 - DNA, 22 bp, Artificial Sequence
  Synthetic oligonucleotide; CTG chr2 60460555 60460576 60460572 60460577 +
gtgagcttgctactctgggcac

SEQ ID NO: 195162 - DNA, 22 bp, Artificial Sequence
  Synthetic oligonucleotide; CTT chr2 60460563 60460584 60460580 60460585 +
gctactctgggcacaggcatag

SEQ ID NO: 195163 - DNA, 22 bp, Artificial Sequence
  Synthetic oligonucleotide; TTG chr2 60460564 60460585 60460581 60460586 +
ctactctgggcacaggcatagt

SEQ ID NO: 195164 - DNA, 22 bp, Artificial Sequence
  Synthetic oligonucleotide; CTA chr2 60460567 60460588 60460584 60460589 +
ctctgggcacaggcatagttgc

SEQ ID NO: 195165 - DNA, 22 bp, Artificial Sequence
  Synthetic oligonucleotide; CTC chr2 60460570 60460591 60460587 60460592 +
tgggcacaggcatagttgcaca

SEQ ID NO: 195166 - DNA, 22 bp, Artificial Sequence
  Synthetic oligonucleotide; CTG chr2 60460572 60460593 60460589 60460594 +
ggcacaggcatagttgcacagc

SEQ ID NO: 195167 - DNA, 22 bp, Artificial Sequence
  Synthetic oligonucleotide; TTG chr2 60460588 60460609 60460605 60460610 +
cacagctcgcatttataaggcc

SEQ ID NO: 195168 - DNA, 22 bp, Artificial Sequence
  Synthetic oligonucleotide; CTC chr2 60460596 60460617 60460613 60460618 +
gcatttataaggcctttcgccc

SEQ ID NO: 195169 - DNA, 22 bp, Artificial Sequence
  Synthetic oligonucleotide; TTT chr2 60460602 60460623 60460619 60460624 +
ataaggcctttcgcccgtgtgg

SEQ ID NO: 195170 - DNA, 22 bp, Artificial Sequence
  Synthetic oligonucleotide; TTA chr2 60460603 60460624 60460620 60460625 +
taaggcctttcgcccgtgtggc

SEQ ID NO: 195171 - DNA, 22 bp, Artificial Sequence
  Synthetic oligonucleotide; CTT chr2 60460612 60460633 60460629 60460634 +
tcgcccgtgtggcttctcctgt

SEQ ID NO: 195172 - DNA, 22 bp, Artificial Sequence
  Synthetic oligonucleotide; TTT chr2 60460613 60460634 60460630 60460635 +
cgcccgtgtggcttctcctgtg

SEQ ID NO: 195173 - DNA, 22 bp, Artificial Sequence
  Synthetic oligonucleotide; TTC chr2 60460614 60460635 60460631 60460636 +
gcccgtgtggcttctcctgtgg

SEQ ID NO: 195174 - DNA, 22 bp, Artificial Sequence
  Synthetic oligonucleotide; CTT chr2 60460627 60460648 60460644 60460649 +
ctcctgtggacagtgagattgc

SEQ ID NO: 195175 - DNA, 22 bp, Artificial Sequence
  Synthetic oligonucleotide; TTC chr2 60460628 60460649 60460645 60460650 +
tcctgtggacagtgagattgct

SEQ ID NO: 195176 - DNA, 22 bp, Artificial Sequence
  Synthetic oligonucleotide; CTC chr2 60460630 60460651 60460647 60460652 +
ctgtggacagtgagattgctac

SEQ ID NO: 195177 - DNA, 22 bp, Artificial Sequence
  Synthetic oligonucleotide; CTG chr2 60460633 60460654 60460650 60460655 +
tggacagtgagattgctacagt

SEQ ID NO: 195178 - DNA, 22 bp, Artificial Sequence
  Synthetic oligonucleotide; TTG chr2 60460648 60460669 60460665 60460670 +
ctacagttcttgaagactttcc

SEQ ID NO: 195179 - DNA, 22 bp, Artificial Sequence
  Synthetic oligonucleotide; CTA chr2 60460651 60460672 60460668 60460673 +
cagttcttgaagactttcccac

SEQ ID NO: 195180 - DNA, 22 bp, Artificial Sequence
  Synthetic oligonucleotide; TTC chr2 60460657 60460678 60460674 60460679 +
ttgaagactttcccacagtact

SEQ ID NO: 195181 - DNA, 22 bp, Artificial Sequence
  Synthetic oligonucleotide; CTT chr2 60460659 60460680 60460676 60460681 +
gaagactttcccacagtactca

SEQ ID NO: 195182 - DNA, 22 bp, Artificial Sequence
  Synthetic oligonucleotide; TTG chr2 60460660 60460681 60460677 60460682 +
aagactttcccacagtactcac

SEQ ID NO: 195183 - DNA, 22 bp, Artificial Sequence
  Synthetic oligonucleotide; CTT chr2 60460667 60460688 60460684 60460689 +
tcccacagtactcacaagtgtc

SEQ ID NO: 195184 - DNA, 22 bp, Artificial Sequence
  Synthetic oligonucleotide; TTT chr2 60460668 60460689 60460685 60460690 +
cccacagtactcacaagtgtcg

SEQ ID NO: 195185 - DNA, 22 bp, Artificial Sequence
  Synthetic oligonucleotide; TTC chr2 60460669 60460690 60460686 60460691 +
ccacagtactcacaagtgtcgc

SEQ ID NO: 195186 - DNA, 22 bp, Artificial Sequence
  Synthetic oligonucleotide; CTC chr2 60460680 60460701 60460697 60460702 +
acaagtgtcgctgcgtctgccc

SEQ ID NO: 195187 - DNA, 22 bp, Artificial Sequence
  Synthetic oligonucleotide; CTG chr2 60460693 60460714 60460710 60460715 +
cgtctgccctcttttgagctgg

SEQ ID NO: 195188 - DNA, 22 bp, Artificial Sequence
  Synthetic oligonucleotide; CTG chr2 60460699 60460720 60460716 60460721 +
ccctcttttgagctgggcctgc

SEQ ID NO: 195189 - DNA, 22 bp, Artificial Sequence
  Synthetic oligonucleotide; CTC chr2 60460704 60460725 60460721 60460726 +
ttttgagctgggcctgcccggg

SEQ ID NO: 195190 - DNA, 22 bp, Artificial Sequence
  Synthetic oligonucleotide; CTT chr2 60460706 60460727 60460723 60460728 +
ttgagctgggcctgcccgggcc

SEQ ID NO: 195191 - DNA, 22 bp, Artificial Sequence
  Synthetic oligonucleotide; TTT chr2 60460707 60460728 60460724 60460729 +
tgagctgggcctgcccgggccc

SEQ ID NO: 195192 - DNA, 22 bp, Artificial Sequence
  Synthetic oligonucleotide; TTT chr2 60460708 60460729 60460725 60460730 +
gagctgggcctgcccgggcccg

SEQ ID NO: 195193 - DNA, 22 bp, Artificial Sequence
  Synthetic oligonucleotide; TTG chr2 60460709 60460730 60460726 60460731 +
agctgggcctgcccgggcccgg

SEQ ID NO: 195194 - DNA, 22 bp, Artificial Sequence
  Synthetic oligonucleotide; CTG chr2 60460714 60460735 60460731 60460736 +
ggcctgcccgggcccggaccac

SEQ ID NO: 195195 - DNA, 22 bp, Artificial Sequence
  Synthetic oligonucleotide; CTG chr2 60460720 60460741 60460737 60460742 +
cccgggcccggaccactaatat

SEQ ID NO: 195196 - DNA, 22 bp, Artificial Sequence
  Synthetic oligonucleotide; CTA chr2 60460738 60460759 60460755 60460760 +
atatggggcgtgctccctccac

SEQ ID NO: 195197 - DNA, 22 bp, Artificial Sequence
  Synthetic oligonucleotide; CTC chr2 60460753 60460774 60460770 60460775 +
cctccacttcccgtgccgctgc

SEQ ID NO: 195198 - DNA, 22 bp, Artificial Sequence
  Synthetic oligonucleotide; CTC chr2 60460757 60460778 60460774 60460779 +
cacttcccgtgccgctgcgccc

SEQ ID NO: 195199 - DNA, 22 bp, Artificial Sequence
  Synthetic oligonucleotide; CTT chr2 60460762 60460783 60460779 60460784 +
cccgtgccgctgcgccccgaga

SEQ ID NO: 195200 - DNA, 22 bp, Artificial Sequence
  Synthetic oligonucleotide; TTC chr2 60460763 60460784 60460780 60460785 +
ccgtgccgctgcgccccgagat

SEQ ID NO: 195201 - DNA, 22 bp, Artificial Sequence
  Synthetic oligonucleotide; CTG chr2 60460774 60460795 60460791 60460796 +
cgccccgagatccctccgtcca

SEQ ID NO: 195202 - DNA, 22 bp, Artificial Sequence
  Synthetic oligonucleotide; CTC chr2 60460790 60460811 60460807 60460812 +
cgtccagctccccgggcggtgt

SEQ ID NO: 195203 - DNA, 22 bp, Artificial Sequence
  Synthetic oligonucleotide; CTC chr2 60460800 60460821 60460817 60460822 +
cccgggcggtgtggagaagcgc

SEQ ID NO: 195204 - DNA, 22 bp, Artificial Sequence
  Synthetic oligonucleotide; CTC chr2 60460828 60460849 60460845 60460850 +
ccgttctccgaggagtgctccg

SEQ ID NO: 195205 - DNA, 22 bp, Artificial Sequence
  Synthetic oligonucleotide; TTC chr2 60460834 60460855 60460851 60460856 +
tccgaggagtgctccgacgagg

SEQ ID NO: 195206 - DNA, 22 bp, Artificial Sequence
  Synthetic oligonucleotide; CTC chr2 60460836 60460857 60460853 60460858 +
cgaggagtgctccgacgaggag

SEQ ID NO: 195207 - DNA, 22 bp, Artificial Sequence
  Synthetic oligonucleotide; CTC chr2 60460848 60460869 60460865 60460870 +
cgacgaggaggcaaaaggcgat

SEQ ID NO: 195208 - DNA, 22 bp, Artificial Sequence
  Synthetic oligonucleotide; TTG chr2 60460872 60460893 60460889 60460894 +
tctggagtctccgaagctaagg

SEQ ID NO: 195209 - DNA, 22 bp, Artificial Sequence
  Synthetic oligonucleotide; CTG chr2 60460876 60460897 60460893 60460898 +
gagtctccgaagctaaggaagg

SEQ ID NO: 195210 - DNA, 22 bp, Artificial Sequence
  Synthetic oligonucleotide; CTC chr2 60460883 60460904 60460900 60460905 +
cgaagctaaggaagggatcttt

SEQ ID NO: 195211 - DNA, 22 bp, Artificial Sequence
  Synthetic oligonucleotide; CTA chr2 60460891 60460912 60460908 60460913 +
aggaagggatctttgagctgcc

SEQ ID NO: 195212 - DNA, 22 bp, Artificial Sequence
  Synthetic oligonucleotide; CTT chr2 60460904 60460925 60460921 60460926 +
tgagctgcctggaggccgcgta

SEQ ID NO: 195213 - DNA, 22 bp, Artificial Sequence
  Synthetic oligonucleotide; TTT chr2 60460905 60460926 60460922 60460927 +
gagctgcctggaggccgcgtag

SEQ ID NO: 195214 - DNA, 22 bp, Artificial Sequence
  Synthetic oligonucleotide; TTG chr2 60460906 60460927 60460923 60460928 +
agctgcctggaggccgcgtagc

SEQ ID NO: 195215 - DNA, 22 bp, Artificial Sequence
  Synthetic oligonucleotide; CTG chr2 60460911 60460932 60460928 60460933 +
cctggaggccgcgtagccggcg

SEQ ID NO: 195216 - DNA, 22 bp, Artificial Sequence
  Synthetic oligonucleotide; CTG chr2 60460915 60460936 60460932 60460937 +
gaggccgcgtagccggcgagcc

SEQ ID NO: 195217 - DNA, 22 bp, Artificial Sequence
  Synthetic oligonucleotide; CTG chr2 60460941 60460962 60460958 60460963 +
cgagtacacgttctccgtgttg

SEQ ID NO: 195218 - DNA, 22 bp, Artificial Sequence
  Synthetic oligonucleotide; TTC chr2 60460954 60460975 60460971 60460976 +
tccgtgttgggcatcgcggccg

SEQ ID NO: 195219 - DNA, 22 bp, Artificial Sequence
  Synthetic oligonucleotide; CTC chr2 60460956 60460977 60460973 60460978 +
cgtgttgggcatcgcggccggg

SEQ ID NO: 195220 - DNA, 22 bp, Artificial Sequence
  Synthetic oligonucleotide; TTG chr2 60460963 60460984 60460980 60460985 +
ggcatcgcggccgggggcaggt

SEQ ID NO: 195221 - DNA, 22 bp, Artificial Sequence
  Synthetic oligonucleotide; CTC chr2 60460992 60461013 60461009 60461014 +
cttctcgagcttgatgcgctta

SEQ ID NO: 195222 - DNA, 22 bp, Artificial Sequence
  Synthetic oligonucleotide; CTT chr2 60460995 60461016 60461012 60461017 +
ctcgagcttgatgcgcttagag

SEQ ID NO: 195223 - DNA, 22 bp, Artificial Sequence
  Synthetic oligonucleotide; TTC chr2 60460996 60461017 60461013 60461018 +
tcgagcttgatgcgcttagaga

SEQ ID NO: 195224 - DNA, 22 bp, Artificial Sequence
  Synthetic oligonucleotide; CTC chr2 60460998 60461019 60461015 60461020 +
gagcttgatgcgcttagagaag

SEQ ID NO: 195225 - DNA, 22 bp, Artificial Sequence
  Synthetic oligonucleotide; CTT chr2 60461004 60461025 60461021 60461026 +
gatgcgcttagagaaggggctc

SEQ ID NO: 195226 - DNA, 22 bp, Artificial Sequence
  Synthetic oligonucleotide; TTG chr2 60461005 60461026 60461022 60461027 +
atgcgcttagagaaggggctca

SEQ ID NO: 195227 - DNA, 22 bp, Artificial Sequence
  Synthetic oligonucleotide; CTT chr2 60461013 60461034 60461030 60461035 +
agagaaggggctcagcgagctg

SEQ ID NO: 195228 - DNA, 22 bp, Artificial Sequence
  Synthetic oligonucleotide; TTA chr2 60461014 60461035 60461031 60461036 +
gagaaggggctcagcgagctgg

SEQ ID NO: 195229 - DNA, 22 bp, Artificial Sequence
  Synthetic oligonucleotide; CTC chr2 60461026 60461047 60461043 60461048 +
agcgagctggggctgcccagca

SEQ ID NO: 195230 - DNA, 22 bp, Artificial Sequence
  Synthetic oligonucleotide; CTG chr2 60461035 60461056 60461052 60461057 +
gggctgcccagcagcagctttt

SEQ ID NO: 195231 - DNA, 22 bp, Artificial Sequence
  Synthetic oligonucleotide; CTG chr2 60461041 60461062 60461058 60461063 +
cccagcagcagctttttggaca

SEQ ID NO: 195232 - DNA, 22 bp, Artificial Sequence
  Synthetic oligonucleotide; CTT chr2 60461055 60461076 60461072 60461077 +
tttggacaggccccccgaggcc

SEQ ID NO: 195233 - DNA, 22 bp, Artificial Sequence
  Synthetic oligonucleotide; TTT chr2 60461056 60461077 60461073 60461078 +
ttggacaggccccccgaggccg

SEQ ID NO: 195234 - DNA, 22 bp, Artificial Sequence
  Synthetic oligonucleotide; TTT chr2 60461057 60461078 60461074 60461079 +
tggacaggccccccgaggccga

SEQ ID NO: 195235 - DNA, 22 bp, Artificial Sequence
  Synthetic oligonucleotide; TTT chr2 60461058 60461079 60461075 60461080 +
ggacaggccccccgaggccgac

SEQ ID NO: 195236 - DNA, 22 bp, Artificial Sequence
  Synthetic oligonucleotide; TTG chr2 60461059 60461080 60461076 60461081 +
gacaggccccccgaggccgact

SEQ ID NO: 195237 - DNA, 22 bp, Artificial Sequence
  Synthetic oligonucleotide; CTC chr2 60461082 60461103 60461099 60461104 +
gcccggggagcagccgcggcca

SEQ ID NO: 195238 - DNA, 22 bp, Artificial Sequence
  Synthetic oligonucleotide; TTA chr2 60461107 60461128 60461124 60461129 +
acagtgccatcgtctatgcggt

SEQ ID NO: 195239 - DNA, 22 bp, Artificial Sequence
  Synthetic oligonucleotide; CTA chr2 60461123 60461144 60461140 60461145 +
tgcggtccgactcgccggccac

SEQ ID NO: 195240 - DNA, 22 bp, Artificial Sequence
  Synthetic oligonucleotide; CTC chr2 60461136 60461157 60461153 60461158 +
gccggccaccgagtcttcgtcg

SEQ ID NO: 195241 - DNA, 22 bp, Artificial Sequence
  Synthetic oligonucleotide; CTT chr2 60461153 60461174 60461170 60461175 +
cgtcgcaagtgtccctgtggcc

SEQ ID NO: 195242 - DNA, 22 bp, Artificial Sequence
  Synthetic oligonucleotide; TTC chr2 60461154 60461175 60461171 60461176 +
gtcgcaagtgtccctgtggccc

SEQ ID NO: 195243 - DNA, 22 bp, Artificial Sequence
  Synthetic oligonucleotide; CTG chr2 60461170 60461191 60461187 60461192 +
tggccctcggcctcggccaggt

SEQ ID NO: 195244 - DNA, 22 bp, Artificial Sequence
  Synthetic oligonucleotide; CTC chr2 60461178 60461199 60461195 60461200 +
ggcctcggccaggtggccgcgc

SEQ ID NO: 195245 - DNA, 22 bp, Artificial Sequence
  Synthetic oligonucleotide; CTC chr2 60461184 60461205 60461201 60461206 +
ggccaggtggccgcgcttatgc

SEQ ID NO: 195246 - DNA, 22 bp, Artificial Sequence
  Synthetic oligonucleotide; CTT chr2 60461202 60461223 60461219 60461224 +
atgcttctcgcccaggacctgg

SEQ ID NO: 195247 - DNA, 22 bp, Artificial Sequence
  Synthetic oligonucleotide; TTA chr2 60461203 60461224 60461220 60461225 +
tgcttctcgcccaggacctggt

SEQ ID NO: 195248 - DNA, 22 bp, Artificial Sequence
  Synthetic oligonucleotide; CTT chr2 60461208 60461229 60461225 60461230 +
ctcgcccaggacctggtggaag

SEQ ID NO: 195249 - DNA, 22 bp, Artificial Sequence
  Synthetic oligonucleotide; TTC chr2 60461209 60461230 60461226 60461231 +
tcgcccaggacctggtggaagg

SEQ ID NO: 195250 - DNA, 22 bp, Artificial Sequence
  Synthetic oligonucleotide; CTC chr2 60461211 60461232 60461228 60461233 +
gcccaggacctggtggaaggcc

SEQ ID NO: 195251 - DNA, 22 bp, Artificial Sequence
  Synthetic oligonucleotide; CTG chr2 60461223 60461244 60461240 60461245 +
gtggaaggcctcgctgaagtgc

SEQ ID NO: 195252 - DNA, 22 bp, Artificial Sequence
  Synthetic oligonucleotide; CTC chr2 60461235 60461256 60461252 60461257 +
gctgaagtgctgcatggagctg

SEQ ID NO: 195253 - DNA, 22 bp, Artificial Sequence
  Synthetic oligonucleotide; CTG chr2 60461239 60461260 60461256 60461261 +
aagtgctgcatggagctgagca

SEQ ID NO: 195254 - DNA, 22 bp, Artificial Sequence
  Synthetic oligonucleotide; CTG chr2 60461247 60461268 60461264 60461269 +
catggagctgagcaccatgccc

SEQ ID NO: 195255 - DNA, 22 bp, Artificial Sequence
  Synthetic oligonucleotide; CTG chr2 60461257 60461278 60461274 60461279 +
agcaccatgccctgcatgacgt

SEQ ID NO: 195256 - DNA, 22 bp, Artificial Sequence
  Synthetic oligonucleotide; CTG chr2 60461271 60461292 60461288 60461293 +
catgacgtcgggcagggcgcgg

SEQ ID NO: 195257 - DNA, 22 bp, Artificial Sequence
  Synthetic oligonucleotide; CTC chr2 60461296 60461317 60461313 60461318 +
tcgtcgcccacgcccacgaccg

SEQ ID NO: 195258 - DNA, 22 bp, Artificial Sequence
  Synthetic oligonucleotide; CTC chr2 60461298 60461319 60461315 60461320 +
gtcgcccacgcccacgaccgcg

SEQ ID NO: 195259 - DNA, 22 bp, Artificial Sequence
  Synthetic oligonucleotide; CTG chr2 60461332 60461353 60461349 60461354 +
ttctcgtggtggcgcgccgcct

SEQ ID NO: 195260 - DNA, 22 bp, Artificial Sequence
  Synthetic oligonucleotide; TTC chr2 60461335 60461356 60461352 60461357 +
tcgtggtggcgcgccgcctcca

SEQ ID NO: 195261 - DNA, 22 bp, Artificial Sequence
  Synthetic oligonucleotide; CTC chr2 60461337 60461358 60461354 60461359 +
gtggtggcgcgccgcctccagg

SEQ ID NO: 195262 - DNA, 22 bp, Artificial Sequence
  Synthetic oligonucleotide; CTC chr2 60461355 60461376 60461372 60461377 +
caggctcagcccgaagccgtag

SEQ ID NO: 195263 - DNA, 22 bp, Artificial Sequence
  Synthetic oligonucleotide; CTC chr2 60461362 60461383 60461379 60461384 +
agcccgaagccgtagtccaccc

SEQ ID NO: 195264 - DNA, 22 bp, Artificial Sequence
  Synthetic oligonucleotide; CTC chr2 60461386 60461407 60461403 60461408 +
tcgctctccgtcagctcctcct

SEQ ID NO: 195265 - DNA, 22 bp, Artificial Sequence
  Synthetic oligonucleotide; CTC chr2 60461388 60461409 60461405 60461410 +
gctctccgtcagctcctcctcc

SEQ ID NO: 195266 - DNA, 22 bp, Artificial Sequence
  Synthetic oligonucleotide; CTC chr2 60461392 60461413 60461409 60461414 +
tccgtcagctcctcctcctcct

SEQ ID NO: 195267 - DNA, 22 bp, Artificial Sequence
  Synthetic oligonucleotide; CTC chr2 60461394 60461415 60461411 60461416 +
cgtcagctcctcctcctcctct

SEQ ID NO: 195268 - DNA, 22 bp, Artificial Sequence
  Synthetic oligonucleotide; CTC chr2 60461403 60461424 60461420 60461425 +
ctcctcctcctcttcctcctct

SEQ ID NO: 195269 - DNA, 22 bp, Artificial Sequence
  Synthetic oligonucleotide; CTC chr2 60461406 60461427 60461423 60461428 +
ctcctcctcttcctcctcttct

SEQ ID NO: 195270 - DNA, 22 bp, Artificial Sequence
  Synthetic oligonucleotide; CTC chr2 60461409 60461430 60461426 60461431 +
ctcctcttcctcctcttcttcc

SEQ ID NO: 195271 - DNA, 22 bp, Artificial Sequence
  Synthetic oligonucleotide; CTC chr2 60461412 60461433 60461429 60461434 +
ctcttcctcctcttcttcctct

SEQ ID NO: 195272 - DNA, 22 bp, Artificial Sequence
  Synthetic oligonucleotide; CTC chr2 60461415 60461436 60461432 60461437 +
ttcctcctcttcttcctcttcc

SEQ ID NO: 195273 - DNA, 22 bp, Artificial Sequence
  Synthetic oligonucleotide; CTT chr2 60461417 60461438 60461434 60461439 +
cctcctcttcttcctcttcctc

SEQ ID NO: 195274 - DNA, 22 bp, Artificial Sequence
  Synthetic oligonucleotide; TTC chr2 60461418 60461439 60461435 60461440 +
ctcctcttcttcctcttcctcg

SEQ ID NO: 195275 - DNA, 22 bp, Artificial Sequence
  Synthetic oligonucleotide; CTC chr2 60461421 60461442 60461438 60461443 +
ctcttcttcctcttcctcgtcg

SEQ ID NO: 195276 - DNA, 22 bp, Artificial Sequence
  Synthetic oligonucleotide; CTC chr2 60461424 60461445 60461441 60461446 +
ttcttcctcttcctcgtcgtcc

SEQ ID NO: 195277 - DNA, 22 bp, Artificial Sequence
  Synthetic oligonucleotide; CTT chr2 60461426 60461447 60461443 60461448 +
cttcctcttcctcgtcgtcctc

SEQ ID NO: 195278 - DNA, 22 bp, Artificial Sequence
  Synthetic oligonucleotide; TTC chr2 60461427 60461448 60461444 60461449 +
ttcctcttcctcgtcgtcctcc

SEQ ID NO: 195279 - DNA, 22 bp, Artificial Sequence
  Synthetic oligonucleotide; CTT chr2 60461429 60461450 60461446 60461451 +
cctcttcctcgtcgtcctcctc

SEQ ID NO: 195280 - DNA, 22 bp, Artificial Sequence
  Synthetic oligonucleotide; TTC chr2 60461430 60461451 60461447 60461452 +
ctcttcctcgtcgtcctcctct

SEQ ID NO: 195281 - DNA, 22 bp, Artificial Sequence
  Synthetic oligonucleotide; CTC chr2 60461433 60461454 60461450 60461455 +
ttcctcgtcgtcctcctcttcc

SEQ ID NO: 195282 - DNA, 22 bp, Artificial Sequence
  Synthetic oligonucleotide; CTT chr2 60461435 60461456 60461452 60461457 +
cctcgtcgtcctcctcttcctc

SEQ ID NO: 195283 - DNA, 22 bp, Artificial Sequence
  Synthetic oligonucleotide; TTC chr2 60461436 60461457 60461453 60461458 +
ctcgtcgtcctcctcttcctcc

SEQ ID NO: 195284 - DNA, 22 bp, Artificial Sequence
  Synthetic oligonucleotide; CTC chr2 60461439 60461460 60461456 60461461 +
gtcgtcctcctcttcctcctcg

SEQ ID NO: 195285 - DNA, 22 bp, Artificial Sequence
  Synthetic oligonucleotide; CTC chr2 60461448 60461469 60461465 60461470 +
ctcttcctcctcgtccccgttc

SEQ ID NO: 195286 - DNA, 22 bp, Artificial Sequence
  Synthetic oligonucleotide; CTC chr2 60461451 60461472 60461468 60461473 +
ttcctcctcgtccccgttctcc

SEQ ID NO: 195287 - DNA, 22 bp, Artificial Sequence
  Synthetic oligonucleotide; CTT chr2 60461453 60461474 60461470 60461475 +
cctcctcgtccccgttctccgg

SEQ ID NO: 195288 - DNA, 22 bp, Artificial Sequence
  Synthetic oligonucleotide; TTC chr2 60461454 60461475 60461471 60461476 +
ctcctcgtccccgttctccggg

SEQ ID NO: 195289 - DNA, 22 bp, Artificial Sequence
  Synthetic oligonucleotide; CTC chr2 60461457 60461478 60461474 60461479 +
ctcgtccccgttctccgggatc

SEQ ID NO: 195290 - DNA, 22 bp, Artificial Sequence
  Synthetic oligonucleotide; CTC chr2 60461460 60461481 60461477 60461482 +
gtccccgttctccgggatcagg

SEQ ID NO: 195291 - DNA, 22 bp, Artificial Sequence
  Synthetic oligonucleotide; TTC chr2 60461470 60461491 60461487 60461492 +
tccgggatcaggttggggtcgt

SEQ ID NO: 195292 - DNA, 22 bp, Artificial Sequence
  Synthetic oligonucleotide; CTC chr2 60461472 60461493 60461489 60461494 +
cgggatcaggttggggtcgttc

SEQ ID NO: 195293 - DNA, 22 bp, Artificial Sequence
  Synthetic oligonucleotide; TTG chr2 60461485 60461506 60461502 60461507 +
gggtcgttctcgctcttgaact

SEQ ID NO: 195294 - DNA, 22 bp, Artificial Sequence
  Synthetic oligonucleotide; TTC chr2 60461494 60461515 60461511 60461516 +
tcgctcttgaacttggccacca

SEQ ID NO: 195295 - DNA, 22 bp, Artificial Sequence
  Synthetic oligonucleotide; CTC chr2 60461496 60461517 60461513 60461518 +
gctcttgaacttggccaccacg

SEQ ID NO: 195296 - DNA, 22 bp, Artificial Sequence
  Synthetic oligonucleotide; CTC chr2 60461500 60461521 60461517 60461522 +
ttgaacttggccaccacggact

SEQ ID NO: 195297 - DNA, 22 bp, Artificial Sequence
  Synthetic oligonucleotide; CTT chr2 60461502 60461523 60461519 60461524 +
gaacttggccaccacggacttg

SEQ ID NO: 195298 - DNA, 22 bp, Artificial Sequence
  Synthetic oligonucleotide; TTG chr2 60461503 60461524 60461520 60461525 +
aacttggccaccacggacttga

SEQ ID NO: 195299 - DNA, 22 bp, Artificial Sequence
  Synthetic oligonucleotide; CTT chr2 60461508 60461529 60461525 60461530 +
ggccaccacggacttgagcgcg

SEQ ID NO: 195300 - DNA, 22 bp, Artificial Sequence
  Synthetic oligonucleotide; TTG chr2 60461509 60461530 60461526 60461531 +
gccaccacggacttgagcgcgc

SEQ ID NO: 195301 - DNA, 22 bp, Artificial Sequence
  Synthetic oligonucleotide; CTT chr2 60461523 60461544 60461540 60461545 +
gagcgcgctgctggcgctgccc

SEQ ID NO: 195302 - DNA, 22 bp, Artificial Sequence
  Synthetic oligonucleotide; TTG chr2 60461524 60461545 60461541 60461546 +
agcgcgctgctggcgctgccca

SEQ ID NO: 195303 - DNA, 22 bp, Artificial Sequence
  Synthetic oligonucleotide; CTG chr2 60461533 60461554 60461550 60461555 +
ctggcgctgcccaccaagtcgc

SEQ ID NO: 195304 - DNA, 22 bp, Artificial Sequence
  Synthetic oligonucleotide; CTG chr2 60461536 60461557 60461553 60461558 +
gcgctgcccaccaagtcgctgg

SEQ ID NO: 195305 - DNA, 22 bp, Artificial Sequence
  Synthetic oligonucleotide; CTG chr2 60461542 60461563 60461559 60461564 +
cccaccaagtcgctggtgccgg

SEQ ID NO: 195306 - DNA, 22 bp, Artificial Sequence
  Synthetic oligonucleotide; CTG chr2 60461557 60461578 60461574 60461579 +
gtgccgggttccggggagctgg

SEQ ID NO: 195307 - DNA, 22 bp, Artificial Sequence
  Synthetic oligonucleotide; TTC chr2 60461568 60461589 60461585 60461590 +
cggggagctggcggtggagaga

SEQ ID NO: 195308 - DNA, 22 bp, Artificial Sequence
  Synthetic oligonucleotide; CTG chr2 60461578 60461599 60461595 60461600 +
gcggtggagagaccgtcgtcgg

SEQ ID NO: 195309 - DNA, 22 bp, Artificial Sequence
  Synthetic oligonucleotide; CTT chr2 60461604 60461625 60461621 60461626 +
gaccgtcatgggggacgatttg

SEQ ID NO: 195310 - DNA, 22 bp, Artificial Sequence
  Synthetic oligonucleotide; TTG chr2 60461605 60461626 60461622 60461627 +
accgtcatgggggacgatttgt

SEQ ID NO: 195311 - DNA, 22 bp, Artificial Sequence
  Synthetic oligonucleotide; TTT chr2 60461625 60461646 60461642 60461647 +
gtgcatgtgcgtcttcatgtgg

SEQ ID NO: 195312 - DNA, 22 bp, Artificial Sequence
  Synthetic oligonucleotide; TTG chr2 60461626 60461647 60461643 60461648 +
tgcatgtgcgtcttcatgtggc

SEQ ID NO: 195313 - DNA, 22 bp, Artificial Sequence
  Synthetic oligonucleotide; CTT chr2 60461640 60461661 60461657 60461662 +
catgtggcgcttcagcttgctg

SEQ ID NO: 195314 - DNA, 22 bp, Artificial Sequence
  Synthetic oligonucleotide; TTC chr2 60461641 60461662 60461658 60461663 +
atgtggcgcttcagcttgctgg

SEQ ID NO: 195315 - DNA, 22 bp, Artificial Sequence
  Synthetic oligonucleotide; CTT chr2 60461652 60461673 60461669 60461674 +
cagcttgctggcctgggtgcac

SEQ ID NO: 195316 - DNA, 22 bp, Artificial Sequence
  Synthetic oligonucleotide; TTC chr2 60461653 60461674 60461670 60461675 +
agcttgctggcctgggtgcacg

SEQ ID NO: 195317 - DNA, 22 bp, Artificial Sequence
  Synthetic oligonucleotide; CTT chr2 60461658 60461679 60461675 60461680 +
gctggcctgggtgcacgcgtgg

SEQ ID NO: 195318 - DNA, 22 bp, Artificial Sequence
  Synthetic oligonucleotide; TTG chr2 60461659 60461680 60461676 60461681 +
ctggcctgggtgcacgcgtggt

SEQ ID NO: 195319 - DNA, 22 bp, Artificial Sequence
  Synthetic oligonucleotide; CTG chr2 60461662 60461683 60461679 60461684 +
gcctgggtgcacgcgtggtcgc

SEQ ID NO: 195320 - DNA, 22 bp, Artificial Sequence
  Synthetic oligonucleotide; CTG chr2 60461667 60461688 60461684 60461689 +
ggtgcacgcgtggtcgcacagg

SEQ ID NO: 195321 - DNA, 22 bp, Artificial Sequence
  Synthetic oligonucleotide; TTG chr2 60461692 60461713 60461709 60461714 +
cacttgtagggcttctcgcccg

SEQ ID NO: 195322 - DNA, 22 bp, Artificial Sequence
  Synthetic oligonucleotide; CTT chr2 60461697 60461718 60461714 60461719 +
gtagggcttctcgcccgtgtgg

SEQ ID NO: 195323 - DNA, 22 bp, Artificial Sequence
  Synthetic oligonucleotide; TTG chr2 60461698 60461719 60461715 60461720 +
tagggcttctcgcccgtgtggc

SEQ ID NO: 195324 - DNA, 22 bp, Artificial Sequence
  Synthetic oligonucleotide; CTT chr2 60461706 60461727 60461723 60461728 +
ctcgcccgtgtggctgcgccgg

SEQ ID NO: 195325 - DNA, 22 bp, Artificial Sequence
  Synthetic oligonucleotide; TTC chr2 60461707 60461728 60461724 60461729 +
tcgcccgtgtggctgcgccggt

SEQ ID NO: 195326 - DNA, 22 bp, Artificial Sequence
  Synthetic oligonucleotide; CTC chr2 60461709 60461730 60461726 60461731 +
gcccgtgtggctgcgccggtgc

SEQ ID NO: 195327 - DNA, 22 bp, Artificial Sequence
  Synthetic oligonucleotide; CTG chr2 60461722 60461743 60461739 60461744 +
cgccggtgcaccaccaggttgc

SEQ ID NO: 195328 - DNA, 22 bp, Artificial Sequence
  Synthetic oligonucleotide; TTG chr2 60461743 60461764 60461760 60461765 +
ctctgaaatttgaacgtcttgc

SEQ ID NO: 195329 - DNA, 22 bp, Artificial Sequence
  Synthetic oligonucleotide; CTC chr2 60461746 60461767 60461763 60461768 +
tgaaatttgaacgtcttgccgc

SEQ ID NO: 195330 - DNA, 22 bp, Artificial Sequence
  Synthetic oligonucleotide; CTG chr2 60461748 60461769 60461765 60461770 +
aaatttgaacgtcttgccgcag

SEQ ID NO: 195331 - DNA, 22 bp, Artificial Sequence
  Synthetic oligonucleotide; TTT chr2 60461754 60461775 60461771 60461776 +
gaacgtcttgccgcagaactcg

SEQ ID NO: 195332 - DNA, 22 bp, Artificial Sequence
  Synthetic oligonucleotide; TTG chr2 60461755 60461776 60461772 60461777 +
aacgtcttgccgcagaactcgc

SEQ ID NO: 195333 - DNA, 22 bp, Artificial Sequence
  Synthetic oligonucleotide; CTT chr2 60461763 60461784 60461780 60461785 +
gccgcagaactcgcatgacttg

SEQ ID NO: 195334 - DNA, 22 bp, Artificial Sequence
  Synthetic oligonucleotide; TTG chr2 60461764 60461785 60461781 60461786 +
ccgcagaactcgcatgacttgg

SEQ ID NO: 195335 - DNA, 22 bp, Artificial Sequence
  Synthetic oligonucleotide; CTC chr2 60461775 60461796 60461792 60461797 +
gcatgacttggacttgaccggg

SEQ ID NO: 195336 - DNA, 22 bp, Artificial Sequence
  Synthetic oligonucleotide; CTT chr2 60461784 60461805 60461801 60461806 +
ggacttgaccgggggctgggag

SEQ ID NO: 195337 - DNA, 22 bp, Artificial Sequence
  Synthetic oligonucleotide; TTG chr2 60461785 60461806 60461802 60461807 +
gacttgaccgggggctgggagg

SEQ ID NO: 195338 - DNA, 22 bp, Artificial Sequence
  Synthetic oligonucleotide; CTT chr2 60461790 60461811 60461807 60461812 +
gaccgggggctgggagggagga

SEQ ID NO: 195339 - DNA, 22 bp, Artificial Sequence
  Synthetic oligonucleotide; TTG chr2 60461791 60461812 60461808 60461813 +
accgggggctgggagggaggag

SEQ ID NO: 195340 - DNA, 22 bp, Artificial Sequence
  Synthetic oligonucleotide; CTG chr2 60461802 60461823 60461819 60461824 +
ggagggaggaggggcggattgc

SEQ ID NO: 195341 - DNA, 22 bp, Artificial Sequence
  Synthetic oligonucleotide; TTG chr2 60461823 60461844 60461840 60461845 +
cagaggagggagggggggcgtc

SEQ ID NO: 195342 - DNA, 22 bp, Artificial Sequence
  Synthetic oligonucleotide; CTT chr2 60461862 60461883 60461879 60461884 +
gctacctggctggaatggttgc

SEQ ID NO: 195343 - DNA, 22 bp, Artificial Sequence
  Synthetic oligonucleotide; TTG chr2 60461863 60461884 60461880 60461885 +
ctacctggctggaatggttgca

SEQ ID NO: 195344 - DNA, 22 bp, Artificial Sequence
  Synthetic oligonucleotide; CTA chr2 60461866 60461887 60461883 60461888 +
cctggctggaatggttgcagta

SEQ ID NO: 195345 - DNA, 22 bp, Artificial Sequence
  Synthetic oligonucleotide; CTG chr2 60461870 60461891 60461887 60461892 +
gctggaatggttgcagtaacct

SEQ ID NO: 195346 - DNA, 22 bp, Artificial Sequence
  Synthetic oligonucleotide; CTG chr2 60461874 60461895 60461891 60461896 +
gaatggttgcagtaacctttgc

SEQ ID NO: 195347 - DNA, 22 bp, Artificial Sequence
  Synthetic oligonucleotide; TTG chr2 60461883 60461904 60461900 60461905 +
cagtaacctttgcatagggctg

SEQ ID NO: 195348 - DNA, 22 bp, Artificial Sequence
  Synthetic oligonucleotide; CTT chr2 60461893 60461914 60461910 60461915 +
tgcatagggctgggccggcctg

SEQ ID NO: 195349 - DNA, 22 bp, Artificial Sequence
  Synthetic oligonucleotide; TTT chr2 60461894 60461915 60461911 60461916 +
gcatagggctgggccggcctgg

SEQ ID NO: 195350 - DNA, 22 bp, Artificial Sequence
  Synthetic oligonucleotide; TTG chr2 60461895 60461916 60461912 60461917 +
catagggctgggccggcctggg

SEQ ID NO: 195351 - DNA, 22 bp, Artificial Sequence
  Synthetic oligonucleotide; CTG chr2 60461905 60461926 60461922 60461927 +
ggccggcctggggacagcggtg

SEQ ID NO: 195352 - DNA, 22 bp, Artificial Sequence
  Synthetic oligonucleotide; CTG chr2 60461915 60461936 60461932 60461937 +
gggacagcggtgggctagacgt

SEQ ID NO: 195353 - DNA, 22 bp, Artificial Sequence
  Synthetic oligonucleotide; CTA chr2 60461932 60461953 60461949 60461954 +
gacgtgttccctgccagctctc

SEQ ID NO: 195354 - DNA, 22 bp, Artificial Sequence
  Synthetic oligonucleotide; TTC chr2 60461941 60461962 60461958 60461963 +
cctgccagctctctaagtctcc

SEQ ID NO: 195355 - DNA, 22 bp, Artificial Sequence
  Synthetic oligonucleotide; CTG chr2 60461945 60461966 60461962 60461967 +
ccagctctctaagtctcctaga

SEQ ID NO: 195356 - DNA, 22 bp, Artificial Sequence
  Synthetic oligonucleotide; CTC chr2 60461952 60461973 60461969 60461974 +
tctaagtctcctagagaaatcc

SEQ ID NO: 195357 - DNA, 22 bp, Artificial Sequence
  Synthetic oligonucleotide; CTC chr2 60461954 60461975 60461971 60461976 +
taagtctcctagagaaatccat

SEQ ID NO: 195358 - DNA, 22 bp, Artificial Sequence
  Synthetic oligonucleotide; CTA chr2 60461956 60461977 60461973 60461978 +
agtctcctagagaaatccatgg

SEQ ID NO: 195359 - DNA, 22 bp, Artificial Sequence
  Synthetic oligonucleotide; CTC chr2 60461962 60461983 60461979 60461984 +
ctagagaaatccatggcgggag

SEQ ID NO: 195360 - DNA, 22 bp, Artificial Sequence
  Synthetic oligonucleotide; CTA chr2 60461965 60461986 60461982 60461987 +
gagaaatccatggcgggaggct

SEQ ID NO: 195361 - DNA, 22 bp, Artificial Sequence
  Synthetic oligonucleotide; CTC chr2 60461988 60462009 60462005 60462010 +
catagccattggattcaaccgc

SEQ ID NO: 195362 - DNA, 22 bp, Artificial Sequence
  Synthetic oligonucleotide; TTG chr2 60461999 60462020 60462016 60462021 +
gattcaaccgcagcaccctgtc

SEQ ID NO: 195363 - DNA, 22 bp, Artificial Sequence
  Synthetic oligonucleotide; TTC chr2 60462004 60462025 60462021 60462026 +
aaccgcagcaccctgtcaaagg

SEQ ID NO: 195364 - DNA, 22 bp, Artificial Sequence
  Synthetic oligonucleotide; CTG chr2 60462019 60462040 60462036 60462041 +
tcaaaggcactcgggtgatggg

SEQ ID NO: 195365 - DNA, 22 bp, Artificial Sequence
  Synthetic oligonucleotide; CTC chr2 60462031 60462052 60462048 60462053 +
gggtgatgggtggccagggcca

SEQ ID NO: 195366 - DNA, 22 bp, Artificial Sequence
  Synthetic oligonucleotide; CTC chr2 60462057 60462078 60462074 60462079 +
ttccgcccccaggcgctctatg

SEQ ID NO: 195367 - DNA, 22 bp, Artificial Sequence
  Synthetic oligonucleotide; CTT chr2 60462059 60462080 60462076 60462081 +
ccgcccccaggcgctctatgcg

SEQ ID NO: 195368 - DNA, 22 bp, Artificial Sequence
  Synthetic oligonucleotide; TTC chr2 60462060 60462081 60462077 60462082 +
cgcccccaggcgctctatgcgg

SEQ ID NO: 195369 - DNA, 22 bp, Artificial Sequence
  Synthetic oligonucleotide; CTC chr2 60462075 60462096 60462092 60462097 +
tatgcggtgggggtccaagtga

SEQ ID NO: 195370 - DNA, 22 bp, Artificial Sequence
  Synthetic oligonucleotide; CTA chr2 60462077 60462098 60462094 60462099 +
tgcggtgggggtccaagtgatg

SEQ ID NO: 195371 - DNA, 22 bp, Artificial Sequence
  Synthetic oligonucleotide; CTC chr2 60462103 60462124 60462120 60462125 +
ggtggtggactaaacagggggg

SEQ ID NO: 195372 - DNA, 22 bp, Artificial Sequence
  Synthetic oligonucleotide; CTA chr2 60462115 60462136 60462132 60462137 +
aacagggggggagtgggtggaa

SEQ ID NO: 195373 - DNA, 22 bp, Artificial Sequence
  Synthetic oligonucleotide; CTT chr2 60462146 60462167 60462163 60462168 +
ctgccaggccggaagcctctct

SEQ ID NO: 195374 - DNA, 22 bp, Artificial Sequence
  Synthetic oligonucleotide; TTC chr2 60462147 60462168 60462164 60462169 +
tgccaggccggaagcctctctc

SEQ ID NO: 195375 - DNA, 22 bp, Artificial Sequence
  Synthetic oligonucleotide; CTG chr2 60462149 60462170 60462166 60462171 +
ccaggccggaagcctctctcga

SEQ ID NO: 195376 - DNA, 22 bp, Artificial Sequence
  Synthetic oligonucleotide; CTC chr2 60462165 60462186 60462182 60462187 +
tctcgatactgatcctggtatt

SEQ ID NO: 195377 - DNA, 22 bp, Artificial Sequence
  Synthetic oligonucleotide; CTC chr2 60462167 60462188 60462184 60462189 +
tcgatactgatcctggtattct

SEQ ID NO: 195378 - DNA, 22 bp, Artificial Sequence
  Synthetic oligonucleotide; CTC chr2 60462169 60462190 60462186 60462191 +
gatactgatcctggtattctta

SEQ ID NO: 195379 - DNA, 22 bp, Artificial Sequence
  Synthetic oligonucleotide; CTG chr2 60462176 60462197 60462193 60462198 +
atcctggtattcttagcaggtt

SEQ ID NO: 195380 - DNA, 22 bp, Artificial Sequence
  Synthetic oligonucleotide; CTG chr2 60462182 60462203 60462199 60462204 +
gtattcttagcaggttaaaggg

SEQ ID NO: 195381 - DNA, 22 bp, Artificial Sequence
  Synthetic oligonucleotide; TTC chr2 60462188 60462209 60462205 60462210 +
ttagcaggttaaaggggttatt

SEQ ID NO: 195382 - DNA, 22 bp, Artificial Sequence
  Synthetic oligonucleotide; CTT chr2 60462190 60462211 60462207 60462212 +
agcaggttaaaggggttattgt

SEQ ID NO: 195383 - DNA, 22 bp, Artificial Sequence
  Synthetic oligonucleotide; TTA chr2 60462191 60462212 60462208 60462213 +
gcaggttaaaggggttattgtc

SEQ ID NO: 195384 - DNA, 22 bp, Artificial Sequence
  Synthetic oligonucleotide; TTA chr2 60462199 60462220 60462216 60462221 +
aaggggttattgtctgcaatat

SEQ ID NO: 195385 - DNA, 22 bp, Artificial Sequence
  Synthetic oligonucleotide; TTA chr2 60462208 60462229 60462225 60462230 +
ttgtctgcaatatgaatcccat

SEQ ID NO: 195386 - DNA, 22 bp, Artificial Sequence
  Synthetic oligonucleotide; TTG chr2 60462211 60462232 60462228 60462233 +
tctgcaatatgaatcccatgga

SEQ ID NO: 195387 - DNA, 22 bp, Artificial Sequence
  Synthetic oligonucleotide; CTG chr2 60462215 60462236 60462232 60462237 +
caatatgaatcccatggagagg

SEQ ID NO: 195388 - DNA, 22 bp, Artificial Sequence
  Synthetic oligonucleotide; CTG chr2 60462243 60462264 60462260 60462265 +
ggaaggacattctgcacctagt

SEQ ID NO: 195389 - DNA, 22 bp, Artificial Sequence
  Synthetic oligonucleotide; TTC chr2 60462255 60462276 60462272 60462277 +
tgcacctagtcctgaagggata

SEQ ID NO: 195390 - DNA, 22 bp, Artificial Sequence
  Synthetic oligonucleotide; CTG chr2 60462257 60462278 60462274 60462279 +
cacctagtcctgaagggatacc

SEQ ID NO: 195391 - DNA, 22 bp, Artificial Sequence
  Synthetic oligonucleotide; CTA chr2 60462263 60462284 60462280 60462285 +
gtcctgaagggataccaacccg

SEQ ID NO: 195392 - DNA, 22 bp, Artificial Sequence
  Synthetic oligonucleotide; CTG chr2 60462269 60462290 60462286 60462291 +
aagggataccaacccgcggggt

SEQ ID NO: 195393 - DNA, 22 bp, Artificial Sequence
  Synthetic oligonucleotide; CTT chr2 60462301 60462322 60462318 60462323 +
ccgtgttcgctttctaagtaga

SEQ ID NO: 195394 - DNA, 22 bp, Artificial Sequence
  Synthetic oligonucleotide; TTC chr2 60462302 60462323 60462319 60462324 +
cgtgttcgctttctaagtagat

SEQ ID NO: 195395 - DNA, 22 bp, Artificial Sequence
  Synthetic oligonucleotide; TTC chr2 60462309 60462330 60462326 60462331 +
gctttctaagtagattcttaat

SEQ ID NO: 195396 - DNA, 22 bp, Artificial Sequence
  Synthetic oligonucleotide; CTT chr2 60462313 60462334 60462330 60462335 +
tctaagtagattcttaatccat

SEQ ID NO: 195397 - DNA, 22 bp, Artificial Sequence
  Synthetic oligonucleotide; TTT chr2 60462314 60462335 60462331 60462336 +
ctaagtagattcttaatccatg

SEQ ID NO: 195398 - DNA, 22 bp, Artificial Sequence
  Synthetic oligonucleotide; TTC chr2 60462315 60462336 60462332 60462337 +
taagtagattcttaatccatga

SEQ ID NO: 195399 - DNA, 22 bp, Artificial Sequence
  Synthetic oligonucleotide; CTA chr2 60462317 60462338 60462334 60462339 +
agtagattcttaatccatgagt

SEQ ID NO: 195400 - DNA, 22 bp, Artificial Sequence
  Synthetic oligonucleotide; TTC chr2 60462326 60462347 60462343 60462348 +
ttaatccatgagtgttctgtgc

SEQ ID NO: 195401 - DNA, 22 bp, Artificial Sequence
  Synthetic oligonucleotide; CTT chr2 60462328 60462349 60462345 60462350 +
aatccatgagtgttctgtgcgt

SEQ ID NO: 195402 - DNA, 22 bp, Artificial Sequence
  Synthetic oligonucleotide; TTA chr2 60462329 60462350 60462346 60462351 +
atccatgagtgttctgtgcgtg

SEQ ID NO: 195403 - DNA, 22 bp, Artificial Sequence
  Synthetic oligonucleotide; TTC chr2 60462343 60462364 60462360 60462365 +
tgtgcgtgttgcaagagaaacc

SEQ ID NO: 195404 - DNA, 22 bp, Artificial Sequence
  Synthetic oligonucleotide; CTG chr2 60462345 60462366 60462362 60462367 +
tgcgtgttgcaagagaaaccat

SEQ ID NO: 195405 - DNA, 22 bp, Artificial Sequence
  Synthetic oligonucleotide; TTG chr2 60462354 60462375 60462371 60462376 +
caagagaaaccatgcactggtg

SEQ ID NO: 195406 - DNA, 22 bp, Artificial Sequence
  Synthetic oligonucleotide; CTG chr2 60462373 60462394 60462390 60462395 +
gtgaatggctgtttgcaagttg

SEQ ID NO: 195407 - DNA, 22 bp, Artificial Sequence
  Synthetic oligonucleotide; CTG chr2 60462384 60462405 60462401 60462406 +
tttgcaagttgtacatgtgtag

SEQ ID NO: 195408 - DNA, 22 bp, Artificial Sequence
  Synthetic oligonucleotide; TTT chr2 60462387 60462408 60462404 60462409 +
gcaagttgtacatgtgtagctg

SEQ ID NO: 195409 - DNA, 22 bp, Artificial Sequence
  Synthetic oligonucleotide; TTG chr2 60462388 60462409 60462405 60462410 +
caagttgtacatgtgtagctgc

SEQ ID NO: 195410 - DNA, 22 bp, Artificial Sequence
  Synthetic oligonucleotide; TTG chr2 60462395 60462416 60462412 60462417 +
tacatgtgtagctgctgggctc

SEQ ID NO: 195411 - DNA, 22 bp, Artificial Sequence
  Synthetic oligonucleotide; CTG chr2 60462409 60462430 60462426 60462431 +
ctgggctcatctttacctgcaa

SEQ ID NO: 195412 - DNA, 22 bp, Artificial Sequence
  Synthetic oligonucleotide; CTG chr2 60462412 60462433 60462429 60462434 +
ggctcatctttacctgcaaaat

SEQ ID NO: 195413 - DNA, 22 bp, Artificial Sequence
  Synthetic oligonucleotide; CTC chr2 60462417 60462438 60462434 60462439 +
atctttacctgcaaaataatac

SEQ ID NO: 195414 - DNA, 22 bp, Artificial Sequence
  Synthetic oligonucleotide; CTT chr2 60462422 60462443 60462439 60462444 +
tacctgcaaaataatacaacac

SEQ ID NO: 195415 - DNA, 22 bp, Artificial Sequence
  Synthetic oligonucleotide; TTT chr2 60462423 60462444 60462440 60462445 +
acctgcaaaataatacaacacc

SEQ ID NO: 195416 - DNA, 22 bp, Artificial Sequence
  Synthetic oligonucleotide; TTA chr2 60462424 60462445 60462441 60462446 +
cctgcaaaataatacaacacca

SEQ ID NO: 195417 - DNA, 22 bp, Artificial Sequence
  Synthetic oligonucleotide; CTG chr2 60462428 60462449 60462445 60462450 +
caaaataatacaacaccaacat

SEQ ID NO: 195418 - DNA, 22 bp, Artificial Sequence
  Synthetic oligonucleotide; TTT chr2 60462458 60462479 60462475 60462480 +
aatcactgaggcgggcatcagc

SEQ ID NO: 195419 - DNA, 22 bp, Artificial Sequence
  Synthetic oligonucleotide; TTA chr2 60462459 60462480 60462476 60462481 +
atcactgaggcgggcatcagca

SEQ ID NO: 195420 - DNA, 22 bp, Artificial Sequence
  Synthetic oligonucleotide; CTG chr2 60462466 60462487 60462483 60462488 +
aggcgggcatcagcaattgctt

SEQ ID NO: 195421 - DNA, 22 bp, Artificial Sequence
  Synthetic oligonucleotide; TTG chr2 60462485 60462506 60462502 60462507 +
cttatttatgttccacctccag

SEQ ID NO: 195422 - DNA, 22 bp, Artificial Sequence
  Synthetic oligonucleotide; CTT chr2 60462488 60462509 60462505 60462510 +
atttatgttccacctccagcct

SEQ ID NO: 195423 - DNA, 22 bp, Artificial Sequence
  Synthetic oligonucleotide; TTA chr2 60462489 60462510 60462506 60462511 +
tttatgttccacctccagcctt

SEQ ID NO: 195424 - DNA, 22 bp, Artificial Sequence
  Synthetic oligonucleotide; TTT chr2 60462492 60462513 60462509 60462514 +
atgttccacctccagccttccc

SEQ ID NO: 195425 - DNA, 22 bp, Artificial Sequence
  Synthetic oligonucleotide; TTA chr2 60462493 60462514 60462510 60462515 +
tgttccacctccagccttccct

SEQ ID NO: 195426 - DNA, 22 bp, Artificial Sequence
  Synthetic oligonucleotide; TTC chr2 60462498 60462519 60462515 60462520 +
cacctccagccttccctgcccc

SEQ ID NO: 195427 - DNA, 22 bp, Artificial Sequence
  Synthetic oligonucleotide; CTC chr2 60462504 60462525 60462521 60462526 +
cagccttccctgcccccacccc

SEQ ID NO: 195428 - DNA, 22 bp, Artificial Sequence
  Synthetic oligonucleotide; CTT chr2 60462511 60462532 60462528 60462533 +
ccctgcccccacccctcaaccc

SEQ ID NO: 195429 - DNA, 22 bp, Artificial Sequence
  Synthetic oligonucleotide; TTC chr2 60462512 60462533 60462529 60462534 +
cctgcccccacccctcaacccc

SEQ ID NO: 195430 - DNA, 22 bp, Artificial Sequence
  Synthetic oligonucleotide; CTG chr2 60462516 60462537 60462533 60462538 +
cccccacccctcaaccccaagg

SEQ ID NO: 195431 - DNA, 22 bp, Artificial Sequence
  Synthetic oligonucleotide; CTC chr2 60462528 60462549 60462545 60462550 +
aaccccaaggcctaagccctca

SEQ ID NO: 195432 - DNA, 22 bp, Artificial Sequence
  Synthetic oligonucleotide; CTA chr2 60462542 60462563 60462559 60462564 +
agccctcactgacctaccccct

SEQ ID NO: 195433 - DNA, 22 bp, Artificial Sequence
  Synthetic oligonucleotide; CTC chr2 60462549 60462570 60462566 60462571 +
actgacctaccccctgtgcctg

SEQ ID NO: 195434 - DNA, 22 bp, Artificial Sequence
  Synthetic oligonucleotide; CTG chr2 60462553 60462574 60462570 60462575 +
acctaccccctgtgcctggcac

SEQ ID NO: 195435 - DNA, 22 bp, Artificial Sequence
  Synthetic oligonucleotide; CTA chr2 60462558 60462579 60462575 60462580 +
ccccctgtgcctggcacgtctg

SEQ ID NO: 195436 - DNA, 22 bp, Artificial Sequence
  Synthetic oligonucleotide; CTG chr2 60462565 60462586 60462582 60462587 +
tgcctggcacgtctgagcatgg

SEQ ID NO: 195437 - DNA, 22 bp, Artificial Sequence
  Synthetic oligonucleotide; CTG chr2 60462571 60462592 60462588 60462593 +
gcacgtctgagcatgggtaccc

SEQ ID NO: 195438 - DNA, 22 bp, Artificial Sequence
  Synthetic oligonucleotide; CTG chr2 60462580 60462601 60462597 60462602 +
agcatgggtacccagtaaatat

SEQ ID NO: 195439 - DNA, 22 bp, Artificial Sequence
  Synthetic oligonucleotide; TTG chr2 60462604 60462625 60462621 60462626 +
gtccaattgatcttcctgccat

SEQ ID NO: 195440 - DNA, 22 bp, Artificial Sequence
  Synthetic oligonucleotide; TTG chr2 60462613 60462634 60462630 60462635 +
atcttcctgccattaaactcag

SEQ ID NO: 195441 - DNA, 22 bp, Artificial Sequence
  Synthetic oligonucleotide; CTT chr2 60462618 60462639 60462635 60462640 +
cctgccattaaactcagttcta

SEQ ID NO: 195442 - DNA, 22 bp, Artificial Sequence
  Synthetic oligonucleotide; TTC chr2 60462619 60462640 60462636 60462641 +
ctgccattaaactcagttctag

SEQ ID NO: 195443 - DNA, 22 bp, Artificial Sequence
  Synthetic oligonucleotide; CTG chr2 60462622 60462643 60462639 60462644 +
ccattaaactcagttctagaaa

SEQ ID NO: 195444 - DNA, 22 bp, Artificial Sequence
  Synthetic oligonucleotide; TTA chr2 60462628 60462649 60462645 60462650 +
aactcagttctagaaattttat

SEQ ID NO: 195445 - DNA, 22 bp, Artificial Sequence
  Synthetic oligonucleotide; CTC chr2 60462633 60462654 60462650 60462655 +
agttctagaaattttatatcca

SEQ ID NO: 195446 - DNA, 22 bp, Artificial Sequence
  Synthetic oligonucleotide; TTC chr2 60462638 60462659 60462655 60462660 +
tagaaattttatatccaatccc

SEQ ID NO: 195447 - DNA, 22 bp, Artificial Sequence
  Synthetic oligonucleotide; CTA chr2 60462640 60462661 60462657 60462662 +
gaaattttatatccaatcccca

SEQ ID NO: 195448 - DNA, 22 bp, Artificial Sequence
  Synthetic oligonucleotide; TTT chr2 60462647 60462668 60462664 60462669 +
tatatccaatccccaaagcaga

SEQ ID NO: 195449 - DNA, 22 bp, Artificial Sequence
  Synthetic oligonucleotide; TTT chr2 60462648 60462669 60462665 60462670 +
atatccaatccccaaagcagaa

SEQ ID NO: 195450 - DNA, 22 bp, Artificial Sequence
  Synthetic oligonucleotide; TTA chr2 60462649 60462670 60462666 60462671 +
tatccaatccccaaagcagaaa

SEQ ID NO: 195451 - DNA, 22 bp, Artificial Sequence
  Synthetic oligonucleotide; CTG chr2 60462678 60462699 60462695 60462700 +
accagttctggcttgaggatga

SEQ ID NO: 195452 - DNA, 22 bp, Artificial Sequence
  Synthetic oligonucleotide; TTC chr2 60462686 60462707 60462703 60462708 +
tggcttgaggatgaaggtccct

SEQ ID NO: 195453 - DNA, 22 bp, Artificial Sequence
  Synthetic oligonucleotide; CTG chr2 60462688 60462709 60462705 60462710 +
gcttgaggatgaaggtccctac

SEQ ID NO: 195454 - DNA, 22 bp, Artificial Sequence
  Synthetic oligonucleotide; CTT chr2 60462692 60462713 60462709 60462714 +
gaggatgaaggtccctacattc

SEQ ID NO: 195455 - DNA, 22 bp, Artificial Sequence
  Synthetic oligonucleotide; TTG chr2 60462693 60462714 60462710 60462715 +
aggatgaaggtccctacattct

SEQ ID NO: 195456 - DNA, 22 bp, Artificial Sequence
  Synthetic oligonucleotide; CTA chr2 60462709 60462730 60462726 60462731 +
cattctaggcacctcaacaaat

SEQ ID NO: 195457 - DNA, 22 bp, Artificial Sequence
  Synthetic oligonucleotide; TTC chr2 60462714 60462735 60462731 60462736 +
taggcacctcaacaaatgtctt

SEQ ID NO: 195458 - DNA, 22 bp, Artificial Sequence
  Synthetic oligonucleotide; CTA chr2 60462716 60462737 60462733 60462738 +
ggcacctcaacaaatgtcttct

SEQ ID NO: 195459 - DNA, 22 bp, Artificial Sequence
  Synthetic oligonucleotide; CTC chr2 60462724 60462745 60462741 60462746 +
aacaaatgtcttctaaactttc

SEQ ID NO: 195460 - DNA, 22 bp, Artificial Sequence
  Synthetic oligonucleotide; CTT chr2 60462736 60462757 60462753 60462758 +
ctaaactttccagttccatcag

SEQ ID NO: 195461 - DNA, 22 bp, Artificial Sequence
  Synthetic oligonucleotide; TTC chr2 60462737 60462758 60462754 60462759 +
taaactttccagttccatcagc

SEQ ID NO: 195462 - DNA, 22 bp, Artificial Sequence
  Synthetic oligonucleotide; CTA chr2 60462739 60462760 60462756 60462761 +
aactttccagttccatcagctg

SEQ ID NO: 195463 - DNA, 22 bp, Artificial Sequence
  Synthetic oligonucleotide; CTT chr2 60462744 60462765 60462761 60462766 +
tccagttccatcagctgtagtt

SEQ ID NO: 195464 - DNA, 22 bp, Artificial Sequence
  Synthetic oligonucleotide; TTT chr2 60462745 60462766 60462762 60462767 +
ccagttccatcagctgtagttt

SEQ ID NO: 195465 - DNA, 22 bp, Artificial Sequence
  Synthetic oligonucleotide; TTC chr2 60462746 60462767 60462763 60462768 +
cagttccatcagctgtagtttg

SEQ ID NO: 195466 - DNA, 22 bp, Artificial Sequence
  Synthetic oligonucleotide; TTC chr2 60462752 60462773 60462769 60462774 +
catcagctgtagtttggggcaa

SEQ ID NO: 195467 - DNA, 22 bp, Artificial Sequence
  Synthetic oligonucleotide; CTG chr2 60462761 60462782 60462778 60462783 +
tagtttggggcaagccatctca

SEQ ID NO: 195468 - DNA, 22 bp, Artificial Sequence
  Synthetic oligonucleotide; TTT chr2 60462767 60462788 60462784 60462789 +
ggggcaagccatctcatctcca

SEQ ID NO: 195469 - DNA, 22 bp, Artificial Sequence
  Synthetic oligonucleotide; TTG chr2 60462768 60462789 60462785 60462790 +
gggcaagccatctcatctccat

SEQ ID NO: 195470 - DNA, 22 bp, Artificial Sequence
  Synthetic oligonucleotide; CTC chr2 60462782 60462803 60462799 60462804 +
atctccatgtgcctctgtttcc

SEQ ID NO: 195471 - DNA, 22 bp, Artificial Sequence
  Synthetic oligonucleotide; CTC chr2 60462787 60462808 60462804 60462809 +
catgtgcctctgtttcctcctt

SEQ ID NO: 195472 - DNA, 22 bp, Artificial Sequence
  Synthetic oligonucleotide; CTC chr2 60462797 60462818 60462814 60462819 +
tgtttcctccttgttaagtgag

SEQ ID NO: 195473 - DNA, 22 bp, Artificial Sequence
  Synthetic oligonucleotide; CTG chr2 60462799 60462820 60462816 60462821 +
tttcctccttgttaagtgagaa

SEQ ID NO: 195474 - DNA, 22 bp, Artificial Sequence
  Synthetic oligonucleotide; TTT chr2 60462802 60462823 60462819 60462824 +
cctccttgttaagtgagaaact

SEQ ID NO: 195475 - DNA, 22 bp, Artificial Sequence
  Synthetic oligonucleotide; TTC chr2 60462803 60462824 60462820 60462825 +
ctccttgttaagtgagaaactt

SEQ ID NO: 195476 - DNA, 22 bp, Artificial Sequence
  Synthetic oligonucleotide; CTC chr2 60462806 60462827 60462823 60462828 +
cttgttaagtgagaaacttgga

SEQ ID NO: 195477 - DNA, 22 bp, Artificial Sequence
  Synthetic oligonucleotide; CTT chr2 60462809 60462830 60462826 60462831 +
gttaagtgagaaacttggacaa

SEQ ID NO: 195478 - DNA, 22 bp, Artificial Sequence
  Synthetic oligonucleotide; TTG chr2 60462810 60462831 60462827 60462832 +
ttaagtgagaaacttggacaag

SEQ ID NO: 195479 - DNA, 22 bp, Artificial Sequence
  Synthetic oligonucleotide; TTA chr2 60462813 60462834 60462830 60462835 +
agtgagaaacttggacaaggtg

SEQ ID NO: 195480 - DNA, 22 bp, Artificial Sequence
  Synthetic oligonucleotide; CTT chr2 60462825 60462846 60462842 60462847 +
ggacaaggtgacccaaggaaac

SEQ ID NO: 195481 - DNA, 22 bp, Artificial Sequence
  Synthetic oligonucleotide; TTG chr2 60462826 60462847 60462843 60462848 +
gacaaggtgacccaaggaaact

SEQ ID NO: 195482 - DNA, 22 bp, Artificial Sequence
  Synthetic oligonucleotide; CTT chr2 60462849 60462870 60462866 60462871 +
tttggcttcctaaatcccagct

SEQ ID NO: 195483 - DNA, 22 bp, Artificial Sequence
  Synthetic oligonucleotide; TTT chr2 60462850 60462871 60462867 60462872 +
ttggcttcctaaatcccagctt

SEQ ID NO: 195484 - DNA, 22 bp, Artificial Sequence
  Synthetic oligonucleotide; TTT chr2 60462851 60462872 60462868 60462873 +
tggcttcctaaatcccagcttt

SEQ ID NO: 195485 - DNA, 22 bp, Artificial Sequence
  Synthetic oligonucleotide; TTT chr2 60462852 60462873 60462869 60462874 +
ggcttcctaaatcccagctttc

SEQ ID NO: 195486 - DNA, 22 bp, Artificial Sequence
  Synthetic oligonucleotide; TTG chr2 60462853 60462874 60462870 60462875 +
gcttcctaaatcccagctttct

SEQ ID NO: 195487 - DNA, 22 bp, Artificial Sequence
  Synthetic oligonucleotide; CTT chr2 60462857 60462878 60462874 60462879 +
cctaaatcccagctttctattc

SEQ ID NO: 195488 - DNA, 22 bp, Artificial Sequence
  Synthetic oligonucleotide; TTC chr2 60462858 60462879 60462875 60462880 +
ctaaatcccagctttctattcc

SEQ ID NO: 195489 - DNA, 22 bp, Artificial Sequence
  Synthetic oligonucleotide; CTA chr2 60462861 60462882 60462878 60462883 +
aatcccagctttctattccccc

SEQ ID NO: 195490 - DNA, 22 bp, Artificial Sequence
  Synthetic oligonucleotide; CTT chr2 60462872 60462893 60462889 60462894 +
tctattcccccctgggtgacag

SEQ ID NO: 195491 - DNA, 22 bp, Artificial Sequence
  Synthetic oligonucleotide; TTT chr2 60462873 60462894 60462890 60462895 +
ctattcccccctgggtgacagg

SEQ ID NO: 195492 - DNA, 22 bp, Artificial Sequence
  Synthetic oligonucleotide; TTC chr2 60462874 60462895 60462891 60462896 +
tattcccccctgggtgacaggt

SEQ ID NO: 195493 - DNA, 22 bp, Artificial Sequence
  Synthetic oligonucleotide; CTA chr2 60462876 60462897 60462893 60462898 +
ttcccccctgggtgacaggtga

SEQ ID NO: 195494 - DNA, 22 bp, Artificial Sequence
  Synthetic oligonucleotide; TTC chr2 60462879 60462900 60462896 60462901 +
ccccctgggtgacaggtgaact

SEQ ID NO: 195495 - DNA, 22 bp, Artificial Sequence
  Synthetic oligonucleotide; CTG chr2 60462886 60462907 60462903 60462908 +
ggtgacaggtgaactttctaaa

SEQ ID NO: 195496 - DNA, 22 bp, Artificial Sequence
  Synthetic oligonucleotide; CTT chr2 60462902 60462923 60462919 60462924 +
tctaaataggcaaacatttcat

SEQ ID NO: 195497 - DNA, 22 bp, Artificial Sequence
  Synthetic oligonucleotide; TTT chr2 60462903 60462924 60462920 60462925 +
ctaaataggcaaacatttcata

SEQ ID NO: 195498 - DNA, 22 bp, Artificial Sequence
  Synthetic oligonucleotide; TTC chr2 60462904 60462925 60462921 60462926 +
taaataggcaaacatttcatag

SEQ ID NO: 195499 - DNA, 22 bp, Artificial Sequence
  Synthetic oligonucleotide; CTA chr2 60462906 60462927 60462923 60462928 +
aataggcaaacatttcatagag

SEQ ID NO: 195500 - DNA, 22 bp, Artificial Sequence
  Synthetic oligonucleotide; TTT chr2 60462921 60462942 60462938 60462943 +
catagaggtatcaaaaaagggg

SEQ ID NO: 195501 - DNA, 22 bp, Artificial Sequence
  Synthetic oligonucleotide; TTC chr2 60462922 60462943 60462939 60462944 +
atagaggtatcaaaaaagggga

SEQ ID NO: 195502 - DNA, 22 bp, Artificial Sequence
  Synthetic oligonucleotide; CTC chr2 60462957 60462978 60462974 60462979 +
actacaatgttctatggcccta

SEQ ID NO: 195503 - DNA, 22 bp, Artificial Sequence
  Synthetic oligonucleotide; CTA chr2 60462961 60462982 60462978 60462983 +
caatgttctatggccctaaaga

SEQ ID NO: 195504 - DNA, 22 bp, Artificial Sequence
  Synthetic oligonucleotide; TTC chr2 60462969 60462990 60462986 60462991 +
tatggccctaaagatgctttca

SEQ ID NO: 195505 - DNA, 22 bp, Artificial Sequence
  Synthetic oligonucleotide; CTA chr2 60462971 60462992 60462988 60462993 +
tggccctaaagatgctttcagc

SEQ ID NO: 195506 - DNA, 22 bp, Artificial Sequence
  Synthetic oligonucleotide; CTA chr2 60462979 60463000 60462996 60463001 +
aagatgctttcagcattagcct

SEQ ID NO: 195507 - DNA, 22 bp, Artificial Sequence
  Synthetic oligonucleotide; CTT chr2 60462988 60463009 60463005 60463010 +
tcagcattagcctgaaacacac

SEQ ID NO: 195508 - DNA, 22 bp, Artificial Sequence
  Synthetic oligonucleotide; TTT chr2 60462989 60463010 60463006 60463011 +
cagcattagcctgaaacacact

SEQ ID NO: 195509 - DNA, 22 bp, Artificial Sequence
  Synthetic oligonucleotide; TTC chr2 60462990 60463011 60463007 60463012 +
agcattagcctgaaacacacta

SEQ ID NO: 195510 - DNA, 22 bp, Artificial Sequence
  Synthetic oligonucleotide; TTA chr2 60462997 60463018 60463014 60463019 +
gcctgaaacacactaattgttg

SEQ ID NO: 195511 - DNA, 22 bp, Artificial Sequence
  Synthetic oligonucleotide; CTG chr2 60463002 60463023 60463019 60463024 +
aaacacactaattgttgatatt

SEQ ID NO: 195512 - DNA, 22 bp, Artificial Sequence
  Synthetic oligonucleotide; CTA chr2 60463012 60463033 60463029 60463034 +
attgttgatattgttaaaatga

SEQ ID NO: 195513 - DNA, 22 bp, Artificial Sequence
  Synthetic oligonucleotide; TTG chr2 60463016 60463037 60463033 60463038 +
ttgatattgttaaaatgagagg

SEQ ID NO: 195514 - DNA, 22 bp, Artificial Sequence
  Synthetic oligonucleotide; TTG chr2 60463019 60463040 60463036 60463041 +
atattgttaaaatgagagggta

SEQ ID NO: 195515 - DNA, 22 bp, Artificial Sequence
  Synthetic oligonucleotide; TTG chr2 60463025 60463046 60463042 60463047 +
ttaaaatgagagggtactcata

SEQ ID NO: 195516 - DNA, 22 bp, Artificial Sequence
  Synthetic oligonucleotide; TTA chr2 60463028 60463049 60463045 60463050 +
aaatgagagggtactcataaaa

SEQ ID NO: 195517 - DNA, 22 bp, Artificial Sequence
  Synthetic oligonucleotide; CTC chr2 60463044 60463065 60463061 60463066 +
ataaaatacttccgtggaaaaa

SEQ ID NO: 195518 - DNA, 22 bp, Artificial Sequence
  Synthetic oligonucleotide; CTT chr2 60463055 60463076 60463072 60463077 +
ccgtggaaaaaagactagcaac

SEQ ID NO: 195519 - DNA, 22 bp, Artificial Sequence
  Synthetic oligonucleotide; TTC chr2 60463056 60463077 60463073 60463078 +
cgtggaaaaaagactagcaaca

SEQ ID NO: 195520 - DNA, 22 bp, Artificial Sequence
  Synthetic oligonucleotide; CTA chr2 60463072 60463093 60463089 60463094 +
gcaacattctcacaccccagac

SEQ ID NO: 195521 - DNA, 22 bp, Artificial Sequence
  Synthetic oligonucleotide; TTC chr2 60463081 60463102 60463098 60463103 +
tcacaccccagactgtgggagg

SEQ ID NO: 195522 - DNA, 22 bp, Artificial Sequence
  Synthetic oligonucleotide; CTC chr2 60463083 60463104 60463100 60463105 +
acaccccagactgtgggaggat

SEQ ID NO: 195523 - DNA, 22 bp, Artificial Sequence
  Synthetic oligonucleotide; CTG chr2 60463096 60463117 60463113 60463118 +
tgggaggatcagtgagtcccaa

SEQ ID NO: 195524 - DNA, 22 bp, Artificial Sequence
  Synthetic oligonucleotide; TTT chr2 60463121 60463142 60463138 60463143 +
tggttccacaacaccccatggg

SEQ ID NO: 195525 - DNA, 22 bp, Artificial Sequence
  Synthetic oligonucleotide; TTT chr2 60463122 60463143 60463139 60463144 +
ggttccacaacaccccatgggg

SEQ ID NO: 195526 - DNA, 22 bp, Artificial Sequence
  Synthetic oligonucleotide; TTG chr2 60463123 60463144 60463140 60463145 +
gttccacaacaccccatgggga

SEQ ID NO: 195527 - DNA, 22 bp, Artificial Sequence
  Synthetic oligonucleotide; TTC chr2 60463127 60463148 60463144 60463149 +
cacaacaccccatggggacgtc

SEQ ID NO: 195528 - DNA, 22 bp, Artificial Sequence
  Synthetic oligonucleotide; TTT chr2 60463154 60463175 60463171 60463176 +
ttatctcaaagaatgtttaaaa

SEQ ID NO: 195529 - DNA, 22 bp, Artificial Sequence
  Synthetic oligonucleotide; TTT chr2 60463155 60463176 60463172 60463177 +
tatctcaaagaatgtttaaaaa

SEQ ID NO: 195530 - DNA, 22 bp, Artificial Sequence
  Synthetic oligonucleotide; TTT chr2 60463156 60463177 60463173 60463178 +
atctcaaagaatgtttaaaaaa

SEQ ID NO: 195531 - DNA, 22 bp, Artificial Sequence
  Synthetic oligonucleotide; TTA chr2 60463157 60463178 60463174 60463179 +
tctcaaagaatgtttaaaaaat

SEQ ID NO: 195532 - DNA, 22 bp, Artificial Sequence
  Synthetic oligonucleotide; CTC chr2 60463161 60463182 60463178 60463183 +
aaagaatgtttaaaaaatctga

SEQ ID NO: 195533 - DNA, 22 bp, Artificial Sequence
  Synthetic oligonucleotide; TTT chr2 60463172 60463193 60463189 60463194 +
aaaaaatctgaaagaaaaactt

SEQ ID NO: 195534 - DNA, 22 bp, Artificial Sequence
  Synthetic oligonucleotide; TTA chr2 60463173 60463194 60463190 60463195 +
aaaaatctgaaagaaaaacttc

SEQ ID NO: 195535 - DNA, 22 bp, Artificial Sequence
  Synthetic oligonucleotide; CTG chr2 60463182 60463203 60463199 60463204 +
aaagaaaaacttcattcagatt

SEQ ID NO: 195536 - DNA, 22 bp, Artificial Sequence
  Synthetic oligonucleotide; CTT chr2 60463194 60463215 60463211 60463216 +
cattcagatttaacggataggc

SEQ ID NO: 195537 - DNA, 22 bp, Artificial Sequence
  Synthetic oligonucleotide; TTC chr2 60463195 60463216 60463212 60463217 +
attcagatttaacggataggct

SEQ ID NO: 195538 - DNA, 22 bp, Artificial Sequence
  Synthetic oligonucleotide; TTC chr2 60463199 60463220 60463216 60463221 +
agatttaacggataggctgtat

SEQ ID NO: 195539 - DNA, 22 bp, Artificial Sequence
  Synthetic oligonucleotide; TTT chr2 60463205 60463226 60463222 60463227 +
aacggataggctgtatccaatc

SEQ ID NO: 195540 - DNA, 22 bp, Artificial Sequence
  Synthetic oligonucleotide; TTA chr2 60463206 60463227 60463223 60463228 +
acggataggctgtatccaatct

SEQ ID NO: 195541 - DNA, 22 bp, Artificial Sequence
  Synthetic oligonucleotide; CTG chr2 60463218 60463239 60463235 60463240 +
tatccaatctttaggagttgtc

SEQ ID NO: 195542 - DNA, 22 bp, Artificial Sequence
  Synthetic oligonucleotide; CTT chr2 60463229 60463250 60463246 60463251 +
taggagttgtcccccggtcaga

SEQ ID NO: 195543 - DNA, 22 bp, Artificial Sequence
  Synthetic oligonucleotide; TTT chr2 60463230 60463251 60463247 60463252 +
aggagttgtcccccggtcagac

SEQ ID NO: 195544 - DNA, 22 bp, Artificial Sequence
  Synthetic oligonucleotide; TTA chr2 60463231 60463252 60463248 60463253 +
ggagttgtcccccggtcagaca

SEQ ID NO: 195545 - DNA, 22 bp, Artificial Sequence
  Synthetic oligonucleotide; TTG chr2 60463238 60463259 60463255 60463260 +
tcccccggtcagacaaatgcaa

SEQ ID NO: 195546 - DNA, 22 bp, Artificial Sequence
  Synthetic oligonucleotide; CTG chr2 60463265 60463286 60463282 60463287 +
gaaaagttaggaggagtggctg

SEQ ID NO: 195547 - DNA, 22 bp, Artificial Sequence
  Synthetic oligonucleotide; TTA chr2 60463274 60463295 60463291 60463296 +
ggaggagtggctggtgccgact

SEQ ID NO: 195548 - DNA, 22 bp, Artificial Sequence
  Synthetic oligonucleotide; CTG chr2 60463287 60463308 60463304 60463309 +
gtgccgacttaagcagacacag

SEQ ID NO: 195549 - DNA, 22 bp, Artificial Sequence
  Synthetic oligonucleotide; CTT chr2 60463297 60463318 60463314 60463319 +
aagcagacacagcatcctagtt

SEQ ID NO: 195550 - DNA, 22 bp, Artificial Sequence
  Synthetic oligonucleotide; TTA chr2 60463298 60463319 60463315 60463320 +
agcagacacagcatcctagttt

SEQ ID NO: 195551 - DNA, 22 bp, Artificial Sequence
  Synthetic oligonucleotide; CTA chr2 60463316 60463337 60463333 60463338 +
gtttaaggaacagttaaaacag

SEQ ID NO: 195552 - DNA, 22 bp, Artificial Sequence
  Synthetic oligonucleotide; TTT chr2 60463320 60463341 60463337 60463342 +
aaggaacagttaaaacagccag

SEQ ID NO: 195553 - DNA, 22 bp, Artificial Sequence
  Synthetic oligonucleotide; TTA chr2 60463321 60463342 60463338 60463343 +
aggaacagttaaaacagccagc

SEQ ID NO: 195554 - DNA, 22 bp, Artificial Sequence
  Synthetic oligonucleotide; TTA chr2 60463332 60463353 60463349 60463354 +
aaacagccagcgccatgacagg

SEQ ID NO: 195555 - DNA, 22 bp, Artificial Sequence
  Synthetic oligonucleotide; CTG chr2 60463364 60463385 60463381 60463386 +
agaaatgctacactatcctcct

SEQ ID NO: 195556 - DNA, 22 bp, Artificial Sequence
  Synthetic oligonucleotide; CTA chr2 60463374 60463395 60463391 60463396 +
cactatcctcctcctcattgtt

SEQ ID NO: 195557 - DNA, 22 bp, Artificial Sequence
  Synthetic oligonucleotide; CTA chr2 60463379 60463400 60463396 60463401 +
tcctcctcctcattgttttgag

SEQ ID NO: 195558 - DNA, 22 bp, Artificial Sequence
  Synthetic oligonucleotide; CTC chr2 60463384 60463405 60463401 60463406 +
ctcctcattgttttgagaggct

SEQ ID NO: 195559 - DNA, 22 bp, Artificial Sequence
  Synthetic oligonucleotide; CTC chr2 60463387 60463408 60463404 60463409 +
ctcattgttttgagaggctaac

SEQ ID NO: 195560 - DNA, 22 bp, Artificial Sequence
  Synthetic oligonucleotide; CTC chr2 60463390 60463411 60463407 60463412 +
attgttttgagaggctaacaac

SEQ ID NO: 195561 - DNA, 22 bp, Artificial Sequence
  Synthetic oligonucleotide; TTG chr2 60463394 60463415 60463411 60463416 +
ttttgagaggctaacaacgtga

SEQ ID NO: 195562 - DNA, 22 bp, Artificial Sequence
  Synthetic oligonucleotide; TTT chr2 60463397 60463418 60463414 60463419 +
tgagaggctaacaacgtgaacc

SEQ ID NO: 195563 - DNA, 22 bp, Artificial Sequence
  Synthetic oligonucleotide; TTT chr2 60463398 60463419 60463415 60463420 +
gagaggctaacaacgtgaacca

SEQ ID NO: 195564 - DNA, 22 bp, Artificial Sequence
  Synthetic oligonucleotide; TTG chr2 60463399 60463420 60463416 60463421 +
agaggctaacaacgtgaaccaa

SEQ ID NO: 195565 - DNA, 22 bp, Artificial Sequence
  Synthetic oligonucleotide; CTA chr2 60463407 60463428 60463424 60463429 +
acaacgtgaaccaaattataca

SEQ ID NO: 195566 - DNA, 22 bp, Artificial Sequence
  Synthetic oligonucleotide; TTA chr2 60463425 60463446 60463442 60463447 +
tacaacatcctgcgccctcggc

SEQ ID NO: 195567 - DNA, 22 bp, Artificial Sequence
  Synthetic oligonucleotide; CTG chr2 60463437 60463458 60463454 60463459 +
cgccctcggctgggactcagct

SEQ ID NO: 195568 - DNA, 22 bp, Artificial Sequence
  Synthetic oligonucleotide; CTC chr2 60463444 60463465 60463461 60463466 +
ggctgggactcagctccagttg

SEQ ID NO: 195569 - DNA, 22 bp, Artificial Sequence
  Synthetic oligonucleotide; CTG chr2 60463449 60463470 60463466 60463471 +
ggactcagctccagttgagaaa

SEQ ID NO: 195570 - DNA, 22 bp, Artificial Sequence
  Synthetic oligonucleotide; CTC chr2 60463455 60463476 60463472 60463477 +
agctccagttgagaaagaaaca

SEQ ID NO: 195571 - DNA, 22 bp, Artificial Sequence
  Synthetic oligonucleotide; CTC chr2 60463460 60463481 60463477 60463482 +
cagttgagaaagaaacagaaag

SEQ ID NO: 195572 - DNA, 22 bp, Artificial Sequence
  Synthetic oligonucleotide; TTG chr2 60463466 60463487 60463483 60463488 +
agaaagaaacagaaagatacag

SEQ ID NO: 195573 - DNA, 22 bp, Artificial Sequence
  Synthetic oligonucleotide; TTC chr2 60463491 60463512 60463508 60463513 +
agctagtcaactctggccagta

SEQ ID NO: 195574 - DNA, 22 bp, Artificial Sequence
  Synthetic oligonucleotide; CTA chr2 60463496 60463517 60463513 60463518 +
gtcaactctggccagtagccaa

SEQ ID NO: 195575 - DNA, 22 bp, Artificial Sequence
  Synthetic oligonucleotide; CTC chr2 60463504 60463525 60463521 60463526 +
tggccagtagccaagccgtctg

SEQ ID NO: 195576 - DNA, 22 bp, Artificial Sequence
  Synthetic oligonucleotide; CTG chr2 60463506 60463527 60463523 60463528 +
gccagtagccaagccgtctgga

SEQ ID NO: 195577 - DNA, 22 bp, Artificial Sequence
  Synthetic oligonucleotide; CTG chr2 60463526 60463547 60463543 60463548 +
gagaggggccctgcttaagtca

SEQ ID NO: 195578 - DNA, 22 bp, Artificial Sequence
  Synthetic oligonucleotide; CTG chr2 60463539 60463560 60463556 60463561 +
cttaagtcacattatttccctt

SEQ ID NO: 195579 - DNA, 22 bp, Artificial Sequence
  Synthetic oligonucleotide; CTT chr2 60463542 60463563 60463559 60463564 +
aagtcacattatttcccttgct

SEQ ID NO: 195580 - DNA, 22 bp, Artificial Sequence
  Synthetic oligonucleotide; TTA chr2 60463543 60463564 60463560 60463565 +
agtcacattatttcccttgctg

SEQ ID NO: 195581 - DNA, 22 bp, Artificial Sequence
  Synthetic oligonucleotide; TTA chr2 60463553 60463574 60463570 60463575 +
tttcccttgctgaaaagaaccc

SEQ ID NO: 195582 - DNA, 22 bp, Artificial Sequence
  Synthetic oligonucleotide; TTT chr2 60463556 60463577 60463573 60463578 +
cccttgctgaaaagaacccaag

SEQ ID NO: 195583 - DNA, 22 bp, Artificial Sequence
  Synthetic oligonucleotide; TTC chr2 60463557 60463578 60463574 60463579 +
ccttgctgaaaagaacccaaga

SEQ ID NO: 195584 - DNA, 22 bp, Artificial Sequence
  Synthetic oligonucleotide; CTT chr2 60463561 60463582 60463578 60463583 +
gctgaaaagaacccaagagtgg

SEQ ID NO: 195585 - DNA, 22 bp, Artificial Sequence
  Synthetic oligonucleotide; TTG chr2 60463562 60463583 60463579 60463584 +
ctgaaaagaacccaagagtggt

SEQ ID NO: 195586 - DNA, 22 bp, Artificial Sequence
  Synthetic oligonucleotide; CTG chr2 60463565 60463586 60463582 60463587 +
aaaagaacccaagagtggtaaa

SEQ ID NO: 195587 - DNA, 22 bp, Artificial Sequence
  Synthetic oligonucleotide; CTT chr2 60463595 60463616 60463612 60463617 +
tggcaaagaagggccagcttga

SEQ ID NO: 195588 - DNA, 22 bp, Artificial Sequence
  Synthetic oligonucleotide; TTT chr2 60463596 60463617 60463613 60463618 +
ggcaaagaagggccagcttgac

SEQ ID NO: 195589 - DNA, 22 bp, Artificial Sequence
  Synthetic oligonucleotide; TTG chr2 60463597 60463618 60463614 60463619 +
gcaaagaagggccagcttgact

SEQ ID NO: 195590 - DNA, 22 bp, Artificial Sequence
  Synthetic oligonucleotide; CTT chr2 60463615 60463636 60463632 60463637 +
gacttcacaaaatatttcattt

SEQ ID NO: 195591 - DNA, 22 bp, Artificial Sequence
  Synthetic oligonucleotide; TTG chr2 60463616 60463637 60463633 60463638 +
acttcacaaaatatttcatttg

SEQ ID NO: 195592 - DNA, 22 bp, Artificial Sequence
  Synthetic oligonucleotide; CTT chr2 60463620 60463641 60463637 60463642 +
cacaaaatatttcatttgggga

SEQ ID NO: 195593 - DNA, 22 bp, Artificial Sequence
  Synthetic oligonucleotide; TTC chr2 60463621 60463642 60463638 60463643 +
acaaaatatttcatttggggag

SEQ ID NO: 195594 - DNA, 22 bp, Artificial Sequence
  Synthetic oligonucleotide; TTT chr2 60463632 60463653 60463649 60463654 +
catttggggagatggctaaatt

SEQ ID NO: 195595 - DNA, 22 bp, Artificial Sequence
  Synthetic oligonucleotide; TTC chr2 60463633 60463654 60463650 60463655 +
atttggggagatggctaaatta

SEQ ID NO: 195596 - DNA, 22 bp, Artificial Sequence
  Synthetic oligonucleotide; TTT chr2 60463637 60463658 60463654 60463659 +
ggggagatggctaaattaaata

SEQ ID NO: 195597 - DNA, 22 bp, Artificial Sequence
  Synthetic oligonucleotide; TTG chr2 60463638 60463659 60463655 60463660 +
gggagatggctaaattaaatat

SEQ ID NO: 195598 - DNA, 22 bp, Artificial Sequence
  Synthetic oligonucleotide; CTA chr2 60463650 60463671 60463667 60463672 +
aattaaatatatatggggagat

SEQ ID NO: 195599 - DNA, 22 bp, Artificial Sequence
  Synthetic oligonucleotide; TTA chr2 60463655 60463676 60463672 60463677 +
aatatatatggggagatagcta

SEQ ID NO: 195600 - DNA, 22 bp, Artificial Sequence
  Synthetic oligonucleotide; CTA chr2 60463677 60463698 60463694 60463699 +
cattaaatatatatatatatgg

SEQ ID NO: 195601 - DNA, 22 bp, Artificial Sequence
  Synthetic oligonucleotide; TTA chr2 60463682 60463703 60463699 60463704 +
aatatatatatatatggaataa

SEQ ID NO: 195602 - DNA, 22 bp, Artificial Sequence
  Synthetic oligonucleotide; CTG chr2 60463707 60463728 60463724 60463729 +
accaacagtttactagtcaact

SEQ ID NO: 195603 - DNA, 22 bp, Artificial Sequence
  Synthetic oligonucleotide; TTT chr2 60463718 60463739 60463735 60463740 +
actagtcaactgcaacattaaa

SEQ ID NO: 195604 - DNA, 22 bp, Artificial Sequence
  Synthetic oligonucleotide; TTA chr2 60463719 60463740 60463736 60463741 +
ctagtcaactgcaacattaaaa

SEQ ID NO: 195605 - DNA, 22 bp, Artificial Sequence
  Synthetic oligonucleotide; CTA chr2 60463722 60463743 60463739 60463744 +
gtcaactgcaacattaaaaagg

SEQ ID NO: 195606 - DNA, 22 bp, Artificial Sequence
  Synthetic oligonucleotide; CTG chr2 60463730 60463751 60463747 60463752 +
caacattaaaaagggcagaagt

SEQ ID NO: 195607 - DNA, 22 bp, Artificial Sequence
  Synthetic oligonucleotide; TTA chr2 60463738 60463759 60463755 60463760 +
aaaagggcagaagtaatggtag

SEQ ID NO: 195608 - DNA, 22 bp, Artificial Sequence
  Synthetic oligonucleotide; CTT chr2 60463791 60463812 60463808 60463813 +
cccagagattctgaaaaaaaaa

SEQ ID NO: 195609 - DNA, 22 bp, Artificial Sequence
  Synthetic oligonucleotide; TTC chr2 60463792 60463813 60463809 60463814 +
ccagagattctgaaaaaaaaag

SEQ ID NO: 195610 - DNA, 22 bp, Artificial Sequence
  Synthetic oligonucleotide; TTC chr2 60463802 60463823 60463819 60463824 +
tgaaaaaaaaagccttaaaata

SEQ ID NO: 195611 - DNA, 22 bp, Artificial Sequence
  Synthetic oligonucleotide; CTG chr2 60463804 60463825 60463821 60463826 +
aaaaaaaaagccttaaaatata

SEQ ID NO: 195612 - DNA, 22 bp, Artificial Sequence
  Synthetic oligonucleotide; CTT chr2 60463818 60463839 60463835 60463840 +
aaaatataactgagaaataaca

SEQ ID NO: 195613 - DNA, 22 bp, Artificial Sequence
  Synthetic oligonucleotide; TTA chr2 60463819 60463840 60463836 60463841 +
aaatataactgagaaataacaa

SEQ ID NO: 195614 - DNA, 22 bp, Artificial Sequence
  Synthetic oligonucleotide; CTG chr2 60463830 60463851 60463847 60463852 +
agaaataacaaacttttctcct

SEQ ID NO: 195615 - DNA, 22 bp, Artificial Sequence
  Synthetic oligonucleotide; CTT chr2 60463845 60463866 60463862 60463867 +
ttctccttcttttaaaagaagg

SEQ ID NO: 195616 - DNA, 22 bp, Artificial Sequence
  Synthetic oligonucleotide; TTT chr2 60463846 60463867 60463863 60463868 +
tctccttcttttaaaagaaggg

SEQ ID NO: 195617 - DNA, 22 bp, Artificial Sequence
  Synthetic oligonucleotide; TTT chr2 60463847 60463868 60463864 60463869 +
ctccttcttttaaaagaagggc

SEQ ID NO: 195618 - DNA, 22 bp, Artificial Sequence
  Synthetic oligonucleotide; TTC chr2 60463848 60463869 60463865 60463870 +
tccttcttttaaaagaagggct

SEQ ID NO: 195619 - DNA, 22 bp, Artificial Sequence
  Synthetic oligonucleotide; CTC chr2 60463850 60463871 60463867 60463872 +
cttcttttaaaagaagggctgc

SEQ ID NO: 195620 - DNA, 22 bp, Artificial Sequence
  Synthetic oligonucleotide; CTT chr2 60463853 60463874 60463870 60463875 +
cttttaaaagaagggctgcaag

SEQ ID NO: 195621 - DNA, 22 bp, Artificial Sequence
  Synthetic oligonucleotide; TTC chr2 60463854 60463875 60463871 60463876 +
ttttaaaagaagggctgcaaga

SEQ ID NO: 195622 - DNA, 22 bp, Artificial Sequence
  Synthetic oligonucleotide; CTT chr2 60463856 60463877 60463873 60463878 +
ttaaaagaagggctgcaagagt

SEQ ID NO: 195623 - DNA, 22 bp, Artificial Sequence
  Synthetic oligonucleotide; TTT chr2 60463857 60463878 60463874 60463879 +
taaaagaagggctgcaagagtt

SEQ ID NO: 195624 - DNA, 22 bp, Artificial Sequence
  Synthetic oligonucleotide; TTT chr2 60463858 60463879 60463875 60463880 +
aaaagaagggctgcaagagttc

SEQ ID NO: 195625 - DNA, 22 bp, Artificial Sequence
  Synthetic oligonucleotide; TTA chr2 60463859 60463880 60463876 60463881 +
aaagaagggctgcaagagttct

SEQ ID NO: 195626 - DNA, 22 bp, Artificial Sequence
  Synthetic oligonucleotide; CTG chr2 60463871 60463892 60463888 60463893 +
caagagttctttaaggccacag

SEQ ID NO: 195627 - DNA, 22 bp, Artificial Sequence
  Synthetic oligonucleotide; TTC chr2 60463880 60463901 60463897 60463902 +
tttaaggccacagctagtattt

SEQ ID NO: 195628 - DNA, 22 bp, Artificial Sequence
  Synthetic oligonucleotide; CTT chr2 60463882 60463903 60463899 60463904 +
taaggccacagctagtatttgt

SEQ ID NO: 195629 - DNA, 22 bp, Artificial Sequence
  Synthetic oligonucleotide; TTT chr2 60463883 60463904 60463900 60463905 +
aaggccacagctagtatttgtc

SEQ ID NO: 195630 - DNA, 22 bp, Artificial Sequence
  Synthetic oligonucleotide; TTA chr2 60463884 60463905 60463901 60463906 +
aggccacagctagtatttgtca

SEQ ID NO: 195631 - DNA, 22 bp, Artificial Sequence
  Synthetic oligonucleotide; CTA chr2 60463896 60463917 60463913 60463918 +
gtatttgtcagtaactttctaa

SEQ ID NO: 195632 - DNA, 22 bp, Artificial Sequence
  Synthetic oligonucleotide; TTT chr2 60463902 60463923 60463919 60463924 +
gtcagtaactttctaagaagga

SEQ ID NO: 195633 - DNA, 22 bp, Artificial Sequence
  Synthetic oligonucleotide; TTG chr2 60463903 60463924 60463920 60463925 +
tcagtaactttctaagaaggaa

SEQ ID NO: 195634 - DNA, 22 bp, Artificial Sequence
  Synthetic oligonucleotide; CTT chr2 60463913 60463934 60463930 60463935 +
tctaagaaggaaaaaaaaaaaa

SEQ ID NO: 195635 - DNA, 22 bp, Artificial Sequence
  Synthetic oligonucleotide; TTT chr2 60463914 60463935 60463931 60463936 +
ctaagaaggaaaaaaaaaaaaa

SEQ ID NO: 195636 - DNA, 22 bp, Artificial Sequence
  Synthetic oligonucleotide; TTC chr2 60463915 60463936 60463932 60463937 +
taagaaggaaaaaaaaaaaaaa

SEQ ID NO: 195637 - DNA, 22 bp, Artificial Sequence
  Synthetic oligonucleotide; CTA chr2 60463917 60463938 60463934 60463939 +
agaaggaaaaaaaaaaaaaatc

SEQ ID NO: 195638 - DNA, 22 bp, Artificial Sequence
  Synthetic oligonucleotide; CTA chr2 60463941 60463962 60463958 60463963 +
ccagggaggttaagagtgagaa

SEQ ID NO: 195639 - DNA, 22 bp, Artificial Sequence
  Synthetic oligonucleotide; TTA chr2 60463953 60463974 60463970 60463975 +
agagtgagaatgaggaattaat

SEQ ID NO: 195640 - DNA, 22 bp, Artificial Sequence
  Synthetic oligonucleotide; TTA chr2 60463973 60463994 60463990 60463995 +
atcaattatatgatgcctccat

SEQ ID NO: 195641 - DNA, 22 bp, Artificial Sequence
  Synthetic oligonucleotide; TTA chr2 60463981 60464002 60463998 60464003 +
tatgatgcctccatttagcaag

SEQ ID NO: 195642 - DNA, 22 bp, Artificial Sequence
  Synthetic oligonucleotide; CTC chr2 60463992 60464013 60464009 60464014 +
catttagcaagtcagaaagaaa

SEQ ID NO: 195643 - DNA, 22 bp, Artificial Sequence
  Synthetic oligonucleotide; TTT chr2 60463997 60464018 60464014 60464019 +
agcaagtcagaaagaaaagccg

SEQ ID NO: 195644 - DNA, 22 bp, Artificial Sequence
  Synthetic oligonucleotide; TTA chr2 60463998 60464019 60464015 60464020 +
gcaagtcagaaagaaaagccgg

SEQ ID NO: 195645 - DNA, 22 bp, Artificial Sequence
  Synthetic oligonucleotide; CTT chr2 60464029 60464050 60464046 60464051 +
ctcaggagcccccaaacactgg

SEQ ID NO: 195646 - DNA, 22 bp, Artificial Sequence
  Synthetic oligonucleotide; TTC chr2 60464030 60464051 60464047 60464052 +
tcaggagcccccaaacactggt

SEQ ID NO: 195647 - DNA, 22 bp, Artificial Sequence
  Synthetic oligonucleotide; CTC chr2 60464032 60464053 60464049 60464054 +
aggagcccccaaacactggtat

SEQ ID NO: 195648 - DNA, 22 bp, Artificial Sequence
  Synthetic oligonucleotide; CTG chr2 60464050 60464071 60464067 60464072 +
gtattccaaaataagccagcct

SEQ ID NO: 195649 - DNA, 22 bp, Artificial Sequence
  Synthetic oligonucleotide; TTC chr2 60464056 60464077 60464073 60464078 +
caaaataagccagcctcgctca

SEQ ID NO: 195650 - DNA, 22 bp, Artificial Sequence
  Synthetic oligonucleotide; CTC chr2 60464073 60464094 60464090 60464095 +
gctcaagcacttgtctaaataa

SEQ ID NO: 195651 - DNA, 22 bp, Artificial Sequence
  Synthetic oligonucleotide; CTC chr2 60464077 60464098 60464094 60464099 +
aagcacttgtctaaataatgga

SEQ ID NO: 195652 - DNA, 22 bp, Artificial Sequence
  Synthetic oligonucleotide; CTT chr2 60464085 60464106 60464102 60464107 +
gtctaaataatggactcctgcc

SEQ ID NO: 195653 - DNA, 22 bp, Artificial Sequence
  Synthetic oligonucleotide; TTG chr2 60464086 60464107 60464103 60464108 +
tctaaataatggactcctgccc

SEQ ID NO: 195654 - DNA, 22 bp, Artificial Sequence
  Synthetic oligonucleotide; CTA chr2 60464090 60464111 60464107 60464112 +
aataatggactcctgccctgac

SEQ ID NO: 195655 - DNA, 22 bp, Artificial Sequence
  Synthetic oligonucleotide; CTC chr2 60464102 60464123 60464119 60464124 +
ctgccctgaccttgtaatttac

SEQ ID NO: 195656 - DNA, 22 bp, Artificial Sequence
  Synthetic oligonucleotide; CTG chr2 60464105 60464126 60464122 60464127 +
ccctgaccttgtaatttacttt

SEQ ID NO: 195657 - DNA, 22 bp, Artificial Sequence
  Synthetic oligonucleotide; CTG chr2 60464110 60464131 60464127 60464132 +
accttgtaatttactttacaac

SEQ ID NO: 195658 - DNA, 22 bp, Artificial Sequence
  Synthetic oligonucleotide; CTT chr2 60464115 60464136 60464132 60464137 +
gtaatttactttacaacgcatt

SEQ ID NO: 195659 - DNA, 22 bp, Artificial Sequence
  Synthetic oligonucleotide; TTG chr2 60464116 60464137 60464133 60464138 +
taatttactttacaacgcattt

SEQ ID NO: 195660 - DNA, 22 bp, Artificial Sequence
  Synthetic oligonucleotide; TTT chr2 60464122 60464143 60464139 60464144 +
actttacaacgcatttataatc

SEQ ID NO: 195661 - DNA, 22 bp, Artificial Sequence
  Synthetic oligonucleotide; TTA chr2 60464123 60464144 60464140 60464145 +
ctttacaacgcatttataatcc

SEQ ID NO: 195662 - DNA, 22 bp, Artificial Sequence
  Synthetic oligonucleotide; CTT chr2 60464126 60464147 60464143 60464148 +
tacaacgcatttataatcccac

SEQ ID NO: 195663 - DNA, 22 bp, Artificial Sequence
  Synthetic oligonucleotide; TTT chr2 60464127 60464148 60464144 60464149 +
acaacgcatttataatcccact

SEQ ID NO: 195664 - DNA, 22 bp, Artificial Sequence
  Synthetic oligonucleotide; TTA chr2 60464128 60464149 60464145 60464150 +
caacgcatttataatcccactc

SEQ ID NO: 195665 - DNA, 22 bp, Artificial Sequence
  Synthetic oligonucleotide; TTT chr2 60464138 60464159 60464155 60464160 +
ataatcccactcaatatatctc

SEQ ID NO: 195666 - DNA, 22 bp, Artificial Sequence
  Synthetic oligonucleotide; TTA chr2 60464139 60464160 60464156 60464161 +
taatcccactcaatatatctca

SEQ ID NO: 195667 - DNA, 22 bp, Artificial Sequence
  Synthetic oligonucleotide; CTC chr2 60464150 60464171 60464167 60464172 +
aatatatctcactcctgggtaa

SEQ ID NO: 195668 - DNA, 22 bp, Artificial Sequence
  Synthetic oligonucleotide; CTC chr2 60464160 60464181 60464177 60464182 +
actcctgggtaaatctcttaaa

SEQ ID NO: 195669 - DNA, 22 bp, Artificial Sequence
  Synthetic oligonucleotide; CTC chr2 60464164 60464185 60464181 60464186 +
ctgggtaaatctcttaaacaag

SEQ ID NO: 195670 - DNA, 22 bp, Artificial Sequence
  Synthetic oligonucleotide; CTG chr2 60464167 60464188 60464184 60464189 +
ggtaaatctcttaaacaagatt

SEQ ID NO: 195671 - DNA, 22 bp, Artificial Sequence
  Synthetic oligonucleotide; CTC chr2 60464177 60464198 60464194 60464199 +
ttaaacaagattagatggtaag

SEQ ID NO: 195672 - DNA, 22 bp, Artificial Sequence
  Synthetic oligonucleotide; CTT chr2 60464179 60464200 60464196 60464201 +
aaacaagattagatggtaagat

SEQ ID NO: 195673 - DNA, 22 bp, Artificial Sequence
  Synthetic oligonucleotide; TTA chr2 60464180 60464201 60464197 60464202 +
aacaagattagatggtaagata

SEQ ID NO: 195674 - DNA, 22 bp, Artificial Sequence
  Synthetic oligonucleotide; TTA chr2 60464190 60464211 60464207 60464212 +
gatggtaagataccaaaattag

SEQ ID NO: 195675 - DNA, 22 bp, Artificial Sequence
  Synthetic oligonucleotide; TTA chr2 60464211 60464232 60464228 60464233 +
ggtttcaaacatttgtctaatg

SEQ ID NO: 195676 - DNA, 22 bp, Artificial Sequence
  Synthetic oligonucleotide; TTT chr2 60464216 60464237 60464233 60464238 +
caaacatttgtctaatgtggaa

SEQ ID NO: 195677 - DNA, 22 bp, Artificial Sequence
  Synthetic oligonucleotide; TTC chr2 60464217 60464238 60464234 60464239 +
aaacatttgtctaatgtggaag

SEQ ID NO: 195678 - DNA, 22 bp, Artificial Sequence
  Synthetic oligonucleotide; TTT chr2 60464225 60464246 60464242 60464247 +
gtctaatgtggaagggggaaaa

SEQ ID NO: 195679 - DNA, 22 bp, Artificial Sequence
  Synthetic oligonucleotide; TTG chr2 60464226 60464247 60464243 60464248 +
tctaatgtggaagggggaaaaa

SEQ ID NO: 195680 - DNA, 22 bp, Artificial Sequence
  Synthetic oligonucleotide; CTA chr2 60464230 60464251 60464247 60464252 +
atgtggaagggggaaaaaaggc

SEQ ID NO: 195681 - DNA, 22 bp, Artificial Sequence
  Synthetic oligonucleotide; TTT chr2 60464262 60464283 60464279 60464284 +
tgaaagaaaacgctgacattag

SEQ ID NO: 195682 - DNA, 22 bp, Artificial Sequence
  Synthetic oligonucleotide; TTT chr2 60464263 60464284 60464280 60464285 +
gaaagaaaacgctgacattagt

SEQ ID NO: 195683 - DNA, 22 bp, Artificial Sequence
  Synthetic oligonucleotide; TTG chr2 60464264 60464285 60464281 60464286 +
aaagaaaacgctgacattagta

SEQ ID NO: 195684 - DNA, 22 bp, Artificial Sequence
  Synthetic oligonucleotide; CTG chr2 60464277 60464298 60464294 60464299 +
acattagtatcacattatctgc

SEQ ID NO: 195685 - DNA, 22 bp, Artificial Sequence
  Synthetic oligonucleotide; TTA chr2 60464283 60464304 60464300 60464305 +
gtatcacattatctgcctattt

SEQ ID NO: 195686 - DNA, 22 bp, Artificial Sequence
  Synthetic oligonucleotide; TTA chr2 60464294 60464315 60464311 60464316 +
tctgcctatttttgtttgcctc

SEQ ID NO: 195687 - DNA, 22 bp, Artificial Sequence
  Synthetic oligonucleotide; CTG chr2 60464298 60464319 60464315 60464320 +
cctatttttgtttgcctcctct

SEQ ID NO: 195688 - DNA, 22 bp, Artificial Sequence
  Synthetic oligonucleotide; CTA chr2 60464302 60464323 60464319 60464324 +
tttttgtttgcctcctctcttc

SEQ ID NO: 195689 - DNA, 22 bp, Artificial Sequence
  Synthetic oligonucleotide; TTT chr2 60464305 60464326 60464322 60464327 +
ttgtttgcctcctctcttcaaa

SEQ ID NO: 195690 - DNA, 22 bp, Artificial Sequence
  Synthetic oligonucleotide; TTT chr2 60464306 60464327 60464323 60464328 +
tgtttgcctcctctcttcaaag

SEQ ID NO: 195691 - DNA, 22 bp, Artificial Sequence
  Synthetic oligonucleotide; TTT chr2 60464307 60464328 60464324 60464329 +
gtttgcctcctctcttcaaagg

SEQ ID NO: 195692 - DNA, 22 bp, Artificial Sequence
  Synthetic oligonucleotide; TTG chr2 60464308 60464329 60464325 60464330 +
tttgcctcctctcttcaaaggg

SEQ ID NO: 195693 - DNA, 22 bp, Artificial Sequence
  Synthetic oligonucleotide; TTT chr2 60464311 60464332 60464328 60464333 +
gcctcctctcttcaaagggaaa

SEQ ID NO: 195694 - DNA, 22 bp, Artificial Sequence
  Synthetic oligonucleotide; TTG chr2 60464312 60464333 60464329 60464334 +
cctcctctcttcaaagggaaat

SEQ ID NO: 195695 - DNA, 22 bp, Artificial Sequence
  Synthetic oligonucleotide; CTC chr2 60464316 60464337 60464333 60464338 +
ctctcttcaaagggaaataaaa

SEQ ID NO: 195696 - DNA, 22 bp, Artificial Sequence
  Synthetic oligonucleotide; CTC chr2 60464319 60464340 60464336 60464341 +
tcttcaaagggaaataaaaagc

SEQ ID NO: 195697 - DNA, 22 bp, Artificial Sequence
  Synthetic oligonucleotide; CTC chr2 60464321 60464342 60464338 60464343 +
ttcaaagggaaataaaaagctt

SEQ ID NO: 195698 - DNA, 22 bp, Artificial Sequence
  Synthetic oligonucleotide; CTT chr2 60464323 60464344 60464340 60464345 +
caaagggaaataaaaagcttca

SEQ ID NO: 195699 - DNA, 22 bp, Artificial Sequence
  Synthetic oligonucleotide; TTC chr2 60464324 60464345 60464341 60464346 +
aaagggaaataaaaagcttcat

SEQ ID NO: 195700 - DNA, 22 bp, Artificial Sequence
  Synthetic oligonucleotide; CTT chr2 60464343 60464364 60464360 60464365 +
cattgagaacatttttataaat

SEQ ID NO: 195701 - DNA, 22 bp, Artificial Sequence
  Synthetic oligonucleotide; TTC chr2 60464344 60464365 60464361 60464366 +
attgagaacatttttataaatt

SEQ ID NO: 195702 - DNA, 22 bp, Artificial Sequence
  Synthetic oligonucleotide; TTG chr2 60464348 60464369 60464365 60464370 +
agaacatttttataaatttttt

SEQ ID NO: 195703 - DNA, 22 bp, Artificial Sequence
  Synthetic oligonucleotide; TTT chr2 60464357 60464378 60464374 60464379 +
ttataaattttttgttgttgtt

SEQ ID NO: 195704 - DNA, 22 bp, Artificial Sequence
  Synthetic oligonucleotide; TTT chr2 60464358 60464379 60464375 60464380 +
tataaattttttgttgttgttg

SEQ ID NO: 195705 - DNA, 22 bp, Artificial Sequence
  Synthetic oligonucleotide; TTT chr2 60464359 60464380 60464376 60464381 +
ataaattttttgttgttgttga

SEQ ID NO: 195706 - DNA, 22 bp, Artificial Sequence
  Synthetic oligonucleotide; TTA chr2 60464360 60464381 60464377 60464382 +
taaattttttgttgttgttgaa

SEQ ID NO: 195707 - DNA, 22 bp, Artificial Sequence
  Synthetic oligonucleotide; TTT chr2 60464367 60464388 60464384 60464389 +
tttgttgttgttgaacaataac

SEQ ID NO: 195708 - DNA, 22 bp, Artificial Sequence
  Synthetic oligonucleotide; TTT chr2 60464368 60464389 60464385 60464390 +
ttgttgttgttgaacaataact

SEQ ID NO: 195709 - DNA, 22 bp, Artificial Sequence
  Synthetic oligonucleotide; TTT chr2 60464369 60464390 60464386 60464391 +
tgttgttgttgaacaataactt

SEQ ID NO: 195710 - DNA, 22 bp, Artificial Sequence
  Synthetic oligonucleotide; TTT chr2 60464370 60464391 60464387 60464392 +
gttgttgttgaacaataacttg

SEQ ID NO: 195711 - DNA, 22 bp, Artificial Sequence
  Synthetic oligonucleotide; TTG chr2 60464371 60464392 60464388 60464393 +
ttgttgttgaacaataacttgg

SEQ ID NO: 195712 - DNA, 22 bp, Artificial Sequence
  Synthetic oligonucleotide; TTG chr2 60464374 60464395 60464391 60464396 +
ttgttgaacaataacttgggtc

SEQ ID NO: 195713 - DNA, 22 bp, Artificial Sequence
  Synthetic oligonucleotide; TTG chr2 60464377 60464398 60464394 60464399 +
ttgaacaataacttgggtccca

SEQ ID NO: 195714 - DNA, 22 bp, Artificial Sequence
  Synthetic oligonucleotide; TTG chr2 60464380 60464401 60464397 60464402 +
aacaataacttgggtcccaaat

SEQ ID NO: 195715 - DNA, 22 bp, Artificial Sequence
  Synthetic oligonucleotide; CTT chr2 60464391 60464412 60464408 60464413 +
gggtcccaaataggctggaaaa

SEQ ID NO: 195716 - DNA, 22 bp, Artificial Sequence
  Synthetic oligonucleotide; TTG chr2 60464392 60464413 60464409 60464414 +
ggtcccaaataggctggaaaaa

SEQ ID NO: 195717 - DNA, 22 bp, Artificial Sequence
  Synthetic oligonucleotide; CTG chr2 60464408 60464429 60464425 60464430 +
gaaaaaaaactatctggttcca

SEQ ID NO: 195718 - DNA, 22 bp, Artificial Sequence
  Synthetic oligonucleotide; CTA chr2 60464420 60464441 60464437 60464442 +
tctggttccaactacatgatcc

SEQ ID NO: 195719 - DNA, 22 bp, Artificial Sequence
  Synthetic oligonucleotide; CTG chr2 60464424 60464445 60464441 60464446 +
gttccaactacatgatcctctg

SEQ ID NO: 195720 - DNA, 22 bp, Artificial Sequence
  Synthetic oligonucleotide; TTC chr2 60464428 60464449 60464445 60464450 +
caactacatgatcctctgtggc

SEQ ID NO: 195721 - DNA, 22 bp, Artificial Sequence
  Synthetic oligonucleotide; CTA chr2 60464434 60464455 60464451 60464456 +
catgatcctctgtggcttcctc

SEQ ID NO: 195722 - DNA, 22 bp, Artificial Sequence
  Synthetic oligonucleotide; CTC chr2 60464444 60464465 60464461 60464466 +
tgtggcttcctccttgtcctcc

SEQ ID NO: 195723 - DNA, 22 bp, Artificial Sequence
  Synthetic oligonucleotide; CTG chr2 60464446 60464467 60464463 60464468 +
tggcttcctccttgtcctccct

SEQ ID NO: 195724 - DNA, 22 bp, Artificial Sequence
  Synthetic oligonucleotide; CTT chr2 60464452 60464473 60464469 60464474 +
cctccttgtcctccctagatct

SEQ ID NO: 195725 - DNA, 22 bp, Artificial Sequence
  Synthetic oligonucleotide; TTC chr2 60464453 60464474 60464470 60464475 +
ctccttgtcctccctagatctc

SEQ ID NO: 195726 - DNA, 22 bp, Artificial Sequence
  Synthetic oligonucleotide; CTC chr2 60464456 60464477 60464473 60464478 +
cttgtcctccctagatctctgg

SEQ ID NO: 195727 - DNA, 22 bp, Artificial Sequence
  Synthetic oligonucleotide; CTT chr2 60464459 60464480 60464476 60464481 +
gtcctccctagatctctgggtg

SEQ ID NO: 195728 - DNA, 22 bp, Artificial Sequence
  Synthetic oligonucleotide; TTG chr2 60464460 60464481 60464477 60464482 +
tcctccctagatctctgggtga

SEQ ID NO: 195729 - DNA, 22 bp, Artificial Sequence
  Synthetic oligonucleotide; CTC chr2 60464465 60464486 60464482 60464487 +
cctagatctctgggtgactatc

SEQ ID NO: 195730 - DNA, 22 bp, Artificial Sequence
  Synthetic oligonucleotide; CTA chr2 60464469 60464490 60464486 60464491 +
gatctctgggtgactatcattc

SEQ ID NO: 195731 - DNA, 22 bp, Artificial Sequence
  Synthetic oligonucleotide; CTC chr2 60464475 60464496 60464492 60464497 +
tgggtgactatcattcctattt

SEQ ID NO: 195732 - DNA, 22 bp, Artificial Sequence
  Synthetic oligonucleotide; CTG chr2 60464477 60464498 60464494 60464499 +
ggtgactatcattcctatttag

SEQ ID NO: 195733 - DNA, 22 bp, Artificial Sequence
  Synthetic oligonucleotide; CTA chr2 60464485 60464506 60464502 60464507 +
tcattcctatttagcctgacga

SEQ ID NO: 195734 - DNA, 22 bp, Artificial Sequence
  Synthetic oligonucleotide; TTC chr2 60464491 60464512 60464508 60464513 +
ctatttagcctgacgatctgag

SEQ ID NO: 195735 - DNA, 22 bp, Artificial Sequence
  Synthetic oligonucleotide; CTA chr2 60464494 60464515 60464511 60464516 +
tttagcctgacgatctgagttg

SEQ ID NO: 195736 - DNA, 22 bp, Artificial Sequence
  Synthetic oligonucleotide; TTT chr2 60464497 60464518 60464514 60464519 +
agcctgacgatctgagttgggc

SEQ ID NO: 195737 - DNA, 22 bp, Artificial Sequence
  Synthetic oligonucleotide; TTA chr2 60464498 60464519 60464515 60464520 +
gcctgacgatctgagttgggca

SEQ ID NO: 195738 - DNA, 22 bp, Artificial Sequence
  Synthetic oligonucleotide; CTG chr2 60464503 60464524 60464520 60464525 +
acgatctgagttgggcaagtaa

SEQ ID NO: 195739 - DNA, 22 bp, Artificial Sequence
  Synthetic oligonucleotide; CTG chr2 60464511 60464532 60464528 60464533 +
agttgggcaagtaaaaagattt

SEQ ID NO: 195740 - DNA, 22 bp, Artificial Sequence
  Synthetic oligonucleotide; TTG chr2 60464516 60464537 60464533 60464538 +
ggcaagtaaaaagatttgtctg

SEQ ID NO: 195741 - DNA, 22 bp, Artificial Sequence
  Synthetic oligonucleotide; TTT chr2 60464533 60464554 60464550 60464555 +
gtctgataatccaagtccttaa

SEQ ID NO: 195742 - DNA, 22 bp, Artificial Sequence
  Synthetic oligonucleotide; TTG chr2 60464534 60464555 60464551 60464556 +
tctgataatccaagtccttaac

SEQ ID NO: 195743 - DNA, 22 bp, Artificial Sequence
  Synthetic oligonucleotide; CTG chr2 60464538 60464559 60464555 60464560 +
ataatccaagtccttaacacgt

SEQ ID NO: 195744 - DNA, 22 bp, Artificial Sequence
  Synthetic oligonucleotide; CTT chr2 60464553 60464574 60464570 60464575 +
aacacgttcatcactccaaatg

SEQ ID NO: 195745 - DNA, 22 bp, Artificial Sequence
  Synthetic oligonucleotide; TTA chr2 60464554 60464575 60464571 60464576 +
acacgttcatcactccaaatgc

SEQ ID NO: 195746 - DNA, 22 bp, Artificial Sequence
  Synthetic oligonucleotide; TTC chr2 60464562 60464583 60464579 60464584 +
atcactccaaatgccttaaaat

SEQ ID NO: 195747 - DNA, 22 bp, Artificial Sequence
  Synthetic oligonucleotide; CTC chr2 60464569 60464590 60464586 60464591 +
caaatgccttaaaattatattt

SEQ ID NO: 195748 - DNA, 22 bp, Artificial Sequence
  Synthetic oligonucleotide; CTT chr2 60464579 60464600 60464596 60464601 +
aaaattatattttaccttataa

SEQ ID NO: 195749 - DNA, 22 bp, Artificial Sequence
  Synthetic oligonucleotide; TTA chr2 60464580 60464601 60464597 60464602 +
aaattatattttaccttataaa

SEQ ID NO: 195750 - DNA, 22 bp, Artificial Sequence
  Synthetic oligonucleotide; TTA chr2 60464586 60464607 60464603 60464608 +
tattttaccttataaaacatcg

SEQ ID NO: 195751 - DNA, 22 bp, Artificial Sequence
  Synthetic oligonucleotide; TTT chr2 60464591 60464612 60464608 60464613 +
taccttataaaacatcgattga

SEQ ID NO: 195752 - DNA, 22 bp, Artificial Sequence
  Synthetic oligonucleotide; TTT chr2 60464592 60464613 60464609 60464614 +
accttataaaacatcgattgaa

SEQ ID NO: 195753 - DNA, 22 bp, Artificial Sequence
  Synthetic oligonucleotide; TTA chr2 60464593 60464614 60464610 60464615 +
ccttataaaacatcgattgaaa

SEQ ID NO: 195754 - DNA, 22 bp, Artificial Sequence
  Synthetic oligonucleotide; CTT chr2 60464597 60464618 60464614 60464619 +
ataaaacatcgattgaaatcca

SEQ ID NO: 195755 - DNA, 22 bp, Artificial Sequence
  Synthetic oligonucleotide; TTA chr2 60464598 60464619 60464615 60464620 +
taaaacatcgattgaaatccag

SEQ ID NO: 195756 - DNA, 22 bp, Artificial Sequence
  Synthetic oligonucleotide; TTG chr2 60464612 60464633 60464629 60464634 +
aaatccaggactagactcataa

SEQ ID NO: 195757 - DNA, 22 bp, Artificial Sequence
  Synthetic oligonucleotide; CTA chr2 60464625 60464646 60464642 60464647 +
gactcataattagtggtgctgg

SEQ ID NO: 195758 - DNA, 22 bp, Artificial Sequence
  Synthetic oligonucleotide; CTC chr2 60464630 60464651 60464647 60464652 +
ataattagtggtgctggtttca

SEQ ID NO: 195759 - DNA, 22 bp, Artificial Sequence
  Synthetic oligonucleotide; TTA chr2 60464637 60464658 60464654 60464659 +
gtggtgctggtttcacatgtgc

SEQ ID NO: 195760 - DNA, 22 bp, Artificial Sequence
  Synthetic oligonucleotide; CTG chr2 60464646 60464667 60464663 60464668 +
gtttcacatgtgccatgaattg

SEQ ID NO: 195761 - DNA, 22 bp, Artificial Sequence
  Synthetic oligonucleotide; TTT chr2 60464650 60464671 60464667 60464672 +
cacatgtgccatgaattgtagt

SEQ ID NO: 195762 - DNA, 22 bp, Artificial Sequence
  Synthetic oligonucleotide; TTC chr2 60464651 60464672 60464668 60464673 +
acatgtgccatgaattgtagtc

SEQ ID NO: 195763 - DNA, 22 bp, Artificial Sequence
  Synthetic oligonucleotide; TTG chr2 60464668 60464689 60464685 60464690 +
tagtcattgataaatgccaaaa

SEQ ID NO: 195764 - DNA, 22 bp, Artificial Sequence
  Synthetic oligonucleotide; TTG chr2 60464677 60464698 60464694 60464699 +
ataaatgccaaaatctgtggca

SEQ ID NO: 195765 - DNA, 22 bp, Artificial Sequence
  Synthetic oligonucleotide; CTG chr2 60464694 60464715 60464711 60464716 +
tggcatacagcactacatcaag

SEQ ID NO: 195766 - DNA, 22 bp, Artificial Sequence
  Synthetic oligonucleotide; CTA chr2 60464709 60464730 60464726 60464731 +
catcaaggatctcatttgtatc

SEQ ID NO: 195767 - DNA, 22 bp, Artificial Sequence
  Synthetic oligonucleotide; CTC chr2 60464722 60464743 60464739 60464744 +
atttgtatcctttcaaaaaggc

SEQ ID NO: 195768 - DNA, 22 bp, Artificial Sequence
  Synthetic oligonucleotide; TTT chr2 60464726 60464747 60464743 60464748 +
gtatcctttcaaaaaggcttaa

SEQ ID NO: 195769 - DNA, 22 bp, Artificial Sequence
  Synthetic oligonucleotide; TTG chr2 60464727 60464748 60464744 60464749 +
tatcctttcaaaaaggcttaaa

SEQ ID NO: 195770 - DNA, 22 bp, Artificial Sequence
  Synthetic oligonucleotide; CTT chr2 60464734 60464755 60464751 60464756 +
tcaaaaaggcttaaatgagaaa

SEQ ID NO: 195771 - DNA, 22 bp, Artificial Sequence
  Synthetic oligonucleotide; TTT chr2 60464735 60464756 60464752 60464757 +
caaaaaggcttaaatgagaaaa

SEQ ID NO: 195772 - DNA, 22 bp, Artificial Sequence
  Synthetic oligonucleotide; TTC chr2 60464736 60464757 60464753 60464758 +
aaaaaggcttaaatgagaaaag

SEQ ID NO: 195773 - DNA, 22 bp, Artificial Sequence
  Synthetic oligonucleotide; CTT chr2 60464746 60464767 60464763 60464768 +
aaatgagaaaagtccattttat

SEQ ID NO: 195774 - DNA, 22 bp, Artificial Sequence
  Synthetic oligonucleotide; TTA chr2 60464747 60464768 60464764 60464769 +
aatgagaaaagtccattttatt

SEQ ID NO: 195775 - DNA, 22 bp, Artificial Sequence
  Synthetic oligonucleotide; TTT chr2 60464765 60464786 60464782 60464787 +
tattttgctgccctgagcatcc

SEQ ID NO: 195776 - DNA, 22 bp, Artificial Sequence
  Synthetic oligonucleotide; TTT chr2 60464766 60464787 60464783 60464788 +
attttgctgccctgagcatcct

SEQ ID NO: 195777 - DNA, 22 bp, Artificial Sequence
  Synthetic oligonucleotide; TTA chr2 60464767 60464788 60464784 60464789 +
ttttgctgccctgagcatccta

SEQ ID NO: 195778 - DNA, 22 bp, Artificial Sequence
  Synthetic oligonucleotide; TTT chr2 60464770 60464791 60464787 60464792 +
tgctgccctgagcatcctaaac

SEQ ID NO: 195779 - DNA, 22 bp, Artificial Sequence
  Synthetic oligonucleotide; TTT chr2 60464771 60464792 60464788 60464793 +
gctgccctgagcatcctaaact

SEQ ID NO: 195780 - DNA, 22 bp, Artificial Sequence
  Synthetic oligonucleotide; TTG chr2 60464772 60464793 60464789 60464794 +
ctgccctgagcatcctaaactt

SEQ ID NO: 195781 - DNA, 22 bp, Artificial Sequence
  Synthetic oligonucleotide; CTG chr2 60464775 60464796 60464792 60464797 +
ccctgagcatcctaaacttttt

SEQ ID NO: 195782 - DNA, 22 bp, Artificial Sequence
  Synthetic oligonucleotide; CTG chr2 60464780 60464801 60464797 60464802 +
agcatcctaaactttttttcag

SEQ ID NO: 195783 - DNA, 22 bp, Artificial Sequence
  Synthetic oligonucleotide; CTA chr2 60464789 60464810 60464806 60464811 +
aactttttttcagagccagtta

SEQ ID NO: 195784 - DNA, 22 bp, Artificial Sequence
  Synthetic oligonucleotide; CTT chr2 60464794 60464815 60464811 60464816 +
tttttcagagccagttatgtga

SEQ ID NO: 195785 - DNA, 22 bp, Artificial Sequence
  Synthetic oligonucleotide; TTT chr2 60464795 60464816 60464812 60464817 +
ttttcagagccagttatgtgat

SEQ ID NO: 195786 - DNA, 22 bp, Artificial Sequence
  Synthetic oligonucleotide; TTT chr2 60464796 60464817 60464813 60464818 +
tttcagagccagttatgtgatc

SEQ ID NO: 195787 - DNA, 22 bp, Artificial Sequence
  Synthetic oligonucleotide; TTT chr2 60464797 60464818 60464814 60464819 +
ttcagagccagttatgtgatca

SEQ ID NO: 195788 - DNA, 22 bp, Artificial Sequence
  Synthetic oligonucleotide; TTT chr2 60464798 60464819 60464815 60464820 +
tcagagccagttatgtgatcat

SEQ ID NO: 195789 - DNA, 22 bp, Artificial Sequence
  Synthetic oligonucleotide; TTT chr2 60464799 60464820 60464816 60464821 +
cagagccagttatgtgatcatg

SEQ ID NO: 195790 - DNA, 22 bp, Artificial Sequence
  Synthetic oligonucleotide; TTC chr2 60464800 60464821 60464817 60464822 +
agagccagttatgtgatcatgc

SEQ ID NO: 195791 - DNA, 22 bp, Artificial Sequence
  Synthetic oligonucleotide; TTA chr2 60464811 60464832 60464828 60464833 +
tgtgatcatgctacagtatgtt

SEQ ID NO: 195792 - DNA, 22 bp, Artificial Sequence
  Synthetic oligonucleotide; CTA chr2 60464824 60464845 60464841 60464846 +
cagtatgttaacactgtgatgt

SEQ ID NO: 195793 - DNA, 22 bp, Artificial Sequence
  Synthetic oligonucleotide; TTA chr2 60464834 60464855 60464851 60464856 +
acactgtgatgttatcctcccc

SEQ ID NO: 195794 - DNA, 22 bp, Artificial Sequence
  Synthetic oligonucleotide; CTG chr2 60464840 60464861 60464857 60464862 +
tgatgttatcctcccctctctc

SEQ ID NO: 195795 - DNA, 22 bp, Artificial Sequence
  Synthetic oligonucleotide; TTA chr2 60464848 60464869 60464865 60464870 +
tcctcccctctctctcatacat

SEQ ID NO: 195796 - DNA, 22 bp, Artificial Sequence
  Synthetic oligonucleotide; CTC chr2 60464853 60464874 60464870 60464875 +
ccctctctctcatacatcaggt

SEQ ID NO: 195797 - DNA, 22 bp, Artificial Sequence
  Synthetic oligonucleotide; CTC chr2 60464858 60464879 60464875 60464880 +
tctctcatacatcaggtcagag

SEQ ID NO: 195798 - DNA, 22 bp, Artificial Sequence
  Synthetic oligonucleotide; CTC chr2 60464860 60464881 60464877 60464882 +
tctcatacatcaggtcagagaa

SEQ ID NO: 195799 - DNA, 22 bp, Artificial Sequence
  Synthetic oligonucleotide; CTC chr2 60464862 60464883 60464879 60464884 +
tcatacatcaggtcagagaaaa

SEQ ID NO: 195800 - DNA, 22 bp, Artificial Sequence
  Synthetic oligonucleotide; CTC chr2 60464864 60464885 60464881 60464886 +
atacatcaggtcagagaaaatg

SEQ ID NO: 195801 - DNA, 22 bp, Artificial Sequence
  Synthetic oligonucleotide; TTT chr2 60464892 60464913 60464909 60464914 +
tatcttataatgagcatacaac

SEQ ID NO: 195802 - DNA, 22 bp, Artificial Sequence
  Synthetic oligonucleotide; TTT chr2 60464893 60464914 60464910 60464915 +
atcttataatgagcatacaaca

SEQ ID NO: 195803 - DNA, 22 bp, Artificial Sequence
  Synthetic oligonucleotide; TTA chr2 60464894 60464915 60464911 60464916 +
tcttataatgagcatacaacat

SEQ ID NO: 195804 - DNA, 22 bp, Artificial Sequence
  Synthetic oligonucleotide; CTT chr2 60464898 60464919 60464915 60464920 +
ataatgagcatacaacatacag

SEQ ID NO: 195805 - DNA, 22 bp, Artificial Sequence
  Synthetic oligonucleotide; TTA chr2 60464899 60464920 60464916 60464921 +
taatgagcatacaacatacagt

SEQ ID NO: 195806 - DNA, 22 bp, Artificial Sequence
  Synthetic oligonucleotide; TTT chr2 60464923 60464944 60464940 60464945 +
tcactatcgcattttagtattc

SEQ ID NO: 195807 - DNA, 22 bp, Artificial Sequence
  Synthetic oligonucleotide; TTT chr2 60464924 60464945 60464941 60464946 +
cactatcgcattttagtattcc

SEQ ID NO: 195808 - DNA, 22 bp, Artificial Sequence
  Synthetic oligonucleotide; TTC chr2 60464925 60464946 60464942 60464947 +
actatcgcattttagtattccc

SEQ ID NO: 195809 - DNA, 22 bp, Artificial Sequence
  Synthetic oligonucleotide; CTA chr2 60464929 60464950 60464946 60464951 +
tcgcattttagtattcccatca

SEQ ID NO: 195810 - DNA, 22 bp, Artificial Sequence
  Synthetic oligonucleotide; TTT chr2 60464937 60464958 60464954 60464959 +
tagtattcccatcaactagata

SEQ ID NO: 195811 - DNA, 22 bp, Artificial Sequence
  Synthetic oligonucleotide; TTT chr2 60464938 60464959 60464955 60464960 +
agtattcccatcaactagatat

SEQ ID NO: 195812 - DNA, 22 bp, Artificial Sequence
  Synthetic oligonucleotide; TTA chr2 60464939 60464960 60464956 60464961 +
gtattcccatcaactagatatt

SEQ ID NO: 195813 - DNA, 22 bp, Artificial Sequence
  Synthetic oligonucleotide; TTC chr2 60464945 60464966 60464962 60464967 +
ccatcaactagatattctagat

SEQ ID NO: 195814 - DNA, 22 bp, Artificial Sequence
  Synthetic oligonucleotide; CTA chr2 60464955 60464976 60464972 60464977 +
gatattctagatcatgagggca

SEQ ID NO: 195815 - DNA, 22 bp, Artificial Sequence
  Synthetic oligonucleotide; TTC chr2 60464962 60464983 60464979 60464984 +
tagatcatgagggcagctagtg

SEQ ID NO: 195816 - DNA, 22 bp, Artificial Sequence
  Synthetic oligonucleotide; CTA chr2 60464964 60464985 60464981 60464986 +
gatcatgagggcagctagtgta

SEQ ID NO: 195817 - DNA, 22 bp, Artificial Sequence
  Synthetic oligonucleotide; CTA chr2 60464981 60465002 60464998 60465003 +
gtgtaatcataatgtcaatgag

SEQ ID NO: 195818 - DNA, 22 bp, Artificial Sequence
  Synthetic oligonucleotide; CTG chr2 60465011 60465032 60465028 60465033 +
ttacgattgagactaaagatta

SEQ ID NO: 195819 - DNA, 22 bp, Artificial Sequence
  Synthetic oligonucleotide; TTA chr2 60465014 60465035 60465031 60465036 +
cgattgagactaaagattacat

SEQ ID NO: 195820 - DNA, 22 bp, Artificial Sequence
  Synthetic oligonucleotide; TTG chr2 60465020 60465041 60465037 60465042 +
agactaaagattacatggagag

SEQ ID NO: 195821 - DNA, 22 bp, Artificial Sequence
  Synthetic oligonucleotide; CTA chr2 60465026 60465047 60465043 60465048 +
aagattacatggagagagctgc

SEQ ID NO: 195822 - DNA, 22 bp, Artificial Sequence
  Synthetic oligonucleotide; TTA chr2 60465033 60465054 60465050 60465055 +
catggagagagctgctttgaaa

SEQ ID NO: 195823 - DNA, 22 bp, Artificial Sequence
  Synthetic oligonucleotide; CTG chr2 60465047 60465068 60465064 60465069 +
ctttgaaactggtaattattac

SEQ ID NO: 195824 - DNA, 22 bp, Artificial Sequence
  Synthetic oligonucleotide; CTT chr2 60465050 60465071 60465067 60465072 +
tgaaactggtaattattaccag

SEQ ID NO: 195825 - DNA, 22 bp, Artificial Sequence
  Synthetic oligonucleotide; TTT chr2 60465051 60465072 60465068 60465073 +
gaaactggtaattattaccagt

SEQ ID NO: 195826 - DNA, 22 bp, Artificial Sequence
  Synthetic oligonucleotide; TTG chr2 60465052 60465073 60465069 60465074 +
aaactggtaattattaccagtc

SEQ ID NO: 195827 - DNA, 22 bp, Artificial Sequence
  Synthetic oligonucleotide; CTG chr2 60465058 60465079 60465075 60465080 +
gtaattattaccagtccactaa

SEQ ID NO: 195828 - DNA, 22 bp, Artificial Sequence
  Synthetic oligonucleotide; TTA chr2 60465065 60465086 60465082 60465087 +
ttaccagtccactaatagcaaa

SEQ ID NO: 195829 - DNA, 22 bp, Artificial Sequence
  Synthetic oligonucleotide; TTA chr2 60465068 60465089 60465085 60465090 +
ccagtccactaatagcaaatga

SEQ ID NO: 195830 - DNA, 22 bp, Artificial Sequence
  Synthetic oligonucleotide; CTA chr2 60465079 60465100 60465096 60465101 +
atagcaaatgatgcattacaat

SEQ ID NO: 195831 - DNA, 22 bp, Artificial Sequence
  Synthetic oligonucleotide; TTA chr2 60465097 60465118 60465114 60465119 +
caatttcaccatataatctgta

SEQ ID NO: 195832 - DNA, 22 bp, Artificial Sequence
  Synthetic oligonucleotide; TTT chr2 60465103 60465124 60465120 60465125 +
caccatataatctgtatttcac

SEQ ID NO: 195833 - DNA, 22 bp, Artificial Sequence
  Synthetic oligonucleotide; TTC chr2 60465104 60465125 60465121 60465126 +
accatataatctgtatttcact

SEQ ID NO: 195834 - DNA, 22 bp, Artificial Sequence
  Synthetic oligonucleotide; CTG chr2 60465117 60465138 60465134 60465139 +
tatttcactcagctcatgccgg

SEQ ID NO: 195835 - DNA, 22 bp, Artificial Sequence
  Synthetic oligonucleotide; TTT chr2 60465122 60465143 60465139 60465144 +
cactcagctcatgccggtgtac

SEQ ID NO: 195836 - DNA, 22 bp, Artificial Sequence
  Synthetic oligonucleotide; TTC chr2 60465123 60465144 60465140 60465145 +
actcagctcatgccggtgtacc

SEQ ID NO: 195837 - DNA, 22 bp, Artificial Sequence
  Synthetic oligonucleotide; CTC chr2 60465127 60465148 60465144 60465149 +
agctcatgccggtgtaccatat

SEQ ID NO: 195838 - DNA, 22 bp, Artificial Sequence
  Synthetic oligonucleotide; CTC chr2 60465132 60465153 60465149 60465154 +
atgccggtgtaccatattatat

SEQ ID NO: 195839 - DNA, 22 bp, Artificial Sequence
  Synthetic oligonucleotide; TTA chr2 60465151 60465172 60465168 60465173 +
tattacagtgctcacagattct

SEQ ID NO: 195840 - DNA, 22 bp, Artificial Sequence
  Synthetic oligonucleotide; TTA chr2 60465156 60465177 60465173 60465178 +
cagtgctcacagattctaaatt

SEQ ID NO: 195841 - DNA, 22 bp, Artificial Sequence
  Synthetic oligonucleotide; CTC chr2 60465164 60465185 60465181 60465186 +
acagattctaaattcctaaact

SEQ ID NO: 195842 - DNA, 22 bp, Artificial Sequence
  Synthetic oligonucleotide; TTC chr2 60465172 60465193 60465189 60465194 +
taaattcctaaactgcagtcat

SEQ ID NO: 195843 - DNA, 22 bp, Artificial Sequence
  Synthetic oligonucleotide; CTA chr2 60465174 60465195 60465191 60465196 +
aattcctaaactgcagtcatca

SEQ ID NO: 195844 - DNA, 22 bp, Artificial Sequence
  Synthetic oligonucleotide; TTC chr2 60465179 60465200 60465196 60465201 +
ctaaactgcagtcatcaataaa

SEQ ID NO: 195845 - DNA, 22 bp, Artificial Sequence
  Synthetic oligonucleotide; CTA chr2 60465182 60465203 60465199 60465204 +
aactgcagtcatcaataaatgt

SEQ ID NO: 195846 - DNA, 22 bp, Artificial Sequence
  Synthetic oligonucleotide; CTG chr2 60465187 60465208 60465204 60465209 +
cagtcatcaataaatgtgttac

SEQ ID NO: 195847 - DNA, 22 bp, Artificial Sequence
  Synthetic oligonucleotide; TTA chr2 60465208 60465229 60465225 60465230 +
cttgccataatttgtgaaatta

SEQ ID NO: 195848 - DNA, 22 bp, Artificial Sequence
  Synthetic oligonucleotide; CTT chr2 60465211 60465232 60465228 60465233 +
gccataatttgtgaaattactt

SEQ ID NO: 195849 - DNA, 22 bp, Artificial Sequence
  Synthetic oligonucleotide; TTG chr2 60465212 60465233 60465229 60465234 +
ccataatttgtgaaattacttt

SEQ ID NO: 195850 - DNA, 22 bp, Artificial Sequence
  Synthetic oligonucleotide; TTT chr2 60465221 60465242 60465238 60465243 +
gtgaaattactttgttcataac

SEQ ID NO: 195851 - DNA, 22 bp, Artificial Sequence
  Synthetic oligonucleotide; TTG chr2 60465222 60465243 60465239 60465244 +
tgaaattactttgttcataaca

SEQ ID NO: 195852 - DNA, 22 bp, Artificial Sequence
  Synthetic oligonucleotide; TTA chr2 60465230 60465251 60465247 60465252 +
ctttgttcataacatctttgat

SEQ ID NO: 195853 - DNA, 22 bp, Artificial Sequence
  Synthetic oligonucleotide; CTT chr2 60465233 60465254 60465250 60465255 +
tgttcataacatctttgatgat

SEQ ID NO: 195854 - DNA, 22 bp, Artificial Sequence
  Synthetic oligonucleotide; TTT chr2 60465234 60465255 60465251 60465256 +
gttcataacatctttgatgatt

SEQ ID NO: 195855 - DNA, 22 bp, Artificial Sequence
  Synthetic oligonucleotide; TTG chr2 60465235 60465256 60465252 60465257 +
ttcataacatctttgatgattt

SEQ ID NO: 195856 - DNA, 22 bp, Artificial Sequence
  Synthetic oligonucleotide; TTC chr2 60465238 60465259 60465255 60465260 +
ataacatctttgatgatttaga

SEQ ID NO: 195857 - DNA, 22 bp, Artificial Sequence
  Synthetic oligonucleotide; CTT chr2 60465248 60465269 60465265 60465270 +
tgatgatttagaaagactggaa

SEQ ID NO: 195858 - DNA, 22 bp, Artificial Sequence
  Synthetic oligonucleotide; TTT chr2 60465249 60465270 60465266 60465271 +
gatgatttagaaagactggaat

SEQ ID NO: 195859 - DNA, 22 bp, Artificial Sequence
  Synthetic oligonucleotide; TTG chr2 60465250 60465271 60465267 60465272 +
atgatttagaaagactggaatt

SEQ ID NO: 195860 - DNA, 22 bp, Artificial Sequence
  Synthetic oligonucleotide; TTT chr2 60465257 60465278 60465274 60465279 +
agaaagactggaattgatttcc

SEQ ID NO: 195861 - DNA, 22 bp, Artificial Sequence
  Synthetic oligonucleotide; TTA chr2 60465258 60465279 60465275 60465280 +
gaaagactggaattgatttcct

SEQ ID NO: 195862 - DNA, 22 bp, Artificial Sequence
  Synthetic oligonucleotide; CTG chr2 60465267 60465288 60465284 60465289 +
gaattgatttcctgtgtggcaa

SEQ ID NO: 195863 - DNA, 22 bp, Artificial Sequence
  Synthetic oligonucleotide; TTG chr2 60465273 60465294 60465290 60465295 +
atttcctgtgtggcaaaattag

SEQ ID NO: 195864 - DNA, 22 bp, Artificial Sequence
  Synthetic oligonucleotide; TTT chr2 60465277 60465298 60465294 60465299 +
cctgtgtggcaaaattagggct

SEQ ID NO: 195865 - DNA, 22 bp, Artificial Sequence
  Synthetic oligonucleotide; TTC chr2 60465278 60465299 60465295 60465300 +
ctgtgtggcaaaattagggcta

SEQ ID NO: 195866 - DNA, 22 bp, Artificial Sequence
  Synthetic oligonucleotide; CTG chr2 60465281 60465302 60465298 60465303 +
tgtggcaaaattagggctacat

SEQ ID NO: 195867 - DNA, 22 bp, Artificial Sequence
  Synthetic oligonucleotide; TTA chr2 60465294 60465315 60465311 60465316 +
gggctacattgatttattgatg

SEQ ID NO: 195868 - DNA, 22 bp, Artificial Sequence
  Synthetic oligonucleotide; CTA chr2 60465300 60465321 60465317 60465322 +
cattgatttattgatgtgtaaa

SEQ ID NO: 195869 - DNA, 22 bp, Artificial Sequence
  Synthetic oligonucleotide; TTG chr2 60465305 60465326 60465322 60465327 +
atttattgatgtgtaaaatata

SEQ ID NO: 195870 - DNA, 22 bp, Artificial Sequence
  Synthetic oligonucleotide; TTT chr2 60465309 60465330 60465326 60465331 +
attgatgtgtaaaatataataa

SEQ ID NO: 195871 - DNA, 22 bp, Artificial Sequence
  Synthetic oligonucleotide; TTA chr2 60465310 60465331 60465327 60465332 +
ttgatgtgtaaaatataataat

SEQ ID NO: 195872 - DNA, 22 bp, Artificial Sequence
  Synthetic oligonucleotide; TTG chr2 60465313 60465334 60465330 60465335 +
atgtgtaaaatataataatatt

SEQ ID NO: 195873 - DNA, 22 bp, Artificial Sequence
  Synthetic oligonucleotide; TTC chr2 60465336 60465357 60465353 60465358 +
ttcatttactctgatgaaaatc

SEQ ID NO: 195874 - DNA, 22 bp, Artificial Sequence
  Synthetic oligonucleotide; CTT chr2 60465338 60465359 60465355 60465360 +
catttactctgatgaaaatcaa

SEQ ID NO: 195875 - DNA, 22 bp, Artificial Sequence
  Synthetic oligonucleotide; TTC chr2 60465339 60465360 60465356 60465361 +
atttactctgatgaaaatcaac

SEQ ID NO: 195876 - DNA, 22 bp, Artificial Sequence
  Synthetic oligonucleotide; TTT chr2 60465343 60465364 60465360 60465365 +
actctgatgaaaatcaacttct

SEQ ID NO: 195877 - DNA, 22 bp, Artificial Sequence
  Synthetic oligonucleotide; TTA chr2 60465344 60465365 60465361 60465366 +
ctctgatgaaaatcaacttctc

SEQ ID NO: 195878 - DNA, 22 bp, Artificial Sequence
  Synthetic oligonucleotide; CTC chr2 60465347 60465368 60465364 60465369 +
tgatgaaaatcaacttctcaat

SEQ ID NO: 195879 - DNA, 22 bp, Artificial Sequence
  Synthetic oligonucleotide; CTG chr2 60465349 60465370 60465366 60465371 +
atgaaaatcaacttctcaattt

SEQ ID NO: 195880 - DNA, 22 bp, Artificial Sequence
  Synthetic oligonucleotide; CTT chr2 60465363 60465384 60465380 60465385 +
ctcaatttgagagcctcattgg

SEQ ID NO: 195881 - DNA, 22 bp, Artificial Sequence
  Synthetic oligonucleotide; TTC chr2 60465364 60465385 60465381 60465386 +
tcaatttgagagcctcattggg

SEQ ID NO: 195882 - DNA, 22 bp, Artificial Sequence
  Synthetic oligonucleotide; CTC chr2 60465366 60465387 60465383 60465388 +
aatttgagagcctcattgggca

SEQ ID NO: 195883 - DNA, 22 bp, Artificial Sequence
  Synthetic oligonucleotide; TTT chr2 60465371 60465392 60465388 60465393 +
gagagcctcattgggcatttac

SEQ ID NO: 195884 - DNA, 22 bp, Artificial Sequence
  Synthetic oligonucleotide; TTG chr2 60465372 60465393 60465389 60465394 +
agagcctcattgggcatttacg

SEQ ID NO: 195885 - DNA, 22 bp, Artificial Sequence
  Synthetic oligonucleotide; CTC chr2 60465380 60465401 60465397 60465402 +
attgggcatttacggggattgt

SEQ ID NO: 195886 - DNA, 22 bp, Artificial Sequence
  Synthetic oligonucleotide; TTG chr2 60465384 60465405 60465401 60465406 +
ggcatttacggggattgttttg

SEQ ID NO: 195887 - DNA, 22 bp, Artificial Sequence
  Synthetic oligonucleotide; TTT chr2 60465391 60465412 60465408 60465413 +
acggggattgttttgatttaga

SEQ ID NO: 195888 - DNA, 22 bp, Artificial Sequence
  Synthetic oligonucleotide; TTA chr2 60465392 60465413 60465409 60465414 +
cggggattgttttgatttagag

SEQ ID NO: 195889 - DNA, 22 bp, Artificial Sequence
  Synthetic oligonucleotide; TTG chr2 60465401 60465422 60465418 60465423 +
ttttgatttagagcaataaact

SEQ ID NO: 195890 - DNA, 22 bp, Artificial Sequence
  Synthetic oligonucleotide; TTT chr2 60465404 60465425 60465421 60465426 +
tgatttagagcaataaactgac

SEQ ID NO: 195891 - DNA, 22 bp, Artificial Sequence
  Synthetic oligonucleotide; TTT chr2 60465405 60465426 60465422 60465427 +
gatttagagcaataaactgaca

SEQ ID NO: 195892 - DNA, 22 bp, Artificial Sequence
  Synthetic oligonucleotide; TTG chr2 60465406 60465427 60465423 60465428 +
atttagagcaataaactgacac

SEQ ID NO: 195893 - DNA, 22 bp, Artificial Sequence
  Synthetic oligonucleotide; TTT chr2 60465410 60465431 60465427 60465432 +
agagcaataaactgacacctgg

SEQ ID NO: 195894 - DNA, 22 bp, Artificial Sequence
  Synthetic oligonucleotide; TTA chr2 60465411 60465432 60465428 60465433 +
gagcaataaactgacacctggc

SEQ ID NO: 195895 - DNA, 22 bp, Artificial Sequence
  Synthetic oligonucleotide; CTG chr2 60465424 60465445 60465441 60465446 +
acacctggcccctaagcatagg

SEQ ID NO: 195896 - DNA, 22 bp, Artificial Sequence
  Synthetic oligonucleotide; CTG chr2 60465431 60465452 60465448 60465453 +
gcccctaagcataggaacttga

SEQ ID NO: 195897 - DNA, 22 bp, Artificial Sequence
  Synthetic oligonucleotide; CTA chr2 60465438 60465459 60465455 60465460 +
agcataggaacttgagacatca

SEQ ID NO: 195898 - DNA, 22 bp, Artificial Sequence
  Synthetic oligonucleotide; CTT chr2 60465451 60465472 60465468 60465473 +
gagacatcaaaagggttaaaat

SEQ ID NO: 195899 - DNA, 22 bp, Artificial Sequence
  Synthetic oligonucleotide; TTG chr2 60465452 60465473 60465469 60465474 +
agacatcaaaagggttaaaatc

SEQ ID NO: 195900 - DNA, 22 bp, Artificial Sequence
  Synthetic oligonucleotide; TTA chr2 60465469 60465490 60465486 60465491 +
aaatcagctattagcccaccta

SEQ ID NO: 195901 - DNA, 22 bp, Artificial Sequence
  Synthetic oligonucleotide; CTA chr2 60465479 60465500 60465496 60465501 +
ttagcccacctactggctttta

SEQ ID NO: 195902 - DNA, 22 bp, Artificial Sequence
  Synthetic oligonucleotide; TTA chr2 60465482 60465503 60465499 60465504 +
gcccacctactggcttttattt

SEQ ID NO: 195903 - DNA, 22 bp, Artificial Sequence
  Synthetic oligonucleotide; CTA chr2 60465491 60465512 60465508 60465513 +
ctggcttttattttatttcatt

SEQ ID NO: 195904 - DNA, 22 bp, Artificial Sequence
  Synthetic oligonucleotide; CTG chr2 60465494 60465515 60465511 60465516 +
gcttttattttatttcatttta

SEQ ID NO: 195905 - DNA, 22 bp, Artificial Sequence
  Synthetic oligonucleotide; CTT chr2 60465498 60465519 60465515 60465520 +
ttattttatttcattttacttt

SEQ ID NO: 195906 - DNA, 22 bp, Artificial Sequence
  Synthetic oligonucleotide; TTT chr2 60465499 60465520 60465516 60465521 +
tattttatttcattttacttta

SEQ ID NO: 195907 - DNA, 22 bp, Artificial Sequence
  Synthetic oligonucleotide; TTT chr2 60465500 60465521 60465517 60465522 +
attttatttcattttactttat

SEQ ID NO: 195908 - DNA, 22 bp, Artificial Sequence
  Synthetic oligonucleotide; TTA chr2 60465501 60465522 60465518 60465523 +
ttttatttcattttactttatg

SEQ ID NO: 195909 - DNA, 22 bp, Artificial Sequence
  Synthetic oligonucleotide; TTT chr2 60465504 60465525 60465521 60465526 +
tatttcattttactttatggga

SEQ ID NO: 195910 - DNA, 22 bp, Artificial Sequence
  Synthetic oligonucleotide; TTT chr2 60465505 60465526 60465522 60465527 +
atttcattttactttatgggaa

SEQ ID NO: 195911 - DNA, 22 bp, Artificial Sequence
  Synthetic oligonucleotide; TTA chr2 60465506 60465527 60465523 60465528 +
tttcattttactttatgggaag

SEQ ID NO: 195912 - DNA, 22 bp, Artificial Sequence
  Synthetic oligonucleotide; TTT chr2 60465509 60465530 60465526 60465531 +
cattttactttatgggaaggaa

SEQ ID NO: 195913 - DNA, 22 bp, Artificial Sequence
  Synthetic oligonucleotide; TTC chr2 60465510 60465531 60465527 60465532 +
attttactttatgggaaggaat

SEQ ID NO: 195914 - DNA, 22 bp, Artificial Sequence
  Synthetic oligonucleotide; TTT chr2 60465514 60465535 60465531 60465536 +
tactttatgggaaggaatgacc

SEQ ID NO: 195915 - DNA, 22 bp, Artificial Sequence
  Synthetic oligonucleotide; TTT chr2 60465515 60465536 60465532 60465537 +
actttatgggaaggaatgaccc

SEQ ID NO: 195916 - DNA, 22 bp, Artificial Sequence
  Synthetic oligonucleotide; TTA chr2 60465516 60465537 60465533 60465538 +
ctttatgggaaggaatgacccc

SEQ ID NO: 195917 - DNA, 22 bp, Artificial Sequence
  Synthetic oligonucleotide; CTT chr2 60465519 60465540 60465536 60465541 +
tatgggaaggaatgacccccat

SEQ ID NO: 195918 - DNA, 22 bp, Artificial Sequence
  Synthetic oligonucleotide; TTT chr2 60465520 60465541 60465537 60465542 +
atgggaaggaatgacccccatt

SEQ ID NO: 195919 - DNA, 22 bp, Artificial Sequence
  Synthetic oligonucleotide; TTA chr2 60465521 60465542 60465538 60465543 +
tgggaaggaatgacccccattt

SEQ ID NO: 195920 - DNA, 22 bp, Artificial Sequence
  Synthetic oligonucleotide; TTT chr2 60465543 60465564 60465560 60465565 +
ctagtatgtcaccaatgtgaaa

SEQ ID NO: 195921 - DNA, 22 bp, Artificial Sequence
  Synthetic oligonucleotide; TTC chr2 60465544 60465565 60465561 60465566 +
tagtatgtcaccaatgtgaaaa

SEQ ID NO: 195922 - DNA, 22 bp, Artificial Sequence
  Synthetic oligonucleotide; CTA chr2 60465546 60465567 60465563 60465568 +
gtatgtcaccaatgtgaaaaag

SEQ ID NO: 195923 - DNA, 22 bp, Artificial Sequence
  Synthetic oligonucleotide; CTA chr2 60465580 60465601 60465597 60465602 +
agcctcaagattcagaagaaca

SEQ ID NO: 195924 - DNA, 22 bp, Artificial Sequence
  Synthetic oligonucleotide; CTC chr2 60465586 60465607 60465603 60465608 +
aagattcagaagaacaaggagg

SEQ ID NO: 195925 - DNA, 22 bp, Artificial Sequence
  Synthetic oligonucleotide; TTC chr2 60465593 60465614 60465610 60465615 +
agaagaacaaggaggtctgaga

SEQ ID NO: 195926 - DNA, 22 bp, Artificial Sequence
  Synthetic oligonucleotide; CTG chr2 60465612 60465633 60465629 60465634 +
agactggaggcctagctctatt

SEQ ID NO: 195927 - DNA, 22 bp, Artificial Sequence
  Synthetic oligonucleotide; CTG chr2 60465618 60465639 60465635 60465640 +
gaggcctagctctattatccac

SEQ ID NO: 195928 - DNA, 22 bp, Artificial Sequence
  Synthetic oligonucleotide; CTA chr2 60465626 60465647 60465643 60465648 +
gctctattatccactagattgt

SEQ ID NO: 195929 - DNA, 22 bp, Artificial Sequence
  Synthetic oligonucleotide; CTC chr2 60465630 60465651 60465647 60465652 +
tattatccactagattgtaact

SEQ ID NO: 195930 - DNA, 22 bp, Artificial Sequence
  Synthetic oligonucleotide; CTA chr2 60465632 60465653 60465649 60465654 +
ttatccactagattgtaactct

SEQ ID NO: 195931 - DNA, 22 bp, Artificial Sequence
  Synthetic oligonucleotide; TTA chr2 60465635 60465656 60465652 60465657 +
tccactagattgtaactctggg

SEQ ID NO: 195932 - DNA, 22 bp, Artificial Sequence
  Synthetic oligonucleotide; CTA chr2 60465642 60465663 60465659 60465664 +
gattgtaactctgggatagtca

SEQ ID NO: 195933 - DNA, 22 bp, Artificial Sequence
  Synthetic oligonucleotide; TTG chr2 60465647 60465668 60465664 60465669 +
taactctgggatagtcatttga

SEQ ID NO: 195934 - DNA, 22 bp, Artificial Sequence
  Synthetic oligonucleotide; CTC chr2 60465653 60465674 60465670 60465675 +
tgggatagtcatttgatttctc

SEQ ID NO: 195935 - DNA, 22 bp, Artificial Sequence
  Synthetic oligonucleotide; CTG chr2 60465655 60465676 60465672 60465677 +
ggatagtcatttgatttctctg

SEQ ID NO: 195936 - DNA, 22 bp, Artificial Sequence
  Synthetic oligonucleotide; TTT chr2 60465667 60465688 60465684 60465689 +
gatttctctgagtcttggaatt

SEQ ID NO: 195937 - DNA, 22 bp, Artificial Sequence
  Synthetic oligonucleotide; TTG chr2 60465668 60465689 60465685 60465690 +
atttctctgagtcttggaattc

SEQ ID NO: 195938 - DNA, 22 bp, Artificial Sequence
  Synthetic oligonucleotide; TTT chr2 60465672 60465693 60465689 60465694 +
ctctgagtcttggaattcctat

SEQ ID NO: 195939 - DNA, 22 bp, Artificial Sequence
  Synthetic oligonucleotide; TTC chr2 60465673 60465694 60465690 60465695 +
tctgagtcttggaattcctatc

SEQ ID NO: 195940 - DNA, 22 bp, Artificial Sequence
  Synthetic oligonucleotide; CTC chr2 60465675 60465696 60465692 60465697 +
tgagtcttggaattcctatctg

SEQ ID NO: 195941 - DNA, 22 bp, Artificial Sequence
  Synthetic oligonucleotide; CTG chr2 60465677 60465698 60465694 60465699 +
agtcttggaattcctatctgta

SEQ ID NO: 195942 - DNA, 22 bp, Artificial Sequence
  Synthetic oligonucleotide; CTT chr2 60465683 60465704 60465700 60465705 +
ggaattcctatctgtaaaatga

SEQ ID NO: 195943 - DNA, 22 bp, Artificial Sequence
  Synthetic oligonucleotide; TTG chr2 60465684 60465705 60465701 60465706 +
gaattcctatctgtaaaatgag

SEQ ID NO: 195944 - DNA, 22 bp, Artificial Sequence
  Synthetic oligonucleotide; TTC chr2 60465690 60465711 60465707 60465712 +
ctatctgtaaaatgagcataaa

SEQ ID NO: 195945 - DNA, 22 bp, Artificial Sequence
  Synthetic oligonucleotide; CTA chr2 60465693 60465714 60465710 60465715 +
tctgtaaaatgagcataaaaac

SEQ ID NO: 195946 - DNA, 22 bp, Artificial Sequence
  Synthetic oligonucleotide; CTG chr2 60465697 60465718 60465714 60465719 +
taaaatgagcataaaaacagta

SEQ ID NO: 195947 - DNA, 22 bp, Artificial Sequence
  Synthetic oligonucleotide; CTG chr2 60465723 60465744 60465740 60465745 +
taagaattgttgggaagttcaa

SEQ ID NO: 195948 - DNA, 22 bp, Artificial Sequence
  Synthetic oligonucleotide; TTG chr2 60465732 60465753 60465749 60465754 +
ttgggaagttcaaatgacagaa

SEQ ID NO: 195949 - DNA, 22 bp, Artificial Sequence
  Synthetic oligonucleotide; TTG chr2 60465735 60465756 60465752 60465757 +
ggaagttcaaatgacagaagta

SEQ ID NO: 195950 - DNA, 22 bp, Artificial Sequence
  Synthetic oligonucleotide; TTC chr2 60465743 60465764 60465760 60465765 +
aaatgacagaagtatataaaag

SEQ ID NO: 195951 - DNA, 22 bp, Artificial Sequence
  Synthetic oligonucleotide; CTC chr2 60465770 60465791 60465787 60465792 +
tgtaaactatcaggtcgaatgt

SEQ ID NO: 195952 - DNA, 22 bp, Artificial Sequence
  Synthetic oligonucleotide; CTG chr2 60465772 60465793 60465789 60465794 +
taaactatcaggtcgaatgtga

SEQ ID NO: 195953 - DNA, 22 bp, Artificial Sequence
  Synthetic oligonucleotide; CTA chr2 60465779 60465800 60465796 60465801 +
tcaggtcgaatgtgaatgtgag

SEQ ID NO: 195954 - DNA, 22 bp, Artificial Sequence
  Synthetic oligonucleotide; TTT chr2 60465804 60465825 60465821 60465826 +
tcattactaccaggggtgatta

SEQ ID NO: 195955 - DNA, 22 bp, Artificial Sequence
  Synthetic oligonucleotide; TTT chr2 60465805 60465826 60465822 60465827 +
cattactaccaggggtgattaa

SEQ ID NO: 195956 - DNA, 22 bp, Artificial Sequence
  Synthetic oligonucleotide; TTC chr2 60465806 60465827 60465823 60465828 +
attactaccaggggtgattaat

SEQ ID NO: 195957 - DNA, 22 bp, Artificial Sequence
  Synthetic oligonucleotide; TTA chr2 60465810 60465831 60465827 60465832 +
ctaccaggggtgattaattact

SEQ ID NO: 195958 - DNA, 22 bp, Artificial Sequence
  Synthetic oligonucleotide; CTA chr2 60465813 60465834 60465830 60465835 +
ccaggggtgattaattactgag

SEQ ID NO: 195959 - DNA, 22 bp, Artificial Sequence
  Synthetic oligonucleotide; TTA chr2 60465826 60465847 60465843 60465848 +
attactgagggtaatgactaac

SEQ ID NO: 195960 - DNA, 22 bp, Artificial Sequence
  Synthetic oligonucleotide; TTA chr2 60465830 60465851 60465847 60465852 +
ctgagggtaatgactaaccaca

SEQ ID NO: 195961 - DNA, 22 bp, Artificial Sequence
  Synthetic oligonucleotide; CTG chr2 60465833 60465854 60465850 60465855 +
agggtaatgactaaccacatta

SEQ ID NO: 195962 - DNA, 22 bp, Artificial Sequence
  Synthetic oligonucleotide; CTA chr2 60465846 60465867 60465863 60465868 +
accacattacacaccccgaacg

SEQ ID NO: 195963 - DNA, 22 bp, Artificial Sequence
  Synthetic oligonucleotide; TTA chr2 60465855 60465876 60465872 60465877 +
cacaccccgaacggcttccaga

SEQ ID NO: 195964 - DNA, 22 bp, Artificial Sequence
  Synthetic oligonucleotide; CTT chr2 60465872 60465893 60465889 60465894 +
ccagaggaaggtcccagtccag

SEQ ID NO: 195965 - DNA, 22 bp, Artificial Sequence
  Synthetic oligonucleotide; TTC chr2 60465873 60465894 60465890 60465895 +
cagaggaaggtcccagtccagg

SEQ ID NO: 195966 - DNA, 22 bp, Artificial Sequence
  Synthetic oligonucleotide; CTT chr2 60465899 60465920 60465916 60465921 +
aacccaggccaaaaggaggctc

SEQ ID NO: 195967 - DNA, 22 bp, Artificial Sequence
  Synthetic oligonucleotide; TTA chr2 60465900 60465921 60465917 60465922 +
acccaggccaaaaggaggctct

SEQ ID NO: 195968 - DNA, 22 bp, Artificial Sequence
  Synthetic oligonucleotide; CTC chr2 60465921 60465942 60465938 60465943 +
tagttaaagagcaggggtgact

SEQ ID NO: 195969 - DNA, 22 bp, Artificial Sequence
  Synthetic oligonucleotide; CTA chr2 60465923 60465944 60465940 60465945 +
gttaaagagcaggggtgactgg

SEQ ID NO: 195970 - DNA, 22 bp, Artificial Sequence
  Synthetic oligonucleotide; TTA chr2 60465927 60465948 60465944 60465949 +
aagagcaggggtgactggcaca

SEQ ID NO: 195971 - DNA, 22 bp, Artificial Sequence
  Synthetic oligonucleotide; CTG chr2 60465944 60465965 60465961 60465966 +
gcacacagcagagtggccacag

SEQ ID NO: 195972 - DNA, 22 bp, Artificial Sequence
  Synthetic oligonucleotide; CTA chr2 60465976 60465997 60465993 60465998 +
tgagctctggaagccaggggca

SEQ ID NO: 195973 - DNA, 22 bp, Artificial Sequence
  Synthetic oligonucleotide; CTC chr2 60465983 60466004 60466000 60466005 +
tggaagccaggggcagcaggtt

SEQ ID NO: 195974 - DNA, 22 bp, Artificial Sequence
  Synthetic oligonucleotide; CTG chr2 60465985 60466006 60466002 60466007 +
gaagccaggggcagcaggttaa

SEQ ID NO: 195975 - DNA, 22 bp, Artificial Sequence
  Synthetic oligonucleotide; TTA chr2 60466006 60466027 60466023 60466028 +
atgccgccaagtggaatgggca

SEQ ID NO: 195976 - DNA, 22 bp, Artificial Sequence
  Synthetic oligonucleotide; TTT chr2 60466036 60466057 60466053 60466058 +
gttctagagctttctggacccc

SEQ ID NO: 195977 - DNA, 22 bp, Artificial Sequence
  Synthetic oligonucleotide; TTG chr2 60466037 60466058 60466054 60466059 +
ttctagagctttctggaccccc

SEQ ID NO: 195978 - DNA, 22 bp, Artificial Sequence
  Synthetic oligonucleotide; TTC chr2 60466040 60466061 60466057 60466062 +
tagagctttctggacccccaca

SEQ ID NO: 195979 - DNA, 22 bp, Artificial Sequence
  Synthetic oligonucleotide; CTA chr2 60466042 60466063 60466059 60466064 +
gagctttctggacccccacaac

SEQ ID NO: 195980 - DNA, 22 bp, Artificial Sequence
  Synthetic oligonucleotide; CTT chr2 60466048 60466069 60466065 60466070 +
tctggacccccacaacccactt

SEQ ID NO: 195981 - DNA, 22 bp, Artificial Sequence
  Synthetic oligonucleotide; TTT chr2 60466049 60466070 60466066 60466071 +
ctggacccccacaacccacttc

SEQ ID NO: 195982 - DNA, 22 bp, Artificial Sequence
  Synthetic oligonucleotide; TTC chr2 60466050 60466071 60466067 60466072 +
tggacccccacaacccacttcc

SEQ ID NO: 195983 - DNA, 22 bp, Artificial Sequence
  Synthetic oligonucleotide; CTG chr2 60466052 60466073 60466069 60466074 +
gacccccacaacccacttccac

SEQ ID NO: 195984 - DNA, 22 bp, Artificial Sequence
  Synthetic oligonucleotide; CTT chr2 60466070 60466091 60466087 60466092 +
ccacataccttgttctggtcac

SEQ ID NO: 195985 - DNA, 22 bp, Artificial Sequence
  Synthetic oligonucleotide; TTC chr2 60466071 60466092 60466088 60466093 +
cacataccttgttctggtcact

SEQ ID NO: 195986 - DNA, 22 bp, Artificial Sequence
  Synthetic oligonucleotide; CTT chr2 60466081 60466102 60466098 60466103 +
gttctggtcactcctaaattgg

SEQ ID NO: 195987 - DNA, 22 bp, Artificial Sequence
  Synthetic oligonucleotide; TTG chr2 60466082 60466103 60466099 60466104 +
ttctggtcactcctaaattggt

SEQ ID NO: 195988 - DNA, 22 bp, Artificial Sequence
  Synthetic oligonucleotide; TTC chr2 60466085 60466106 60466102 60466107 +
tggtcactcctaaattggtcct

SEQ ID NO: 195989 - DNA, 22 bp, Artificial Sequence
  Synthetic oligonucleotide; CTG chr2 60466087 60466108 60466104 60466109 +
gtcactcctaaattggtcctgc

SEQ ID NO: 195990 - DNA, 22 bp, Artificial Sequence
  Synthetic oligonucleotide; CTC chr2 60466094 60466115 60466111 60466116 +
ctaaattggtcctgccagcagg

SEQ ID NO: 195991 - DNA, 22 bp, Artificial Sequence
  Synthetic oligonucleotide; CTA chr2 60466097 60466118 60466114 60466119 +
aattggtcctgccagcaggggc

SEQ ID NO: 195992 - DNA, 22 bp, Artificial Sequence
  Synthetic oligonucleotide; TTG chr2 60466102 60466123 60466119 60466124 +
gtcctgccagcaggggcaccag

SEQ ID NO: 195993 - DNA, 22 bp, Artificial Sequence
  Synthetic oligonucleotide; CTG chr2 60466108 60466129 60466125 60466130 +
ccagcaggggcaccagcaaact

SEQ ID NO: 195994 - DNA, 22 bp, Artificial Sequence
  Synthetic oligonucleotide; CTA chr2 60466131 60466152 60466148 60466153 +
tgtaccctccctttgtgggaag

SEQ ID NO: 195995 - DNA, 22 bp, Artificial Sequence
  Synthetic oligonucleotide; CTC chr2 60466140 60466161 60466157 60466162 +
cctttgtgggaaggtgggagag

SEQ ID NO: 195996 - DNA, 22 bp, Artificial Sequence
  Synthetic oligonucleotide; CTT chr2 60466144 60466165 60466161 60466166 +
tgtgggaaggtgggagaggaca

SEQ ID NO: 195997 - DNA, 22 bp, Artificial Sequence
  Synthetic oligonucleotide; TTT chr2 60466145 60466166 60466162 60466167 +
gtgggaaggtgggagaggacag

SEQ ID NO: 195998 - DNA, 22 bp, Artificial Sequence
  Synthetic oligonucleotide; TTG chr2 60466146 60466167 60466163 60466168 +
tgggaaggtgggagaggacagg

SEQ ID NO: 195999 - DNA, 22 bp, Artificial Sequence
  Synthetic oligonucleotide; TTC chr2 60466173 60466194 60466190 60466195 +
cctatcaagctcagactttcct

SEQ ID NO: 196000 - DNA, 22 bp, Artificial Sequence
  Synthetic oligonucleotide; CTA chr2 60466177 60466198 60466194 60466199 +
tcaagctcagactttcctacca

SEQ ID NO: 196001 - DNA, 22 bp, Artificial Sequence
  Synthetic oligonucleotide; CTC chr2 60466185 60466206 60466202 60466207 +
agactttcctaccagtcaaatc

SEQ ID NO: 196002 - DNA, 22 bp, Artificial Sequence
  Synthetic oligonucleotide; CTT chr2 60466191 60466212 60466208 60466213 +
tcctaccagtcaaatcaaactc

SEQ ID NO: 196003 - DNA, 22 bp, Artificial Sequence
  Synthetic oligonucleotide; TTT chr2 60466192 60466213 60466209 60466214 +
cctaccagtcaaatcaaactcc

SEQ ID NO: 196004 - DNA, 22 bp, Artificial Sequence
  Synthetic oligonucleotide; TTC chr2 60466193 60466214 60466210 60466215 +
ctaccagtcaaatcaaactccc

SEQ ID NO: 196005 - DNA, 22 bp, Artificial Sequence
  Synthetic oligonucleotide; CTA chr2 60466196 60466217 60466213 60466218 +
ccagtcaaatcaaactcccagc

SEQ ID NO: 196006 - DNA, 22 bp, Artificial Sequence
  Synthetic oligonucleotide; CTC chr2 60466213 60466234 60466230 60466235 +
ccagccctcaggaagaccaggc

SEQ ID NO: 196007 - DNA, 22 bp, Artificial Sequence
  Synthetic oligonucleotide; CTC chr2 60466222 60466243 60466239 60466244 +
aggaagaccaggctgaagaccg

SEQ ID NO: 196008 - DNA, 22 bp, Artificial Sequence
  Synthetic oligonucleotide; CTG chr2 60466237 60466258 60466254 60466259 +
aagaccgagaactatgtttccc

SEQ ID NO: 196009 - DNA, 22 bp, Artificial Sequence
  Synthetic oligonucleotide; CTA chr2 60466251 60466272 60466268 60466273 +
tgtttccctggcaacagccctt

SEQ ID NO: 196010 - DNA, 22 bp, Artificial Sequence
  Synthetic oligonucleotide; TTT chr2 60466256 60466277 60466273 60466278 +
ccctggcaacagcccttggcct

SEQ ID NO: 196011 - DNA, 22 bp, Artificial Sequence
  Synthetic oligonucleotide; TTC chr2 60466257 60466278 60466274 60466279 +
cctggcaacagcccttggcctc

SEQ ID NO: 196012 - DNA, 22 bp, Artificial Sequence
  Synthetic oligonucleotide; CTG chr2 60466261 60466282 60466278 60466283 +
gcaacagcccttggcctctcaa

SEQ ID NO: 196013 - DNA, 22 bp, Artificial Sequence
  Synthetic oligonucleotide; CTT chr2 60466273 60466294 60466290 60466295 +
ggcctctcaactccaccctcct

SEQ ID NO: 196014 - DNA, 22 bp, Artificial Sequence
  Synthetic oligonucleotide; TTG chr2 60466274 60466295 60466291 60466296 +
gcctctcaactccaccctcctc

SEQ ID NO: 196015 - DNA, 22 bp, Artificial Sequence
  Synthetic oligonucleotide; CTC chr2 60466279 60466300 60466296 60466301 +
tcaactccaccctcctctgaac

SEQ ID NO: 196016 - DNA, 22 bp, Artificial Sequence
  Synthetic oligonucleotide; CTC chr2 60466281 60466302 60466298 60466303 +
aactccaccctcctctgaactg

SEQ ID NO: 196017 - DNA, 22 bp, Artificial Sequence
  Synthetic oligonucleotide; CTC chr2 60466286 60466307 60466303 60466308 +
caccctcctctgaactgctcaa

SEQ ID NO: 196018 - DNA, 22 bp, Artificial Sequence
  Synthetic oligonucleotide; CTC chr2 60466293 60466314 60466310 60466315 +
ctctgaactgctcaactccctt

SEQ ID NO: 196019 - DNA, 22 bp, Artificial Sequence
  Synthetic oligonucleotide; CTC chr2 60466296 60466317 60466313 60466318 +
tgaactgctcaactcccttcta

SEQ ID NO: 196020 - DNA, 22 bp, Artificial Sequence
  Synthetic oligonucleotide; CTG chr2 60466298 60466319 60466315 60466320 +
aactgctcaactcccttctatc

SEQ ID NO: 196021 - DNA, 22 bp, Artificial Sequence
  Synthetic oligonucleotide; CTG chr2 60466303 60466324 60466320 60466325 +
ctcaactcccttctatcccttc

SEQ ID NO: 196022 - DNA, 22 bp, Artificial Sequence
  Synthetic oligonucleotide; CTC chr2 60466306 60466327 60466323 60466328 +
aactcccttctatcccttccct

SEQ ID NO: 196023 - DNA, 22 bp, Artificial Sequence
  Synthetic oligonucleotide; CTC chr2 60466311 60466332 60466328 60466333 +
ccttctatcccttccctccaaa

SEQ ID NO: 196024 - DNA, 22 bp, Artificial Sequence
  Synthetic oligonucleotide; CTT chr2 60466315 60466336 60466332 60466337 +
ctatcccttccctccaaaagtg

SEQ ID NO: 196025 - DNA, 22 bp, Artificial Sequence
  Synthetic oligonucleotide; TTC chr2 60466316 60466337 60466333 60466338 +
tatcccttccctccaaaagtgg

SEQ ID NO: 196026 - DNA, 22 bp, Artificial Sequence
  Synthetic oligonucleotide; CTA chr2 60466318 60466339 60466335 60466340 +
tcccttccctccaaaagtggct

SEQ ID NO: 196027 - DNA, 22 bp, Artificial Sequence
  Synthetic oligonucleotide; CTT chr2 60466324 60466345 60466341 60466346 +
ccctccaaaagtggctccgttt

SEQ ID NO: 196028 - DNA, 22 bp, Artificial Sequence
  Synthetic oligonucleotide; TTC chr2 60466325 60466346 60466342 60466347 +
cctccaaaagtggctccgtttc

SEQ ID NO: 196029 - DNA, 22 bp, Artificial Sequence
  Synthetic oligonucleotide; CTC chr2 60466329 60466350 60466346 60466351 +
caaaagtggctccgtttccaca

SEQ ID NO: 196030 - DNA, 22 bp, Artificial Sequence
  Synthetic oligonucleotide; CTC chr2 60466341 60466362 60466358 60466363 +
cgtttccacagccccatgcagg

SEQ ID NO: 196031 - DNA, 22 bp, Artificial Sequence
  Synthetic oligonucleotide; TTT chr2 60466346 60466367 60466363 60466368 +
ccacagccccatgcaggcccca

SEQ ID NO: 196032 - DNA, 22 bp, Artificial Sequence
  Synthetic oligonucleotide; TTC chr2 60466347 60466368 60466364 60466369 +
cacagccccatgcaggccccag

SEQ ID NO: 196033 - DNA, 22 bp, Artificial Sequence
  Synthetic oligonucleotide; CTC chr2 60466393 60466414 60466410 60466415 +
tccccacccagccagcatgcag

SEQ ID NO: 196034 - DNA, 22 bp, Artificial Sequence
  Synthetic oligonucleotide; CTC chr2 60466395 60466416 60466412 60466417 +
cccacccagccagcatgcaggg

SEQ ID NO: 196035 - DNA, 22 bp, Artificial Sequence
  Synthetic oligonucleotide; CTA chr2 60466421 60466442 60466438 60466443 +
gaaaccgtgagcccaacctcct

SEQ ID NO: 196036 - DNA, 22 bp, Artificial Sequence
  Synthetic oligonucleotide; CTC chr2 60466441 60466462 60466458 60466463 +
ctaaaccttctgcaatctgtga

SEQ ID NO: 196037 - DNA, 22 bp, Artificial Sequence
  Synthetic oligonucleotide; CTA chr2 60466444 60466465 60466461 60466466 +
aaccttctgcaatctgtgacct

SEQ ID NO: 196038 - DNA, 22 bp, Artificial Sequence
  Synthetic oligonucleotide; CTT chr2 60466450 60466471 60466467 60466472 +
ctgcaatctgtgacctaaccca

SEQ ID NO: 196039 - DNA, 22 bp, Artificial Sequence
  Synthetic oligonucleotide; TTC chr2 60466451 60466472 60466468 60466473 +
tgcaatctgtgacctaacccag

SEQ ID NO: 196040 - DNA, 22 bp, Artificial Sequence
  Synthetic oligonucleotide; CTG chr2 60466453 60466474 60466470 60466475 +
caatctgtgacctaacccaggc

SEQ ID NO: 196041 - DNA, 22 bp, Artificial Sequence
  Synthetic oligonucleotide; CTG chr2 60466460 60466481 60466477 60466482 +
tgacctaacccaggcttaggcc

SEQ ID NO: 196042 - DNA, 22 bp, Artificial Sequence
  Synthetic oligonucleotide; CTA chr2 60466467 60466488 60466484 60466489 +
acccaggcttaggcccagcttg

SEQ ID NO: 196043 - DNA, 22 bp, Artificial Sequence
  Synthetic oligonucleotide; CTT chr2 60466477 60466498 60466494 60466499 +
aggcccagcttgggggaaggga

SEQ ID NO: 196044 - DNA, 22 bp, Artificial Sequence
  Synthetic oligonucleotide; TTA chr2 60466478 60466499 60466495 60466500 +
ggcccagcttgggggaagggag

SEQ ID NO: 196045 - DNA, 22 bp, Artificial Sequence
  Synthetic oligonucleotide; CTT chr2 60466488 60466509 60466505 60466510 +
gggggaagggagcagatgaggt

SEQ ID NO: 196046 - DNA, 22 bp, Artificial Sequence
  Synthetic oligonucleotide; TTG chr2 60466489 60466510 60466506 60466511 +
ggggaagggagcagatgaggtg

SEQ ID NO: 196047 - DNA, 22 bp, Artificial Sequence
  Synthetic oligonucleotide; CTT chr2 60466514 60466535 60466531 60466536 +
ttaacccctgaaccacccagcc

SEQ ID NO: 196048 - DNA, 22 bp, Artificial Sequence
  Synthetic oligonucleotide; TTT chr2 60466515 60466536 60466532 60466537 +
taacccctgaaccacccagccc

SEQ ID NO: 196049 - DNA, 22 bp, Artificial Sequence
  Synthetic oligonucleotide; TTT chr2 60466516 60466537 60466533 60466538 +
aacccctgaaccacccagccct

SEQ ID NO: 196050 - DNA, 22 bp, Artificial Sequence
  Synthetic oligonucleotide; TTA chr2 60466517 60466538 60466534 60466539 +
acccctgaaccacccagccctc

SEQ ID NO: 196051 - DNA, 22 bp, Artificial Sequence
  Synthetic oligonucleotide; CTG chr2 60466524 60466545 60466541 60466546 +
aaccacccagccctcaggacct

SEQ ID NO: 196052 - DNA, 22 bp, Artificial Sequence
  Synthetic oligonucleotide; CTC chr2 60466539 60466560 60466556 60466561 +
aggacctgagggcttatgaaat

SEQ ID NO: 196053 - DNA, 22 bp, Artificial Sequence
  Synthetic oligonucleotide; CTG chr2 60466547 60466568 60466564 60466569 +
agggcttatgaaattcacacaa

SEQ ID NO: 196054 - DNA, 22 bp, Artificial Sequence
  Synthetic oligonucleotide; CTT chr2 60466554 60466575 60466571 60466576 +
atgaaattcacacaataactct

SEQ ID NO: 196055 - DNA, 22 bp, Artificial Sequence
  Synthetic oligonucleotide; TTA chr2 60466555 60466576 60466572 60466577 +
tgaaattcacacaataactctt

SEQ ID NO: 196056 - DNA, 22 bp, Artificial Sequence
  Synthetic oligonucleotide; TTC chr2 60466563 60466584 60466580 60466585 +
acacaataactctttgttacct

SEQ ID NO: 196057 - DNA, 22 bp, Artificial Sequence
  Synthetic oligonucleotide; CTC chr2 60466575 60466596 60466592 60466597 +
tttgttacctaggattacctag

SEQ ID NO: 196058 - DNA, 22 bp, Artificial Sequence
  Synthetic oligonucleotide; CTT chr2 60466577 60466598 60466594 60466599 +
tgttacctaggattacctagga

SEQ ID NO: 196059 - DNA, 22 bp, Artificial Sequence
  Synthetic oligonucleotide; TTT chr2 60466578 60466599 60466595 60466600 +
gttacctaggattacctaggag

SEQ ID NO: 196060 - DNA, 22 bp, Artificial Sequence
  Synthetic oligonucleotide; TTG chr2 60466579 60466600 60466596 60466601 +
ttacctaggattacctaggagt

SEQ ID NO: 196061 - DNA, 22 bp, Artificial Sequence
  Synthetic oligonucleotide; TTA chr2 60466582 60466603 60466599 60466604 +
cctaggattacctaggagttaa

SEQ ID NO: 196062 - DNA, 22 bp, Artificial Sequence
  Synthetic oligonucleotide; CTA chr2 60466586 60466607 60466603 60466608 +
ggattacctaggagttaacaaa

SEQ ID NO: 196063 - DNA, 22 bp, Artificial Sequence
  Synthetic oligonucleotide; TTA chr2 60466592 60466613 60466609 60466614 +
cctaggagttaacaaaaataaa

SEQ ID NO: 196064 - DNA, 22 bp, Artificial Sequence
  Synthetic oligonucleotide; CTA chr2 60466596 60466617 60466613 60466618 +
ggagttaacaaaaataaacaac

SEQ ID NO: 196065 - DNA, 22 bp, Artificial Sequence
  Synthetic oligonucleotide; TTA chr2 60466603 60466624 60466620 60466625 +
acaaaaataaacaactggcttt

SEQ ID NO: 196066 - DNA, 22 bp, Artificial Sequence
  Synthetic oligonucleotide; CTG chr2 60466620 60466641 60466637 60466642 +
gctttgaatctggtctcagggt

SEQ ID NO: 196067 - DNA, 22 bp, Artificial Sequence
  Synthetic oligonucleotide; CTT chr2 60466624 60466645 60466641 60466646 +
tgaatctggtctcagggtgcat

SEQ ID NO: 196068 - DNA, 22 bp, Artificial Sequence
  Synthetic oligonucleotide; TTT chr2 60466625 60466646 60466642 60466647 +
gaatctggtctcagggtgcatg

SEQ ID NO: 196069 - DNA, 22 bp, Artificial Sequence
  Synthetic oligonucleotide; TTG chr2 60466626 60466647 60466643 60466648 +
aatctggtctcagggtgcatgc

SEQ ID NO: 196070 - DNA, 22 bp, Artificial Sequence
  Synthetic oligonucleotide; CTG chr2 60466632 60466653 60466649 60466654 +
gtctcagggtgcatgccctgct

SEQ ID NO: 196071 - DNA, 22 bp, Artificial Sequence
  Synthetic oligonucleotide; CTC chr2 60466637 60466658 60466654 60466659 +
agggtgcatgccctgctcttca

SEQ ID NO: 196072 - DNA, 22 bp, Artificial Sequence
  Synthetic oligonucleotide; CTG chr2 60466652 60466673 60466669 60466674 +
ctcttcagataccatttacaag

SEQ ID NO: 196073 - DNA, 22 bp, Artificial Sequence
  Synthetic oligonucleotide; CTC chr2 60466655 60466676 60466672 60466677 +
ttcagataccatttacaagatg

SEQ ID NO: 196074 - DNA, 22 bp, Artificial Sequence
  Synthetic oligonucleotide; CTT chr2 60466657 60466678 60466674 60466679 +
cagataccatttacaagatggg

SEQ ID NO: 196075 - DNA, 22 bp, Artificial Sequence
  Synthetic oligonucleotide; TTC chr2 60466658 60466679 60466675 60466680 +
agataccatttacaagatgggt

SEQ ID NO: 196076 - DNA, 22 bp, Artificial Sequence
  Synthetic oligonucleotide; TTT chr2 60466669 60466690 60466686 60466691 +
acaagatgggtaagtgtcatct

SEQ ID NO: 196077 - DNA, 22 bp, Artificial Sequence
  Synthetic oligonucleotide; TTA chr2 60466670 60466691 60466687 60466692 +
caagatgggtaagtgtcatctc

SEQ ID NO: 196078 - DNA, 22 bp, Artificial Sequence
  Synthetic oligonucleotide; CTC chr2 60466692 60466713 60466709 60466714 +
cctcccatctaaaaacagtccc

SEQ ID NO: 196079 - DNA, 22 bp, Artificial Sequence
  Synthetic oligonucleotide; CTC chr2 60466696 60466717 60466713 60466718 +
ccatctaaaaacagtccccctt

SEQ ID NO: 196080 - DNA, 22 bp, Artificial Sequence
  Synthetic oligonucleotide; CTA chr2 60466703 60466724 60466720 60466725 +
aaaacagtcccccttagagcct

SEQ ID NO: 196081 - DNA, 22 bp, Artificial Sequence
  Synthetic oligonucleotide; CTT chr2 60466718 60466739 60466735 60466740 +
agagccttaactctggcatctt

SEQ ID NO: 196082 - DNA, 22 bp, Artificial Sequence
  Synthetic oligonucleotide; TTA chr2 60466719 60466740 60466736 60466741 +
gagccttaactctggcatcttg

SEQ ID NO: 196083 - DNA, 22 bp, Artificial Sequence
  Synthetic oligonucleotide; CTT chr2 60466726 60466747 60466743 60466748 +
aactctggcatcttgctctttg

SEQ ID NO: 196084 - DNA, 22 bp, Artificial Sequence
  Synthetic oligonucleotide; TTA chr2 60466727 60466748 60466744 60466749 +
actctggcatcttgctctttgt

SEQ ID NO: 196085 - DNA, 22 bp, Artificial Sequence
  Synthetic oligonucleotide; CTC chr2 60466731 60466752 60466748 60466753 +
tggcatcttgctctttgttatt

SEQ ID NO: 196086 - DNA, 22 bp, Artificial Sequence
  Synthetic oligonucleotide; CTG chr2 60466733 60466754 60466750 60466755 +
gcatcttgctctttgttattct

SEQ ID NO: 196087 - DNA, 22 bp, Artificial Sequence
  Synthetic oligonucleotide; CTT chr2 60466740 60466761 60466757 60466762 +
gctctttgttattctctctcca

SEQ ID NO: 196088 - DNA, 22 bp, Artificial Sequence
  Synthetic oligonucleotide; TTG chr2 60466741 60466762 60466758 60466763 +
ctctttgttattctctctccat

SEQ ID NO: 196089 - DNA, 22 bp, Artificial Sequence
  Synthetic oligonucleotide; CTC chr2 60466744 60466765 60466761 60466766 +
tttgttattctctctccatgac

SEQ ID NO: 196090 - DNA, 22 bp, Artificial Sequence
  Synthetic oligonucleotide; CTT chr2 60466746 60466767 60466763 60466768 +
tgttattctctctccatgacct

SEQ ID NO: 196091 - DNA, 22 bp, Artificial Sequence
  Synthetic oligonucleotide; TTT chr2 60466747 60466768 60466764 60466769 +
gttattctctctccatgacctt

SEQ ID NO: 196092 - DNA, 22 bp, Artificial Sequence
  Synthetic oligonucleotide; TTG chr2 60466748 60466769 60466765 60466770 +
ttattctctctccatgaccttt

SEQ ID NO: 196093 - DNA, 22 bp, Artificial Sequence
  Synthetic oligonucleotide; TTA chr2 60466751 60466772 60466768 60466773 +
ttctctctccatgacctttttc

SEQ ID NO: 196094 - DNA, 22 bp, Artificial Sequence
  Synthetic oligonucleotide; TTC chr2 60466754 60466775 60466771 60466776 +
tctctccatgacctttttcctt

SEQ ID NO: 196095 - DNA, 22 bp, Artificial Sequence
  Synthetic oligonucleotide; CTC chr2 60466756 60466777 60466773 60466778 +
tctccatgacctttttcctttt

SEQ ID NO: 196096 - DNA, 22 bp, Artificial Sequence
  Synthetic oligonucleotide; CTC chr2 60466758 60466779 60466775 60466780 +
tccatgacctttttccttttct

SEQ ID NO: 196097 - DNA, 22 bp, Artificial Sequence
  Synthetic oligonucleotide; CTC chr2 60466760 60466781 60466777 60466782 +
catgacctttttccttttcttt

SEQ ID NO: 196098 - DNA, 22 bp, Artificial Sequence
  Synthetic oligonucleotide; CTT chr2 60466769 60466790 60466786 60466791 +
tttccttttctttttttttctt

SEQ ID NO: 196099 - DNA, 22 bp, Artificial Sequence
  Synthetic oligonucleotide; TTT chr2 60466770 60466791 60466787 60466792 +
ttccttttctttttttttcttt

SEQ ID NO: 196100 - DNA, 22 bp, Artificial Sequence
  Synthetic oligonucleotide; TTT chr2 60466771 60466792 60466788 60466793 +
tccttttctttttttttctttc

SEQ ID NO: 196101 - DNA, 22 bp, Artificial Sequence
  Synthetic oligonucleotide; TTT chr2 60466772 60466793 60466789 60466794 +
ccttttctttttttttctttcc

SEQ ID NO: 196102 - DNA, 22 bp, Artificial Sequence
  Synthetic oligonucleotide; TTC chr2 60466773 60466794 60466790 60466795 +
cttttctttttttttctttcca

SEQ ID NO: 196103 - DNA, 22 bp, Artificial Sequence
  Synthetic oligonucleotide; CTT chr2 60466776 60466797 60466793 60466798 +
ttctttttttttctttccacag

SEQ ID NO: 196104 - DNA, 22 bp, Artificial Sequence
  Synthetic oligonucleotide; TTT chr2 60466777 60466798 60466794 60466799 +
tctttttttttctttccacagc

SEQ ID NO: 196105 - DNA, 22 bp, Artificial Sequence
  Synthetic oligonucleotide; TTT chr2 60466778 60466799 60466795 60466800 +
ctttttttttctttccacagca

SEQ ID NO: 196106 - DNA, 22 bp, Artificial Sequence
  Synthetic oligonucleotide; TTC chr2 60466779 60466800 60466796 60466801 +
tttttttttctttccacagcag

SEQ ID NO: 196107 - DNA, 22 bp, Artificial Sequence
  Synthetic oligonucleotide; CTT chr2 60466781 60466802 60466798 60466803 +
tttttttctttccacagcaggt

SEQ ID NO: 196108 - DNA, 22 bp, Artificial Sequence
  Synthetic oligonucleotide; TTT chr2 60466782 60466803 60466799 60466804 +
ttttttctttccacagcaggtt

SEQ ID NO: 196109 - DNA, 22 bp, Artificial Sequence
  Synthetic oligonucleotide; TTT chr2 60466783 60466804 60466800 60466805 +
tttttctttccacagcaggtta

SEQ ID NO: 196110 - DNA, 22 bp, Artificial Sequence
  Synthetic oligonucleotide; TTT chr2 60466784 60466805 60466801 60466806 +
ttttctttccacagcaggttat

SEQ ID NO: 196111 - DNA, 22 bp, Artificial Sequence
  Synthetic oligonucleotide; TTT chr2 60466785 60466806 60466802 60466807 +
tttctttccacagcaggttatt

SEQ ID NO: 196112 - DNA, 22 bp, Artificial Sequence
  Synthetic oligonucleotide; TTT chr2 60466786 60466807 60466803 60466808 +
ttctttccacagcaggttattt

SEQ ID NO: 196113 - DNA, 22 bp, Artificial Sequence
  Synthetic oligonucleotide; TTT chr2 60466787 60466808 60466804 60466809 +
tctttccacagcaggttatttt

SEQ ID NO: 196114 - DNA, 22 bp, Artificial Sequence
  Synthetic oligonucleotide; TTT chr2 60466788 60466809 60466805 60466810 +
ctttccacagcaggttattttt

SEQ ID NO: 196115 - DNA, 22 bp, Artificial Sequence
  Synthetic oligonucleotide; TTC chr2 60466789 60466810 60466806 60466811 +
tttccacagcaggttatttttc

SEQ ID NO: 196116 - DNA, 22 bp, Artificial Sequence
  Synthetic oligonucleotide; CTT chr2 60466791 60466812 60466808 60466813 +
tccacagcaggttatttttcat

SEQ ID NO: 196117 - DNA, 22 bp, Artificial Sequence
  Synthetic oligonucleotide; TTT chr2 60466792 60466813 60466809 60466814 +
ccacagcaggttatttttcatt

SEQ ID NO: 196118 - DNA, 22 bp, Artificial Sequence
  Synthetic oligonucleotide; TTC chr2 60466793 60466814 60466810 60466815 +
cacagcaggttatttttcattt

SEQ ID NO: 196119 - DNA, 22 bp, Artificial Sequence
  Synthetic oligonucleotide; TTA chr2 60466805 60466826 60466822 60466827 +
tttttcatttactttcaaataa

SEQ ID NO: 196120 - DNA, 22 bp, Artificial Sequence
  Synthetic oligonucleotide; TTT chr2 60466808 60466829 60466825 60466830 +
ttcatttactttcaaataaaaa

SEQ ID NO: 196121 - DNA, 22 bp, Artificial Sequence
  Synthetic oligonucleotide; TTT chr2 60466809 60466830 60466826 60466831 +
tcatttactttcaaataaaaat

SEQ ID NO: 196122 - DNA, 22 bp, Artificial Sequence
  Synthetic oligonucleotide; TTT chr2 60466810 60466831 60466827 60466832 +
catttactttcaaataaaaatt

SEQ ID NO: 196123 - DNA, 22 bp, Artificial Sequence
  Synthetic oligonucleotide; TTC chr2 60466811 60466832 60466828 60466833 +
atttactttcaaataaaaatta

SEQ ID NO: 196124 - DNA, 22 bp, Artificial Sequence
  Synthetic oligonucleotide; TTT chr2 60466815 60466836 60466832 60466837 +
actttcaaataaaaattagatg

SEQ ID NO: 196125 - DNA, 22 bp, Artificial Sequence
  Synthetic oligonucleotide; TTA chr2 60466816 60466837 60466833 60466838 +
ctttcaaataaaaattagatgt

SEQ ID NO: 196126 - DNA, 22 bp, Artificial Sequence
  Synthetic oligonucleotide; CTT chr2 60466819 60466840 60466836 60466841 +
tcaaataaaaattagatgtcac

SEQ ID NO: 196127 - DNA, 22 bp, Artificial Sequence
  Synthetic oligonucleotide; TTT chr2 60466820 60466841 60466837 60466842 +
caaataaaaattagatgtcaca

SEQ ID NO: 196128 - DNA, 22 bp, Artificial Sequence
  Synthetic oligonucleotide; TTC chr2 60466821 60466842 60466838 60466843 +
aaataaaaattagatgtcacac

SEQ ID NO: 196129 - DNA, 22 bp, Artificial Sequence
  Synthetic oligonucleotide; TTA chr2 60466833 60466854 60466850 60466855 +
gatgtcacacttcttttcttct

SEQ ID NO: 196130 - DNA, 22 bp, Artificial Sequence
  Synthetic oligonucleotide; CTT chr2 60466845 60466866 60466862 60466867 +
cttttcttcttgaacctgcttt

SEQ ID NO: 196131 - DNA, 22 bp, Artificial Sequence
  Synthetic oligonucleotide; TTC chr2 60466846 60466867 60466863 60466868 +
ttttcttcttgaacctgctttt

SEQ ID NO: 196132 - DNA, 22 bp, Artificial Sequence
  Synthetic oligonucleotide; CTT chr2 60466848 60466869 60466865 60466870 +
ttcttcttgaacctgctttttt

SEQ ID NO: 196133 - DNA, 22 bp, Artificial Sequence
  Synthetic oligonucleotide; TTT chr2 60466849 60466870 60466866 60466871 +
tcttcttgaacctgcttttttg

SEQ ID NO: 196134 - DNA, 22 bp, Artificial Sequence
  Synthetic oligonucleotide; TTT chr2 60466850 60466871 60466867 60466872 +
cttcttgaacctgcttttttgt

SEQ ID NO: 196135 - DNA, 22 bp, Artificial Sequence
  Synthetic oligonucleotide; TTC chr2 60466851 60466872 60466868 60466873 +
ttcttgaacctgcttttttgtg

SEQ ID NO: 196136 - DNA, 22 bp, Artificial Sequence
  Synthetic oligonucleotide; CTT chr2 60466853 60466874 60466870 60466875 +
cttgaacctgcttttttgtgtt

SEQ ID NO: 196137 - DNA, 22 bp, Artificial Sequence
  Synthetic oligonucleotide; TTC chr2 60466854 60466875 60466871 60466876 +
ttgaacctgcttttttgtgttt

SEQ ID NO: 196138 - DNA, 22 bp, Artificial Sequence
  Synthetic oligonucleotide; CTT chr2 60466856 60466877 60466873 60466878 +
gaacctgcttttttgtgtttag

SEQ ID NO: 196139 - DNA, 22 bp, Artificial Sequence
  Synthetic oligonucleotide; TTG chr2 60466857 60466878 60466874 60466879 +
aacctgcttttttgtgtttagg

SEQ ID NO: 196140 - DNA, 22 bp, Artificial Sequence
  Synthetic oligonucleotide; CTG chr2 60466863 60466884 60466880 60466885 +
cttttttgtgtttagggtggaa

SEQ ID NO: 196141 - DNA, 22 bp, Artificial Sequence
  Synthetic oligonucleotide; CTT chr2 60466866 60466887 60466883 60466888 +
ttttgtgtttagggtggaatca

SEQ ID NO: 196142 - DNA, 22 bp, Artificial Sequence
  Synthetic oligonucleotide; TTT chr2 60466867 60466888 60466884 60466889 +
tttgtgtttagggtggaatcac

SEQ ID NO: 196143 - DNA, 22 bp, Artificial Sequence
  Synthetic oligonucleotide; TTT chr2 60466868 60466889 60466885 60466890 +
ttgtgtttagggtggaatcact

SEQ ID NO: 196144 - DNA, 22 bp, Artificial Sequence
  Synthetic oligonucleotide; TTT chr2 60466869 60466890 60466886 60466891 +
tgtgtttagggtggaatcactg

SEQ ID NO: 196145 - DNA, 22 bp, Artificial Sequence
  Synthetic oligonucleotide; TTT chr2 60466870 60466891 60466887 60466892 +
gtgtttagggtggaatcactgc

SEQ ID NO: 196146 - DNA, 22 bp, Artificial Sequence
  Synthetic oligonucleotide; TTG chr2 60466871 60466892 60466888 60466893 +
tgtttagggtggaatcactgcc

SEQ ID NO: 196147 - DNA, 22 bp, Artificial Sequence
  Synthetic oligonucleotide; TTT chr2 60466876 60466897 60466893 60466898 +
agggtggaatcactgcccaccc

SEQ ID NO: 196148 - DNA, 22 bp, Artificial Sequence
  Synthetic oligonucleotide; TTA chr2 60466877 60466898 60466894 60466899 +
gggtggaatcactgcccacccc

SEQ ID NO: 196149 - DNA, 22 bp, Artificial Sequence
  Synthetic oligonucleotide; CTG chr2 60466891 60466912 60466908 60466913 +
cccaccccctaaccttttagcc

SEQ ID NO: 196150 - DNA, 22 bp, Artificial Sequence
  Synthetic oligonucleotide; CTA chr2 60466902 60466923 60466919 60466924 +
accttttagccatgcatgattc

SEQ ID NO: 196151 - DNA, 22 bp, Artificial Sequence
  Synthetic oligonucleotide; CTT chr2 60466907 60466928 60466924 60466929 +
ttagccatgcatgattcatacc

SEQ ID NO: 196152 - DNA, 22 bp, Artificial Sequence
  Synthetic oligonucleotide; TTT chr2 60466908 60466929 60466925 60466930 +
tagccatgcatgattcatacca

SEQ ID NO: 196153 - DNA, 22 bp, Artificial Sequence
  Synthetic oligonucleotide; TTT chr2 60466909 60466930 60466926 60466931 +
agccatgcatgattcataccat

SEQ ID NO: 196154 - DNA, 22 bp, Artificial Sequence
  Synthetic oligonucleotide; TTA chr2 60466910 60466931 60466927 60466932 +
gccatgcatgattcataccatg

SEQ ID NO: 196155 - DNA, 22 bp, Artificial Sequence
  Synthetic oligonucleotide; TTC chr2 60466924 60466945 60466941 60466946 +
ataccatgtgttcctacacaga

SEQ ID NO: 196156 - DNA, 22 bp, Artificial Sequence
  Synthetic oligonucleotide; TTC chr2 60466937 60466958 60466954 60466959 +
ctacacagagaagcaaactgta

SEQ ID NO: 196157 - DNA, 22 bp, Artificial Sequence
  Synthetic oligonucleotide; CTA chr2 60466940 60466961 60466957 60466962 +
cacagagaagcaaactgtatta

SEQ ID NO: 196158 - DNA, 22 bp, Artificial Sequence
  Synthetic oligonucleotide; CTG chr2 60466957 60466978 60466974 60466979 +
tattattttctaaaacagtatc

SEQ ID NO: 196159 - DNA, 22 bp, Artificial Sequence
  Synthetic oligonucleotide; TTA chr2 60466962 60466983 60466979 60466984 +
ttttctaaaacagtatctttca

SEQ ID NO: 196160 - DNA, 22 bp, Artificial Sequence
  Synthetic oligonucleotide; TTT chr2 60466965 60466986 60466982 60466987 +
tctaaaacagtatctttcagaa

SEQ ID NO: 196161 - DNA, 22 bp, Artificial Sequence
  Synthetic oligonucleotide; TTT chr2 60466966 60466987 60466983 60466988 +
ctaaaacagtatctttcagaaa

SEQ ID NO: 196162 - DNA, 22 bp, Artificial Sequence
  Synthetic oligonucleotide; TTC chr2 60466967 60466988 60466984 60466989 +
taaaacagtatctttcagaaaa

SEQ ID NO: 196163 - DNA, 22 bp, Artificial Sequence
  Synthetic oligonucleotide; CTA chr2 60466969 60466990 60466986 60466991 +
aaacagtatctttcagaaaaca

SEQ ID NO: 196164 - DNA, 22 bp, Artificial Sequence
  Synthetic oligonucleotide; CTT chr2 60466981 60467002 60466998 60467003 +
tcagaaaacatttgtataaatg

SEQ ID NO: 196165 - DNA, 22 bp, Artificial Sequence
  Synthetic oligonucleotide; TTT chr2 60466982 60467003 60466999 60467004 +
cagaaaacatttgtataaatgg

SEQ ID NO: 196166 - DNA, 22 bp, Artificial Sequence
  Synthetic oligonucleotide; TTC chr2 60466983 60467004 60467000 60467005 +
agaaaacatttgtataaatgga

SEQ ID NO: 196167 - DNA, 22 bp, Artificial Sequence
  Synthetic oligonucleotide; TTT chr2 60466994 60467015 60467011 60467016 +
gtataaatggacaaatttaagt

SEQ ID NO: 196168 - DNA, 22 bp, Artificial Sequence
  Synthetic oligonucleotide; TTG chr2 60466995 60467016 60467012 60467017 +
tataaatggacaaatttaagtt

SEQ ID NO: 196169 - DNA, 22 bp, Artificial Sequence
  Synthetic oligonucleotide; TTT chr2 60467012 60467033 60467029 60467034 +
aagtttcataaaatggtcccta

SEQ ID NO: 196170 - DNA, 22 bp, Artificial Sequence
  Synthetic oligonucleotide; TTA chr2 60467013 60467034 60467030 60467035 +
agtttcataaaatggtccctac

SEQ ID NO: 196171 - DNA, 22 bp, Artificial Sequence
  Synthetic oligonucleotide; TTT chr2 60467018 60467039 60467035 60467040 +
cataaaatggtccctactataa

SEQ ID NO: 196172 - DNA, 22 bp, Artificial Sequence
  Synthetic oligonucleotide; TTC chr2 60467019 60467040 60467036 60467041 +
ataaaatggtccctactataaa

SEQ ID NO: 196173 - DNA, 22 bp, Artificial Sequence
  Synthetic oligonucleotide; CTA chr2 60467034 60467055 60467051 60467056 +
ctataaaagctcacttgaacaa

SEQ ID NO: 196174 - DNA, 22 bp, Artificial Sequence
  Synthetic oligonucleotide; CTA chr2 60467037 60467058 60467054 60467059 +
taaaagctcacttgaacaagta

SEQ ID NO: 196175 - DNA, 22 bp, Artificial Sequence
  Synthetic oligonucleotide; CTC chr2 60467046 60467067 60467063 60467068 +
acttgaacaagtaaatggtggt

SEQ ID NO: 196176 - DNA, 22 bp, Artificial Sequence
  Synthetic oligonucleotide; CTT chr2 60467050 60467071 60467067 60467072 +
gaacaagtaaatggtggtggca

SEQ ID NO: 196177 - DNA, 22 bp, Artificial Sequence
  Synthetic oligonucleotide; TTG chr2 60467051 60467072 60467068 60467073 +
aacaagtaaatggtggtggcag

SEQ ID NO: 196178 - DNA, 22 bp, Artificial Sequence
  Synthetic oligonucleotide; TTG chr2 60467141 60467162 60467158 60467163 +
gtggtgatggtggtggtggtgg

SEQ ID NO: 196179 - DNA, 22 bp, Artificial Sequence
  Synthetic oligonucleotide; CTG chr2 60467219 60467240 60467236 60467241 +
gtgatggtggtggtggtagtga

SEQ ID NO: 196180 - DNA, 22 bp, Artificial Sequence
  Synthetic oligonucleotide; CTG chr2 60467390 60467411 60467407 60467412 +
gtggtgatggtgatggtgatgg

SEQ ID NO: 196181 - DNA, 22 bp, Artificial Sequence
  Synthetic oligonucleotide; CTG chr2 60467417 60467438 60467434 60467439 +
gtgatggtggtggtggtagtga

SEQ ID NO: 196182 - DNA, 22 bp, Artificial Sequence
  Synthetic oligonucleotide; CTG chr2 60467519 60467540 60467536 60467541 +
gtggtgatggtgatggtgatgg

SEQ ID NO: 196183 - DNA, 22 bp, Artificial Sequence
  Synthetic oligonucleotide; CTG chr2 60467546 60467567 60467563 60467568 +
gtgatggtggtggtggtagtga

SEQ ID NO: 196184 - DNA, 22 bp, Artificial Sequence
  Synthetic oligonucleotide; CTG chr2 60467669 60467690 60467686 60467691 +
gtggtgatggtgatggtggtgg

SEQ ID NO: 196185 - DNA, 22 bp, Artificial Sequence
  Synthetic oligonucleotide; CTG chr2 60467708 60467729 60467725 60467730 +
gtggtgatggtactggtggtga

SEQ ID NO: 196186 - DNA, 22 bp, Artificial Sequence
  Synthetic oligonucleotide; CTG chr2 60467723 60467744 60467740 60467745 +
gtggtgatggtggtggtggtag

SEQ ID NO: 196187 - DNA, 22 bp, Artificial Sequence
  Synthetic oligonucleotide; TTG chr2 60467786 60467807 60467803 60467808 +
atggtgatggtactggtggtga

SEQ ID NO: 196188 - DNA, 22 bp, Artificial Sequence
  Synthetic oligonucleotide; CTG chr2 60467801 60467822 60467818 60467823 +
gtggtgatggtactggtggtga

SEQ ID NO: 196189 - DNA, 22 bp, Artificial Sequence
  Synthetic oligonucleotide; CTG chr2 60467816 60467837 60467833 60467838 +
gtggtgatggtgatggtggtgg

SEQ ID NO: 196190 - DNA, 22 bp, Artificial Sequence
  Synthetic oligonucleotide; CTA chr2 60467852 60467873 60467869 60467874 +
ctggtggtgatggtactggtgg

SEQ ID NO: 196191 - DNA, 22 bp, Artificial Sequence
  Synthetic oligonucleotide; CTG chr2 60467855 60467876 60467872 60467877 +
gtggtgatggtactggtggtga

SEQ ID NO: 196192 - DNA, 22 bp, Artificial Sequence
  Synthetic oligonucleotide; CTG chr2 60467870 60467891 60467887 60467892 +
gtggtgatggtggtggtggtag

SEQ ID NO: 196193 - DNA, 22 bp, Artificial Sequence
  Synthetic oligonucleotide; CTG chr2 60467957 60467978 60467974 60467979 +
gtggtgatggtggtggtggtag

SEQ ID NO: 196194 - DNA, 22 bp, Artificial Sequence
  Synthetic oligonucleotide; CTG chr2 60468053 60468074 60468070 60468075 +
gtggtgatggtggtggtggtag

SEQ ID NO: 196195 - DNA, 22 bp, Artificial Sequence
  Synthetic oligonucleotide; TTG chr2 60468090 60468111 60468107 60468112 +
tggtggtggtggtgatggtggc

SEQ ID NO: 196196 - DNA, 22 bp, Artificial Sequence
  Synthetic oligonucleotide; TTG chr2 60468123 60468144 60468140 60468145 +
tggtggtggtggtgatggtggt

SEQ ID NO: 196197 - DNA, 22 bp, Artificial Sequence
  Synthetic oligonucleotide; CTT chr2 60468171 60468192 60468188 60468193 +
cacattttaactacaatgatgt

SEQ ID NO: 196198 - DNA, 22 bp, Artificial Sequence
  Synthetic oligonucleotide; TTC chr2 60468172 60468193 60468189 60468194 +
acattttaactacaatgatgtg

SEQ ID NO: 196199 - DNA, 22 bp, Artificial Sequence
  Synthetic oligonucleotide; TTT chr2 60468178 60468199 60468195 60468200 +
taactacaatgatgtgcatttt

SEQ ID NO: 196200 - DNA, 22 bp, Artificial Sequence
  Synthetic oligonucleotide; TTT chr2 60468179 60468200 60468196 60468201 +
aactacaatgatgtgcattttt

SEQ ID NO: 196201 - DNA, 22 bp, Artificial Sequence
  Synthetic oligonucleotide; TTA chr2 60468180 60468201 60468197 60468202 +
actacaatgatgtgcatttttc

SEQ ID NO: 196202 - DNA, 22 bp, Artificial Sequence
  Synthetic oligonucleotide; CTA chr2 60468184 60468205 60468201 60468206 +
caatgatgtgcatttttctcta

SEQ ID NO: 196203 - DNA, 22 bp, Artificial Sequence
  Synthetic oligonucleotide; TTT chr2 60468199 60468220 60468216 60468221 +
ttctctaaaaccaggagaaaaa

SEQ ID NO: 196204 - DNA, 22 bp, Artificial Sequence
  Synthetic oligonucleotide; TTT chr2 60468200 60468221 60468217 60468222 +
tctctaaaaccaggagaaaaat

SEQ ID NO: 196205 - DNA, 22 bp, Artificial Sequence
  Synthetic oligonucleotide; TTT chr2 60468201 60468222 60468218 60468223 +
ctctaaaaccaggagaaaaatt

SEQ ID NO: 196206 - DNA, 22 bp, Artificial Sequence
  Synthetic oligonucleotide; TTC chr2 60468202 60468223 60468219 60468224 +
tctaaaaccaggagaaaaatta

SEQ ID NO: 196207 - DNA, 22 bp, Artificial Sequence
  Synthetic oligonucleotide; CTC chr2 60468204 60468225 60468221 60468226 +
taaaaccaggagaaaaattagt

SEQ ID NO: 196208 - DNA, 22 bp, Artificial Sequence
  Synthetic oligonucleotide; CTA chr2 60468206 60468227 60468223 60468228 +
aaaccaggagaaaaattagtca

SEQ ID NO: 196209 - DNA, 22 bp, Artificial Sequence
  Synthetic oligonucleotide; TTA chr2 60468224 60468245 60468241 60468246 +
gtcaaaattatgtgtgggcatg

SEQ ID NO: 196210 - DNA, 22 bp, Artificial Sequence
  Synthetic oligonucleotide; TTA chr2 60468234 60468255 60468251 60468256 +
tgtgtgggcatgaatatacaac

SEQ ID NO: 196211 - DNA, 22 bp, Artificial Sequence
  Synthetic oligonucleotide; CTA chr2 60468264 60468285 60468281 60468286 +
tgttcaaatacacatgtaaata

SEQ ID NO: 196212 - DNA, 22 bp, Artificial Sequence
  Synthetic oligonucleotide; TTC chr2 60468269 60468290 60468286 60468291 +
aaatacacatgtaaatacataa

SEQ ID NO: 196213 - DNA, 22 bp, Artificial Sequence
  Synthetic oligonucleotide; TTG chr2 60468304 60468325 60468321 60468326 +
gaataactctggaataacccta

SEQ ID NO: 196214 - DNA, 22 bp, Artificial Sequence
  Synthetic oligonucleotide; CTC chr2 60468313 60468334 60468330 60468335 +
tggaataaccctaaactgactc

SEQ ID NO: 196215 - DNA, 22 bp, Artificial Sequence
  Synthetic oligonucleotide; CTG chr2 60468315 60468336 60468332 60468337 +
gaataaccctaaactgactcct

SEQ ID NO: 196216 - DNA, 22 bp, Artificial Sequence
  Synthetic oligonucleotide; CTA chr2 60468326 60468347 60468343 60468348 +
aactgactccttttgattctgg

SEQ ID NO: 196217 - DNA, 22 bp, Artificial Sequence
  Synthetic oligonucleotide; CTG chr2 60468331 60468352 60468348 60468353 +
actccttttgattctggccttg

SEQ ID NO: 196218 - DNA, 22 bp, Artificial Sequence
  Synthetic oligonucleotide; CTC chr2 60468335 60468356 60468352 60468357 +
cttttgattctggccttggcta

SEQ ID NO: 196219 - DNA, 22 bp, Artificial Sequence
  Synthetic oligonucleotide; CTT chr2 60468338 60468359 60468355 60468360 +
ttgattctggccttggctaaag

SEQ ID NO: 196220 - DNA, 22 bp, Artificial Sequence
  Synthetic oligonucleotide; TTT chr2 60468339 60468360 60468356 60468361 +
tgattctggccttggctaaaga

SEQ ID NO: 196221 - DNA, 22 bp, Artificial Sequence
  Synthetic oligonucleotide; TTT chr2 60468340 60468361 60468357 60468362 +
gattctggccttggctaaagat

SEQ ID NO: 196222 - DNA, 22 bp, Artificial Sequence
  Synthetic oligonucleotide; TTG chr2 60468341 60468362 60468358 60468363 +
attctggccttggctaaagatg

SEQ ID NO: 196223 - DNA, 22 bp, Artificial Sequence
  Synthetic oligonucleotide; TTC chr2 60468345 60468366 60468362 60468367 +
tggccttggctaaagatgtgtg

SEQ ID NO: 196224 - DNA, 22 bp, Artificial Sequence
  Synthetic oligonucleotide; CTG chr2 60468347 60468368 60468364 60468369 +
gccttggctaaagatgtgtgcc

SEQ ID NO: 196225 - DNA, 22 bp, Artificial Sequence
  Synthetic oligonucleotide; CTT chr2 60468352 60468373 60468369 60468374 +
ggctaaagatgtgtgccatgga

SEQ ID NO: 196226 - DNA, 22 bp, Artificial Sequence
  Synthetic oligonucleotide; TTG chr2 60468353 60468374 60468370 60468375 +
gctaaagatgtgtgccatggac

SEQ ID NO: 196227 - DNA, 22 bp, Artificial Sequence
  Synthetic oligonucleotide; CTA chr2 60468357 60468378 60468374 60468379 +
aagatgtgtgccatggactata

SEQ ID NO: 196228 - DNA, 22 bp, Artificial Sequence
  Synthetic oligonucleotide; CTA chr2 60468377 60468398 60468394 60468399 +
tacccaaagtcctaaatgaggc

SEQ ID NO: 196229 - DNA, 22 bp, Artificial Sequence
  Synthetic oligonucleotide; CTA chr2 60468391 60468412 60468408 60468413 +
aatgaggccacaggagtgaatg

SEQ ID NO: 196230 - DNA, 22 bp, Artificial Sequence
  Synthetic oligonucleotide; CTC chr2 60468433 60468454 60468450 60468455 +
cagaggcacaggcatcttcaat

SEQ ID NO: 196231 - DNA, 22 bp, Artificial Sequence
  Synthetic oligonucleotide; CTT chr2 60468451 60468472 60468468 60468473 +
caatcactagccacggagcaag

SEQ ID NO: 196232 - DNA, 22 bp, Artificial Sequence
  Synthetic oligonucleotide; TTC chr2 60468452 60468473 60468469 60468474 +
aatcactagccacggagcaaga

SEQ ID NO: 196233 - DNA, 22 bp, Artificial Sequence
  Synthetic oligonucleotide; CTA chr2 60468460 60468481 60468477 60468482 +
gccacggagcaagacaagaccc

SEQ ID NO: 196234 - DNA, 22 bp, Artificial Sequence
  Synthetic oligonucleotide; CTG chr2 60468484 60468505 60468501 60468506 +
gggagaagacccacagggatga

SEQ ID NO: 196235 - DNA, 22 bp, Artificial Sequence
  Synthetic oligonucleotide; CTA chr2 60468510 60468531 60468527 60468532 +
ctatcagctcccagcctccagt

SEQ ID NO: 196236 - DNA, 22 bp, Artificial Sequence
  Synthetic oligonucleotide; CTA chr2 60468513 60468534 60468530 60468535 +
tcagctcccagcctccagtgag

SEQ ID NO: 196237 - DNA, 22 bp, Artificial Sequence
  Synthetic oligonucleotide; CTC chr2 60468520 60468541 60468537 60468542 +
ccagcctccagtgaggaaagaa

SEQ ID NO: 196238 - DNA, 22 bp, Artificial Sequence
  Synthetic oligonucleotide; CTC chr2 60468528 60468549 60468545 60468550 +
cagtgaggaaagaaaaagggga

SEQ ID NO: 196239 - DNA, 22 bp, Artificial Sequence
  Synthetic oligonucleotide; CTC chr2 60468565 60468586 60468582 60468587 +
tggggctgagtggagtggggag

SEQ ID NO: 196240 - DNA, 22 bp, Artificial Sequence
  Synthetic oligonucleotide; CTG chr2 60468567 60468588 60468584 60468589 +
gggctgagtggagtggggagcg

SEQ ID NO: 196241 - DNA, 22 bp, Artificial Sequence
  Synthetic oligonucleotide; CTG chr2 60468573 60468594 60468590 60468595 +
agtggagtggggagcggctgcc

SEQ ID NO: 196242 - DNA, 22 bp, Artificial Sequence
  Synthetic oligonucleotide; CTG chr2 60468593 60468614 60468610 60468615 +
ccaagtgagtaatggaataata

SEQ ID NO: 196243 - DNA, 22 bp, Artificial Sequence
  Synthetic oligonucleotide; CTA chr2 60468629 60468650 60468646 60468651 +
ttttggaagtaactccttcagt

SEQ ID NO: 196244 - DNA, 22 bp, Artificial Sequence
  Synthetic oligonucleotide; TTT chr2 60468632 60468653 60468649 60468654 +
tggaagtaactccttcagtact

SEQ ID NO: 196245 - DNA, 22 bp, Artificial Sequence
  Synthetic oligonucleotide; TTT chr2 60468633 60468654 60468650 60468655 +
ggaagtaactccttcagtactt

SEQ ID NO: 196246 - DNA, 22 bp, Artificial Sequence
  Synthetic oligonucleotide; TTG chr2 60468634 60468655 60468651 60468656 +
gaagtaactccttcagtactta

SEQ ID NO: 196247 - DNA, 22 bp, Artificial Sequence
  Synthetic oligonucleotide; CTC chr2 60468644 60468665 60468661 60468666 +
cttcagtacttaaaaagtaagg

SEQ ID NO: 196248 - DNA, 22 bp, Artificial Sequence
  Synthetic oligonucleotide; CTT chr2 60468647 60468668 60468664 60468669 +
cagtacttaaaaagtaagggca

SEQ ID NO: 196249 - DNA, 22 bp, Artificial Sequence
  Synthetic oligonucleotide; TTC chr2 60468648 60468669 60468665 60468670 +
agtacttaaaaagtaagggcaa

SEQ ID NO: 196250 - DNA, 22 bp, Artificial Sequence
  Synthetic oligonucleotide; CTT chr2 60468655 60468676 60468672 60468677 +
aaaaagtaagggcaatttccag

SEQ ID NO: 196251 - DNA, 22 bp, Artificial Sequence
  Synthetic oligonucleotide; TTA chr2 60468656 60468677 60468673 60468678 +
aaaagtaagggcaatttccaga

SEQ ID NO: 196252 - DNA, 22 bp, Artificial Sequence
  Synthetic oligonucleotide; TTT chr2 60468673 60468694 60468690 60468695 +
ccagaaattctcatctctatac

SEQ ID NO: 196253 - DNA, 22 bp, Artificial Sequence
  Synthetic oligonucleotide; TTC chr2 60468674 60468695 60468691 60468696 +
cagaaattctcatctctataca

SEQ ID NO: 196254 - DNA, 22 bp, Artificial Sequence
  Synthetic oligonucleotide; TTC chr2 60468683 60468704 60468700 60468705 +
tcatctctatacacatggacat

SEQ ID NO: 196255 - DNA, 22 bp, Artificial Sequence
  Synthetic oligonucleotide; CTC chr2 60468685 60468706 60468702 60468707 +
atctctatacacatggacattt

SEQ ID NO: 196256 - DNA, 22 bp, Artificial Sequence
  Synthetic oligonucleotide; CTC chr2 60468690 60468711 60468707 60468712 +
tatacacatggacatttgtaga

SEQ ID NO: 196257 - DNA, 22 bp, Artificial Sequence
  Synthetic oligonucleotide; CTA chr2 60468692 60468713 60468709 60468714 +
tacacatggacatttgtagaag

SEQ ID NO: 196258 - DNA, 22 bp, Artificial Sequence
  Synthetic oligonucleotide; TTT chr2 60468707 60468728 60468724 60468729 +
gtagaagaaataaggctcaact

SEQ ID NO: 196259 - DNA, 22 bp, Artificial Sequence
  Synthetic oligonucleotide; TTG chr2 60468708 60468729 60468725 60468730 +
tagaagaaataaggctcaactt

SEQ ID NO: 196260 - DNA, 22 bp, Artificial Sequence
  Synthetic oligonucleotide; CTC chr2 60468725 60468746 60468742 60468747 +
aacttacaaataccctgcgggg

SEQ ID NO: 196261 - DNA, 22 bp, Artificial Sequence
  Synthetic oligonucleotide; CTT chr2 60468730 60468751 60468747 60468752 +
acaaataccctgcggggcatat

SEQ ID NO: 196262 - DNA, 22 bp, Artificial Sequence
  Synthetic oligonucleotide; TTA chr2 60468731 60468752 60468748 60468753 +
caaataccctgcggggcatatt

SEQ ID NO: 196263 - DNA, 22 bp, Artificial Sequence
  Synthetic oligonucleotide; CTG chr2 60468742 60468763 60468759 60468764 +
cggggcatattctgcactcatc

SEQ ID NO: 196264 - DNA, 22 bp, Artificial Sequence
  Synthetic oligonucleotide; TTC chr2 60468754 60468775 60468771 60468776 +
tgcactcatcccaggcgtgggg

SEQ ID NO: 196265 - DNA, 22 bp, Artificial Sequence
  Synthetic oligonucleotide; CTG chr2 60468756 60468777 60468773 60468778 +
cactcatcccaggcgtggggat

SEQ ID NO: 196266 - DNA, 22 bp, Artificial Sequence
  Synthetic oligonucleotide; CTC chr2 60468761 60468782 60468778 60468783 +
atcccaggcgtggggattagag

SEQ ID NO: 196267 - DNA, 22 bp, Artificial Sequence
  Synthetic oligonucleotide; TTA chr2 60468780 60468801 60468797 60468802 +
gagctccatgtgcagaacgagg

SEQ ID NO: 196268 - DNA, 22 bp, Artificial Sequence
  Synthetic oligonucleotide; CTC chr2 60468786 60468807 60468803 60468808 +
catgtgcagaacgaggggagga

SEQ ID NO: 196269 - DNA, 22 bp, Artificial Sequence
  Synthetic oligonucleotide; CTC chr2 60468818 60468839 60468835 60468840 +
cagtgcagaagtttatctgtga

SEQ ID NO: 196270 - DNA, 22 bp, Artificial Sequence
  Synthetic oligonucleotide; TTT chr2 60468832 60468853 60468849 60468854 +
atctgtgaaagaaacccaaaat

SEQ ID NO: 196271 - DNA, 22 bp, Artificial Sequence
  Synthetic oligonucleotide; TTA chr2 60468833 60468854 60468850 60468855 +
tctgtgaaagaaacccaaaatc

SEQ ID NO: 196272 - DNA, 22 bp, Artificial Sequence
  Synthetic oligonucleotide; CTG chr2 60468837 60468858 60468854 60468859 +
tgaaagaaacccaaaatcaagc

SEQ ID NO: 196273 - DNA, 22 bp, Artificial Sequence
  Synthetic oligonucleotide; CTA chr2 60468863 60468884 60468880 60468885 +
cagctacaaacaacgtgcatca

SEQ ID NO: 196274 - DNA, 22 bp, Artificial Sequence
  Synthetic oligonucleotide; CTA chr2 60468869 60468890 60468886 60468891 +
caaacaacgtgcatcataaacc

SEQ ID NO: 196275 - DNA, 22 bp, Artificial Sequence
  Synthetic oligonucleotide; TTT chr2 60468907 60468928 60468924 60468929 +
caattccattaaaatagattac

SEQ ID NO: 196276 - DNA, 22 bp, Artificial Sequence
  Synthetic oligonucleotide; TTC chr2 60468908 60468929 60468925 60468930 +
aattccattaaaatagattaca

SEQ ID NO: 196277 - DNA, 22 bp, Artificial Sequence
  Synthetic oligonucleotide; TTC chr2 60468913 60468934 60468930 60468935 +
cattaaaatagattacaacatc

SEQ ID NO: 196278 - DNA, 22 bp, Artificial Sequence
  Synthetic oligonucleotide; TTA chr2 60468918 60468939 60468935 60468940 +
aaatagattacaacatcattac

SEQ ID NO: 196279 - DNA, 22 bp, Artificial Sequence
  Synthetic oligonucleotide; TTA chr2 60468928 60468949 60468945 60468950 +
caacatcattacaacagccttg

SEQ ID NO: 196280 - DNA, 22 bp, Artificial Sequence
  Synthetic oligonucleotide; TTA chr2 60468939 60468960 60468956 60468961 +
caacagccttgcagatagttaa

SEQ ID NO: 196281 - DNA, 22 bp, Artificial Sequence
  Synthetic oligonucleotide; CTT chr2 60468949 60468970 60468966 60468971 +
gcagatagttaacaggcccaag

SEQ ID NO: 196282 - DNA, 22 bp, Artificial Sequence
  Synthetic oligonucleotide; TTG chr2 60468950 60468971 60468967 60468972 +
cagatagttaacaggcccaagg

SEQ ID NO: 196283 - DNA, 22 bp, Artificial Sequence
  Synthetic oligonucleotide; TTA chr2 60468960 60468981 60468977 60468982 +
acaggcccaaggcctgaaacaa

SEQ ID NO: 196284 - DNA, 22 bp, Artificial Sequence
  Synthetic oligonucleotide; CTG chr2 60468976 60468997 60468993 60468998 +
aaacaaaagaagagtggtgagt

SEQ ID NO: 196285 - DNA, 22 bp, Artificial Sequence
  Synthetic oligonucleotide; TTA chr2 60469000 60469021 60469017 60469022 +
tttcccagagtttctgttttgt

SEQ ID NO: 196286 - DNA, 22 bp, Artificial Sequence
  Synthetic oligonucleotide; TTT chr2 60469003 60469024 60469020 60469025 +
cccagagtttctgttttgtttt

SEQ ID NO: 196287 - DNA, 22 bp, Artificial Sequence
  Synthetic oligonucleotide; TTC chr2 60469004 60469025 60469021 60469026 +
ccagagtttctgttttgttttc

SEQ ID NO: 196288 - DNA, 22 bp, Artificial Sequence
  Synthetic oligonucleotide; TTT chr2 60469013 60469034 60469030 60469035 +
ctgttttgttttcaatttcggt

SEQ ID NO: 196289 - DNA, 22 bp, Artificial Sequence
  Synthetic oligonucleotide; TTC chr2 60469014 60469035 60469031 60469036 +
tgttttgttttcaatttcggtc

SEQ ID NO: 196290 - DNA, 22 bp, Artificial Sequence
  Synthetic oligonucleotide; CTG chr2 60469016 60469037 60469033 60469038 +
ttttgttttcaatttcggtctt

SEQ ID NO: 196291 - DNA, 22 bp, Artificial Sequence
  Synthetic oligonucleotide; TTT chr2 60469019 60469040 60469036 60469041 +
tgttttcaatttcggtcttttt

SEQ ID NO: 196292 - DNA, 22 bp, Artificial Sequence
  Synthetic oligonucleotide; TTT chr2 60469020 60469041 60469037 60469042 +
gttttcaatttcggtctttttg

SEQ ID NO: 196293 - DNA, 22 bp, Artificial Sequence
  Synthetic oligonucleotide; TTG chr2 60469021 60469042 60469038 60469043 +
ttttcaatttcggtctttttga

SEQ ID NO: 196294 - DNA, 22 bp, Artificial Sequence
  Synthetic oligonucleotide; TTT chr2 60469024 60469045 60469041 60469046 +
tcaatttcggtctttttgacaa

SEQ ID NO: 196295 - DNA, 22 bp, Artificial Sequence
  Synthetic oligonucleotide; TTT chr2 60469025 60469046 60469042 60469047 +
caatttcggtctttttgacaaa

SEQ ID NO: 196296 - DNA, 22 bp, Artificial Sequence
  Synthetic oligonucleotide; TTC chr2 60469026 60469047 60469043 60469048 +
aatttcggtctttttgacaaaa

SEQ ID NO: 196297 - DNA, 22 bp, Artificial Sequence
  Synthetic oligonucleotide; TTT chr2 60469031 60469052 60469048 60469053 +
cggtctttttgacaaaagtgaa

SEQ ID NO: 196298 - DNA, 22 bp, Artificial Sequence
  Synthetic oligonucleotide; TTC chr2 60469032 60469053 60469049 60469054 +
ggtctttttgacaaaagtgaaa

SEQ ID NO: 196299 - DNA, 22 bp, Artificial Sequence
  Synthetic oligonucleotide; CTT chr2 60469038 60469059 60469055 60469060 +
tttgacaaaagtgaaagggttt

SEQ ID NO: 196300 - DNA, 22 bp, Artificial Sequence
  Synthetic oligonucleotide; TTT chr2 60469039 60469060 60469056 60469061 +
ttgacaaaagtgaaagggtttg

SEQ ID NO: 196301 - DNA, 22 bp, Artificial Sequence
  Synthetic oligonucleotide; TTT chr2 60469040 60469061 60469057 60469062 +
tgacaaaagtgaaagggtttgt

SEQ ID NO: 196302 - DNA, 22 bp, Artificial Sequence
  Synthetic oligonucleotide; TTT chr2 60469041 60469062 60469058 60469063 +
gacaaaagtgaaagggtttgtt

SEQ ID NO: 196303 - DNA, 22 bp, Artificial Sequence
  Synthetic oligonucleotide; TTG chr2 60469042 60469063 60469059 60469064 +
acaaaagtgaaagggtttgttt

SEQ ID NO: 196304 - DNA, 22 bp, Artificial Sequence
  Synthetic oligonucleotide; TTT chr2 60469060 60469081 60469077 60469082 +
gttttaggaaaggggagaggtg

SEQ ID NO: 196305 - DNA, 22 bp, Artificial Sequence
  Synthetic oligonucleotide; TTG chr2 60469061 60469082 60469078 60469083 +
ttttaggaaaggggagaggtgg

SEQ ID NO: 196306 - DNA, 22 bp, Artificial Sequence
  Synthetic oligonucleotide; TTT chr2 60469064 60469085 60469081 60469086 +
taggaaaggggagaggtggtct

SEQ ID NO: 196307 - DNA, 22 bp, Artificial Sequence
  Synthetic oligonucleotide; TTT chr2 60469065 60469086 60469082 60469087 +
aggaaaggggagaggtggtctt

SEQ ID NO: 196308 - DNA, 22 bp, Artificial Sequence
  Synthetic oligonucleotide; TTA chr2 60469066 60469087 60469083 60469088 +
ggaaaggggagaggtggtcttt

SEQ ID NO: 196309 - DNA, 22 bp, Artificial Sequence
  Synthetic oligonucleotide; CTT chr2 60469087 60469108 60469104 60469109 +
tggttcatttgcttatttattt

SEQ ID NO: 196310 - DNA, 22 bp, Artificial Sequence
  Synthetic oligonucleotide; TTT chr2 60469088 60469109 60469105 60469110 +
ggttcatttgcttatttatttg

SEQ ID NO: 196311 - DNA, 22 bp, Artificial Sequence
  Synthetic oligonucleotide; TTG chr2 60469089 60469110 60469106 60469111 +
gttcatttgcttatttatttgt

SEQ ID NO: 196312 - DNA, 22 bp, Artificial Sequence
  Synthetic oligonucleotide; TTC chr2 60469093 60469114 60469110 60469115 +
atttgcttatttatttgttgtt

SEQ ID NO: 196313 - DNA, 22 bp, Artificial Sequence
  Synthetic oligonucleotide; TTT chr2 60469097 60469118 60469114 60469119 +
gcttatttatttgttgttgttt

SEQ ID NO: 196314 - DNA, 22 bp, Artificial Sequence
  Synthetic oligonucleotide; TTG chr2 60469098 60469119 60469115 60469120 +
cttatttatttgttgttgtttg

SEQ ID NO: 196315 - DNA, 22 bp, Artificial Sequence
  Synthetic oligonucleotide; CTT chr2 60469101 60469122 60469118 60469123 +
atttatttgttgttgtttgatt

SEQ ID NO: 196316 - DNA, 22 bp, Artificial Sequence
  Synthetic oligonucleotide; TTA chr2 60469102 60469123 60469119 60469124 +
tttatttgttgttgtttgatta

SEQ ID NO: 196317 - DNA, 22 bp, Artificial Sequence
  Synthetic oligonucleotide; TTT chr2 60469105 60469126 60469122 60469127 +
atttgttgttgtttgattattg

SEQ ID NO: 196318 - DNA, 22 bp, Artificial Sequence
  Synthetic oligonucleotide; TTA chr2 60469106 60469127 60469123 60469128 +
tttgttgttgtttgattattgt

SEQ ID NO: 196319 - DNA, 22 bp, Artificial Sequence
  Synthetic oligonucleotide; TTT chr2 60469109 60469130 60469126 60469131 +
gttgttgtttgattattgtctt

SEQ ID NO: 196320 - DNA, 22 bp, Artificial Sequence
  Synthetic oligonucleotide; TTG chr2 60469110 60469131 60469127 60469132 +
ttgttgtttgattattgtcttg

SEQ ID NO: 196321 - DNA, 22 bp, Artificial Sequence
  Synthetic oligonucleotide; TTG chr2 60469113 60469134 60469130 60469135 +
ttgtttgattattgtcttgtgg

SEQ ID NO: 196322 - DNA, 22 bp, Artificial Sequence
  Synthetic oligonucleotide; TTG chr2 60469116 60469137 60469133 60469138 +
tttgattattgtcttgtggaaa

SEQ ID NO: 196323 - DNA, 22 bp, Artificial Sequence
  Synthetic oligonucleotide; TTT chr2 60469119 60469140 60469136 60469141 +
gattattgtcttgtggaaagaa

SEQ ID NO: 196324 - DNA, 22 bp, Artificial Sequence
  Synthetic oligonucleotide; TTG chr2 60469120 60469141 60469137 60469142 +
attattgtcttgtggaaagaag

SEQ ID NO: 196325 - DNA, 22 bp, Artificial Sequence
  Synthetic oligonucleotide; TTA chr2 60469124 60469145 60469141 60469146 +
ttgtcttgtggaaagaagatgt

SEQ ID NO: 196326 - DNA, 22 bp, Artificial Sequence
  Synthetic oligonucleotide; TTG chr2 60469127 60469148 60469144 60469149 +
tcttgtggaaagaagatgtgta

SEQ ID NO: 196327 - DNA, 22 bp, Artificial Sequence
  Synthetic oligonucleotide; CTT chr2 60469131 60469152 60469148 60469153 +
gtggaaagaagatgtgtaagca

SEQ ID NO: 196328 - DNA, 22 bp, Artificial Sequence
  Synthetic oligonucleotide; TTG chr2 60469132 60469153 60469149 60469154 +
tggaaagaagatgtgtaagcag

SEQ ID NO: 196329 - DNA, 22 bp, Artificial Sequence
  Synthetic oligonucleotide; CTG chr2 60469168 60469189 60469185 60469190 +
gtaatattgtgggtagcctgga

SEQ ID NO: 196330 - DNA, 22 bp, Artificial Sequence
  Synthetic oligonucleotide; TTG chr2 60469177 60469198 60469194 60469199 +
tgggtagcctggaaacatgggg

SEQ ID NO: 196331 - DNA, 22 bp, Artificial Sequence
  Synthetic oligonucleotide; CTG chr2 60469188 60469209 60469205 60469210 +
gaaacatggggggattttatct

SEQ ID NO: 196332 - DNA, 22 bp, Artificial Sequence
  Synthetic oligonucleotide; TTT chr2 60469205 60469226 60469222 60469227 +
tatctgcaaggctggtttacat

SEQ ID NO: 196333 - DNA, 22 bp, Artificial Sequence
  Synthetic oligonucleotide; TTT chr2 60469206 60469227 60469223 60469228 +
atctgcaaggctggtttacatg

SEQ ID NO: 196334 - DNA, 22 bp, Artificial Sequence
  Synthetic oligonucleotide; TTA chr2 60469207 60469228 60469224 60469229 +
tctgcaaggctggtttacatgc

SEQ ID NO: 196335 - DNA, 22 bp, Artificial Sequence
  Synthetic oligonucleotide; CTG chr2 60469211 60469232 60469228 60469233 +
caaggctggtttacatgcatac

SEQ ID NO: 196336 - DNA, 22 bp, Artificial Sequence
  Synthetic oligonucleotide; CTG chr2 60469219 60469240 60469236 60469241 +
gtttacatgcatacattaactt

SEQ ID NO: 196337 - DNA, 22 bp, Artificial Sequence
  Synthetic oligonucleotide; TTT chr2 60469223 60469244 60469240 60469245 +
acatgcatacattaactttact

SEQ ID NO: 196338 - DNA, 22 bp, Artificial Sequence
  Synthetic oligonucleotide; TTA chr2 60469224 60469245 60469241 60469246 +
catgcatacattaactttactt

SEQ ID NO: 196339 - DNA, 22 bp, Artificial Sequence
  Synthetic oligonucleotide; TTA chr2 60469237 60469258 60469254 60469259 +
actttactttatagacaaaccc

SEQ ID NO: 196340 - DNA, 22 bp, Artificial Sequence
  Synthetic oligonucleotide; CTT chr2 60469241 60469262 60469258 60469263 +
tactttatagacaaacccaagc

SEQ ID NO: 196341 - DNA, 22 bp, Artificial Sequence
  Synthetic oligonucleotide; TTT chr2 60469242 60469263 60469259 60469264 +
actttatagacaaacccaagca

SEQ ID NO: 196342 - DNA, 22 bp, Artificial Sequence
  Synthetic oligonucleotide; TTA chr2 60469243 60469264 60469260 60469265 +
ctttatagacaaacccaagcaa

SEQ ID NO: 196343 - DNA, 22 bp, Artificial Sequence
  Synthetic oligonucleotide; CTT chr2 60469246 60469267 60469263 60469268 +
tatagacaaacccaagcaaaaa

SEQ ID NO: 196344 - DNA, 22 bp, Artificial Sequence
  Synthetic oligonucleotide; TTT chr2 60469247 60469268 60469264 60469269 +
atagacaaacccaagcaaaaag

SEQ ID NO: 196345 - DNA, 22 bp, Artificial Sequence
  Synthetic oligonucleotide; TTA chr2 60469248 60469269 60469265 60469270 +
tagacaaacccaagcaaaaagc

SEQ ID NO: 196346 - DNA, 22 bp, Artificial Sequence
  Synthetic oligonucleotide; CTG chr2 60469279 60469300 60469296 60469301 +
ataggaaatgagtagatttgtg

SEQ ID NO: 196347 - DNA, 22 bp, Artificial Sequence
  Synthetic oligonucleotide; TTT chr2 60469298 60469319 60469315 60469320 +
gtgaatcgttttttatgggaca

SEQ ID NO: 196348 - DNA, 22 bp, Artificial Sequence
  Synthetic oligonucleotide; TTG chr2 60469299 60469320 60469316 60469321 +
tgaatcgttttttatgggacag

SEQ ID NO: 196349 - DNA, 22 bp, Artificial Sequence
  Synthetic oligonucleotide; TTT chr2 60469309 60469330 60469326 60469331 +
tttatgggacagagtcccactt

SEQ ID NO: 196350 - DNA, 22 bp, Artificial Sequence
  Synthetic oligonucleotide; TTT chr2 60469310 60469331 60469327 60469332 +
ttatgggacagagtcccacttt

SEQ ID NO: 196351 - DNA, 22 bp, Artificial Sequence
  Synthetic oligonucleotide; TTT chr2 60469311 60469332 60469328 60469333 +
tatgggacagagtcccactttg

SEQ ID NO: 196352 - DNA, 22 bp, Artificial Sequence
  Synthetic oligonucleotide; TTT chr2 60469312 60469333 60469329 60469334 +
atgggacagagtcccactttgc

SEQ ID NO: 196353 - DNA, 22 bp, Artificial Sequence
  Synthetic oligonucleotide; TTA chr2 60469313 60469334 60469330 60469335 +
tgggacagagtcccactttgct

SEQ ID NO: 196354 - DNA, 22 bp, Artificial Sequence
  Synthetic oligonucleotide; CTT chr2 60469331 60469352 60469348 60469353 +
tgctttctctgtccctctgccc

SEQ ID NO: 196355 - DNA, 22 bp, Artificial Sequence
  Synthetic oligonucleotide; TTT chr2 60469332 60469353 60469349 60469354 +
gctttctctgtccctctgcccc

SEQ ID NO: 196356 - DNA, 22 bp, Artificial Sequence
  Synthetic oligonucleotide; TTG chr2 60469333 60469354 60469350 60469355 +
ctttctctgtccctctgccccc

SEQ ID NO: 196357 - DNA, 22 bp, Artificial Sequence
  Synthetic oligonucleotide; CTT chr2 60469336 60469357 60469353 60469358 +
tctctgtccctctgcccccctc

SEQ ID NO: 196358 - DNA, 22 bp, Artificial Sequence
  Synthetic oligonucleotide; TTT chr2 60469337 60469358 60469354 60469359 +
ctctgtccctctgcccccctct

SEQ ID NO: 196359 - DNA, 22 bp, Artificial Sequence
  Synthetic oligonucleotide; TTC chr2 60469338 60469359 60469355 60469360 +
tctgtccctctgcccccctctt

SEQ ID NO: 196360 - DNA, 22 bp, Artificial Sequence
  Synthetic oligonucleotide; CTC chr2 60469340 60469361 60469357 60469362 +
tgtccctctgcccccctcttcc

SEQ ID NO: 196361 - DNA, 22 bp, Artificial Sequence
  Synthetic oligonucleotide; CTG chr2 60469342 60469363 60469359 60469364 +
tccctctgcccccctcttccca

SEQ ID NO: 196362 - DNA, 22 bp, Artificial Sequence
  Synthetic oligonucleotide; CTC chr2 60469348 60469369 60469365 60469370 +
tgcccccctcttcccatgctat

SEQ ID NO: 196363 - DNA, 22 bp, Artificial Sequence
  Synthetic oligonucleotide; CTG chr2 60469350 60469371 60469367 60469372 +
cccccctcttcccatgctatat

SEQ ID NO: 196364 - DNA, 22 bp, Artificial Sequence
  Synthetic oligonucleotide; CTC chr2 60469358 60469379 60469375 60469380 +
ttcccatgctatatttatgata

SEQ ID NO: 196365 - DNA, 22 bp, Artificial Sequence
  Synthetic oligonucleotide; CTT chr2 60469360 60469381 60469377 60469382 +
cccatgctatatttatgatagc

SEQ ID NO: 196366 - DNA, 22 bp, Artificial Sequence
  Synthetic oligonucleotide; TTC chr2 60469361 60469382 60469378 60469383 +
ccatgctatatttatgatagcg

SEQ ID NO: 196367 - DNA, 22 bp, Artificial Sequence
  Synthetic oligonucleotide; CTA chr2 60469369 60469390 60469386 60469391 +
tatttatgatagcgccttcagt

SEQ ID NO: 196368 - DNA, 22 bp, Artificial Sequence
  Synthetic oligonucleotide; TTT chr2 60469374 60469395 60469391 60469396 +
atgatagcgccttcagtgatag

SEQ ID NO: 196369 - DNA, 22 bp, Artificial Sequence
  Synthetic oligonucleotide; TTA chr2 60469375 60469396 60469392 60469397 +
tgatagcgccttcagtgatagg

SEQ ID NO: 196370 - DNA, 22 bp, Artificial Sequence
  Synthetic oligonucleotide; CTT chr2 60469387 60469408 60469404 60469409 +
cagtgataggggaaacctgggc

SEQ ID NO: 196371 - DNA, 22 bp, Artificial Sequence
  Synthetic oligonucleotide; TTC chr2 60469388 60469409 60469405 60469410 +
agtgataggggaaacctgggca

SEQ ID NO: 196372 - DNA, 22 bp, Artificial Sequence
  Synthetic oligonucleotide; CTG chr2 60469406 60469427 60469423 60469428 +
ggcatttctggactgagctggg

SEQ ID NO: 196373 - DNA, 22 bp, Artificial Sequence
  Synthetic oligonucleotide; TTT chr2 60469413 60469434 60469430 60469435 +
ctggactgagctgggccatact

SEQ ID NO: 196374 - DNA, 22 bp, Artificial Sequence
  Synthetic oligonucleotide; TTC chr2 60469414 60469435 60469431 60469436 +
tggactgagctgggccatactc

SEQ ID NO: 196375 - DNA, 22 bp, Artificial Sequence
  Synthetic oligonucleotide; CTG chr2 60469416 60469437 60469433 60469438 +
gactgagctgggccatactcta

SEQ ID NO: 196376 - DNA, 22 bp, Artificial Sequence
  Synthetic oligonucleotide; CTG chr2 60469421 60469442 60469438 60469443 +
agctgggccatactctagaatc

SEQ ID NO: 196377 - DNA, 22 bp, Artificial Sequence
  Synthetic oligonucleotide; CTG chr2 60469426 60469447 60469443 60469448 +
ggccatactctagaatcctgtc

SEQ ID NO: 196378 - DNA, 22 bp, Artificial Sequence
  Synthetic oligonucleotide; CTC chr2 60469436 60469457 60469453 60469458 +
tagaatcctgtcaactggaaac

SEQ ID NO: 196379 - DNA, 22 bp, Artificial Sequence
  Synthetic oligonucleotide; CTA chr2 60469438 60469459 60469455 60469460 +
gaatcctgtcaactggaaacct

SEQ ID NO: 196380 - DNA, 22 bp, Artificial Sequence
  Synthetic oligonucleotide; CTG chr2 60469446 60469467 60469463 60469468 +
tcaactggaaaccttacacaga

SEQ ID NO: 196381 - DNA, 22 bp, Artificial Sequence
  Synthetic oligonucleotide; CTG chr2 60469453 60469474 60469470 60469475 +
gaaaccttacacagatgtggct

SEQ ID NO: 196382 - DNA, 22 bp, Artificial Sequence
  Synthetic oligonucleotide; CTT chr2 60469461 60469482 60469478 60469483 +
acacagatgtggcttctcacaa

SEQ ID NO: 196383 - DNA, 22 bp, Artificial Sequence
  Synthetic oligonucleotide; TTA chr2 60469462 60469483 60469479 60469484 +
cacagatgtggcttctcacaat

SEQ ID NO: 196384 - DNA, 22 bp, Artificial Sequence
  Synthetic oligonucleotide; CTT chr2 60469476 60469497 60469493 60469498 +
ctcacaatacaaagcaatggaa

SEQ ID NO: 196385 - DNA, 22 bp, Artificial Sequence
  Synthetic oligonucleotide; TTC chr2 60469477 60469498 60469494 60469499 +
tcacaatacaaagcaatggaag

SEQ ID NO: 196386 - DNA, 22 bp, Artificial Sequence
  Synthetic oligonucleotide; CTC chr2 60469479 60469500 60469496 60469501 +
acaatacaaagcaatggaagat

SEQ ID NO: 196387 - DNA, 22 bp, Artificial Sequence
  Synthetic oligonucleotide; TTA chr2 60469509 60469530 60469526 60469531 +
gacttctggggtccaaataact

SEQ ID NO: 196388 - DNA, 22 bp, Artificial Sequence
  Synthetic oligonucleotide; CTT chr2 60469514 60469535 60469531 60469536 +
ctggggtccaaataactttgac

SEQ ID NO: 196389 - DNA, 22 bp, Artificial Sequence
  Synthetic oligonucleotide; TTC chr2 60469515 60469536 60469532 60469537 +
tggggtccaaataactttgacc

SEQ ID NO: 196390 - DNA, 22 bp, Artificial Sequence
  Synthetic oligonucleotide; CTG chr2 60469517 60469538 60469534 60469539 +
gggtccaaataactttgaccat

SEQ ID NO: 196391 - DNA, 22 bp, Artificial Sequence
  Synthetic oligonucleotide; CTT chr2 60469532 60469553 60469549 60469554 +
tgaccattaaatgacaaggaaa

SEQ ID NO: 196392 - DNA, 22 bp, Artificial Sequence
  Synthetic oligonucleotide; TTT chr2 60469533 60469554 60469550 60469555 +
gaccattaaatgacaaggaaag

SEQ ID NO: 196393 - DNA, 22 bp, Artificial Sequence
  Synthetic oligonucleotide; TTG chr2 60469534 60469555 60469551 60469556 +
accattaaatgacaaggaaaga

SEQ ID NO: 196394 - DNA, 22 bp, Artificial Sequence
  Synthetic oligonucleotide; TTA chr2 60469541 60469562 60469558 60469563 +
aatgacaaggaaagaaccagca

SEQ ID NO: 196395 - DNA, 22 bp, Artificial Sequence
  Synthetic oligonucleotide; TTC chr2 60469566 60469587 60469583 60469588 +
caataatgccagcacccagaaa

SEQ ID NO: 196396 - DNA, 22 bp, Artificial Sequence
  Synthetic oligonucleotide; CTG chr2 60469593 60469614 60469610 60469615 +
acccatcttcaccattttactg

SEQ ID NO: 196397 - DNA, 22 bp, Artificial Sequence
  Synthetic oligonucleotide; CTT chr2 60469602 60469623 60469619 60469624 +
caccattttactgcactttgtt

SEQ ID NO: 196398 - DNA, 22 bp, Artificial Sequence
  Synthetic oligonucleotide; TTC chr2 60469603 60469624 60469620 60469625 +
accattttactgcactttgttg

SEQ ID NO: 196399 - DNA, 22 bp, Artificial Sequence
  Synthetic oligonucleotide; TTT chr2 60469610 60469631 60469627 60469632 +
tactgcactttgttgtactctg

SEQ ID NO: 196400 - DNA, 22 bp, Artificial Sequence
  Synthetic oligonucleotide; TTT chr2 60469611 60469632 60469628 60469633 +
actgcactttgttgtactctgg

SEQ ID NO: 196401 - DNA, 22 bp, Artificial Sequence
  Synthetic oligonucleotide; TTA chr2 60469612 60469633 60469629 60469634 +
ctgcactttgttgtactctggt

SEQ ID NO: 196402 - DNA, 22 bp, Artificial Sequence
  Synthetic oligonucleotide; CTG chr2 60469615 60469636 60469632 60469637 +
cactttgttgtactctggtgaa

SEQ ID NO: 196403 - DNA, 22 bp, Artificial Sequence
  Synthetic oligonucleotide; CTT chr2 60469620 60469641 60469637 60469642 +
tgttgtactctggtgaagacaa

SEQ ID NO: 196404 - DNA, 22 bp, Artificial Sequence
  Synthetic oligonucleotide; TTT chr2 60469621 60469642 60469638 60469643 +
gttgtactctggtgaagacaag

SEQ ID NO: 196405 - DNA, 22 bp, Artificial Sequence
  Synthetic oligonucleotide; TTG chr2 60469622 60469643 60469639 60469644 +
ttgtactctggtgaagacaagt

SEQ ID NO: 196406 - DNA, 22 bp, Artificial Sequence
  Synthetic oligonucleotide; TTG chr2 60469625 60469646 60469642 60469647 +
tactctggtgaagacaagtgac

SEQ ID NO: 196407 - DNA, 22 bp, Artificial Sequence
  Synthetic oligonucleotide; CTC chr2 60469630 60469651 60469647 60469652 +
tggtgaagacaagtgacttctc

SEQ ID NO: 196408 - DNA, 22 bp, Artificial Sequence
  Synthetic oligonucleotide; CTG chr2 60469632 60469653 60469649 60469654 +
gtgaagacaagtgacttctcac

SEQ ID NO: 196409 - DNA, 22 bp, Artificial Sequence
  Synthetic oligonucleotide; CTT chr2 60469649 60469670 60469666 60469671 +
ctcacactaataaaatgaatct

SEQ ID NO: 196410 - DNA, 22 bp, Artificial Sequence
  Synthetic oligonucleotide; TTC chr2 60469650 60469671 60469667 60469672 +
tcacactaataaaatgaatcta

SEQ ID NO: 196411 - DNA, 22 bp, Artificial Sequence
  Synthetic oligonucleotide; CTC chr2 60469652 60469673 60469669 60469674 +
acactaataaaatgaatctaat

SEQ ID NO: 196412 - DNA, 22 bp, Artificial Sequence
  Synthetic oligonucleotide; CTA chr2 60469658 60469679 60469675 60469680 +
ataaaatgaatctaatagtcaa

SEQ ID NO: 196413 - DNA, 22 bp, Artificial Sequence
  Synthetic oligonucleotide; CTA chr2 60469672 60469693 60469689 60469694 +
atagtcaatgaaacatttgtag

SEQ ID NO: 196414 - DNA, 22 bp, Artificial Sequence
  Synthetic oligonucleotide; TTT chr2 60469690 60469711 60469707 60469712 +
gtagcactgagatttttttgag

SEQ ID NO: 196415 - DNA, 22 bp, Artificial Sequence
  Synthetic oligonucleotide; TTG chr2 60469691 60469712 60469708 60469713 +
tagcactgagatttttttgaga

SEQ ID NO: 196416 - DNA, 22 bp, Artificial Sequence
  Synthetic oligonucleotide; CTG chr2 60469699 60469720 60469716 60469721 +
agatttttttgagaagaggaaa

SEQ ID NO: 196417 - DNA, 22 bp, Artificial Sequence
  Synthetic oligonucleotide; TTT chr2 60469705 60469726 60469722 60469727 +
ttttgagaagaggaaaatttgg

SEQ ID NO: 196418 - DNA, 22 bp, Artificial Sequence
  Synthetic oligonucleotide; TTT chr2 60469706 60469727 60469723 60469728 +
tttgagaagaggaaaatttggt

SEQ ID NO: 196419 - DNA, 22 bp, Artificial Sequence
  Synthetic oligonucleotide; TTT chr2 60469707 60469728 60469724 60469729 +
ttgagaagaggaaaatttggtt

SEQ ID NO: 196420 - DNA, 22 bp, Artificial Sequence
  Synthetic oligonucleotide; TTT chr2 60469708 60469729 60469725 60469730 +
tgagaagaggaaaatttggttt

SEQ ID NO: 196421 - DNA, 22 bp, Artificial Sequence
  Synthetic oligonucleotide; TTT chr2 60469709 60469730 60469726 60469731 +
gagaagaggaaaatttggtttg

SEQ ID NO: 196422 - DNA, 22 bp, Artificial Sequence
  Synthetic oligonucleotide; TTG chr2 60469710 60469731 60469727 60469732 +
agaagaggaaaatttggtttgt

SEQ ID NO: 196423 - DNA, 22 bp, Artificial Sequence
  Synthetic oligonucleotide; TTT chr2 60469725 60469746 60469742 60469747 +
ggtttgtgcaatctggggattt

SEQ ID NO: 196424 - DNA, 22 bp, Artificial Sequence
  Synthetic oligonucleotide; TTG chr2 60469726 60469747 60469743 60469748 +
gtttgtgcaatctggggatttt

SEQ ID NO: 196425 - DNA, 22 bp, Artificial Sequence
  Synthetic oligonucleotide; TTT chr2 60469730 60469751 60469747 60469752 +
gtgcaatctggggattttacgg

SEQ ID NO: 196426 - DNA, 22 bp, Artificial Sequence
  Synthetic oligonucleotide; TTG chr2 60469731 60469752 60469748 60469753 +
tgcaatctggggattttacggt

SEQ ID NO: 196427 - DNA, 22 bp, Artificial Sequence
  Synthetic oligonucleotide; CTG chr2 60469740 60469761 60469757 60469762 +
gggattttacggtttatgtggt

SEQ ID NO: 196428 - DNA, 22 bp, Artificial Sequence
  Synthetic oligonucleotide; TTT chr2 60469747 60469768 60469764 60469769 +
tacggtttatgtggtaagtgcc

SEQ ID NO: 196429 - DNA, 22 bp, Artificial Sequence
  Synthetic oligonucleotide; TTT chr2 60469748 60469769 60469765 60469770 +
acggtttatgtggtaagtgcct

SEQ ID NO: 196430 - DNA, 22 bp, Artificial Sequence
  Synthetic oligonucleotide; TTA chr2 60469749 60469770 60469766 60469771 +
cggtttatgtggtaagtgccta

SEQ ID NO: 196431 - DNA, 22 bp, Artificial Sequence
  Synthetic oligonucleotide; TTT chr2 60469755 60469776 60469772 60469777 +
atgtggtaagtgcctagctttt

SEQ ID NO: 196432 - DNA, 22 bp, Artificial Sequence
  Synthetic oligonucleotide; TTA chr2 60469756 60469777 60469773 60469778 +
tgtggtaagtgcctagcttttc

SEQ ID NO: 196433 - DNA, 22 bp, Artificial Sequence
  Synthetic oligonucleotide; CTA chr2 60469771 60469792 60469788 60469793 +
gcttttccaagtcctcctctag

SEQ ID NO: 196434 - DNA, 22 bp, Artificial Sequence
  Synthetic oligonucleotide; CTT chr2 60469775 60469796 60469792 60469797 +
ttccaagtcctcctctagctaa

SEQ ID NO: 196435 - DNA, 22 bp, Artificial Sequence
  Synthetic oligonucleotide; TTT chr2 60469776 60469797 60469793 60469798 +
tccaagtcctcctctagctaac

SEQ ID NO: 196436 - DNA, 22 bp, Artificial Sequence
  Synthetic oligonucleotide; TTT chr2 60469777 60469798 60469794 60469799 +
ccaagtcctcctctagctaact

SEQ ID NO: 196437 - DNA, 22 bp, Artificial Sequence
  Synthetic oligonucleotide; TTC chr2 60469778 60469799 60469795 60469800 +
caagtcctcctctagctaacta

SEQ ID NO: 196438 - DNA, 22 bp, Artificial Sequence
  Synthetic oligonucleotide; CTC chr2 60469787 60469808 60469804 60469809 +
ctctagctaactaaccatgtag

SEQ ID NO: 196439 - DNA, 22 bp, Artificial Sequence
  Synthetic oligonucleotide; CTC chr2 60469790 60469811 60469807 60469812 +
tagctaactaaccatgtagctg

SEQ ID NO: 196440 - DNA, 22 bp, Artificial Sequence
  Synthetic oligonucleotide; CTA chr2 60469792 60469813 60469809 60469814 +
gctaactaaccatgtagctgtc

SEQ ID NO: 196441 - DNA, 22 bp, Artificial Sequence
  Synthetic oligonucleotide; CTA chr2 60469796 60469817 60469813 60469818 +
actaaccatgtagctgtccatc

SEQ ID NO: 196442 - DNA, 22 bp, Artificial Sequence
  Synthetic oligonucleotide; CTA chr2 60469800 60469821 60469817 60469822 +
accatgtagctgtccatcttga

SEQ ID NO: 196443 - DNA, 22 bp, Artificial Sequence
  Synthetic oligonucleotide; CTG chr2 60469812 60469833 60469829 60469834 +
tccatcttgagacagactggag

SEQ ID NO: 196444 - DNA, 22 bp, Artificial Sequence
  Synthetic oligonucleotide; CTT chr2 60469820 60469841 60469837 60469842 +
gagacagactggaggatagatg

SEQ ID NO: 196445 - DNA, 22 bp, Artificial Sequence
  Synthetic oligonucleotide; TTG chr2 60469821 60469842 60469838 60469843 +
agacagactggaggatagatgg

SEQ ID NO: 196446 - DNA, 22 bp, Artificial Sequence
  Synthetic oligonucleotide; CTG chr2 60469831 60469852 60469848 60469853 +
gaggatagatggtgcaggagac

SEQ ID NO: 196447 - DNA, 22 bp, Artificial Sequence
  Synthetic oligonucleotide; CTC chr2 60469857 60469878 60469874 60469879 +
tgtgtgttctagaggtttggag

SEQ ID NO: 196448 - DNA, 22 bp, Artificial Sequence
  Synthetic oligonucleotide; CTG chr2 60469859 60469880 60469876 60469881 +
tgtgttctagaggtttggagtt

SEQ ID NO: 196449 - DNA, 22 bp, Artificial Sequence
  Synthetic oligonucleotide; TTC chr2 60469866 60469887 60469883 60469888 +
tagaggtttggagttcatgatg

SEQ ID NO: 196450 - DNA, 22 bp, Artificial Sequence
  Synthetic oligonucleotide; CTA chr2 60469868 60469889 60469885 60469890 +
gaggtttggagttcatgatgat

SEQ ID NO: 196451 - DNA, 22 bp, Artificial Sequence
  Synthetic oligonucleotide; TTT chr2 60469875 60469896 60469892 60469897 +
ggagttcatgatgattggggag

SEQ ID NO: 196452 - DNA, 22 bp, Artificial Sequence
  Synthetic oligonucleotide; TTG chr2 60469876 60469897 60469893 60469898 +
gagttcatgatgattggggagg

SEQ ID NO: 196453 - DNA, 22 bp, Artificial Sequence
  Synthetic oligonucleotide; TTC chr2 60469882 60469903 60469899 60469904 +
atgatgattggggagggcggga

SEQ ID NO: 196454 - DNA, 22 bp, Artificial Sequence
  Synthetic oligonucleotide; TTG chr2 60469892 60469913 60469909 60469914 +
gggagggcgggagacaagaaaa

SEQ ID NO: 196455 - DNA, 22 bp, Artificial Sequence
  Synthetic oligonucleotide; CTT chr2 60469922 60469943 60469939 60469944 +
tgatggtgaacaaacagtatgt

SEQ ID NO: 196456 - DNA, 22 bp, Artificial Sequence
  Synthetic oligonucleotide; TTT chr2 60469923 60469944 60469940 60469945 +
gatggtgaacaaacagtatgtt

SEQ ID NO: 196457 - DNA, 22 bp, Artificial Sequence
  Synthetic oligonucleotide; TTG chr2 60469924 60469945 60469941 60469946 +
atggtgaacaaacagtatgttt

SEQ ID NO: 196458 - DNA, 22 bp, Artificial Sequence
  Synthetic oligonucleotide; TTT chr2 60469946 60469967 60469963 60469968 +
tccattagcttaatattaagag

SEQ ID NO: 196459 - DNA, 22 bp, Artificial Sequence
  Synthetic oligonucleotide; TTT chr2 60469947 60469968 60469964 60469969 +
ccattagcttaatattaagagc

SEQ ID NO: 196460 - DNA, 22 bp, Artificial Sequence
  Synthetic oligonucleotide; TTC chr2 60469948 60469969 60469965 60469970 +
cattagcttaatattaagagca

SEQ ID NO: 196461 - DNA, 22 bp, Artificial Sequence
  Synthetic oligonucleotide; TTA chr2 60469953 60469974 60469970 60469975 +
gcttaatattaagagcacttag

SEQ ID NO: 196462 - DNA, 22 bp, Artificial Sequence
  Synthetic oligonucleotide; CTT chr2 60469957 60469978 60469974 60469979 +
aatattaagagcacttagaagt

SEQ ID NO: 196463 - DNA, 22 bp, Artificial Sequence
  Synthetic oligonucleotide; TTA chr2 60469958 60469979 60469975 60469980 +
atattaagagcacttagaagtg

SEQ ID NO: 196464 - DNA, 22 bp, Artificial Sequence
  Synthetic oligonucleotide; TTA chr2 60469964 60469985 60469981 60469986 +
agagcacttagaagtgttgttg

SEQ ID NO: 196465 - DNA, 22 bp, Artificial Sequence
  Synthetic oligonucleotide; CTT chr2 60469973 60469994 60469990 60469995 +
agaagtgttgttgttgtactct

SEQ ID NO: 196466 - DNA, 22 bp, Artificial Sequence
  Synthetic oligonucleotide; TTA chr2 60469974 60469995 60469991 60469996 +
gaagtgttgttgttgtactcta

SEQ ID NO: 196467 - DNA, 22 bp, Artificial Sequence
  Synthetic oligonucleotide; TTG chr2 60469983 60470004 60470000 60470005 +
ttgttgtactctaggatagcag

SEQ ID NO: 196468 - DNA, 22 bp, Artificial Sequence
  Synthetic oligonucleotide; TTG chr2 60469986 60470007 60470003 60470008 +
ttgtactctaggatagcaggtc

SEQ ID NO: 196469 - DNA, 22 bp, Artificial Sequence
  Synthetic oligonucleotide; TTG chr2 60469989 60470010 60470006 60470011 +
tactctaggatagcaggtctca

SEQ ID NO: 196470 - DNA, 22 bp, Artificial Sequence
  Synthetic oligonucleotide; CTC chr2 60469994 60470015 60470011 60470016 +
taggatagcaggtctcaagtgt

SEQ ID NO: 196471 - DNA, 22 bp, Artificial Sequence
  Synthetic oligonucleotide; CTA chr2 60469996 60470017 60470013 60470018 +
ggatagcaggtctcaagtgtaa

SEQ ID NO: 196472 - DNA, 22 bp, Artificial Sequence
  Synthetic oligonucleotide; CTC chr2 60470010 60470031 60470027 60470032 +
aagtgtaaaatacatcctgttc

SEQ ID NO: 196473 - DNA, 22 bp, Artificial Sequence
  Synthetic oligonucleotide; CTG chr2 60470029 60470050 60470046 60470051 +
ttctccttatatagagcacact

SEQ ID NO: 196474 - DNA, 22 bp, Artificial Sequence
  Synthetic oligonucleotide; TTC chr2 60470032 60470053 60470049 60470054 +
tccttatatagagcacactgcc

SEQ ID NO: 196475 - DNA, 22 bp, Artificial Sequence
  Synthetic oligonucleotide; CTC chr2 60470034 60470055 60470051 60470056 +
cttatatagagcacactgccaa

SEQ ID NO: 196476 - DNA, 22 bp, Artificial Sequence
  Synthetic oligonucleotide; CTT chr2 60470037 60470058 60470054 60470059 +
atatagagcacactgccaagca

SEQ ID NO: 196477 - DNA, 22 bp, Artificial Sequence
  Synthetic oligonucleotide; TTA chr2 60470038 60470059 60470055 60470060 +
tatagagcacactgccaagcac

SEQ ID NO: 196478 - DNA, 22 bp, Artificial Sequence
  Synthetic oligonucleotide; CTG chr2 60470052 60470073 60470069 60470074 +
ccaagcacagccaaggcagttg

SEQ ID NO: 196479 - DNA, 22 bp, Artificial Sequence
  Synthetic oligonucleotide; TTG chr2 60470074 60470095 60470091 60470096 +
ggacaagatttcctttcgcaag

SEQ ID NO: 196480 - DNA, 22 bp, Artificial Sequence
  Synthetic oligonucleotide; TTT chr2 60470085 60470106 60470102 60470107 +
cctttcgcaaggagcctggtgg

SEQ ID NO: 196481 - DNA, 22 bp, Artificial Sequence
  Synthetic oligonucleotide; TTC chr2 60470086 60470107 60470103 60470108 +
ctttcgcaaggagcctggtggg

SEQ ID NO: 196482 - DNA, 22 bp, Artificial Sequence
  Synthetic oligonucleotide; CTT chr2 60470089 60470110 60470106 60470111 +
tcgcaaggagcctggtgggtaa

SEQ ID NO: 196483 - DNA, 22 bp, Artificial Sequence
  Synthetic oligonucleotide; TTT chr2 60470090 60470111 60470107 60470112 +
cgcaaggagcctggtgggtaac

SEQ ID NO: 196484 - DNA, 22 bp, Artificial Sequence
  Synthetic oligonucleotide; TTC chr2 60470091 60470112 60470108 60470113 +
gcaaggagcctggtgggtaacg

SEQ ID NO: 196485 - DNA, 22 bp, Artificial Sequence
  Synthetic oligonucleotide; CTG chr2 60470103 60470124 60470120 60470125 +
gtgggtaacgatggtgtgctgc

SEQ ID NO: 196486 - DNA, 22 bp, Artificial Sequence
  Synthetic oligonucleotide; CTG chr2 60470124 60470145 60470141 60470146 +
ctgagaaggctcttacacagac

SEQ ID NO: 196487 - DNA, 22 bp, Artificial Sequence
  Synthetic oligonucleotide; CTG chr2 60470127 60470148 60470144 60470149 +
agaaggctcttacacagacagc

SEQ ID NO: 196488 - DNA, 22 bp, Artificial Sequence
  Synthetic oligonucleotide; CTC chr2 60470136 60470157 60470153 60470158 +
ttacacagacagcataggtctg

SEQ ID NO: 196489 - DNA, 22 bp, Artificial Sequence
  Synthetic oligonucleotide; CTT chr2 60470138 60470159 60470155 60470160 +
acacagacagcataggtctgct

SEQ ID NO: 196490 - DNA, 22 bp, Artificial Sequence
  Synthetic oligonucleotide; TTA chr2 60470139 60470160 60470156 60470161 +
cacagacagcataggtctgctg

SEQ ID NO: 196491 - DNA, 22 bp, Artificial Sequence
  Synthetic oligonucleotide; CTG chr2 60470158 60470179 60470175 60470180 +
ctgttaccaggcctgcagaggg

SEQ ID NO: 196492 - DNA, 22 bp, Artificial Sequence
  Synthetic oligonucleotide; CTG chr2 60470161 60470182 60470178 60470183 +
ttaccaggcctgcagagggaag

SEQ ID NO: 196493 - DNA, 22 bp, Artificial Sequence
  Synthetic oligonucleotide; TTA chr2 60470164 60470185 60470181 60470186 +
ccaggcctgcagagggaagccc

SEQ ID NO: 196494 - DNA, 22 bp, Artificial Sequence
  Synthetic oligonucleotide; CTG chr2 60470173 60470194 60470190 60470195 +
cagagggaagccctggtggaag

SEQ ID NO: 196495 - DNA, 22 bp, Artificial Sequence
  Synthetic oligonucleotide; CTG chr2 60470188 60470209 60470205 60470210 +
gtggaagcaccacctagcctga

SEQ ID NO: 196496 - DNA, 22 bp, Artificial Sequence
  Synthetic oligonucleotide; CTA chr2 60470204 60470225 60470221 60470226 +
gcctgagaacatctacagagac

SEQ ID NO: 196497 - DNA, 22 bp, Artificial Sequence
  Synthetic oligonucleotide; CTG chr2 60470209 60470230 60470226 60470231 +
agaacatctacagagacatttc

SEQ ID NO: 196498 - DNA, 22 bp, Artificial Sequence
  Synthetic oligonucleotide; CTA chr2 60470219 60470240 60470236 60470241 +
cagagacatttcatcctctctg

SEQ ID NO: 196499 - DNA, 22 bp, Artificial Sequence
  Synthetic oligonucleotide; TTT chr2 60470230 60470251 60470247 60470252 +
catcctctctgacccaaaacaa

SEQ ID NO: 196500 - DNA, 22 bp, Artificial Sequence
  Synthetic oligonucleotide; TTC chr2 60470231 60470252 60470248 60470253 +
atcctctctgacccaaaacaaa

SEQ ID NO: 196501 - DNA, 22 bp, Artificial Sequence
  Synthetic oligonucleotide; CTC chr2 60470237 60470258 60470254 60470259 +
tctgacccaaaacaaaataaac

SEQ ID NO: 196502 - DNA, 22 bp, Artificial Sequence
  Synthetic oligonucleotide; CTC chr2 60470239 60470260 60470256 60470261 +
tgacccaaaacaaaataaacac

SEQ ID NO: 196503 - DNA, 22 bp, Artificial Sequence
  Synthetic oligonucleotide; CTG chr2 60470241 60470262 60470258 60470263 +
acccaaaacaaaataaacacca

SEQ ID NO: 196504 - DNA, 22 bp, Artificial Sequence
  Synthetic oligonucleotide; CTT chr2 60470298 60470319 60470315 60470320 +
aacaaacaagtatgtctacatt

SEQ ID NO: 196505 - DNA, 22 bp, Artificial Sequence
  Synthetic oligonucleotide; TTA chr2 60470299 60470320 60470316 60470321 +
acaaacaagtatgtctacattt

SEQ ID NO: 196506 - DNA, 22 bp, Artificial Sequence
  Synthetic oligonucleotide; CTA chr2 60470316 60470337 60470333 60470338 +
catttgactgtttacgtcaagt

SEQ ID NO: 196507 - DNA, 22 bp, Artificial Sequence
  Synthetic oligonucleotide; TTT chr2 60470321 60470342 60470338 60470343 +
gactgtttacgtcaagtgaatt

SEQ ID NO: 196508 - DNA, 22 bp, Artificial Sequence
  Synthetic oligonucleotide; TTG chr2 60470322 60470343 60470339 60470344 +
actgtttacgtcaagtgaattg

SEQ ID NO: 196509 - DNA, 22 bp, Artificial Sequence
  Synthetic oligonucleotide; CTG chr2 60470326 60470347 60470343 60470348 +
tttacgtcaagtgaattgagag

SEQ ID NO: 196510 - DNA, 22 bp, Artificial Sequence
  Synthetic oligonucleotide; TTT chr2 60470329 60470350 60470346 60470351 +
acgtcaagtgaattgagagtgt

SEQ ID NO: 196511 - DNA, 22 bp, Artificial Sequence
  Synthetic oligonucleotide; TTA chr2 60470330 60470351 60470347 60470352 +
cgtcaagtgaattgagagtgtg

SEQ ID NO: 196512 - DNA, 22 bp, Artificial Sequence
  Synthetic oligonucleotide; TTG chr2 60470344 60470365 60470361 60470366 +
agagtgtggcgtaaaattacta

SEQ ID NO: 196513 - DNA, 22 bp, Artificial Sequence
  Synthetic oligonucleotide; TTA chr2 60470363 60470384 60470380 60470385 +
ctacagattttgtcatggtatt

SEQ ID NO: 196514 - DNA, 22 bp, Artificial Sequence
  Synthetic oligonucleotide; CTA chr2 60470366 60470387 60470383 60470388 +
cagattttgtcatggtattttt

SEQ ID NO: 196515 - DNA, 22 bp, Artificial Sequence
  Synthetic oligonucleotide; TTT chr2 60470373 60470394 60470390 60470395 +
tgtcatggtatttttcaatgag

SEQ ID NO: 196516 - DNA, 22 bp, Artificial Sequence
  Synthetic oligonucleotide; TTT chr2 60470374 60470395 60470391 60470396 +
gtcatggtatttttcaatgaga

SEQ ID NO: 196517 - DNA, 22 bp, Artificial Sequence
  Synthetic oligonucleotide; TTG chr2 60470375 60470396 60470392 60470397 +
tcatggtatttttcaatgagaa

SEQ ID NO: 196518 - DNA, 22 bp, Artificial Sequence
  Synthetic oligonucleotide; TTT chr2 60470386 60470407 60470403 60470408 +
ttcaatgagaaatctgagaatc

SEQ ID NO: 196519 - DNA, 22 bp, Artificial Sequence
  Synthetic oligonucleotide; TTT chr2 60470387 60470408 60470404 60470409 +
tcaatgagaaatctgagaatcc

SEQ ID NO: 196520 - DNA, 22 bp, Artificial Sequence
  Synthetic oligonucleotide; TTT chr2 60470388 60470409 60470405 60470410 +
caatgagaaatctgagaatcca

SEQ ID NO: 196521 - DNA, 22 bp, Artificial Sequence
  Synthetic oligonucleotide; TTC chr2 60470389 60470410 60470406 60470411 +
aatgagaaatctgagaatccat

SEQ ID NO: 196522 - DNA, 22 bp, Artificial Sequence
  Synthetic oligonucleotide; CTG chr2 60470402 60470423 60470419 60470424 +
agaatccatctttgcacttgtt

SEQ ID NO: 196523 - DNA, 22 bp, Artificial Sequence
  Synthetic oligonucleotide; CTT chr2 60470414 60470435 60470431 60470436 +
tgcacttgtttttgcctcagcc

SEQ ID NO: 196524 - DNA, 22 bp, Artificial Sequence
  Synthetic oligonucleotide; TTT chr2 60470415 60470436 60470432 60470437 +
gcacttgtttttgcctcagccg

SEQ ID NO: 196525 - DNA, 22 bp, Artificial Sequence
  Synthetic oligonucleotide; TTG chr2 60470416 60470437 60470433 60470438 +
cacttgtttttgcctcagccgt

SEQ ID NO: 196526 - DNA, 22 bp, Artificial Sequence
  Synthetic oligonucleotide; CTT chr2 60470421 60470442 60470438 60470443 +
gtttttgcctcagccgttcact

SEQ ID NO: 196527 - DNA, 22 bp, Artificial Sequence
  Synthetic oligonucleotide; TTG chr2 60470422 60470443 60470439 60470444 +
tttttgcctcagccgttcacta

SEQ ID NO: 196528 - DNA, 22 bp, Artificial Sequence
  Synthetic oligonucleotide; TTT chr2 60470425 60470446 60470442 60470447 +
ttgcctcagccgttcactaagt

SEQ ID NO: 196529 - DNA, 22 bp, Artificial Sequence
  Synthetic oligonucleotide; TTT chr2 60470426 60470447 60470443 60470448 +
tgcctcagccgttcactaagtt

SEQ ID NO: 196530 - DNA, 22 bp, Artificial Sequence
  Synthetic oligonucleotide; TTT chr2 60470427 60470448 60470444 60470449 +
gcctcagccgttcactaagttt

SEQ ID NO: 196531 - DNA, 22 bp, Artificial Sequence
  Synthetic oligonucleotide; TTG chr2 60470428 60470449 60470445 60470450 +
cctcagccgttcactaagtttg

SEQ ID NO: 196532 - DNA, 22 bp, Artificial Sequence
  Synthetic oligonucleotide; CTC chr2 60470432 60470453 60470449 60470454 +
agccgttcactaagtttgctgc

SEQ ID NO: 196533 - DNA, 22 bp, Artificial Sequence
  Synthetic oligonucleotide; TTC chr2 60470440 60470461 60470457 60470462 +
actaagtttgctgccaaaacag

SEQ ID NO: 196534 - DNA, 22 bp, Artificial Sequence
  Synthetic oligonucleotide; CTA chr2 60470444 60470465 60470461 60470466 +
agtttgctgccaaaacagacat

SEQ ID NO: 196535 - DNA, 22 bp, Artificial Sequence
  Synthetic oligonucleotide; TTT chr2 60470449 60470470 60470466 60470471 +
gctgccaaaacagacatccttt

SEQ ID NO: 196536 - DNA, 22 bp, Artificial Sequence
  Synthetic oligonucleotide; TTG chr2 60470450 60470471 60470467 60470472 +
ctgccaaaacagacatcctttt

SEQ ID NO: 196537 - DNA, 22 bp, Artificial Sequence
  Synthetic oligonucleotide; CTG chr2 60470453 60470474 60470470 60470475 +
ccaaaacagacatccttttctt

SEQ ID NO: 196538 - DNA, 22 bp, Artificial Sequence
  Synthetic oligonucleotide; CTT chr2 60470470 60470491 60470487 60470492 +
ttcttaggaaacacaggcaacc

SEQ ID NO: 196539 - DNA, 22 bp, Artificial Sequence
  Synthetic oligonucleotide; TTT chr2 60470471 60470492 60470488 60470493 +
tcttaggaaacacaggcaaccc

SEQ ID NO: 196540 - DNA, 22 bp, Artificial Sequence
  Synthetic oligonucleotide; TTT chr2 60470472 60470493 60470489 60470494 +
cttaggaaacacaggcaaccca

SEQ ID NO: 196541 - DNA, 22 bp, Artificial Sequence
  Synthetic oligonucleotide; TTC chr2 60470473 60470494 60470490 60470495 +
ttaggaaacacaggcaacccag

SEQ ID NO: 196542 - DNA, 22 bp, Artificial Sequence
  Synthetic oligonucleotide; CTT chr2 60470475 60470496 60470492 60470497 +
aggaaacacaggcaacccaggt

SEQ ID NO: 196543 - DNA, 22 bp, Artificial Sequence
  Synthetic oligonucleotide; TTA chr2 60470476 60470497 60470493 60470498 +
ggaaacacaggcaacccaggta

SEQ ID NO: 196544 - DNA, 22 bp, Artificial Sequence
  Synthetic oligonucleotide; CTC chr2 60470502 60470523 60470519 60470524 +
tgtgatcccagcataaacgcaa

SEQ ID NO: 196545 - DNA, 22 bp, Artificial Sequence
  Synthetic oligonucleotide; CTG chr2 60470504 60470525 60470521 60470526 +
tgatcccagcataaacgcaaca

SEQ ID NO: 196546 - DNA, 22 bp, Artificial Sequence
  Synthetic oligonucleotide; CTT chr2 60470533 60470554 60470550 60470555 +
ggatccttgtatggggagtatc

SEQ ID NO: 196547 - DNA, 22 bp, Artificial Sequence
  Synthetic oligonucleotide; TTG chr2 60470534 60470555 60470551 60470556 +
gatccttgtatggggagtatca

SEQ ID NO: 196548 - DNA, 22 bp, Artificial Sequence
  Synthetic oligonucleotide; CTT chr2 60470541 60470562 60470558 60470563 +
gtatggggagtatcaaatttca

SEQ ID NO: 196549 - DNA, 22 bp, Artificial Sequence
  Synthetic oligonucleotide; TTG chr2 60470542 60470563 60470559 60470564 +
tatggggagtatcaaatttcaa

SEQ ID NO: 196550 - DNA, 22 bp, Artificial Sequence
  Synthetic oligonucleotide; TTT chr2 60470561 60470582 60470578 60470583 +
caaattctctgccacttactct

SEQ ID NO: 196551 - DNA, 22 bp, Artificial Sequence
  Synthetic oligonucleotide; TTC chr2 60470562 60470583 60470579 60470584 +
aaattctctgccacttactctg

SEQ ID NO: 196552 - DNA, 22 bp, Artificial Sequence
  Synthetic oligonucleotide; TTC chr2 60470568 60470589 60470585 60470590 +
tctgccacttactctgggaaga

SEQ ID NO: 196553 - DNA, 22 bp, Artificial Sequence
  Synthetic oligonucleotide; CTC chr2 60470570 60470591 60470587 60470592 +
tgccacttactctgggaagaga

SEQ ID NO: 196554 - DNA, 22 bp, Artificial Sequence
  Synthetic oligonucleotide; CTG chr2 60470572 60470593 60470589 60470594 +
ccacttactctgggaagagacc

SEQ ID NO: 196555 - DNA, 22 bp, Artificial Sequence
  Synthetic oligonucleotide; CTT chr2 60470578 60470599 60470595 60470600 +
actctgggaagagaccctgaag

SEQ ID NO: 196556 - DNA, 22 bp, Artificial Sequence
  Synthetic oligonucleotide; TTA chr2 60470579 60470600 60470596 60470601 +
ctctgggaagagaccctgaagt

SEQ ID NO: 196557 - DNA, 22 bp, Artificial Sequence
  Synthetic oligonucleotide; CTC chr2 60470582 60470603 60470599 60470604 +
tgggaagagaccctgaagtgct

SEQ ID NO: 196558 - DNA, 22 bp, Artificial Sequence
  Synthetic oligonucleotide; CTG chr2 60470584 60470605 60470601 60470606 +
ggaagagaccctgaagtgcttc

SEQ ID NO: 196559 - DNA, 22 bp, Artificial Sequence
  Synthetic oligonucleotide; CTG chr2 60470597 60470618 60470614 60470619 +
aagtgcttcagcaggcctccag

SEQ ID NO: 196560 - DNA, 22 bp, Artificial Sequence
  Synthetic oligonucleotide; CTT chr2 60470605 60470626 60470622 60470627 +
cagcaggcctccagcaagaaat

SEQ ID NO: 196561 - DNA, 22 bp, Artificial Sequence
  Synthetic oligonucleotide; TTC chr2 60470606 60470627 60470623 60470628 +
agcaggcctccagcaagaaatg

SEQ ID NO: 196562 - DNA, 22 bp, Artificial Sequence
  Synthetic oligonucleotide; CTC chr2 60470616 60470637 60470633 60470638 +
cagcaagaaatgggagaactgc

SEQ ID NO: 196563 - DNA, 22 bp, Artificial Sequence
  Synthetic oligonucleotide; CTG chr2 60470637 60470658 60470654 60470659 +
ctaacctaatccatgcctagcc

SEQ ID NO: 196564 - DNA, 22 bp, Artificial Sequence
  Synthetic oligonucleotide; CTA chr2 60470640 60470661 60470657 60470662 +
acctaatccatgcctagcccct

SEQ ID NO: 196565 - DNA, 22 bp, Artificial Sequence
  Synthetic oligonucleotide; CTA chr2 60470645 60470666 60470662 60470667 +
atccatgcctagcccctcgcat

SEQ ID NO: 196566 - DNA, 22 bp, Artificial Sequence
  Synthetic oligonucleotide; CTA chr2 60470656 60470677 60470673 60470678 +
gcccctcgcatgaatctcttgt

SEQ ID NO: 196567 - DNA, 22 bp, Artificial Sequence
  Synthetic oligonucleotide; CTC chr2 60470663 60470684 60470680 60470685 +
gcatgaatctcttgttggcaaa

SEQ ID NO: 196568 - DNA, 22 bp, Artificial Sequence
  Synthetic oligonucleotide; CTC chr2 60470674 60470695 60470691 60470696 +
ttgttggcaaacttgtctacaa

SEQ ID NO: 196569 - DNA, 22 bp, Artificial Sequence
  Synthetic oligonucleotide; CTT chr2 60470676 60470697 60470693 60470698 +
gttggcaaacttgtctacaaac

SEQ ID NO: 196570 - DNA, 22 bp, Artificial Sequence
  Synthetic oligonucleotide; TTG chr2 60470677 60470698 60470694 60470699 +
ttggcaaacttgtctacaaacc

SEQ ID NO: 196571 - DNA, 22 bp, Artificial Sequence
  Synthetic oligonucleotide; TTG chr2 60470680 60470701 60470697 60470702 +
gcaaacttgtctacaaacccat

SEQ ID NO: 196572 - DNA, 22 bp, Artificial Sequence
  Synthetic oligonucleotide; CTT chr2 60470688 60470709 60470705 60470710 +
gtctacaaacccattagcccta

SEQ ID NO: 196573 - DNA, 22 bp, Artificial Sequence
  Synthetic oligonucleotide; TTG chr2 60470689 60470710 60470706 60470711 +
tctacaaacccattagccctaa

SEQ ID NO: 196574 - DNA, 22 bp, Artificial Sequence
  Synthetic oligonucleotide; CTA chr2 60470693 60470714 60470710 60470715 +
caaacccattagccctaaacaa

SEQ ID NO: 196575 - DNA, 22 bp, Artificial Sequence
  Synthetic oligonucleotide; TTA chr2 60470704 60470725 60470721 60470726 +
gccctaaacaagctgacggcag

SEQ ID NO: 196576 - DNA, 22 bp, Artificial Sequence
  Synthetic oligonucleotide; CTA chr2 60470710 60470731 60470727 60470732 +
aacaagctgacggcaggaccag

SEQ ID NO: 196577 - DNA, 22 bp, Artificial Sequence
  Synthetic oligonucleotide; CTG chr2 60470719 60470740 60470736 60470741 +
acggcaggaccagatctctaca

SEQ ID NO: 196578 - DNA, 22 bp, Artificial Sequence
  Synthetic oligonucleotide; CTC chr2 60470737 60470758 60470754 60470759 +
tacagtgtctggccgtgtggca

SEQ ID NO: 196579 - DNA, 22 bp, Artificial Sequence
  Synthetic oligonucleotide; CTA chr2 60470739 60470760 60470756 60470761 +
cagtgtctggccgtgtggcaaa

SEQ ID NO: 196580 - DNA, 22 bp, Artificial Sequence
  Synthetic oligonucleotide; CTG chr2 60470748 60470769 60470765 60470770 +
gccgtgtggcaaagtgaggtct

SEQ ID NO: 196581 - DNA, 22 bp, Artificial Sequence
  Synthetic oligonucleotide; CTC chr2 60470771 60470792 60470788 60470793 +
atctgactatctggcagcatag

SEQ ID NO: 196582 - DNA, 22 bp, Artificial Sequence
  Synthetic oligonucleotide; CTG chr2 60470776 60470797 60470793 60470798 +
actatctggcagcatagtttgt

SEQ ID NO: 196583 - DNA, 22 bp, Artificial Sequence
  Synthetic oligonucleotide; CTA chr2 60470780 60470801 60470797 60470802 +
tctggcagcatagtttgttttt

SEQ ID NO: 196584 - DNA, 22 bp, Artificial Sequence
  Synthetic oligonucleotide; CTG chr2 60470784 60470805 60470801 60470806 +
gcagcatagtttgtttttgttt

SEQ ID NO: 196585 - DNA, 22 bp, Artificial Sequence
  Synthetic oligonucleotide; TTT chr2 60470796 60470817 60470813 60470818 +
gtttttgtttttgtttttgttt

SEQ ID NO: 196586 - DNA, 22 bp, Artificial Sequence
  Synthetic oligonucleotide; TTG chr2 60470797 60470818 60470814 60470819 +
tttttgtttttgtttttgtttt

SEQ ID NO: 196587 - DNA, 22 bp, Artificial Sequence
  Synthetic oligonucleotide; TTT chr2 60470800 60470821 60470817 60470822 +
ttgtttttgtttttgtttttgt

SEQ ID NO: 196588 - DNA, 22 bp, Artificial Sequence
  Synthetic oligonucleotide; TTT chr2 60470801 60470822 60470818 60470823 +
tgtttttgtttttgtttttgtt

SEQ ID NO: 196589 - DNA, 22 bp, Artificial Sequence
  Synthetic oligonucleotide; TTT chr2 60470802 60470823 60470819 60470824 +
gtttttgtttttgtttttgttt

SEQ ID NO: 196590 - DNA, 22 bp, Artificial Sequence
  Synthetic oligonucleotide; TTG chr2 60470803 60470824 60470820 60470825 +
tttttgtttttgtttttgtttt

SEQ ID NO: 196591 - DNA, 22 bp, Artificial Sequence
  Synthetic oligonucleotide; TTT chr2 60470806 60470827 60470823 60470828 +
ttgtttttgtttttgttttcta

SEQ ID NO: 196592 - DNA, 22 bp, Artificial Sequence
  Synthetic oligonucleotide; TTT chr2 60470807 60470828 60470824 60470829 +
tgtttttgtttttgttttctaa

SEQ ID NO: 196593 - DNA, 22 bp, Artificial Sequence
  Synthetic oligonucleotide; TTT chr2 60470808 60470829 60470825 60470830 +
gtttttgtttttgttttctaag

SEQ ID NO: 196594 - DNA, 22 bp, Artificial Sequence
  Synthetic oligonucleotide; TTG chr2 60470809 60470830 60470826 60470831 +
tttttgtttttgttttctaagt

SEQ ID NO: 196595 - DNA, 22 bp, Artificial Sequence
  Synthetic oligonucleotide; TTT chr2 60470812 60470833 60470829 60470834 +
ttgtttttgttttctaagttgt

SEQ ID NO: 196596 - DNA, 22 bp, Artificial Sequence
  Synthetic oligonucleotide; TTT chr2 60470813 60470834 60470830 60470835 +
tgtttttgttttctaagttgta

SEQ ID NO: 196597 - DNA, 22 bp, Artificial Sequence
  Synthetic oligonucleotide; TTT chr2 60470814 60470835 60470831 60470836 +
gtttttgttttctaagttgtaa

SEQ ID NO: 196598 - DNA, 22 bp, Artificial Sequence
  Synthetic oligonucleotide; TTG chr2 60470815 60470836 60470832 60470837 +
tttttgttttctaagttgtaaa

SEQ ID NO: 196599 - DNA, 22 bp, Artificial Sequence
  Synthetic oligonucleotide; TTT chr2 60470818 60470839 60470835 60470840 +
ttgttttctaagttgtaaaaaa

SEQ ID NO: 196600 - DNA, 22 bp, Artificial Sequence
  Synthetic oligonucleotide; TTT chr2 60470819 60470840 60470836 60470841 +
tgttttctaagttgtaaaaaac

SEQ ID NO: 196601 - DNA, 22 bp, Artificial Sequence
  Synthetic oligonucleotide; TTT chr2 60470820 60470841 60470837 60470842 +
gttttctaagttgtaaaaaacc

SEQ ID NO: 196602 - DNA, 22 bp, Artificial Sequence
  Synthetic oligonucleotide; TTG chr2 60470821 60470842 60470838 60470843 +
ttttctaagttgtaaaaaaccc

SEQ ID NO: 196603 - DNA, 22 bp, Artificial Sequence
  Synthetic oligonucleotide; TTT chr2 60470824 60470845 60470841 60470846 +
tctaagttgtaaaaaaccctag

SEQ ID NO: 196604 - DNA, 22 bp, Artificial Sequence
  Synthetic oligonucleotide; TTT chr2 60470825 60470846 60470842 60470847 +
ctaagttgtaaaaaaccctagc

SEQ ID NO: 196605 - DNA, 22 bp, Artificial Sequence
  Synthetic oligonucleotide; TTC chr2 60470826 60470847 60470843 60470848 +
taagttgtaaaaaaccctagct

SEQ ID NO: 196606 - DNA, 22 bp, Artificial Sequence
  Synthetic oligonucleotide; CTA chr2 60470828 60470849 60470845 60470850 +
agttgtaaaaaaccctagctat

SEQ ID NO: 196607 - DNA, 22 bp, Artificial Sequence
  Synthetic oligonucleotide; TTG chr2 60470833 60470854 60470850 60470855 +
taaaaaaccctagctatcatca

SEQ ID NO: 196608 - DNA, 22 bp, Artificial Sequence
  Synthetic oligonucleotide; CTA chr2 60470845 60470866 60470862 60470867 +
gctatcatcaagtctgtccctt

SEQ ID NO: 196609 - DNA, 22 bp, Artificial Sequence
  Synthetic oligonucleotide; CTA chr2 60470849 60470870 60470866 60470871 +
tcatcaagtctgtcccttcatt

SEQ ID NO: 196610 - DNA, 22 bp, Artificial Sequence
  Synthetic oligonucleotide; CTG chr2 60470861 60470882 60470878 60470883 +
tcccttcattttacagatgggg

SEQ ID NO: 196611 - DNA, 22 bp, Artificial Sequence
  Synthetic oligonucleotide; CTT chr2 60470867 60470888 60470884 60470889 +
cattttacagatggggaaactg

SEQ ID NO: 196612 - DNA, 22 bp, Artificial Sequence
  Synthetic oligonucleotide; TTC chr2 60470868 60470889 60470885 60470890 +
attttacagatggggaaactga

SEQ ID NO: 196613 - DNA, 22 bp, Artificial Sequence
  Synthetic oligonucleotide; TTT chr2 60470872 60470893 60470889 60470894 +
tacagatggggaaactgaggcc

SEQ ID NO: 196614 - DNA, 22 bp, Artificial Sequence
  Synthetic oligonucleotide; TTT chr2 60470873 60470894 60470890 60470895 +
acagatggggaaactgaggcca

SEQ ID NO: 196615 - DNA, 22 bp, Artificial Sequence
  Synthetic oligonucleotide; TTA chr2 60470874 60470895 60470891 60470896 +
cagatggggaaactgaggccat

SEQ ID NO: 196616 - DNA, 22 bp, Artificial Sequence
  Synthetic oligonucleotide; CTG chr2 60470889 60470910 60470906 60470911 +
aggccatgagaaattaagtgac

SEQ ID NO: 196617 - DNA, 22 bp, Artificial Sequence
  Synthetic oligonucleotide; TTA chr2 60470905 60470926 60470922 60470927 +
agtgacttgcccatggctacac

SEQ ID NO: 196618 - DNA, 22 bp, Artificial Sequence
  Synthetic oligonucleotide; CTT chr2 60470913 60470934 60470930 60470935 +
gcccatggctacactgatgatt

SEQ ID NO: 196619 - DNA, 22 bp, Artificial Sequence
  Synthetic oligonucleotide; TTG chr2 60470914 60470935 60470931 60470936 +
cccatggctacactgatgatta

SEQ ID NO: 196620 - DNA, 22 bp, Artificial Sequence
  Synthetic oligonucleotide; CTA chr2 60470924 60470945 60470941 60470946 +
cactgatgattaaccacaatgt

SEQ ID NO: 196621 - DNA, 22 bp, Artificial Sequence
  Synthetic oligonucleotide; CTG chr2 60470929 60470950 60470946 60470951 +
atgattaaccacaatgtgaaga

SEQ ID NO: 196622 - DNA, 22 bp, Artificial Sequence
  Synthetic oligonucleotide; TTA chr2 60470936 60470957 60470953 60470958 +
accacaatgtgaagattagaat

SEQ ID NO: 196623 - DNA, 22 bp, Artificial Sequence
  Synthetic oligonucleotide; TTA chr2 60470954 60470975 60470971 60470976 +
gaattaatctcctgactcctga

SEQ ID NO: 196624 - DNA, 22 bp, Artificial Sequence
  Synthetic oligonucleotide; TTA chr2 60470960 60470981 60470977 60470982 +
atctcctgactcctgatccagt

SEQ ID NO: 196625 - DNA, 22 bp, Artificial Sequence
  Synthetic oligonucleotide; CTC chr2 60470965 60470986 60470982 60470987 +
ctgactcctgatccagtggtct

SEQ ID NO: 196626 - DNA, 22 bp, Artificial Sequence
  Synthetic oligonucleotide; CTG chr2 60470968 60470989 60470985 60470990 +
actcctgatccagtggtctttc

SEQ ID NO: 196627 - DNA, 22 bp, Artificial Sequence
  Synthetic oligonucleotide; CTC chr2 60470972 60470993 60470989 60470994 +
ctgatccagtggtctttcctgg

SEQ ID NO: 196628 - DNA, 22 bp, Artificial Sequence
  Synthetic oligonucleotide; CTG chr2 60470975 60470996 60470992 60470997 +
atccagtggtctttcctgggaa

SEQ ID NO: 196629 - DNA, 22 bp, Artificial Sequence
  Synthetic oligonucleotide; CTT chr2 60470988 60471009 60471005 60471010 +
tcctgggaatttgtctcttccc

SEQ ID NO: 196630 - DNA, 22 bp, Artificial Sequence
  Synthetic oligonucleotide; TTT chr2 60470989 60471010 60471006 60471011 +
cctgggaatttgtctcttcccc

SEQ ID NO: 196631 - DNA, 22 bp, Artificial Sequence
  Synthetic oligonucleotide; TTC chr2 60470990 60471011 60471007 60471012 +
ctgggaatttgtctcttccccc

SEQ ID NO: 196632 - DNA, 22 bp, Artificial Sequence
  Synthetic oligonucleotide; CTG chr2 60470993 60471014 60471010 60471015 +
ggaatttgtctcttcccccctg

SEQ ID NO: 196633 - DNA, 22 bp, Artificial Sequence
  Synthetic oligonucleotide; TTT chr2 60471000 60471021 60471017 60471022 +
gtctcttcccccctgctgctcc

SEQ ID NO: 196634 - DNA, 22 bp, Artificial Sequence
  Synthetic oligonucleotide; TTG chr2 60471001 60471022 60471018 60471023 +
tctcttcccccctgctgctcct

SEQ ID NO: 196635 - DNA, 22 bp, Artificial Sequence
  Synthetic oligonucleotide; CTC chr2 60471005 60471026 60471022 60471027 +
ttcccccctgctgctcctgccg

SEQ ID NO: 196636 - DNA, 22 bp, Artificial Sequence
  Synthetic oligonucleotide; CTT chr2 60471007 60471028 60471024 60471029 +
cccccctgctgctcctgccgtg

SEQ ID NO: 196637 - DNA, 22 bp, Artificial Sequence
  Synthetic oligonucleotide; TTC chr2 60471008 60471029 60471025 60471030 +
ccccctgctgctcctgccgtgg

SEQ ID NO: 196638 - DNA, 22 bp, Artificial Sequence
  Synthetic oligonucleotide; CTG chr2 60471015 60471036 60471032 60471037 +
ctgctcctgccgtggtcttcac

SEQ ID NO: 196639 - DNA, 22 bp, Artificial Sequence
  Synthetic oligonucleotide; CTG chr2 60471018 60471039 60471035 60471040 +
ctcctgccgtggtcttcactgc

SEQ ID NO: 196640 - DNA, 22 bp, Artificial Sequence
  Synthetic oligonucleotide; CTC chr2 60471021 60471042 60471038 60471043 +
ctgccgtggtcttcactgccca

SEQ ID NO: 196641 - DNA, 22 bp, Artificial Sequence
  Synthetic oligonucleotide; CTG chr2 60471024 60471045 60471041 60471046 +
ccgtggtcttcactgcccaaca

SEQ ID NO: 196642 - DNA, 22 bp, Artificial Sequence
  Synthetic oligonucleotide; CTT chr2 60471034 60471055 60471051 60471056 +
cactgcccaacaagaaggtcct

SEQ ID NO: 196643 - DNA, 22 bp, Artificial Sequence
  Synthetic oligonucleotide; TTC chr2 60471035 60471056 60471052 60471057 +
actgcccaacaagaaggtcctg

SEQ ID NO: 196644 - DNA, 22 bp, Artificial Sequence
  Synthetic oligonucleotide; CTG chr2 60471039 60471060 60471056 60471061 +
cccaacaagaaggtcctgtttc

SEQ ID NO: 196645 - DNA, 22 bp, Artificial Sequence
  Synthetic oligonucleotide; CTG chr2 60471057 60471078 60471074 60471079 +
tttctactgatccattaagcag

SEQ ID NO: 196646 - DNA, 22 bp, Artificial Sequence
  Synthetic oligonucleotide; TTT chr2 60471060 60471081 60471077 60471082 +
ctactgatccattaagcagtac

SEQ ID NO: 196647 - DNA, 22 bp, Artificial Sequence
  Synthetic oligonucleotide; TTC chr2 60471061 60471082 60471078 60471083 +
tactgatccattaagcagtact

SEQ ID NO: 196648 - DNA, 22 bp, Artificial Sequence
  Synthetic oligonucleotide; CTA chr2 60471063 60471084 60471080 60471085 +
ctgatccattaagcagtactta

SEQ ID NO: 196649 - DNA, 22 bp, Artificial Sequence
  Synthetic oligonucleotide; CTG chr2 60471066 60471087 60471083 60471088 +
atccattaagcagtacttaacc

SEQ ID NO: 196650 - DNA, 22 bp, Artificial Sequence
  Synthetic oligonucleotide; TTA chr2 60471074 60471095 60471091 60471096 +
agcagtacttaaccgtcttggg

SEQ ID NO: 196651 - DNA, 22 bp, Artificial Sequence
  Synthetic oligonucleotide; CTT chr2 60471084 60471105 60471101 60471106 +
aaccgtcttgggggagggtcca

SEQ ID NO: 196652 - DNA, 22 bp, Artificial Sequence
  Synthetic oligonucleotide; TTA chr2 60471085 60471106 60471102 60471107 +
accgtcttgggggagggtccag

SEQ ID NO: 196653 - DNA, 22 bp, Artificial Sequence
  Synthetic oligonucleotide; CTT chr2 60471093 60471114 60471110 60471115 +
gggggagggtccagcccagcag

SEQ ID NO: 196654 - DNA, 22 bp, Artificial Sequence
  Synthetic oligonucleotide; TTG chr2 60471094 60471115 60471111 60471116 +
ggggagggtccagcccagcagc

SEQ ID NO: 196655 - DNA, 22 bp, Artificial Sequence
  Synthetic oligonucleotide; CTA chr2 60471120 60471141 60471137 60471142 +
catggggctttcgaaaggtgcc

SEQ ID NO: 196656 - DNA, 22 bp, Artificial Sequence
  Synthetic oligonucleotide; CTT chr2 60471130 60471151 60471147 60471152 +
tcgaaaggtgccaatgaactga

SEQ ID NO: 196657 - DNA, 22 bp, Artificial Sequence
  Synthetic oligonucleotide; TTT chr2 60471131 60471152 60471148 60471153 +
cgaaaggtgccaatgaactgac

SEQ ID NO: 196658 - DNA, 22 bp, Artificial Sequence
  Synthetic oligonucleotide; TTC chr2 60471132 60471153 60471149 60471154 +
gaaaggtgccaatgaactgact

SEQ ID NO: 196659 - DNA, 22 bp, Artificial Sequence
  Synthetic oligonucleotide; CTG chr2 60471151 60471172 60471168 60471173 +
acttggtctcacaattggaaaa

SEQ ID NO: 196660 - DNA, 22 bp, Artificial Sequence
  Synthetic oligonucleotide; CTT chr2 60471155 60471176 60471172 60471177 +
ggtctcacaattggaaaacaag

SEQ ID NO: 196661 - DNA, 22 bp, Artificial Sequence
  Synthetic oligonucleotide; TTG chr2 60471156 60471177 60471173 60471178 +
gtctcacaattggaaaacaagg

SEQ ID NO: 196662 - DNA, 22 bp, Artificial Sequence
  Synthetic oligonucleotide; CTC chr2 60471161 60471182 60471178 60471183 +
acaattggaaaacaaggcctgc

SEQ ID NO: 196663 - DNA, 22 bp, Artificial Sequence
  Synthetic oligonucleotide; TTG chr2 60471168 60471189 60471185 60471190 +
gaaaacaaggcctgctctgctg

SEQ ID NO: 196664 - DNA, 22 bp, Artificial Sequence
  Synthetic oligonucleotide; CTG chr2 60471182 60471203 60471199 60471204 +
ctctgctgcctgggcctcctgg

SEQ ID NO: 196665 - DNA, 22 bp, Artificial Sequence
  Synthetic oligonucleotide; CTC chr2 60471185 60471206 60471202 60471207 +
tgctgcctgggcctcctggcct

SEQ ID NO: 196666 - DNA, 22 bp, Artificial Sequence
  Synthetic oligonucleotide; CTG chr2 60471187 60471208 60471204 60471209 +
ctgcctgggcctcctggcctca

SEQ ID NO: 196667 - DNA, 22 bp, Artificial Sequence
  Synthetic oligonucleotide; CTG chr2 60471190 60471211 60471207 60471212 +
cctgggcctcctggcctcacct

SEQ ID NO: 196668 - DNA, 22 bp, Artificial Sequence
  Synthetic oligonucleotide; CTG chr2 60471194 60471215 60471211 60471216 +
ggcctcctggcctcacctttgc

SEQ ID NO: 196669 - DNA, 22 bp, Artificial Sequence
  Synthetic oligonucleotide; CTC chr2 60471200 60471221 60471217 60471222 +
ctggcctcacctttgctgtgtt

SEQ ID NO: 196670 - DNA, 22 bp, Artificial Sequence
  Synthetic oligonucleotide; CTG chr2 60471203 60471224 60471220 60471225 +
gcctcacctttgctgtgttcac

SEQ ID NO: 196671 - DNA, 22 bp, Artificial Sequence
  Synthetic oligonucleotide; CTC chr2 60471208 60471229 60471225 60471230 +
acctttgctgtgttcaccctct

SEQ ID NO: 196672 - DNA, 22 bp, Artificial Sequence
  Synthetic oligonucleotide; CTT chr2 60471213 60471234 60471230 60471235 +
tgctgtgttcaccctctacctc

SEQ ID NO: 196673 - DNA, 22 bp, Artificial Sequence
  Synthetic oligonucleotide; TTT chr2 60471214 60471235 60471231 60471236 +
gctgtgttcaccctctacctct

SEQ ID NO: 196674 - DNA, 22 bp, Artificial Sequence
  Synthetic oligonucleotide; TTG chr2 60471215 60471236 60471232 60471237 +
ctgtgttcaccctctacctctg

SEQ ID NO: 196675 - DNA, 22 bp, Artificial Sequence
  Synthetic oligonucleotide; CTG chr2 60471218 60471239 60471235 60471240 +
tgttcaccctctacctctgctt

SEQ ID NO: 196676 - DNA, 22 bp, Artificial Sequence
  Synthetic oligonucleotide; TTC chr2 60471223 60471244 60471240 60471245 +
accctctacctctgcttcccct

SEQ ID NO: 196677 - DNA, 22 bp, Artificial Sequence
  Synthetic oligonucleotide; CTC chr2 60471229 60471250 60471246 60471251 +
tacctctgcttcccctgcagaa

SEQ ID NO: 196678 - DNA, 22 bp, Artificial Sequence
  Synthetic oligonucleotide; CTA chr2 60471231 60471252 60471248 60471253 +
cctctgcttcccctgcagaatt

SEQ ID NO: 196679 - DNA, 22 bp, Artificial Sequence
  Synthetic oligonucleotide; CTC chr2 60471235 60471256 60471252 60471257 +
tgcttcccctgcagaattagac

SEQ ID NO: 196680 - DNA, 22 bp, Artificial Sequence
  Synthetic oligonucleotide; CTG chr2 60471237 60471258 60471254 60471259 +
cttcccctgcagaattagacag

SEQ ID NO: 196681 - DNA, 22 bp, Artificial Sequence
  Synthetic oligonucleotide; CTT chr2 60471240 60471261 60471257 60471262 +
cccctgcagaattagacagcta

SEQ ID NO: 196682 - DNA, 22 bp, Artificial Sequence
  Synthetic oligonucleotide; TTC chr2 60471241 60471262 60471258 60471263 +
ccctgcagaattagacagctaa

SEQ ID NO: 196683 - DNA, 22 bp, Artificial Sequence
  Synthetic oligonucleotide; CTG chr2 60471246 60471267 60471263 60471268 +
cagaattagacagctaaaaaca

SEQ ID NO: 196684 - DNA, 22 bp, Artificial Sequence
  Synthetic oligonucleotide; TTA chr2 60471254 60471275 60471271 60471276 +
gacagctaaaaacatttctatc

SEQ ID NO: 196685 - DNA, 22 bp, Artificial Sequence
  Synthetic oligonucleotide; CTA chr2 60471262 60471283 60471279 60471284 +
aaaacatttctatcagcctaag

SEQ ID NO: 196686 - DNA, 22 bp, Artificial Sequence
  Synthetic oligonucleotide; TTT chr2 60471271 60471292 60471288 60471293 +
ctatcagcctaagaagctattt

SEQ ID NO: 196687 - DNA, 22 bp, Artificial Sequence
  Synthetic oligonucleotide; TTC chr2 60471272 60471293 60471289 60471294 +
tatcagcctaagaagctattta

SEQ ID NO: 196688 - DNA, 22 bp, Artificial Sequence
  Synthetic oligonucleotide; CTA chr2 60471274 60471295 60471291 60471296 +
tcagcctaagaagctatttact

SEQ ID NO: 196689 - DNA, 22 bp, Artificial Sequence
  Synthetic oligonucleotide; CTA chr2 60471282 60471303 60471299 60471304 +
agaagctatttactttagaaaa

SEQ ID NO: 196690 - DNA, 22 bp, Artificial Sequence
  Synthetic oligonucleotide; CTA chr2 60471290 60471311 60471307 60471312 +
tttactttagaaaaaaagcaca

SEQ ID NO: 196691 - DNA, 22 bp, Artificial Sequence
  Synthetic oligonucleotide; TTT chr2 60471293 60471314 60471310 60471315 +
actttagaaaaaaagcacactg

SEQ ID NO: 196692 - DNA, 22 bp, Artificial Sequence
  Synthetic oligonucleotide; TTA chr2 60471294 60471315 60471311 60471316 +
ctttagaaaaaaagcacactgt

SEQ ID NO: 196693 - DNA, 22 bp, Artificial Sequence
  Synthetic oligonucleotide; CTT chr2 60471297 60471318 60471314 60471319 +
tagaaaaaaagcacactgtctt

SEQ ID NO: 196694 - DNA, 22 bp, Artificial Sequence
  Synthetic oligonucleotide; TTT chr2 60471298 60471319 60471315 60471320 +
agaaaaaaagcacactgtcttt

SEQ ID NO: 196695 - DNA, 22 bp, Artificial Sequence
  Synthetic oligonucleotide; TTA chr2 60471299 60471320 60471316 60471321 +
gaaaaaaagcacactgtctttg

SEQ ID NO: 196696 - DNA, 22 bp, Artificial Sequence
  Synthetic oligonucleotide; CTG chr2 60471315 60471336 60471332 60471337 +
tctttgtgagactcacccttgc

SEQ ID NO: 196697 - DNA, 22 bp, Artificial Sequence
  Synthetic oligonucleotide; CTT chr2 60471319 60471340 60471336 60471341 +
tgtgagactcacccttgcattt

SEQ ID NO: 196698 - DNA, 22 bp, Artificial Sequence
  Synthetic oligonucleotide; TTT chr2 60471320 60471341 60471337 60471342 +
gtgagactcacccttgcattta

SEQ ID NO: 196699 - DNA, 22 bp, Artificial Sequence
  Synthetic oligonucleotide; TTG chr2 60471321 60471342 60471338 60471343 +
tgagactcacccttgcatttat

SEQ ID NO: 196700 - DNA, 22 bp, Artificial Sequence
  Synthetic oligonucleotide; CTC chr2 60471329 60471350 60471346 60471351 +
acccttgcatttatcttccttc

SEQ ID NO: 196701 - DNA, 22 bp, Artificial Sequence
  Synthetic oligonucleotide; CTT chr2 60471335 60471356 60471352 60471357 +
gcatttatcttccttcaggaag

SEQ ID NO: 196702 - DNA, 22 bp, Artificial Sequence
  Synthetic oligonucleotide; TTG chr2 60471336 60471357 60471353 60471358 +
catttatcttccttcaggaaga

SEQ ID NO: 196703 - DNA, 22 bp, Artificial Sequence
  Synthetic oligonucleotide; TTT chr2 60471341 60471362 60471358 60471363 +
atcttccttcaggaagagggtc

SEQ ID NO: 196704 - DNA, 22 bp, Artificial Sequence
  Synthetic oligonucleotide; TTA chr2 60471342 60471363 60471359 60471364 +
tcttccttcaggaagagggtca

SEQ ID NO: 196705 - DNA, 22 bp, Artificial Sequence
  Synthetic oligonucleotide; CTT chr2 60471346 60471367 60471363 60471368 +
ccttcaggaagagggtcaaagc

SEQ ID NO: 196706 - DNA, 22 bp, Artificial Sequence
  Synthetic oligonucleotide; TTC chr2 60471347 60471368 60471364 60471369 +
cttcaggaagagggtcaaagca

SEQ ID NO: 196707 - DNA, 22 bp, Artificial Sequence
  Synthetic oligonucleotide; CTT chr2 60471350 60471371 60471367 60471372 +
caggaagagggtcaaagcaaag

SEQ ID NO: 196708 - DNA, 22 bp, Artificial Sequence
  Synthetic oligonucleotide; TTC chr2 60471351 60471372 60471368 60471373 +
aggaagagggtcaaagcaaagc

SEQ ID NO: 196709 - DNA, 22 bp, Artificial Sequence
  Synthetic oligonucleotide; CTG chr2 60471379 60471400 60471396 60471401 +
gggaccccagctgattctgctg

SEQ ID NO: 196710 - DNA, 22 bp, Artificial Sequence
  Synthetic oligonucleotide; CTG chr2 60471392 60471413 60471409 60471414 +
attctgctgcttcttccactaa

SEQ ID NO: 196711 - DNA, 22 bp, Artificial Sequence
  Synthetic oligonucleotide; TTC chr2 60471396 60471417 60471413 60471418 +
tgctgcttcttccactaaacac

SEQ ID NO: 196712 - DNA, 22 bp, Artificial Sequence
  Synthetic oligonucleotide; CTG chr2 60471398 60471419 60471415 60471420 +
ctgcttcttccactaaacacat

SEQ ID NO: 196713 - DNA, 22 bp, Artificial Sequence
  Synthetic oligonucleotide; CTG chr2 60471401 60471422 60471418 60471423 +
cttcttccactaaacacatcca

SEQ ID NO: 196714 - DNA, 22 bp, Artificial Sequence
  Synthetic oligonucleotide; CTT chr2 60471404 60471425 60471421 60471426 +
cttccactaaacacatccataa

SEQ ID NO: 196715 - DNA, 22 bp, Artificial Sequence
  Synthetic oligonucleotide; TTC chr2 60471405 60471426 60471422 60471427 +
ttccactaaacacatccataat

SEQ ID NO: 196716 - DNA, 22 bp, Artificial Sequence
  Synthetic oligonucleotide; CTT chr2 60471407 60471428 60471424 60471429 +
ccactaaacacatccataatat

SEQ ID NO: 196717 - DNA, 22 bp, Artificial Sequence
  Synthetic oligonucleotide; TTC chr2 60471408 60471429 60471425 60471430 +
cactaaacacatccataatatt

SEQ ID NO: 196718 - DNA, 22 bp, Artificial Sequence
  Synthetic oligonucleotide; CTA chr2 60471413 60471434 60471430 60471435 +
aacacatccataatattctctt

SEQ ID NO: 196719 - DNA, 22 bp, Artificial Sequence
  Synthetic oligonucleotide; TTC chr2 60471431 60471452 60471448 60471453 +
tctttggtaagtaaaatcgaca

SEQ ID NO: 196720 - DNA, 22 bp, Artificial Sequence
  Synthetic oligonucleotide; CTC chr2 60471433 60471454 60471450 60471455 +
tttggtaagtaaaatcgacatt

SEQ ID NO: 196721 - DNA, 22 bp, Artificial Sequence
  Synthetic oligonucleotide; CTT chr2 60471435 60471456 60471452 60471457 +
tggtaagtaaaatcgacattcc

SEQ ID NO: 196722 - DNA, 22 bp, Artificial Sequence
  Synthetic oligonucleotide; TTT chr2 60471436 60471457 60471453 60471458 +
ggtaagtaaaatcgacattccc

SEQ ID NO: 196723 - DNA, 22 bp, Artificial Sequence
  Synthetic oligonucleotide; TTG chr2 60471437 60471458 60471454 60471459 +
gtaagtaaaatcgacattccca

SEQ ID NO: 196724 - DNA, 22 bp, Artificial Sequence
  Synthetic oligonucleotide; TTC chr2 60471456 60471477 60471473 60471478 +
ccacatgaactggaaatgctaa

SEQ ID NO: 196725 - DNA, 22 bp, Artificial Sequence
  Synthetic oligonucleotide; CTG chr2 60471468 60471489 60471485 60471490 +
gaaatgctaaattgttaatagc

SEQ ID NO: 196726 - DNA, 22 bp, Artificial Sequence
  Synthetic oligonucleotide; CTA chr2 60471477 60471498 60471494 60471499 +
aattgttaatagcctccctagg

SEQ ID NO: 196727 - DNA, 22 bp, Artificial Sequence
  Synthetic oligonucleotide; TTG chr2 60471482 60471503 60471499 60471504 +
ttaatagcctccctagggctta

SEQ ID NO: 196728 - DNA, 22 bp, Artificial Sequence
  Synthetic oligonucleotide; TTA chr2 60471485 60471506 60471502 60471507 +
atagcctccctagggcttaact

SEQ ID NO: 196729 - DNA, 22 bp, Artificial Sequence
  Synthetic oligonucleotide; CTC chr2 60471493 60471514 60471510 60471515 +
cctagggcttaacttcttgcta

SEQ ID NO: 196730 - DNA, 22 bp, Artificial Sequence
  Synthetic oligonucleotide; CTA chr2 60471497 60471518 60471514 60471519 +
gggcttaacttcttgctatgat

SEQ ID NO: 196731 - DNA, 22 bp, Artificial Sequence
  Synthetic oligonucleotide; CTT chr2 60471503 60471524 60471520 60471525 +
aacttcttgctatgatgccttc

SEQ ID NO: 196732 - DNA, 22 bp, Artificial Sequence
  Synthetic oligonucleotide; TTA chr2 60471504 60471525 60471521 60471526 +
acttcttgctatgatgccttca

SEQ ID NO: 196733 - DNA, 22 bp, Artificial Sequence
  Synthetic oligonucleotide; CTT chr2 60471508 60471529 60471525 60471530 +
cttgctatgatgccttcaatta

SEQ ID NO: 196734 - DNA, 22 bp, Artificial Sequence
  Synthetic oligonucleotide; TTC chr2 60471509 60471530 60471526 60471531 +
ttgctatgatgccttcaattat

SEQ ID NO: 196735 - DNA, 22 bp, Artificial Sequence
  Synthetic oligonucleotide; CTT chr2 60471511 60471532 60471528 60471533 +
gctatgatgccttcaattattt

SEQ ID NO: 196736 - DNA, 22 bp, Artificial Sequence
  Synthetic oligonucleotide; TTG chr2 60471512 60471533 60471529 60471534 +
ctatgatgccttcaattatttc

SEQ ID NO: 196737 - DNA, 22 bp, Artificial Sequence
  Synthetic oligonucleotide; CTA chr2 60471515 60471536 60471532 60471537 +
tgatgccttcaattatttcatc

SEQ ID NO: 196738 - DNA, 22 bp, Artificial Sequence
  Synthetic oligonucleotide; CTT chr2 60471524 60471545 60471541 60471546 +
caattatttcatcacggcttag

SEQ ID NO: 196739 - DNA, 22 bp, Artificial Sequence
  Synthetic oligonucleotide; TTC chr2 60471525 60471546 60471542 60471547 +
aattatttcatcacggcttagg

SEQ ID NO: 196740 - DNA, 22 bp, Artificial Sequence
  Synthetic oligonucleotide; TTA chr2 60471530 60471551 60471547 60471552 +
tttcatcacggcttaggcaaag

SEQ ID NO: 196741 - DNA, 22 bp, Artificial Sequence
  Synthetic oligonucleotide; TTT chr2 60471533 60471554 60471550 60471555 +
catcacggcttaggcaaagtaa

SEQ ID NO: 196742 - DNA, 22 bp, Artificial Sequence
  Synthetic oligonucleotide; TTC chr2 60471534 60471555 60471551 60471556 +
atcacggcttaggcaaagtaaa

SEQ ID NO: 196743 - DNA, 22 bp, Artificial Sequence
  Synthetic oligonucleotide; CTT chr2 60471544 60471565 60471561 60471566 +
aggcaaagtaaagtatcacaat

SEQ ID NO: 196744 - DNA, 22 bp, Artificial Sequence
  Synthetic oligonucleotide; TTA chr2 60471545 60471566 60471562 60471567 +
ggcaaagtaaagtatcacaatt

SEQ ID NO: 196745 - DNA, 22 bp, Artificial Sequence
  Synthetic oligonucleotide; TTA chr2 60471568 60471589 60471585 60471590 +
atgcttctgagcgtcaaactcg

SEQ ID NO: 196746 - DNA, 22 bp, Artificial Sequence
  Synthetic oligonucleotide; CTT chr2 60471574 60471595 60471591 60471596 +
ctgagcgtcaaactcgaggagc

SEQ ID NO: 196747 - DNA, 22 bp, Artificial Sequence
  Synthetic oligonucleotide; TTC chr2 60471575 60471596 60471592 60471597 +
tgagcgtcaaactcgaggagca

SEQ ID NO: 196748 - DNA, 22 bp, Artificial Sequence
  Synthetic oligonucleotide; CTG chr2 60471577 60471598 60471594 60471599 +
agcgtcaaactcgaggagcagc

SEQ ID NO: 196749 - DNA, 22 bp, Artificial Sequence
  Synthetic oligonucleotide; CTC chr2 60471589 60471610 60471606 60471611 +
gaggagcagctctgccttccca

SEQ ID NO: 196750 - DNA, 22 bp, Artificial Sequence
  Synthetic oligonucleotide; CTC chr2 60471601 60471622 60471618 60471623 +
tgccttcccaggccaaggtggg

SEQ ID NO: 196751 - DNA, 22 bp, Artificial Sequence
  Synthetic oligonucleotide; CTG chr2 60471603 60471624 60471620 60471625 +
ccttcccaggccaaggtgggga

SEQ ID NO: 196752 - DNA, 22 bp, Artificial Sequence
  Synthetic oligonucleotide; CTT chr2 60471607 60471628 60471624 60471629 +
cccaggccaaggtggggaaaag

SEQ ID NO: 196753 - DNA, 22 bp, Artificial Sequence
  Synthetic oligonucleotide; TTC chr2 60471608 60471629 60471625 60471630 +
ccaggccaaggtggggaaaagg

SEQ ID NO: 196754 - DNA, 22 bp, Artificial Sequence
  Synthetic oligonucleotide; CTG chr2 60471635 60471656 60471652 60471657 +
cccctggttgagggcctcttct

SEQ ID NO: 196755 - DNA, 22 bp, Artificial Sequence
  Synthetic oligonucleotide; CTG chr2 60471641 60471662 60471658 60471663 +
gttgagggcctcttcttttccc

SEQ ID NO: 196756 - DNA, 22 bp, Artificial Sequence
  Synthetic oligonucleotide; TTG chr2 60471645 60471666 60471662 60471667 +
agggcctcttcttttcccacct

SEQ ID NO: 196757 - DNA, 22 bp, Artificial Sequence
  Synthetic oligonucleotide; CTC chr2 60471653 60471674 60471670 60471675 +
ttcttttcccaccttcgctttc

SEQ ID NO: 196758 - DNA, 22 bp, Artificial Sequence
  Synthetic oligonucleotide; CTT chr2 60471655 60471676 60471672 60471677 +
cttttcccaccttcgctttcat

SEQ ID NO: 196759 - DNA, 22 bp, Artificial Sequence
  Synthetic oligonucleotide; TTC chr2 60471656 60471677 60471673 60471678 +
ttttcccaccttcgctttcatt

SEQ ID NO: 196760 - DNA, 22 bp, Artificial Sequence
  Synthetic oligonucleotide; CTT chr2 60471658 60471679 60471675 60471680 +
ttcccaccttcgctttcattct

SEQ ID NO: 196761 - DNA, 22 bp, Artificial Sequence
  Synthetic oligonucleotide; TTT chr2 60471659 60471680 60471676 60471681 +
tcccaccttcgctttcattctc

SEQ ID NO: 196762 - DNA, 22 bp, Artificial Sequence
  Synthetic oligonucleotide; TTT chr2 60471660 60471681 60471677 60471682 +
cccaccttcgctttcattctcc

SEQ ID NO: 196763 - DNA, 22 bp, Artificial Sequence
  Synthetic oligonucleotide; TTC chr2 60471661 60471682 60471678 60471683 +
ccaccttcgctttcattctccc

SEQ ID NO: 196764 - DNA, 22 bp, Artificial Sequence
  Synthetic oligonucleotide; CTT chr2 60471668 60471689 60471685 60471690 +
cgctttcattctccccagccag

SEQ ID NO: 196765 - DNA, 22 bp, Artificial Sequence
  Synthetic oligonucleotide; TTC chr2 60471669 60471690 60471686 60471691 +
gctttcattctccccagccaga

SEQ ID NO: 196766 - DNA, 22 bp, Artificial Sequence
  Synthetic oligonucleotide; CTT chr2 60471673 60471694 60471690 60471695 +
tcattctccccagccagagatg

SEQ ID NO: 196767 - DNA, 22 bp, Artificial Sequence
  Synthetic oligonucleotide; TTT chr2 60471674 60471695 60471691 60471696 +
cattctccccagccagagatgg

SEQ ID NO: 196768 - DNA, 22 bp, Artificial Sequence
  Synthetic oligonucleotide; TTC chr2 60471675 60471696 60471692 60471697 +
attctccccagccagagatggg

SEQ ID NO: 196769 - DNA, 22 bp, Artificial Sequence
  Synthetic oligonucleotide; TTC chr2 60471679 60471700 60471696 60471701 +
tccccagccagagatgggctct

SEQ ID NO: 196770 - DNA, 22 bp, Artificial Sequence
  Synthetic oligonucleotide; CTC chr2 60471681 60471702 60471698 60471703 +
cccagccagagatgggctctgg

SEQ ID NO: 196771 - DNA, 22 bp, Artificial Sequence
  Synthetic oligonucleotide; CTC chr2 60471700 60471721 60471717 60471722 +
tggttgctggctaggaagtggg

SEQ ID NO: 196772 - DNA, 22 bp, Artificial Sequence
  Synthetic oligonucleotide; CTG chr2 60471702 60471723 60471719 60471724 +
gttgctggctaggaagtgggtg

SEQ ID NO: 196773 - DNA, 22 bp, Artificial Sequence
  Synthetic oligonucleotide; TTG chr2 60471706 60471727 60471723 60471728 +
ctggctaggaagtgggtgatct

SEQ ID NO: 196774 - DNA, 22 bp, Artificial Sequence
  Synthetic oligonucleotide; CTG chr2 60471709 60471730 60471726 60471731 +
gctaggaagtgggtgatctagt

SEQ ID NO: 196775 - DNA, 22 bp, Artificial Sequence
  Synthetic oligonucleotide; CTA chr2 60471713 60471734 60471730 60471735 +
ggaagtgggtgatctagttatg

SEQ ID NO: 196776 - DNA, 22 bp, Artificial Sequence
  Synthetic oligonucleotide; CTA chr2 60471729 60471750 60471746 60471751 +
gttatgtcctctttttttcttt

SEQ ID NO: 196777 - DNA, 22 bp, Artificial Sequence
  Synthetic oligonucleotide; TTA chr2 60471733 60471754 60471750 60471755 +
tgtcctctttttttctttgtta

SEQ ID NO: 196778 - DNA, 22 bp, Artificial Sequence
  Synthetic oligonucleotide; CTC chr2 60471740 60471761 60471757 60471762 +
tttttttctttgttagtgctct

SEQ ID NO: 196779 - DNA, 22 bp, Artificial Sequence
  Synthetic oligonucleotide; CTT chr2 60471742 60471763 60471759 60471764 +
tttttctttgttagtgctctta

SEQ ID NO: 196780 - DNA, 22 bp, Artificial Sequence
  Synthetic oligonucleotide; TTT chr2 60471743 60471764 60471760 60471765 +
ttttctttgttagtgctcttag

SEQ ID NO: 196781 - DNA, 22 bp, Artificial Sequence
  Synthetic oligonucleotide; TTT chr2 60471744 60471765 60471761 60471766 +
tttctttgttagtgctcttagg

SEQ ID NO: 196782 - DNA, 22 bp, Artificial Sequence
  Synthetic oligonucleotide; TTT chr2 60471745 60471766 60471762 60471767 +
ttctttgttagtgctcttaggc

SEQ ID NO: 196783 - DNA, 22 bp, Artificial Sequence
  Synthetic oligonucleotide; TTT chr2 60471746 60471767 60471763 60471768 +
tctttgttagtgctcttaggca

SEQ ID NO: 196784 - DNA, 22 bp, Artificial Sequence
  Synthetic oligonucleotide; TTT chr2 60471747 60471768 60471764 60471769 +
ctttgttagtgctcttaggcaa

SEQ ID NO: 196785 - DNA, 22 bp, Artificial Sequence
  Synthetic oligonucleotide; TTC chr2 60471748 60471769 60471765 60471770 +
tttgttagtgctcttaggcaag

SEQ ID NO: 196786 - DNA, 22 bp, Artificial Sequence
  Synthetic oligonucleotide; CTT chr2 60471750 60471771 60471767 60471772 +
tgttagtgctcttaggcaagtg

SEQ ID NO: 196787 - DNA, 22 bp, Artificial Sequence
  Synthetic oligonucleotide; TTT chr2 60471751 60471772 60471768 60471773 +
gttagtgctcttaggcaagtga

SEQ ID NO: 196788 - DNA, 22 bp, Artificial Sequence
  Synthetic oligonucleotide; TTG chr2 60471752 60471773 60471769 60471774 +
ttagtgctcttaggcaagtgat

SEQ ID NO: 196789 - DNA, 22 bp, Artificial Sequence
  Synthetic oligonucleotide; TTA chr2 60471755 60471776 60471772 60471777 +
gtgctcttaggcaagtgattct

SEQ ID NO: 196790 - DNA, 22 bp, Artificial Sequence
  Synthetic oligonucleotide; CTC chr2 60471761 60471782 60471778 60471783 +
ttaggcaagtgattctcacagc

SEQ ID NO: 196791 - DNA, 22 bp, Artificial Sequence
  Synthetic oligonucleotide; CTT chr2 60471763 60471784 60471780 60471785 +
aggcaagtgattctcacagcgc

SEQ ID NO: 196792 - DNA, 22 bp, Artificial Sequence
  Synthetic oligonucleotide; TTA chr2 60471764 60471785 60471781 60471786 +
ggcaagtgattctcacagcgca

SEQ ID NO: 196793 - DNA, 22 bp, Artificial Sequence
  Synthetic oligonucleotide; TTC chr2 60471776 60471797 60471793 60471798 +
tcacagcgcagacccaggccca

SEQ ID NO: 196794 - DNA, 22 bp, Artificial Sequence
  Synthetic oligonucleotide; CTC chr2 60471778 60471799 60471795 60471800 +
acagcgcagacccaggcccacc

SEQ ID NO: 196795 - DNA, 22 bp, Artificial Sequence
  Synthetic oligonucleotide; CTG chr2 60471818 60471839 60471835 60471840 +
ggagtttgttcaaaatgcaaat

SEQ ID NO: 196796 - DNA, 22 bp, Artificial Sequence
  Synthetic oligonucleotide; TTT chr2 60471825 60471846 60471842 60471847 +
gttcaaaatgcaaattcttggg

SEQ ID NO: 196797 - DNA, 22 bp, Artificial Sequence
  Synthetic oligonucleotide; TTG chr2 60471826 60471847 60471843 60471848 +
ttcaaaatgcaaattcttgggc

SEQ ID NO: 196798 - DNA, 22 bp, Artificial Sequence
  Synthetic oligonucleotide; TTC chr2 60471829 60471850 60471846 60471851 +
aaaatgcaaattcttgggcacc

SEQ ID NO: 196799 - DNA, 22 bp, Artificial Sequence
  Synthetic oligonucleotide; TTC chr2 60471842 60471863 60471859 60471864 +
ttgggcaccacctcagacttac

SEQ ID NO: 196800 - DNA, 22 bp, Artificial Sequence
  Synthetic oligonucleotide; CTT chr2 60471844 60471865 60471861 60471866 +
gggcaccacctcagacttactg

SEQ ID NO: 196801 - DNA, 22 bp, Artificial Sequence
  Synthetic oligonucleotide; TTG chr2 60471845 60471866 60471862 60471867 +
ggcaccacctcagacttactga

SEQ ID NO: 196802 - DNA, 22 bp, Artificial Sequence
  Synthetic oligonucleotide; CTC chr2 60471856 60471877 60471873 60471878 +
agacttactgaatcagaaattg

SEQ ID NO: 196803 - DNA, 22 bp, Artificial Sequence
  Synthetic oligonucleotide; CTT chr2 60471862 60471883 60471879 60471884 +
actgaatcagaaattgagggtg

SEQ ID NO: 196804 - DNA, 22 bp, Artificial Sequence
  Synthetic oligonucleotide; TTA chr2 60471863 60471884 60471880 60471885 +
ctgaatcagaaattgagggtgg

SEQ ID NO: 196805 - DNA, 22 bp, Artificial Sequence
  Synthetic oligonucleotide; CTG chr2 60471866 60471887 60471883 60471888 +
aatcagaaattgagggtgggga

SEQ ID NO: 196806 - DNA, 22 bp, Artificial Sequence
  Synthetic oligonucleotide; TTG chr2 60471878 60471899 60471895 60471900 +
agggtggggaagcagccttcta

SEQ ID NO: 196807 - DNA, 22 bp, Artificial Sequence
  Synthetic oligonucleotide; CTT chr2 60471897 60471918 60471914 60471919 +
ctatgttgaataaattctccag

SEQ ID NO: 196808 - DNA, 22 bp, Artificial Sequence
  Synthetic oligonucleotide; TTC chr2 60471898 60471919 60471915 60471920 +
tatgttgaataaattctccagg

SEQ ID NO: 196809 - DNA, 22 bp, Artificial Sequence
  Synthetic oligonucleotide; CTA chr2 60471900 60471921 60471917 60471922 +
tgttgaataaattctccaggtg

SEQ ID NO: 196810 - DNA, 22 bp, Artificial Sequence
  Synthetic oligonucleotide; TTG chr2 60471905 60471926 60471922 60471927 +
aataaattctccaggtgattct

SEQ ID NO: 196811 - DNA, 22 bp, Artificial Sequence
  Synthetic oligonucleotide; TTC chr2 60471914 60471935 60471931 60471936 +
tccaggtgattctcatgcacac

SEQ ID NO: 196812 - DNA, 22 bp, Artificial Sequence
  Synthetic oligonucleotide; CTC chr2 60471916 60471937 60471933 60471938 +
caggtgattctcatgcacactc

SEQ ID NO: 196813 - DNA, 22 bp, Artificial Sequence
  Synthetic oligonucleotide; TTC chr2 60471926 60471947 60471943 60471948 +
tcatgcacactcaagctgaatc

SEQ ID NO: 196814 - DNA, 22 bp, Artificial Sequence
  Synthetic oligonucleotide; CTC chr2 60471928 60471949 60471945 60471950 +
atgcacactcaagctgaatcag

SEQ ID NO: 196815 - DNA, 22 bp, Artificial Sequence
  Synthetic oligonucleotide; CTC chr2 60471938 60471959 60471955 60471960 +
aagctgaatcagcactgctgtc

SEQ ID NO: 196816 - DNA, 22 bp, Artificial Sequence
  Synthetic oligonucleotide; CTG chr2 60471944 60471965 60471961 60471966 +
aatcagcactgctgtcttaggg

SEQ ID NO: 196817 - DNA, 22 bp, Artificial Sequence
  Synthetic oligonucleotide; CTG chr2 60471955 60471976 60471972 60471977 +
ctgtcttagggtaagggaagta

SEQ ID NO: 196818 - DNA, 22 bp, Artificial Sequence
  Synthetic oligonucleotide; CTG chr2 60471958 60471979 60471975 60471980 +
tcttagggtaagggaagtatga

SEQ ID NO: 196819 - DNA, 22 bp, Artificial Sequence
  Synthetic oligonucleotide; CTT chr2 60471962 60471983 60471979 60471984 +
agggtaagggaagtatgaacgc

SEQ ID NO: 196820 - DNA, 22 bp, Artificial Sequence
  Synthetic oligonucleotide; TTA chr2 60471963 60471984 60471980 60471985 +
gggtaagggaagtatgaacgct

SEQ ID NO: 196821 - DNA, 22 bp, Artificial Sequence
  Synthetic oligonucleotide; CTG chr2 60471986 60472007 60472003 60472008 +
gaagctttgaaattccctgggc

SEQ ID NO: 196822 - DNA, 22 bp, Artificial Sequence
  Synthetic oligonucleotide; CTT chr2 60471993 60472014 60472010 60472015 +
tgaaattccctgggcagagacc

SEQ ID NO: 196823 - DNA, 22 bp, Artificial Sequence
  Synthetic oligonucleotide; TTT chr2 60471994 60472015 60472011 60472016 +
gaaattccctgggcagagaccc

SEQ ID NO: 196824 - DNA, 22 bp, Artificial Sequence
  Synthetic oligonucleotide; TTG chr2 60471995 60472016 60472012 60472017 +
aaattccctgggcagagaccca

SEQ ID NO: 196825 - DNA, 22 bp, Artificial Sequence
  Synthetic oligonucleotide; TTC chr2 60472001 60472022 60472018 60472023 +
cctgggcagagacccatgggcc

SEQ ID NO: 196826 - DNA, 22 bp, Artificial Sequence
  Synthetic oligonucleotide; CTG chr2 60472005 60472026 60472022 60472027 +
ggcagagacccatgggccatga

SEQ ID NO: 196827 - DNA, 22 bp, Artificial Sequence
  Synthetic oligonucleotide; CTG chr2 60472032 60472053 60472049 60472054 +
ttttccctcctgtccaggaccc

SEQ ID NO: 196828 - DNA, 22 bp, Artificial Sequence
  Synthetic oligonucleotide; TTT chr2 60472035 60472056 60472052 60472057 +
tccctcctgtccaggacccacc

SEQ ID NO: 196829 - DNA, 22 bp, Artificial Sequence
  Synthetic oligonucleotide; TTT chr2 60472036 60472057 60472053 60472058 +
ccctcctgtccaggacccacct

SEQ ID NO: 196830 - DNA, 22 bp, Artificial Sequence
  Synthetic oligonucleotide; TTC chr2 60472037 60472058 60472054 60472059 +
cctcctgtccaggacccacctc

SEQ ID NO: 196831 - DNA, 22 bp, Artificial Sequence
  Synthetic oligonucleotide; CTC chr2 60472041 60472062 60472058 60472063 +
ctgtccaggacccacctccttt

SEQ ID NO: 196832 - DNA, 22 bp, Artificial Sequence
  Synthetic oligonucleotide; CTG chr2 60472044 60472065 60472061 60472066 +
tccaggacccacctcctttagg

SEQ ID NO: 196833 - DNA, 22 bp, Artificial Sequence
  Synthetic oligonucleotide; CTC chr2 60472059 60472080 60472076 60472081 +
ctttaggactggaacagtcaaa

SEQ ID NO: 196834 - DNA, 22 bp, Artificial Sequence
  Synthetic oligonucleotide; CTT chr2 60472062 60472083 60472079 60472084 +
taggactggaacagtcaaaaac

SEQ ID NO: 196835 - DNA, 22 bp, Artificial Sequence
  Synthetic oligonucleotide; TTT chr2 60472063 60472084 60472080 60472085 +
aggactggaacagtcaaaaaca

SEQ ID NO: 196836 - DNA, 22 bp, Artificial Sequence
  Synthetic oligonucleotide; TTA chr2 60472064 60472085 60472081 60472086 +
ggactggaacagtcaaaaacaa

SEQ ID NO: 196837 - DNA, 22 bp, Artificial Sequence
  Synthetic oligonucleotide; CTG chr2 60472070 60472091 60472087 60472092 +
gaacagtcaaaaacaaattaag

SEQ ID NO: 196838 - DNA, 22 bp, Artificial Sequence
  Synthetic oligonucleotide; TTA chr2 60472090 60472111 60472107 60472112 +
agcttagggaatccctaaggat

SEQ ID NO: 196839 - DNA, 22 bp, Artificial Sequence
  Synthetic oligonucleotide; CTT chr2 60472095 60472116 60472112 60472117 +
agggaatccctaaggatccctc

SEQ ID NO: 196840 - DNA, 22 bp, Artificial Sequence
  Synthetic oligonucleotide; TTA chr2 60472096 60472117 60472113 60472118 +
gggaatccctaaggatccctcc

SEQ ID NO: 196841 - DNA, 22 bp, Artificial Sequence
  Synthetic oligonucleotide; CTA chr2 60472107 60472128 60472124 60472129 +
aggatccctccattaggaaatt

SEQ ID NO: 196842 - DNA, 22 bp, Artificial Sequence
  Synthetic oligonucleotide; CTC chr2 60472117 60472138 60472134 60472139 +
cattaggaaattcaggttccac

SEQ ID NO: 196843 - DNA, 22 bp, Artificial Sequence
  Synthetic oligonucleotide; TTA chr2 60472122 60472143 60472139 60472144 +
ggaaattcaggttccaccctcc

SEQ ID NO: 196844 - DNA, 22 bp, Artificial Sequence
  Synthetic oligonucleotide; TTC chr2 60472130 60472151 60472147 60472152 +
aggttccaccctccgtctgtca

SEQ ID NO: 196845 - DNA, 22 bp, Artificial Sequence
  Synthetic oligonucleotide; TTC chr2 60472136 60472157 60472153 60472158 +
caccctccgtctgtcattgata

SEQ ID NO: 196846 - DNA, 22 bp, Artificial Sequence
  Synthetic oligonucleotide; CTC chr2 60472143 60472164 60472160 60472165 +
cgtctgtcattgataaggacag

SEQ ID NO: 196847 - DNA, 22 bp, Artificial Sequence
  Synthetic oligonucleotide; CTG chr2 60472149 60472170 60472166 60472171 +
tcattgataaggacagggaaca

SEQ ID NO: 196848 - DNA, 22 bp, Artificial Sequence
  Synthetic oligonucleotide; TTG chr2 60472155 60472176 60472172 60472177 +
ataaggacagggaacaggtcca

SEQ ID NO: 196849 - DNA, 22 bp, Artificial Sequence
  Synthetic oligonucleotide; CTC chr2 60472182 60472203 60472199 60472204 +
tccatcaggtccagggccttct

SEQ ID NO: 196850 - DNA, 22 bp, Artificial Sequence
  Synthetic oligonucleotide; CTC chr2 60472184 60472205 60472201 60472206 +
catcaggtccagggccttctta

SEQ ID NO: 196851 - DNA, 22 bp, Artificial Sequence
  Synthetic oligonucleotide; CTT chr2 60472202 60472223 60472219 60472224 +
cttagcatgagacaacacccaa

SEQ ID NO: 196852 - DNA, 22 bp, Artificial Sequence
  Synthetic oligonucleotide; TTC chr2 60472203 60472224 60472220 60472225 +
ttagcatgagacaacacccaaa

SEQ ID NO: 196853 - DNA, 22 bp, Artificial Sequence
  Synthetic oligonucleotide; CTT chr2 60472205 60472226 60472222 60472227 +
agcatgagacaacacccaaacc

SEQ ID NO: 196854 - DNA, 22 bp, Artificial Sequence
  Synthetic oligonucleotide; TTA chr2 60472206 60472227 60472223 60472228 +
gcatgagacaacacccaaacca

SEQ ID NO: 196855 - DNA, 22 bp, Artificial Sequence
  Synthetic oligonucleotide; CTT chr2 60472232 60472253 60472249 60472254 +
gtgccagacagattgtgtcctc

SEQ ID NO: 196856 - DNA, 22 bp, Artificial Sequence
  Synthetic oligonucleotide; TTG chr2 60472233 60472254 60472250 60472255 +
tgccagacagattgtgtcctca

SEQ ID NO: 196857 - DNA, 22 bp, Artificial Sequence
  Synthetic oligonucleotide; TTG chr2 60472247 60472268 60472264 60472269 +
tgtcctcactgcttccattaaa

SEQ ID NO: 196858 - DNA, 22 bp, Artificial Sequence
  Synthetic oligonucleotide; CTC chr2 60472254 60472275 60472271 60472276 +
actgcttccattaaagccgaca

SEQ ID NO: 196859 - DNA, 22 bp, Artificial Sequence
  Synthetic oligonucleotide; CTG chr2 60472258 60472279 60472275 60472280 +
cttccattaaagccgacatgtc

SEQ ID NO: 196860 - DNA, 22 bp, Artificial Sequence
  Synthetic oligonucleotide; CTT chr2 60472261 60472282 60472278 60472283 +
ccattaaagccgacatgtcagc

SEQ ID NO: 196861 - DNA, 22 bp, Artificial Sequence
  Synthetic oligonucleotide; TTC chr2 60472262 60472283 60472279 60472284 +
cattaaagccgacatgtcagcg

SEQ ID NO: 196862 - DNA, 22 bp, Artificial Sequence
  Synthetic oligonucleotide; TTA chr2 60472267 60472288 60472284 60472289 +
aagccgacatgtcagcgaacgc

SEQ ID NO: 196863 - DNA, 22 bp, Artificial Sequence
  Synthetic oligonucleotide; CTG chr2 60472294 60472315 60472311 60472316 +
tggcaactgcacggacacagca

SEQ ID NO: 196864 - DNA, 22 bp, Artificial Sequence
  Synthetic oligonucleotide; CTG chr2 60472303 60472324 60472320 60472325 +
cacggacacagcaggaactgga

SEQ ID NO: 196865 - DNA, 22 bp, Artificial Sequence
  Synthetic oligonucleotide; CTG chr2 60472323 60472344 60472340 60472345 +
gactcttgtttccctttctggt

SEQ ID NO: 196866 - DNA, 22 bp, Artificial Sequence
  Synthetic oligonucleotide; CTC chr2 60472328 60472349 60472345 60472350 +
ttgtttccctttctggtctctc

SEQ ID NO: 196867 - DNA, 22 bp, Artificial Sequence
  Synthetic oligonucleotide; CTT chr2 60472330 60472351 60472347 60472352 +
gtttccctttctggtctctcaa

SEQ ID NO: 196868 - DNA, 22 bp, Artificial Sequence
  Synthetic oligonucleotide; TTG chr2 60472331 60472352 60472348 60472353 +
tttccctttctggtctctcaaa

SEQ ID NO: 196869 - DNA, 22 bp, Artificial Sequence
  Synthetic oligonucleotide; TTT chr2 60472334 60472355 60472351 60472356 +
ccctttctggtctctcaaatgg

SEQ ID NO: 196870 - DNA, 22 bp, Artificial Sequence
  Synthetic oligonucleotide; TTC chr2 60472335 60472356 60472352 60472357 +
cctttctggtctctcaaatggg

SEQ ID NO: 196871 - DNA, 22 bp, Artificial Sequence
  Synthetic oligonucleotide; CTT chr2 60472339 60472360 60472356 60472361 +
tctggtctctcaaatgggacac

SEQ ID NO: 196872 - DNA, 22 bp, Artificial Sequence
  Synthetic oligonucleotide; TTT chr2 60472340 60472361 60472357 60472362 +
ctggtctctcaaatgggacaca

SEQ ID NO: 196873 - DNA, 22 bp, Artificial Sequence
  Synthetic oligonucleotide; TTC chr2 60472341 60472362 60472358 60472363 +
tggtctctcaaatgggacacat

SEQ ID NO: 196874 - DNA, 22 bp, Artificial Sequence
  Synthetic oligonucleotide; CTG chr2 60472343 60472364 60472360 60472365 +
gtctctcaaatgggacacattt

SEQ ID NO: 196875 - DNA, 22 bp, Artificial Sequence
  Synthetic oligonucleotide; CTC chr2 60472348 60472369 60472365 60472370 +
tcaaatgggacacatttccctt

SEQ ID NO: 196876 - DNA, 22 bp, Artificial Sequence
  Synthetic oligonucleotide; CTC chr2 60472350 60472371 60472367 60472372 +
aaatgggacacatttccctttt

SEQ ID NO: 196877 - DNA, 22 bp, Artificial Sequence
  Synthetic oligonucleotide; TTT chr2 60472365 60472386 60472382 60472387 +
cccttttctgactcaatctttt

SEQ ID NO: 196878 - DNA, 22 bp, Artificial Sequence
  Synthetic oligonucleotide; TTC chr2 60472366 60472387 60472383 60472388 +
ccttttctgactcaatcttttt

SEQ ID NO: 196879 - DNA, 22 bp, Artificial Sequence
  Synthetic oligonucleotide; CTT chr2 60472370 60472391 60472387 60472392 +
ttctgactcaatcttttttcaa

SEQ ID NO: 196880 - DNA, 22 bp, Artificial Sequence
  Synthetic oligonucleotide; TTT chr2 60472371 60472392 60472388 60472393 +
tctgactcaatcttttttcaaa

SEQ ID NO: 196881 - DNA, 22 bp, Artificial Sequence
  Synthetic oligonucleotide; TTT chr2 60472372 60472393 60472389 60472394 +
ctgactcaatcttttttcaaat

SEQ ID NO: 196882 - DNA, 22 bp, Artificial Sequence
  Synthetic oligonucleotide; TTC chr2 60472373 60472394 60472390 60472395 +
tgactcaatcttttttcaaatg

SEQ ID NO: 196883 - DNA, 22 bp, Artificial Sequence
  Synthetic oligonucleotide; CTG chr2 60472375 60472396 60472392 60472397 +
actcaatcttttttcaaatgtc

SEQ ID NO: 196884 - DNA, 22 bp, Artificial Sequence
  Synthetic oligonucleotide; CTC chr2 60472379 60472400 60472396 60472401 +
aatcttttttcaaatgtcttac

SEQ ID NO: 196885 - DNA, 22 bp, Artificial Sequence
  Synthetic oligonucleotide; CTT chr2 60472385 60472406 60472402 60472407 +
ttttcaaatgtcttacactttt

SEQ ID NO: 196886 - DNA, 22 bp, Artificial Sequence
  Synthetic oligonucleotide; TTT chr2 60472386 60472407 60472403 60472408 +
tttcaaatgtcttacacttttc

SEQ ID NO: 196887 - DNA, 22 bp, Artificial Sequence
  Synthetic oligonucleotide; TTT chr2 60472387 60472408 60472404 60472409 +
ttcaaatgtcttacacttttct

SEQ ID NO: 196888 - DNA, 22 bp, Artificial Sequence
  Synthetic oligonucleotide; TTT chr2 60472388 60472409 60472405 60472410 +
tcaaatgtcttacacttttctg

SEQ ID NO: 196889 - DNA, 22 bp, Artificial Sequence
  Synthetic oligonucleotide; TTT chr2 60472389 60472410 60472406 60472411 +
caaatgtcttacacttttctgg

SEQ ID NO: 196890 - DNA, 22 bp, Artificial Sequence
  Synthetic oligonucleotide; TTC chr2 60472390 60472411 60472407 60472412 +
aaatgtcttacacttttctggt

SEQ ID NO: 196891 - DNA, 22 bp, Artificial Sequence
  Synthetic oligonucleotide; CTT chr2 60472399 60472420 60472416 60472421 +
acacttttctggtggaaggtgt

SEQ ID NO: 196892 - DNA, 22 bp, Artificial Sequence
  Synthetic oligonucleotide; TTA chr2 60472400 60472421 60472417 60472422 +
cacttttctggtggaaggtgtt

SEQ ID NO: 196893 - DNA, 22 bp, Artificial Sequence
  Synthetic oligonucleotide; CTT chr2 60472405 60472426 60472422 60472427 +
ttctggtggaaggtgtttcaac

SEQ ID NO: 196894 - DNA, 22 bp, Artificial Sequence
  Synthetic oligonucleotide; TTT chr2 60472406 60472427 60472423 60472428 +
tctggtggaaggtgtttcaacc

SEQ ID NO: 196895 - DNA, 22 bp, Artificial Sequence
  Synthetic oligonucleotide; TTT chr2 60472407 60472428 60472424 60472429 +
ctggtggaaggtgtttcaacct

SEQ ID NO: 196896 - DNA, 22 bp, Artificial Sequence
  Synthetic oligonucleotide; TTC chr2 60472408 60472429 60472425 60472430 +
tggtggaaggtgtttcaacctg

SEQ ID NO: 196897 - DNA, 22 bp, Artificial Sequence
  Synthetic oligonucleotide; CTG chr2 60472410 60472431 60472427 60472432 +
gtggaaggtgtttcaacctgtt

SEQ ID NO: 196898 - DNA, 22 bp, Artificial Sequence
  Synthetic oligonucleotide; TTT chr2 60472423 60472444 60472440 60472445 +
caacctgttctatttcataaag

SEQ ID NO: 196899 - DNA, 22 bp, Artificial Sequence
  Synthetic oligonucleotide; TTC chr2 60472424 60472445 60472441 60472446 +
aacctgttctatttcataaagg

SEQ ID NO: 196900 - DNA, 22 bp, Artificial Sequence
  Synthetic oligonucleotide; CTG chr2 60472430 60472451 60472447 60472452 +
ttctatttcataaaggtctctc

SEQ ID NO: 196901 - DNA, 22 bp, Artificial Sequence
  Synthetic oligonucleotide; TTC chr2 60472433 60472454 60472450 60472455 +
tatttcataaaggtctctctag

SEQ ID NO: 196902 - DNA, 22 bp, Artificial Sequence
  Synthetic oligonucleotide; CTA chr2 60472435 60472456 60472452 60472457 +
tttcataaaggtctctctagac

SEQ ID NO: 196903 - DNA, 22 bp, Artificial Sequence
  Synthetic oligonucleotide; TTT chr2 60472438 60472459 60472455 60472460 +
cataaaggtctctctagaccca

SEQ ID NO: 196904 - DNA, 22 bp, Artificial Sequence
  Synthetic oligonucleotide; TTC chr2 60472439 60472460 60472456 60472461 +
ataaaggtctctctagacccag

SEQ ID NO: 196905 - DNA, 22 bp, Artificial Sequence
  Synthetic oligonucleotide; CTC chr2 60472450 60472471 60472467 60472472 +
tctagacccagtatttccactt

SEQ ID NO: 196906 - DNA, 22 bp, Artificial Sequence
  Synthetic oligonucleotide; CTC chr2 60472452 60472473 60472469 60472474 +
tagacccagtatttccacttgg

SEQ ID NO: 196907 - DNA, 22 bp, Artificial Sequence
  Synthetic oligonucleotide; CTA chr2 60472454 60472475 60472471 60472476 +
gacccagtatttccacttgggg

SEQ ID NO: 196908 - DNA, 22 bp, Artificial Sequence
  Synthetic oligonucleotide; TTT chr2 60472466 60472487 60472483 60472488 +
ccacttggggcctcagaaatgc

SEQ ID NO: 196909 - DNA, 22 bp, Artificial Sequence
  Synthetic oligonucleotide; TTC chr2 60472467 60472488 60472484 60472489 +
cacttggggcctcagaaatgcc

SEQ ID NO: 196910 - DNA, 22 bp, Artificial Sequence
  Synthetic oligonucleotide; CTT chr2 60472472 60472493 60472489 60472494 +
ggggcctcagaaatgccttaca

SEQ ID NO: 196911 - DNA, 22 bp, Artificial Sequence
  Synthetic oligonucleotide; TTG chr2 60472473 60472494 60472490 60472495 +
gggcctcagaaatgccttacac

SEQ ID NO: 196912 - DNA, 22 bp, Artificial Sequence
  Synthetic oligonucleotide; CTC chr2 60472480 60472501 60472497 60472502 +
agaaatgccttacacattatta

SEQ ID NO: 196913 - DNA, 22 bp, Artificial Sequence
  Synthetic oligonucleotide; CTT chr2 60472491 60472512 60472508 60472513 +
acacattattaggttgcaaagt

SEQ ID NO: 196914 - DNA, 22 bp, Artificial Sequence
  Synthetic oligonucleotide; TTA chr2 60472492 60472513 60472509 60472514 +
cacattattaggttgcaaagtt

SEQ ID NO: 196915 - DNA, 22 bp, Artificial Sequence
  Synthetic oligonucleotide; TTA chr2 60472499 60472520 60472516 60472521 +
ttaggttgcaaagtttccttat

SEQ ID NO: 196916 - DNA, 22 bp, Artificial Sequence
  Synthetic oligonucleotide; TTA chr2 60472502 60472523 60472519 60472524 +
ggttgcaaagtttccttatggc

SEQ ID NO: 196917 - DNA, 22 bp, Artificial Sequence
  Synthetic oligonucleotide; TTG chr2 60472507 60472528 60472524 60472529 +
caaagtttccttatggctgaat

SEQ ID NO: 196918 - DNA, 22 bp, Artificial Sequence
  Synthetic oligonucleotide; TTT chr2 60472515 60472536 60472532 60472537 +
ccttatggctgaatttaaaaat

SEQ ID NO: 196919 - DNA, 22 bp, Artificial Sequence
  Synthetic oligonucleotide; TTC chr2 60472516 60472537 60472533 60472538 +
cttatggctgaatttaaaaata

SEQ ID NO: 196920 - DNA, 22 bp, Artificial Sequence
  Synthetic oligonucleotide; CTT chr2 60472519 60472540 60472536 60472541 +
atggctgaatttaaaaatagtg

SEQ ID NO: 196921 - DNA, 22 bp, Artificial Sequence
  Synthetic oligonucleotide; TTA chr2 60472520 60472541 60472537 60472542 +
tggctgaatttaaaaatagtga

SEQ ID NO: 196922 - DNA, 22 bp, Artificial Sequence
  Synthetic oligonucleotide; CTG chr2 60472526 60472547 60472543 60472548 +
aatttaaaaatagtgactctta

SEQ ID NO: 196923 - DNA, 22 bp, Artificial Sequence
  Synthetic oligonucleotide; TTT chr2 60472531 60472552 60472548 60472553 +
aaaaatagtgactcttattttt

SEQ ID NO: 196924 - DNA, 22 bp, Artificial Sequence
  Synthetic oligonucleotide; TTA chr2 60472532 60472553 60472549 60472554 +
aaaatagtgactcttatttttc

SEQ ID NO: 196925 - DNA, 22 bp, Artificial Sequence
  Synthetic oligonucleotide; CTC chr2 60472545 60472566 60472562 60472567 +
ttatttttcaggtttcattaaa

SEQ ID NO: 196926 - DNA, 22 bp, Artificial Sequence
  Synthetic oligonucleotide; CTT chr2 60472547 60472568 60472564 60472569 +
atttttcaggtttcattaaaaa

SEQ ID NO: 196927 - DNA, 22 bp, Artificial Sequence
  Synthetic oligonucleotide; TTA chr2 60472548 60472569 60472565 60472570 +
tttttcaggtttcattaaaaaa

SEQ ID NO: 196928 - DNA, 22 bp, Artificial Sequence
  Synthetic oligonucleotide; TTT chr2 60472551 60472572 60472568 60472573 +
ttcaggtttcattaaaaaatat

SEQ ID NO: 196929 - DNA, 22 bp, Artificial Sequence
  Synthetic oligonucleotide; TTT chr2 60472552 60472573 60472569 60472574 +
tcaggtttcattaaaaaatatg

SEQ ID NO: 196930 - DNA, 22 bp, Artificial Sequence
  Synthetic oligonucleotide; TTT chr2 60472553 60472574 60472570 60472575 +
caggtttcattaaaaaatatgc

SEQ ID NO: 196931 - DNA, 22 bp, Artificial Sequence
  Synthetic oligonucleotide; TTC chr2 60472554 60472575 60472571 60472576 +
aggtttcattaaaaaatatgca

SEQ ID NO: 196932 - DNA, 22 bp, Artificial Sequence
  Synthetic oligonucleotide; TTT chr2 60472560 60472581 60472577 60472582 +
cattaaaaaatatgcagcaaac

SEQ ID NO: 196933 - DNA, 22 bp, Artificial Sequence
  Synthetic oligonucleotide; TTC chr2 60472561 60472582 60472578 60472583 +
attaaaaaatatgcagcaaact

SEQ ID NO: 196934 - DNA, 22 bp, Artificial Sequence
  Synthetic oligonucleotide; TTA chr2 60472565 60472586 60472582 60472587 +
aaaaatatgcagcaaactggga

SEQ ID NO: 196935 - DNA, 22 bp, Artificial Sequence
  Synthetic oligonucleotide; CTG chr2 60472584 60472605 60472601 60472606 +
ggaatggctttgatttaatgtt

SEQ ID NO: 196936 - DNA, 22 bp, Artificial Sequence
  Synthetic oligonucleotide; CTT chr2 60472594 60472615 60472611 60472616 +
tgatttaatgttatacatttgg

SEQ ID NO: 196937 - DNA, 22 bp, Artificial Sequence
  Synthetic oligonucleotide; TTT chr2 60472595 60472616 60472612 60472617 +
gatttaatgttatacatttggt

SEQ ID NO: 196938 - DNA, 22 bp, Artificial Sequence
  Synthetic oligonucleotide; TTG chr2 60472596 60472617 60472613 60472618 +
atttaatgttatacatttggtc

SEQ ID NO: 196939 - DNA, 22 bp, Artificial Sequence
  Synthetic oligonucleotide; TTT chr2 60472600 60472621 60472617 60472622 +
aatgttatacatttggtcactt

SEQ ID NO: 196940 - DNA, 22 bp, Artificial Sequence
  Synthetic oligonucleotide; TTA chr2 60472601 60472622 60472618 60472623 +
atgttatacatttggtcacttt

SEQ ID NO: 196941 - DNA, 22 bp, Artificial Sequence
  Synthetic oligonucleotide; TTA chr2 60472607 60472628 60472624 60472629 +
tacatttggtcactttacattt

SEQ ID NO: 196942 - DNA, 22 bp, Artificial Sequence
  Synthetic oligonucleotide; TTT chr2 60472614 60472635 60472631 60472636 +
ggtcactttacatttctacata

SEQ ID NO: 196943 - DNA, 22 bp, Artificial Sequence
  Synthetic oligonucleotide; TTG chr2 60472615 60472636 60472632 60472637 +
gtcactttacatttctacatat

SEQ ID NO: 196944 - DNA, 22 bp, Artificial Sequence
  Synthetic oligonucleotide; CTT chr2 60472622 60472643 60472639 60472644 +
tacatttctacatatattgggt

SEQ ID NO: 196945 - DNA, 22 bp, Artificial Sequence
  Synthetic oligonucleotide; TTT chr2 60472623 60472644 60472640 60472645 +
acatttctacatatattgggta

SEQ ID NO: 196946 - DNA, 22 bp, Artificial Sequence
  Synthetic oligonucleotide; TTA chr2 60472624 60472645 60472641 60472646 +
catttctacatatattgggtac

SEQ ID NO: 196947 - DNA, 22 bp, Artificial Sequence
  Synthetic oligonucleotide; TTT chr2 60472629 60472650 60472646 60472651 +
ctacatatattgggtaccaact

SEQ ID NO: 196948 - DNA, 22 bp, Artificial Sequence
  Synthetic oligonucleotide; TTC chr2 60472630 60472651 60472647 60472652 +
tacatatattgggtaccaactt

SEQ ID NO: 196949 - DNA, 22 bp, Artificial Sequence
  Synthetic oligonucleotide; CTA chr2 60472632 60472653 60472649 60472654 +
catatattgggtaccaactttt

SEQ ID NO: 196950 - DNA, 22 bp, Artificial Sequence
  Synthetic oligonucleotide; TTG chr2 60472641 60472662 60472658 60472663 +
ggtaccaacttttgacaaagag

SEQ ID NO: 196951 - DNA, 22 bp, Artificial Sequence
  Synthetic oligonucleotide; CTT chr2 60472652 60472673 60472669 60472674 +
ttgacaaagagctctaagccca

SEQ ID NO: 196952 - DNA, 22 bp, Artificial Sequence
  Synthetic oligonucleotide; TTT chr2 60472653 60472674 60472670 60472675 +
tgacaaagagctctaagcccag

SEQ ID NO: 196953 - DNA, 22 bp, Artificial Sequence
  Synthetic oligonucleotide; TTT chr2 60472654 60472675 60472671 60472676 +
gacaaagagctctaagcccagt

SEQ ID NO: 196954 - DNA, 22 bp, Artificial Sequence
  Synthetic oligonucleotide; TTG chr2 60472655 60472676 60472672 60472677 +
acaaagagctctaagcccagtg

SEQ ID NO: 196955 - DNA, 22 bp, Artificial Sequence
  Synthetic oligonucleotide; CTC chr2 60472666 60472687 60472683 60472688 +
taagcccagtgggatgttcctg

SEQ ID NO: 196956 - DNA, 22 bp, Artificial Sequence
  Synthetic oligonucleotide; CTA chr2 60472668 60472689 60472685 60472690 +
agcccagtgggatgttcctgga

SEQ ID NO: 196957 - DNA, 22 bp, Artificial Sequence
  Synthetic oligonucleotide; TTC chr2 60472685 60472706 60472702 60472707 +
ctggaatttaagtcattaaatc

SEQ ID NO: 196958 - DNA, 22 bp, Artificial Sequence
  Synthetic oligonucleotide; CTG chr2 60472688 60472709 60472705 60472710 +
gaatttaagtcattaaatcaag

SEQ ID NO: 196959 - DNA, 22 bp, Artificial Sequence
  Synthetic oligonucleotide; TTT chr2 60472694 60472715 60472711 60472716 +
aagtcattaaatcaagtttttt

SEQ ID NO: 196960 - DNA, 22 bp, Artificial Sequence
  Synthetic oligonucleotide; TTA chr2 60472695 60472716 60472712 60472717 +
agtcattaaatcaagttttttg

SEQ ID NO: 196961 - DNA, 22 bp, Artificial Sequence
  Synthetic oligonucleotide; TTA chr2 60472703 60472724 60472720 60472725 +
aatcaagttttttggtttcctc

SEQ ID NO: 196962 - DNA, 22 bp, Artificial Sequence
  Synthetic oligonucleotide; TTT chr2 60472713 60472734 60472730 60472735 +
tttggtttcctcaagaacatct

SEQ ID NO: 196963 - DNA, 22 bp, Artificial Sequence
  Synthetic oligonucleotide; TTT chr2 60472714 60472735 60472731 60472736 +
ttggtttcctcaagaacatctc

SEQ ID NO: 196964 - DNA, 22 bp, Artificial Sequence
  Synthetic oligonucleotide; TTT chr2 60472715 60472736 60472732 60472737 +
tggtttcctcaagaacatctca

SEQ ID NO: 196965 - DNA, 22 bp, Artificial Sequence
  Synthetic oligonucleotide; TTT chr2 60472716 60472737 60472733 60472738 +
ggtttcctcaagaacatctcaa

SEQ ID NO: 196966 - DNA, 22 bp, Artificial Sequence
  Synthetic oligonucleotide; TTG chr2 60472717 60472738 60472734 60472739 +
gtttcctcaagaacatctcaaa

SEQ ID NO: 196967 - DNA, 22 bp, Artificial Sequence
  Synthetic oligonucleotide; TTT chr2 60472721 60472742 60472738 60472743 +
cctcaagaacatctcaaagatt

SEQ ID NO: 196968 - DNA, 22 bp, Artificial Sequence
  Synthetic oligonucleotide; TTC chr2 60472722 60472743 60472739 60472744 +
ctcaagaacatctcaaagattc

SEQ ID NO: 196969 - DNA, 22 bp, Artificial Sequence
  Synthetic oligonucleotide; CTC chr2 60472725 60472746 60472742 60472747 +
aagaacatctcaaagattcctt

SEQ ID NO: 196970 - DNA, 22 bp, Artificial Sequence
  Synthetic oligonucleotide; CTC chr2 60472736 60472757 60472753 60472758 +
aaagattccttgactattaaca

SEQ ID NO: 196971 - DNA, 22 bp, Artificial Sequence
  Synthetic oligonucleotide; TTC chr2 60472744 60472765 60472761 60472766 +
cttgactattaacatgctattt

SEQ ID NO: 196972 - DNA, 22 bp, Artificial Sequence
  Synthetic oligonucleotide; CTT chr2 60472747 60472768 60472764 60472769 +
gactattaacatgctatttgtt

SEQ ID NO: 196973 - DNA, 22 bp, Artificial Sequence
  Synthetic oligonucleotide; TTG chr2 60472748 60472769 60472765 60472770 +
actattaacatgctatttgttt

SEQ ID NO: 196974 - DNA, 22 bp, Artificial Sequence
  Synthetic oligonucleotide; CTA chr2 60472752 60472773 60472769 60472774 +
ttaacatgctatttgtttctga

SEQ ID NO: 196975 - DNA, 22 bp, Artificial Sequence
  Synthetic oligonucleotide; TTA chr2 60472755 60472776 60472772 60472777 +
acatgctatttgtttctgaaac

SEQ ID NO: 196976 - DNA, 22 bp, Artificial Sequence
  Synthetic oligonucleotide; CTA chr2 60472763 60472784 60472780 60472785 +
tttgtttctgaaactaatcact

SEQ ID NO: 196977 - DNA, 22 bp, Artificial Sequence
  Synthetic oligonucleotide; TTT chr2 60472766 60472787 60472783 60472788 +
gtttctgaaactaatcactggg

SEQ ID NO: 196978 - DNA, 22 bp, Artificial Sequence
  Synthetic oligonucleotide; TTG chr2 60472767 60472788 60472784 60472789 +
tttctgaaactaatcactgggt

SEQ ID NO: 196979 - DNA, 22 bp, Artificial Sequence
  Synthetic oligonucleotide; TTT chr2 60472770 60472791 60472787 60472792 +
ctgaaactaatcactgggtgtg

SEQ ID NO: 196980 - DNA, 22 bp, Artificial Sequence
  Synthetic oligonucleotide; TTC chr2 60472771 60472792 60472788 60472793 +
tgaaactaatcactgggtgtgt

SEQ ID NO: 196981 - DNA, 22 bp, Artificial Sequence
  Synthetic oligonucleotide; CTG chr2 60472773 60472794 60472790 60472795 +
aaactaatcactgggtgtgtaa

SEQ ID NO: 196982 - DNA, 22 bp, Artificial Sequence
  Synthetic oligonucleotide; CTA chr2 60472779 60472800 60472796 60472801 +
atcactgggtgtgtaatacagc

SEQ ID NO: 196983 - DNA, 22 bp, Artificial Sequence
  Synthetic oligonucleotide; CTG chr2 60472786 60472807 60472803 60472808 +
ggtgtgtaatacagccacatta

SEQ ID NO: 196984 - DNA, 22 bp, Artificial Sequence
  Synthetic oligonucleotide; TTA chr2 60472808 60472829 60472825 60472830 +
ctgtctactaatcaacaggtaa

SEQ ID NO: 196985 - DNA, 22 bp, Artificial Sequence
  Synthetic oligonucleotide; CTG chr2 60472811 60472832 60472828 60472833 +
tctactaatcaacaggtaatac

SEQ ID NO: 196986 - DNA, 22 bp, Artificial Sequence
  Synthetic oligonucleotide; CTA chr2 60472815 60472836 60472832 60472837 +
ctaatcaacaggtaatactgca

SEQ ID NO: 196987 - DNA, 22 bp, Artificial Sequence
  Synthetic oligonucleotide; CTA chr2 60472818 60472839 60472835 60472840 +
atcaacaggtaatactgcagat

SEQ ID NO: 196988 - DNA, 22 bp, Artificial Sequence
  Synthetic oligonucleotide; CTG chr2 60472835 60472856 60472852 60472857 +
cagatttccaaatgtgccaaaa

SEQ ID NO: 196989 - DNA, 22 bp, Artificial Sequence
  Synthetic oligonucleotide; TTT chr2 60472842 60472863 60472859 60472864 +
ccaaatgtgccaaaacagctaa

SEQ ID NO: 196990 - DNA, 22 bp, Artificial Sequence
  Synthetic oligonucleotide; TTC chr2 60472843 60472864 60472860 60472865 +
caaatgtgccaaaacagctaag

SEQ ID NO: 196991 - DNA, 22 bp, Artificial Sequence
  Synthetic oligonucleotide; CTA chr2 60472863 60472884 60472880 60472885 +
agcaaaaagcatcattccaaca

SEQ ID NO: 196992 - DNA, 22 bp, Artificial Sequence
  Synthetic oligonucleotide; TTC chr2 60472880 60472901 60472897 60472902 +
caacacgtttaatgactgcttt

SEQ ID NO: 196993 - DNA, 22 bp, Artificial Sequence
  Synthetic oligonucleotide; TTT chr2 60472890 60472911 60472907 60472912 +
aatgactgctttgggagcccaa

SEQ ID NO: 196994 - DNA, 22 bp, Artificial Sequence
  Synthetic oligonucleotide; TTA chr2 60472891 60472912 60472908 60472913 +
atgactgctttgggagcccaac

SEQ ID NO: 196995 - DNA, 22 bp, Artificial Sequence
  Synthetic oligonucleotide; CTG chr2 60472898 60472919 60472915 60472920 +
ctttgggagcccaactttaaca

SEQ ID NO: 196996 - DNA, 22 bp, Artificial Sequence
  Synthetic oligonucleotide; CTT chr2 60472901 60472922 60472918 60472923 +
tgggagcccaactttaacaggt

SEQ ID NO: 196997 - DNA, 22 bp, Artificial Sequence
  Synthetic oligonucleotide; TTT chr2 60472902 60472923 60472919 60472924 +
gggagcccaactttaacaggta

SEQ ID NO: 196998 - DNA, 22 bp, Artificial Sequence
  Synthetic oligonucleotide; TTG chr2 60472903 60472924 60472920 60472925 +
ggagcccaactttaacaggtat

SEQ ID NO: 196999 - DNA, 22 bp, Artificial Sequence
  Synthetic oligonucleotide; CTT chr2 60472915 60472936 60472932 60472937 +
taacaggtattaaaaccacagg

SEQ ID NO: 197000 - DNA, 22 bp, Artificial Sequence
  Synthetic oligonucleotide; TTT chr2 60472916 60472937 60472933 60472938 +
aacaggtattaaaaccacagga

SEQ ID NO: 197001 - DNA, 22 bp, Artificial Sequence
  Synthetic oligonucleotide; TTA chr2 60472917 60472938 60472934 60472939 +
acaggtattaaaaccacaggac

SEQ ID NO: 197002 - DNA, 22 bp, Artificial Sequence
  Synthetic oligonucleotide; TTA chr2 60472927 60472948 60472944 60472949 +
aaaccacaggactctccacagg

SEQ ID NO: 197003 - DNA, 22 bp, Artificial Sequence
  Synthetic oligonucleotide; CTC chr2 60472941 60472962 60472958 60472963 +
tccacaggagtacatagatgtg

SEQ ID NO: 197004 - DNA, 22 bp, Artificial Sequence
  Synthetic oligonucleotide; CTC chr2 60472943 60472964 60472960 60472965 +
cacaggagtacatagatgtgtg

SEQ ID NO: 197005 - DNA, 22 bp, Artificial Sequence
  Synthetic oligonucleotide; CTA chr2 60472968 60472989 60472985 60472990 +
ttcactaaaatgtacgtgtgtg

SEQ ID NO: 197006 - DNA, 22 bp, Artificial Sequence
  Synthetic oligonucleotide; TTC chr2 60472971 60472992 60472988 60472993 +
actaaaatgtacgtgtgtgtgt

SEQ ID NO: 197007 - DNA, 22 bp, Artificial Sequence
  Synthetic oligonucleotide; CTA chr2 60472975 60472996 60472992 60472997 +
aaatgtacgtgtgtgtgtgttt

SEQ ID NO: 197008 - DNA, 22 bp, Artificial Sequence
  Synthetic oligonucleotide; TTT chr2 60472997 60473018 60473014 60473019 +
gcaagcatttatgtgtacatat

SEQ ID NO: 197009 - DNA, 22 bp, Artificial Sequence
  Synthetic oligonucleotide; TTG chr2 60472998 60473019 60473015 60473020 +
caagcatttatgtgtacatatg

SEQ ID NO: 197010 - DNA, 22 bp, Artificial Sequence
  Synthetic oligonucleotide; TTT chr2 60473007 60473028 60473024 60473029 +
atgtgtacatatgtgtgttagc

SEQ ID NO: 197011 - DNA, 22 bp, Artificial Sequence
  Synthetic oligonucleotide; TTA chr2 60473008 60473029 60473025 60473030 +
tgtgtacatatgtgtgttagcg

SEQ ID NO: 197012 - DNA, 22 bp, Artificial Sequence
  Synthetic oligonucleotide; TTA chr2 60473027 60473048 60473044 60473049 +
gcgtgtgcatgcatatgtgttt

SEQ ID NO: 197013 - DNA, 22 bp, Artificial Sequence
  Synthetic oligonucleotide; TTT chr2 60473049 60473070 60473066 60473071 +
gtgagcatgtgcatgtgtgtat

SEQ ID NO: 197014 - DNA, 22 bp, Artificial Sequence
  Synthetic oligonucleotide; TTG chr2 60473050 60473071 60473067 60473072 +
tgagcatgtgcatgtgtgtata

SEQ ID NO: 197015 - DNA, 22 bp, Artificial Sequence
  Synthetic oligonucleotide; TTG chr2 60473075 60473096 60473092 60473097 +
tgactgtgtgcatgtgtgtgta

SEQ ID NO: 197016 - DNA, 22 bp, Artificial Sequence
  Synthetic oligonucleotide; CTG chr2 60473081 60473102 60473098 60473103 +
tgtgcatgtgtgtgtatgcttg

SEQ ID NO: 197017 - DNA, 22 bp, Artificial Sequence
  Synthetic oligonucleotide; CTT chr2 60473102 60473123 60473119 60473124 +
gtgcatgtgttagcatgtgcat

SEQ ID NO: 197018 - DNA, 22 bp, Artificial Sequence
  Synthetic oligonucleotide; TTG chr2 60473103 60473124 60473120 60473125 +
tgcatgtgttagcatgtgcatg

SEQ ID NO: 197019 - DNA, 22 bp, Artificial Sequence
  Synthetic oligonucleotide; TTA chr2 60473114 60473135 60473131 60473136 +
gcatgtgcatgcacatgtgtgt

SEQ ID NO: 197020 - DNA, 22 bp, Artificial Sequence
  Synthetic oligonucleotide; TTA chr2 60473138 60473159 60473155 60473160 +
gcgtgttcatgtgtgtgtatat

SEQ ID NO: 197021 - DNA, 22 bp, Artificial Sequence
  Synthetic oligonucleotide; TTC chr2 60473146 60473167 60473163 60473168 +
atgtgtgtgtatatgtgagtgt

SEQ ID NO: 197022 - DNA, 22 bp, Artificial Sequence
  Synthetic oligonucleotide; CTG chr2 60473183 60473204 60473200 60473205 +
tgtacgtgtgtgaatgtgtgta

SEQ ID NO: 197023 - DNA, 22 bp, Artificial Sequence
  Synthetic oligonucleotide; TTT chr2 60473210 60473231 60473227 60473232 +
cctaaacatatgtttttagata

SEQ ID NO: 197024 - DNA, 22 bp, Artificial Sequence
  Synthetic oligonucleotide; TTC chr2 60473211 60473232 60473228 60473233 +
ctaaacatatgtttttagataa

SEQ ID NO: 197025 - DNA, 22 bp, Artificial Sequence
  Synthetic oligonucleotide; CTA chr2 60473214 60473235 60473231 60473236 +
aacatatgtttttagataattt

SEQ ID NO: 197026 - DNA, 22 bp, Artificial Sequence
  Synthetic oligonucleotide; TTT chr2 60473225 60473246 60473242 60473247 +
ttagataatttccctgtttttt

SEQ ID NO: 197027 - DNA, 22 bp, Artificial Sequence
  Synthetic oligonucleotide; TTT chr2 60473226 60473247 60473243 60473248 +
tagataatttccctgttttttt

SEQ ID NO: 197028 - DNA, 22 bp, Artificial Sequence
  Synthetic oligonucleotide; TTT chr2 60473227 60473248 60473244 60473249 +
agataatttccctgtttttttt

SEQ ID NO: 197029 - DNA, 22 bp, Artificial Sequence
  Synthetic oligonucleotide; TTA chr2 60473228 60473249 60473245 60473250 +
gataatttccctgttttttttt

SEQ ID NO: 197030 - DNA, 22 bp, Artificial Sequence
  Synthetic oligonucleotide; TTT chr2 60473236 60473257 60473253 60473258 +
ccctgtttttttttttttttca

SEQ ID NO: 197031 - DNA, 22 bp, Artificial Sequence
  Synthetic oligonucleotide; TTC chr2 60473237 60473258 60473254 60473259 +
cctgtttttttttttttttcag

SEQ ID NO: 197032 - DNA, 22 bp, Artificial Sequence
  Synthetic oligonucleotide; CTG chr2 60473241 60473262 60473258 60473263 +
tttttttttttttttcagtgag

SEQ ID NO: 197033 - DNA, 22 bp, Artificial Sequence
  Synthetic oligonucleotide; TTT chr2 60473244 60473265 60473261 60473266 +
ttttttttttttcagtgagaca

SEQ ID NO: 197034 - DNA, 22 bp, Artificial Sequence
  Synthetic oligonucleotide; TTT chr2 60473245 60473266 60473262 60473267 +
tttttttttttcagtgagacag

SEQ ID NO: 197035 - DNA, 22 bp, Artificial Sequence
  Synthetic oligonucleotide; TTT chr2 60473246 60473267 60473263 60473268 +
ttttttttttcagtgagacagg

SEQ ID NO: 197036 - DNA, 22 bp, Artificial Sequence
  Synthetic oligonucleotide; TTT chr2 60473247 60473268 60473264 60473269 +
tttttttttcagtgagacaggc

SEQ ID NO: 197037 - DNA, 22 bp, Artificial Sequence
  Synthetic oligonucleotide; TTT chr2 60473248 60473269 60473265 60473270 +
ttttttttcagtgagacaggca

SEQ ID NO: 197038 - DNA, 22 bp, Artificial Sequence
  Synthetic oligonucleotide; TTT chr2 60473249 60473270 60473266 60473271 +
tttttttcagtgagacaggcac

SEQ ID NO: 197039 - DNA, 22 bp, Artificial Sequence
  Synthetic oligonucleotide; TTT chr2 60473250 60473271 60473267 60473272 +
ttttttcagtgagacaggcaca

SEQ ID NO: 197040 - DNA, 22 bp, Artificial Sequence
  Synthetic oligonucleotide; TTT chr2 60473251 60473272 60473268 60473273 +
tttttcagtgagacaggcacaa

SEQ ID NO: 197041 - DNA, 22 bp, Artificial Sequence
  Synthetic oligonucleotide; TTT chr2 60473252 60473273 60473269 60473274 +
ttttcagtgagacaggcacaaa

SEQ ID NO: 197042 - DNA, 22 bp, Artificial Sequence
  Synthetic oligonucleotide; TTT chr2 60473253 60473274 60473270 60473275 +
tttcagtgagacaggcacaaaa

SEQ ID NO: 197043 - DNA, 22 bp, Artificial Sequence
  Synthetic oligonucleotide; TTT chr2 60473254 60473275 60473271 60473276 +
ttcagtgagacaggcacaaaag

SEQ ID NO: 197044 - DNA, 22 bp, Artificial Sequence
  Synthetic oligonucleotide; TTT chr2 60473255 60473276 60473272 60473277 +
tcagtgagacaggcacaaaagc

SEQ ID NO: 197045 - DNA, 22 bp, Artificial Sequence
  Synthetic oligonucleotide; TTT chr2 60473256 60473277 60473273 60473278 +
cagtgagacaggcacaaaagca

SEQ ID NO: 197046 - DNA, 22 bp, Artificial Sequence
  Synthetic oligonucleotide; TTC chr2 60473257 60473278 60473274 60473279 +
agtgagacaggcacaaaagcag

SEQ ID NO: 197047 - DNA, 22 bp, Artificial Sequence
  Synthetic oligonucleotide; CTG chr2 60473287 60473308 60473304 60473309 +
tcccacgtggaatgggctatct

SEQ ID NO: 197048 - DNA, 22 bp, Artificial Sequence
  Synthetic oligonucleotide; CTA chr2 60473306 60473327 60473323 60473328 +
tctcgtgacactgtgaccccct

SEQ ID NO: 197049 - DNA, 22 bp, Artificial Sequence
  Synthetic oligonucleotide; CTC chr2 60473310 60473331 60473327 60473332 +
gtgacactgtgaccccctttct

SEQ ID NO: 197050 - DNA, 22 bp, Artificial Sequence
  Synthetic oligonucleotide; CTG chr2 60473319 60473340 60473336 60473341 +
tgaccccctttctttcaccctg

SEQ ID NO: 197051 - DNA, 22 bp, Artificial Sequence
  Synthetic oligonucleotide; CTT chr2 60473329 60473350 60473346 60473351 +
tctttcaccctgggtcttcaaa

SEQ ID NO: 197052 - DNA, 22 bp, Artificial Sequence
  Synthetic oligonucleotide; TTT chr2 60473330 60473351 60473347 60473352 +
ctttcaccctgggtcttcaaaa

SEQ ID NO: 197053 - DNA, 22 bp, Artificial Sequence
  Synthetic oligonucleotide; TTC chr2 60473331 60473352 60473348 60473353 +
tttcaccctgggtcttcaaaaa

SEQ ID NO: 197054 - DNA, 22 bp, Artificial Sequence
  Synthetic oligonucleotide; CTT chr2 60473333 60473354 60473350 60473355 +
tcaccctgggtcttcaaaaaga

SEQ ID NO: 197055 - DNA, 22 bp, Artificial Sequence
  Synthetic oligonucleotide; TTT chr2 60473334 60473355 60473351 60473356 +
caccctgggtcttcaaaaagag

SEQ ID NO: 197056 - DNA, 22 bp, Artificial Sequence
  Synthetic oligonucleotide; TTC chr2 60473335 60473356 60473352 60473357 +
accctgggtcttcaaaaagaga

SEQ ID NO: 197057 - DNA, 22 bp, Artificial Sequence
  Synthetic oligonucleotide; CTG chr2 60473341 60473362 60473358 60473363 +
ggtcttcaaaaagagaatggat

SEQ ID NO: 197058 - DNA, 22 bp, Artificial Sequence
  Synthetic oligonucleotide; CTT chr2 60473347 60473368 60473364 60473369 +
caaaaagagaatggatgacact

SEQ ID NO: 197059 - DNA, 22 bp, Artificial Sequence
  Synthetic oligonucleotide; TTC chr2 60473348 60473369 60473365 60473370 +
aaaaagagaatggatgacacta

SEQ ID NO: 197060 - DNA, 22 bp, Artificial Sequence
  Synthetic oligonucleotide; CTA chr2 60473370 60473391 60473387 60473392 +
tgatgaggaggggtctctatat

SEQ ID NO: 197061 - DNA, 22 bp, Artificial Sequence
  Synthetic oligonucleotide; CTC chr2 60473387 60473408 60473404 60473409 +
tatattggtgacaggccaaaat

SEQ ID NO: 197062 - DNA, 22 bp, Artificial Sequence
  Synthetic oligonucleotide; CTA chr2 60473389 60473410 60473406 60473411 +
tattggtgacaggccaaaatac

SEQ ID NO: 197063 - DNA, 22 bp, Artificial Sequence
  Synthetic oligonucleotide; TTG chr2 60473394 60473415 60473411 60473416 +
gtgacaggccaaaatacaggac

SEQ ID NO: 197064 - DNA, 22 bp, Artificial Sequence
  Synthetic oligonucleotide; CTA chr2 60473418 60473439 60473435 60473440 +
cctacagtcctttcgcagtcca

SEQ ID NO: 197065 - DNA, 22 bp, Artificial Sequence
  Synthetic oligonucleotide; CTA chr2 60473422 60473443 60473439 60473444 +
cagtcctttcgcagtccataat

SEQ ID NO: 197066 - DNA, 22 bp, Artificial Sequence
  Synthetic oligonucleotide; CTT chr2 60473430 60473451 60473447 60473452 +
tcgcagtccataatcctcaagt

SEQ ID NO: 197067 - DNA, 22 bp, Artificial Sequence
  Synthetic oligonucleotide; TTT chr2 60473431 60473452 60473448 60473453 +
cgcagtccataatcctcaagtc

SEQ ID NO: 197068 - DNA, 22 bp, Artificial Sequence
  Synthetic oligonucleotide; TTC chr2 60473432 60473453 60473449 60473454 +
gcagtccataatcctcaagtcc

SEQ ID NO: 197069 - DNA, 22 bp, Artificial Sequence
  Synthetic oligonucleotide; CTC chr2 60473448 60473469 60473465 60473470 +
aagtccctcagctcttccatgt

SEQ ID NO: 197070 - DNA, 22 bp, Artificial Sequence
  Synthetic oligonucleotide; CTC chr2 60473457 60473478 60473474 60473479 +
agctcttccatgtaccaccttc

SEQ ID NO: 197071 - DNA, 22 bp, Artificial Sequence
  Synthetic oligonucleotide; CTC chr2 60473462 60473483 60473479 60473484 +
ttccatgtaccaccttctagac

SEQ ID NO: 197072 - DNA, 22 bp, Artificial Sequence
  Synthetic oligonucleotide; CTT chr2 60473464 60473485 60473481 60473486 +
ccatgtaccaccttctagacta

SEQ ID NO: 197073 - DNA, 22 bp, Artificial Sequence
  Synthetic oligonucleotide; TTC chr2 60473465 60473486 60473482 60473487 +
catgtaccaccttctagactac

SEQ ID NO: 197074 - DNA, 22 bp, Artificial Sequence
  Synthetic oligonucleotide; CTT chr2 60473478 60473499 60473495 60473500 +
ctagactacacttaaaatgcat

SEQ ID NO: 197075 - DNA, 22 bp, Artificial Sequence
  Synthetic oligonucleotide; TTC chr2 60473479 60473500 60473496 60473501 +
tagactacacttaaaatgcatc

SEQ ID NO: 197076 - DNA, 22 bp, Artificial Sequence
  Synthetic oligonucleotide; CTA chr2 60473481 60473502 60473498 60473503 +
gactacacttaaaatgcatcct

SEQ ID NO: 197077 - DNA, 22 bp, Artificial Sequence
  Synthetic oligonucleotide; CTA chr2 60473486 60473507 60473503 60473508 +
cacttaaaatgcatcctgaacg

SEQ ID NO: 197078 - DNA, 22 bp, Artificial Sequence
  Synthetic oligonucleotide; CTT chr2 60473491 60473512 60473508 60473513 +
aaaatgcatcctgaacgtttgt

SEQ ID NO: 197079 - DNA, 22 bp, Artificial Sequence
  Synthetic oligonucleotide; TTA chr2 60473492 60473513 60473509 60473514 +
aaatgcatcctgaacgtttgta

SEQ ID NO: 197080 - DNA, 22 bp, Artificial Sequence
  Synthetic oligonucleotide; CTG chr2 60473504 60473525 60473521 60473526 +
aacgtttgtaaagtaccctgaa

SEQ ID NO: 197081 - DNA, 22 bp, Artificial Sequence
  Synthetic oligonucleotide; TTT chr2 60473511 60473532 60473528 60473533 +
gtaaagtaccctgaaggaaccc

SEQ ID NO: 197082 - DNA, 22 bp, Artificial Sequence
  Synthetic oligonucleotide; TTG chr2 60473512 60473533 60473529 60473534 +
taaagtaccctgaaggaaccca

SEQ ID NO: 197083 - DNA, 22 bp, Artificial Sequence
  Synthetic oligonucleotide; CTG chr2 60473524 60473545 60473541 60473546 +
aaggaacccattccagttctga

SEQ ID NO: 197084 - DNA, 22 bp, Artificial Sequence
  Synthetic oligonucleotide; TTC chr2 60473537 60473558 60473554 60473559 +
cagttctgaatccgattactag

SEQ ID NO: 197085 - DNA, 22 bp, Artificial Sequence
  Synthetic oligonucleotide; TTC chr2 60473543 60473564 60473560 60473565 +
tgaatccgattactaggttcaa

SEQ ID NO: 197086 - DNA, 22 bp, Artificial Sequence
  Synthetic oligonucleotide; CTG chr2 60473545 60473566 60473562 60473567 +
aatccgattactaggttcaagc

SEQ ID NO: 197087 - DNA, 22 bp, Artificial Sequence
  Synthetic oligonucleotide; TTA chr2 60473555 60473576 60473572 60473577 +
ctaggttcaagccacacaaata

SEQ ID NO: 197088 - DNA, 22 bp, Artificial Sequence
  Synthetic oligonucleotide; CTA chr2 60473558 60473579 60473575 60473580 +
ggttcaagccacacaaataaca

SEQ ID NO: 197089 - DNA, 22 bp, Artificial Sequence
  Synthetic oligonucleotide; TTC chr2 60473563 60473584 60473580 60473585 +
aagccacacaaataacaacagt

SEQ ID NO: 197090 - DNA, 22 bp, Artificial Sequence
  Synthetic oligonucleotide; CTA chr2 60473592 60473613 60473609 60473614 +
gtctgagctagaggcttcttta

SEQ ID NO: 197091 - DNA, 22 bp, Artificial Sequence
  Synthetic oligonucleotide; CTG chr2 60473597 60473618 60473614 60473619 +
agctagaggcttctttacctaa

SEQ ID NO: 197092 - DNA, 22 bp, Artificial Sequence
  Synthetic oligonucleotide; CTA chr2 60473602 60473623 60473619 60473624 +
gaggcttctttacctaactgca

SEQ ID NO: 197093 - DNA, 22 bp, Artificial Sequence
  Synthetic oligonucleotide; CTT chr2 60473609 60473630 60473626 60473631 +
ctttacctaactgcaaagtaaa

SEQ ID NO: 197094 - DNA, 22 bp, Artificial Sequence
  Synthetic oligonucleotide; TTC chr2 60473610 60473631 60473627 60473632 +
tttacctaactgcaaagtaaat

SEQ ID NO: 197095 - DNA, 22 bp, Artificial Sequence
  Synthetic oligonucleotide; CTT chr2 60473612 60473633 60473629 60473634 +
tacctaactgcaaagtaaatgt

SEQ ID NO: 197096 - DNA, 22 bp, Artificial Sequence
  Synthetic oligonucleotide; TTT chr2 60473613 60473634 60473630 60473635 +
acctaactgcaaagtaaatgtc

SEQ ID NO: 197097 - DNA, 22 bp, Artificial Sequence
  Synthetic oligonucleotide; TTA chr2 60473614 60473635 60473631 60473636 +
cctaactgcaaagtaaatgtcc

SEQ ID NO: 197098 - DNA, 22 bp, Artificial Sequence
  Synthetic oligonucleotide; CTA chr2 60473618 60473639 60473635 60473640 +
actgcaaagtaaatgtcctttc

SEQ ID NO: 197099 - DNA, 22 bp, Artificial Sequence
  Synthetic oligonucleotide; CTG chr2 60473622 60473643 60473639 60473644 +
caaagtaaatgtcctttctatt

SEQ ID NO: 197100 - DNA, 22 bp, Artificial Sequence
  Synthetic oligonucleotide; CTT chr2 60473638 60473659 60473655 60473660 +
tctattcagccgcatctagctc

SEQ ID NO: 197101 - DNA, 22 bp, Artificial Sequence
  Synthetic oligonucleotide; TTT chr2 60473639 60473660 60473656 60473661 +
ctattcagccgcatctagctct

SEQ ID NO: 197102 - DNA, 22 bp, Artificial Sequence
  Synthetic oligonucleotide; TTC chr2 60473640 60473661 60473657 60473662 +
tattcagccgcatctagctctt

SEQ ID NO: 197103 - DNA, 22 bp, Artificial Sequence
  Synthetic oligonucleotide; CTA chr2 60473642 60473663 60473659 60473664 +
ttcagccgcatctagctcttga

SEQ ID NO: 197104 - DNA, 22 bp, Artificial Sequence
  Synthetic oligonucleotide; TTC chr2 60473645 60473666 60473662 60473667 +
agccgcatctagctcttgaccc

SEQ ID NO: 197105 - DNA, 22 bp, Artificial Sequence
  Synthetic oligonucleotide; CTA chr2 60473656 60473677 60473673 60473678 +
gctcttgaccctatgtttacca

SEQ ID NO: 197106 - DNA, 22 bp, Artificial Sequence
  Synthetic oligonucleotide; CTC chr2 60473660 60473681 60473677 60473682 +
ttgaccctatgtttaccataga

SEQ ID NO: 197107 - DNA, 22 bp, Artificial Sequence
  Synthetic oligonucleotide; CTT chr2 60473662 60473683 60473679 60473684 +
gaccctatgtttaccatagata

SEQ ID NO: 197108 - DNA, 22 bp, Artificial Sequence
  Synthetic oligonucleotide; TTG chr2 60473663 60473684 60473680 60473685 +
accctatgtttaccatagatac

SEQ ID NO: 197109 - DNA, 22 bp, Artificial Sequence
  Synthetic oligonucleotide; CTA chr2 60473669 60473690 60473686 60473691 +
tgtttaccatagataccagttc

SEQ ID NO: 197110 - DNA, 22 bp, Artificial Sequence
  Synthetic oligonucleotide; TTT chr2 60473674 60473695 60473691 60473696 +
accatagataccagttcttctc

SEQ ID NO: 197111 - DNA, 22 bp, Artificial Sequence
  Synthetic oligonucleotide; TTA chr2 60473675 60473696 60473692 60473697 +
ccatagataccagttcttctca

SEQ ID NO: 197112 - DNA, 22 bp, Artificial Sequence
  Synthetic oligonucleotide; TTC chr2 60473691 60473712 60473708 60473713 +
ttctcacttagattctctgact

SEQ ID NO: 197113 - DNA, 22 bp, Artificial Sequence
  Synthetic oligonucleotide; CTT chr2 60473693 60473714 60473710 60473715 +
ctcacttagattctctgactta

SEQ ID NO: 197114 - DNA, 22 bp, Artificial Sequence
  Synthetic oligonucleotide; TTC chr2 60473694 60473715 60473711 60473716 +
tcacttagattctctgacttat

SEQ ID NO: 197115 - DNA, 22 bp, Artificial Sequence
  Synthetic oligonucleotide; CTC chr2 60473696 60473717 60473713 60473718 +
acttagattctctgacttatca

SEQ ID NO: 197116 - DNA, 22 bp, Artificial Sequence
  Synthetic oligonucleotide; CTT chr2 60473700 60473721 60473717 60473722 +
agattctctgacttatcagagt

SEQ ID NO: 197117 - DNA, 22 bp, Artificial Sequence
  Synthetic oligonucleotide; TTA chr2 60473701 60473722 60473718 60473723 +
gattctctgacttatcagagta

SEQ ID NO: 197118 - DNA, 22 bp, Artificial Sequence
  Synthetic oligonucleotide; TTC chr2 60473706 60473727 60473723 60473728 +
tctgacttatcagagtattata

SEQ ID NO: 197119 - DNA, 22 bp, Artificial Sequence
  Synthetic oligonucleotide; CTC chr2 60473708 60473729 60473725 60473730 +
tgacttatcagagtattataga

SEQ ID NO: 197120 - DNA, 22 bp, Artificial Sequence
  Synthetic oligonucleotide; CTG chr2 60473710 60473731 60473727 60473732 +
acttatcagagtattatagagc

SEQ ID NO: 197121 - DNA, 22 bp, Artificial Sequence
  Synthetic oligonucleotide; CTT chr2 60473714 60473735 60473731 60473736 +
atcagagtattatagagcaaac

SEQ ID NO: 197122 - DNA, 22 bp, Artificial Sequence
  Synthetic oligonucleotide; TTA chr2 60473715 60473736 60473732 60473737 +
tcagagtattatagagcaaaca

SEQ ID NO: 197123 - DNA, 22 bp, Artificial Sequence
  Synthetic oligonucleotide; TTA chr2 60473726 60473747 60473743 60473748 +
tagagcaaacattagctatgcc

SEQ ID NO: 197124 - DNA, 22 bp, Artificial Sequence
  Synthetic oligonucleotide; TTA chr2 60473740 60473761 60473757 60473762 +
gctatgcctgtgacttgagttg

SEQ ID NO: 197125 - DNA, 22 bp, Artificial Sequence
  Synthetic oligonucleotide; CTA chr2 60473744 60473765 60473761 60473766 +
tgcctgtgacttgagttgtgtc

SEQ ID NO: 197126 - DNA, 22 bp, Artificial Sequence
  Synthetic oligonucleotide; CTG chr2 60473750 60473771 60473767 60473772 +
tgacttgagttgtgtcaatctg

SEQ ID NO: 197127 - DNA, 22 bp, Artificial Sequence
  Synthetic oligonucleotide; CTT chr2 60473756 60473777 60473773 60473778 +
gagttgtgtcaatctgtaatga

SEQ ID NO: 197128 - DNA, 22 bp, Artificial Sequence
  Synthetic oligonucleotide; TTG chr2 60473757 60473778 60473774 60473779 +
agttgtgtcaatctgtaatgaa

SEQ ID NO: 197129 - DNA, 22 bp, Artificial Sequence
  Synthetic oligonucleotide; TTG chr2 60473762 60473783 60473779 60473784 +
tgtcaatctgtaatgaaaatgt

SEQ ID NO: 197130 - DNA, 22 bp, Artificial Sequence
  Synthetic oligonucleotide; CTG chr2 60473772 60473793 60473789 60473794 +
taatgaaaatgtgccagcttta

SEQ ID NO: 197131 - DNA, 22 bp, Artificial Sequence
  Synthetic oligonucleotide; CTT chr2 60473792 60473813 60473809 60473814 +
tatcatcactcacagacttctt

SEQ ID NO: 197132 - DNA, 22 bp, Artificial Sequence
  Synthetic oligonucleotide; TTT chr2 60473793 60473814 60473810 60473815 +
atcatcactcacagacttctta

SEQ ID NO: 197133 - DNA, 22 bp, Artificial Sequence
  Synthetic oligonucleotide; TTA chr2 60473794 60473815 60473811 60473816 +
tcatcactcacagacttcttaa

SEQ ID NO: 197134 - DNA, 22 bp, Artificial Sequence
  Synthetic oligonucleotide; CTC chr2 60473803 60473824 60473820 60473825 +
acagacttcttaattaaccttc

SEQ ID NO: 197135 - DNA, 22 bp, Artificial Sequence
  Synthetic oligonucleotide; CTT chr2 60473811 60473832 60473828 60473833 +
cttaattaaccttctgatattg

SEQ ID NO: 197136 - DNA, 22 bp, Artificial Sequence
  Synthetic oligonucleotide; TTC chr2 60473812 60473833 60473829 60473834 +
ttaattaaccttctgatattgt

SEQ ID NO: 197137 - DNA, 22 bp, Artificial Sequence
  Synthetic oligonucleotide; CTT chr2 60473814 60473835 60473831 60473836 +
aattaaccttctgatattgtca

SEQ ID NO: 197138 - DNA, 22 bp, Artificial Sequence
  Synthetic oligonucleotide; TTA chr2 60473815 60473836 60473832 60473837 +
attaaccttctgatattgtcaa

SEQ ID NO: 197139 - DNA, 22 bp, Artificial Sequence
  Synthetic oligonucleotide; TTA chr2 60473819 60473840 60473836 60473841 +
accttctgatattgtcaaaatc

SEQ ID NO: 197140 - DNA, 22 bp, Artificial Sequence
  Synthetic oligonucleotide; CTT chr2 60473824 60473845 60473841 60473846 +
ctgatattgtcaaaatcgcact

SEQ ID NO: 197141 - DNA, 22 bp, Artificial Sequence
  Synthetic oligonucleotide; TTC chr2 60473825 60473846 60473842 60473847 +
tgatattgtcaaaatcgcactc

SEQ ID NO: 197142 - DNA, 22 bp, Artificial Sequence
  Synthetic oligonucleotide; CTG chr2 60473827 60473848 60473844 60473849 +
atattgtcaaaatcgcactctc

SEQ ID NO: 197143 - DNA, 22 bp, Artificial Sequence
  Synthetic oligonucleotide; TTG chr2 60473833 60473854 60473850 60473855 +
tcaaaatcgcactctcttttgt

SEQ ID NO: 197144 - DNA, 22 bp, Artificial Sequence
  Synthetic oligonucleotide; CTC chr2 60473847 60473868 60473864 60473869 +
tcttttgttctagaaatgagca

SEQ ID NO: 197145 - DNA, 22 bp, Artificial Sequence
  Synthetic oligonucleotide; CTC chr2 60473849 60473870 60473866 60473871 +
ttttgttctagaaatgagcatt

SEQ ID NO: 197146 - DNA, 22 bp, Artificial Sequence
  Synthetic oligonucleotide; CTT chr2 60473851 60473872 60473868 60473873 +
ttgttctagaaatgagcattta

SEQ ID NO: 197147 - DNA, 22 bp, Artificial Sequence
  Synthetic oligonucleotide; TTT chr2 60473852 60473873 60473869 60473874 +
tgttctagaaatgagcatttac

SEQ ID NO: 197148 - DNA, 22 bp, Artificial Sequence
  Synthetic oligonucleotide; TTT chr2 60473853 60473874 60473870 60473875 +
gttctagaaatgagcatttaca

SEQ ID NO: 197149 - DNA, 22 bp, Artificial Sequence
  Synthetic oligonucleotide; TTG chr2 60473854 60473875 60473871 60473876 +
ttctagaaatgagcatttacat

SEQ ID NO: 197150 - DNA, 22 bp, Artificial Sequence
  Synthetic oligonucleotide; TTC chr2 60473857 60473878 60473874 60473879 +
tagaaatgagcatttacatgtg

SEQ ID NO: 197151 - DNA, 22 bp, Artificial Sequence
  Synthetic oligonucleotide; CTA chr2 60473859 60473880 60473876 60473881 +
gaaatgagcatttacatgtgca

SEQ ID NO: 197152 - DNA, 22 bp, Artificial Sequence
  Synthetic oligonucleotide; TTT chr2 60473872 60473893 60473889 60473894 +
acatgtgcattttttttccttc

SEQ ID NO: 197153 - DNA, 22 bp, Artificial Sequence
  Synthetic oligonucleotide; TTA chr2 60473873 60473894 60473890 60473895 +
catgtgcattttttttccttca

SEQ ID NO: 197154 - DNA, 22 bp, Artificial Sequence
  Synthetic oligonucleotide; TTT chr2 60473884 60473905 60473901 60473906 +
tttttccttcattgctttttta

SEQ ID NO: 197155 - DNA, 22 bp, Artificial Sequence
  Synthetic oligonucleotide; TTT chr2 60473885 60473906 60473902 60473907 +
ttttccttcattgcttttttac

SEQ ID NO: 197156 - DNA, 22 bp, Artificial Sequence
  Synthetic oligonucleotide; TTT chr2 60473886 60473907 60473903 60473908 +
tttccttcattgcttttttact

SEQ ID NO: 197157 - DNA, 22 bp, Artificial Sequence
  Synthetic oligonucleotide; TTT chr2 60473887 60473908 60473904 60473909 +
ttccttcattgcttttttactg

SEQ ID NO: 197158 - DNA, 22 bp, Artificial Sequence
  Synthetic oligonucleotide; TTT chr2 60473888 60473909 60473905 60473910 +
tccttcattgcttttttactgg

SEQ ID NO: 197159 - DNA, 22 bp, Artificial Sequence
  Synthetic oligonucleotide; TTT chr2 60473889 60473910 60473906 60473911 +
ccttcattgcttttttactggc

SEQ ID NO: 197160 - DNA, 22 bp, Artificial Sequence
  Synthetic oligonucleotide; TTC chr2 60473890 60473911 60473907 60473912 +
cttcattgcttttttactggct

SEQ ID NO: 197161 - DNA, 22 bp, Artificial Sequence
  Synthetic oligonucleotide; CTT chr2 60473893 60473914 60473910 60473915 +
cattgcttttttactggctgtt

SEQ ID NO: 197162 - DNA, 22 bp, Artificial Sequence
  Synthetic oligonucleotide; TTC chr2 60473894 60473915 60473911 60473916 +
attgcttttttactggctgttt

SEQ ID NO: 197163 - DNA, 22 bp, Artificial Sequence
  Synthetic oligonucleotide; TTG chr2 60473898 60473919 60473915 60473920 +
cttttttactggctgttttacc

SEQ ID NO: 197164 - DNA, 22 bp, Artificial Sequence
  Synthetic oligonucleotide; CTT chr2 60473901 60473922 60473918 60473923 +
ttttactggctgttttaccaaa

SEQ ID NO: 197165 - DNA, 22 bp, Artificial Sequence
  Synthetic oligonucleotide; TTT chr2 60473902 60473923 60473919 60473924 +
tttactggctgttttaccaaat

SEQ ID NO: 197166 - DNA, 22 bp, Artificial Sequence
  Synthetic oligonucleotide; TTT chr2 60473903 60473924 60473920 60473925 +
ttactggctgttttaccaaatc

SEQ ID NO: 197167 - DNA, 22 bp, Artificial Sequence
  Synthetic oligonucleotide; TTT chr2 60473904 60473925 60473921 60473926 +
tactggctgttttaccaaatcc

SEQ ID NO: 197168 - DNA, 22 bp, Artificial Sequence
  Synthetic oligonucleotide; TTT chr2 60473905 60473926 60473922 60473927 +
actggctgttttaccaaatcct

SEQ ID NO: 197169 - DNA, 22 bp, Artificial Sequence
  Synthetic oligonucleotide; TTA chr2 60473906 60473927 60473923 60473928 +
ctggctgttttaccaaatcctg

SEQ ID NO: 197170 - DNA, 22 bp, Artificial Sequence
  Synthetic oligonucleotide; CTG chr2 60473909 60473930 60473926 60473931 +
gctgttttaccaaatcctgatg

SEQ ID NO: 197171 - DNA, 22 bp, Artificial Sequence
  Synthetic oligonucleotide; CTG chr2 60473913 60473934 60473930 60473935 +
ttttaccaaatcctgatgttct

SEQ ID NO: 197172 - DNA, 22 bp, Artificial Sequence
  Synthetic oligonucleotide; TTT chr2 60473916 60473937 60473933 60473938 +
taccaaatcctgatgttcttta

SEQ ID NO: 197173 - DNA, 22 bp, Artificial Sequence
  Synthetic oligonucleotide; TTT chr2 60473917 60473938 60473934 60473939 +
accaaatcctgatgttctttaa

SEQ ID NO: 197174 - DNA, 22 bp, Artificial Sequence
  Synthetic oligonucleotide; TTA chr2 60473918 60473939 60473935 60473940 +
ccaaatcctgatgttctttaaa

SEQ ID NO: 197175 - DNA, 22 bp, Artificial Sequence
  Synthetic oligonucleotide; CTG chr2 60473928 60473949 60473945 60473950 +
atgttctttaaaaagtgtattc

SEQ ID NO: 197176 - DNA, 22 bp, Artificial Sequence
  Synthetic oligonucleotide; TTC chr2 60473934 60473955 60473951 60473956 +
tttaaaaagtgtattctgcaaa

SEQ ID NO: 197177 - DNA, 22 bp, Artificial Sequence
  Synthetic oligonucleotide; CTT chr2 60473936 60473957 60473953 60473958 +
taaaaagtgtattctgcaaaaa

SEQ ID NO: 197178 - DNA, 22 bp, Artificial Sequence
  Synthetic oligonucleotide; TTT chr2 60473937 60473958 60473954 60473959 +
aaaaagtgtattctgcaaaaac

SEQ ID NO: 197179 - DNA, 22 bp, Artificial Sequence
  Synthetic oligonucleotide; TTA chr2 60473938 60473959 60473955 60473960 +
aaaagtgtattctgcaaaaaca

SEQ ID NO: 197180 - DNA, 22 bp, Artificial Sequence
  Synthetic oligonucleotide; TTC chr2 60473950 60473971 60473967 60473972 +
tgcaaaaacaaaagaaagcaat

SEQ ID NO: 197181 - DNA, 22 bp, Artificial Sequence
  Synthetic oligonucleotide; CTG chr2 60473952 60473973 60473969 60473974 +
caaaaacaaaagaaagcaataa

SEQ ID NO: 197182 - DNA, 22 bp, Artificial Sequence
  Synthetic oligonucleotide; TTA chr2 60473977 60473998 60473994 60473999 +
tagacactacaatatagaattt

SEQ ID NO: 197183 - DNA, 22 bp, Artificial Sequence
  Synthetic oligonucleotide; CTA chr2 60473986 60474007 60474003 60474008 +
caatatagaatttcttccctga

SEQ ID NO: 197184 - DNA, 22 bp, Artificial Sequence
  Synthetic oligonucleotide; TTT chr2 60473999 60474020 60474016 60474021 +
cttccctgaaactctctcatgg

SEQ ID NO: 197185 - DNA, 22 bp, Artificial Sequence
  Synthetic oligonucleotide; TTC chr2 60474000 60474021 60474017 60474022 +
ttccctgaaactctctcatggt

SEQ ID NO: 197186 - DNA, 22 bp, Artificial Sequence
  Synthetic oligonucleotide; CTT chr2 60474002 60474023 60474019 60474024 +
ccctgaaactctctcatggtcc

SEQ ID NO: 197187 - DNA, 22 bp, Artificial Sequence
  Synthetic oligonucleotide; TTC chr2 60474003 60474024 60474020 60474025 +
cctgaaactctctcatggtcct

SEQ ID NO: 197188 - DNA, 22 bp, Artificial Sequence
  Synthetic oligonucleotide; CTG chr2 60474007 60474028 60474024 60474029 +
aaactctctcatggtccttaga

SEQ ID NO: 197189 - DNA, 22 bp, Artificial Sequence
  Synthetic oligonucleotide; CTC chr2 60474013 60474034 60474030 60474035 +
tctcatggtccttagattcctt

SEQ ID NO: 197190 - DNA, 22 bp, Artificial Sequence
  Synthetic oligonucleotide; CTC chr2 60474015 60474036 60474032 60474037 +
tcatggtccttagattccttga

SEQ ID NO: 197191 - DNA, 22 bp, Artificial Sequence
  Synthetic oligonucleotide; CTC chr2 60474017 60474038 60474034 60474039 +
atggtccttagattccttgata

SEQ ID NO: 197192 - DNA, 22 bp, Artificial Sequence
  Synthetic oligonucleotide; CTT chr2 60474026 60474047 60474043 60474048 +
agattccttgatacttcaccag

SEQ ID NO: 197193 - DNA, 22 bp, Artificial Sequence
  Synthetic oligonucleotide; TTA chr2 60474027 60474048 60474044 60474049 +
gattccttgatacttcaccagt

SEQ ID NO: 197194 - DNA, 22 bp, Artificial Sequence
  Synthetic oligonucleotide; TTC chr2 60474032 60474053 60474049 60474054 +
cttgatacttcaccagtgactt

SEQ ID NO: 197195 - DNA, 22 bp, Artificial Sequence
  Synthetic oligonucleotide; CTT chr2 60474035 60474056 60474052 60474057 +
gatacttcaccagtgactttaa

SEQ ID NO: 197196 - DNA, 22 bp, Artificial Sequence
  Synthetic oligonucleotide; TTG chr2 60474036 60474057 60474053 60474058 +
atacttcaccagtgactttaat

SEQ ID NO: 197197 - DNA, 22 bp, Artificial Sequence
  Synthetic oligonucleotide; CTT chr2 60474042 60474063 60474059 60474064 +
caccagtgactttaataacatc

SEQ ID NO: 197198 - DNA, 22 bp, Artificial Sequence
  Synthetic oligonucleotide; TTC chr2 60474043 60474064 60474060 60474065 +
accagtgactttaataacatca

SEQ ID NO: 197199 - DNA, 22 bp, Artificial Sequence
  Synthetic oligonucleotide; CTT chr2 60474054 60474075 60474071 60474076 +
taataacatcaatcactcattt

SEQ ID NO: 197200 - DNA, 22 bp, Artificial Sequence
  Synthetic oligonucleotide; TTT chr2 60474055 60474076 60474072 60474077 +
aataacatcaatcactcatttt

SEQ ID NO: 197201 - DNA, 22 bp, Artificial Sequence
  Synthetic oligonucleotide; TTA chr2 60474056 60474077 60474073 60474078 +
ataacatcaatcactcatttta

SEQ ID NO: 197202 - DNA, 22 bp, Artificial Sequence
  Synthetic oligonucleotide; CTC chr2 60474072 60474093 60474089 60474094 +
attttaaaactcttttttgatc

SEQ ID NO: 197203 - DNA, 22 bp, Artificial Sequence
  Synthetic oligonucleotide; TTT chr2 60474076 60474097 60474093 60474098 +
taaaactcttttttgatcaatg

SEQ ID NO: 197204 - DNA, 22 bp, Artificial Sequence
  Synthetic oligonucleotide; TTT chr2 60474077 60474098 60474094 60474099 +
aaaactcttttttgatcaatgc

SEQ ID NO: 197205 - DNA, 22 bp, Artificial Sequence
  Synthetic oligonucleotide; TTA chr2 60474078 60474099 60474095 60474100 +
aaactcttttttgatcaatgct

SEQ ID NO: 197206 - DNA, 22 bp, Artificial Sequence
  Synthetic oligonucleotide; CTC chr2 60474084 60474105 60474101 60474106 +
ttttttgatcaatgctatcctc

SEQ ID NO: 197207 - DNA, 22 bp, Artificial Sequence
  Synthetic oligonucleotide; CTT chr2 60474086 60474107 60474103 60474108 +
ttttgatcaatgctatcctctt

SEQ ID NO: 197208 - DNA, 22 bp, Artificial Sequence
  Synthetic oligonucleotide; TTT chr2 60474087 60474108 60474104 60474109 +
tttgatcaatgctatcctctta

SEQ ID NO: 197209 - DNA, 22 bp, Artificial Sequence
  Synthetic oligonucleotide; TTT chr2 60474088 60474109 60474105 60474110 +
ttgatcaatgctatcctcttag

SEQ ID NO: 197210 - DNA, 22 bp, Artificial Sequence
  Synthetic oligonucleotide; TTT chr2 60474089 60474110 60474106 60474111 +
tgatcaatgctatcctcttaga

SEQ ID NO: 197211 - DNA, 22 bp, Artificial Sequence
  Synthetic oligonucleotide; TTT chr2 60474090 60474111 60474107 60474112 +
gatcaatgctatcctcttagag

SEQ ID NO: 197212 - DNA, 22 bp, Artificial Sequence
  Synthetic oligonucleotide; TTG chr2 60474091 60474112 60474108 60474113 +
atcaatgctatcctcttagagc

SEQ ID NO: 197213 - DNA, 22 bp, Artificial Sequence
  Synthetic oligonucleotide; CTA chr2 60474101 60474122 60474118 60474123 +
tcctcttagagccttgattact

SEQ ID NO: 197214 - DNA, 22 bp, Artificial Sequence
  Synthetic oligonucleotide; CTC chr2 60474106 60474127 60474123 60474128 +
ttagagccttgattactcaaac

SEQ ID NO: 197215 - DNA, 22 bp, Artificial Sequence
  Synthetic oligonucleotide; CTT chr2 60474108 60474129 60474125 60474130 +
agagccttgattactcaaacaa

SEQ ID NO: 197216 - DNA, 22 bp, Artificial Sequence
  Synthetic oligonucleotide; TTA chr2 60474109 60474130 60474126 60474131 +
gagccttgattactcaaacaac

SEQ ID NO: 197217 - DNA, 22 bp, Artificial Sequence
  Synthetic oligonucleotide; CTT chr2 60474116 60474137 60474133 60474138 +
gattactcaaacaacaggttac

SEQ ID NO: 197218 - DNA, 22 bp, Artificial Sequence
  Synthetic oligonucleotide; TTG chr2 60474117 60474138 60474134 60474139 +
attactcaaacaacaggttact

SEQ ID NO: 197219 - DNA, 22 bp, Artificial Sequence
  Synthetic oligonucleotide; TTA chr2 60474121 60474142 60474138 60474143 +
ctcaaacaacaggttactaact

SEQ ID NO: 197220 - DNA, 22 bp, Artificial Sequence
  Synthetic oligonucleotide; CTC chr2 60474124 60474145 60474141 60474146 +
aaacaacaggttactaacttca

SEQ ID NO: 197221 - DNA, 22 bp, Artificial Sequence
  Synthetic oligonucleotide; TTA chr2 60474137 60474158 60474154 60474159 +
ctaacttcaccttttaagagtt

SEQ ID NO: 197222 - DNA, 22 bp, Artificial Sequence
  Synthetic oligonucleotide; CTA chr2 60474140 60474161 60474157 60474162 +
acttcaccttttaagagttctc

SEQ ID NO: 197223 - DNA, 22 bp, Artificial Sequence
  Synthetic oligonucleotide; CTT chr2 60474144 60474165 60474161 60474166 +
caccttttaagagttctcctcc

SEQ ID NO: 197224 - DNA, 22 bp, Artificial Sequence
  Synthetic oligonucleotide; TTC chr2 60474145 60474166 60474162 60474167 +
accttttaagagttctcctcct

SEQ ID NO: 197225 - DNA, 22 bp, Artificial Sequence
  Synthetic oligonucleotide; CTT chr2 60474150 60474171 60474167 60474172 +
ttaagagttctcctcctaggct

SEQ ID NO: 197226 - DNA, 22 bp, Artificial Sequence
  Synthetic oligonucleotide; TTT chr2 60474151 60474172 60474168 60474173 +
taagagttctcctcctaggctt

SEQ ID NO: 197227 - DNA, 22 bp, Artificial Sequence
  Synthetic oligonucleotide; TTT chr2 60474152 60474173 60474169 60474174 +
aagagttctcctcctaggcttt

SEQ ID NO: 197228 - DNA, 22 bp, Artificial Sequence
  Synthetic oligonucleotide; TTA chr2 60474153 60474174 60474170 60474175 +
agagttctcctcctaggctttt

SEQ ID NO: 197229 - DNA, 22 bp, Artificial Sequence
  Synthetic oligonucleotide; TTC chr2 60474160 60474181 60474177 60474182 +
tcctcctaggctttttctcaat

SEQ ID NO: 197230 - DNA, 22 bp, Artificial Sequence
  Synthetic oligonucleotide; CTC chr2 60474162 60474183 60474179 60474184 +
ctcctaggctttttctcaataa

SEQ ID NO: 197231 - DNA, 22 bp, Artificial Sequence
  Synthetic oligonucleotide; CTC chr2 60474165 60474186 60474182 60474187 +
ctaggctttttctcaataaagg

SEQ ID NO: 197232 - DNA, 22 bp, Artificial Sequence
  Synthetic oligonucleotide; CTA chr2 60474168 60474189 60474185 60474190 +
ggctttttctcaataaagggag

SEQ ID NO: 197233 - DNA, 22 bp, Artificial Sequence
  Synthetic oligonucleotide; CTT chr2 60474173 60474194 60474190 60474195 +
tttctcaataaagggaggaagt

SEQ ID NO: 197234 - DNA, 22 bp, Artificial Sequence
  Synthetic oligonucleotide; TTT chr2 60474174 60474195 60474191 60474196 +
ttctcaataaagggaggaagta

SEQ ID NO: 197235 - DNA, 22 bp, Artificial Sequence
  Synthetic oligonucleotide; TTT chr2 60474175 60474196 60474192 60474197 +
tctcaataaagggaggaagtag

SEQ ID NO: 197236 - DNA, 22 bp, Artificial Sequence
  Synthetic oligonucleotide; TTT chr2 60474176 60474197 60474193 60474198 +
ctcaataaagggaggaagtaga

SEQ ID NO: 197237 - DNA, 22 bp, Artificial Sequence
  Synthetic oligonucleotide; TTC chr2 60474177 60474198 60474194 60474199 +
tcaataaagggaggaagtagag

SEQ ID NO: 197238 - DNA, 22 bp, Artificial Sequence
  Synthetic oligonucleotide; CTC chr2 60474179 60474200 60474196 60474201 +
aataaagggaggaagtagagat

SEQ ID NO: 197239 - DNA, 22 bp, Artificial Sequence
  Synthetic oligonucleotide; TTT chr2 60474208 60474229 60474225 60474230 +
tgcgtgcccctttatctataaa

SEQ ID NO: 197240 - DNA, 22 bp, Artificial Sequence
  Synthetic oligonucleotide; TTT chr2 60474209 60474230 60474226 60474231 +
gcgtgcccctttatctataaaa

SEQ ID NO: 197241 - DNA, 22 bp, Artificial Sequence
  Synthetic oligonucleotide; TTG chr2 60474210 60474231 60474227 60474232 +
cgtgcccctttatctataaaaa

SEQ ID NO: 197242 - DNA, 22 bp, Artificial Sequence
  Synthetic oligonucleotide; CTT chr2 60474220 60474241 60474237 60474242 +
tatctataaaaatgccagccac

SEQ ID NO: 197243 - DNA, 22 bp, Artificial Sequence
  Synthetic oligonucleotide; TTT chr2 60474221 60474242 60474238 60474243 +
atctataaaaatgccagccacc

SEQ ID NO: 197244 - DNA, 22 bp, Artificial Sequence
  Synthetic oligonucleotide; TTA chr2 60474222 60474243 60474239 60474244 +
tctataaaaatgccagccacca

SEQ ID NO: 197245 - DNA, 22 bp, Artificial Sequence
  Synthetic oligonucleotide; CTA chr2 60474226 60474247 60474243 60474248 +
taaaaatgccagccaccaatct

SEQ ID NO: 197246 - DNA, 22 bp, Artificial Sequence
  Synthetic oligonucleotide; CTG chr2 60474249 60474270 60474266 60474271 +
tcaggcctaaacaaaatttttc

SEQ ID NO: 197247 - DNA, 22 bp, Artificial Sequence
  Synthetic oligonucleotide; CTA chr2 60474258 60474279 60474275 60474280 +
aacaaaatttttctgcaagctg

SEQ ID NO: 197248 - DNA, 22 bp, Artificial Sequence
  Synthetic oligonucleotide; TTT chr2 60474268 60474289 60474285 60474290 +
ttctgcaagctgtgtctttaac

SEQ ID NO: 197249 - DNA, 22 bp, Artificial Sequence
  Synthetic oligonucleotide; TTT chr2 60474269 60474290 60474286 60474291 +
tctgcaagctgtgtctttaaca

SEQ ID NO: 197250 - DNA, 22 bp, Artificial Sequence
  Synthetic oligonucleotide; TTT chr2 60474270 60474291 60474287 60474292 +
ctgcaagctgtgtctttaacat

SEQ ID NO: 197251 - DNA, 22 bp, Artificial Sequence
  Synthetic oligonucleotide; TTC chr2 60474271 60474292 60474288 60474293 +
tgcaagctgtgtctttaacata

SEQ ID NO: 197252 - DNA, 22 bp, Artificial Sequence
  Synthetic oligonucleotide; CTG chr2 60474273 60474294 60474290 60474295 +
caagctgtgtctttaacataag

SEQ ID NO: 197253 - DNA, 22 bp, Artificial Sequence
  Synthetic oligonucleotide; CTG chr2 60474280 60474301 60474297 60474302 +
tgtctttaacataagcaaagca

SEQ ID NO: 197254 - DNA, 22 bp, Artificial Sequence
  Synthetic oligonucleotide; CTT chr2 60474286 60474307 60474303 60474308 +
taacataagcaaagcatataat

SEQ ID NO: 197255 - DNA, 22 bp, Artificial Sequence
  Synthetic oligonucleotide; TTT chr2 60474287 60474308 60474304 60474309 +
aacataagcaaagcatataatt

SEQ ID NO: 197256 - DNA, 22 bp, Artificial Sequence
  Synthetic oligonucleotide; TTA chr2 60474288 60474309 60474305 60474310 +
acataagcaaagcatataattc

SEQ ID NO: 197257 - DNA, 22 bp, Artificial Sequence
  Synthetic oligonucleotide; TTC chr2 60474310 60474331 60474327 60474332 +
caaaaaaaaaaaatcttgcttt

SEQ ID NO: 197258 - DNA, 22 bp, Artificial Sequence
  Synthetic oligonucleotide; CTT chr2 60474327 60474348 60474344 60474349 +
gcttttctgaaaagcaactaag

SEQ ID NO: 197259 - DNA, 22 bp, Artificial Sequence
  Synthetic oligonucleotide; TTG chr2 60474328 60474349 60474345 60474350 +
cttttctgaaaagcaactaagc

SEQ ID NO: 197260 - DNA, 22 bp, Artificial Sequence
  Synthetic oligonucleotide; CTT chr2 60474331 60474352 60474348 60474353 +
ttctgaaaagcaactaagccaa

SEQ ID NO: 197261 - DNA, 22 bp, Artificial Sequence
  Synthetic oligonucleotide; TTT chr2 60474332 60474353 60474349 60474354 +
tctgaaaagcaactaagccaaa

SEQ ID NO: 197262 - DNA, 22 bp, Artificial Sequence
  Synthetic oligonucleotide; TTT chr2 60474333 60474354 60474350 60474355 +
ctgaaaagcaactaagccaaag

SEQ ID NO: 197263 - DNA, 22 bp, Artificial Sequence
  Synthetic oligonucleotide; TTC chr2 60474334 60474355 60474351 60474356 +
tgaaaagcaactaagccaaaga

SEQ ID NO: 197264 - DNA, 22 bp, Artificial Sequence
  Synthetic oligonucleotide; CTG chr2 60474336 60474357 60474353 60474358 +
aaaagcaactaagccaaagaca

SEQ ID NO: 197265 - DNA, 22 bp, Artificial Sequence
  Synthetic oligonucleotide; CTA chr2 60474347 60474368 60474364 60474369 +
agccaaagacattgtgttccat

SEQ ID NO: 197266 - DNA, 22 bp, Artificial Sequence
  Synthetic oligonucleotide; TTG chr2 60474361 60474382 60474378 60474383 +
tgttccatctttgtgttgaaat

SEQ ID NO: 197267 - DNA, 22 bp, Artificial Sequence
  Synthetic oligonucleotide; TTC chr2 60474366 60474387 60474383 60474388 +
catctttgtgttgaaatgcaga

SEQ ID NO: 197268 - DNA, 22 bp, Artificial Sequence
  Synthetic oligonucleotide; CTT chr2 60474372 60474393 60474389 60474394 +
tgtgttgaaatgcagatttccc

SEQ ID NO: 197269 - DNA, 22 bp, Artificial Sequence
  Synthetic oligonucleotide; TTT chr2 60474373 60474394 60474390 60474395 +
gtgttgaaatgcagatttccca

SEQ ID NO: 197270 - DNA, 22 bp, Artificial Sequence
  Synthetic oligonucleotide; TTG chr2 60474374 60474395 60474391 60474396 +
tgttgaaatgcagatttcccac

SEQ ID NO: 197271 - DNA, 22 bp, Artificial Sequence
  Synthetic oligonucleotide; TTG chr2 60474379 60474400 60474396 60474401 +
aaatgcagatttcccactaaaa

SEQ ID NO: 197272 - DNA, 22 bp, Artificial Sequence
  Synthetic oligonucleotide; TTT chr2 60474391 60474412 60474408 60474413 +
cccactaaaaggcaaatccttc

SEQ ID NO: 197273 - DNA, 22 bp, Artificial Sequence
  Synthetic oligonucleotide; TTC chr2 60474392 60474413 60474409 60474414 +
ccactaaaaggcaaatccttca

SEQ ID NO: 197274 - DNA, 22 bp, Artificial Sequence
  Synthetic oligonucleotide; CTA chr2 60474398 60474419 60474415 60474420 +
aaaggcaaatccttcatttcaa

SEQ ID NO: 197275 - DNA, 22 bp, Artificial Sequence
  Synthetic oligonucleotide; CTT chr2 60474412 60474433 60474429 60474434 +
catttcaaaaggttgaatagga

SEQ ID NO: 197276 - DNA, 22 bp, Artificial Sequence
  Synthetic oligonucleotide; TTC chr2 60474413 60474434 60474430 60474435 +
atttcaaaaggttgaataggat

SEQ ID NO: 197277 - DNA, 22 bp, Artificial Sequence
  Synthetic oligonucleotide; TTT chr2 60474417 60474438 60474434 60474439 +
caaaaggttgaataggatggta

SEQ ID NO: 197278 - DNA, 22 bp, Artificial Sequence
  Synthetic oligonucleotide; TTC chr2 60474418 60474439 60474435 60474440 +
aaaaggttgaataggatggtac

SEQ ID NO: 197279 - DNA, 22 bp, Artificial Sequence
  Synthetic oligonucleotide; TTG chr2 60474427 60474448 60474444 60474449 +
aataggatggtacttaaaaaaa

SEQ ID NO: 197280 - DNA, 22 bp, Artificial Sequence
  Synthetic oligonucleotide; CTT chr2 60474442 60474463 60474459 60474464 +
aaaaaaagaattccagctggtt

SEQ ID NO: 197281 - DNA, 22 bp, Artificial Sequence
  Synthetic oligonucleotide; TTA chr2 60474443 60474464 60474460 60474465 +
aaaaaagaattccagctggtta

SEQ ID NO: 197282 - DNA, 22 bp, Artificial Sequence
  Synthetic oligonucleotide; TTC chr2 60474455 60474476 60474472 60474477 +
cagctggttaaatttagggtgt

SEQ ID NO: 197283 - DNA, 22 bp, Artificial Sequence
  Synthetic oligonucleotide; CTG chr2 60474461 60474482 60474478 60474483 +
gttaaatttagggtgttaaaaa

SEQ ID NO: 197284 - DNA, 22 bp, Artificial Sequence
  Synthetic oligonucleotide; TTA chr2 60474465 60474486 60474482 60474487 +
aatttagggtgttaaaaaaagt

SEQ ID NO: 197285 - DNA, 22 bp, Artificial Sequence
  Synthetic oligonucleotide; TTT chr2 60474470 60474491 60474487 60474492 +
agggtgttaaaaaaagttcact

SEQ ID NO: 197286 - DNA, 22 bp, Artificial Sequence
  Synthetic oligonucleotide; TTA chr2 60474471 60474492 60474488 60474493 +
gggtgttaaaaaaagttcactc

SEQ ID NO: 197287 - DNA, 22 bp, Artificial Sequence
  Synthetic oligonucleotide; TTA chr2 60474479 60474500 60474496 60474501 +
aaaaaagttcactccaataata

SEQ ID NO: 197288 - DNA, 22 bp, Artificial Sequence
  Synthetic oligonucleotide; TTC chr2 60474489 60474510 60474506 60474511 +
actccaataatattctttggct

SEQ ID NO: 197289 - DNA, 22 bp, Artificial Sequence
  Synthetic oligonucleotide; CTC chr2 60474493 60474514 60474510 60474515 +
caataatattctttggctctgg

SEQ ID NO: 197290 - DNA, 22 bp, Artificial Sequence
  Synthetic oligonucleotide; TTC chr2 60474504 60474525 60474521 60474526 +
tttggctctgggcccaaagtat

SEQ ID NO: 197291 - DNA, 22 bp, Artificial Sequence
  Synthetic oligonucleotide; CTT chr2 60474506 60474527 60474523 60474528 +
tggctctgggcccaaagtattt

SEQ ID NO: 197292 - DNA, 22 bp, Artificial Sequence
  Synthetic oligonucleotide; TTT chr2 60474507 60474528 60474524 60474529 +
ggctctgggcccaaagtatttt

SEQ ID NO: 197293 - DNA, 22 bp, Artificial Sequence
  Synthetic oligonucleotide; TTG chr2 60474508 60474529 60474525 60474530 +
gctctgggcccaaagtattttc

SEQ ID NO: 197294 - DNA, 22 bp, Artificial Sequence
  Synthetic oligonucleotide; CTC chr2 60474512 60474533 60474529 60474534 +
tgggcccaaagtattttcactt

SEQ ID NO: 197295 - DNA, 22 bp, Artificial Sequence
  Synthetic oligonucleotide; CTG chr2 60474514 60474535 60474531 60474536 +
ggcccaaagtattttcacttga

SEQ ID NO: 197296 - DNA, 22 bp, Artificial Sequence
  Synthetic oligonucleotide; TTT chr2 60474528 60474549 60474545 60474550 +
tcacttgatcgtgaattagata

SEQ ID NO: 197297 - DNA, 22 bp, Artificial Sequence
  Synthetic oligonucleotide; TTT chr2 60474529 60474550 60474546 60474551 +
cacttgatcgtgaattagataa

SEQ ID NO: 197298 - DNA, 22 bp, Artificial Sequence
  Synthetic oligonucleotide; TTC chr2 60474530 60474551 60474547 60474552 +
acttgatcgtgaattagataaa

SEQ ID NO: 197299 - DNA, 22 bp, Artificial Sequence
  Synthetic oligonucleotide; CTT chr2 60474534 60474555 60474551 60474556 +
gatcgtgaattagataaatttt

SEQ ID NO: 197300 - DNA, 22 bp, Artificial Sequence
  Synthetic oligonucleotide; TTG chr2 60474535 60474556 60474552 60474557 +
atcgtgaattagataaattttt

SEQ ID NO: 197301 - DNA, 22 bp, Artificial Sequence
  Synthetic oligonucleotide; TTA chr2 60474546 60474567 60474563 60474568 +
gataaatttttattacacttta

SEQ ID NO: 197302 - DNA, 22 bp, Artificial Sequence
  Synthetic oligonucleotide; TTT chr2 60474555 60474576 60474572 60474577 +
ttattacactttaagcttttgc

SEQ ID NO: 197303 - DNA, 22 bp, Artificial Sequence
  Synthetic oligonucleotide; TTT chr2 60474556 60474577 60474573 60474578 +
tattacactttaagcttttgcc

SEQ ID NO: 197304 - DNA, 22 bp, Artificial Sequence
  Synthetic oligonucleotide; TTT chr2 60474557 60474578 60474574 60474579 +
attacactttaagcttttgcct

SEQ ID NO: 197305 - DNA, 22 bp, Artificial Sequence
  Synthetic oligonucleotide; TTA chr2 60474558 60474579 60474575 60474580 +
ttacactttaagcttttgcctt

SEQ ID NO: 197306 - DNA, 22 bp, Artificial Sequence
  Synthetic oligonucleotide; TTA chr2 60474561 60474582 60474578 60474583 +
cactttaagcttttgccttaga

SEQ ID NO: 197307 - DNA, 22 bp, Artificial Sequence
  Synthetic oligonucleotide; CTT chr2 60474566 60474587 60474583 60474588 +
taagcttttgccttagaatggc

SEQ ID NO: 197308 - DNA, 22 bp, Artificial Sequence
  Synthetic oligonucleotide; TTT chr2 60474567 60474588 60474584 60474589 +
aagcttttgccttagaatggcg

SEQ ID NO: 197309 - DNA, 22 bp, Artificial Sequence
  Synthetic oligonucleotide; TTA chr2 60474568 60474589 60474585 60474590 +
agcttttgccttagaatggcgg

SEQ ID NO: 197310 - DNA, 22 bp, Artificial Sequence
  Synthetic oligonucleotide; CTT chr2 60474573 60474594 60474590 60474595 +
ttgccttagaatggcggaactt

SEQ ID NO: 197311 - DNA, 22 bp, Artificial Sequence
  Synthetic oligonucleotide; TTT chr2 60474574 60474595 60474591 60474596 +
tgccttagaatggcggaactta

SEQ ID NO: 197312 - DNA, 22 bp, Artificial Sequence
  Synthetic oligonucleotide; TTT chr2 60474575 60474596 60474592 60474597 +
gccttagaatggcggaacttat

SEQ ID NO: 197313 - DNA, 22 bp, Artificial Sequence
  Synthetic oligonucleotide; TTG chr2 60474576 60474597 60474593 60474598 +
ccttagaatggcggaacttatc

SEQ ID NO: 197314 - DNA, 22 bp, Artificial Sequence
  Synthetic oligonucleotide; CTT chr2 60474580 60474601 60474597 60474602 +
agaatggcggaacttatctagg

SEQ ID NO: 197315 - DNA, 22 bp, Artificial Sequence
  Synthetic oligonucleotide; TTA chr2 60474581 60474602 60474598 60474603 +
gaatggcggaacttatctagga

SEQ ID NO: 197316 - DNA, 22 bp, Artificial Sequence
  Synthetic oligonucleotide; CTT chr2 60474595 60474616 60474612 60474617 +
atctaggagactgagagggcag

SEQ ID NO: 197317 - DNA, 22 bp, Artificial Sequence
  Synthetic oligonucleotide; TTA chr2 60474596 60474617 60474613 60474618 +
tctaggagactgagagggcagc

SEQ ID NO: 197318 - DNA, 22 bp, Artificial Sequence
  Synthetic oligonucleotide; CTA chr2 60474600 60474621 60474617 60474622 +
ggagactgagagggcagctgca

SEQ ID NO: 197319 - DNA, 22 bp, Artificial Sequence
  Synthetic oligonucleotide; CTG chr2 60474608 60474629 60474625 60474630 +
agagggcagctgcataaaaaga

SEQ ID NO: 197320 - DNA, 22 bp, Artificial Sequence
  Synthetic oligonucleotide; CTG chr2 60474620 60474641 60474637 60474642 +
cataaaaagacaaattgtctta

SEQ ID NO: 197321 - DNA, 22 bp, Artificial Sequence
  Synthetic oligonucleotide; TTG chr2 60474637 60474658 60474654 60474659 +
tcttaggacaatttttttttgt

SEQ ID NO: 197322 - DNA, 22 bp, Artificial Sequence
  Synthetic oligonucleotide; CTT chr2 60474641 60474662 60474658 60474663 +
aggacaatttttttttgtttgt

SEQ ID NO: 197323 - DNA, 22 bp, Artificial Sequence
  Synthetic oligonucleotide; TTA chr2 60474642 60474663 60474659 60474664 +
ggacaatttttttttgtttgtt

SEQ ID NO: 197324 - DNA, 22 bp, Artificial Sequence
  Synthetic oligonucleotide; TTT chr2 60474651 60474672 60474668 60474673 +
ttttttgtttgtttaatcacat

SEQ ID NO: 197325 - DNA, 22 bp, Artificial Sequence
  Synthetic oligonucleotide; TTT chr2 60474652 60474673 60474669 60474674 +
tttttgtttgtttaatcacata

SEQ ID NO: 197326 - DNA, 22 bp, Artificial Sequence
  Synthetic oligonucleotide; TTT chr2 60474653 60474674 60474670 60474675 +
ttttgtttgtttaatcacatac

SEQ ID NO: 197327 - DNA, 22 bp, Artificial Sequence
  Synthetic oligonucleotide; TTT chr2 60474654 60474675 60474671 60474676 +
tttgtttgtttaatcacatacc

SEQ ID NO: 197328 - DNA, 22 bp, Artificial Sequence
  Synthetic oligonucleotide; TTT chr2 60474655 60474676 60474672 60474677 +
ttgtttgtttaatcacatacct

SEQ ID NO: 197329 - DNA, 22 bp, Artificial Sequence
  Synthetic oligonucleotide; TTT chr2 60474656 60474677 60474673 60474678 +
tgtttgtttaatcacatacctc

SEQ ID NO: 197330 - DNA, 22 bp, Artificial Sequence
  Synthetic oligonucleotide; TTT chr2 60474657 60474678 60474674 60474679 +
gtttgtttaatcacatacctca

SEQ ID NO: 197331 - DNA, 22 bp, Artificial Sequence
  Synthetic oligonucleotide; TTG chr2 60474658 60474679 60474675 60474680 +
tttgtttaatcacatacctcac

SEQ ID NO: 197332 - DNA, 22 bp, Artificial Sequence
  Synthetic oligonucleotide; TTT chr2 60474661 60474682 60474678 60474683 +
gtttaatcacatacctcactat

SEQ ID NO: 197333 - DNA, 22 bp, Artificial Sequence
  Synthetic oligonucleotide; TTG chr2 60474662 60474683 60474679 60474684 +
tttaatcacatacctcactatg

SEQ ID NO: 197334 - DNA, 22 bp, Artificial Sequence
  Synthetic oligonucleotide; TTT chr2 60474665 60474686 60474682 60474687 +
aatcacatacctcactatgcaa

SEQ ID NO: 197335 - DNA, 22 bp, Artificial Sequence
  Synthetic oligonucleotide; TTA chr2 60474666 60474687 60474683 60474688 +
atcacatacctcactatgcaaa

SEQ ID NO: 197336 - DNA, 22 bp, Artificial Sequence
  Synthetic oligonucleotide; CTC chr2 60474678 60474699 60474695 60474700 +
actatgcaaaatgtgtgttccc

SEQ ID NO: 197337 - DNA, 22 bp, Artificial Sequence
  Synthetic oligonucleotide; CTA chr2 60474682 60474703 60474699 60474704 +
tgcaaaatgtgtgttcccagga

SEQ ID NO: 197338 - DNA, 22 bp, Artificial Sequence
  Synthetic oligonucleotide; TTC chr2 60474698 60474719 60474715 60474720 +
ccaggataaattccattcattc

SEQ ID NO: 197339 - DNA, 22 bp, Artificial Sequence
  Synthetic oligonucleotide; TTC chr2 60474711 60474732 60474728 60474733 +
cattcattcattctctcatgca

SEQ ID NO: 197340 - DNA, 22 bp, Artificial Sequence
  Synthetic oligonucleotide; TTC chr2 60474716 60474737 60474733 60474738 +
attcattctctcatgcattcat

SEQ ID NO: 197341 - DNA, 22 bp, Artificial Sequence
  Synthetic oligonucleotide; TTC chr2 60474720 60474741 60474737 60474742 +
attctctcatgcattcattcaa

SEQ ID NO: 197342 - DNA, 22 bp, Artificial Sequence
  Synthetic oligonucleotide; TTC chr2 60474724 60474745 60474741 60474746 +
tctcatgcattcattcaacctc

SEQ ID NO: 197343 - DNA, 22 bp, Artificial Sequence
  Synthetic oligonucleotide; CTC chr2 60474726 60474747 60474743 60474748 +
tcatgcattcattcaacctctc

SEQ ID NO: 197344 - DNA, 22 bp, Artificial Sequence
  Synthetic oligonucleotide; CTC chr2 60474728 60474749 60474745 60474750 +
atgcattcattcaacctctcat

SEQ ID NO: 197345 - DNA, 22 bp, Artificial Sequence
  Synthetic oligonucleotide; TTC chr2 60474736 60474757 60474753 60474758 +
attcaacctctcatgcattcat

SEQ ID NO: 197346 - DNA, 22 bp, Artificial Sequence
  Synthetic oligonucleotide; TTC chr2 60474740 60474761 60474757 60474762 +
aacctctcatgcattcattcaa

SEQ ID NO: 197347 - DNA, 22 bp, Artificial Sequence
  Synthetic oligonucleotide; CTC chr2 60474746 60474767 60474763 60474768 +
tcatgcattcattcaacaaata

SEQ ID NO: 197348 - DNA, 22 bp, Artificial Sequence
  Synthetic oligonucleotide; CTC chr2 60474748 60474769 60474765 60474770 +
atgcattcattcaacaaatatt

SEQ ID NO: 197349 - DNA, 22 bp, Artificial Sequence
  Synthetic oligonucleotide; TTC chr2 60474756 60474777 60474773 60474778 +
attcaacaaatatttaccgagt

SEQ ID NO: 197350 - DNA, 22 bp, Artificial Sequence
  Synthetic oligonucleotide; TTC chr2 60474760 60474781 60474777 60474782 +
aacaaatatttaccgagtgcct

SEQ ID NO: 197351 - DNA, 22 bp, Artificial Sequence
  Synthetic oligonucleotide; TTT chr2 60474771 60474792 60474788 60474793 +
accgagtgcctacaatgcccaa

SEQ ID NO: 197352 - DNA, 22 bp, Artificial Sequence
  Synthetic oligonucleotide; TTA chr2 60474772 60474793 60474789 60474794 +
ccgagtgcctacaatgcccaaa

SEQ ID NO: 197353 - DNA, 22 bp, Artificial Sequence
  Synthetic oligonucleotide; CTA chr2 60474783 60474804 60474800 60474805 +
caatgcccaaagcaatgggcta

SEQ ID NO: 197354 - DNA, 22 bp, Artificial Sequence
  Synthetic oligonucleotide; CTA chr2 60474805 60474826 60474822 60474827 +
gccgctgtgggcagtacaaaga

SEQ ID NO: 197355 - DNA, 22 bp, Artificial Sequence
  Synthetic oligonucleotide; CTG chr2 60474812 60474833 60474829 60474834 +
tgggcagtacaaagaaaacacg

SEQ ID NO: 197356 - DNA, 22 bp, Artificial Sequence
  Synthetic oligonucleotide; TTT chr2 60474845 60474866 60474862 60474867 +
ctcccacagcaggcttcattta

SEQ ID NO: 197357 - DNA, 22 bp, Artificial Sequence
  Synthetic oligonucleotide; TTC chr2 60474846 60474867 60474863 60474868 +
tcccacagcaggcttcatttag

SEQ ID NO: 197358 - DNA, 22 bp, Artificial Sequence
  Synthetic oligonucleotide; CTC chr2 60474848 60474869 60474865 60474870 +
ccacagcaggcttcatttagta

SEQ ID NO: 197359 - DNA, 22 bp, Artificial Sequence
  Synthetic oligonucleotide; CTT chr2 60474861 60474882 60474878 60474883 +
catttagtagaaaaggtaaggc

SEQ ID NO: 197360 - DNA, 22 bp, Artificial Sequence
  Synthetic oligonucleotide; TTC chr2 60474862 60474883 60474879 60474884 +
atttagtagaaaaggtaaggcc

SEQ ID NO: 197361 - DNA, 22 bp, Artificial Sequence
  Synthetic oligonucleotide; TTT chr2 60474866 60474887 60474883 60474888 +
agtagaaaaggtaaggcctgca

SEQ ID NO: 197362 - DNA, 22 bp, Artificial Sequence
  Synthetic oligonucleotide; TTA chr2 60474867 60474888 60474884 60474889 +
gtagaaaaggtaaggcctgcac

SEQ ID NO: 197363 - DNA, 22 bp, Artificial Sequence
  Synthetic oligonucleotide; CTG chr2 60474886 60474907 60474903 60474908 +
cacagaaattgctctaccccca

SEQ ID NO: 197364 - DNA, 22 bp, Artificial Sequence
  Synthetic oligonucleotide; TTG chr2 60474897 60474918 60474914 60474919 +
ctctacccccatgtagaaagtg

SEQ ID NO: 197365 - DNA, 22 bp, Artificial Sequence
  Synthetic oligonucleotide; CTC chr2 60474900 60474921 60474917 60474922 +
tacccccatgtagaaagtgtgt

SEQ ID NO: 197366 - DNA, 22 bp, Artificial Sequence
  Synthetic oligonucleotide; CTA chr2 60474902 60474923 60474919 60474924 +
cccccatgtagaaagtgtgtca

SEQ ID NO: 197367 - DNA, 22 bp, Artificial Sequence
  Synthetic oligonucleotide; CTG chr2 60474946 60474967 60474963 60474968 +
ctatggaaattcaaaggaagag

SEQ ID NO: 197368 - DNA, 22 bp, Artificial Sequence
  Synthetic oligonucleotide; CTA chr2 60474949 60474970 60474966 60474971 +
tggaaattcaaaggaagagaaa

SEQ ID NO: 197369 - DNA, 22 bp, Artificial Sequence
  Synthetic oligonucleotide; TTC chr2 60474958 60474979 60474975 60474980 +
aaaggaagagaaattatttcca

SEQ ID NO: 197370 - DNA, 22 bp, Artificial Sequence
  Synthetic oligonucleotide; TTA chr2 60474974 60474995 60474991 60474996 +
tttccatttggaagggagggag

SEQ ID NO: 197371 - DNA, 22 bp, Artificial Sequence
  Synthetic oligonucleotide; TTT chr2 60474977 60474998 60474994 60474999 +
ccatttggaagggagggagaga

SEQ ID NO: 197372 - DNA, 22 bp, Artificial Sequence
  Synthetic oligonucleotide; TTC chr2 60474978 60474999 60474995 60475000 +
catttggaagggagggagagag

SEQ ID NO: 197373 - DNA, 22 bp, Artificial Sequence
  Synthetic oligonucleotide; TTT chr2 60474983 60475004 60475000 60475005 +
ggaagggagggagagaggcttt

SEQ ID NO: 197374 - DNA, 22 bp, Artificial Sequence
  Synthetic oligonucleotide; TTG chr2 60474984 60475005 60475001 60475006 +
gaagggagggagagaggctttg

SEQ ID NO: 197375 - DNA, 22 bp, Artificial Sequence
  Synthetic oligonucleotide; CTT chr2 60475004 60475025 60475021 60475026 +
tgggaaagaggaaaacttatga

SEQ ID NO: 197376 - DNA, 22 bp, Artificial Sequence
  Synthetic oligonucleotide; TTT chr2 60475005 60475026 60475022 60475027 +
gggaaagaggaaaacttatgag

SEQ ID NO: 197377 - DNA, 22 bp, Artificial Sequence
  Synthetic oligonucleotide; TTG chr2 60475006 60475027 60475023 60475028 +
ggaaagaggaaaacttatgagt

SEQ ID NO: 197378 - DNA, 22 bp, Artificial Sequence
  Synthetic oligonucleotide; CTT chr2 60475022 60475043 60475039 60475044 +
atgagttaaacctggagagcca

SEQ ID NO: 197379 - DNA, 22 bp, Artificial Sequence
  Synthetic oligonucleotide; TTA chr2 60475023 60475044 60475040 60475045 +
tgagttaaacctggagagccaa

SEQ ID NO: 197380 - DNA, 22 bp, Artificial Sequence
  Synthetic oligonucleotide; TTA chr2 60475030 60475051 60475047 60475052 +
aacctggagagccaagagaaag

SEQ ID NO: 197381 - DNA, 22 bp, Artificial Sequence
  Synthetic oligonucleotide; CTG chr2 60475036 60475057 60475053 60475058 +
gagagccaagagaaaggatatc

SEQ ID NO: 197382 - DNA, 22 bp, Artificial Sequence
  Synthetic oligonucleotide; CTA chr2 60475061 60475082 60475078 60475083 +
gataaaaagaaaaagcaggtaa

SEQ ID NO: 197383 - DNA, 22 bp, Artificial Sequence
  Synthetic oligonucleotide; CTT chr2 60475091 60475112 60475108 60475113 +
agagagaagcaaagcccaaggt

SEQ ID NO: 197384 - DNA, 22 bp, Artificial Sequence
  Synthetic oligonucleotide; TTA chr2 60475092 60475113 60475109 60475114 +
gagagaagcaaagcccaaggtg

SEQ ID NO: 197385 - DNA, 22 bp, Artificial Sequence
  Synthetic oligonucleotide; TTA chr2 60475147 60475168 60475164 60475169 +
cattcacatcaaaatattgcac

SEQ ID NO: 197386 - DNA, 22 bp, Artificial Sequence
  Synthetic oligonucleotide; TTC chr2 60475152 60475173 60475169 60475174 +
acatcaaaatattgcacactga

SEQ ID NO: 197387 - DNA, 22 bp, Artificial Sequence
  Synthetic oligonucleotide; TTG chr2 60475166 60475187 60475183 60475188 +
cacactgattcatccagttgac

SEQ ID NO: 197388 - DNA, 22 bp, Artificial Sequence
  Synthetic oligonucleotide; CTG chr2 60475173 60475194 60475190 60475195 +
attcatccagttgacagcggag

SEQ ID NO: 197389 - DNA, 22 bp, Artificial Sequence
  Synthetic oligonucleotide; TTC chr2 60475177 60475198 60475194 60475199 +
atccagttgacagcggaggata

SEQ ID NO: 197390 - DNA, 22 bp, Artificial Sequence
  Synthetic oligonucleotide; TTG chr2 60475186 60475207 60475203 60475208 +
acagcggaggatacgaccatct

SEQ ID NO: 197391 - DNA, 22 bp, Artificial Sequence
  Synthetic oligonucleotide; CTA chr2 60475209 60475230 60475226 60475231 +
aataaatcctctgaagatttct

SEQ ID NO: 197392 - DNA, 22 bp, Artificial Sequence
  Synthetic oligonucleotide; CTC chr2 60475220 60475241 60475237 60475242 +
tgaagatttctgtgacatcttc

SEQ ID NO: 197393 - DNA, 22 bp, Artificial Sequence
  Synthetic oligonucleotide; CTG chr2 60475222 60475243 60475239 60475244 +
aagatttctgtgacatcttcag

SEQ ID NO: 197394 - DNA, 22 bp, Artificial Sequence
  Synthetic oligonucleotide; TTT chr2 60475229 60475250 60475246 60475251 +
ctgtgacatcttcagctttcac

SEQ ID NO: 197395 - DNA, 22 bp, Artificial Sequence
  Synthetic oligonucleotide; TTC chr2 60475230 60475251 60475247 60475252 +
tgtgacatcttcagctttcaca

SEQ ID NO: 197396 - DNA, 22 bp, Artificial Sequence
  Synthetic oligonucleotide; CTG chr2 60475232 60475253 60475249 60475254 +
tgacatcttcagctttcacaag

SEQ ID NO: 197397 - DNA, 22 bp, Artificial Sequence
  Synthetic oligonucleotide; CTT chr2 60475241 60475262 60475258 60475263 +
cagctttcacaagtgcgtattt

SEQ ID NO: 197398 - DNA, 22 bp, Artificial Sequence
  Synthetic oligonucleotide; TTC chr2 60475242 60475263 60475259 60475264 +
agctttcacaagtgcgtatttt

SEQ ID NO: 197399 - DNA, 22 bp, Artificial Sequence
  Synthetic oligonucleotide; CTT chr2 60475247 60475268 60475264 60475269 +
tcacaagtgcgtattttccaat

SEQ ID NO: 197400 - DNA, 22 bp, Artificial Sequence
  Synthetic oligonucleotide; TTT chr2 60475248 60475269 60475265 60475270 +
cacaagtgcgtattttccaatt

SEQ ID NO: 197401 - DNA, 22 bp, Artificial Sequence
  Synthetic oligonucleotide; TTC chr2 60475249 60475270 60475266 60475271 +
acaagtgcgtattttccaattt

SEQ ID NO: 197402 - DNA, 22 bp, Artificial Sequence
  Synthetic oligonucleotide; TTT chr2 60475263 60475284 60475280 60475285 +
tccaatttcacattttctgaaa

SEQ ID NO: 197403 - DNA, 22 bp, Artificial Sequence
  Synthetic oligonucleotide; TTT chr2 60475264 60475285 60475281 60475286 +
ccaatttcacattttctgaaaa

SEQ ID NO: 197404 - DNA, 22 bp, Artificial Sequence
  Synthetic oligonucleotide; TTC chr2 60475265 60475286 60475282 60475287 +
caatttcacattttctgaaaat

SEQ ID NO: 197405 - DNA, 22 bp, Artificial Sequence
  Synthetic oligonucleotide; TTT chr2 60475271 60475292 60475288 60475293 +
cacattttctgaaaataaggga

SEQ ID NO: 197406 - DNA, 22 bp, Artificial Sequence
  Synthetic oligonucleotide; TTC chr2 60475272 60475293 60475289 60475294 +
acattttctgaaaataagggac

SEQ ID NO: 197407 - DNA, 22 bp, Artificial Sequence
  Synthetic oligonucleotide; TTT chr2 60475278 60475299 60475295 60475300 +
tctgaaaataagggacacaacc

SEQ ID NO: 197408 - DNA, 22 bp, Artificial Sequence
  Synthetic oligonucleotide; TTT chr2 60475279 60475300 60475296 60475301 +
ctgaaaataagggacacaacca

SEQ ID NO: 197409 - DNA, 22 bp, Artificial Sequence
  Synthetic oligonucleotide; TTC chr2 60475280 60475301 60475297 60475302 +
tgaaaataagggacacaaccat

SEQ ID NO: 197410 - DNA, 22 bp, Artificial Sequence
  Synthetic oligonucleotide; CTG chr2 60475282 60475303 60475299 60475304 +
aaaataagggacacaaccatgt

SEQ ID NO: 197411 - DNA, 22 bp, Artificial Sequence
  Synthetic oligonucleotide; CTC chr2 60475310 60475331 60475327 60475332 +
ttgtgaaactccatgaaggttc

SEQ ID NO: 197412 - DNA, 22 bp, Artificial Sequence
  Synthetic oligonucleotide; CTT chr2 60475312 60475333 60475329 60475334 +
gtgaaactccatgaaggttcat

SEQ ID NO: 197413 - DNA, 22 bp, Artificial Sequence
  Synthetic oligonucleotide; TTG chr2 60475313 60475334 60475330 60475335 +
tgaaactccatgaaggttcatc

SEQ ID NO: 197414 - DNA, 22 bp, Artificial Sequence
  Synthetic oligonucleotide; CTC chr2 60475321 60475342 60475338 60475343 +
catgaaggttcatctgttctgt

SEQ ID NO: 197415 - DNA, 22 bp, Artificial Sequence
  Synthetic oligonucleotide; TTC chr2 60475332 60475353 60475349 60475354 +
atctgttctgttttccccccac

SEQ ID NO: 197416 - DNA, 22 bp, Artificial Sequence
  Synthetic oligonucleotide; CTG chr2 60475337 60475358 60475354 60475359 +
ttctgttttccccccacctcaa

SEQ ID NO: 197417 - DNA, 22 bp, Artificial Sequence
  Synthetic oligonucleotide; TTC chr2 60475340 60475361 60475357 60475362 +
tgttttccccccacctcaattg

SEQ ID NO: 197418 - DNA, 22 bp, Artificial Sequence
  Synthetic oligonucleotide; CTG chr2 60475342 60475363 60475359 60475364 +
ttttccccccacctcaattgtt

SEQ ID NO: 197419 - DNA, 22 bp, Artificial Sequence
  Synthetic oligonucleotide; TTT chr2 60475345 60475366 60475362 60475367 +
tccccccacctcaattgtttct

SEQ ID NO: 197420 - DNA, 22 bp, Artificial Sequence
  Synthetic oligonucleotide; TTT chr2 60475346 60475367 60475363 60475368 +
ccccccacctcaattgtttctt

SEQ ID NO: 197421 - DNA, 22 bp, Artificial Sequence
  Synthetic oligonucleotide; TTC chr2 60475347 60475368 60475364 60475369 +
cccccacctcaattgtttcttc

SEQ ID NO: 197422 - DNA, 22 bp, Artificial Sequence
  Synthetic oligonucleotide; CTC chr2 60475357 60475378 60475374 60475379 +
aattgtttcttcccccaatgaa

SEQ ID NO: 197423 - DNA, 22 bp, Artificial Sequence
  Synthetic oligonucleotide; TTG chr2 60475362 60475383 60475379 60475384 +
tttcttcccccaatgaatgtgg

SEQ ID NO: 197424 - DNA, 22 bp, Artificial Sequence
  Synthetic oligonucleotide; TTT chr2 60475365 60475386 60475382 60475387 +
cttcccccaatgaatgtgggtg

SEQ ID NO: 197425 - DNA, 22 bp, Artificial Sequence
  Synthetic oligonucleotide; TTC chr2 60475366 60475387 60475383 60475388 +
ttcccccaatgaatgtgggtgg

SEQ ID NO: 197426 - DNA, 22 bp, Artificial Sequence
  Synthetic oligonucleotide; CTT chr2 60475368 60475389 60475385 60475390 +
cccccaatgaatgtgggtggcc

SEQ ID NO: 197427 - DNA, 22 bp, Artificial Sequence
  Synthetic oligonucleotide; TTC chr2 60475369 60475390 60475386 60475391 +
ccccaatgaatgtgggtggccc

SEQ ID NO: 197428 - DNA, 22 bp, Artificial Sequence
  Synthetic oligonucleotide; CTA chr2 60475395 60475416 60475412 60475417 +
aggcaaaatttactatgtttta

SEQ ID NO: 197429 - DNA, 22 bp, Artificial Sequence
  Synthetic oligonucleotide; TTT chr2 60475406 60475427 60475423 60475428 +
actatgttttattcctctgagt

SEQ ID NO: 197430 - DNA, 22 bp, Artificial Sequence
  Synthetic oligonucleotide; TTA chr2 60475407 60475428 60475424 60475429 +
ctatgttttattcctctgagtc

SEQ ID NO: 197431 - DNA, 22 bp, Artificial Sequence
  Synthetic oligonucleotide; CTA chr2 60475410 60475431 60475427 60475432 +
tgttttattcctctgagtcaga

SEQ ID NO: 197432 - DNA, 22 bp, Artificial Sequence
  Synthetic oligonucleotide; TTT chr2 60475415 60475436 60475432 60475437 +
tattcctctgagtcagacaaac

SEQ ID NO: 197433 - DNA, 22 bp, Artificial Sequence
  Synthetic oligonucleotide; TTT chr2 60475416 60475437 60475433 60475438 +
attcctctgagtcagacaaaca

SEQ ID NO: 197434 - DNA, 22 bp, Artificial Sequence
  Synthetic oligonucleotide; TTA chr2 60475417 60475438 60475434 60475439 +
ttcctctgagtcagacaaacaa

SEQ ID NO: 197435 - DNA, 22 bp, Artificial Sequence
  Synthetic oligonucleotide; TTC chr2 60475420 60475441 60475437 60475442 +
ctctgagtcagacaaacaagtg

SEQ ID NO: 197436 - DNA, 22 bp, Artificial Sequence
  Synthetic oligonucleotide; CTC chr2 60475423 60475444 60475440 60475445 +
tgagtcagacaaacaagtgttg

SEQ ID NO: 197437 - DNA, 22 bp, Artificial Sequence
  Synthetic oligonucleotide; CTG chr2 60475425 60475446 60475442 60475447 +
agtcagacaaacaagtgttgat

SEQ ID NO: 197438 - DNA, 22 bp, Artificial Sequence
  Synthetic oligonucleotide; TTG chr2 60475445 60475466 60475462 60475467 +
atagccatgttcttccttgcaa

SEQ ID NO: 197439 - DNA, 22 bp, Artificial Sequence
  Synthetic oligonucleotide; TTC chr2 60475457 60475478 60475474 60475479 +
ttccttgcaatactgcctccct

SEQ ID NO: 197440 - DNA, 22 bp, Artificial Sequence
  Synthetic oligonucleotide; CTT chr2 60475459 60475480 60475476 60475481 +
ccttgcaatactgcctccctgg

SEQ ID NO: 197441 - DNA, 22 bp, Artificial Sequence
  Synthetic oligonucleotide; TTC chr2 60475460 60475481 60475477 60475482 +
cttgcaatactgcctccctggc

SEQ ID NO: 197442 - DNA, 22 bp, Artificial Sequence
  Synthetic oligonucleotide; CTT chr2 60475463 60475484 60475480 60475485 +
gcaatactgcctccctggctta

SEQ ID NO: 197443 - DNA, 22 bp, Artificial Sequence
  Synthetic oligonucleotide; TTG chr2 60475464 60475485 60475481 60475486 +
caatactgcctccctggcttaa

SEQ ID NO: 197444 - DNA, 22 bp, Artificial Sequence
  Synthetic oligonucleotide; CTG chr2 60475472 60475493 60475489 60475494 +
cctccctggcttaaataatcta

SEQ ID NO: 197445 - DNA, 22 bp, Artificial Sequence
  Synthetic oligonucleotide; CTC chr2 60475476 60475497 60475493 60475498 +
cctggcttaaataatctatttc

SEQ ID NO: 197446 - DNA, 22 bp, Artificial Sequence
  Synthetic oligonucleotide; CTG chr2 60475480 60475501 60475497 60475502 +
gcttaaataatctatttcagat

SEQ ID NO: 197447 - DNA, 22 bp, Artificial Sequence
  Synthetic oligonucleotide; CTT chr2 60475484 60475505 60475501 60475506 +
aaataatctatttcagatgtct

SEQ ID NO: 197448 - DNA, 22 bp, Artificial Sequence
  Synthetic oligonucleotide; TTA chr2 60475485 60475506 60475502 60475507 +
aataatctatttcagatgtctc

SEQ ID NO: 197449 - DNA, 22 bp, Artificial Sequence
  Synthetic oligonucleotide; CTA chr2 60475494 60475515 60475511 60475516 +
tttcagatgtctcattgccagt

SEQ ID NO: 197450 - DNA, 22 bp, Artificial Sequence
  Synthetic oligonucleotide; TTT chr2 60475497 60475518 60475514 60475519 +
cagatgtctcattgccagttta

SEQ ID NO: 197451 - DNA, 22 bp, Artificial Sequence
  Synthetic oligonucleotide; TTC chr2 60475498 60475519 60475515 60475520 +
agatgtctcattgccagtttaa

SEQ ID NO: 197452 - DNA, 22 bp, Artificial Sequence
  Synthetic oligonucleotide; CTC chr2 60475507 60475528 60475524 60475529 +
attgccagtttaagatgggctt

SEQ ID NO: 197453 - DNA, 22 bp, Artificial Sequence
  Synthetic oligonucleotide; TTG chr2 60475511 60475532 60475528 60475533 +
ccagtttaagatgggcttgtac

SEQ ID NO: 197454 - DNA, 22 bp, Artificial Sequence
  Synthetic oligonucleotide; TTT chr2 60475518 60475539 60475535 60475540 +
aagatgggcttgtacttgctga

SEQ ID NO: 197455 - DNA, 22 bp, Artificial Sequence
  Synthetic oligonucleotide; TTA chr2 60475519 60475540 60475536 60475541 +
agatgggcttgtacttgctgac

SEQ ID NO: 197456 - DNA, 22 bp, Artificial Sequence
  Synthetic oligonucleotide; CTT chr2 60475529 60475550 60475546 60475551 +
gtacttgctgacacattttcaa

SEQ ID NO: 197457 - DNA, 22 bp, Artificial Sequence
  Synthetic oligonucleotide; TTG chr2 60475530 60475551 60475547 60475552 +
tacttgctgacacattttcaac

SEQ ID NO: 197458 - DNA, 22 bp, Artificial Sequence
  Synthetic oligonucleotide; CTT chr2 60475535 60475556 60475552 60475557 +
gctgacacattttcaacaaatg

SEQ ID NO: 197459 - DNA, 22 bp, Artificial Sequence
  Synthetic oligonucleotide; TTG chr2 60475536 60475557 60475553 60475558 +
ctgacacattttcaacaaatga

SEQ ID NO: 197460 - DNA, 22 bp, Artificial Sequence
  Synthetic oligonucleotide; CTG chr2 60475539 60475560 60475556 60475561 +
acacattttcaacaaatgactg

SEQ ID NO: 197461 - DNA, 22 bp, Artificial Sequence
  Synthetic oligonucleotide; TTT chr2 60475547 60475568 60475564 60475569 +
tcaacaaatgactgtgcaagaa

SEQ ID NO: 197462 - DNA, 22 bp, Artificial Sequence
  Synthetic oligonucleotide; TTT chr2 60475548 60475569 60475565 60475570 +
caacaaatgactgtgcaagaaa

SEQ ID NO: 197463 - DNA, 22 bp, Artificial Sequence
  Synthetic oligonucleotide; TTC chr2 60475549 60475570 60475566 60475571 +
aacaaatgactgtgcaagaaac

SEQ ID NO: 197464 - DNA, 22 bp, Artificial Sequence
  Synthetic oligonucleotide; CTG chr2 60475561 60475582 60475578 60475583 +
tgcaagaaacattgagattttc

SEQ ID NO: 197465 - DNA, 22 bp, Artificial Sequence
  Synthetic oligonucleotide; TTG chr2 60475575 60475596 60475592 60475597 +
agattttcctacactactttgt

SEQ ID NO: 197466 - DNA, 22 bp, Artificial Sequence
  Synthetic oligonucleotide; TTT chr2 60475581 60475602 60475598 60475603 +
tcctacactactttgtctcttc

SEQ ID NO: 197467 - DNA, 22 bp, Artificial Sequence
  Synthetic oligonucleotide; TTT chr2 60475582 60475603 60475599 60475604 +
cctacactactttgtctcttca

SEQ ID NO: 197468 - DNA, 22 bp, Artificial Sequence
  Synthetic oligonucleotide; TTC chr2 60475583 60475604 60475600 60475605 +
ctacactactttgtctcttcaa

SEQ ID NO: 197469 - DNA, 22 bp, Artificial Sequence
  Synthetic oligonucleotide; CTA chr2 60475586 60475607 60475603 60475608 +
cactactttgtctcttcaatca

SEQ ID NO: 197470 - DNA, 22 bp, Artificial Sequence
  Synthetic oligonucleotide; CTA chr2 60475591 60475612 60475608 60475613 +
ctttgtctcttcaatcatcaac

SEQ ID NO: 197471 - DNA, 22 bp, Artificial Sequence
  Synthetic oligonucleotide; CTT chr2 60475594 60475615 60475611 60475616 +
tgtctcttcaatcatcaacttg

SEQ ID NO: 197472 - DNA, 22 bp, Artificial Sequence
  Synthetic oligonucleotide; TTT chr2 60475595 60475616 60475612 60475617 +
gtctcttcaatcatcaacttga

SEQ ID NO: 197473 - DNA, 22 bp, Artificial Sequence
  Synthetic oligonucleotide; TTG chr2 60475596 60475617 60475613 60475618 +
tctcttcaatcatcaacttgac

SEQ ID NO: 197474 - DNA, 22 bp, Artificial Sequence
  Synthetic oligonucleotide; CTC chr2 60475600 60475621 60475617 60475622 +
ttcaatcatcaacttgaccatc

SEQ ID NO: 197475 - DNA, 22 bp, Artificial Sequence
  Synthetic oligonucleotide; CTT chr2 60475602 60475623 60475619 60475624 +
caatcatcaacttgaccatccc

SEQ ID NO: 197476 - DNA, 22 bp, Artificial Sequence
  Synthetic oligonucleotide; TTC chr2 60475603 60475624 60475620 60475625 +
aatcatcaacttgaccatccct

SEQ ID NO: 197477 - DNA, 22 bp, Artificial Sequence
  Synthetic oligonucleotide; CTT chr2 60475615 60475636 60475632 60475637 +
gaccatccctccaaatttcccc

SEQ ID NO: 197478 - DNA, 22 bp, Artificial Sequence
  Synthetic oligonucleotide; TTG chr2 60475616 60475637 60475633 60475638 +
accatccctccaaatttcccct

SEQ ID NO: 197479 - DNA, 22 bp, Artificial Sequence
  Synthetic oligonucleotide; CTC chr2 60475626 60475647 60475643 60475648 +
caaatttcccctctttcttctt

SEQ ID NO: 197480 - DNA, 22 bp, Artificial Sequence
  Synthetic oligonucleotide; TTT chr2 60475633 60475654 60475650 60475655 +
cccctctttcttcttttcaaag

SEQ ID NO: 197481 - DNA, 22 bp, Artificial Sequence
  Synthetic oligonucleotide; TTC chr2 60475634 60475655 60475651 60475656 +
ccctctttcttcttttcaaagc

SEQ ID NO: 197482 - DNA, 22 bp, Artificial Sequence
  Synthetic oligonucleotide; CTC chr2 60475639 60475660 60475656 60475661 +
tttcttcttttcaaagccatgg

SEQ ID NO: 197483 - DNA, 22 bp, Artificial Sequence
  Synthetic oligonucleotide; CTT chr2 60475641 60475662 60475658 60475663 +
tcttcttttcaaagccatgggg

SEQ ID NO: 197484 - DNA, 22 bp, Artificial Sequence
  Synthetic oligonucleotide; TTT chr2 60475642 60475663 60475659 60475664 +
cttcttttcaaagccatgggga

SEQ ID NO: 197485 - DNA, 22 bp, Artificial Sequence
  Synthetic oligonucleotide; TTC chr2 60475643 60475664 60475660 60475665 +
ttcttttcaaagccatggggag

SEQ ID NO: 197486 - DNA, 22 bp, Artificial Sequence
  Synthetic oligonucleotide; CTT chr2 60475645 60475666 60475662 60475667 +
cttttcaaagccatggggagga

SEQ ID NO: 197487 - DNA, 22 bp, Artificial Sequence
  Synthetic oligonucleotide; TTC chr2 60475646 60475667 60475663 60475668 +
ttttcaaagccatggggaggat

SEQ ID NO: 197488 - DNA, 22 bp, Artificial Sequence
  Synthetic oligonucleotide; CTT chr2 60475648 60475669 60475665 60475670 +
ttcaaagccatggggaggatag

SEQ ID NO: 197489 - DNA, 22 bp, Artificial Sequence
  Synthetic oligonucleotide; TTT chr2 60475649 60475670 60475666 60475671 +
tcaaagccatggggaggatagg

SEQ ID NO: 197490 - DNA, 22 bp, Artificial Sequence
  Synthetic oligonucleotide; TTT chr2 60475650 60475671 60475667 60475672 +
caaagccatggggaggataggg

SEQ ID NO: 197491 - DNA, 22 bp, Artificial Sequence
  Synthetic oligonucleotide; TTC chr2 60475651 60475672 60475668 60475673 +
aaagccatggggaggatagggg

SEQ ID NO: 197492 - DNA, 22 bp, Artificial Sequence
  Synthetic oligonucleotide; CTT chr2 60475680 60475701 60475697 60475702 +
actcctgctctgagtcctcagc

SEQ ID NO: 197493 - DNA, 22 bp, Artificial Sequence
  Synthetic oligonucleotide; TTA chr2 60475681 60475702 60475698 60475703 +
ctcctgctctgagtcctcagct

SEQ ID NO: 197494 - DNA, 22 bp, Artificial Sequence
  Synthetic oligonucleotide; CTC chr2 60475684 60475705 60475701 60475706 +
ctgctctgagtcctcagctgag

SEQ ID NO: 197495 - DNA, 22 bp, Artificial Sequence
  Synthetic oligonucleotide; CTG chr2 60475687 60475708 60475704 60475709 +
ctctgagtcctcagctgaggat

SEQ ID NO: 197496 - DNA, 22 bp, Artificial Sequence
  Synthetic oligonucleotide; CTC chr2 60475690 60475711 60475707 60475712 +
tgagtcctcagctgaggatctt

SEQ ID NO: 197497 - DNA, 22 bp, Artificial Sequence
  Synthetic oligonucleotide; CTG chr2 60475692 60475713 60475709 60475714 +
agtcctcagctgaggatcttgt

SEQ ID NO: 197498 - DNA, 22 bp, Artificial Sequence
  Synthetic oligonucleotide; CTC chr2 60475699 60475720 60475716 60475721 +
agctgaggatcttgtttgtgtg

SEQ ID NO: 197499 - DNA, 22 bp, Artificial Sequence
  Synthetic oligonucleotide; CTG chr2 60475704 60475725 60475721 60475726 +
aggatcttgtttgtgtgtagtg

SEQ ID NO: 197500 - DNA, 22 bp, Artificial Sequence
  Synthetic oligonucleotide; CTT chr2 60475712 60475733 60475729 60475734 +
gtttgtgtgtagtgggggcagg

SEQ ID NO: 197501 - DNA, 22 bp, Artificial Sequence
  Synthetic oligonucleotide; TTG chr2 60475713 60475734 60475730 60475735 +
tttgtgtgtagtgggggcaggg

SEQ ID NO: 197502 - DNA, 22 bp, Artificial Sequence
  Synthetic oligonucleotide; TTT chr2 60475716 60475737 60475733 60475738 +
gtgtgtagtgggggcaggggga

SEQ ID NO: 197503 - DNA, 22 bp, Artificial Sequence
  Synthetic oligonucleotide; TTG chr2 60475717 60475738 60475734 60475739 +
tgtgtagtgggggcagggggag

SEQ ID NO: 197504 - DNA, 22 bp, Artificial Sequence
  Synthetic oligonucleotide; CTT chr2 60475751 60475772 60475768 60475773 +
gcctctatccgaggtatttatc

SEQ ID NO: 197505 - DNA, 22 bp, Artificial Sequence
  Synthetic oligonucleotide; TTG chr2 60475752 60475773 60475769 60475774 +
cctctatccgaggtatttatca

SEQ ID NO: 197506 - DNA, 22 bp, Artificial Sequence
  Synthetic oligonucleotide; CTC chr2 60475756 60475777 60475773 60475778 +
tatccgaggtatttatcaggtt

SEQ ID NO: 197507 - DNA, 22 bp, Artificial Sequence
  Synthetic oligonucleotide; CTA chr2 60475758 60475779 60475775 60475780 +
tccgaggtatttatcaggttat

SEQ ID NO: 197508 - DNA, 22 bp, Artificial Sequence
  Synthetic oligonucleotide; TTT chr2 60475770 60475791 60475787 60475792 +
atcaggttatttgggagctact

SEQ ID NO: 197509 - DNA, 22 bp, Artificial Sequence
  Synthetic oligonucleotide; TTA chr2 60475771 60475792 60475788 60475793 +
tcaggttatttgggagctactt

SEQ ID NO: 197510 - DNA, 22 bp, Artificial Sequence
  Synthetic oligonucleotide; TTA chr2 60475779 60475800 60475796 60475801 +
tttgggagctactttcagagat

SEQ ID NO: 197511 - DNA, 22 bp, Artificial Sequence
  Synthetic oligonucleotide; TTT chr2 60475782 60475803 60475799 60475804 +
gggagctactttcagagatgcc

SEQ ID NO: 197512 - DNA, 22 bp, Artificial Sequence
  Synthetic oligonucleotide; TTG chr2 60475783 60475804 60475800 60475805 +
ggagctactttcagagatgccc

SEQ ID NO: 197513 - DNA, 22 bp, Artificial Sequence
  Synthetic oligonucleotide; CTA chr2 60475790 60475811 60475807 60475812 +
ctttcagagatgcccttgctct

SEQ ID NO: 197514 - DNA, 22 bp, Artificial Sequence
  Synthetic oligonucleotide; CTT chr2 60475793 60475814 60475810 60475815 +
tcagagatgcccttgctctatg

SEQ ID NO: 197515 - DNA, 22 bp, Artificial Sequence
  Synthetic oligonucleotide; TTT chr2 60475794 60475815 60475811 60475816 +
cagagatgcccttgctctatgt

SEQ ID NO: 197516 - DNA, 22 bp, Artificial Sequence
  Synthetic oligonucleotide; TTC chr2 60475795 60475816 60475812 60475817 +
agagatgcccttgctctatgta

SEQ ID NO: 197517 - DNA, 22 bp, Artificial Sequence
  Synthetic oligonucleotide; CTT chr2 60475807 60475828 60475824 60475829 +
gctctatgtattcccactgcca

SEQ ID NO: 197518 - DNA, 22 bp, Artificial Sequence
  Synthetic oligonucleotide; TTG chr2 60475808 60475829 60475825 60475830 +
ctctatgtattcccactgccac

SEQ ID NO: 197519 - DNA, 22 bp, Artificial Sequence
  Synthetic oligonucleotide; CTC chr2 60475811 60475832 60475828 60475833 +
tatgtattcccactgccaccac

SEQ ID NO: 197520 - DNA, 22 bp, Artificial Sequence
  Synthetic oligonucleotide; CTA chr2 60475813 60475834 60475830 60475835 +
tgtattcccactgccaccactc

SEQ ID NO: 197521 - DNA, 22 bp, Artificial Sequence
  Synthetic oligonucleotide; TTC chr2 60475820 60475841 60475837 60475842 +
ccactgccaccactccccggat

SEQ ID NO: 197522 - DNA, 22 bp, Artificial Sequence
  Synthetic oligonucleotide; CTG chr2 60475826 60475847 60475843 60475848 +
ccaccactccccggattctttt

SEQ ID NO: 197523 - DNA, 22 bp, Artificial Sequence
  Synthetic oligonucleotide; CTC chr2 60475835 60475856 60475852 60475857 +
cccggattcttttcttccttta

SEQ ID NO: 197524 - DNA, 22 bp, Artificial Sequence
  Synthetic oligonucleotide; TTC chr2 60475844 60475865 60475861 60475866 +
ttttcttcctttaggaagcagg

SEQ ID NO: 197525 - DNA, 22 bp, Artificial Sequence
  Synthetic oligonucleotide; CTT chr2 60475846 60475867 60475863 60475868 +
ttcttcctttaggaagcaggga

SEQ ID NO: 197526 - DNA, 22 bp, Artificial Sequence
  Synthetic oligonucleotide; TTT chr2 60475847 60475868 60475864 60475869 +
tcttcctttaggaagcagggac

SEQ ID NO: 197527 - DNA, 22 bp, Artificial Sequence
  Synthetic oligonucleotide; TTT chr2 60475848 60475869 60475865 60475870 +
cttcctttaggaagcagggact

SEQ ID NO: 197528 - DNA, 22 bp, Artificial Sequence
  Synthetic oligonucleotide; TTC chr2 60475849 60475870 60475866 60475871 +
ttcctttaggaagcagggactt

SEQ ID NO: 197529 - DNA, 22 bp, Artificial Sequence
  Synthetic oligonucleotide; CTT chr2 60475851 60475872 60475868 60475873 +
cctttaggaagcagggacttgt

SEQ ID NO: 197530 - DNA, 22 bp, Artificial Sequence
  Synthetic oligonucleotide; TTC chr2 60475852 60475873 60475869 60475874 +
ctttaggaagcagggacttgtt

SEQ ID NO: 197531 - DNA, 22 bp, Artificial Sequence
  Synthetic oligonucleotide; CTT chr2 60475855 60475876 60475872 60475877 +
taggaagcagggacttgttcct

SEQ ID NO: 197532 - DNA, 22 bp, Artificial Sequence
  Synthetic oligonucleotide; TTT chr2 60475856 60475877 60475873 60475878 +
aggaagcagggacttgttcctc

SEQ ID NO: 197533 - DNA, 22 bp, Artificial Sequence
  Synthetic oligonucleotide; TTA chr2 60475857 60475878 60475874 60475879 +
ggaagcagggacttgttcctct

SEQ ID NO: 197534 - DNA, 22 bp, Artificial Sequence
  Synthetic oligonucleotide; CTT chr2 60475871 60475892 60475888 60475893 +
gttcctctggagagactgctag

SEQ ID NO: 197535 - DNA, 22 bp, Artificial Sequence
  Synthetic oligonucleotide; TTG chr2 60475872 60475893 60475889 60475894 +
ttcctctggagagactgctaga

SEQ ID NO: 197536 - DNA, 22 bp, Artificial Sequence
  Synthetic oligonucleotide; TTC chr2 60475875 60475896 60475892 60475897 +
ctctggagagactgctagagga

SEQ ID NO: 197537 - DNA, 22 bp, Artificial Sequence
  Synthetic oligonucleotide; CTC chr2 60475878 60475899 60475895 60475900 +
tggagagactgctagaggaaag

SEQ ID NO: 197538 - DNA, 22 bp, Artificial Sequence
  Synthetic oligonucleotide; CTG chr2 60475880 60475901 60475897 60475902 +
gagagactgctagaggaaagtc

SEQ ID NO: 197539 - DNA, 22 bp, Artificial Sequence
  Synthetic oligonucleotide; CTG chr2 60475889 60475910 60475906 60475911 +
ctagaggaaagtcaggaaccta

SEQ ID NO: 197540 - DNA, 22 bp, Artificial Sequence
  Synthetic oligonucleotide; CTA chr2 60475892 60475913 60475909 60475914 +
gaggaaagtcaggaacctaagt

SEQ ID NO: 197541 - DNA, 22 bp, Artificial Sequence
  Synthetic oligonucleotide; CTA chr2 60475911 60475932 60475928 60475933 +
agttctgcaaccccaactctgc

SEQ ID NO: 197542 - DNA, 22 bp, Artificial Sequence
  Synthetic oligonucleotide; TTC chr2 60475916 60475937 60475933 60475938 +
tgcaaccccaactctgccactc

SEQ ID NO: 197543 - DNA, 22 bp, Artificial Sequence
  Synthetic oligonucleotide; CTG chr2 60475918 60475939 60475935 60475940 +
caaccccaactctgccactcac

SEQ ID NO: 197544 - DNA, 22 bp, Artificial Sequence
  Synthetic oligonucleotide; CTC chr2 60475930 60475951 60475947 60475952 +
tgccactcaccagctgtttcgt

SEQ ID NO: 197545 - DNA, 22 bp, Artificial Sequence
  Synthetic oligonucleotide; CTG chr2 60475932 60475953 60475949 60475954 +
ccactcaccagctgtttcgtga

SEQ ID NO: 197546 - DNA, 22 bp, Artificial Sequence
  Synthetic oligonucleotide; CTC chr2 60475938 60475959 60475955 60475960 +
accagctgtttcgtgactttga

SEQ ID NO: 197547 - DNA, 22 bp, Artificial Sequence
  Synthetic oligonucleotide; CTG chr2 60475946 60475967 60475963 60475968 +
tttcgtgactttgaataaatcc

SEQ ID NO: 197548 - DNA, 22 bp, Artificial Sequence
  Synthetic oligonucleotide; TTT chr2 60475949 60475970 60475966 60475971 +
cgtgactttgaataaatccttt

SEQ ID NO: 197549 - DNA, 22 bp, Artificial Sequence
  Synthetic oligonucleotide; TTC chr2 60475950 60475971 60475967 60475972 +
gtgactttgaataaatcctttc

SEQ ID NO: 197550 - DNA, 22 bp, Artificial Sequence
  Synthetic oligonucleotide; CTT chr2 60475957 60475978 60475974 60475979 +
tgaataaatcctttctttctgg

SEQ ID NO: 197551 - DNA, 22 bp, Artificial Sequence
  Synthetic oligonucleotide; TTT chr2 60475958 60475979 60475975 60475980 +
gaataaatcctttctttctggc

SEQ ID NO: 197552 - DNA, 22 bp, Artificial Sequence
  Synthetic oligonucleotide; TTG chr2 60475959 60475980 60475976 60475981 +
aataaatcctttctttctggcc

SEQ ID NO: 197553 - DNA, 22 bp, Artificial Sequence
  Synthetic oligonucleotide; CTT chr2 60475970 60475991 60475987 60475992 +
tctttctggccctaagtgtttc

SEQ ID NO: 197554 - DNA, 22 bp, Artificial Sequence
  Synthetic oligonucleotide; TTT chr2 60475971 60475992 60475988 60475993 +
ctttctggccctaagtgtttcc

SEQ ID NO: 197555 - DNA, 22 bp, Artificial Sequence
  Synthetic oligonucleotide; TTC chr2 60475972 60475993 60475989 60475994 +
tttctggccctaagtgtttcca

SEQ ID NO: 197556 - DNA, 22 bp, Artificial Sequence
  Synthetic oligonucleotide; CTT chr2 60475974 60475995 60475991 60475996 +
tctggccctaagtgtttccatc

SEQ ID NO: 197557 - DNA, 22 bp, Artificial Sequence
  Synthetic oligonucleotide; TTT chr2 60475975 60475996 60475992 60475997 +
ctggccctaagtgtttccatct

SEQ ID NO: 197558 - DNA, 22 bp, Artificial Sequence
  Synthetic oligonucleotide; TTC chr2 60475976 60475997 60475993 60475998 +
tggccctaagtgtttccatctt

SEQ ID NO: 197559 - DNA, 22 bp, Artificial Sequence
  Synthetic oligonucleotide; CTG chr2 60475978 60475999 60475995 60476000 +
gccctaagtgtttccatcttta

SEQ ID NO: 197560 - DNA, 22 bp, Artificial Sequence
  Synthetic oligonucleotide; CTA chr2 60475984 60476005 60476001 60476006 +
agtgtttccatctttaaaagga

SEQ ID NO: 197561 - DNA, 22 bp, Artificial Sequence
  Synthetic oligonucleotide; TTT chr2 60475991 60476012 60476008 60476013 +
ccatctttaaaaggagaagact

SEQ ID NO: 197562 - DNA, 22 bp, Artificial Sequence
  Synthetic oligonucleotide; TTC chr2 60475992 60476013 60476009 60476014 +
catctttaaaaggagaagactg

SEQ ID NO: 197563 - DNA, 22 bp, Artificial Sequence
  Synthetic oligonucleotide; CTT chr2 60475998 60476019 60476015 60476020 +
taaaaggagaagactggattag

SEQ ID NO: 197564 - DNA, 22 bp, Artificial Sequence
  Synthetic oligonucleotide; TTT chr2 60475999 60476020 60476016 60476021 +
aaaaggagaagactggattaga

SEQ ID NO: 197565 - DNA, 22 bp, Artificial Sequence
  Synthetic oligonucleotide; TTA chr2 60476000 60476021 60476017 60476022 +
aaaggagaagactggattagat

SEQ ID NO: 197566 - DNA, 22 bp, Artificial Sequence
  Synthetic oligonucleotide; CTG chr2 60476014 60476035 60476031 60476036 +
gattagatggggtggcttctct

SEQ ID NO: 197567 - DNA, 22 bp, Artificial Sequence
  Synthetic oligonucleotide; TTA chr2 60476019 60476040 60476036 60476041 +
gatggggtggcttctctctcct

SEQ ID NO: 197568 - DNA, 22 bp, Artificial Sequence
  Synthetic oligonucleotide; CTT chr2 60476032 60476053 60476049 60476054 +
ctctctcctgcctcccatgcaa

SEQ ID NO: 197569 - DNA, 22 bp, Artificial Sequence
  Synthetic oligonucleotide; TTC chr2 60476033 60476054 60476050 60476055 +
tctctcctgcctcccatgcaag

SEQ ID NO: 197570 - DNA, 22 bp, Artificial Sequence
  Synthetic oligonucleotide; CTC chr2 60476035 60476056 60476052 60476057 +
tctcctgcctcccatgcaagtc

SEQ ID NO: 197571 - DNA, 22 bp, Artificial Sequence
  Synthetic oligonucleotide; CTC chr2 60476037 60476058 60476054 60476059 +
tcctgcctcccatgcaagtcca

SEQ ID NO: 197572 - DNA, 22 bp, Artificial Sequence
  Synthetic oligonucleotide; CTC chr2 60476039 60476060 60476056 60476061 +
ctgcctcccatgcaagtccagg

SEQ ID NO: 197573 - DNA, 22 bp, Artificial Sequence
  Synthetic oligonucleotide; CTG chr2 60476042 60476063 60476059 60476064 +
cctcccatgcaagtccaggcct

SEQ ID NO: 197574 - DNA, 22 bp, Artificial Sequence
  Synthetic oligonucleotide; CTC chr2 60476046 60476067 60476063 60476068 +
ccatgcaagtccaggcctcctt

SEQ ID NO: 197575 - DNA, 22 bp, Artificial Sequence
  Synthetic oligonucleotide; CTC chr2 60476065 60476086 60476082 60476087 +
ctttggaccaaccaagagacct

SEQ ID NO: 197576 - DNA, 22 bp, Artificial Sequence
  Synthetic oligonucleotide; CTT chr2 60476068 60476089 60476085 60476090 +
tggaccaaccaagagacctact

SEQ ID NO: 197577 - DNA, 22 bp, Artificial Sequence
  Synthetic oligonucleotide; TTT chr2 60476069 60476090 60476086 60476091 +
ggaccaaccaagagacctacta

SEQ ID NO: 197578 - DNA, 22 bp, Artificial Sequence
  Synthetic oligonucleotide; TTG chr2 60476070 60476091 60476087 60476092 +
gaccaaccaagagacctactat

SEQ ID NO: 197579 - DNA, 22 bp, Artificial Sequence
  Synthetic oligonucleotide; CTA chr2 60476088 60476109 60476105 60476110 +
ctataggccgtgctagaagctg

SEQ ID NO: 197580 - DNA, 22 bp, Artificial Sequence
  Synthetic oligonucleotide; CTA chr2 60476091 60476112 60476108 60476113 +
taggccgtgctagaagctggcc

SEQ ID NO: 197581 - DNA, 22 bp, Artificial Sequence
  Synthetic oligonucleotide; CTA chr2 60476103 60476124 60476120 60476125 +
gaagctggccaggatacacctg

SEQ ID NO: 197582 - DNA, 22 bp, Artificial Sequence
  Synthetic oligonucleotide; CTG chr2 60476110 60476131 60476127 60476132 +
gccaggatacacctgttcccct

SEQ ID NO: 197583 - DNA, 22 bp, Artificial Sequence
  Synthetic oligonucleotide; CTG chr2 60476125 60476146 60476142 60476147 +
ttcccctcatgaccttgacctg

SEQ ID NO: 197584 - DNA, 22 bp, Artificial Sequence
  Synthetic oligonucleotide; TTC chr2 60476128 60476149 60476145 60476150 +
ccctcatgaccttgacctggat

SEQ ID NO: 197585 - DNA, 22 bp, Artificial Sequence
  Synthetic oligonucleotide; CTC chr2 60476133 60476154 60476150 60476155 +
atgaccttgacctggatgagga

SEQ ID NO: 197586 - DNA, 22 bp, Artificial Sequence
  Synthetic oligonucleotide; CTT chr2 60476141 60476162 60476158 60476163 +
gacctggatgaggagggcctta

SEQ ID NO: 197587 - DNA, 22 bp, Artificial Sequence
  Synthetic oligonucleotide; TTG chr2 60476142 60476163 60476159 60476164 +
acctggatgaggagggccttat

SEQ ID NO: 197588 - DNA, 22 bp, Artificial Sequence
  Synthetic oligonucleotide; CTG chr2 60476147 60476168 60476164 60476169 +
gatgaggagggccttataggag

SEQ ID NO: 197589 - DNA, 22 bp, Artificial Sequence
  Synthetic oligonucleotide; CTT chr2 60476162 60476183 60476179 60476184 +
ataggagagttcagggctgggc

SEQ ID NO: 197590 - DNA, 22 bp, Artificial Sequence
  Synthetic oligonucleotide; TTA chr2 60476163 60476184 60476180 60476185 +
taggagagttcagggctgggct

SEQ ID NO: 197591 - DNA, 22 bp, Artificial Sequence
  Synthetic oligonucleotide; TTC chr2 60476174 60476195 60476191 60476196 +
agggctgggcttggtccccagg

SEQ ID NO: 197592 - DNA, 22 bp, Artificial Sequence
  Synthetic oligonucleotide; CTG chr2 60476181 60476202 60476198 60476203 +
ggcttggtccccaggctaatcc

SEQ ID NO: 197593 - DNA, 22 bp, Artificial Sequence
  Synthetic oligonucleotide; CTT chr2 60476186 60476207 60476203 60476208 +
ggtccccaggctaatccttagg

SEQ ID NO: 197594 - DNA, 22 bp, Artificial Sequence
  Synthetic oligonucleotide; TTG chr2 60476187 60476208 60476204 60476209 +
gtccccaggctaatccttaggc

SEQ ID NO: 197595 - DNA, 22 bp, Artificial Sequence
  Synthetic oligonucleotide; CTA chr2 60476199 60476220 60476216 60476221 +
atccttaggcttagagagtgag

SEQ ID NO: 197596 - DNA, 22 bp, Artificial Sequence
  Synthetic oligonucleotide; CTT chr2 60476205 60476226 60476222 60476227 +
aggcttagagagtgagcctgat

SEQ ID NO: 197597 - DNA, 22 bp, Artificial Sequence
  Synthetic oligonucleotide; TTA chr2 60476206 60476227 60476223 60476228 +
ggcttagagagtgagcctgatg

SEQ ID NO: 197598 - DNA, 22 bp, Artificial Sequence
  Synthetic oligonucleotide; CTT chr2 60476211 60476232 60476228 60476233 +
agagagtgagcctgatgatgga

SEQ ID NO: 197599 - DNA, 22 bp, Artificial Sequence
  Synthetic oligonucleotide; TTA chr2 60476212 60476233 60476229 60476234 +
gagagtgagcctgatgatggat

SEQ ID NO: 197600 - DNA, 22 bp, Artificial Sequence
  Synthetic oligonucleotide; CTG chr2 60476225 60476246 60476242 60476247 +
atgatggatttcaacctcctgg

SEQ ID NO: 197601 - DNA, 22 bp, Artificial Sequence
  Synthetic oligonucleotide; TTT chr2 60476236 60476257 60476253 60476258 +
caacctcctgggacacagtctt

SEQ ID NO: 197602 - DNA, 22 bp, Artificial Sequence
  Synthetic oligonucleotide; TTC chr2 60476237 60476258 60476254 60476259 +
aacctcctgggacacagtcttg

SEQ ID NO: 197603 - DNA, 22 bp, Artificial Sequence
  Synthetic oligonucleotide; CTC chr2 60476243 60476264 60476260 60476265 +
ctgggacacagtcttgcaaagt

SEQ ID NO: 197604 - DNA, 22 bp, Artificial Sequence
  Synthetic oligonucleotide; CTG chr2 60476246 60476267 60476263 60476268 +
ggacacagtcttgcaaagttta

SEQ ID NO: 197605 - DNA, 22 bp, Artificial Sequence
  Synthetic oligonucleotide; CTT chr2 60476258 60476279 60476275 60476280 +
gcaaagtttacatgtctgagct

SEQ ID NO: 197606 - DNA, 22 bp, Artificial Sequence
  Synthetic oligonucleotide; TTG chr2 60476259 60476280 60476276 60476281 +
caaagtttacatgtctgagctt

SEQ ID NO: 197607 - DNA, 22 bp, Artificial Sequence
  Synthetic oligonucleotide; TTT chr2 60476267 60476288 60476284 60476289 +
acatgtctgagcttcaaggagg

SEQ ID NO: 197608 - DNA, 22 bp, Artificial Sequence
  Synthetic oligonucleotide; TTA chr2 60476268 60476289 60476285 60476290 +
catgtctgagcttcaaggagga

SEQ ID NO: 197609 - DNA, 22 bp, Artificial Sequence
  Synthetic oligonucleotide; CTG chr2 60476276 60476297 60476293 60476298 +
agcttcaaggaggaaacctagg

SEQ ID NO: 197610 - DNA, 22 bp, Artificial Sequence
  Synthetic oligonucleotide; CTT chr2 60476281 60476302 60476298 60476303 +
caaggaggaaacctaggtgtgt

SEQ ID NO: 197611 - DNA, 22 bp, Artificial Sequence
  Synthetic oligonucleotide; TTC chr2 60476282 60476303 60476299 60476304 +
aaggaggaaacctaggtgtgtc

SEQ ID NO: 197612 - DNA, 22 bp, Artificial Sequence
  Synthetic oligonucleotide; CTA chr2 60476296 60476317 60476313 60476318 +
ggtgtgtcctgagccaatgaga

SEQ ID NO: 197613 - DNA, 22 bp, Artificial Sequence
  Synthetic oligonucleotide; CTG chr2 60476307 60476328 60476324 60476329 +
agccaatgagactgaaggtcag

SEQ ID NO: 197614 - DNA, 22 bp, Artificial Sequence
  Synthetic oligonucleotide; CTG chr2 60476321 60476342 60476338 60476343 +
aaggtcagagaaccaggaagaa

SEQ ID NO: 197615 - DNA, 22 bp, Artificial Sequence
  Synthetic oligonucleotide; CTT chr2 60476347 60476368 60476364 60476369 +
ccccaaacccaggctaaatgtc

SEQ ID NO: 197616 - DNA, 22 bp, Artificial Sequence
  Synthetic oligonucleotide; TTC chr2 60476348 60476369 60476365 60476370 +
cccaaacccaggctaaatgtca

SEQ ID NO: 197617 - DNA, 22 bp, Artificial Sequence
  Synthetic oligonucleotide; CTA chr2 60476363 60476384 60476380 60476385 +
aatgtcaagggaaaaggtctca

SEQ ID NO: 197618 - DNA, 22 bp, Artificial Sequence
  Synthetic oligonucleotide; CTC chr2 60476384 60476405 60476401 60476406 +
agtggctcatgccagaagtcca

SEQ ID NO: 197619 - DNA, 22 bp, Artificial Sequence
  Synthetic oligonucleotide; CTC chr2 60476392 60476413 60476409 60476414 +
atgccagaagtccagtagcaaa

SEQ ID NO: 197620 - DNA, 22 bp, Artificial Sequence
  Synthetic oligonucleotide; CTC chr2 60476418 60476439 60476435 60476440 +
ggcctcatgccagagcctggca

SEQ ID NO: 197621 - DNA, 22 bp, Artificial Sequence
  Synthetic oligonucleotide; CTC chr2 60476424 60476445 60476441 60476446 +
atgccagagcctggcacccatt

SEQ ID NO: 197622 - DNA, 22 bp, Artificial Sequence
  Synthetic oligonucleotide; CTG chr2 60476437 60476458 60476454 60476459 +
gcacccattgctcacaaaggca

SEQ ID NO: 197623 - DNA, 22 bp, Artificial Sequence
  Synthetic oligonucleotide; TTG chr2 60476447 60476468 60476464 60476469 +
ctcacaaaggcacacacaggac

SEQ ID NO: 197624 - DNA, 22 bp, Artificial Sequence
  Synthetic oligonucleotide; CTC chr2 60476450 60476471 60476467 60476472 +
acaaaggcacacacaggactct

SEQ ID NO: 197625 - DNA, 22 bp, Artificial Sequence
  Synthetic oligonucleotide; CTC chr2 60476471 60476492 60476488 60476493 +
taagaaaagggagtcctctccc

SEQ ID NO: 197626 - DNA, 22 bp, Artificial Sequence
  Synthetic oligonucleotide; CTA chr2 60476473 60476494 60476490 60476495 +
agaaaagggagtcctctcccca

SEQ ID NO: 197627 - DNA, 22 bp, Artificial Sequence
  Synthetic oligonucleotide; CTC chr2 60476489 60476510 60476506 60476511 +
tccccagccaccacaaaccagg

SEQ ID NO: 197628 - DNA, 22 bp, Artificial Sequence
  Synthetic oligonucleotide; CTC chr2 60476491 60476512 60476508 60476513 +
cccagccaccacaaaccaggac

SEQ ID NO: 197629 - DNA, 22 bp, Artificial Sequence
  Synthetic oligonucleotide; CTG chr2 60476532 60476553 60476549 60476554 +
tggtccttgacctcccaccaca

SEQ ID NO: 197630 - DNA, 22 bp, Artificial Sequence
  Synthetic oligonucleotide; CTT chr2 60476540 60476561 60476557 60476562 +
gacctcccaccacaccccatca

SEQ ID NO: 197631 - DNA, 22 bp, Artificial Sequence
  Synthetic oligonucleotide; TTG chr2 60476541 60476562 60476558 60476563 +
acctcccaccacaccccatcag

SEQ ID NO: 197632 - DNA, 22 bp, Artificial Sequence
  Synthetic oligonucleotide; CTC chr2 60476546 60476567 60476563 60476568 +
ccaccacaccccatcagcatgg

SEQ ID NO: 197633 - DNA, 22 bp, Artificial Sequence
  Synthetic oligonucleotide; TTC chr2 60476575 60476596 60476592 60476597 +
ttggaaagccatgtgtaaaatg

SEQ ID NO: 197634 - DNA, 22 bp, Artificial Sequence
  Synthetic oligonucleotide; CTT chr2 60476577 60476598 60476594 60476599 +
ggaaagccatgtgtaaaatgaa

SEQ ID NO: 197635 - DNA, 22 bp, Artificial Sequence
  Synthetic oligonucleotide; TTG chr2 60476578 60476599 60476595 60476600 +
gaaagccatgtgtaaaatgaat

SEQ ID NO: 197636 - DNA, 22 bp, Artificial Sequence
  Synthetic oligonucleotide; TTT chr2 60476602 60476623 60476619 60476624 +
ctgtaaaataaatcatatttgc

SEQ ID NO: 197637 - DNA, 22 bp, Artificial Sequence
  Synthetic oligonucleotide; TTC chr2 60476603 60476624 60476620 60476625 +
tgtaaaataaatcatatttgct

SEQ ID NO: 197638 - DNA, 22 bp, Artificial Sequence
  Synthetic oligonucleotide; CTG chr2 60476605 60476626 60476622 60476627 +
taaaataaatcatatttgctaa

SEQ ID NO: 197639 - DNA, 22 bp, Artificial Sequence
  Synthetic oligonucleotide; TTT chr2 60476622 60476643 60476639 60476644 +
gctaaccaacataatttcagag

SEQ ID NO: 197640 - DNA, 22 bp, Artificial Sequence
  Synthetic oligonucleotide; TTG chr2 60476623 60476644 60476640 60476645 +
ctaaccaacataatttcagaga

SEQ ID NO: 197641 - DNA, 22 bp, Artificial Sequence
  Synthetic oligonucleotide; CTA chr2 60476626 60476647 60476643 60476648 +
accaacataatttcagagatgt

SEQ ID NO: 197642 - DNA, 22 bp, Artificial Sequence
  Synthetic oligonucleotide; TTT chr2 60476639 60476660 60476656 60476661 +
cagagatgtttcgtcacccttc

SEQ ID NO: 197643 - DNA, 22 bp, Artificial Sequence
  Synthetic oligonucleotide; TTC chr2 60476640 60476661 60476657 60476662 +
agagatgtttcgtcacccttcc

SEQ ID NO: 197644 - DNA, 22 bp, Artificial Sequence
  Synthetic oligonucleotide; TTT chr2 60476650 60476671 60476667 60476672 +
cgtcacccttccaggctcattg

SEQ ID NO: 197645 - DNA, 22 bp, Artificial Sequence
  Synthetic oligonucleotide; TTC chr2 60476651 60476672 60476668 60476673 +
gtcacccttccaggctcattga

SEQ ID NO: 197646 - DNA, 22 bp, Artificial Sequence
  Synthetic oligonucleotide; CTT chr2 60476660 60476681 60476677 60476682 +
ccaggctcattgaaaattggca

SEQ ID NO: 197647 - DNA, 22 bp, Artificial Sequence
  Synthetic oligonucleotide; TTC chr2 60476661 60476682 60476678 60476683 +
caggctcattgaaaattggcag

SEQ ID NO: 197648 - DNA, 22 bp, Artificial Sequence
  Synthetic oligonucleotide; CTC chr2 60476668 60476689 60476685 60476690 +
attgaaaattggcagggcttct

SEQ ID NO: 197649 - DNA, 22 bp, Artificial Sequence
  Synthetic oligonucleotide; TTG chr2 60476672 60476693 60476689 60476694 +
aaaattggcagggcttctaaca

SEQ ID NO: 197650 - DNA, 22 bp, Artificial Sequence
  Synthetic oligonucleotide; TTG chr2 60476679 60476700 60476696 60476701 +
gcagggcttctaacattttacc

SEQ ID NO: 197651 - DNA, 22 bp, Artificial Sequence
  Synthetic oligonucleotide; CTT chr2 60476688 60476709 60476705 60476710 +
ctaacattttaccttttaagtg

SEQ ID NO: 197652 - DNA, 22 bp, Artificial Sequence
  Synthetic oligonucleotide; TTC chr2 60476689 60476710 60476706 60476711 +
taacattttaccttttaagtgt

SEQ ID NO: 197653 - DNA, 22 bp, Artificial Sequence
  Synthetic oligonucleotide; CTA chr2 60476691 60476712 60476708 60476713 +
acattttaccttttaagtgtgt

SEQ ID NO: 197654 - DNA, 22 bp, Artificial Sequence
  Synthetic oligonucleotide; TTT chr2 60476697 60476718 60476714 60476719 +
taccttttaagtgtgtcttcct

SEQ ID NO: 197655 - DNA, 22 bp, Artificial Sequence
  Synthetic oligonucleotide; TTT chr2 60476698 60476719 60476715 60476720 +
accttttaagtgtgtcttcctt

SEQ ID NO: 197656 - DNA, 22 bp, Artificial Sequence
  Synthetic oligonucleotide; TTA chr2 60476699 60476720 60476716 60476721 +
ccttttaagtgtgtcttccttc

SEQ ID NO: 197657 - DNA, 22 bp, Artificial Sequence
  Synthetic oligonucleotide; CTT chr2 60476703 60476724 60476720 60476725 +
ttaagtgtgtcttccttccccc

SEQ ID NO: 197658 - DNA, 22 bp, Artificial Sequence
  Synthetic oligonucleotide; TTT chr2 60476704 60476725 60476721 60476726 +
taagtgtgtcttccttccccca

SEQ ID NO: 197659 - DNA, 22 bp, Artificial Sequence
  Synthetic oligonucleotide; TTT chr2 60476705 60476726 60476722 60476727 +
aagtgtgtcttccttcccccaa

SEQ ID NO: 197660 - DNA, 22 bp, Artificial Sequence
  Synthetic oligonucleotide; TTA chr2 60476706 60476727 60476723 60476728 +
agtgtgtcttccttcccccaac

SEQ ID NO: 197661 - DNA, 22 bp, Artificial Sequence
  Synthetic oligonucleotide; CTT chr2 60476716 60476737 60476733 60476738 +
ccttcccccaacccccaatatc

SEQ ID NO: 197662 - DNA, 22 bp, Artificial Sequence
  Synthetic oligonucleotide; TTC chr2 60476717 60476738 60476734 60476739 +
cttcccccaacccccaatatcc

SEQ ID NO: 197663 - DNA, 22 bp, Artificial Sequence
  Synthetic oligonucleotide; CTT chr2 60476720 60476741 60476737 60476742 +
cccccaacccccaatatcctct

SEQ ID NO: 197664 - DNA, 22 bp, Artificial Sequence
  Synthetic oligonucleotide; TTC chr2 60476721 60476742 60476738 60476743 +
ccccaacccccaatatcctctc

SEQ ID NO: 197665 - DNA, 22 bp, Artificial Sequence
  Synthetic oligonucleotide; CTC chr2 60476741 60476762 60476758 60476763 +
tctgtcaagtagttaatgatct

SEQ ID NO: 197666 - DNA, 22 bp, Artificial Sequence
  Synthetic oligonucleotide; CTC chr2 60476743 60476764 60476760 60476765 +
tgtcaagtagttaatgatctgt

SEQ ID NO: 197667 - DNA, 22 bp, Artificial Sequence
  Synthetic oligonucleotide; CTG chr2 60476745 60476766 60476762 60476767 +
tcaagtagttaatgatctgtaa

SEQ ID NO: 197668 - DNA, 22 bp, Artificial Sequence
  Synthetic oligonucleotide; TTA chr2 60476756 60476777 60476773 60476778 +
atgatctgtaaacaaacacttt

SEQ ID NO: 197669 - DNA, 22 bp, Artificial Sequence
  Synthetic oligonucleotide; CTG chr2 60476764 60476785 60476781 60476786 +
taaacaaacactttaaattcag

SEQ ID NO: 197670 - DNA, 22 bp, Artificial Sequence
  Synthetic oligonucleotide; CTT chr2 60476777 60476798 60476794 60476799 +
taaattcagtgggggagctcac

SEQ ID NO: 197671 - DNA, 22 bp, Artificial Sequence
  Synthetic oligonucleotide; TTT chr2 60476778 60476799 60476795 60476800 +
aaattcagtgggggagctcact

SEQ ID NO: 197672 - DNA, 22 bp, Artificial Sequence
  Synthetic oligonucleotide; TTA chr2 60476779 60476800 60476796 60476801 +
aattcagtgggggagctcacta

SEQ ID NO: 197673 - DNA, 22 bp, Artificial Sequence
  Synthetic oligonucleotide; TTC chr2 60476784 60476805 60476801 60476806 +
agtgggggagctcactatttaa

SEQ ID NO: 197674 - DNA, 22 bp, Artificial Sequence
  Synthetic oligonucleotide; CTC chr2 60476797 60476818 60476814 60476819 +
actatttaaagaaaccctgtgg

SEQ ID NO: 197675 - DNA, 22 bp, Artificial Sequence
  Synthetic oligonucleotide; CTA chr2 60476801 60476822 60476818 60476823 +
tttaaagaaaccctgtggtgaa

SEQ ID NO: 197676 - DNA, 22 bp, Artificial Sequence
  Synthetic oligonucleotide; TTT chr2 60476804 60476825 60476821 60476826 +
aaagaaaccctgtggtgaaacc

SEQ ID NO: 197677 - DNA, 22 bp, Artificial Sequence
  Synthetic oligonucleotide; TTA chr2 60476805 60476826 60476822 60476827 +
aagaaaccctgtggtgaaacct

SEQ ID NO: 197678 - DNA, 22 bp, Artificial Sequence
  Synthetic oligonucleotide; CTG chr2 60476816 60476837 60476833 60476838 +
tggtgaaaccttttgaaaagtt

SEQ ID NO: 197679 - DNA, 22 bp, Artificial Sequence
  Synthetic oligonucleotide; CTT chr2 60476828 60476849 60476845 60476850 +
ttgaaaagttaacaatctttct

SEQ ID NO: 197680 - DNA, 22 bp, Artificial Sequence
  Synthetic oligonucleotide; TTT chr2 60476829 60476850 60476846 60476851 +
tgaaaagttaacaatctttctg

SEQ ID NO: 197681 - DNA, 22 bp, Artificial Sequence
  Synthetic oligonucleotide; TTT chr2 60476830 60476851 60476847 60476852 +
gaaaagttaacaatctttctgt

SEQ ID NO: 197682 - DNA, 22 bp, Artificial Sequence
  Synthetic oligonucleotide; TTG chr2 60476831 60476852 60476848 60476853 +
aaaagttaacaatctttctgta

SEQ ID NO: 197683 - DNA, 22 bp, Artificial Sequence
  Synthetic oligonucleotide; TTA chr2 60476839 60476860 60476856 60476861 +
acaatctttctgtaatgtgaaa

SEQ ID NO: 197684 - DNA, 22 bp, Artificial Sequence
  Synthetic oligonucleotide; CTT chr2 60476847 60476868 60476864 60476869 +
tctgtaatgtgaaaaatcactc

SEQ ID NO: 197685 - DNA, 22 bp, Artificial Sequence
  Synthetic oligonucleotide; TTT chr2 60476848 60476869 60476865 60476870 +
ctgtaatgtgaaaaatcactct

SEQ ID NO: 197686 - DNA, 22 bp, Artificial Sequence
  Synthetic oligonucleotide; TTC chr2 60476849 60476870 60476866 60476871 +
tgtaatgtgaaaaatcactctc

SEQ ID NO: 197687 - DNA, 22 bp, Artificial Sequence
  Synthetic oligonucleotide; CTG chr2 60476851 60476872 60476868 60476873 +
taatgtgaaaaatcactctcta

SEQ ID NO: 197688 - DNA, 22 bp, Artificial Sequence
  Synthetic oligonucleotide; CTC chr2 60476869 60476890 60476886 60476891 +
tctaatttatcagtttccatta

SEQ ID NO: 197689 - DNA, 22 bp, Artificial Sequence
  Synthetic oligonucleotide; CTC chr2 60476871 60476892 60476888 60476893 +
taatttatcagtttccattaat

SEQ ID NO: 197690 - DNA, 22 bp, Artificial Sequence
  Synthetic oligonucleotide; CTA chr2 60476873 60476894 60476890 60476895 +
atttatcagtttccattaatga

SEQ ID NO: 197691 - DNA, 22 bp, Artificial Sequence
  Synthetic oligonucleotide; TTT chr2 60476877 60476898 60476894 60476899 +
atcagtttccattaatgagatt

SEQ ID NO: 197692 - DNA, 22 bp, Artificial Sequence
  Synthetic oligonucleotide; TTA chr2 60476878 60476899 60476895 60476900 +
tcagtttccattaatgagattt

SEQ ID NO: 197693 - DNA, 22 bp, Artificial Sequence
  Synthetic oligonucleotide; TTT chr2 60476885 60476906 60476902 60476907 +
ccattaatgagatttttgtgtg

SEQ ID NO: 197694 - DNA, 22 bp, Artificial Sequence
  Synthetic oligonucleotide; TTC chr2 60476886 60476907 60476903 60476908 +
cattaatgagatttttgtgtgt

SEQ ID NO: 197695 - DNA, 22 bp, Artificial Sequence
  Synthetic oligonucleotide; TTA chr2 60476891 60476912 60476908 60476913 +
atgagatttttgtgtgtattgg

SEQ ID NO: 197696 - DNA, 22 bp, Artificial Sequence
  Synthetic oligonucleotide; TTT chr2 60476900 60476921 60476917 60476922 +
ttgtgtgtattgggccttctga

SEQ ID NO: 197697 - DNA, 22 bp, Artificial Sequence
  Synthetic oligonucleotide; TTT chr2 60476901 60476922 60476918 60476923 +
tgtgtgtattgggccttctgaa

SEQ ID NO: 197698 - DNA, 22 bp, Artificial Sequence
  Synthetic oligonucleotide; TTT chr2 60476902 60476923 60476919 60476924 +
gtgtgtattgggccttctgaaa

SEQ ID NO: 197699 - DNA, 22 bp, Artificial Sequence
  Synthetic oligonucleotide; TTG chr2 60476903 60476924 60476920 60476925 +
tgtgtattgggccttctgaaag

SEQ ID NO: 197700 - DNA, 22 bp, Artificial Sequence
  Synthetic oligonucleotide; TTG chr2 60476912 60476933 60476929 60476934 +
ggccttctgaaagtggggctca

SEQ ID NO: 197701 - DNA, 22 bp, Artificial Sequence
  Synthetic oligonucleotide; CTT chr2 60476918 60476939 60476935 60476940 +
ctgaaagtggggctcaactgca

SEQ ID NO: 197702 - DNA, 22 bp, Artificial Sequence
  Synthetic oligonucleotide; TTC chr2 60476919 60476940 60476936 60476941 +
tgaaagtggggctcaactgcaa

SEQ ID NO: 197703 - DNA, 22 bp, Artificial Sequence
  Synthetic oligonucleotide; CTG chr2 60476921 60476942 60476938 60476943 +
aaagtggggctcaactgcaatc

SEQ ID NO: 197704 - DNA, 22 bp, Artificial Sequence
  Synthetic oligonucleotide; CTC chr2 60476933 60476954 60476950 60476955 +
aactgcaatccatgcctttgta

SEQ ID NO: 197705 - DNA, 22 bp, Artificial Sequence
  Synthetic oligonucleotide; CTG chr2 60476938 60476959 60476955 60476960 +
caatccatgcctttgtagttag

SEQ ID NO: 197706 - DNA, 22 bp, Artificial Sequence
  Synthetic oligonucleotide; CTT chr2 60476951 60476972 60476968 60476973 +
tgtagttagaagggacgataaa

SEQ ID NO: 197707 - DNA, 22 bp, Artificial Sequence
  Synthetic oligonucleotide; TTT chr2 60476952 60476973 60476969 60476974 +
gtagttagaagggacgataaaa

SEQ ID NO: 197708 - DNA, 22 bp, Artificial Sequence
  Synthetic oligonucleotide; TTG chr2 60476953 60476974 60476970 60476975 +
tagttagaagggacgataaaag

SEQ ID NO: 197709 - DNA, 22 bp, Artificial Sequence
  Synthetic oligonucleotide; TTA chr2 60476959 60476980 60476976 60476981 +
gaagggacgataaaagacactg

SEQ ID NO: 197710 - DNA, 22 bp, Artificial Sequence
  Synthetic oligonucleotide; CTG chr2 60476981 60477002 60476998 60477003 +
ccctgaacatatttctgtcacc

SEQ ID NO: 197711 - DNA, 22 bp, Artificial Sequence
  Synthetic oligonucleotide; CTG chr2 60476986 60477007 60477003 60477008 +
aacatatttctgtcacccgaat

SEQ ID NO: 197712 - DNA, 22 bp, Artificial Sequence
  Synthetic oligonucleotide; TTT chr2 60476995 60477016 60477012 60477017 +
ctgtcacccgaattgtccagct

SEQ ID NO: 197713 - DNA, 22 bp, Artificial Sequence
  Synthetic oligonucleotide; TTC chr2 60476996 60477017 60477013 60477018 +
tgtcacccgaattgtccagctt

SEQ ID NO: 197714 - DNA, 22 bp, Artificial Sequence
  Synthetic oligonucleotide; CTG chr2 60476998 60477019 60477015 60477020 +
tcacccgaattgtccagcttca

SEQ ID NO: 197715 - DNA, 22 bp, Artificial Sequence
  Synthetic oligonucleotide; TTG chr2 60477010 60477031 60477027 60477032 +
tccagcttcacacaaacgtatc

SEQ ID NO: 197716 - DNA, 22 bp, Artificial Sequence
  Synthetic oligonucleotide; CTT chr2 60477018 60477039 60477035 60477040 +
cacacaaacgtatcacaaacac

SEQ ID NO: 197717 - DNA, 22 bp, Artificial Sequence
  Synthetic oligonucleotide; TTC chr2 60477019 60477040 60477036 60477041 +
acacaaacgtatcacaaacacc

SEQ ID NO: 197718 - DNA, 22 bp, Artificial Sequence
  Synthetic oligonucleotide; CTC chr2 60477051 60477072 60477068 60477073 +
cctgccccactcgagaaatgaa

SEQ ID NO: 197719 - DNA, 22 bp, Artificial Sequence
  Synthetic oligonucleotide; CTG chr2 60477055 60477076 60477072 60477077 +
ccccactcgagaaatgaagaaa

SEQ ID NO: 197720 - DNA, 22 bp, Artificial Sequence
  Synthetic oligonucleotide; CTC chr2 60477063 60477084 60477080 60477085 +
gagaaatgaagaaaaggatggg

SEQ ID NO: 197721 - DNA, 22 bp, Artificial Sequence
  Synthetic oligonucleotide; TTT chr2 60477097 60477118 60477114 60477119 +
ggacacctggaaagccttgcaa

SEQ ID NO: 197722 - DNA, 22 bp, Artificial Sequence
  Synthetic oligonucleotide; TTG chr2 60477098 60477119 60477115 60477120 +
gacacctggaaagccttgcaaa

SEQ ID NO: 197723 - DNA, 22 bp, Artificial Sequence
  Synthetic oligonucleotide; CTG chr2 60477106 60477127 60477123 60477128 +
gaaagccttgcaaaccacactt

SEQ ID NO: 197724 - DNA, 22 bp, Artificial Sequence
  Synthetic oligonucleotide; CTT chr2 60477115 60477136 60477132 60477137 +
gcaaaccacacttgcgtttctc

SEQ ID NO: 197725 - DNA, 22 bp, Artificial Sequence
  Synthetic oligonucleotide; TTG chr2 60477116 60477137 60477133 60477138 +
caaaccacacttgcgtttctcc

SEQ ID NO: 197726 - DNA, 22 bp, Artificial Sequence
  Synthetic oligonucleotide; CTT chr2 60477128 60477149 60477145 60477150 +
gcgtttctcccaggttaagtat

SEQ ID NO: 197727 - DNA, 22 bp, Artificial Sequence
  Synthetic oligonucleotide; TTG chr2 60477129 60477150 60477146 60477151 +
cgtttctcccaggttaagtatt

SEQ ID NO: 197728 - DNA, 22 bp, Artificial Sequence
  Synthetic oligonucleotide; TTT chr2 60477134 60477155 60477151 60477156 +
ctcccaggttaagtattagata

SEQ ID NO: 197729 - DNA, 22 bp, Artificial Sequence
  Synthetic oligonucleotide; TTC chr2 60477135 60477156 60477152 60477157 +
tcccaggttaagtattagatac

SEQ ID NO: 197730 - DNA, 22 bp, Artificial Sequence
  Synthetic oligonucleotide; CTC chr2 60477137 60477158 60477154 60477159 +
ccaggttaagtattagatacct

SEQ ID NO: 197731 - DNA, 22 bp, Artificial Sequence
  Synthetic oligonucleotide; TTA chr2 60477145 60477166 60477162 60477167 +
agtattagatacctgaggaagg

SEQ ID NO: 197732 - DNA, 22 bp, Artificial Sequence
  Synthetic oligonucleotide; TTA chr2 60477152 60477173 60477169 60477174 +
gatacctgaggaaggtgaaata

SEQ ID NO: 197733 - DNA, 22 bp, Artificial Sequence
  Synthetic oligonucleotide; CTG chr2 60477160 60477181 60477177 60477182 +
aggaaggtgaaatacgcatttt

SEQ ID NO: 197734 - DNA, 22 bp, Artificial Sequence
  Synthetic oligonucleotide; TTT chr2 60477181 60477202 60477198 60477203 +
tcaactgagcattcaggaagag

SEQ ID NO: 197735 - DNA, 22 bp, Artificial Sequence
  Synthetic oligonucleotide; TTT chr2 60477182 60477203 60477199 60477204 +
caactgagcattcaggaagagg

SEQ ID NO: 197736 - DNA, 22 bp, Artificial Sequence
  Synthetic oligonucleotide; TTC chr2 60477183 60477204 60477200 60477205 +
aactgagcattcaggaagaggc

SEQ ID NO: 197737 - DNA, 22 bp, Artificial Sequence
  Synthetic oligonucleotide; CTG chr2 60477188 60477209 60477205 60477210 +
agcattcaggaagaggcatggg

SEQ ID NO: 197738 - DNA, 22 bp, Artificial Sequence
  Synthetic oligonucleotide; TTC chr2 60477195 60477216 60477212 60477217 +
aggaagaggcatggggctgtga

SEQ ID NO: 197739 - DNA, 22 bp, Artificial Sequence
  Synthetic oligonucleotide; CTG chr2 60477214 60477235 60477231 60477236 +
tgaagatggatgcgatgagaat

SEQ ID NO: 197740 - DNA, 22 bp, Artificial Sequence
  Synthetic oligonucleotide; TTT chr2 60477244 60477265 60477261 60477266 +
gcaaacgtttgattctgataac

SEQ ID NO: 197741 - DNA, 22 bp, Artificial Sequence
  Synthetic oligonucleotide; TTG chr2 60477245 60477266 60477262 60477267 +
caaacgtttgattctgataaca

SEQ ID NO: 197742 - DNA, 22 bp, Artificial Sequence
  Synthetic oligonucleotide; TTT chr2 60477254 60477275 60477271 60477276 +
gattctgataacacctgccaga

SEQ ID NO: 197743 - DNA, 22 bp, Artificial Sequence
  Synthetic oligonucleotide; TTG chr2 60477255 60477276 60477272 60477277 +
attctgataacacctgccagag

SEQ ID NO: 197744 - DNA, 22 bp, Artificial Sequence
  Synthetic oligonucleotide; TTC chr2 60477259 60477280 60477276 60477281 +
tgataacacctgccagagcaga

SEQ ID NO: 197745 - DNA, 22 bp, Artificial Sequence
  Synthetic oligonucleotide; CTG chr2 60477261 60477282 60477278 60477283 +
ataacacctgccagagcagaga

SEQ ID NO: 197746 - DNA, 22 bp, Artificial Sequence
  Synthetic oligonucleotide; CTG chr2 60477271 60477292 60477288 60477293 +
ccagagcagagaagggcttgtc

SEQ ID NO: 197747 - DNA, 22 bp, Artificial Sequence
  Synthetic oligonucleotide; CTT chr2 60477290 60477311 60477307 60477312 +
gtctatcaaagccagcagaaca

SEQ ID NO: 197748 - DNA, 22 bp, Artificial Sequence
  Synthetic oligonucleotide; TTG chr2 60477291 60477312 60477308 60477313 +
tctatcaaagccagcagaacac

SEQ ID NO: 197749 - DNA, 22 bp, Artificial Sequence
  Synthetic oligonucleotide; CTA chr2 60477295 60477316 60477312 60477317 +
tcaaagccagcagaacacacaa

SEQ ID NO: 197750 - DNA, 22 bp, Artificial Sequence
  Synthetic oligonucleotide; CTC chr2 60477320 60477341 60477337 60477342 +
ccaaattactctgaagaccacc

SEQ ID NO: 197751 - DNA, 22 bp, Artificial Sequence
  Synthetic oligonucleotide; TTA chr2 60477328 60477349 60477345 60477350 +
ctctgaagaccaccccaagcct

SEQ ID NO: 197752 - DNA, 22 bp, Artificial Sequence
  Synthetic oligonucleotide; CTC chr2 60477331 60477352 60477348 60477353 +
tgaagaccaccccaagcctttt

SEQ ID NO: 197753 - DNA, 22 bp, Artificial Sequence
  Synthetic oligonucleotide; CTG chr2 60477333 60477354 60477350 60477355 +
aagaccaccccaagccttttta

SEQ ID NO: 197754 - DNA, 22 bp, Artificial Sequence
  Synthetic oligonucleotide; CTT chr2 60477351 60477372 60477368 60477373 +
tttatctgcatcaactcacaac

SEQ ID NO: 197755 - DNA, 22 bp, Artificial Sequence
  Synthetic oligonucleotide; TTT chr2 60477352 60477373 60477369 60477374 +
ttatctgcatcaactcacaaca

SEQ ID NO: 197756 - DNA, 22 bp, Artificial Sequence
  Synthetic oligonucleotide; TTT chr2 60477353 60477374 60477370 60477375 +
tatctgcatcaactcacaacaa

SEQ ID NO: 197757 - DNA, 22 bp, Artificial Sequence
  Synthetic oligonucleotide; TTT chr2 60477354 60477375 60477371 60477376 +
atctgcatcaactcacaacaaa

SEQ ID NO: 197758 - DNA, 22 bp, Artificial Sequence
  Synthetic oligonucleotide; TTA chr2 60477355 60477376 60477372 60477377 +
tctgcatcaactcacaacaaat

SEQ ID NO: 197759 - DNA, 22 bp, Artificial Sequence
  Synthetic oligonucleotide; CTG chr2 60477359 60477380 60477376 60477381 +
catcaactcacaacaaatgtgc

SEQ ID NO: 197760 - DNA, 22 bp, Artificial Sequence
  Synthetic oligonucleotide; CTC chr2 60477368 60477389 60477385 60477390 +
acaacaaatgtgctttatgcct

SEQ ID NO: 197761 - DNA, 22 bp, Artificial Sequence
  Synthetic oligonucleotide; CTT chr2 60477383 60477404 60477400 60477405 +
tatgcctctatattatcatttc

SEQ ID NO: 197762 - DNA, 22 bp, Artificial Sequence
  Synthetic oligonucleotide; TTT chr2 60477384 60477405 60477401 60477406 +
atgcctctatattatcatttcg

SEQ ID NO: 197763 - DNA, 22 bp, Artificial Sequence
  Synthetic oligonucleotide; TTA chr2 60477385 60477406 60477402 60477407 +
tgcctctatattatcatttcga

SEQ ID NO: 197764 - DNA, 22 bp, Artificial Sequence
  Synthetic oligonucleotide; CTC chr2 60477391 60477412 60477408 60477413 +
tatattatcatttcgatcggtc

SEQ ID NO: 197765 - DNA, 22 bp, Artificial Sequence
  Synthetic oligonucleotide; CTA chr2 60477393 60477414 60477410 60477415 +
tattatcatttcgatcggtctt

SEQ ID NO: 197766 - DNA, 22 bp, Artificial Sequence
  Synthetic oligonucleotide; TTA chr2 60477398 60477419 60477415 60477420 +
tcatttcgatcggtcttgagaa

SEQ ID NO: 197767 - DNA, 22 bp, Artificial Sequence
  Synthetic oligonucleotide; TTT chr2 60477404 60477425 60477421 60477426 +
cgatcggtcttgagaaaatact

SEQ ID NO: 197768 - DNA, 22 bp, Artificial Sequence
  Synthetic oligonucleotide; TTC chr2 60477405 60477426 60477422 60477427 +
gatcggtcttgagaaaatacta

SEQ ID NO: 197769 - DNA, 22 bp, Artificial Sequence
  Synthetic oligonucleotide; CTT chr2 60477415 60477436 60477432 60477437 +
gagaaaatactagaataagcta

SEQ ID NO: 197770 - DNA, 22 bp, Artificial Sequence
  Synthetic oligonucleotide; TTG chr2 60477416 60477437 60477433 60477438 +
agaaaatactagaataagctaa

SEQ ID NO: 197771 - DNA, 22 bp, Artificial Sequence
  Synthetic oligonucleotide; CTA chr2 60477427 60477448 60477444 60477449 +
gaataagctaaagaaaaccaaa

SEQ ID NO: 197772 - DNA, 22 bp, Artificial Sequence
  Synthetic oligonucleotide; CTA chr2 60477437 60477458 60477454 60477459 +
aagaaaaccaaacatgggtgga

SEQ ID NO: 197773 - DNA, 22 bp, Artificial Sequence
  Synthetic oligonucleotide; TTA chr2 60477483 60477504 60477500 60477505 +
ggagaaatgcctaatgtagatg

SEQ ID NO: 197774 - DNA, 22 bp, Artificial Sequence
  Synthetic oligonucleotide; CTA chr2 60477496 60477517 60477513 60477518 +
atgtagatgatgggttgatagg

SEQ ID NO: 197775 - DNA, 22 bp, Artificial Sequence
  Synthetic oligonucleotide; TTG chr2 60477513 60477534 60477530 60477535 +
ataggtgcagcaaaccaccatg

SEQ ID NO: 197776 - DNA, 22 bp, Artificial Sequence
  Synthetic oligonucleotide; CTT chr2 60477549 60477570 60477566 60477571 +
atgtaacaaacctgcacattct

SEQ ID NO: 197777 - DNA, 22 bp, Artificial Sequence
  Synthetic oligonucleotide; TTA chr2 60477550 60477571 60477567 60477572 +
tgtaacaaacctgcacattctg

SEQ ID NO: 197778 - DNA, 22 bp, Artificial Sequence
  Synthetic oligonucleotide; CTG chr2 60477563 60477584 60477580 60477585 +
cacattctgcacatgtatccca

SEQ ID NO: 197779 - DNA, 22 bp, Artificial Sequence
  Synthetic oligonucleotide; TTC chr2 60477570 60477591 60477587 60477592 +
tgcacatgtatcccagaactta

SEQ ID NO: 197780 - DNA, 22 bp, Artificial Sequence
  Synthetic oligonucleotide; CTG chr2 60477572 60477593 60477589 60477594 +
cacatgtatcccagaacttaga

SEQ ID NO: 197781 - DNA, 22 bp, Artificial Sequence
  Synthetic oligonucleotide; CTT chr2 60477591 60477612 60477608 60477613 +
agagtaaaataaataaagaaag

SEQ ID NO: 197782 - DNA, 22 bp, Artificial Sequence
  Synthetic oligonucleotide; TTA chr2 60477592 60477613 60477609 60477614 +
gagtaaaataaataaagaaaga

SEQ ID NO: 197783 - DNA, 22 bp, Artificial Sequence
  Synthetic oligonucleotide; TTT chr2 60477646 60477667 60477663 60477668 +
ccaagagactcctgatgttttg

SEQ ID NO: 197784 - DNA, 22 bp, Artificial Sequence
  Synthetic oligonucleotide; TTC chr2 60477647 60477668 60477664 60477669 +
caagagactcctgatgttttgt

SEQ ID NO: 197785 - DNA, 22 bp, Artificial Sequence
  Synthetic oligonucleotide; CTC chr2 60477657 60477678 60477674 60477679 +
ctgatgttttgttcgtgggcac

SEQ ID NO: 197786 - DNA, 22 bp, Artificial Sequence
  Synthetic oligonucleotide; CTG chr2 60477660 60477681 60477677 60477682 +
atgttttgttcgtgggcactgt

SEQ ID NO: 197787 - DNA, 22 bp, Artificial Sequence
  Synthetic oligonucleotide; TTT chr2 60477666 60477687 60477683 60477688 +
tgttcgtgggcactgtggaaac

SEQ ID NO: 197788 - DNA, 22 bp, Artificial Sequence
  Synthetic oligonucleotide; TTT chr2 60477667 60477688 60477684 60477689 +
gttcgtgggcactgtggaaaca

SEQ ID NO: 197789 - DNA, 22 bp, Artificial Sequence
  Synthetic oligonucleotide; TTG chr2 60477668 60477689 60477685 60477690 +
ttcgtgggcactgtggaaacag

SEQ ID NO: 197790 - DNA, 22 bp, Artificial Sequence
  Synthetic oligonucleotide; TTC chr2 60477671 60477692 60477688 60477693 +
gtgggcactgtggaaacagggg

SEQ ID NO: 197791 - DNA, 22 bp, Artificial Sequence
  Synthetic oligonucleotide; CTG chr2 60477681 60477702 60477698 60477703 +
tggaaacaggggcagtggtgct

SEQ ID NO: 197792 - DNA, 22 bp, Artificial Sequence
  Synthetic oligonucleotide; CTG chr2 60477704 60477725 60477721 60477726 +
tgagagacaagggagtggggag

SEQ ID NO: 197793 - DNA, 22 bp, Artificial Sequence
  Synthetic oligonucleotide; CTG chr2 60477763 60477784 60477780 60477785 +
cagcccggccaggtggagggct

SEQ ID NO: 197794 - DNA, 22 bp, Artificial Sequence
  Synthetic oligonucleotide; CTT chr2 60477786 60477807 60477803 60477808 +
tcctgacttatcatccaagact

SEQ ID NO: 197795 - DNA, 22 bp, Artificial Sequence
  Synthetic oligonucleotide; TTT chr2 60477787 60477808 60477804 60477809 +
cctgacttatcatccaagactg

SEQ ID NO: 197796 - DNA, 22 bp, Artificial Sequence
  Synthetic oligonucleotide; TTC chr2 60477788 60477809 60477805 60477810 +
ctgacttatcatccaagactgg

SEQ ID NO: 197797 - DNA, 22 bp, Artificial Sequence
  Synthetic oligonucleotide; CTG chr2 60477791 60477812 60477808 60477813 +
acttatcatccaagactggtct

SEQ ID NO: 197798 - DNA, 22 bp, Artificial Sequence
  Synthetic oligonucleotide; CTT chr2 60477795 60477816 60477812 60477817 +
atcatccaagactggtctgtgc

SEQ ID NO: 197799 - DNA, 22 bp, Artificial Sequence
  Synthetic oligonucleotide; TTA chr2 60477796 60477817 60477813 60477818 +
tcatccaagactggtctgtgca

SEQ ID NO: 197800 - DNA, 22 bp, Artificial Sequence
  Synthetic oligonucleotide; CTG chr2 60477809 60477830 60477826 60477831 +
gtctgtgcacggagaaggggcc

SEQ ID NO: 197801 - DNA, 22 bp, Artificial Sequence
  Synthetic oligonucleotide; CTG chr2 60477814 60477835 60477831 60477836 +
tgcacggagaaggggccagaag

SEQ ID NO: 197802 - DNA, 22 bp, Artificial Sequence
  Synthetic oligonucleotide; CTC chr2 60477859 60477880 60477876 60477881 +
tgtcaggcctcccccaaggcca

SEQ ID NO: 197803 - DNA, 22 bp, Artificial Sequence
  Synthetic oligonucleotide; CTG chr2 60477861 60477882 60477878 60477883 +
tcaggcctcccccaaggccaac

SEQ ID NO: 197804 - DNA, 22 bp, Artificial Sequence
  Synthetic oligonucleotide; CTC chr2 60477870 60477891 60477887 60477892 +
ccccaaggccaacaagcccaga

SEQ ID NO: 197805 - DNA, 22 bp, Artificial Sequence
  Synthetic oligonucleotide; CTC chr2 60477907 60477928 60477924 60477929 +
caactctagcccttcttaagga

SEQ ID NO: 197806 - DNA, 22 bp, Artificial Sequence
  Synthetic oligonucleotide; CTC chr2 60477913 60477934 60477930 60477935 +
tagcccttcttaaggaagcaca

SEQ ID NO: 197807 - DNA, 22 bp, Artificial Sequence
  Synthetic oligonucleotide; CTA chr2 60477915 60477936 60477932 60477937 +
gcccttcttaaggaagcacatc

SEQ ID NO: 197808 - DNA, 22 bp, Artificial Sequence
  Synthetic oligonucleotide; CTT chr2 60477921 60477942 60477938 60477943 +
cttaaggaagcacatctgtcct

SEQ ID NO: 197809 - DNA, 22 bp, Artificial Sequence
  Synthetic oligonucleotide; TTC chr2 60477922 60477943 60477939 60477944 +
ttaaggaagcacatctgtcctg

SEQ ID NO: 197810 - DNA, 22 bp, Artificial Sequence
  Synthetic oligonucleotide; CTT chr2 60477924 60477945 60477941 60477946 +
aaggaagcacatctgtcctggc

SEQ ID NO: 197811 - DNA, 22 bp, Artificial Sequence
  Synthetic oligonucleotide; TTA chr2 60477925 60477946 60477942 60477947 +
aggaagcacatctgtcctggcc

SEQ ID NO: 197812 - DNA, 22 bp, Artificial Sequence
  Synthetic oligonucleotide; CTG chr2 60477939 60477960 60477956 60477961 +
tcctggcctttatggaaagctt

SEQ ID NO: 197813 - DNA, 22 bp, Artificial Sequence
  Synthetic oligonucleotide; CTG chr2 60477944 60477965 60477961 60477966 +
gcctttatggaaagcttttttt

SEQ ID NO: 197814 - DNA, 22 bp, Artificial Sequence
  Synthetic oligonucleotide; CTT chr2 60477949 60477970 60477966 60477971 +
tatggaaagctttttttttttt

SEQ ID NO: 197815 - DNA, 22 bp, Artificial Sequence
  Synthetic oligonucleotide; TTT chr2 60477950 60477971 60477967 60477972 +
atggaaagcttttttttttttt

SEQ ID NO: 197816 - DNA, 22 bp, Artificial Sequence
  Synthetic oligonucleotide; TTA chr2 60477951 60477972 60477968 60477973 +
tggaaagctttttttttttttt

SEQ ID NO: 197817 - DNA, 22 bp, Artificial Sequence
  Synthetic oligonucleotide; CTT chr2 60477961 60477982 60477978 60477983 +
ttttttttttttttttaattga

SEQ ID NO: 197818 - DNA, 22 bp, Artificial Sequence
  Synthetic oligonucleotide; TTT chr2 60477962 60477983 60477979 60477984 +
tttttttttttttttaattgag

SEQ ID NO: 197819 - DNA, 22 bp, Artificial Sequence
  Synthetic oligonucleotide; TTT chr2 60477963 60477984 60477980 60477985 +
ttttttttttttttaattgaga

SEQ ID NO: 197820 - DNA, 22 bp, Artificial Sequence
  Synthetic oligonucleotide; TTT chr2 60477964 60477985 60477981 60477986 +
tttttttttttttaattgagac

SEQ ID NO: 197821 - DNA, 22 bp, Artificial Sequence
  Synthetic oligonucleotide; TTT chr2 60477965 60477986 60477982 60477987 +
ttttttttttttaattgagaca

SEQ ID NO: 197822 - DNA, 22 bp, Artificial Sequence
  Synthetic oligonucleotide; TTT chr2 60477966 60477987 60477983 60477988 +
tttttttttttaattgagacat

SEQ ID NO: 197823 - DNA, 22 bp, Artificial Sequence
  Synthetic oligonucleotide; TTT chr2 60477967 60477988 60477984 60477989 +
ttttttttttaattgagacatg

SEQ ID NO: 197824 - DNA, 22 bp, Artificial Sequence
  Synthetic oligonucleotide; TTT chr2 60477968 60477989 60477985 60477990 +
tttttttttaattgagacatgg

SEQ ID NO: 197825 - DNA, 22 bp, Artificial Sequence
  Synthetic oligonucleotide; TTT chr2 60477969 60477990 60477986 60477991 +
ttttttttaattgagacatggt

SEQ ID NO: 197826 - DNA, 22 bp, Artificial Sequence
  Synthetic oligonucleotide; TTT chr2 60477970 60477991 60477987 60477992 +
tttttttaattgagacatggtc

SEQ ID NO: 197827 - DNA, 22 bp, Artificial Sequence
  Synthetic oligonucleotide; TTT chr2 60477971 60477992 60477988 60477993 +
ttttttaattgagacatggtct

SEQ ID NO: 197828 - DNA, 22 bp, Artificial Sequence
  Synthetic oligonucleotide; TTT chr2 60477972 60477993 60477989 60477994 +
tttttaattgagacatggtctc

SEQ ID NO: 197829 - DNA, 22 bp, Artificial Sequence
  Synthetic oligonucleotide; TTT chr2 60477973 60477994 60477990 60477995 +
ttttaattgagacatggtctca

SEQ ID NO: 197830 - DNA, 22 bp, Artificial Sequence
  Synthetic oligonucleotide; TTT chr2 60477974 60477995 60477991 60477996 +
tttaattgagacatggtctcac

SEQ ID NO: 197831 - DNA, 22 bp, Artificial Sequence
  Synthetic oligonucleotide; TTT chr2 60477975 60477996 60477992 60477997 +
ttaattgagacatggtctcact

SEQ ID NO: 197832 - DNA, 22 bp, Artificial Sequence
  Synthetic oligonucleotide; TTT chr2 60477976 60477997 60477993 60477998 +
taattgagacatggtctcactc

SEQ ID NO: 197833 - DNA, 22 bp, Artificial Sequence
  Synthetic oligonucleotide; TTT chr2 60477977 60477998 60477994 60477999 +
aattgagacatggtctcactct

SEQ ID NO: 197834 - DNA, 22 bp, Artificial Sequence
  Synthetic oligonucleotide; TTA chr2 60477978 60477999 60477995 60478000 +
attgagacatggtctcactctg

SEQ ID NO: 197835 - DNA, 22 bp, Artificial Sequence
  Synthetic oligonucleotide; TTG chr2 60477982 60478003 60477999 60478004 +
agacatggtctcactctgttgc

SEQ ID NO: 197836 - DNA, 22 bp, Artificial Sequence
  Synthetic oligonucleotide; CTC chr2 60477994 60478015 60478011 60478016 +
actctgttgcccaggctggagt

SEQ ID NO: 197837 - DNA, 22 bp, Artificial Sequence
  Synthetic oligonucleotide; CTC chr2 60477998 60478019 60478015 60478020 +
tgttgcccaggctggagtgcag

SEQ ID NO: 197838 - DNA, 22 bp, Artificial Sequence
  Synthetic oligonucleotide; CTG chr2 60478000 60478021 60478017 60478022 +
ttgcccaggctggagtgcagtg

SEQ ID NO: 197839 - DNA, 22 bp, Artificial Sequence
  Synthetic oligonucleotide; TTG chr2 60478003 60478024 60478020 60478025 +
cccaggctggagtgcagtggtg

SEQ ID NO: 197840 - DNA, 22 bp, Artificial Sequence
  Synthetic oligonucleotide; CTG chr2 60478012 60478033 60478029 60478034 +
gagtgcagtggtgcaatcttgg

SEQ ID NO: 197841 - DNA, 22 bp, Artificial Sequence
  Synthetic oligonucleotide; CTT chr2 60478032 60478053 60478049 60478054 +
ggctcactgcaacctccgcctc

SEQ ID NO: 197842 - DNA, 22 bp, Artificial Sequence
  Synthetic oligonucleotide; TTG chr2 60478033 60478054 60478050 60478055 +
gctcactgcaacctccgcctcc

SEQ ID NO: 197843 - DNA, 22 bp, Artificial Sequence
  Synthetic oligonucleotide; CTC chr2 60478037 60478058 60478054 60478059 +
actgcaacctccgcctcccgag

SEQ ID NO: 197844 - DNA, 22 bp, Artificial Sequence
  Synthetic oligonucleotide; CTG chr2 60478041 60478062 60478058 60478063 +
caacctccgcctcccgagttca

SEQ ID NO: 197845 - DNA, 22 bp, Artificial Sequence
  Synthetic oligonucleotide; CTC chr2 60478048 60478069 60478065 60478070 +
cgcctcccgagttcaagcagtc

SEQ ID NO: 197846 - DNA, 22 bp, Artificial Sequence
  Synthetic oligonucleotide; CTC chr2 60478054 60478075 60478071 60478076 +
ccgagttcaagcagtcctcctg

SEQ ID NO: 197847 - DNA, 22 bp, Artificial Sequence
  Synthetic oligonucleotide; TTC chr2 60478062 60478083 60478079 60478084 +
aagcagtcctcctgcctcagct

SEQ ID NO: 197848 - DNA, 22 bp, Artificial Sequence
  Synthetic oligonucleotide; CTC chr2 60478073 60478094 60478090 60478095 +
ctgcctcagctctcaagtagct

SEQ ID NO: 197849 - DNA, 22 bp, Artificial Sequence
  Synthetic oligonucleotide; CTG chr2 60478076 60478097 60478093 60478098 +
cctcagctctcaagtagctagg

SEQ ID NO: 197850 - DNA, 22 bp, Artificial Sequence
  Synthetic oligonucleotide; CTC chr2 60478080 60478101 60478097 60478102 +
agctctcaagtagctaggacta

SEQ ID NO: 197851 - DNA, 22 bp, Artificial Sequence
  Synthetic oligonucleotide; CTC chr2 60478085 60478106 60478102 60478107 +
tcaagtagctaggactacaggc

SEQ ID NO: 197852 - DNA, 22 bp, Artificial Sequence
  Synthetic oligonucleotide; CTC chr2 60478087 60478108 60478104 60478109 +
aagtagctaggactacaggcat

SEQ ID NO: 197853 - DNA, 22 bp, Artificial Sequence
  Synthetic oligonucleotide; CTA chr2 60478096 60478117 60478113 60478118 +
ggactacaggcatgcgccacca

SEQ ID NO: 197854 - DNA, 22 bp, Artificial Sequence
  Synthetic oligonucleotide; CTA chr2 60478102 60478123 60478119 60478124 +
caggcatgcgccaccaccacac

SEQ ID NO: 197855 - DNA, 22 bp, Artificial Sequence
  Synthetic oligonucleotide; CTG chr2 60478127 60478148 60478144 60478149 +
gctaatttttgtattttttgta

SEQ ID NO: 197856 - DNA, 22 bp, Artificial Sequence
  Synthetic oligonucleotide; CTA chr2 60478131 60478152 60478148 60478153 +
atttttgtattttttgtagaga

SEQ ID NO: 197857 - DNA, 22 bp, Artificial Sequence
  Synthetic oligonucleotide; TTT chr2 60478135 60478156 60478152 60478157 +
ttgtattttttgtagagatggg

SEQ ID NO: 197858 - DNA, 22 bp, Artificial Sequence
  Synthetic oligonucleotide; TTT chr2 60478136 60478157 60478153 60478158 +
tgtattttttgtagagatggga

SEQ ID NO: 197859 - DNA, 22 bp, Artificial Sequence
  Synthetic oligonucleotide; TTT chr2 60478137 60478158 60478154 60478159 +
gtattttttgtagagatgggat

SEQ ID NO: 197860 - DNA, 22 bp, Artificial Sequence
  Synthetic oligonucleotide; TTG chr2 60478138 60478159 60478155 60478160 +
tattttttgtagagatgggatc

SEQ ID NO: 197861 - DNA, 22 bp, Artificial Sequence
  Synthetic oligonucleotide; TTT chr2 60478143 60478164 60478160 60478165 +
tttgtagagatgggatctcacc

SEQ ID NO: 197862 - DNA, 22 bp, Artificial Sequence
  Synthetic oligonucleotide; TTT chr2 60478144 60478165 60478161 60478166 +
ttgtagagatgggatctcacca

SEQ ID NO: 197863 - DNA, 22 bp, Artificial Sequence
  Synthetic oligonucleotide; TTT chr2 60478145 60478166 60478162 60478167 +
tgtagagatgggatctcaccat

SEQ ID NO: 197864 - DNA, 22 bp, Artificial Sequence
  Synthetic oligonucleotide; TTT chr2 60478146 60478167 60478163 60478168 +
gtagagatgggatctcaccatg

SEQ ID NO: 197865 - DNA, 22 bp, Artificial Sequence
  Synthetic oligonucleotide; TTG chr2 60478147 60478168 60478164 60478169 +
tagagatgggatctcaccatgt

SEQ ID NO: 197866 - DNA, 22 bp, Artificial Sequence
  Synthetic oligonucleotide; CTC chr2 60478162 60478183 60478179 60478184 +
accatgttgcccaggctgggtg

SEQ ID NO: 197867 - DNA, 22 bp, Artificial Sequence
  Synthetic oligonucleotide; TTG chr2 60478171 60478192 60478188 60478193 +
cccaggctgggtggaaagtgtt

SEQ ID NO: 197868 - DNA, 22 bp, Artificial Sequence
  Synthetic oligonucleotide; CTG chr2 60478180 60478201 60478197 60478202 +
ggtggaaagtgttatgttcttc

SEQ ID NO: 197869 - DNA, 22 bp, Artificial Sequence
  Synthetic oligonucleotide; TTA chr2 60478194 60478215 60478211 60478216 +
tgttcttcccaaagtactctcc

SEQ ID NO: 197870 - DNA, 22 bp, Artificial Sequence
  Synthetic oligonucleotide; TTC chr2 60478199 60478220 60478216 60478221 +
ttcccaaagtactctcctcaca

SEQ ID NO: 197871 - DNA, 22 bp, Artificial Sequence
  Synthetic oligonucleotide; CTT chr2 60478201 60478222 60478218 60478223 +
cccaaagtactctcctcacatc

SEQ ID NO: 197872 - DNA, 22 bp, Artificial Sequence
  Synthetic oligonucleotide; TTC chr2 60478202 60478223 60478219 60478224 +
ccaaagtactctcctcacatcc

SEQ ID NO: 197873 - DNA, 22 bp, Artificial Sequence
  Synthetic oligonucleotide; CTC chr2 60478213 60478234 60478230 60478235 +
tcctcacatcctgccccaacag

SEQ ID NO: 197874 - DNA, 22 bp, Artificial Sequence
  Synthetic oligonucleotide; CTC chr2 60478215 60478236 60478232 60478237 +
ctcacatcctgccccaacagtc

SEQ ID NO: 197875 - DNA, 22 bp, Artificial Sequence
  Synthetic oligonucleotide; CTC chr2 60478218 60478239 60478235 60478240 +
acatcctgccccaacagtcgcc

SEQ ID NO: 197876 - DNA, 22 bp, Artificial Sequence
  Synthetic oligonucleotide; CTG chr2 60478226 60478247 60478243 60478248 +
ccccaacagtcgccctgtggaa

SEQ ID NO: 197877 - DNA, 22 bp, Artificial Sequence
  Synthetic oligonucleotide; CTG chr2 60478243 60478264 60478260 60478265 +
tggaatgagggaaggtattagc

SEQ ID NO: 197878 - DNA, 22 bp, Artificial Sequence
  Synthetic oligonucleotide; TTA chr2 60478263 60478284 60478280 60478285 +
gcctcacctcccagtgaggaac

SEQ ID NO: 197879 - DNA, 22 bp, Artificial Sequence
  Synthetic oligonucleotide; CTC chr2 60478268 60478289 60478285 60478290 +
acctcccagtgaggaactcgaa

SEQ ID NO: 197880 - DNA, 22 bp, Artificial Sequence
  Synthetic oligonucleotide; CTC chr2 60478273 60478294 60478290 60478295 +
ccagtgaggaactcgaagatct

SEQ ID NO: 197881 - DNA, 22 bp, Artificial Sequence
  Synthetic oligonucleotide; CTC chr2 60478287 60478308 60478304 60478309 +
gaagatctcagaagtgtcctgc

SEQ ID NO: 197882 - DNA, 22 bp, Artificial Sequence
  Synthetic oligonucleotide; CTC chr2 60478296 60478317 60478313 60478318 +
agaagtgtcctgctgtggacag

SEQ ID NO: 197883 - DNA, 22 bp, Artificial Sequence
  Synthetic oligonucleotide; CTG chr2 60478308 60478329 60478325 60478330 +
ctgtggacagggaggacagggc

SEQ ID NO: 197884 - DNA, 22 bp, Artificial Sequence
  Synthetic oligonucleotide; CTG chr2 60478311 60478332 60478328 60478333 +
tggacagggaggacagggctgg

SEQ ID NO: 197885 - DNA, 22 bp, Artificial Sequence
  Synthetic oligonucleotide; CTG chr2 60478332 60478353 60478349 60478354 +
ggcttcaggaccctgcccacct

SEQ ID NO: 197886 - DNA, 22 bp, Artificial Sequence
  Synthetic oligonucleotide; CTT chr2 60478337 60478358 60478354 60478359 +
caggaccctgcccaccttctga

SEQ ID NO: 197887 - DNA, 22 bp, Artificial Sequence
  Synthetic oligonucleotide; TTC chr2 60478338 60478359 60478355 60478360 +
aggaccctgcccaccttctgac

SEQ ID NO: 197888 - DNA, 22 bp, Artificial Sequence
  Synthetic oligonucleotide; CTG chr2 60478347 60478368 60478364 60478369 +
cccaccttctgacaaacccctc

SEQ ID NO: 197889 - DNA, 22 bp, Artificial Sequence
  Synthetic oligonucleotide; CTT chr2 60478355 60478376 60478372 60478377 +
ctgacaaacccctcccactgcc

SEQ ID NO: 197890 - DNA, 22 bp, Artificial Sequence
  Synthetic oligonucleotide; TTC chr2 60478356 60478377 60478373 60478378 +
tgacaaacccctcccactgcca

SEQ ID NO: 197891 - DNA, 22 bp, Artificial Sequence
  Synthetic oligonucleotide; CTG chr2 60478358 60478379 60478375 60478380 +
acaaacccctcccactgccacc

SEQ ID NO: 197892 - DNA, 22 bp, Artificial Sequence
  Synthetic oligonucleotide; CTC chr2 60478369 60478390 60478386 60478391 +
ccactgccacctcagggccgcg

SEQ ID NO: 197893 - DNA, 22 bp, Artificial Sequence
  Synthetic oligonucleotide; CTG chr2 60478375 60478396 60478392 60478397 +
ccacctcagggccgcggcagaa

SEQ ID NO: 197894 - DNA, 22 bp, Artificial Sequence
  Synthetic oligonucleotide; CTC chr2 60478382 60478403 60478399 60478404 +
agggccgcggcagaaacctgtc

SEQ ID NO: 197895 - DNA, 22 bp, Artificial Sequence
  Synthetic oligonucleotide; CTG chr2 60478402 60478423 60478419 60478424 +
tcgtctggacactggtcataca

SEQ ID NO: 197896 - DNA, 22 bp, Artificial Sequence
  Synthetic oligonucleotide; CTG chr2 60478409 60478430 60478426 60478431 +
gacactggtcatacagcccctt

SEQ ID NO: 197897 - DNA, 22 bp, Artificial Sequence
  Synthetic oligonucleotide; CTG chr2 60478416 60478437 60478433 60478438 +
gtcatacagcccctttcaggca

SEQ ID NO: 197898 - DNA, 22 bp, Artificial Sequence
  Synthetic oligonucleotide; CTT chr2 60478431 60478452 60478448 60478453 +
tcaggcaatctcctcacttgcc

SEQ ID NO: 197899 - DNA, 22 bp, Artificial Sequence
  Synthetic oligonucleotide; TTT chr2 60478432 60478453 60478449 60478454 +
caggcaatctcctcacttgcct

SEQ ID NO: 197900 - DNA, 22 bp, Artificial Sequence
  Synthetic oligonucleotide; TTC chr2 60478433 60478454 60478450 60478455 +
aggcaatctcctcacttgcctt

SEQ ID NO: 197901 - DNA, 22 bp, Artificial Sequence
  Synthetic oligonucleotide; CTC chr2 60478443 60478464 60478460 60478465 +
ctcacttgcctttctggcacta

SEQ ID NO: 197902 - DNA, 22 bp, Artificial Sequence
  Synthetic oligonucleotide; CTC chr2 60478446 60478467 60478463 60478468 +
acttgcctttctggcactattg

SEQ ID NO: 197903 - DNA, 22 bp, Artificial Sequence
  Synthetic oligonucleotide; CTT chr2 60478450 60478471 60478467 60478472 +
gcctttctggcactattgagtg

SEQ ID NO: 197904 - DNA, 22 bp, Artificial Sequence
  Synthetic oligonucleotide; TTG chr2 60478451 60478472 60478468 60478473 +
cctttctggcactattgagtga

SEQ ID NO: 197905 - DNA, 22 bp, Artificial Sequence
  Synthetic oligonucleotide; CTT chr2 60478455 60478476 60478472 60478477 +
tctggcactattgagtgactgg

SEQ ID NO: 197906 - DNA, 22 bp, Artificial Sequence
  Synthetic oligonucleotide; TTT chr2 60478456 60478477 60478473 60478478 +
ctggcactattgagtgactggt

SEQ ID NO: 197907 - DNA, 22 bp, Artificial Sequence
  Synthetic oligonucleotide; TTC chr2 60478457 60478478 60478474 60478479 +
tggcactattgagtgactggtg

SEQ ID NO: 197908 - DNA, 22 bp, Artificial Sequence
  Synthetic oligonucleotide; CTG chr2 60478459 60478480 60478476 60478481 +
gcactattgagtgactggtgtg

SEQ ID NO: 197909 - DNA, 22 bp, Artificial Sequence
  Synthetic oligonucleotide; CTA chr2 60478465 60478486 60478482 60478487 +
ttgagtgactggtgtgtggact

SEQ ID NO: 197910 - DNA, 22 bp, Artificial Sequence
  Synthetic oligonucleotide; TTG chr2 60478468 60478489 60478485 60478490 +
agtgactggtgtgtggacttca

SEQ ID NO: 197911 - DNA, 22 bp, Artificial Sequence
  Synthetic oligonucleotide; CTG chr2 60478476 60478497 60478493 60478498 +
gtgtgtggacttcaggggaagc

SEQ ID NO: 197912 - DNA, 22 bp, Artificial Sequence
  Synthetic oligonucleotide; CTT chr2 60478488 60478509 60478505 60478510 +
caggggaagcgtggaaggcact

SEQ ID NO: 197913 - DNA, 22 bp, Artificial Sequence
  Synthetic oligonucleotide; TTC chr2 60478489 60478510 60478506 60478511 +
aggggaagcgtggaaggcactt

SEQ ID NO: 197914 - DNA, 22 bp, Artificial Sequence
  Synthetic oligonucleotide; CTT chr2 60478511 60478532 60478528 60478533 +
cacaggcctaatactctgtgac

SEQ ID NO: 197915 - DNA, 22 bp, Artificial Sequence
  Synthetic oligonucleotide; TTC chr2 60478512 60478533 60478529 60478534 +
acaggcctaatactctgtgaca

SEQ ID NO: 197916 - DNA, 22 bp, Artificial Sequence
  Synthetic oligonucleotide; CTA chr2 60478521 60478542 60478538 60478543 +
atactctgtgacagtcttggcc

SEQ ID NO: 197917 - DNA, 22 bp, Artificial Sequence
  Synthetic oligonucleotide; CTC chr2 60478527 60478548 60478544 60478549 +
tgtgacagtcttggccaagaga

SEQ ID NO: 197918 - DNA, 22 bp, Artificial Sequence
  Synthetic oligonucleotide; CTG chr2 60478529 60478550 60478546 60478551 +
tgacagtcttggccaagagatt

SEQ ID NO: 197919 - DNA, 22 bp, Artificial Sequence
  Synthetic oligonucleotide; CTT chr2 60478539 60478560 60478556 60478561 +
ggccaagagattctgagaacca

SEQ ID NO: 197920 - DNA, 22 bp, Artificial Sequence
  Synthetic oligonucleotide; TTG chr2 60478540 60478561 60478557 60478562 +
gccaagagattctgagaaccag

SEQ ID NO: 197921 - DNA, 22 bp, Artificial Sequence
  Synthetic oligonucleotide; TTC chr2 60478552 60478573 60478569 60478574 +
tgagaaccagaactggccattc

SEQ ID NO: 197922 - DNA, 22 bp, Artificial Sequence
  Synthetic oligonucleotide; CTG chr2 60478554 60478575 60478571 60478576 +
agaaccagaactggccattctc

SEQ ID NO: 197923 - DNA, 22 bp, Artificial Sequence
  Synthetic oligonucleotide; CTG chr2 60478567 60478588 60478584 60478589 +
gccattctccagaattaaaacc

SEQ ID NO: 197924 - DNA, 22 bp, Artificial Sequence
  Synthetic oligonucleotide; TTC chr2 60478574 60478595 60478591 60478596 +
tccagaattaaaacctattatg

SEQ ID NO: 197925 - DNA, 22 bp, Artificial Sequence
  Synthetic oligonucleotide; CTC chr2 60478576 60478597 60478593 60478598 +
cagaattaaaacctattatgtc

SEQ ID NO: 197926 - DNA, 22 bp, Artificial Sequence
  Synthetic oligonucleotide; TTA chr2 60478584 60478605 60478601 60478606 +
aaacctattatgtcctatggtt

SEQ ID NO: 197927 - DNA, 22 bp, Artificial Sequence
  Synthetic oligonucleotide; CTA chr2 60478591 60478612 60478608 60478613 +
ttatgtcctatggttaacacag

SEQ ID NO: 197928 - DNA, 22 bp, Artificial Sequence
  Synthetic oligonucleotide; TTA chr2 60478594 60478615 60478611 60478616 +
tgtcctatggttaacacagagc

SEQ ID NO: 197929 - DNA, 22 bp, Artificial Sequence
  Synthetic oligonucleotide; CTA chr2 60478601 60478622 60478618 60478623 +
tggttaacacagagctgctcag

SEQ ID NO: 197930 - DNA, 22 bp, Artificial Sequence
  Synthetic oligonucleotide; TTA chr2 60478607 60478628 60478624 60478629 +
acacagagctgctcagaaatta

SEQ ID NO: 197931 - DNA, 22 bp, Artificial Sequence
  Synthetic oligonucleotide; CTG chr2 60478618 60478639 60478635 60478640 +
ctcagaaattatgagaactaat

SEQ ID NO: 197932 - DNA, 22 bp, Artificial Sequence
  Synthetic oligonucleotide; CTC chr2 60478621 60478642 60478638 60478643 +
agaaattatgagaactaattta

SEQ ID NO: 197933 - DNA, 22 bp, Artificial Sequence
  Synthetic oligonucleotide; TTA chr2 60478629 60478650 60478646 60478651 +
tgagaactaatttaaggcttca

SEQ ID NO: 197934 - DNA, 22 bp, Artificial Sequence
  Synthetic oligonucleotide; CTA chr2 60478638 60478659 60478655 60478660 +
atttaaggcttcaaagctctac

SEQ ID NO: 197935 - DNA, 22 bp, Artificial Sequence
  Synthetic oligonucleotide; TTT chr2 60478642 60478663 60478659 60478664 +
aaggcttcaaagctctaccaaa

SEQ ID NO: 197936 - DNA, 22 bp, Artificial Sequence
  Synthetic oligonucleotide; TTA chr2 60478643 60478664 60478660 60478665 +
aggcttcaaagctctaccaaaa

SEQ ID NO: 197937 - DNA, 22 bp, Artificial Sequence
  Synthetic oligonucleotide; CTT chr2 60478649 60478670 60478666 60478671 +
caaagctctaccaaaaaaaatg

SEQ ID NO: 197938 - DNA, 22 bp, Artificial Sequence
  Synthetic oligonucleotide; TTC chr2 60478650 60478671 60478667 60478672 +
aaagctctaccaaaaaaaatgg

SEQ ID NO: 197939 - DNA, 22 bp, Artificial Sequence
  Synthetic oligonucleotide; CTC chr2 60478657 60478678 60478674 60478679 +
taccaaaaaaaatggtctagca

SEQ ID NO: 197940 - DNA, 22 bp, Artificial Sequence
  Synthetic oligonucleotide; CTA chr2 60478659 60478680 60478676 60478681 +
ccaaaaaaaatggtctagcagg

SEQ ID NO: 197941 - DNA, 22 bp, Artificial Sequence
  Synthetic oligonucleotide; CTA chr2 60478676 60478697 60478693 60478698 +
gcaggtcaggctctaacatttc

SEQ ID NO: 197942 - DNA, 22 bp, Artificial Sequence
  Synthetic oligonucleotide; CTC chr2 60478689 60478710 60478706 60478711 +
taacatttcttcaggaataaaa

SEQ ID NO: 197943 - DNA, 22 bp, Artificial Sequence
  Synthetic oligonucleotide; CTA chr2 60478691 60478712 60478708 60478713 +
acatttcttcaggaataaaact

SEQ ID NO: 197944 - DNA, 22 bp, Artificial Sequence
  Synthetic oligonucleotide; TTT chr2 60478697 60478718 60478714 60478719 +
cttcaggaataaaactaggctg

SEQ ID NO: 197945 - DNA, 22 bp, Artificial Sequence
  Synthetic oligonucleotide; TTC chr2 60478698 60478719 60478715 60478720 +
ttcaggaataaaactaggctgc

SEQ ID NO: 197946 - DNA, 22 bp, Artificial Sequence
  Synthetic oligonucleotide; CTT chr2 60478700 60478721 60478717 60478722 +
caggaataaaactaggctgccc

SEQ ID NO: 197947 - DNA, 22 bp, Artificial Sequence
  Synthetic oligonucleotide; TTC chr2 60478701 60478722 60478718 60478723 +
aggaataaaactaggctgccct

SEQ ID NO: 197948 - DNA, 22 bp, Artificial Sequence
  Synthetic oligonucleotide; CTA chr2 60478714 60478735 60478731 60478736 +
ggctgccctctcgcctgaggtg

SEQ ID NO: 197949 - DNA, 22 bp, Artificial Sequence
  Synthetic oligonucleotide; CTG chr2 60478719 60478740 60478736 60478741 +
ccctctcgcctgaggtgaggct

SEQ ID NO: 197950 - DNA, 22 bp, Artificial Sequence
  Synthetic oligonucleotide; CTC chr2 60478724 60478745 60478741 60478746 +
tcgcctgaggtgaggctgaatg

SEQ ID NO: 197951 - DNA, 22 bp, Artificial Sequence
  Synthetic oligonucleotide; CTC chr2 60478726 60478747 60478743 60478748 +
gcctgaggtgaggctgaatgaa

SEQ ID NO: 197952 - DNA, 22 bp, Artificial Sequence
  Synthetic oligonucleotide; CTG chr2 60478731 60478752 60478748 60478753 +
aggtgaggctgaatgaaggagc

SEQ ID NO: 197953 - DNA, 22 bp, Artificial Sequence
  Synthetic oligonucleotide; CTG chr2 60478742 60478763 60478759 60478764 +
aatgaaggagcgctctggtgct

SEQ ID NO: 197954 - DNA, 22 bp, Artificial Sequence
  Synthetic oligonucleotide; CTC chr2 60478757 60478778 60478774 60478779 +
tggtgctgcgaggccaggcctc

SEQ ID NO: 197955 - DNA, 22 bp, Artificial Sequence
  Synthetic oligonucleotide; CTG chr2 60478759 60478780 60478776 60478781 +
gtgctgcgaggccaggcctcct

SEQ ID NO: 197956 - DNA, 22 bp, Artificial Sequence
  Synthetic oligonucleotide; CTG chr2 60478765 60478786 60478782 60478787 +
cgaggccaggcctcctcccatg

SEQ ID NO: 197957 - DNA, 22 bp, Artificial Sequence
  Synthetic oligonucleotide; CTC chr2 60478779 60478800 60478796 60478801 +
ctcccatgacggcaagtccttc

SEQ ID NO: 197958 - DNA, 22 bp, Artificial Sequence
  Synthetic oligonucleotide; CTC chr2 60478782 60478803 60478799 60478804 +
ccatgacggcaagtccttcttt

SEQ ID NO: 197959 - DNA, 22 bp, Artificial Sequence
  Synthetic oligonucleotide; CTT chr2 60478800 60478821 60478817 60478822 +
ctttcagaaaacaggcctctgc

SEQ ID NO: 197960 - DNA, 22 bp, Artificial Sequence
  Synthetic oligonucleotide; TTC chr2 60478801 60478822 60478818 60478823 +
tttcagaaaacaggcctctgcc

SEQ ID NO: 197961 - DNA, 22 bp, Artificial Sequence
  Synthetic oligonucleotide; CTT chr2 60478803 60478824 60478820 60478825 +
tcagaaaacaggcctctgcccg

SEQ ID NO: 197962 - DNA, 22 bp, Artificial Sequence
  Synthetic oligonucleotide; TTT chr2 60478804 60478825 60478821 60478826 +
cagaaaacaggcctctgcccgg

SEQ ID NO: 197963 - DNA, 22 bp, Artificial Sequence
  Synthetic oligonucleotide; TTC chr2 60478805 60478826 60478822 60478827 +
agaaaacaggcctctgcccggg

SEQ ID NO: 197964 - DNA, 22 bp, Artificial Sequence
  Synthetic oligonucleotide; CTC chr2 60478819 60478840 60478836 60478841 +
tgcccggggcatgctgcagctg

SEQ ID NO: 197965 - DNA, 22 bp, Artificial Sequence
  Synthetic oligonucleotide; CTG chr2 60478821 60478842 60478838 60478843 +
cccggggcatgctgcagctgct

SEQ ID NO: 197966 - DNA, 22 bp, Artificial Sequence
  Synthetic oligonucleotide; CTG chr2 60478835 60478856 60478852 60478857 +
cagctgcttctctgcagtgcct

SEQ ID NO: 197967 - DNA, 22 bp, Artificial Sequence
  Synthetic oligonucleotide; CTG chr2 60478841 60478862 60478858 60478863 +
cttctctgcagtgcctcagcac

SEQ ID NO: 197968 - DNA, 22 bp, Artificial Sequence
  Synthetic oligonucleotide; CTT chr2 60478844 60478865 60478861 60478866 +
ctctgcagtgcctcagcacctt

SEQ ID NO: 197969 - DNA, 22 bp, Artificial Sequence
  Synthetic oligonucleotide; TTC chr2 60478845 60478866 60478862 60478867 +
tctgcagtgcctcagcaccttc

SEQ ID NO: 197970 - DNA, 22 bp, Artificial Sequence
  Synthetic oligonucleotide; CTC chr2 60478847 60478868 60478864 60478869 +
tgcagtgcctcagcaccttccc

SEQ ID NO: 197971 - DNA, 22 bp, Artificial Sequence
  Synthetic oligonucleotide; CTG chr2 60478849 60478870 60478866 60478871 +
cagtgcctcagcaccttcccgc

SEQ ID NO: 197972 - DNA, 22 bp, Artificial Sequence
  Synthetic oligonucleotide; CTC chr2 60478858 60478879 60478875 60478880 +
agcaccttcccgcctcccaggc

SEQ ID NO: 197973 - DNA, 22 bp, Artificial Sequence
  Synthetic oligonucleotide; CTT chr2 60478866 60478887 60478883 60478888 +
cccgcctcccaggcacacagca

SEQ ID NO: 197974 - DNA, 22 bp, Artificial Sequence
  Synthetic oligonucleotide; TTC chr2 60478867 60478888 60478884 60478889 +
ccgcctcccaggcacacagcag

SEQ ID NO: 197975 - DNA, 22 bp, Artificial Sequence
  Synthetic oligonucleotide; CTC chr2 60478874 60478895 60478891 60478896 +
ccaggcacacagcagcccagcc

SEQ ID NO: 197976 - DNA, 22 bp, Artificial Sequence
  Synthetic oligonucleotide; CTC chr2 60478898 60478919 60478915 60478920 +
agtcctcatctctctggcaaag

SEQ ID NO: 197977 - DNA, 22 bp, Artificial Sequence
  Synthetic oligonucleotide; CTC chr2 60478905 60478926 60478922 60478927 +
atctctctggcaaagtcccaca

SEQ ID NO: 197978 - DNA, 22 bp, Artificial Sequence
  Synthetic oligonucleotide; CTC chr2 60478910 60478931 60478927 60478932 +
tctggcaaagtcccacagaaca

SEQ ID NO: 197979 - DNA, 22 bp, Artificial Sequence
  Synthetic oligonucleotide; CTC chr2 60478912 60478933 60478929 60478934 +
tggcaaagtcccacagaacaaa

SEQ ID NO: 197980 - DNA, 22 bp, Artificial Sequence
  Synthetic oligonucleotide; CTG chr2 60478914 60478935 60478931 60478936 +
gcaaagtcccacagaacaaaac

SEQ ID NO: 197981 - DNA, 22 bp, Artificial Sequence
  Synthetic oligonucleotide; CTT chr2 60478945 60478966 60478962 60478967 +
ggctttgacgtgctttgttttt

SEQ ID NO: 197982 - DNA, 22 bp, Artificial Sequence
  Synthetic oligonucleotide; TTG chr2 60478946 60478967 60478963 60478968 +
gctttgacgtgctttgtttttt

SEQ ID NO: 197983 - DNA, 22 bp, Artificial Sequence
  Synthetic oligonucleotide; CTT chr2 60478950 60478971 60478967 60478972 +
tgacgtgctttgttttttgttt

SEQ ID NO: 197984 - DNA, 22 bp, Artificial Sequence
  Synthetic oligonucleotide; TTT chr2 60478951 60478972 60478968 60478973 +
gacgtgctttgttttttgtttt

SEQ ID NO: 197985 - DNA, 22 bp, Artificial Sequence
  Synthetic oligonucleotide; TTG chr2 60478952 60478973 60478969 60478974 +
acgtgctttgttttttgttttt

SEQ ID NO: 197986 - DNA, 22 bp, Artificial Sequence
  Synthetic oligonucleotide; CTT chr2 60478960 60478981 60478977 60478982 +
tgttttttgttttttttttttc

SEQ ID NO: 197987 - DNA, 22 bp, Artificial Sequence
  Synthetic oligonucleotide; TTT chr2 60478961 60478982 60478978 60478983 +
gttttttgttttttttttttcc

SEQ ID NO: 197988 - DNA, 22 bp, Artificial Sequence
  Synthetic oligonucleotide; TTG chr2 60478962 60478983 60478979 60478984 +
ttttttgttttttttttttccc

SEQ ID NO: 197989 - DNA, 22 bp, Artificial Sequence
  Synthetic oligonucleotide; TTT chr2 60478965 60478986 60478982 60478987 +
tttgttttttttttttccctcc

SEQ ID NO: 197990 - DNA, 22 bp, Artificial Sequence
  Synthetic oligonucleotide; TTT chr2 60478966 60478987 60478983 60478988 +
ttgttttttttttttccctcct

SEQ ID NO: 197991 - DNA, 22 bp, Artificial Sequence
  Synthetic oligonucleotide; TTT chr2 60478967 60478988 60478984 60478989 +
tgttttttttttttccctcctc

SEQ ID NO: 197992 - DNA, 22 bp, Artificial Sequence
  Synthetic oligonucleotide; TTT chr2 60478968 60478989 60478985 60478990 +
gttttttttttttccctcctcc

SEQ ID NO: 197993 - DNA, 22 bp, Artificial Sequence
  Synthetic oligonucleotide; TTG chr2 60478969 60478990 60478986 60478991 +
ttttttttttttccctcctccc

SEQ ID NO: 197994 - DNA, 22 bp, Artificial Sequence
  Synthetic oligonucleotide; TTT chr2 60478972 60478993 60478989 60478994 +
tttttttttccctcctccctgg

SEQ ID NO: 197995 - DNA, 22 bp, Artificial Sequence
  Synthetic oligonucleotide; TTT chr2 60478973 60478994 60478990 60478995 +
ttttttttccctcctccctggc

SEQ ID NO: 197996 - DNA, 22 bp, Artificial Sequence
  Synthetic oligonucleotide; TTT chr2 60478974 60478995 60478991 60478996 +
tttttttccctcctccctggct

SEQ ID NO: 197997 - DNA, 22 bp, Artificial Sequence
  Synthetic oligonucleotide; TTT chr2 60478975 60478996 60478992 60478997 +
ttttttccctcctccctggctt

SEQ ID NO: 197998 - DNA, 22 bp, Artificial Sequence
  Synthetic oligonucleotide; TTT chr2 60478976 60478997 60478993 60478998 +
tttttccctcctccctggcttt

SEQ ID NO: 197999 - DNA, 22 bp, Artificial Sequence
  Synthetic oligonucleotide; TTT chr2 60478977 60478998 60478994 60478999 +
ttttccctcctccctggctttt

SEQ ID NO: 198000 - DNA, 22 bp, Artificial Sequence
  Synthetic oligonucleotide; TTT chr2 60478978 60478999 60478995 60479000 +
tttccctcctccctggcttttt

SEQ ID NO: 198001 - DNA, 22 bp, Artificial Sequence
  Synthetic oligonucleotide; TTT chr2 60478979 60479000 60478996 60479001 +
ttccctcctccctggcttttta

SEQ ID NO: 198002 - DNA, 22 bp, Artificial Sequence
  Synthetic oligonucleotide; TTT chr2 60478980 60479001 60478997 60479002 +
tccctcctccctggctttttac

SEQ ID NO: 198003 - DNA, 22 bp, Artificial Sequence
  Synthetic oligonucleotide; TTT chr2 60478981 60479002 60478998 60479003 +
ccctcctccctggctttttacc

SEQ ID NO: 198004 - DNA, 22 bp, Artificial Sequence
  Synthetic oligonucleotide; TTC chr2 60478982 60479003 60478999 60479004 +
cctcctccctggctttttaccc

SEQ ID NO: 198005 - DNA, 22 bp, Artificial Sequence
  Synthetic oligonucleotide; CTC chr2 60478986 60479007 60479003 60479008 +
ctccctggctttttacccaatt

SEQ ID NO: 198006 - DNA, 22 bp, Artificial Sequence
  Synthetic oligonucleotide; CTC chr2 60478989 60479010 60479006 60479011 +
cctggctttttacccaatttcc

SEQ ID NO: 198007 - DNA, 22 bp, Artificial Sequence
  Synthetic oligonucleotide; CTG chr2 60478993 60479014 60479010 60479015 +
gctttttacccaatttcctaat

SEQ ID NO: 198008 - DNA, 22 bp, Artificial Sequence
  Synthetic oligonucleotide; CTT chr2 60478997 60479018 60479014 60479019 +
tttacccaatttcctaatcctt

SEQ ID NO: 198009 - DNA, 22 bp, Artificial Sequence
  Synthetic oligonucleotide; TTT chr2 60478998 60479019 60479015 60479020 +
ttacccaatttcctaatccttc

SEQ ID NO: 198010 - DNA, 22 bp, Artificial Sequence
  Synthetic oligonucleotide; TTT chr2 60478999 60479020 60479016 60479021 +
tacccaatttcctaatccttca

SEQ ID NO: 198011 - DNA, 22 bp, Artificial Sequence
  Synthetic oligonucleotide; TTT chr2 60479000 60479021 60479017 60479022 +
acccaatttcctaatccttcat

SEQ ID NO: 198012 - DNA, 22 bp, Artificial Sequence
  Synthetic oligonucleotide; TTA chr2 60479001 60479022 60479018 60479023 +
cccaatttcctaatccttcatt

SEQ ID NO: 198013 - DNA, 22 bp, Artificial Sequence
  Synthetic oligonucleotide; TTT chr2 60479009 60479030 60479026 60479031 +
cctaatccttcatttataccac

SEQ ID NO: 198014 - DNA, 22 bp, Artificial Sequence
  Synthetic oligonucleotide; TTC chr2 60479010 60479031 60479027 60479032 +
ctaatccttcatttataccact

SEQ ID NO: 198015 - DNA, 22 bp, Artificial Sequence
  Synthetic oligonucleotide; CTA chr2 60479013 60479034 60479030 60479035 +
atccttcatttataccactgac

SEQ ID NO: 198016 - DNA, 22 bp, Artificial Sequence
  Synthetic oligonucleotide; CTT chr2 60479019 60479040 60479036 60479041 +
catttataccactgaccaatct

SEQ ID NO: 198017 - DNA, 22 bp, Artificial Sequence
  Synthetic oligonucleotide; TTC chr2 60479020 60479041 60479037 60479042 +
atttataccactgaccaatctg

SEQ ID NO: 198018 - DNA, 22 bp, Artificial Sequence
  Synthetic oligonucleotide; TTT chr2 60479024 60479045 60479041 60479046 +
ataccactgaccaatctggaaa

SEQ ID NO: 198019 - DNA, 22 bp, Artificial Sequence
  Synthetic oligonucleotide; TTA chr2 60479025 60479046 60479042 60479047 +
taccactgaccaatctggaaag

SEQ ID NO: 198020 - DNA, 22 bp, Artificial Sequence
  Synthetic oligonucleotide; CTG chr2 60479033 60479054 60479050 60479055 +
accaatctggaaagagttccct

SEQ ID NO: 198021 - DNA, 22 bp, Artificial Sequence
  Synthetic oligonucleotide; CTG chr2 60479042 60479063 60479059 60479064 +
gaaagagttccctgagcaaatt

SEQ ID NO: 198022 - DNA, 22 bp, Artificial Sequence
  Synthetic oligonucleotide; TTC chr2 60479052 60479073 60479069 60479074 +
cctgagcaaattggagatgccc

SEQ ID NO: 198023 - DNA, 22 bp, Artificial Sequence
  Synthetic oligonucleotide; CTG chr2 60479056 60479077 60479073 60479078 +
agcaaattggagatgcccgcag

SEQ ID NO: 198024 - DNA, 22 bp, Artificial Sequence
  Synthetic oligonucleotide; TTG chr2 60479065 60479086 60479082 60479087 +
gagatgcccgcagatacaacct

SEQ ID NO: 198025 - DNA, 22 bp, Artificial Sequence
  Synthetic oligonucleotide; CTG chr2 60479088 60479109 60479105 60479110 +
ccatcattggagcagcctcagt

SEQ ID NO: 198026 - DNA, 22 bp, Artificial Sequence
  Synthetic oligonucleotide; TTG chr2 60479097 60479118 60479114 60479119 +
gagcagcctcagtccagccatg

SEQ ID NO: 198027 - DNA, 22 bp, Artificial Sequence
  Synthetic oligonucleotide; CTC chr2 60479107 60479128 60479124 60479129 +
agtccagccatggggtgtggca

SEQ ID NO: 198028 - DNA, 22 bp, Artificial Sequence
  Synthetic oligonucleotide; CTG chr2 60479132 60479153 60479149 60479154 +
ccgtctgttcttggctctacta

SEQ ID NO: 198029 - DNA, 22 bp, Artificial Sequence
  Synthetic oligonucleotide; CTG chr2 60479139 60479160 60479156 60479161 +
ttcttggctctactaattctgc

SEQ ID NO: 198030 - DNA, 22 bp, Artificial Sequence
  Synthetic oligonucleotide; TTC chr2 60479142 60479163 60479159 60479164 +
ttggctctactaattctgctga

SEQ ID NO: 198031 - DNA, 22 bp, Artificial Sequence
  Synthetic oligonucleotide; CTT chr2 60479144 60479165 60479161 60479166 +
ggctctactaattctgctgatt

SEQ ID NO: 198032 - DNA, 22 bp, Artificial Sequence
  Synthetic oligonucleotide; TTG chr2 60479145 60479166 60479162 60479167 +
gctctactaattctgctgattc

SEQ ID NO: 198033 - DNA, 22 bp, Artificial Sequence
  Synthetic oligonucleotide; CTC chr2 60479149 60479170 60479166 60479171 +
tactaattctgctgattccata

SEQ ID NO: 198034 - DNA, 22 bp, Artificial Sequence
  Synthetic oligonucleotide; CTA chr2 60479151 60479172 60479168 60479173 +
ctaattctgctgattccatatg

SEQ ID NO: 198035 - DNA, 22 bp, Artificial Sequence
  Synthetic oligonucleotide; CTA chr2 60479154 60479175 60479171 60479176 +
attctgctgattccatatgagt

SEQ ID NO: 198036 - DNA, 22 bp, Artificial Sequence
  Synthetic oligonucleotide; TTC chr2 60479158 60479179 60479175 60479180 +
tgctgattccatatgagtaaca

SEQ ID NO: 198037 - DNA, 22 bp, Artificial Sequence
  Synthetic oligonucleotide; CTG chr2 60479160 60479181 60479177 60479182 +
ctgattccatatgagtaacatc

SEQ ID NO: 198038 - DNA, 22 bp, Artificial Sequence
  Synthetic oligonucleotide; CTG chr2 60479163 60479184 60479180 60479185 +
attccatatgagtaacatccaa

SEQ ID NO: 198039 - DNA, 22 bp, Artificial Sequence
  Synthetic oligonucleotide; TTC chr2 60479167 60479188 60479184 60479189 +
catatgagtaacatccaatgtt

SEQ ID NO: 198040 - DNA, 22 bp, Artificial Sequence
  Synthetic oligonucleotide; TTC chr2 60479190 60479211 60479207 60479212 +
ccagacacctccaagctcctcc

SEQ ID NO: 198041 - DNA, 22 bp, Artificial Sequence
  Synthetic oligonucleotide; CTC chr2 60479201 60479222 60479218 60479223 +
caagctcctccaaccaacagca

SEQ ID NO: 198042 - DNA, 22 bp, Artificial Sequence
  Synthetic oligonucleotide; CTC chr2 60479208 60479229 60479225 60479230 +
ctccaaccaacagcacaacatc

SEQ ID NO: 198043 - DNA, 22 bp, Artificial Sequence
  Synthetic oligonucleotide; CTC chr2 60479211 60479232 60479228 60479233 +
caaccaacagcacaacatcttc

SEQ ID NO: 198044 - DNA, 22 bp, Artificial Sequence
  Synthetic oligonucleotide; CTT chr2 60479232 60479253 60479249 60479254 +
caactcctttctacccacctag

SEQ ID NO: 198045 - DNA, 22 bp, Artificial Sequence
  Synthetic oligonucleotide; TTC chr2 60479233 60479254 60479250 60479255 +
aactcctttctacccacctagc

SEQ ID NO: 198046 - DNA, 22 bp, Artificial Sequence
  Synthetic oligonucleotide; CTC chr2 60479238 60479259 60479255 60479260 +
ctttctacccacctagcaggtc

SEQ ID NO: 198047 - DNA, 22 bp, Artificial Sequence
  Synthetic oligonucleotide; CTT chr2 60479241 60479262 60479258 60479263 +
tctacccacctagcaggtccac

SEQ ID NO: 198048 - DNA, 22 bp, Artificial Sequence
  Synthetic oligonucleotide; TTT chr2 60479242 60479263 60479259 60479264 +
ctacccacctagcaggtccacg

SEQ ID NO: 198049 - DNA, 22 bp, Artificial Sequence
  Synthetic oligonucleotide; TTC chr2 60479243 60479264 60479260 60479265 +
tacccacctagcaggtccacgt

SEQ ID NO: 198050 - DNA, 22 bp, Artificial Sequence
  Synthetic oligonucleotide; CTA chr2 60479245 60479266 60479262 60479267 +
cccacctagcaggtccacgtgg

SEQ ID NO: 198051 - DNA, 22 bp, Artificial Sequence
  Synthetic oligonucleotide; CTA chr2 60479253 60479274 60479270 60479275 +
gcaggtccacgtggggactcag

SEQ ID NO: 198052 - DNA, 22 bp, Artificial Sequence
  Synthetic oligonucleotide; CTC chr2 60479273 60479294 60479290 60479295 +
agcctatggacacctggcctct

SEQ ID NO: 198053 - DNA, 22 bp, Artificial Sequence
  Synthetic oligonucleotide; CTA chr2 60479279 60479300 60479296 60479301 +
tggacacctggcctctgcgggc

SEQ ID NO: 198054 - DNA, 22 bp, Artificial Sequence
  Synthetic oligonucleotide; CTG chr2 60479289 60479310 60479306 60479311 +
gcctctgcgggcacagcggcca

SEQ ID NO: 198055 - DNA, 22 bp, Artificial Sequence
  Synthetic oligonucleotide; CTC chr2 60479294 60479315 60479311 60479316 +
tgcgggcacagcggccacacac

SEQ ID NO: 198056 - DNA, 22 bp, Artificial Sequence
  Synthetic oligonucleotide; CTG chr2 60479296 60479317 60479313 60479318 +
cgggcacagcggccacacacca

SEQ ID NO: 198057 - DNA, 22 bp, Artificial Sequence
  Synthetic oligonucleotide; TTT chr2 60479340 60479361 60479357 60479362 +
tttgttttgagtctctctaaga

SEQ ID NO: 198058 - DNA, 22 bp, Artificial Sequence
  Synthetic oligonucleotide; TTT chr2 60479341 60479362 60479358 60479363 +
ttgttttgagtctctctaagac

SEQ ID NO: 198059 - DNA, 22 bp, Artificial Sequence
  Synthetic oligonucleotide; TTT chr2 60479342 60479363 60479359 60479364 +
tgttttgagtctctctaagact

SEQ ID NO: 198060 - DNA, 22 bp, Artificial Sequence
  Synthetic oligonucleotide; TTT chr2 60479343 60479364 60479360 60479365 +
gttttgagtctctctaagactg

SEQ ID NO: 198061 - DNA, 22 bp, Artificial Sequence
  Synthetic oligonucleotide; TTG chr2 60479344 60479365 60479361 60479366 +
ttttgagtctctctaagactgc

SEQ ID NO: 198062 - DNA, 22 bp, Artificial Sequence
  Synthetic oligonucleotide; TTT chr2 60479347 60479368 60479364 60479369 +
tgagtctctctaagactgcttg

SEQ ID NO: 198063 - DNA, 22 bp, Artificial Sequence
  Synthetic oligonucleotide; TTT chr2 60479348 60479369 60479365 60479370 +
gagtctctctaagactgcttgg

SEQ ID NO: 198064 - DNA, 22 bp, Artificial Sequence
  Synthetic oligonucleotide; TTG chr2 60479349 60479370 60479366 60479371 +
agtctctctaagactgcttggg

SEQ ID NO: 198065 - DNA, 22 bp, Artificial Sequence
  Synthetic oligonucleotide; CTC chr2 60479355 60479376 60479372 60479377 +
tctaagactgcttgggaaatga

SEQ ID NO: 198066 - DNA, 22 bp, Artificial Sequence
  Synthetic oligonucleotide; CTC chr2 60479357 60479378 60479374 60479379 +
taagactgcttgggaaatgagg

SEQ ID NO: 198067 - DNA, 22 bp, Artificial Sequence
  Synthetic oligonucleotide; CTA chr2 60479359 60479380 60479376 60479381 +
agactgcttgggaaatgaggtc

SEQ ID NO: 198068 - DNA, 22 bp, Artificial Sequence
  Synthetic oligonucleotide; CTG chr2 60479365 60479386 60479382 60479387 +
cttgggaaatgaggtctctcag

SEQ ID NO: 198069 - DNA, 22 bp, Artificial Sequence
  Synthetic oligonucleotide; CTT chr2 60479368 60479389 60479385 60479390 +
gggaaatgaggtctctcaggtc

SEQ ID NO: 198070 - DNA, 22 bp, Artificial Sequence
  Synthetic oligonucleotide; TTG chr2 60479369 60479390 60479386 60479391 +
ggaaatgaggtctctcaggtct

SEQ ID NO: 198071 - DNA, 22 bp, Artificial Sequence
  Synthetic oligonucleotide; CTC chr2 60479383 60479404 60479400 60479405 +
tcaggtctagcatttccacgca

SEQ ID NO: 198072 - DNA, 22 bp, Artificial Sequence
  Synthetic oligonucleotide; CTC chr2 60479385 60479406 60479402 60479407 +
aggtctagcatttccacgcagt

SEQ ID NO: 198073 - DNA, 22 bp, Artificial Sequence
  Synthetic oligonucleotide; CTA chr2 60479392 60479413 60479409 60479414 +
gcatttccacgcagtcccaacc

SEQ ID NO: 198074 - DNA, 22 bp, Artificial Sequence
  Synthetic oligonucleotide; TTT chr2 60479398 60479419 60479415 60479420 +
ccacgcagtcccaaccatgagg

SEQ ID NO: 198075 - DNA, 22 bp, Artificial Sequence
  Synthetic oligonucleotide; TTC chr2 60479399 60479420 60479416 60479421 +
cacgcagtcccaaccatgaggc

SEQ ID NO: 198076 - DNA, 22 bp, Artificial Sequence
  Synthetic oligonucleotide; CTG chr2 60479423 60479444 60479440 60479445 +
accagaggccaccaacgtcaag

SEQ ID NO: 198077 - DNA, 22 bp, Artificial Sequence
  Synthetic oligonucleotide; CTC chr2 60479448 60479469 60479465 60479470 +
tctcaggtctactaggaacagg

SEQ ID NO: 198078 - DNA, 22 bp, Artificial Sequence
  Synthetic oligonucleotide; CTC chr2 60479450 60479471 60479467 60479472 +
tcaggtctactaggaacaggaa

SEQ ID NO: 198079 - DNA, 22 bp, Artificial Sequence
  Synthetic oligonucleotide; CTC chr2 60479452 60479473 60479469 60479474 +
aggtctactaggaacaggaaag

SEQ ID NO: 198080 - DNA, 22 bp, Artificial Sequence
  Synthetic oligonucleotide; CTA chr2 60479459 60479480 60479476 60479481 +
ctaggaacaggaaagaataact

SEQ ID NO: 198081 - DNA, 22 bp, Artificial Sequence
  Synthetic oligonucleotide; CTA chr2 60479462 60479483 60479479 60479484 +
ggaacaggaaagaataactctc

SEQ ID NO: 198082 - DNA, 22 bp, Artificial Sequence
  Synthetic oligonucleotide; CTC chr2 60479482 60479503 60479499 60479504 +
tcccttaacaagcccctcaggc

SEQ ID NO: 198083 - DNA, 22 bp, Artificial Sequence
  Synthetic oligonucleotide; CTC chr2 60479484 60479505 60479501 60479506 +
ccttaacaagcccctcaggctg

SEQ ID NO: 198084 - DNA, 22 bp, Artificial Sequence
  Synthetic oligonucleotide; CTT chr2 60479488 60479509 60479505 60479510 +
aacaagcccctcaggctgaaat

SEQ ID NO: 198085 - DNA, 22 bp, Artificial Sequence
  Synthetic oligonucleotide; TTA chr2 60479489 60479510 60479506 60479511 +
acaagcccctcaggctgaaatc

SEQ ID NO: 198086 - DNA, 22 bp, Artificial Sequence
  Synthetic oligonucleotide; CTC chr2 60479500 60479521 60479517 60479522 +
aggctgaaatccttttgcttcc

SEQ ID NO: 198087 - DNA, 22 bp, Artificial Sequence
  Synthetic oligonucleotide; CTG chr2 60479506 60479527 60479523 60479528 +
aaatccttttgcttccagggcc

SEQ ID NO: 198088 - DNA, 22 bp, Artificial Sequence
  Synthetic oligonucleotide; CTT chr2 60479514 60479535 60479531 60479536 +
ttgcttccagggcctcaacctt

SEQ ID NO: 198089 - DNA, 22 bp, Artificial Sequence
  Synthetic oligonucleotide; TTT chr2 60479515 60479536 60479532 60479537 +
tgcttccagggcctcaaccttc

SEQ ID NO: 198090 - DNA, 22 bp, Artificial Sequence
  Synthetic oligonucleotide; TTT chr2 60479516 60479537 60479533 60479538 +
gcttccagggcctcaaccttct

SEQ ID NO: 198091 - DNA, 22 bp, Artificial Sequence
  Synthetic oligonucleotide; TTG chr2 60479517 60479538 60479534 60479539 +
cttccagggcctcaaccttcta

SEQ ID NO: 198092 - DNA, 22 bp, Artificial Sequence
  Synthetic oligonucleotide; CTT chr2 60479520 60479541 60479537 60479542 +
ccagggcctcaaccttctactg

SEQ ID NO: 198093 - DNA, 22 bp, Artificial Sequence
  Synthetic oligonucleotide; TTC chr2 60479521 60479542 60479538 60479543 +
cagggcctcaaccttctactgc

SEQ ID NO: 198094 - DNA, 22 bp, Artificial Sequence
  Synthetic oligonucleotide; CTC chr2 60479530 60479551 60479547 60479552 +
aaccttctactgctgggtagaa

SEQ ID NO: 198095 - DNA, 22 bp, Artificial Sequence
  Synthetic oligonucleotide; CTT chr2 60479536 60479557 60479553 60479558 +
ctactgctgggtagaaagcccc

SEQ ID NO: 198096 - DNA, 22 bp, Artificial Sequence
  Synthetic oligonucleotide; TTC chr2 60479537 60479558 60479554 60479559 +
tactgctgggtagaaagccccc

SEQ ID NO: 198097 - DNA, 22 bp, Artificial Sequence
  Synthetic oligonucleotide; CTA chr2 60479539 60479560 60479556 60479561 +
ctgctgggtagaaagccccctc

SEQ ID NO: 198098 - DNA, 22 bp, Artificial Sequence
  Synthetic oligonucleotide; CTG chr2 60479542 60479563 60479559 60479564 +
ctgggtagaaagccccctctgt

SEQ ID NO: 198099 - DNA, 22 bp, Artificial Sequence
  Synthetic oligonucleotide; CTG chr2 60479545 60479566 60479562 60479567 +
ggtagaaagccccctctgtcac

SEQ ID NO: 198100 - DNA, 22 bp, Artificial Sequence
  Synthetic oligonucleotide; CTC chr2 60479561 60479582 60479578 60479583 +
tgtcaccggcccacagatctca

SEQ ID NO: 198101 - DNA, 22 bp, Artificial Sequence
  Synthetic oligonucleotide; CTG chr2 60479563 60479584 60479580 60479585 +
tcaccggcccacagatctcagc

SEQ ID NO: 198102 - DNA, 22 bp, Artificial Sequence
  Synthetic oligonucleotide; CTC chr2 60479582 60479603 60479599 60479604 +
agctgccatcgcactcaaaccc

SEQ ID NO: 198103 - DNA, 22 bp, Artificial Sequence
  Synthetic oligonucleotide; CTG chr2 60479587 60479608 60479604 60479609 +
ccatcgcactcaaaccctgtca

SEQ ID NO: 198104 - DNA, 22 bp, Artificial Sequence
  Synthetic oligonucleotide; CTC chr2 60479598 60479619 60479615 60479620 +
aaaccctgtcaggcggtggaga

SEQ ID NO: 198105 - DNA, 22 bp, Artificial Sequence
  Synthetic oligonucleotide; CTG chr2 60479606 60479627 60479623 60479628 +
tcaggcggtggagagtgtggac

SEQ ID NO: 198106 - DNA, 22 bp, Artificial Sequence
  Synthetic oligonucleotide; CTG chr2 60479637 60479658 60479654 60479659 +
acgcggtttcaaagaggccgac

SEQ ID NO: 198107 - DNA, 22 bp, Artificial Sequence
  Synthetic oligonucleotide; TTT chr2 60479646 60479667 60479663 60479668 +
caaagaggccgaccaggcaaga

SEQ ID NO: 198108 - DNA, 22 bp, Artificial Sequence
  Synthetic oligonucleotide; TTC chr2 60479647 60479668 60479664 60479669 +
aaagaggccgaccaggcaagaa

SEQ ID NO: 198109 - DNA, 22 bp, Artificial Sequence
  Synthetic oligonucleotide; CTG chr2 60479677 60479698 60479694 60479699 +
tactcctgccccagctctaatg

SEQ ID NO: 198110 - DNA, 22 bp, Artificial Sequence
  Synthetic oligonucleotide; CTC chr2 60479682 60479703 60479699 60479704 +
ctgccccagctctaatgcaata

SEQ ID NO: 198111 - DNA, 22 bp, Artificial Sequence
  Synthetic oligonucleotide; CTG chr2 60479685 60479706 60479702 60479707 +
ccccagctctaatgcaataaaa

SEQ ID NO: 198112 - DNA, 22 bp, Artificial Sequence
  Synthetic oligonucleotide; CTC chr2 60479694 60479715 60479711 60479716 +
taatgcaataaaatgtctttta

SEQ ID NO: 198113 - DNA, 22 bp, Artificial Sequence
  Synthetic oligonucleotide; CTA chr2 60479696 60479717 60479713 60479718 +
atgcaataaaatgtcttttatc

SEQ ID NO: 198114 - DNA, 22 bp, Artificial Sequence
  Synthetic oligonucleotide; CTT chr2 60479713 60479734 60479730 60479735 +
ttatcaatgtaattcaaggcaa

SEQ ID NO: 198115 - DNA, 22 bp, Artificial Sequence
  Synthetic oligonucleotide; TTT chr2 60479714 60479735 60479731 60479736 +
tatcaatgtaattcaaggcaaa

SEQ ID NO: 198116 - DNA, 22 bp, Artificial Sequence
  Synthetic oligonucleotide; TTT chr2 60479715 60479736 60479732 60479737 +
atcaatgtaattcaaggcaaag

SEQ ID NO: 198117 - DNA, 22 bp, Artificial Sequence
  Synthetic oligonucleotide; TTA chr2 60479716 60479737 60479733 60479738 +
tcaatgtaattcaaggcaaaga

SEQ ID NO: 198118 - DNA, 22 bp, Artificial Sequence
  Synthetic oligonucleotide; TTC chr2 60479728 60479749 60479745 60479750 +
aaggcaaagagtcaagggtctg

SEQ ID NO: 198119 - DNA, 22 bp, Artificial Sequence
  Synthetic oligonucleotide; CTG chr2 60479750 60479771 60479767 60479772 +
tcaccattttaaagaggcttat

SEQ ID NO: 198120 - DNA, 22 bp, Artificial Sequence
  Synthetic oligonucleotide; TTT chr2 60479759 60479780 60479776 60479781 +
taaagaggcttattacatggcc

SEQ ID NO: 198121 - DNA, 22 bp, Artificial Sequence
  Synthetic oligonucleotide; TTT chr2 60479760 60479781 60479777 60479782 +
aaagaggcttattacatggcca

SEQ ID NO: 198122 - DNA, 22 bp, Artificial Sequence
  Synthetic oligonucleotide; TTA chr2 60479761 60479782 60479778 60479783 +
aagaggcttattacatggccac

SEQ ID NO: 198123 - DNA, 22 bp, Artificial Sequence
  Synthetic oligonucleotide; CTT chr2 60479770 60479791 60479787 60479792 +
attacatggccacaaaaatttg

SEQ ID NO: 198124 - DNA, 22 bp, Artificial Sequence
  Synthetic oligonucleotide; TTA chr2 60479771 60479792 60479788 60479793 +
ttacatggccacaaaaatttgc

SEQ ID NO: 198125 - DNA, 22 bp, Artificial Sequence
  Synthetic oligonucleotide; TTA chr2 60479774 60479795 60479791 60479796 +
catggccacaaaaatttgcctc

SEQ ID NO: 198126 - DNA, 22 bp, Artificial Sequence
  Synthetic oligonucleotide; TTT chr2 60479791 60479812 60479808 60479813 +
gcctcaggctcaaacctggcat

SEQ ID NO: 198127 - DNA, 22 bp, Artificial Sequence
  Synthetic oligonucleotide; TTG chr2 60479792 60479813 60479809 60479814 +
cctcaggctcaaacctggcatg

SEQ ID NO: 198128 - DNA, 22 bp, Artificial Sequence
  Synthetic oligonucleotide; CTC chr2 60479796 60479817 60479813 60479818 +
aggctcaaacctggcatgtaag

SEQ ID NO: 198129 - DNA, 22 bp, Artificial Sequence
  Synthetic oligonucleotide; CTC chr2 60479802 60479823 60479819 60479824 +
aaacctggcatgtaaggtatca

SEQ ID NO: 198130 - DNA, 22 bp, Artificial Sequence
  Synthetic oligonucleotide; CTG chr2 60479809 60479830 60479826 60479831 +
gcatgtaaggtatcagcgtggg

SEQ ID NO: 198131 - DNA, 22 bp, Artificial Sequence
  Synthetic oligonucleotide; TTC chr2 60479839 60479860 60479856 60479861 +
ttttgattttattttattttct

SEQ ID NO: 198132 - DNA, 22 bp, Artificial Sequence
  Synthetic oligonucleotide; CTT chr2 60479841 60479862 60479858 60479863 +
ttgattttattttattttctta

SEQ ID NO: 198133 - DNA, 22 bp, Artificial Sequence
  Synthetic oligonucleotide; TTT chr2 60479842 60479863 60479859 60479864 +
tgattttattttattttcttac

SEQ ID NO: 198134 - DNA, 22 bp, Artificial Sequence
  Synthetic oligonucleotide; TTT chr2 60479843 60479864 60479860 60479865 +
gattttattttattttcttaca

SEQ ID NO: 198135 - DNA, 22 bp, Artificial Sequence
  Synthetic oligonucleotide; TTG chr2 60479844 60479865 60479861 60479866 +
attttattttattttcttacaa

SEQ ID NO: 198136 - DNA, 22 bp, Artificial Sequence
  Synthetic oligonucleotide; TTT chr2 60479848 60479869 60479865 60479870 +
tattttattttcttacaaaatc

SEQ ID NO: 198137 - DNA, 22 bp, Artificial Sequence
  Synthetic oligonucleotide; TTT chr2 60479849 60479870 60479866 60479871 +
attttattttcttacaaaatct

SEQ ID NO: 198138 - DNA, 22 bp, Artificial Sequence
  Synthetic oligonucleotide; TTA chr2 60479850 60479871 60479867 60479872 +
ttttattttcttacaaaatctg

SEQ ID NO: 198139 - DNA, 22 bp, Artificial Sequence
  Synthetic oligonucleotide; TTT chr2 60479853 60479874 60479870 60479875 +
tattttcttacaaaatctgaaa

SEQ ID NO: 198140 - DNA, 22 bp, Artificial Sequence
  Synthetic oligonucleotide; TTT chr2 60479854 60479875 60479871 60479876 +
attttcttacaaaatctgaaaa

SEQ ID NO: 198141 - DNA, 22 bp, Artificial Sequence
  Synthetic oligonucleotide; TTA chr2 60479855 60479876 60479872 60479877 +
ttttcttacaaaatctgaaaat

SEQ ID NO: 198142 - DNA, 22 bp, Artificial Sequence
  Synthetic oligonucleotide; TTT chr2 60479858 60479879 60479875 60479880 +
tcttacaaaatctgaaaatgaa

SEQ ID NO: 198143 - DNA, 22 bp, Artificial Sequence
  Synthetic oligonucleotide; TTT chr2 60479859 60479880 60479876 60479881 +
cttacaaaatctgaaaatgaaa

SEQ ID NO: 198144 - DNA, 22 bp, Artificial Sequence
  Synthetic oligonucleotide; TTC chr2 60479860 60479881 60479877 60479882 +
ttacaaaatctgaaaatgaaac

SEQ ID NO: 198145 - DNA, 22 bp, Artificial Sequence
  Synthetic oligonucleotide; CTT chr2 60479862 60479883 60479879 60479884 +
acaaaatctgaaaatgaaacgc

SEQ ID NO: 198146 - DNA, 22 bp, Artificial Sequence
  Synthetic oligonucleotide; TTA chr2 60479863 60479884 60479880 60479885 +
caaaatctgaaaatgaaacgct

SEQ ID NO: 198147 - DNA, 22 bp, Artificial Sequence
  Synthetic oligonucleotide; CTG chr2 60479872 60479893 60479889 60479894 +
aaaatgaaacgcttctgtccct

SEQ ID NO: 198148 - DNA, 22 bp, Artificial Sequence
  Synthetic oligonucleotide; CTT chr2 60479886 60479907 60479903 60479908 +
ctgtccctcccttccaccaacc

SEQ ID NO: 198149 - DNA, 22 bp, Artificial Sequence
  Synthetic oligonucleotide; TTC chr2 60479887 60479908 60479904 60479909 +
tgtccctcccttccaccaaccg

SEQ ID NO: 198150 - DNA, 22 bp, Artificial Sequence
  Synthetic oligonucleotide; CTG chr2 60479889 60479910 60479906 60479911 +
tccctcccttccaccaaccgtt

SEQ ID NO: 198151 - DNA, 22 bp, Artificial Sequence
  Synthetic oligonucleotide; CTC chr2 60479895 60479916 60479912 60479917 +
ccttccaccaaccgttttttga

SEQ ID NO: 198152 - DNA, 22 bp, Artificial Sequence
  Synthetic oligonucleotide; CTT chr2 60479899 60479920 60479916 60479921 +
ccaccaaccgttttttgattta

SEQ ID NO: 198153 - DNA, 22 bp, Artificial Sequence
  Synthetic oligonucleotide; TTC chr2 60479900 60479921 60479917 60479922 +
caccaaccgttttttgatttat

SEQ ID NO: 198154 - DNA, 22 bp, Artificial Sequence
  Synthetic oligonucleotide; TTT chr2 60479912 60479933 60479929 60479934 +
tttgatttatggggaggaggaa

SEQ ID NO: 198155 - DNA, 22 bp, Artificial Sequence
  Synthetic oligonucleotide; TTT chr2 60479913 60479934 60479930 60479935 +
ttgatttatggggaggaggaaa

SEQ ID NO: 198156 - DNA, 22 bp, Artificial Sequence
  Synthetic oligonucleotide; TTT chr2 60479914 60479935 60479931 60479936 +
tgatttatggggaggaggaaag

SEQ ID NO: 198157 - DNA, 22 bp, Artificial Sequence
  Synthetic oligonucleotide; TTT chr2 60479915 60479936 60479932 60479937 +
gatttatggggaggaggaaaga

SEQ ID NO: 198158 - DNA, 22 bp, Artificial Sequence
  Synthetic oligonucleotide; TTG chr2 60479916 60479937 60479933 60479938 +
atttatggggaggaggaaagaa

SEQ ID NO: 198159 - DNA, 22 bp, Artificial Sequence
  Synthetic oligonucleotide; TTT chr2 60479920 60479941 60479937 60479942 +
atggggaggaggaaagaaatct

SEQ ID NO: 198160 - DNA, 22 bp, Artificial Sequence
  Synthetic oligonucleotide; TTA chr2 60479921 60479942 60479938 60479943 +
tggggaggaggaaagaaatctg

SEQ ID NO: 198161 - DNA, 22 bp, Artificial Sequence
  Synthetic oligonucleotide; CTG chr2 60479943 60479964 60479960 60479965 +
aagttgacaggttgggacaact

SEQ ID NO: 198162 - DNA, 22 bp, Artificial Sequence
  Synthetic oligonucleotide; TTG chr2 60479949 60479970 60479966 60479971 +
acaggttgggacaactccactc

SEQ ID NO: 198163 - DNA, 22 bp, Artificial Sequence
  Synthetic oligonucleotide; TTG chr2 60479957 60479978 60479974 60479979 +
ggacaactccactcagctttct

SEQ ID NO: 198164 - DNA, 22 bp, Artificial Sequence
  Synthetic oligonucleotide; CTC chr2 60479966 60479987 60479983 60479988 +
cactcagctttctcactcaaaa

SEQ ID NO: 198165 - DNA, 22 bp, Artificial Sequence
  Synthetic oligonucleotide; CTC chr2 60479971 60479992 60479988 60479993 +
agctttctcactcaaaagctgc

SEQ ID NO: 198166 - DNA, 22 bp, Artificial Sequence
  Synthetic oligonucleotide; CTT chr2 60479976 60479997 60479993 60479998 +
tctcactcaaaagctgcttttg

SEQ ID NO: 198167 - DNA, 22 bp, Artificial Sequence
  Synthetic oligonucleotide; TTT chr2 60479977 60479998 60479994 60479999 +
ctcactcaaaagctgcttttgt

SEQ ID NO: 198168 - DNA, 22 bp, Artificial Sequence
  Synthetic oligonucleotide; TTC chr2 60479978 60479999 60479995 60480000 +
tcactcaaaagctgcttttgtt

SEQ ID NO: 198169 - DNA, 22 bp, Artificial Sequence
  Synthetic oligonucleotide; CTC chr2 60479980 60480001 60479997 60480002 +
actcaaaagctgcttttgttaa

SEQ ID NO: 198170 - DNA, 22 bp, Artificial Sequence
  Synthetic oligonucleotide; CTC chr2 60479984 60480005 60480001 60480006 +
aaaagctgcttttgttaaatca

SEQ ID NO: 198171 - DNA, 22 bp, Artificial Sequence
  Synthetic oligonucleotide; CTG chr2 60479992 60480013 60480009 60480014 +
cttttgttaaatcatactttgc

SEQ ID NO: 198172 - DNA, 22 bp, Artificial Sequence
  Synthetic oligonucleotide; CTT chr2 60479995 60480016 60480012 60480017 +
ttgttaaatcatactttgcatt

SEQ ID NO: 198173 - DNA, 22 bp, Artificial Sequence
  Synthetic oligonucleotide; TTT chr2 60479996 60480017 60480013 60480018 +
tgttaaatcatactttgcattt

SEQ ID NO: 198174 - DNA, 22 bp, Artificial Sequence
  Synthetic oligonucleotide; TTT chr2 60479997 60480018 60480014 60480019 +
gttaaatcatactttgcattta

SEQ ID NO: 198175 - DNA, 22 bp, Artificial Sequence
  Synthetic oligonucleotide; TTG chr2 60479998 60480019 60480015 60480020 +
ttaaatcatactttgcatttat

SEQ ID NO: 198176 - DNA, 22 bp, Artificial Sequence
  Synthetic oligonucleotide; TTA chr2 60480001 60480022 60480018 60480023 +
aatcatactttgcatttatggc

SEQ ID NO: 198177 - DNA, 22 bp, Artificial Sequence
  Synthetic oligonucleotide; CTT chr2 60480011 60480032 60480028 60480033 +
tgcatttatggcctgcggctct

SEQ ID NO: 198178 - DNA, 22 bp, Artificial Sequence
  Synthetic oligonucleotide; TTT chr2 60480012 60480033 60480029 60480034 +
gcatttatggcctgcggctctt

SEQ ID NO: 198179 - DNA, 22 bp, Artificial Sequence
  Synthetic oligonucleotide; TTG chr2 60480013 60480034 60480030 60480035 +
catttatggcctgcggctcttg

SEQ ID NO: 198180 - DNA, 22 bp, Artificial Sequence
  Synthetic oligonucleotide; TTT chr2 60480018 60480039 60480035 60480040 +
atggcctgcggctcttggctga

SEQ ID NO: 198181 - DNA, 22 bp, Artificial Sequence
  Synthetic oligonucleotide; TTA chr2 60480019 60480040 60480036 60480041 +
tggcctgcggctcttggctgac

SEQ ID NO: 198182 - DNA, 22 bp, Artificial Sequence
  Synthetic oligonucleotide; CTG chr2 60480026 60480047 60480043 60480048 +
cggctcttggctgactttggcg

SEQ ID NO: 198183 - DNA, 22 bp, Artificial Sequence
  Synthetic oligonucleotide; CTC chr2 60480032 60480053 60480049 60480054 +
ttggctgactttggcggctcct

SEQ ID NO: 198184 - DNA, 22 bp, Artificial Sequence
  Synthetic oligonucleotide; CTT chr2 60480034 60480055 60480051 60480056 +
ggctgactttggcggctcctcc

SEQ ID NO: 198185 - DNA, 22 bp, Artificial Sequence
  Synthetic oligonucleotide; TTG chr2 60480035 60480056 60480052 60480057 +
gctgactttggcggctcctccg

SEQ ID NO: 198186 - DNA, 22 bp, Artificial Sequence
  Synthetic oligonucleotide; CTG chr2 60480039 60480060 60480056 60480061 +
actttggcggctcctccggtgt

SEQ ID NO: 198187 - DNA, 22 bp, Artificial Sequence
  Synthetic oligonucleotide; CTT chr2 60480043 60480064 60480060 60480065 +
tggcggctcctccggtgtggag

SEQ ID NO: 198188 - DNA, 22 bp, Artificial Sequence
  Synthetic oligonucleotide; TTT chr2 60480044 60480065 60480061 60480066 +
ggcggctcctccggtgtggagc

SEQ ID NO: 198189 - DNA, 22 bp, Artificial Sequence
  Synthetic oligonucleotide; TTG chr2 60480045 60480066 60480062 60480067 +
gcggctcctccggtgtggagca

SEQ ID NO: 198190 - DNA, 22 bp, Artificial Sequence
  Synthetic oligonucleotide; CTC chr2 60480052 60480073 60480069 60480074 +
ctccggtgtggagcaagctgtg

SEQ ID NO: 198191 - DNA, 22 bp, Artificial Sequence
  Synthetic oligonucleotide; CTC chr2 60480055 60480076 60480072 60480077 +
cggtgtggagcaagctgtggac

SEQ ID NO: 198192 - DNA, 22 bp, Artificial Sequence
  Synthetic oligonucleotide; CTG chr2 60480072 60480093 60480089 60480094 +
tggacttccccgggaggaggcc

SEQ ID NO: 198193 - DNA, 22 bp, Artificial Sequence
  Synthetic oligonucleotide; CTT chr2 60480079 60480100 60480096 60480101 +
ccccgggaggaggccccactga

SEQ ID NO: 198194 - DNA, 22 bp, Artificial Sequence
  Synthetic oligonucleotide; TTC chr2 60480080 60480101 60480097 60480102 +
cccgggaggaggccccactgag

SEQ ID NO: 198195 - DNA, 22 bp, Artificial Sequence
  Synthetic oligonucleotide; CTG chr2 60480100 60480121 60480117 60480122 +
agatgactgccccactctgcac

SEQ ID NO: 198196 - DNA, 22 bp, Artificial Sequence
  Synthetic oligonucleotide; CTG chr2 60480109 60480130 60480126 60480131 +
ccccactctgcaccaaggacag

SEQ ID NO: 198197 - DNA, 22 bp, Artificial Sequence
  Synthetic oligonucleotide; CTC chr2 60480117 60480138 60480134 60480139 +
tgcaccaaggacagcgaggagg

SEQ ID NO: 198198 - DNA, 22 bp, Artificial Sequence
  Synthetic oligonucleotide; CTG chr2 60480119 60480140 60480136 60480141 +
caccaaggacagcgaggagggg

SEQ ID NO: 198199 - DNA, 22 bp, Artificial Sequence
  Synthetic oligonucleotide; CTG chr2 60480164 60480185 60480181 60480186 +
gaggccagggggctggggacat

SEQ ID NO: 198200 - DNA, 22 bp, Artificial Sequence
  Synthetic oligonucleotide; CTG chr2 60480179 60480200 60480196 60480201 +
gggacatgaaggcactggctag

SEQ ID NO: 198201 - DNA, 22 bp, Artificial Sequence
  Synthetic oligonucleotide; CTG chr2 60480196 60480217 60480213 60480218 +
gctaggtaacacaaaggcctgt

SEQ ID NO: 198202 - DNA, 22 bp, Artificial Sequence
  Synthetic oligonucleotide; CTA chr2 60480200 60480221 60480217 60480222 +
ggtaacacaaaggcctgtaaag

SEQ ID NO: 198203 - DNA, 22 bp, Artificial Sequence
  Synthetic oligonucleotide; CTG chr2 60480217 60480238 60480234 60480239 +
taaaggatatgtctctcttctg

SEQ ID NO: 198204 - DNA, 22 bp, Artificial Sequence
  Synthetic oligonucleotide; CTC chr2 60480232 60480253 60480249 60480254 +
tcttctgaacctggctctccac

SEQ ID NO: 198205 - DNA, 22 bp, Artificial Sequence
  Synthetic oligonucleotide; CTC chr2 60480234 60480255 60480251 60480256 +
ttctgaacctggctctccactc

SEQ ID NO: 198206 - DNA, 22 bp, Artificial Sequence
  Synthetic oligonucleotide; CTT chr2 60480236 60480257 60480253 60480258 +
ctgaacctggctctccactcca

SEQ ID NO: 198207 - DNA, 22 bp, Artificial Sequence
  Synthetic oligonucleotide; TTC chr2 60480237 60480258 60480254 60480259 +
tgaacctggctctccactccat

SEQ ID NO: 198208 - DNA, 22 bp, Artificial Sequence
  Synthetic oligonucleotide; CTG chr2 60480239 60480260 60480256 60480261 +
aacctggctctccactccattt

SEQ ID NO: 198209 - DNA, 22 bp, Artificial Sequence
  Synthetic oligonucleotide; CTG chr2 60480245 60480266 60480262 60480267 +
gctctccactccatttctcctg

SEQ ID NO: 198210 - DNA, 22 bp, Artificial Sequence
  Synthetic oligonucleotide; CTC chr2 60480249 60480270 60480266 60480271 +
tccactccatttctcctggatc

SEQ ID NO: 198211 - DNA, 22 bp, Artificial Sequence
  Synthetic oligonucleotide; CTC chr2 60480251 60480272 60480268 60480273 +
cactccatttctcctggatcca

SEQ ID NO: 198212 - DNA, 22 bp, Artificial Sequence
  Synthetic oligonucleotide; CTC chr2 60480256 60480277 60480273 60480278 +
catttctcctggatccaagtct

SEQ ID NO: 198213 - DNA, 22 bp, Artificial Sequence
  Synthetic oligonucleotide; TTT chr2 60480261 60480282 60480278 60480283 +
ctcctggatccaagtctccctg

SEQ ID NO: 198214 - DNA, 22 bp, Artificial Sequence
  Synthetic oligonucleotide; TTC chr2 60480262 60480283 60480279 60480284 +
tcctggatccaagtctccctgt

SEQ ID NO: 198215 - DNA, 22 bp, Artificial Sequence
  Synthetic oligonucleotide; CTC chr2 60480264 60480285 60480281 60480286 +
ctggatccaagtctccctgtaa

SEQ ID NO: 198216 - DNA, 22 bp, Artificial Sequence
  Synthetic oligonucleotide; CTG chr2 60480267 60480288 60480284 60480289 +
gatccaagtctccctgtaatca

SEQ ID NO: 198217 - DNA, 22 bp, Artificial Sequence
  Synthetic oligonucleotide; CTC chr2 60480279 60480300 60480296 60480301 +
cctgtaatcagcatgtatctac

SEQ ID NO: 198218 - DNA, 22 bp, Artificial Sequence
  Synthetic oligonucleotide; CTG chr2 60480283 60480304 60480300 60480305 +
taatcagcatgtatctaccact

SEQ ID NO: 198219 - DNA, 22 bp, Artificial Sequence
  Synthetic oligonucleotide; CTA chr2 60480300 60480321 60480317 60480322 +
ccactggttctccaactaaaag

SEQ ID NO: 198220 - DNA, 22 bp, Artificial Sequence
  Synthetic oligonucleotide; CTG chr2 60480306 60480327 60480323 60480328 +
gttctccaactaaaagttcaag

SEQ ID NO: 198221 - DNA, 22 bp, Artificial Sequence
  Synthetic oligonucleotide; TTC chr2 60480310 60480331 60480327 60480332 +
tccaactaaaagttcaaggctt

SEQ ID NO: 198222 - DNA, 22 bp, Artificial Sequence
  Synthetic oligonucleotide; CTC chr2 60480312 60480333 60480329 60480334 +
caactaaaagttcaaggcttct

SEQ ID NO: 198223 - DNA, 22 bp, Artificial Sequence
  Synthetic oligonucleotide; CTA chr2 60480318 60480339 60480335 60480340 +
aaagttcaaggcttctaagaac

SEQ ID NO: 198224 - DNA, 22 bp, Artificial Sequence
  Synthetic oligonucleotide; TTC chr2 60480325 60480346 60480342 60480347 +
aaggcttctaagaaccaagact

SEQ ID NO: 198225 - DNA, 22 bp, Artificial Sequence
  Synthetic oligonucleotide; CTT chr2 60480332 60480353 60480349 60480354 +
ctaagaaccaagactcagtggt

SEQ ID NO: 198226 - DNA, 22 bp, Artificial Sequence
  Synthetic oligonucleotide; TTC chr2 60480333 60480354 60480350 60480355 +
taagaaccaagactcagtggtc

SEQ ID NO: 198227 - DNA, 22 bp, Artificial Sequence
  Synthetic oligonucleotide; CTA chr2 60480335 60480356 60480352 60480357 +
agaaccaagactcagtggtcta

SEQ ID NO: 198228 - DNA, 22 bp, Artificial Sequence
  Synthetic oligonucleotide; CTC chr2 60480348 60480369 60480365 60480370 +
agtggtctacctctgactgtcc

SEQ ID NO: 198229 - DNA, 22 bp, Artificial Sequence
  Synthetic oligonucleotide; CTA chr2 60480357 60480378 60480374 60480379 +
cctctgactgtccagcaccatg

SEQ ID NO: 198230 - DNA, 22 bp, Artificial Sequence
  Synthetic oligonucleotide; CTC chr2 60480361 60480382 60480378 60480383 +
tgactgtccagcaccatgctgg

SEQ ID NO: 198231 - DNA, 22 bp, Artificial Sequence
  Synthetic oligonucleotide; CTG chr2 60480363 60480384 60480380 60480385 +
actgtccagcaccatgctgggc

SEQ ID NO: 198232 - DNA, 22 bp, Artificial Sequence
  Synthetic oligonucleotide; CTG chr2 60480367 60480388 60480384 60480389 +
tccagcaccatgctgggcaaag

SEQ ID NO: 198233 - DNA, 22 bp, Artificial Sequence
  Synthetic oligonucleotide; CTG chr2 60480382 60480403 60480399 60480404 +
ggcaaagaagagcccctcaata

SEQ ID NO: 198234 - DNA, 22 bp, Artificial Sequence
  Synthetic oligonucleotide; CTC chr2 60480400 60480421 60480417 60480422 +
aataaataattaggattcaagc

SEQ ID NO: 198235 - DNA, 22 bp, Artificial Sequence
  Synthetic oligonucleotide; TTA chr2 60480412 60480433 60480429 60480434 +
ggattcaagcgctgtgcagtga

SEQ ID NO: 198236 - DNA, 22 bp, Artificial Sequence
  Synthetic oligonucleotide; TTC chr2 60480418 60480439 60480435 60480440 +
aagcgctgtgcagtgaactttt

SEQ ID NO: 198237 - DNA, 22 bp, Artificial Sequence
  Synthetic oligonucleotide; CTG chr2 60480426 60480447 60480443 60480448 +
tgcagtgaacttttcttcctgt

SEQ ID NO: 198238 - DNA, 22 bp, Artificial Sequence
  Synthetic oligonucleotide; CTT chr2 60480438 60480459 60480455 60480460 +
ttcttcctgttggagagccatt

SEQ ID NO: 198239 - DNA, 22 bp, Artificial Sequence
  Synthetic oligonucleotide; TTT chr2 60480439 60480460 60480456 60480461 +
tcttcctgttggagagccattc

SEQ ID NO: 198240 - DNA, 22 bp, Artificial Sequence
  Synthetic oligonucleotide; TTT chr2 60480440 60480461 60480457 60480462 +
cttcctgttggagagccattct

SEQ ID NO: 198241 - DNA, 22 bp, Artificial Sequence
  Synthetic oligonucleotide; TTC chr2 60480441 60480462 60480458 60480463 +
ttcctgttggagagccattcta

SEQ ID NO: 198242 - DNA, 22 bp, Artificial Sequence
  Synthetic oligonucleotide; CTT chr2 60480443 60480464 60480460 60480465 +
cctgttggagagccattctaaa

SEQ ID NO: 198243 - DNA, 22 bp, Artificial Sequence
  Synthetic oligonucleotide; TTC chr2 60480444 60480465 60480461 60480466 +
ctgttggagagccattctaaat

SEQ ID NO: 198244 - DNA, 22 bp, Artificial Sequence
  Synthetic oligonucleotide; CTG chr2 60480447 60480468 60480464 60480469 +
ttggagagccattctaaatgac

SEQ ID NO: 198245 - DNA, 22 bp, Artificial Sequence
  Synthetic oligonucleotide; TTG chr2 60480450 60480471 60480467 60480472 +
gagagccattctaaatgacctg

SEQ ID NO: 198246 - DNA, 22 bp, Artificial Sequence
  Synthetic oligonucleotide; TTC chr2 60480461 60480482 60480478 60480483 +
taaatgacctggctggaaggac

SEQ ID NO: 198247 - DNA, 22 bp, Artificial Sequence
  Synthetic oligonucleotide; CTA chr2 60480463 60480484 60480480 60480485 +
aatgacctggctggaaggacca

SEQ ID NO: 198248 - DNA, 22 bp, Artificial Sequence
  Synthetic oligonucleotide; CTG chr2 60480472 60480493 60480489 60480494 +
gctggaaggaccaggccatgga

SEQ ID NO: 198249 - DNA, 22 bp, Artificial Sequence
  Synthetic oligonucleotide; CTG chr2 60480476 60480497 60480493 60480498 +
gaaggaccaggccatggagcca

SEQ ID NO: 198250 - DNA, 22 bp, Artificial Sequence
  Synthetic oligonucleotide; CTT chr2 60480519 60480540 60480536 60480541 +
ccctagtaaatgattcactaac

SEQ ID NO: 198251 - DNA, 22 bp, Artificial Sequence
  Synthetic oligonucleotide; TTC chr2 60480520 60480541 60480537 60480542 +
cctagtaaatgattcactaacc

SEQ ID NO: 198252 - DNA, 22 bp, Artificial Sequence
  Synthetic oligonucleotide; CTA chr2 60480524 60480545 60480541 60480546 +
gtaaatgattcactaaccaagg

SEQ ID NO: 198253 - DNA, 22 bp, Artificial Sequence
  Synthetic oligonucleotide; TTC chr2 60480535 60480556 60480552 60480557 +
actaaccaaggagcctctgggt

SEQ ID NO: 198254 - DNA, 22 bp, Artificial Sequence
  Synthetic oligonucleotide; CTA chr2 60480539 60480560 60480556 60480561 +
accaaggagcctctgggtcagc

SEQ ID NO: 198255 - DNA, 22 bp, Artificial Sequence
  Synthetic oligonucleotide; CTC chr2 60480552 60480573 60480569 60480574 +
tgggtcagccttgacccaggag

SEQ ID NO: 198256 - DNA, 22 bp, Artificial Sequence
  Synthetic oligonucleotide; CTG chr2 60480554 60480575 60480571 60480576 +
ggtcagccttgacccaggagag

SEQ ID NO: 198257 - DNA, 22 bp, Artificial Sequence
  Synthetic oligonucleotide; CTT chr2 60480564 60480585 60480581 60480586 +
gacccaggagaggattacagcc

SEQ ID NO: 198258 - DNA, 22 bp, Artificial Sequence
  Synthetic oligonucleotide; TTG chr2 60480565 60480586 60480582 60480587 +
acccaggagaggattacagccc

SEQ ID NO: 198259 - DNA, 22 bp, Artificial Sequence
  Synthetic oligonucleotide; TTA chr2 60480581 60480602 60480598 60480603 +
cagccccttgaaagtggctgct

SEQ ID NO: 198260 - DNA, 22 bp, Artificial Sequence
  Synthetic oligonucleotide; CTT chr2 60480590 60480611 60480607 60480612 +
gaaagtggctgctggtccatcg

SEQ ID NO: 198261 - DNA, 22 bp, Artificial Sequence
  Synthetic oligonucleotide; TTG chr2 60480591 60480612 60480608 60480613 +
aaagtggctgctggtccatcgc

SEQ ID NO: 198262 - DNA, 22 bp, Artificial Sequence
  Synthetic oligonucleotide; CTG chr2 60480601 60480622 60480618 60480623 +
ctggtccatcgcttcactgtac

SEQ ID NO: 198263 - DNA, 22 bp, Artificial Sequence
  Synthetic oligonucleotide; CTG chr2 60480604 60480625 60480621 60480626 +
gtccatcgcttcactgtactat

SEQ ID NO: 198264 - DNA, 22 bp, Artificial Sequence
  Synthetic oligonucleotide; CTT chr2 60480615 60480636 60480632 60480637 +
cactgtactattttggcaatct

SEQ ID NO: 198265 - DNA, 22 bp, Artificial Sequence
  Synthetic oligonucleotide; TTC chr2 60480616 60480637 60480633 60480638 +
actgtactattttggcaatctg

SEQ ID NO: 198266 - DNA, 22 bp, Artificial Sequence
  Synthetic oligonucleotide; CTG chr2 60480620 60480641 60480637 60480642 +
tactattttggcaatctgtaat

SEQ ID NO: 198267 - DNA, 22 bp, Artificial Sequence
  Synthetic oligonucleotide; CTA chr2 60480625 60480646 60480642 60480647 +
ttttggcaatctgtaatagtgt

SEQ ID NO: 198268 - DNA, 22 bp, Artificial Sequence
  Synthetic oligonucleotide; TTT chr2 60480628 60480649 60480645 60480650 +
tggcaatctgtaatagtgtatt

SEQ ID NO: 198269 - DNA, 22 bp, Artificial Sequence
  Synthetic oligonucleotide; TTT chr2 60480629 60480650 60480646 60480651 +
ggcaatctgtaatagtgtattt

SEQ ID NO: 198270 - DNA, 22 bp, Artificial Sequence
  Synthetic oligonucleotide; TTG chr2 60480630 60480651 60480647 60480652 +
gcaatctgtaatagtgtattta

SEQ ID NO: 198271 - DNA, 22 bp, Artificial Sequence
  Synthetic oligonucleotide; CTG chr2 60480638 60480659 60480655 60480660 +
taatagtgtatttactcaatgg

SEQ ID NO: 198272 - DNA, 22 bp, Artificial Sequence
  Synthetic oligonucleotide; TTT chr2 60480651 60480672 60480668 60480673 +
actcaatggttgttatggacaa

SEQ ID NO: 198273 - DNA, 22 bp, Artificial Sequence
  Synthetic oligonucleotide; TTA chr2 60480652 60480673 60480669 60480674 +
ctcaatggttgttatggacaat

SEQ ID NO: 198274 - DNA, 22 bp, Artificial Sequence
  Synthetic oligonucleotide; CTC chr2 60480655 60480676 60480672 60480677 +
aatggttgttatggacaatcag

SEQ ID NO: 198275 - DNA, 22 bp, Artificial Sequence
  Synthetic oligonucleotide; TTG chr2 60480663 60480684 60480680 60480685 +
ttatggacaatcaggttaatca

SEQ ID NO: 198276 - DNA, 22 bp, Artificial Sequence
  Synthetic oligonucleotide; TTA chr2 60480666 60480687 60480683 60480688 +
tggacaatcaggttaatcattc

SEQ ID NO: 198277 - DNA, 22 bp, Artificial Sequence
  Synthetic oligonucleotide; TTA chr2 60480681 60480702 60480698 60480703 +
atcattcactttccaaatgctg

SEQ ID NO: 198278 - DNA, 22 bp, Artificial Sequence
  Synthetic oligonucleotide; TTC chr2 60480688 60480709 60480705 60480710 +
actttccaaatgctgtgtaatt

SEQ ID NO: 198279 - DNA, 22 bp, Artificial Sequence
  Synthetic oligonucleotide; CTT chr2 60480692 60480713 60480709 60480714 +
tccaaatgctgtgtaattacac

SEQ ID NO: 198280 - DNA, 22 bp, Artificial Sequence
  Synthetic oligonucleotide; TTT chr2 60480693 60480714 60480710 60480715 +
ccaaatgctgtgtaattacaca

SEQ ID NO: 198281 - DNA, 22 bp, Artificial Sequence
  Synthetic oligonucleotide; TTC chr2 60480694 60480715 60480711 60480716 +
caaatgctgtgtaattacacag

SEQ ID NO: 198282 - DNA, 22 bp, Artificial Sequence
  Synthetic oligonucleotide; CTG chr2 60480703 60480724 60480720 60480725 +
tgtaattacacagttaaaagag

SEQ ID NO: 198283 - DNA, 22 bp, Artificial Sequence
  Synthetic oligonucleotide; TTA chr2 60480711 60480732 60480728 60480733 +
cacagttaaaagagctacagcg

SEQ ID NO: 198284 - DNA, 22 bp, Artificial Sequence
  Synthetic oligonucleotide; TTA chr2 60480719 60480740 60480736 60480741 +
aaagagctacagcggatgtcaa

SEQ ID NO: 198285 - DNA, 22 bp, Artificial Sequence
  Synthetic oligonucleotide; CTA chr2 60480728 60480749 60480745 60480750 +
cagcggatgtcaaatttcctta

SEQ ID NO: 198286 - DNA, 22 bp, Artificial Sequence
  Synthetic oligonucleotide; TTT chr2 60480745 60480766 60480762 60480767 +
ccttaagtcttctggtgaattg

SEQ ID NO: 198287 - DNA, 22 bp, Artificial Sequence
  Synthetic oligonucleotide; TTC chr2 60480746 60480767 60480763 60480768 +
cttaagtcttctggtgaattgg

SEQ ID NO: 198288 - DNA, 22 bp, Artificial Sequence
  Synthetic oligonucleotide; CTT chr2 60480749 60480770 60480766 60480771 +
aagtcttctggtgaattggtct

SEQ ID NO: 198289 - DNA, 22 bp, Artificial Sequence
  Synthetic oligonucleotide; TTA chr2 60480750 60480771 60480767 60480772 +
agtcttctggtgaattggtctc

SEQ ID NO: 198290 - DNA, 22 bp, Artificial Sequence
  Synthetic oligonucleotide; CTT chr2 60480756 60480777 60480773 60480778 +
ctggtgaattggtctcaattac

SEQ ID NO: 198291 - DNA, 22 bp, Artificial Sequence
  Synthetic oligonucleotide; TTC chr2 60480757 60480778 60480774 60480779 +
tggtgaattggtctcaattact

SEQ ID NO: 198292 - DNA, 22 bp, Artificial Sequence
  Synthetic oligonucleotide; CTG chr2 60480759 60480780 60480776 60480781 +
gtgaattggtctcaattactag

SEQ ID NO: 198293 - DNA, 22 bp, Artificial Sequence
  Synthetic oligonucleotide; TTG chr2 60480767 60480788 60480784 60480789 +
gtctcaattactagtctgggtc

SEQ ID NO: 198294 - DNA, 22 bp, Artificial Sequence
  Synthetic oligonucleotide; CTC chr2 60480772 60480793 60480789 60480794 +
aattactagtctgggtcccttt

SEQ ID NO: 198295 - DNA, 22 bp, Artificial Sequence
  Synthetic oligonucleotide; TTA chr2 60480777 60480798 60480794 60480799 +
ctagtctgggtccctttcttcc

SEQ ID NO: 198296 - DNA, 22 bp, Artificial Sequence
  Synthetic oligonucleotide; CTA chr2 60480780 60480801 60480797 60480802 +
gtctgggtccctttcttccttc

SEQ ID NO: 198297 - DNA, 22 bp, Artificial Sequence
  Synthetic oligonucleotide; CTG chr2 60480785 60480806 60480802 60480807 +
ggtccctttcttccttcctctc

SEQ ID NO: 198298 - DNA, 22 bp, Artificial Sequence
  Synthetic oligonucleotide; CTT chr2 60480793 60480814 60480810 60480815 +
tcttccttcctctctcaatttg

SEQ ID NO: 198299 - DNA, 22 bp, Artificial Sequence
  Synthetic oligonucleotide; TTT chr2 60480794 60480815 60480811 60480816 +
cttccttcctctctcaatttgt

SEQ ID NO: 198300 - DNA, 22 bp, Artificial Sequence
  Synthetic oligonucleotide; TTC chr2 60480795 60480816 60480812 60480817 +
ttccttcctctctcaatttgtt

SEQ ID NO: 198301 - DNA, 22 bp, Artificial Sequence
  Synthetic oligonucleotide; CTT chr2 60480797 60480818 60480814 60480819 +
ccttcctctctcaatttgtttt

SEQ ID NO: 198302 - DNA, 22 bp, Artificial Sequence
  Synthetic oligonucleotide; TTC chr2 60480798 60480819 60480815 60480820 +
cttcctctctcaatttgtttta

SEQ ID NO: 198303 - DNA, 22 bp, Artificial Sequence
  Synthetic oligonucleotide; CTT chr2 60480801 60480822 60480818 60480823 +
cctctctcaatttgttttagca

SEQ ID NO: 198304 - DNA, 22 bp, Artificial Sequence
  Synthetic oligonucleotide; TTC chr2 60480802 60480823 60480819 60480824 +
ctctctcaatttgttttagcaa

SEQ ID NO: 198305 - DNA, 22 bp, Artificial Sequence
  Synthetic oligonucleotide; CTC chr2 60480805 60480826 60480822 60480827 +
tctcaatttgttttagcaatcc

SEQ ID NO: 198306 - DNA, 22 bp, Artificial Sequence
  Synthetic oligonucleotide; CTC chr2 60480807 60480828 60480824 60480829 +
tcaatttgttttagcaatcctc

SEQ ID NO: 198307 - DNA, 22 bp, Artificial Sequence
  Synthetic oligonucleotide; CTC chr2 60480809 60480830 60480826 60480831 +
aatttgttttagcaatcctcca

SEQ ID NO: 198308 - DNA, 22 bp, Artificial Sequence
  Synthetic oligonucleotide; TTT chr2 60480814 60480835 60480831 60480836 +
gttttagcaatcctccacattt

SEQ ID NO: 198309 - DNA, 22 bp, Artificial Sequence
  Synthetic oligonucleotide; TTG chr2 60480815 60480836 60480832 60480837 +
ttttagcaatcctccacatttt

SEQ ID NO: 198310 - DNA, 22 bp, Artificial Sequence
  Synthetic oligonucleotide; TTT chr2 60480818 60480839 60480835 60480840 +
tagcaatcctccacattttcct

SEQ ID NO: 198311 - DNA, 22 bp, Artificial Sequence
  Synthetic oligonucleotide; TTT chr2 60480819 60480840 60480836 60480841 +
agcaatcctccacattttcctc

SEQ ID NO: 198312 - DNA, 22 bp, Artificial Sequence
  Synthetic oligonucleotide; TTA chr2 60480820 60480841 60480837 60480842 +
gcaatcctccacattttcctct

SEQ ID NO: 198313 - DNA, 22 bp, Artificial Sequence
  Synthetic oligonucleotide; CTC chr2 60480829 60480850 60480846 60480851 +
cacattttcctctattctcatc

SEQ ID NO: 198314 - DNA, 22 bp, Artificial Sequence
  Synthetic oligonucleotide; TTT chr2 60480836 60480857 60480853 60480858 +
tcctctattctcatcccctacc

SEQ ID NO: 198315 - DNA, 22 bp, Artificial Sequence
  Synthetic oligonucleotide; TTT chr2 60480837 60480858 60480854 60480859 +
cctctattctcatcccctacct

SEQ ID NO: 198316 - DNA, 22 bp, Artificial Sequence
  Synthetic oligonucleotide; TTC chr2 60480838 60480859 60480855 60480860 +
ctctattctcatcccctacctg

SEQ ID NO: 198317 - DNA, 22 bp, Artificial Sequence
  Synthetic oligonucleotide; CTC chr2 60480841 60480862 60480858 60480863 +
tattctcatcccctacctgcac

SEQ ID NO: 198318 - DNA, 22 bp, Artificial Sequence
  Synthetic oligonucleotide; CTA chr2 60480843 60480864 60480860 60480865 +
ttctcatcccctacctgcaccc

SEQ ID NO: 198319 - DNA, 22 bp, Artificial Sequence
  Synthetic oligonucleotide; TTC chr2 60480846 60480867 60480863 60480868 +
tcatcccctacctgcaccccca

SEQ ID NO: 198320 - DNA, 22 bp, Artificial Sequence
  Synthetic oligonucleotide; CTC chr2 60480848 60480869 60480865 60480870 +
atcccctacctgcacccccatc

SEQ ID NO: 198321 - DNA, 22 bp, Artificial Sequence
  Synthetic oligonucleotide; CTA chr2 60480856 60480877 60480873 60480878 +
cctgcacccccatctctgtccc

SEQ ID NO: 198322 - DNA, 22 bp, Artificial Sequence
  Synthetic oligonucleotide; CTG chr2 60480860 60480881 60480877 60480882 +
cacccccatctctgtcccaaga

SEQ ID NO: 198323 - DNA, 22 bp, Artificial Sequence
  Synthetic oligonucleotide; CTC chr2 60480872 60480893 60480889 60480894 +
tgtcccaagagaaagaacagtg

SEQ ID NO: 198324 - DNA, 22 bp, Artificial Sequence
  Synthetic oligonucleotide; CTG chr2 60480874 60480895 60480891 60480896 +
tcccaagagaaagaacagtgtg

SEQ ID NO: 198325 - DNA, 22 bp, Artificial Sequence
  Synthetic oligonucleotide; CTC chr2 60480905 60480926 60480922 60480927 +
cgcttgaataatcctatttttg

SEQ ID NO: 198326 - DNA, 22 bp, Artificial Sequence
  Synthetic oligonucleotide; CTT chr2 60480910 60480931 60480927 60480932 +
gaataatcctatttttgaactc

SEQ ID NO: 198327 - DNA, 22 bp, Artificial Sequence
  Synthetic oligonucleotide; TTG chr2 60480911 60480932 60480928 60480933 +
aataatcctatttttgaactca

SEQ ID NO: 198328 - DNA, 22 bp, Artificial Sequence
  Synthetic oligonucleotide; CTA chr2 60480921 60480942 60480938 60480943 +
tttttgaactcatagttctaaa

SEQ ID NO: 198329 - DNA, 22 bp, Artificial Sequence
  Synthetic oligonucleotide; TTT chr2 60480924 60480945 60480941 60480946 +
ttgaactcatagttctaaatag

SEQ ID NO: 198330 - DNA, 22 bp, Artificial Sequence
  Synthetic oligonucleotide; TTT chr2 60480925 60480946 60480942 60480947 +
tgaactcatagttctaaatagt

SEQ ID NO: 198331 - DNA, 22 bp, Artificial Sequence
  Synthetic oligonucleotide; TTT chr2 60480926 60480947 60480943 60480948 +
gaactcatagttctaaatagtt

SEQ ID NO: 198332 - DNA, 22 bp, Artificial Sequence
  Synthetic oligonucleotide; TTG chr2 60480927 60480948 60480944 60480949 +
aactcatagttctaaatagttt

SEQ ID NO: 198333 - DNA, 22 bp, Artificial Sequence
  Synthetic oligonucleotide; CTC chr2 60480932 60480953 60480949 60480954 +
atagttctaaatagtttttgct

SEQ ID NO: 198334 - DNA, 22 bp, Artificial Sequence
  Synthetic oligonucleotide; TTC chr2 60480939 60480960 60480956 60480961 +
taaatagtttttgctccactaa

SEQ ID NO: 198335 - DNA, 22 bp, Artificial Sequence
  Synthetic oligonucleotide; CTA chr2 60480941 60480962 60480958 60480963 +
aatagtttttgctccactaaaa

SEQ ID NO: 198336 - DNA, 22 bp, Artificial Sequence
  Synthetic oligonucleotide; TTT chr2 60480949 60480970 60480966 60480971 +
ttgctccactaaaagggcttaa

SEQ ID NO: 198337 - DNA, 22 bp, Artificial Sequence
  Synthetic oligonucleotide; TTT chr2 60480950 60480971 60480967 60480972 +
tgctccactaaaagggcttaaa

SEQ ID NO: 198338 - DNA, 22 bp, Artificial Sequence
  Synthetic oligonucleotide; TTT chr2 60480951 60480972 60480968 60480973 +
gctccactaaaagggcttaaaa

SEQ ID NO: 198339 - DNA, 22 bp, Artificial Sequence
  Synthetic oligonucleotide; TTG chr2 60480952 60480973 60480969 60480974 +
ctccactaaaagggcttaaaaa

SEQ ID NO: 198340 - DNA, 22 bp, Artificial Sequence
  Synthetic oligonucleotide; CTC chr2 60480955 60480976 60480972 60480977 +
cactaaaagggcttaaaaataa

SEQ ID NO: 198341 - DNA, 22 bp, Artificial Sequence
  Synthetic oligonucleotide; CTA chr2 60480960 60480981 60480977 60480982 +
aaagggcttaaaaataaggcta

SEQ ID NO: 198342 - DNA, 22 bp, Artificial Sequence
  Synthetic oligonucleotide; CTT chr2 60480969 60480990 60480986 60480991 +
aaaaataaggctaggaagctag

SEQ ID NO: 198343 - DNA, 22 bp, Artificial Sequence
  Synthetic oligonucleotide; TTA chr2 60480970 60480991 60480987 60480992 +
aaaataaggctaggaagctaga

SEQ ID NO: 198344 - DNA, 22 bp, Artificial Sequence
  Synthetic oligonucleotide; CTA chr2 60480982 60481003 60480999 60481004 +
ggaagctagacctgggaggggc

SEQ ID NO: 198345 - DNA, 22 bp, Artificial Sequence
  Synthetic oligonucleotide; CTA chr2 60480990 60481011 60481007 60481012 +
gacctgggaggggcattacagg

SEQ ID NO: 198346 - DNA, 22 bp, Artificial Sequence
  Synthetic oligonucleotide; CTG chr2 60480996 60481017 60481013 60481018 +
ggaggggcattacaggctggct

SEQ ID NO: 198347 - DNA, 22 bp, Artificial Sequence
  Synthetic oligonucleotide; TTA chr2 60481008 60481029 60481025 60481030 +
caggctggctggaagcccccag

SEQ ID NO: 198348 - DNA, 22 bp, Artificial Sequence
  Synthetic oligonucleotide; CTG chr2 60481015 60481036 60481032 60481037 +
gctggaagcccccagctgcctc

SEQ ID NO: 198349 - DNA, 22 bp, Artificial Sequence
  Synthetic oligonucleotide; CTG chr2 60481019 60481040 60481036 60481041 +
gaagcccccagctgcctccctg

SEQ ID NO: 198350 - DNA, 22 bp, Artificial Sequence
  Synthetic oligonucleotide; CTG chr2 60481033 60481054 60481050 60481055 +
cctccctgcctcagatgcaggg

SEQ ID NO: 198351 - DNA, 22 bp, Artificial Sequence
  Synthetic oligonucleotide; CTC chr2 60481037 60481058 60481054 60481059 +
cctgcctcagatgcagggagaa

SEQ ID NO: 198352 - DNA, 22 bp, Artificial Sequence
  Synthetic oligonucleotide; CTG chr2 60481041 60481062 60481058 60481063 +
cctcagatgcagggagaacacc

SEQ ID NO: 198353 - DNA, 22 bp, Artificial Sequence
  Synthetic oligonucleotide; CTC chr2 60481045 60481066 60481062 60481067 +
agatgcagggagaacacctgca

SEQ ID NO: 198354 - DNA, 22 bp, Artificial Sequence
  Synthetic oligonucleotide; CTG chr2 60481065 60481086 60481082 60481087 +
cagccacccacaccttgtcacc

SEQ ID NO: 198355 - DNA, 22 bp, Artificial Sequence
  Synthetic oligonucleotide; CTT chr2 60481081 60481102 60481098 60481103 +
gtcacccaagttgcactagatc

SEQ ID NO: 198356 - DNA, 22 bp, Artificial Sequence
  Synthetic oligonucleotide; TTG chr2 60481082 60481103 60481099 60481104 +
tcacccaagttgcactagatcc

SEQ ID NO: 198357 - DNA, 22 bp, Artificial Sequence
  Synthetic oligonucleotide; TTG chr2 60481094 60481115 60481111 60481116 +
cactagatcctggtacagccca

SEQ ID NO: 198358 - DNA, 22 bp, Artificial Sequence
  Synthetic oligonucleotide; CTA chr2 60481099 60481120 60481116 60481121 +
gatcctggtacagcccagtggt

SEQ ID NO: 198359 - DNA, 22 bp, Artificial Sequence
  Synthetic oligonucleotide; CTG chr2 60481106 60481127 60481123 60481128 +
gtacagcccagtggtggccgca

SEQ ID NO: 198360 - DNA, 22 bp, Artificial Sequence
  Synthetic oligonucleotide; CTC chr2 60481132 60481153 60481149 60481154 +
agggaagaaagaaggcaaagcc

SEQ ID NO: 198361 - DNA, 22 bp, Artificial Sequence
  Synthetic oligonucleotide; CTG chr2 60481157 60481178 60481174 60481179 +
ctgtgctcaaggagattgaggc

SEQ ID NO: 198362 - DNA, 22 bp, Artificial Sequence
  Synthetic oligonucleotide; CTG chr2 60481160 60481181 60481177 60481182 +
tgctcaaggagattgaggcttc

SEQ ID NO: 198363 - DNA, 22 bp, Artificial Sequence
  Synthetic oligonucleotide; CTC chr2 60481165 60481186 60481182 60481187 +
aaggagattgaggcttcccagc

SEQ ID NO: 198364 - DNA, 22 bp, Artificial Sequence
  Synthetic oligonucleotide; TTG chr2 60481175 60481196 60481192 60481197 +
aggcttcccagccccaaaactg

SEQ ID NO: 198365 - DNA, 22 bp, Artificial Sequence
  Synthetic oligonucleotide; CTT chr2 60481181 60481202 60481198 60481203 +
cccagccccaaaactgggaagg

SEQ ID NO: 198366 - DNA, 22 bp, Artificial Sequence
  Synthetic oligonucleotide; TTC chr2 60481182 60481203 60481199 60481204 +
ccagccccaaaactgggaaggg

SEQ ID NO: 198367 - DNA, 22 bp, Artificial Sequence
  Synthetic oligonucleotide; CTG chr2 60481197 60481218 60481214 60481219 +
ggaagggccctggaatgggata

SEQ ID NO: 198368 - DNA, 22 bp, Artificial Sequence
  Synthetic oligonucleotide; CTG chr2 60481209 60481230 60481226 60481231 +
gaatgggatatcccctcccctc

SEQ ID NO: 198369 - DNA, 22 bp, Artificial Sequence
  Synthetic oligonucleotide; CTC chr2 60481226 60481247 60481243 60481248 +
ccctcccagcaccccattccca

SEQ ID NO: 198370 - DNA, 22 bp, Artificial Sequence
  Synthetic oligonucleotide; CTC chr2 60481231 60481252 60481248 60481253 +
ccagcaccccattcccaaacct

SEQ ID NO: 198371 - DNA, 22 bp, Artificial Sequence
  Synthetic oligonucleotide; TTC chr2 60481245 60481266 60481262 60481267 +
ccaaacctagccacccatctct

SEQ ID NO: 198372 - DNA, 22 bp, Artificial Sequence
  Synthetic oligonucleotide; CTA chr2 60481254 60481275 60481271 60481276 +
gccacccatctctgcttgggac

SEQ ID NO: 198373 - DNA, 22 bp, Artificial Sequence
  Synthetic oligonucleotide; CTC chr2 60481266 60481287 60481283 60481288 +
tgcttgggacatgctggaaggc

SEQ ID NO: 198374 - DNA, 22 bp, Artificial Sequence
  Synthetic oligonucleotide; CTG chr2 60481268 60481289 60481285 60481290 +
cttgggacatgctggaaggcaa

SEQ ID NO: 198375 - DNA, 22 bp, Artificial Sequence
  Synthetic oligonucleotide; CTT chr2 60481271 60481292 60481288 60481293 +
gggacatgctggaaggcaagaa

SEQ ID NO: 198376 - DNA, 22 bp, Artificial Sequence
  Synthetic oligonucleotide; TTG chr2 60481272 60481293 60481289 60481294 +
ggacatgctggaaggcaagaag

SEQ ID NO: 198377 - DNA, 22 bp, Artificial Sequence
  Synthetic oligonucleotide; CTG chr2 60481282 60481303 60481299 60481304 +
gaaggcaagaagagagaaacaa

SEQ ID NO: 198378 - DNA, 22 bp, Artificial Sequence
  Synthetic oligonucleotide; CTC chr2 60481311 60481332 60481328 60481333 +
cttgaaaacaaaaatgaagcag

SEQ ID NO: 198379 - DNA, 22 bp, Artificial Sequence
  Synthetic oligonucleotide; CTT chr2 60481314 60481335 60481331 60481336 +
gaaaacaaaaatgaagcaggga

SEQ ID NO: 198380 - DNA, 22 bp, Artificial Sequence
  Synthetic oligonucleotide; TTG chr2 60481315 60481336 60481332 60481337 +
aaaacaaaaatgaagcagggat

SEQ ID NO: 198381 - DNA, 22 bp, Artificial Sequence
  Synthetic oligonucleotide; CTA chr2 60481341 60481362 60481358 60481363 +
ggaaaagtaaaaacattcagaa

SEQ ID NO: 198382 - DNA, 22 bp, Artificial Sequence
  Synthetic oligonucleotide; TTC chr2 60481359 60481380 60481376 60481381 +
agaacccagggccttctctctg

SEQ ID NO: 198383 - DNA, 22 bp, Artificial Sequence
  Synthetic oligonucleotide; CTT chr2 60481374 60481395 60481391 60481396 +
ctctctgtctcccacgacctac

SEQ ID NO: 198384 - DNA, 22 bp, Artificial Sequence
  Synthetic oligonucleotide; TTC chr2 60481375 60481396 60481392 60481397 +
tctctgtctcccacgacctaca

SEQ ID NO: 198385 - DNA, 22 bp, Artificial Sequence
  Synthetic oligonucleotide; CTC chr2 60481377 60481398 60481394 60481399 +
tctgtctcccacgacctacacc

SEQ ID NO: 198386 - DNA, 22 bp, Artificial Sequence
  Synthetic oligonucleotide; CTC chr2 60481379 60481400 60481396 60481401 +
tgtctcccacgacctacaccag

SEQ ID NO: 198387 - DNA, 22 bp, Artificial Sequence
  Synthetic oligonucleotide; CTG chr2 60481381 60481402 60481398 60481403 +
tctcccacgacctacaccaggc

SEQ ID NO: 198388 - DNA, 22 bp, Artificial Sequence
  Synthetic oligonucleotide; CTC chr2 60481385 60481406 60481402 60481407 +
ccacgacctacaccaggccctt

SEQ ID NO: 198389 - DNA, 22 bp, Artificial Sequence
  Synthetic oligonucleotide; CTA chr2 60481395 60481416 60481412 60481417 +
caccaggcccttcgcacctctg

SEQ ID NO: 198390 - DNA, 22 bp, Artificial Sequence
  Synthetic oligonucleotide; CTT chr2 60481407 60481428 60481424 60481429 +
cgcacctctgctttgcggcttt

SEQ ID NO: 198391 - DNA, 22 bp, Artificial Sequence
  Synthetic oligonucleotide; TTC chr2 60481408 60481429 60481425 60481430 +
gcacctctgctttgcggcttta

SEQ ID NO: 198392 - DNA, 22 bp, Artificial Sequence
  Synthetic oligonucleotide; CTC chr2 60481415 60481436 60481432 60481437 +
tgctttgcggctttaacgcact

SEQ ID NO: 198393 - DNA, 22 bp, Artificial Sequence
  Synthetic oligonucleotide; CTG chr2 60481417 60481438 60481434 60481439 +
ctttgcggctttaacgcactac

SEQ ID NO: 198394 - DNA, 22 bp, Artificial Sequence
  Synthetic oligonucleotide; CTT chr2 60481420 60481441 60481437 60481442 +
tgcggctttaacgcactacacc

SEQ ID NO: 198395 - DNA, 22 bp, Artificial Sequence
  Synthetic oligonucleotide; TTT chr2 60481421 60481442 60481438 60481443 +
gcggctttaacgcactacaccc

SEQ ID NO: 198396 - DNA, 22 bp, Artificial Sequence
  Synthetic oligonucleotide; TTG chr2 60481422 60481443 60481439 60481444 +
cggctttaacgcactacacccc

SEQ ID NO: 198397 - DNA, 22 bp, Artificial Sequence
  Synthetic oligonucleotide; CTT chr2 60481428 60481449 60481445 60481450 +
taacgcactacaccccacccac

SEQ ID NO: 198398 - DNA, 22 bp, Artificial Sequence
  Synthetic oligonucleotide; TTT chr2 60481429 60481450 60481446 60481451 +
aacgcactacaccccacccacc

SEQ ID NO: 198399 - DNA, 22 bp, Artificial Sequence
  Synthetic oligonucleotide; TTA chr2 60481430 60481451 60481447 60481452 +
acgcactacaccccacccacca

SEQ ID NO: 198400 - DNA, 22 bp, Artificial Sequence
  Synthetic oligonucleotide; CTA chr2 60481438 60481459 60481455 60481460 +
caccccacccaccacaagcaca

SEQ ID NO: 198401 - DNA, 22 bp, Artificial Sequence
  Synthetic oligonucleotide; CTC chr2 60481471 60481492 60481488 60481493 +
tcaggagtcagagggtcaccca

SEQ ID NO: 198402 - DNA, 22 bp, Artificial Sequence
  Synthetic oligonucleotide; CTC chr2 60481473 60481494 60481490 60481495 +
aggagtcagagggtcacccagg

SEQ ID NO: 198403 - DNA, 22 bp, Artificial Sequence
  Synthetic oligonucleotide; CTA chr2 60481499 60481520 60481516 60481521 +
gaacttaagccacccagcccac

SEQ ID NO: 198404 - DNA, 22 bp, Artificial Sequence
  Synthetic oligonucleotide; CTT chr2 60481505 60481526 60481522 60481527 +
aagccacccagcccacaagctg

SEQ ID NO: 198405 - DNA, 22 bp, Artificial Sequence
  Synthetic oligonucleotide; TTA chr2 60481506 60481527 60481523 60481528 +
agccacccagcccacaagctgg

SEQ ID NO: 198406 - DNA, 22 bp, Artificial Sequence
  Synthetic oligonucleotide; CTG chr2 60481527 60481548 60481544 60481549 +
gcaggtgaaggaggacagggat

SEQ ID NO: 198407 - DNA, 22 bp, Artificial Sequence
  Synthetic oligonucleotide; CTG chr2 60481565 60481586 60481582 60481587 +
tccacgctggcccctggctaag

SEQ ID NO: 198408 - DNA, 22 bp, Artificial Sequence
  Synthetic oligonucleotide; CTG chr2 60481574 60481595 60481591 60481596 +
gcccctggctaagagcaactgc

SEQ ID NO: 198409 - DNA, 22 bp, Artificial Sequence
  Synthetic oligonucleotide; CTG chr2 60481581 60481602 60481598 60481603 +
gctaagagcaactgcagcagaa

SEQ ID NO: 198410 - DNA, 22 bp, Artificial Sequence
  Synthetic oligonucleotide; CTA chr2 60481585 60481606 60481602 60481607 +
agagcaactgcagcagaaacag

SEQ ID NO: 198411 - DNA, 22 bp, Artificial Sequence
  Synthetic oligonucleotide; CTG chr2 60481595 60481616 60481612 60481617 +
cagcagaaacagtgtttcttct

SEQ ID NO: 198412 - DNA, 22 bp, Artificial Sequence
  Synthetic oligonucleotide; TTT chr2 60481612 60481633 60481629 60481634 +
cttctccatttccatggctcgt

SEQ ID NO: 198413 - DNA, 22 bp, Artificial Sequence
  Synthetic oligonucleotide; TTC chr2 60481613 60481634 60481630 60481635 +
ttctccatttccatggctcgtg

SEQ ID NO: 198414 - DNA, 22 bp, Artificial Sequence
  Synthetic oligonucleotide; CTT chr2 60481615 60481636 60481632 60481637 +
ctccatttccatggctcgtgaa

SEQ ID NO: 198415 - DNA, 22 bp, Artificial Sequence
  Synthetic oligonucleotide; TTC chr2 60481616 60481637 60481633 60481638 +
tccatttccatggctcgtgaat

SEQ ID NO: 198416 - DNA, 22 bp, Artificial Sequence
  Synthetic oligonucleotide; CTC chr2 60481618 60481639 60481635 60481640 +
catttccatggctcgtgaattt

SEQ ID NO: 198417 - DNA, 22 bp, Artificial Sequence
  Synthetic oligonucleotide; TTT chr2 60481623 60481644 60481640 60481645 +
ccatggctcgtgaatttttttg

SEQ ID NO: 198418 - DNA, 22 bp, Artificial Sequence
  Synthetic oligonucleotide; TTC chr2 60481624 60481645 60481641 60481646 +
catggctcgtgaatttttttgt

SEQ ID NO: 198419 - DNA, 22 bp, Artificial Sequence
  Synthetic oligonucleotide; CTC chr2 60481632 60481653 60481649 60481654 +
gtgaatttttttgtcttgtttt

SEQ ID NO: 198420 - DNA, 22 bp, Artificial Sequence
  Synthetic oligonucleotide; TTT chr2 60481640 60481661 60481657 60481662 +
ttttgtcttgtttttcttgacg

SEQ ID NO: 198421 - DNA, 22 bp, Artificial Sequence
  Synthetic oligonucleotide; TTT chr2 60481641 60481662 60481658 60481663 +
tttgtcttgtttttcttgacgc

SEQ ID NO: 198422 - DNA, 22 bp, Artificial Sequence
  Synthetic oligonucleotide; TTT chr2 60481642 60481663 60481659 60481664 +
ttgtcttgtttttcttgacgct

SEQ ID NO: 198423 - DNA, 22 bp, Artificial Sequence
  Synthetic oligonucleotide; TTT chr2 60481643 60481664 60481660 60481665 +
tgtcttgtttttcttgacgctc

SEQ ID NO: 198424 - DNA, 22 bp, Artificial Sequence
  Synthetic oligonucleotide; TTT chr2 60481644 60481665 60481661 60481666 +
gtcttgtttttcttgacgctcc

SEQ ID NO: 198425 - DNA, 22 bp, Artificial Sequence
  Synthetic oligonucleotide; TTG chr2 60481645 60481666 60481662 60481667 +
tcttgtttttcttgacgctcca

SEQ ID NO: 198426 - DNA, 22 bp, Artificial Sequence
  Synthetic oligonucleotide; CTT chr2 60481649 60481670 60481666 60481671 +
gtttttcttgacgctccacccc

SEQ ID NO: 198427 - DNA, 22 bp, Artificial Sequence
  Synthetic oligonucleotide; TTG chr2 60481650 60481671 60481667 60481672 +
tttttcttgacgctccaccccc

SEQ ID NO: 198428 - DNA, 22 bp, Artificial Sequence
  Synthetic oligonucleotide; TTT chr2 60481653 60481674 60481670 60481675 +
ttcttgacgctccaccccctac

SEQ ID NO: 198429 - DNA, 22 bp, Artificial Sequence
  Synthetic oligonucleotide; TTT chr2 60481654 60481675 60481671 60481676 +
tcttgacgctccaccccctaca

SEQ ID NO: 198430 - DNA, 22 bp, Artificial Sequence
  Synthetic oligonucleotide; TTT chr2 60481655 60481676 60481672 60481677 +
cttgacgctccaccccctacat

SEQ ID NO: 198431 - DNA, 22 bp, Artificial Sequence
  Synthetic oligonucleotide; TTC chr2 60481656 60481677 60481673 60481678 +
ttgacgctccaccccctacatc

SEQ ID NO: 198432 - DNA, 22 bp, Artificial Sequence
  Synthetic oligonucleotide; CTT chr2 60481658 60481679 60481675 60481680 +
gacgctccaccccctacatctt

SEQ ID NO: 198433 - DNA, 22 bp, Artificial Sequence
  Synthetic oligonucleotide; TTG chr2 60481659 60481680 60481676 60481681 +
acgctccaccccctacatcttt

SEQ ID NO: 198434 - DNA, 22 bp, Artificial Sequence
  Synthetic oligonucleotide; CTC chr2 60481665 60481686 60481682 60481687 +
caccccctacatctttcttttc

SEQ ID NO: 198435 - DNA, 22 bp, Artificial Sequence
  Synthetic oligonucleotide; CTA chr2 60481674 60481695 60481691 60481696 +
catctttcttttccccacatgc

SEQ ID NO: 198436 - DNA, 22 bp, Artificial Sequence
  Synthetic oligonucleotide; CTT chr2 60481680 60481701 60481697 60481702 +
tcttttccccacatgctccagc

SEQ ID NO: 198437 - DNA, 22 bp, Artificial Sequence
  Synthetic oligonucleotide; TTT chr2 60481681 60481702 60481698 60481703 +
cttttccccacatgctccagca

SEQ ID NO: 198438 - DNA, 22 bp, Artificial Sequence
  Synthetic oligonucleotide; TTC chr2 60481682 60481703 60481699 60481704 +
ttttccccacatgctccagcac

SEQ ID NO: 198439 - DNA, 22 bp, Artificial Sequence
  Synthetic oligonucleotide; CTT chr2 60481684 60481705 60481701 60481706 +
ttccccacatgctccagcacat

SEQ ID NO: 198440 - DNA, 22 bp, Artificial Sequence
  Synthetic oligonucleotide; TTT chr2 60481685 60481706 60481702 60481707 +
tccccacatgctccagcacata

SEQ ID NO: 198441 - DNA, 22 bp, Artificial Sequence
  Synthetic oligonucleotide; TTT chr2 60481686 60481707 60481703 60481708 +
ccccacatgctccagcacatac

SEQ ID NO: 198442 - DNA, 22 bp, Artificial Sequence
  Synthetic oligonucleotide; TTC chr2 60481687 60481708 60481704 60481709 +
cccacatgctccagcacataca

SEQ ID NO: 198443 - DNA, 22 bp, Artificial Sequence
  Synthetic oligonucleotide; CTC chr2 60481698 60481719 60481715 60481720 +
cagcacatacaactcagggctc

SEQ ID NO: 198444 - DNA, 22 bp, Artificial Sequence
  Synthetic oligonucleotide; CTC chr2 60481713 60481734 60481730 60481735 +
agggctccagtgttttaagggc

SEQ ID NO: 198445 - DNA, 22 bp, Artificial Sequence
  Synthetic oligonucleotide; CTC chr2 60481720 60481741 60481737 60481742 +
cagtgttttaagggcatttttt

SEQ ID NO: 198446 - DNA, 22 bp, Artificial Sequence
  Synthetic oligonucleotide; TTT chr2 60481728 60481749 60481745 60481750 +
taagggcattttttttccacaa

SEQ ID NO: 198447 - DNA, 22 bp, Artificial Sequence
  Synthetic oligonucleotide; TTT chr2 60481729 60481750 60481746 60481751 +
aagggcattttttttccacaag

SEQ ID NO: 198448 - DNA, 22 bp, Artificial Sequence
  Synthetic oligonucleotide; TTA chr2 60481730 60481751 60481747 60481752 +
agggcattttttttccacaagt

SEQ ID NO: 198449 - DNA, 22 bp, Artificial Sequence
  Synthetic oligonucleotide; TTT chr2 60481739 60481760 60481756 60481761 +
tttttccacaagtgagattaat

SEQ ID NO: 198450 - DNA, 22 bp, Artificial Sequence
  Synthetic oligonucleotide; TTT chr2 60481740 60481761 60481757 60481762 +
ttttccacaagtgagattaatt

SEQ ID NO: 198451 - DNA, 22 bp, Artificial Sequence
  Synthetic oligonucleotide; TTT chr2 60481741 60481762 60481758 60481763 +
tttccacaagtgagattaattt

SEQ ID NO: 198452 - DNA, 22 bp, Artificial Sequence
  Synthetic oligonucleotide; TTT chr2 60481742 60481763 60481759 60481764 +
ttccacaagtgagattaatttt

SEQ ID NO: 198453 - DNA, 22 bp, Artificial Sequence
  Synthetic oligonucleotide; TTT chr2 60481743 60481764 60481760 60481765 +
tccacaagtgagattaattttc

SEQ ID NO: 198454 - DNA, 22 bp, Artificial Sequence
  Synthetic oligonucleotide; TTT chr2 60481744 60481765 60481761 60481766 +
ccacaagtgagattaattttct

SEQ ID NO: 198455 - DNA, 22 bp, Artificial Sequence
  Synthetic oligonucleotide; TTC chr2 60481745 60481766 60481762 60481767 +
cacaagtgagattaattttcta

SEQ ID NO: 198456 - DNA, 22 bp, Artificial Sequence
  Synthetic oligonucleotide; TTA chr2 60481759 60481780 60481776 60481781 +
attttctaacagaaccctagta

SEQ ID NO: 198457 - DNA, 22 bp, Artificial Sequence
  Synthetic oligonucleotide; TTT chr2 60481763 60481784 60481780 60481785 +
tctaacagaaccctagtacatt

SEQ ID NO: 198458 - DNA, 22 bp, Artificial Sequence
  Synthetic oligonucleotide; TTT chr2 60481764 60481785 60481781 60481786 +
ctaacagaaccctagtacattc

SEQ ID NO: 198459 - DNA, 22 bp, Artificial Sequence
  Synthetic oligonucleotide; TTC chr2 60481765 60481786 60481782 60481787 +
taacagaaccctagtacattct

SEQ ID NO: 198460 - DNA, 22 bp, Artificial Sequence
  Synthetic oligonucleotide; CTA chr2 60481767 60481788 60481784 60481789 +
acagaaccctagtacattctgt

SEQ ID NO: 198461 - DNA, 22 bp, Artificial Sequence
  Synthetic oligonucleotide; CTA chr2 60481778 60481799 60481795 60481800 +
gtacattctgtgtgatggtggg

SEQ ID NO: 198462 - DNA, 22 bp, Artificial Sequence
  Synthetic oligonucleotide; TTC chr2 60481786 60481807 60481803 60481808 +
tgtgtgatggtgggagagcctt

SEQ ID NO: 198463 - DNA, 22 bp, Artificial Sequence
  Synthetic oligonucleotide; CTG chr2 60481788 60481809 60481805 60481810 +
tgtgatggtgggagagcctttt

SEQ ID NO: 198464 - DNA, 22 bp, Artificial Sequence
  Synthetic oligonucleotide; CTT chr2 60481808 60481829 60481825 60481830 +
ttgaccatcacagtgtcctgga

SEQ ID NO: 198465 - DNA, 22 bp, Artificial Sequence
  Synthetic oligonucleotide; TTT chr2 60481809 60481830 60481826 60481831 +
tgaccatcacagtgtcctggaa

SEQ ID NO: 198466 - DNA, 22 bp, Artificial Sequence
  Synthetic oligonucleotide; TTT chr2 60481810 60481831 60481827 60481832 +
gaccatcacagtgtcctggaat

SEQ ID NO: 198467 - DNA, 22 bp, Artificial Sequence
  Synthetic oligonucleotide; TTG chr2 60481811 60481832 60481828 60481833 +
accatcacagtgtcctggaatg

SEQ ID NO: 198468 - DNA, 22 bp, Artificial Sequence
  Synthetic oligonucleotide; CTG chr2 60481828 60481849 60481845 60481850 +
gaatgagctcagcatgctctct

SEQ ID NO: 198469 - DNA, 22 bp, Artificial Sequence
  Synthetic oligonucleotide; CTC chr2 60481838 60481859 60481855 60481860 +
agcatgctctctgggaagtgaa

SEQ ID NO: 198470 - DNA, 22 bp, Artificial Sequence
  Synthetic oligonucleotide; CTC chr2 60481847 60481868 60481864 60481869 +
tctgggaagtgaattgggaaag

SEQ ID NO: 198471 - DNA, 22 bp, Artificial Sequence
  Synthetic oligonucleotide; CTC chr2 60481849 60481870 60481866 60481871 +
tgggaagtgaattgggaaagtg

SEQ ID NO: 198472 - DNA, 22 bp, Artificial Sequence
  Synthetic oligonucleotide; CTG chr2 60481851 60481872 60481868 60481873 +
ggaagtgaattgggaaagtgaa

SEQ ID NO: 198473 - DNA, 22 bp, Artificial Sequence
  Synthetic oligonucleotide; TTG chr2 60481863 60481884 60481880 60481885 +
ggaaagtgaatggggaaaagcc

SEQ ID NO: 198474 - DNA, 22 bp, Artificial Sequence
  Synthetic oligonucleotide; CTC chr2 60481887 60481908 60481904 60481909 +
aacacacagacagccccatgga

SEQ ID NO: 198475 - DNA, 22 bp, Artificial Sequence
  Synthetic oligonucleotide; TTC chr2 60481915 60481936 60481932 60481937 +
tccagctcaggaaacccaccta

SEQ ID NO: 198476 - DNA, 22 bp, Artificial Sequence
  Synthetic oligonucleotide; CTC chr2 60481917 60481938 60481934 60481939 +
cagctcaggaaacccacctagg

SEQ ID NO: 198477 - DNA, 22 bp, Artificial Sequence
  Synthetic oligonucleotide; CTC chr2 60481923 60481944 60481940 60481945 +
aggaaacccacctaggtataga

SEQ ID NO: 198478 - DNA, 22 bp, Artificial Sequence
  Synthetic oligonucleotide; CTA chr2 60481937 60481958 60481954 60481959 +
ggtatagagaccttctccggaa

SEQ ID NO: 198479 - DNA, 22 bp, Artificial Sequence
  Synthetic oligonucleotide; CTT chr2 60481951 60481972 60481968 60481973 +
ctccggaacctctggtctgttc

SEQ ID NO: 198480 - DNA, 22 bp, Artificial Sequence
  Synthetic oligonucleotide; TTC chr2 60481952 60481973 60481969 60481974 +
tccggaacctctggtctgttct

SEQ ID NO: 198481 - DNA, 22 bp, Artificial Sequence
  Synthetic oligonucleotide; CTC chr2 60481954 60481975 60481971 60481976 +
cggaacctctggtctgttctag

SEQ ID NO: 198482 - DNA, 22 bp, Artificial Sequence
  Synthetic oligonucleotide; CTC chr2 60481963 60481984 60481980 60481985 +
tggtctgttctagtcctgctgt

SEQ ID NO: 198483 - DNA, 22 bp, Artificial Sequence
  Synthetic oligonucleotide; CTG chr2 60481965 60481986 60481982 60481987 +
gtctgttctagtcctgctgtca

SEQ ID NO: 198484 - DNA, 22 bp, Artificial Sequence
  Synthetic oligonucleotide; CTG chr2 60481970 60481991 60481987 60481992 +
ttctagtcctgctgtcaaaaga

SEQ ID NO: 198485 - DNA, 22 bp, Artificial Sequence
  Synthetic oligonucleotide; TTC chr2 60481973 60481994 60481990 60481995 +
tagtcctgctgtcaaaagaaag

SEQ ID NO: 198486 - DNA, 22 bp, Artificial Sequence
  Synthetic oligonucleotide; CTA chr2 60481975 60481996 60481992 60481997 +
gtcctgctgtcaaaagaaaggg

SEQ ID NO: 198487 - DNA, 22 bp, Artificial Sequence
  Synthetic oligonucleotide; CTG chr2 60481981 60482002 60481998 60482003 +
ctgtcaaaagaaaggggttgga

SEQ ID NO: 198488 - DNA, 22 bp, Artificial Sequence
  Synthetic oligonucleotide; CTG chr2 60481984 60482005 60482001 60482006 +
tcaaaagaaaggggttggactg

SEQ ID NO: 198489 - DNA, 22 bp, Artificial Sequence
  Synthetic oligonucleotide; TTG chr2 60482001 60482022 60482018 60482023 +
gactgatgtttcccagtggagg

SEQ ID NO: 198490 - DNA, 22 bp, Artificial Sequence
  Synthetic oligonucleotide; CTG chr2 60482006 60482027 60482023 60482028 +
atgtttcccagtggagggcttg

SEQ ID NO: 198491 - DNA, 22 bp, Artificial Sequence
  Synthetic oligonucleotide; TTT chr2 60482012 60482033 60482029 60482034 +
cccagtggagggcttgtttgtc

SEQ ID NO: 198492 - DNA, 22 bp, Artificial Sequence
  Synthetic oligonucleotide; TTC chr2 60482013 60482034 60482030 60482035 +
ccagtggagggcttgtttgtca

SEQ ID NO: 198493 - DNA, 22 bp, Artificial Sequence
  Synthetic oligonucleotide; CTT chr2 60482027 60482048 60482044 60482049 +
gtttgtcatttttggacctaac

SEQ ID NO: 198494 - DNA, 22 bp, Artificial Sequence
  Synthetic oligonucleotide; TTG chr2 60482028 60482049 60482045 60482050 +
tttgtcatttttggacctaaca

SEQ ID NO: 198495 - DNA, 22 bp, Artificial Sequence
  Synthetic oligonucleotide; TTT chr2 60482031 60482052 60482048 60482053 +
gtcatttttggacctaacatcc

SEQ ID NO: 198496 - DNA, 22 bp, Artificial Sequence
  Synthetic oligonucleotide; TTG chr2 60482032 60482053 60482049 60482054 +
tcatttttggacctaacatcca

SEQ ID NO: 198497 - DNA, 22 bp, Artificial Sequence
  Synthetic oligonucleotide; TTT chr2 60482038 60482059 60482055 60482060 +
ttggacctaacatccagttcat

SEQ ID NO: 198498 - DNA, 22 bp, Artificial Sequence
  Synthetic oligonucleotide; TTT chr2 60482039 60482060 60482056 60482061 +
tggacctaacatccagttcatc

SEQ ID NO: 198499 - DNA, 22 bp, Artificial Sequence
  Synthetic oligonucleotide; TTT chr2 60482040 60482061 60482057 60482062 +
ggacctaacatccagttcatca

SEQ ID NO: 198500 - DNA, 22 bp, Artificial Sequence
  Synthetic oligonucleotide; TTG chr2 60482041 60482062 60482058 60482063 +
gacctaacatccagttcatcaa

SEQ ID NO: 198501 - DNA, 22 bp, Artificial Sequence
  Synthetic oligonucleotide; CTA chr2 60482047 60482068 60482064 60482069 +
acatccagttcatcaaggtcac

SEQ ID NO: 198502 - DNA, 22 bp, Artificial Sequence
  Synthetic oligonucleotide; TTC chr2 60482058 60482079 60482075 60482080 +
atcaaggtcacttctgactccc

SEQ ID NO: 198503 - DNA, 22 bp, Artificial Sequence
  Synthetic oligonucleotide; CTT chr2 60482071 60482092 60482088 60482093 +
ctgactcccaggaagagaggca

SEQ ID NO: 198504 - DNA, 22 bp, Artificial Sequence
  Synthetic oligonucleotide; TTC chr2 60482072 60482093 60482089 60482094 +
tgactcccaggaagagaggcag

SEQ ID NO: 198505 - DNA, 22 bp, Artificial Sequence
  Synthetic oligonucleotide; CTG chr2 60482074 60482095 60482091 60482096 +
actcccaggaagagaggcagac

SEQ ID NO: 198506 - DNA, 22 bp, Artificial Sequence
  Synthetic oligonucleotide; CTC chr2 60482078 60482099 60482095 60482100 +
ccaggaagagaggcagacctgt

SEQ ID NO: 198507 - DNA, 22 bp, Artificial Sequence
  Synthetic oligonucleotide; CTG chr2 60482099 60482120 60482116 60482121 +
ttaaggggcgggtggtttgagc

SEQ ID NO: 198508 - DNA, 22 bp, Artificial Sequence
  Synthetic oligonucleotide; TTA chr2 60482102 60482123 60482119 60482124 +
aggggcgggtggtttgagccac

SEQ ID NO: 198509 - DNA, 22 bp, Artificial Sequence
  Synthetic oligonucleotide; TTT chr2 60482117 60482138 60482134 60482139 +
gagccacttaggacattttgga

SEQ ID NO: 198510 - DNA, 22 bp, Artificial Sequence
  Synthetic oligonucleotide; TTG chr2 60482118 60482139 60482135 60482140 +
agccacttaggacattttggac

SEQ ID NO: 198511 - DNA, 22 bp, Artificial Sequence
  Synthetic oligonucleotide; CTT chr2 60482126 60482147 60482143 60482148 +
aggacattttggacattttgca

SEQ ID NO: 198512 - DNA, 22 bp, Artificial Sequence
  Synthetic oligonucleotide; TTA chr2 60482127 60482148 60482144 60482149 +
ggacattttggacattttgcat

SEQ ID NO: 198513 - DNA, 22 bp, Artificial Sequence
  Synthetic oligonucleotide; TTT chr2 60482135 60482156 60482152 60482157 +
tggacattttgcatctctcatg

SEQ ID NO: 198514 - DNA, 22 bp, Artificial Sequence
  Synthetic oligonucleotide; TTT chr2 60482136 60482157 60482153 60482158 +
ggacattttgcatctctcatga

SEQ ID NO: 198515 - DNA, 22 bp, Artificial Sequence
  Synthetic oligonucleotide; TTG chr2 60482137 60482158 60482154 60482159 +
gacattttgcatctctcatgat

SEQ ID NO: 198516 - DNA, 22 bp, Artificial Sequence
  Synthetic oligonucleotide; TTT chr2 60482144 60482165 60482161 60482166 +
tgcatctctcatgattctatct

SEQ ID NO: 198517 - DNA, 22 bp, Artificial Sequence
  Synthetic oligonucleotide; TTT chr2 60482145 60482166 60482162 60482167 +
gcatctctcatgattctatctt

SEQ ID NO: 198518 - DNA, 22 bp, Artificial Sequence
  Synthetic oligonucleotide; TTG chr2 60482146 60482167 60482163 60482168 +
catctctcatgattctatcttg

SEQ ID NO: 198519 - DNA, 22 bp, Artificial Sequence
  Synthetic oligonucleotide; CTC chr2 60482152 60482173 60482169 60482174 +
tcatgattctatcttgagagtt

SEQ ID NO: 198520 - DNA, 22 bp, Artificial Sequence
  Synthetic oligonucleotide; CTC chr2 60482154 60482175 60482171 60482176 +
atgattctatcttgagagttta

SEQ ID NO: 198521 - DNA, 22 bp, Artificial Sequence
  Synthetic oligonucleotide; TTC chr2 60482161 60482182 60482178 60482183 +
tatcttgagagtttagtttggt

SEQ ID NO: 198522 - DNA, 22 bp, Artificial Sequence
  Synthetic oligonucleotide; CTA chr2 60482163 60482184 60482180 60482185 +
tcttgagagtttagtttggttg

SEQ ID NO: 198523 - DNA, 22 bp, Artificial Sequence
  Synthetic oligonucleotide; CTT chr2 60482167 60482188 60482184 60482189 +
gagagtttagtttggttggagt

SEQ ID NO: 198524 - DNA, 22 bp, Artificial Sequence
  Synthetic oligonucleotide; TTG chr2 60482168 60482189 60482185 60482190 +
agagtttagtttggttggagtt

SEQ ID NO: 198525 - DNA, 22 bp, Artificial Sequence
  Synthetic oligonucleotide; TTT chr2 60482175 60482196 60482192 60482197 +
agtttggttggagtttagtttt

SEQ ID NO: 198526 - DNA, 22 bp, Artificial Sequence
  Synthetic oligonucleotide; TTA chr2 60482176 60482197 60482193 60482198 +
gtttggttggagtttagttttt

SEQ ID NO: 198527 - DNA, 22 bp, Artificial Sequence
  Synthetic oligonucleotide; TTT chr2 60482180 60482201 60482197 60482202 +
ggttggagtttagtttttgagt

SEQ ID NO: 198528 - DNA, 22 bp, Artificial Sequence
  Synthetic oligonucleotide; TTG chr2 60482181 60482202 60482198 60482203 +
gttggagtttagtttttgagtt

SEQ ID NO: 198529 - DNA, 22 bp, Artificial Sequence
  Synthetic oligonucleotide; TTG chr2 60482185 60482206 60482202 60482207 +
gagtttagtttttgagtttttt

SEQ ID NO: 198530 - DNA, 22 bp, Artificial Sequence
  Synthetic oligonucleotide; TTT chr2 60482191 60482212 60482208 60482213 +
agtttttgagttttttgttcgg

SEQ ID NO: 198531 - DNA, 22 bp, Artificial Sequence
  Synthetic oligonucleotide; TTA chr2 60482192 60482213 60482209 60482214 +
gtttttgagttttttgttcggg

SEQ ID NO: 198532 - DNA, 22 bp, Artificial Sequence
  Synthetic oligonucleotide; TTT chr2 60482196 60482217 60482213 60482218 +
ttgagttttttgttcgggttgt

SEQ ID NO: 198533 - DNA, 22 bp, Artificial Sequence
  Synthetic oligonucleotide; TTT chr2 60482197 60482218 60482214 60482219 +
tgagttttttgttcgggttgtg

SEQ ID NO: 198534 - DNA, 22 bp, Artificial Sequence
  Synthetic oligonucleotide; TTT chr2 60482198 60482219 60482215 60482220 +
gagttttttgttcgggttgtgg

SEQ ID NO: 198535 - DNA, 22 bp, Artificial Sequence
  Synthetic oligonucleotide; TTG chr2 60482199 60482220 60482216 60482221 +
agttttttgttcgggttgtggt

SEQ ID NO: 198536 - DNA, 22 bp, Artificial Sequence
  Synthetic oligonucleotide; TTT chr2 60482204 60482225 60482221 60482226 +
tttgttcgggttgtggtttctc

SEQ ID NO: 198537 - DNA, 22 bp, Artificial Sequence
  Synthetic oligonucleotide; TTT chr2 60482205 60482226 60482222 60482227 +
ttgttcgggttgtggtttctct

SEQ ID NO: 198538 - DNA, 22 bp, Artificial Sequence
  Synthetic oligonucleotide; TTT chr2 60482206 60482227 60482223 60482228 +
tgttcgggttgtggtttctctt

SEQ ID NO: 198539 - DNA, 22 bp, Artificial Sequence
  Synthetic oligonucleotide; TTT chr2 60482207 60482228 60482224 60482229 +
gttcgggttgtggtttctcttc

SEQ ID NO: 198540 - DNA, 22 bp, Artificial Sequence
  Synthetic oligonucleotide; TTG chr2 60482208 60482229 60482225 60482230 +
ttcgggttgtggtttctcttcc

SEQ ID NO: 198541 - DNA, 22 bp, Artificial Sequence
  Synthetic oligonucleotide; TTC chr2 60482211 60482232 60482228 60482233 +
gggttgtggtttctcttcctcc

SEQ ID NO: 198542 - DNA, 22 bp, Artificial Sequence
  Synthetic oligonucleotide; TTG chr2 60482217 60482238 60482234 60482239 +
tggtttctcttcctccattaaa

SEQ ID NO: 198543 - DNA, 22 bp, Artificial Sequence
  Synthetic oligonucleotide; TTT chr2 60482223 60482244 60482240 60482245 +
ctcttcctccattaaaaaaaaa

SEQ ID NO: 198544 - DNA, 22 bp, Artificial Sequence
  Synthetic oligonucleotide; TTC chr2 60482224 60482245 60482241 60482246 +
tcttcctccattaaaaaaaaaa

SEQ ID NO: 198545 - DNA, 22 bp, Artificial Sequence
  Synthetic oligonucleotide; CTC chr2 60482226 60482247 60482243 60482248 +
ttcctccattaaaaaaaaaaat

SEQ ID NO: 198546 - DNA, 22 bp, Artificial Sequence
  Synthetic oligonucleotide; CTT chr2 60482228 60482249 60482245 60482250 +
cctccattaaaaaaaaaaattg

SEQ ID NO: 198547 - DNA, 22 bp, Artificial Sequence
  Synthetic oligonucleotide; TTC chr2 60482229 60482250 60482246 60482251 +
ctccattaaaaaaaaaaattgg

SEQ ID NO: 198548 - DNA, 22 bp, Artificial Sequence
  Synthetic oligonucleotide; CTC chr2 60482232 60482253 60482249 60482254 +
cattaaaaaaaaaaattggagc

SEQ ID NO: 198549 - DNA, 22 bp, Artificial Sequence
  Synthetic oligonucleotide; TTA chr2 60482237 60482258 60482254 60482259 +
aaaaaaaaaattggagctgtat

SEQ ID NO: 198550 - DNA, 22 bp, Artificial Sequence
  Synthetic oligonucleotide; TTG chr2 60482250 60482271 60482267 60482272 +
gagctgtatttctgtttcctgt

SEQ ID NO: 198551 - DNA, 22 bp, Artificial Sequence
  Synthetic oligonucleotide; CTG chr2 60482256 60482277 60482273 60482278 +
tatttctgtttcctgttcacgg

SEQ ID NO: 198552 - DNA, 22 bp, Artificial Sequence
  Synthetic oligonucleotide; TTT chr2 60482261 60482282 60482278 60482283 +
ctgtttcctgttcacggagcgg

SEQ ID NO: 198553 - DNA, 22 bp, Artificial Sequence
  Synthetic oligonucleotide; TTC chr2 60482262 60482283 60482279 60482284 +
tgtttcctgttcacggagcgga

SEQ ID NO: 198554 - DNA, 22 bp, Artificial Sequence
  Synthetic oligonucleotide; CTG chr2 60482264 60482285 60482281 60482286 +
tttcctgttcacggagcggaca

SEQ ID NO: 198555 - DNA, 22 bp, Artificial Sequence
  Synthetic oligonucleotide; TTT chr2 60482267 60482288 60482284 60482289 +
cctgttcacggagcggacagaa

SEQ ID NO: 198556 - DNA, 22 bp, Artificial Sequence
  Synthetic oligonucleotide; TTC chr2 60482268 60482289 60482285 60482290 +
ctgttcacggagcggacagaag

SEQ ID NO: 198557 - DNA, 22 bp, Artificial Sequence
  Synthetic oligonucleotide; CTG chr2 60482271 60482292 60482288 60482293 +
ttcacggagcggacagaaggag

SEQ ID NO: 198558 - DNA, 22 bp, Artificial Sequence
  Synthetic oligonucleotide; TTC chr2 60482274 60482295 60482291 60482296 +
acggagcggacagaaggagggt

SEQ ID NO: 198559 - DNA, 22 bp, Artificial Sequence
  Synthetic oligonucleotide; CTG chr2 60482329 60482350 60482346 60482351 +
atacatggagcagagccgagaa

SEQ ID NO: 198560 - DNA, 22 bp, Artificial Sequence
  Synthetic oligonucleotide; CTG chr2 60482363 60482384 60482380 60482385 +
gagaaaagtgagaaatggagct

SEQ ID NO: 198561 - DNA, 22 bp, Artificial Sequence
  Synthetic oligonucleotide; CTT chr2 60482386 60482407 60482403 60482408 +
ttttcttggcttccaaacagtt

SEQ ID NO: 198562 - DNA, 22 bp, Artificial Sequence
  Synthetic oligonucleotide; TTT chr2 60482387 60482408 60482404 60482409 +
tttcttggcttccaaacagttg

SEQ ID NO: 198563 - DNA, 22 bp, Artificial Sequence
  Synthetic oligonucleotide; TTT chr2 60482388 60482409 60482405 60482410 +
ttcttggcttccaaacagttgt

SEQ ID NO: 198564 - DNA, 22 bp, Artificial Sequence
  Synthetic oligonucleotide; TTT chr2 60482389 60482410 60482406 60482411 +
tcttggcttccaaacagttgta

SEQ ID NO: 198565 - DNA, 22 bp, Artificial Sequence
  Synthetic oligonucleotide; TTT chr2 60482390 60482411 60482407 60482412 +
cttggcttccaaacagttgtaa

SEQ ID NO: 198566 - DNA, 22 bp, Artificial Sequence
  Synthetic oligonucleotide; TTC chr2 60482391 60482412 60482408 60482413 +
ttggcttccaaacagttgtaat

SEQ ID NO: 198567 - DNA, 22 bp, Artificial Sequence
  Synthetic oligonucleotide; CTT chr2 60482393 60482414 60482410 60482415 +
ggcttccaaacagttgtaattt

SEQ ID NO: 198568 - DNA, 22 bp, Artificial Sequence
  Synthetic oligonucleotide; TTG chr2 60482394 60482415 60482411 60482416 +
gcttccaaacagttgtaatttc

SEQ ID NO: 198569 - DNA, 22 bp, Artificial Sequence
  Synthetic oligonucleotide; CTT chr2 60482398 60482419 60482415 60482420 +
ccaaacagttgtaatttccact

SEQ ID NO: 198570 - DNA, 22 bp, Artificial Sequence
  Synthetic oligonucleotide; TTC chr2 60482399 60482420 60482416 60482421 +
caaacagttgtaatttccactg

SEQ ID NO: 198571 - DNA, 22 bp, Artificial Sequence
  Synthetic oligonucleotide; TTG chr2 60482409 60482430 60482426 60482431 +
taatttccactgccactgctta

SEQ ID NO: 198572 - DNA, 22 bp, Artificial Sequence
  Synthetic oligonucleotide; TTT chr2 60482415 60482436 60482432 60482437 +
ccactgccactgcttagttcct

SEQ ID NO: 198573 - DNA, 22 bp, Artificial Sequence
  Synthetic oligonucleotide; TTC chr2 60482416 60482437 60482433 60482438 +
cactgccactgcttagttcctg

SEQ ID NO: 198574 - DNA, 22 bp, Artificial Sequence
  Synthetic oligonucleotide; CTG chr2 60482421 60482442 60482438 60482443 +
ccactgcttagttcctgggcac

SEQ ID NO: 198575 - DNA, 22 bp, Artificial Sequence
  Synthetic oligonucleotide; CTG chr2 60482427 60482448 60482444 60482449 +
cttagttcctgggcaccaggca

SEQ ID NO: 198576 - DNA, 22 bp, Artificial Sequence
  Synthetic oligonucleotide; CTT chr2 60482430 60482451 60482447 60482452 +
agttcctgggcaccaggcatac

SEQ ID NO: 198577 - DNA, 22 bp, Artificial Sequence
  Synthetic oligonucleotide; TTA chr2 60482431 60482452 60482448 60482453 +
gttcctgggcaccaggcataca

SEQ ID NO: 198578 - DNA, 22 bp, Artificial Sequence
  Synthetic oligonucleotide; TTC chr2 60482435 60482456 60482452 60482457 +
ctgggcaccaggcatacagagt

SEQ ID NO: 198579 - DNA, 22 bp, Artificial Sequence
  Synthetic oligonucleotide; CTG chr2 60482438 60482459 60482455 60482460 +
ggcaccaggcatacagagtggg

SEQ ID NO: 198580 - DNA, 22 bp, Artificial Sequence
  Synthetic oligonucleotide; CTT chr2 60482480 60482501 60482497 60482502 +
tgccacaaatcaggatttggca

SEQ ID NO: 198581 - DNA, 22 bp, Artificial Sequence
  Synthetic oligonucleotide; TTT chr2 60482481 60482502 60482498 60482503 +
gccacaaatcaggatttggcat

SEQ ID NO: 198582 - DNA, 22 bp, Artificial Sequence
  Synthetic oligonucleotide; TTG chr2 60482482 60482503 60482499 60482504 +
ccacaaatcaggatttggcatt

SEQ ID NO: 198583 - DNA, 22 bp, Artificial Sequence
  Synthetic oligonucleotide; TTT chr2 60482498 60482519 60482515 60482520 +
ggcatttaaatccacaggaagc

SEQ ID NO: 198584 - DNA, 22 bp, Artificial Sequence
  Synthetic oligonucleotide; TTG chr2 60482499 60482520 60482516 60482521 +
gcatttaaatccacaggaagca

SEQ ID NO: 198585 - DNA, 22 bp, Artificial Sequence
  Synthetic oligonucleotide; TTT chr2 60482505 60482526 60482522 60482527 +
aaatccacaggaagcaagaaga

SEQ ID NO: 198586 - DNA, 22 bp, Artificial Sequence
  Synthetic oligonucleotide; TTA chr2 60482506 60482527 60482523 60482528 +
aatccacaggaagcaagaagaa

SEQ ID NO: 198587 - DNA, 22 bp, Artificial Sequence
  Synthetic oligonucleotide; CTG chr2 60482539 60482560 60482556 60482561 +
cttatttatagatttgcagatg

SEQ ID NO: 198588 - DNA, 22 bp, Artificial Sequence
  Synthetic oligonucleotide; CTT chr2 60482542 60482563 60482559 60482564 +
atttatagatttgcagatgaat

SEQ ID NO: 198589 - DNA, 22 bp, Artificial Sequence
  Synthetic oligonucleotide; TTA chr2 60482543 60482564 60482560 60482565 +
tttatagatttgcagatgaatg

SEQ ID NO: 198590 - DNA, 22 bp, Artificial Sequence
  Synthetic oligonucleotide; TTT chr2 60482546 60482567 60482563 60482568 +
atagatttgcagatgaatgaga

SEQ ID NO: 198591 - DNA, 22 bp, Artificial Sequence
  Synthetic oligonucleotide; TTA chr2 60482547 60482568 60482564 60482569 +
tagatttgcagatgaatgagat

SEQ ID NO: 198592 - DNA, 22 bp, Artificial Sequence
  Synthetic oligonucleotide; TTT chr2 60482554 60482575 60482571 60482576 +
gcagatgaatgagataaccaaa

SEQ ID NO: 198593 - DNA, 22 bp, Artificial Sequence
  Synthetic oligonucleotide; TTG chr2 60482555 60482576 60482572 60482577 +
cagatgaatgagataaccaaaa

SEQ ID NO: 198594 - DNA, 22 bp, Artificial Sequence
  Synthetic oligonucleotide; CTT chr2 60482584 60482605 60482601 60482606 +
ctcgcgtatgtgaaggagcaat

SEQ ID NO: 198595 - DNA, 22 bp, Artificial Sequence
  Synthetic oligonucleotide; TTC chr2 60482585 60482606 60482602 60482607 +
tcgcgtatgtgaaggagcaatt

SEQ ID NO: 198596 - DNA, 22 bp, Artificial Sequence
  Synthetic oligonucleotide; CTC chr2 60482587 60482608 60482604 60482609 +
gcgtatgtgaaggagcaattcc

SEQ ID NO: 198597 - DNA, 22 bp, Artificial Sequence
  Synthetic oligonucleotide; TTC chr2 60482608 60482629 60482625 60482630 +
cattttcagacttggaaagttc

SEQ ID NO: 198598 - DNA, 22 bp, Artificial Sequence
  Synthetic oligonucleotide; TTT chr2 60482613 60482634 60482630 60482635 +
tcagacttggaaagttctccat

SEQ ID NO: 198599 - DNA, 22 bp, Artificial Sequence
  Synthetic oligonucleotide; TTT chr2 60482614 60482635 60482631 60482636 +
cagacttggaaagttctccata

SEQ ID NO: 198600 - DNA, 22 bp, Artificial Sequence
  Synthetic oligonucleotide; TTC chr2 60482615 60482636 60482632 60482637 +
agacttggaaagttctccataa

SEQ ID NO: 198601 - DNA, 22 bp, Artificial Sequence
  Synthetic oligonucleotide; CTT chr2 60482621 60482642 60482638 60482643 +
ggaaagttctccataattaagt

SEQ ID NO: 198602 - DNA, 22 bp, Artificial Sequence
  Synthetic oligonucleotide; TTG chr2 60482622 60482643 60482639 60482644 +
gaaagttctccataattaagta

SEQ ID NO: 198603 - DNA, 22 bp, Artificial Sequence
  Synthetic oligonucleotide; TTC chr2 60482630 60482651 60482647 60482652 +
tccataattaagtatcacccaa

SEQ ID NO: 198604 - DNA, 22 bp, Artificial Sequence
  Synthetic oligonucleotide; CTC chr2 60482632 60482653 60482649 60482654 +
cataattaagtatcacccaacc

SEQ ID NO: 198605 - DNA, 22 bp, Artificial Sequence
  Synthetic oligonucleotide; TTA chr2 60482640 60482661 60482657 60482662 +
agtatcacccaaccctgaaagc

SEQ ID NO: 198606 - DNA, 22 bp, Artificial Sequence
  Synthetic oligonucleotide; CTG chr2 60482657 60482678 60482674 60482679 +
aaagcacactgcatcccaaggt

SEQ ID NO: 198607 - DNA, 22 bp, Artificial Sequence
  Synthetic oligonucleotide; CTG chr2 60482668 60482689 60482685 60482690 +
catcccaaggttaagatcagct

SEQ ID NO: 198608 - DNA, 22 bp, Artificial Sequence
  Synthetic oligonucleotide; TTA chr2 60482681 60482702 60482698 60482703 +
agatcagcttcctgaaaacagg

SEQ ID NO: 198609 - DNA, 22 bp, Artificial Sequence
  Synthetic oligonucleotide; CTT chr2 60482691 60482712 60482708 60482713 +
cctgaaaacagggcagaagact

SEQ ID NO: 198610 - DNA, 22 bp, Artificial Sequence
  Synthetic oligonucleotide; TTC chr2 60482692 60482713 60482709 60482714 +
ctgaaaacagggcagaagactg

SEQ ID NO: 198611 - DNA, 22 bp, Artificial Sequence
  Synthetic oligonucleotide; CTG chr2 60482695 60482716 60482712 60482717 +
aaaacagggcagaagactgctg

SEQ ID NO: 198612 - DNA, 22 bp, Artificial Sequence
  Synthetic oligonucleotide; CTG chr2 60482714 60482735 60482731 60482736 +
ctgcttcagtggtagctcaaaa

SEQ ID NO: 198613 - DNA, 22 bp, Artificial Sequence
  Synthetic oligonucleotide; CTG chr2 60482717 60482738 60482734 60482739 +
cttcagtggtagctcaaaaatt

SEQ ID NO: 198614 - DNA, 22 bp, Artificial Sequence
  Synthetic oligonucleotide; CTT chr2 60482720 60482741 60482737 60482742 +
cagtggtagctcaaaaattcta

SEQ ID NO: 198615 - DNA, 22 bp, Artificial Sequence
  Synthetic oligonucleotide; TTC chr2 60482721 60482742 60482738 60482743 +
agtggtagctcaaaaattctat

SEQ ID NO: 198616 - DNA, 22 bp, Artificial Sequence
  Synthetic oligonucleotide; CTC chr2 60482732 60482753 60482749 60482754 +
aaaaattctattttgaaggaca

SEQ ID NO: 198617 - DNA, 22 bp, Artificial Sequence
  Synthetic oligonucleotide; TTC chr2 60482740 60482761 60482757 60482762 +
tattttgaaggacaggttagta

SEQ ID NO: 198618 - DNA, 22 bp, Artificial Sequence
  Synthetic oligonucleotide; CTA chr2 60482742 60482763 60482759 60482764 +
ttttgaaggacaggttagtacc

SEQ ID NO: 198619 - DNA, 22 bp, Artificial Sequence
  Synthetic oligonucleotide; TTT chr2 60482745 60482766 60482762 60482767 +
tgaaggacaggttagtaccaca

SEQ ID NO: 198620 - DNA, 22 bp, Artificial Sequence
  Synthetic oligonucleotide; TTT chr2 60482746 60482767 60482763 60482768 +
gaaggacaggttagtaccacac

SEQ ID NO: 198621 - DNA, 22 bp, Artificial Sequence
  Synthetic oligonucleotide; TTG chr2 60482747 60482768 60482764 60482769 +
aaggacaggttagtaccacact

SEQ ID NO: 198622 - DNA, 22 bp, Artificial Sequence
  Synthetic oligonucleotide; TTA chr2 60482759 60482780 60482776 60482781 +
gtaccacactacatttaactgg

SEQ ID NO: 198623 - DNA, 22 bp, Artificial Sequence
  Synthetic oligonucleotide; CTA chr2 60482770 60482791 60482787 60482792 +
catttaactggattcagttcat

SEQ ID NO: 198624 - DNA, 22 bp, Artificial Sequence
  Synthetic oligonucleotide; TTT chr2 60482775 60482796 60482792 60482797 +
aactggattcagttcatgtgat

SEQ ID NO: 198625 - DNA, 22 bp, Artificial Sequence
  Synthetic oligonucleotide; TTA chr2 60482776 60482797 60482793 60482798 +
actggattcagttcatgtgatt

SEQ ID NO: 198626 - DNA, 22 bp, Artificial Sequence
  Synthetic oligonucleotide; CTG chr2 60482780 60482801 60482797 60482802 +
gattcagttcatgtgattatac

SEQ ID NO: 198627 - DNA, 22 bp, Artificial Sequence
  Synthetic oligonucleotide; TTC chr2 60482785 60482806 60482802 60482807 +
agttcatgtgattatacagtgc

SEQ ID NO: 198628 - DNA, 22 bp, Artificial Sequence
  Synthetic oligonucleotide; TTC chr2 60482790 60482811 60482807 60482812 +
atgtgattatacagtgccttgc

SEQ ID NO: 198629 - DNA, 22 bp, Artificial Sequence
  Synthetic oligonucleotide; TTA chr2 60482799 60482820 60482816 60482821 +
tacagtgccttgctttctagaa

SEQ ID NO: 198630 - DNA, 22 bp, Artificial Sequence
  Synthetic oligonucleotide; CTT chr2 60482810 60482831 60482827 60482832 +
gctttctagaatgtgtaatcat

SEQ ID NO: 198631 - DNA, 22 bp, Artificial Sequence
  Synthetic oligonucleotide; TTG chr2 60482811 60482832 60482828 60482833 +
ctttctagaatgtgtaatcatc

SEQ ID NO: 198632 - DNA, 22 bp, Artificial Sequence
  Synthetic oligonucleotide; CTT chr2 60482814 60482835 60482831 60482836 +
tctagaatgtgtaatcatctct

SEQ ID NO: 198633 - DNA, 22 bp, Artificial Sequence
  Synthetic oligonucleotide; TTT chr2 60482815 60482836 60482832 60482837 +
ctagaatgtgtaatcatctctt

SEQ ID NO: 198634 - DNA, 22 bp, Artificial Sequence
  Synthetic oligonucleotide; TTC chr2 60482816 60482837 60482833 60482838 +
tagaatgtgtaatcatctcttt

SEQ ID NO: 198635 - DNA, 22 bp, Artificial Sequence
  Synthetic oligonucleotide; CTA chr2 60482818 60482839 60482835 60482840 +
gaatgtgtaatcatctctttct

SEQ ID NO: 198636 - DNA, 22 bp, Artificial Sequence
  Synthetic oligonucleotide; CTC chr2 60482835 60482856 60482852 60482857 +
tttctgatgacattttaaatat

SEQ ID NO: 198637 - DNA, 22 bp, Artificial Sequence
  Synthetic oligonucleotide; CTT chr2 60482837 60482858 60482854 60482859 +
tctgatgacattttaaatatcc

SEQ ID NO: 198638 - DNA, 22 bp, Artificial Sequence
  Synthetic oligonucleotide; TTT chr2 60482838 60482859 60482855 60482860 +
ctgatgacattttaaatatcca

SEQ ID NO: 198639 - DNA, 22 bp, Artificial Sequence
  Synthetic oligonucleotide; TTC chr2 60482839 60482860 60482856 60482861 +
tgatgacattttaaatatccaa

SEQ ID NO: 198640 - DNA, 22 bp, Artificial Sequence
  Synthetic oligonucleotide; CTG chr2 60482841 60482862 60482858 60482863 +
atgacattttaaatatccaact

SEQ ID NO: 198641 - DNA, 22 bp, Artificial Sequence
  Synthetic oligonucleotide; TTT chr2 60482850 60482871 60482867 60482872 +
taaatatccaactagacaaata

SEQ ID NO: 198642 - DNA, 22 bp, Artificial Sequence
  Synthetic oligonucleotide; TTT chr2 60482851 60482872 60482868 60482873 +
aaatatccaactagacaaataa

SEQ ID NO: 198643 - DNA, 22 bp, Artificial Sequence
  Synthetic oligonucleotide; TTA chr2 60482852 60482873 60482869 60482874 +
aatatccaactagacaaataat

SEQ ID NO: 198644 - DNA, 22 bp, Artificial Sequence
  Synthetic oligonucleotide; CTA chr2 60482864 60482885 60482881 60482886 +
gacaaataattgcagcaataat

SEQ ID NO: 198645 - DNA, 22 bp, Artificial Sequence
  Synthetic oligonucleotide; TTG chr2 60482876 60482897 60482893 60482898 +
cagcaataattgatagcagagt

SEQ ID NO: 198646 - DNA, 22 bp, Artificial Sequence
  Synthetic oligonucleotide; TTG chr2 60482888 60482909 60482905 60482910 +
atagcagagtcaagctggaaga

SEQ ID NO: 198647 - DNA, 22 bp, Artificial Sequence
  Synthetic oligonucleotide; CTG chr2 60482905 60482926 60482922 60482927 +
gaagatcattgattggcagagt

SEQ ID NO: 198648 - DNA, 22 bp, Artificial Sequence
  Synthetic oligonucleotide; TTG chr2 60482916 60482937 60482933 60482938 +
attggcagagtccccactgaaa

SEQ ID NO: 198649 - DNA, 22 bp, Artificial Sequence
  Synthetic oligonucleotide; TTG chr2 60482920 60482941 60482937 60482942 +
gcagagtccccactgaaacaaa

SEQ ID NO: 198650 - DNA, 22 bp, Artificial Sequence
  Synthetic oligonucleotide; CTG chr2 60482935 60482956 60482952 60482957 +
aaacaaatctttctttcaaaca

SEQ ID NO: 198651 - DNA, 22 bp, Artificial Sequence
  Synthetic oligonucleotide; CTT chr2 60482946 60482967 60482963 60482968 +
tctttcaaacattacagaaatg

SEQ ID NO: 198652 - DNA, 22 bp, Artificial Sequence
  Synthetic oligonucleotide; TTT chr2 60482947 60482968 60482964 60482969 +
ctttcaaacattacagaaatga

SEQ ID NO: 198653 - DNA, 22 bp, Artificial Sequence
  Synthetic oligonucleotide; TTC chr2 60482948 60482969 60482965 60482970 +
tttcaaacattacagaaatgat

SEQ ID NO: 198654 - DNA, 22 bp, Artificial Sequence
  Synthetic oligonucleotide; CTT chr2 60482950 60482971 60482967 60482972 +
tcaaacattacagaaatgatga

SEQ ID NO: 198655 - DNA, 22 bp, Artificial Sequence
  Synthetic oligonucleotide; TTT chr2 60482951 60482972 60482968 60482973 +
caaacattacagaaatgatgat

SEQ ID NO: 198656 - DNA, 22 bp, Artificial Sequence
  Synthetic oligonucleotide; TTC chr2 60482952 60482973 60482969 60482974 +
aaacattacagaaatgatgatg

SEQ ID NO: 198657 - DNA, 22 bp, Artificial Sequence
  Synthetic oligonucleotide; TTA chr2 60482960 60482981 60482977 60482982 +
cagaaatgatgatgtttaagtc

SEQ ID NO: 198658 - DNA, 22 bp, Artificial Sequence
  Synthetic oligonucleotide; TTT chr2 60482977 60482998 60482994 60482999 +
aagtctaacttttgctgataaa

SEQ ID NO: 198659 - DNA, 22 bp, Artificial Sequence
  Synthetic oligonucleotide; TTA chr2 60482978 60482999 60482995 60483000 +
agtctaacttttgctgataaat

SEQ ID NO: 198660 - DNA, 22 bp, Artificial Sequence
  Synthetic oligonucleotide; CTA chr2 60482984 60483005 60483001 60483006 +
acttttgctgataaatgctcaa

SEQ ID NO: 198661 - DNA, 22 bp, Artificial Sequence
  Synthetic oligonucleotide; CTT chr2 60482988 60483009 60483005 60483010 +
ttgctgataaatgctcaaaatc

SEQ ID NO: 198662 - DNA, 22 bp, Artificial Sequence
  Synthetic oligonucleotide; TTT chr2 60482989 60483010 60483006 60483011 +
tgctgataaatgctcaaaatct

SEQ ID NO: 198663 - DNA, 22 bp, Artificial Sequence
  Synthetic oligonucleotide; TTT chr2 60482990 60483011 60483007 60483012 +
gctgataaatgctcaaaatctg

SEQ ID NO: 198664 - DNA, 22 bp, Artificial Sequence
  Synthetic oligonucleotide; TTG chr2 60482991 60483012 60483008 60483013 +
ctgataaatgctcaaaatctga

SEQ ID NO: 198665 - DNA, 22 bp, Artificial Sequence
  Synthetic oligonucleotide; CTG chr2 60482994 60483015 60483011 60483016 +
ataaatgctcaaaatctgattt

SEQ ID NO: 198666 - DNA, 22 bp, Artificial Sequence
  Synthetic oligonucleotide; CTC chr2 60483004 60483025 60483021 60483026 +
aaaatctgatttactgataaag

SEQ ID NO: 198667 - DNA, 22 bp, Artificial Sequence
  Synthetic oligonucleotide; CTG chr2 60483012 60483033 60483029 60483034 +
atttactgataaaggcactgca

SEQ ID NO: 198668 - DNA, 22 bp, Artificial Sequence
  Synthetic oligonucleotide; TTT chr2 60483016 60483037 60483033 60483038 +
actgataaaggcactgcaagaa

SEQ ID NO: 198669 - DNA, 22 bp, Artificial Sequence
  Synthetic oligonucleotide; TTA chr2 60483017 60483038 60483034 60483039 +
ctgataaaggcactgcaagaaa

SEQ ID NO: 198670 - DNA, 22 bp, Artificial Sequence
  Synthetic oligonucleotide; CTG chr2 60483020 60483041 60483037 60483042 +
ataaaggcactgcaagaaaacc

SEQ ID NO: 198671 - DNA, 22 bp, Artificial Sequence
  Synthetic oligonucleotide; CTG chr2 60483032 60483053 60483049 60483054 +
caagaaaacctgcacttcagcc

SEQ ID NO: 198672 - DNA, 22 bp, Artificial Sequence
  Synthetic oligonucleotide; CTG chr2 60483044 60483065 60483061 60483066 +
cacttcagcccatgattacttt

SEQ ID NO: 198673 - DNA, 22 bp, Artificial Sequence
  Synthetic oligonucleotide; CTT chr2 60483049 60483070 60483066 60483071 +
cagcccatgattactttgcgag

SEQ ID NO: 198674 - DNA, 22 bp, Artificial Sequence
  Synthetic oligonucleotide; TTC chr2 60483050 60483071 60483067 60483072 +
agcccatgattactttgcgaga

SEQ ID NO: 198675 - DNA, 22 bp, Artificial Sequence
  Synthetic oligonucleotide; TTA chr2 60483062 60483083 60483079 60483084 +
ctttgcgagatgtttgagaaga

SEQ ID NO: 198676 - DNA, 22 bp, Artificial Sequence
  Synthetic oligonucleotide; CTT chr2 60483065 60483086 60483082 60483087 +
tgcgagatgtttgagaagaatc

SEQ ID NO: 198677 - DNA, 22 bp, Artificial Sequence
  Synthetic oligonucleotide; TTT chr2 60483066 60483087 60483083 60483088 +
gcgagatgtttgagaagaatca

SEQ ID NO: 198678 - DNA, 22 bp, Artificial Sequence
  Synthetic oligonucleotide; TTG chr2 60483067 60483088 60483084 60483089 +
cgagatgtttgagaagaatcag

SEQ ID NO: 198679 - DNA, 22 bp, Artificial Sequence
  Synthetic oligonucleotide; TTT chr2 60483077 60483098 60483094 60483099 +
gagaagaatcaggcagtgtgat

SEQ ID NO: 198680 - DNA, 22 bp, Artificial Sequence
  Synthetic oligonucleotide; TTG chr2 60483078 60483099 60483095 60483100 +
agaagaatcaggcagtgtgatt

SEQ ID NO: 198681 - DNA, 22 bp, Artificial Sequence
  Synthetic oligonucleotide; TTT chr2 60483101 60483122 60483118 60483123 +
atattatttcccatgaataact

SEQ ID NO: 198682 - DNA, 22 bp, Artificial Sequence
  Synthetic oligonucleotide; TTA chr2 60483102 60483123 60483119 60483124 +
tattatttcccatgaataactg

SEQ ID NO: 198683 - DNA, 22 bp, Artificial Sequence
  Synthetic oligonucleotide; TTA chr2 60483107 60483128 60483124 60483129 +
tttcccatgaataactgcaagg

SEQ ID NO: 198684 - DNA, 22 bp, Artificial Sequence
  Synthetic oligonucleotide; TTT chr2 60483110 60483131 60483127 60483132 +
cccatgaataactgcaaggata

SEQ ID NO: 198685 - DNA, 22 bp, Artificial Sequence
  Synthetic oligonucleotide; TTC chr2 60483111 60483132 60483128 60483133 +
ccatgaataactgcaaggatag

SEQ ID NO: 198686 - DNA, 22 bp, Artificial Sequence
  Synthetic oligonucleotide; CTG chr2 60483124 60483145 60483141 60483146 +
caaggatagtgtgggtagttgg

SEQ ID NO: 198687 - DNA, 22 bp, Artificial Sequence
  Synthetic oligonucleotide; TTG chr2 60483145 60483166 60483162 60483167 +
gaggagaatcaacacaggcgag

SEQ ID NO: 198688 - DNA, 22 bp, Artificial Sequence
  Synthetic oligonucleotide; TTG chr2 60483177 60483198 60483194 60483199 +
ctccttaatgctacacttcctg

SEQ ID NO: 198689 - DNA, 22 bp, Artificial Sequence
  Synthetic oligonucleotide; CTC chr2 60483180 60483201 60483197 60483202 +
cttaatgctacacttcctgaac

SEQ ID NO: 198690 - DNA, 22 bp, Artificial Sequence
  Synthetic oligonucleotide; CTT chr2 60483183 60483204 60483200 60483205 +
aatgctacacttcctgaacaat

SEQ ID NO: 198691 - DNA, 22 bp, Artificial Sequence
  Synthetic oligonucleotide; TTA chr2 60483184 60483205 60483201 60483206 +
atgctacacttcctgaacaatg

SEQ ID NO: 198692 - DNA, 22 bp, Artificial Sequence
  Synthetic oligonucleotide; CTA chr2 60483190 60483211 60483207 60483212 +
cacttcctgaacaatgctagcc

SEQ ID NO: 198693 - DNA, 22 bp, Artificial Sequence
  Synthetic oligonucleotide; CTT chr2 60483195 60483216 60483212 60483217 +
cctgaacaatgctagccaacaa

SEQ ID NO: 198694 - DNA, 22 bp, Artificial Sequence
  Synthetic oligonucleotide; TTC chr2 60483196 60483217 60483213 60483218 +
ctgaacaatgctagccaacaat

SEQ ID NO: 198695 - DNA, 22 bp, Artificial Sequence
  Synthetic oligonucleotide; CTG chr2 60483199 60483220 60483216 60483221 +
aacaatgctagccaacaatcag

SEQ ID NO: 198696 - DNA, 22 bp, Artificial Sequence
  Synthetic oligonucleotide; CTA chr2 60483209 60483230 60483226 60483231 +
gccaacaatcagggtttacagc

SEQ ID NO: 198697 - DNA, 22 bp, Artificial Sequence
  Synthetic oligonucleotide; TTT chr2 60483226 60483247 60483243 60483248 +
acagccgttttcccctctaata

SEQ ID NO: 198698 - DNA, 22 bp, Artificial Sequence
  Synthetic oligonucleotide; TTA chr2 60483227 60483248 60483244 60483249 +
cagccgttttcccctctaatat

SEQ ID NO: 198699 - DNA, 22 bp, Artificial Sequence
  Synthetic oligonucleotide; TTT chr2 60483236 60483257 60483253 60483258 +
tcccctctaatatatatcccgt

SEQ ID NO: 198700 - DNA, 22 bp, Artificial Sequence
  Synthetic oligonucleotide; TTT chr2 60483237 60483258 60483254 60483259 +
cccctctaatatatatcccgtg

SEQ ID NO: 198701 - DNA, 22 bp, Artificial Sequence
  Synthetic oligonucleotide; TTC chr2 60483238 60483259 60483255 60483260 +
ccctctaatatatatcccgtgg

SEQ ID NO: 198702 - DNA, 22 bp, Artificial Sequence
  Synthetic oligonucleotide; CTC chr2 60483243 60483264 60483260 60483265 +
taatatatatcccgtggtagag

SEQ ID NO: 198703 - DNA, 22 bp, Artificial Sequence
  Synthetic oligonucleotide; CTA chr2 60483245 60483266 60483262 60483267 +
atatatatcccgtggtagagaa

SEQ ID NO: 198704 - DNA, 22 bp, Artificial Sequence
  Synthetic oligonucleotide; CTT chr2 60483275 60483296 60483292 60483297 +
gacaaggggaagaccaggaaaa

SEQ ID NO: 198705 - DNA, 22 bp, Artificial Sequence
  Synthetic oligonucleotide; TTG chr2 60483276 60483297 60483293 60483298 +
acaaggggaagaccaggaaaag

SEQ ID NO: 198706 - DNA, 22 bp, Artificial Sequence
  Synthetic oligonucleotide; CTC chr2 60483320 60483341 60483337 60483342 +
cattcaggcctttgaaaagtgg

SEQ ID NO: 198707 - DNA, 22 bp, Artificial Sequence
  Synthetic oligonucleotide; TTC chr2 60483325 60483346 60483342 60483347 +
aggcctttgaaaagtggtttaa

SEQ ID NO: 198708 - DNA, 22 bp, Artificial Sequence
  Synthetic oligonucleotide; CTT chr2 60483332 60483353 60483349 60483354 +
tgaaaagtggtttaaatcgatg

SEQ ID NO: 198709 - DNA, 22 bp, Artificial Sequence
  Synthetic oligonucleotide; TTT chr2 60483333 60483354 60483350 60483355 +
gaaaagtggtttaaatcgatgc

SEQ ID NO: 198710 - DNA, 22 bp, Artificial Sequence
  Synthetic oligonucleotide; TTG chr2 60483334 60483355 60483351 60483356 +
aaaagtggtttaaatcgatgcc

SEQ ID NO: 198711 - DNA, 22 bp, Artificial Sequence
  Synthetic oligonucleotide; TTT chr2 60483345 60483366 60483362 60483367 +
aaatcgatgcctcaaattggga

SEQ ID NO: 198712 - DNA, 22 bp, Artificial Sequence
  Synthetic oligonucleotide; TTA chr2 60483346 60483367 60483363 60483368 +
aatcgatgcctcaaattgggac

SEQ ID NO: 198713 - DNA, 22 bp, Artificial Sequence
  Synthetic oligonucleotide; CTC chr2 60483358 60483379 60483375 60483380 +
aaattgggactcaaattcccct

SEQ ID NO: 198714 - DNA, 22 bp, Artificial Sequence
  Synthetic oligonucleotide; TTG chr2 60483364 60483385 60483381 60483386 +
ggactcaaattcccctgcccag

SEQ ID NO: 198715 - DNA, 22 bp, Artificial Sequence
  Synthetic oligonucleotide; CTC chr2 60483370 60483391 60483387 60483392 +
aaattcccctgcccagtgcaaa

SEQ ID NO: 198716 - DNA, 22 bp, Artificial Sequence
  Synthetic oligonucleotide; TTC chr2 60483376 60483397 60483393 60483398 +
ccctgcccagtgcaaagatccc

SEQ ID NO: 198717 - DNA, 22 bp, Artificial Sequence
  Synthetic oligonucleotide; CTG chr2 60483381 60483402 60483398 60483403 +
cccagtgcaaagatccctggcc

SEQ ID NO: 198718 - DNA, 22 bp, Artificial Sequence
  Synthetic oligonucleotide; CTG chr2 60483400 60483421 60483417 60483422 +
gccaaggtcagaagacttgaga

SEQ ID NO: 198719 - DNA, 22 bp, Artificial Sequence
  Synthetic oligonucleotide; CTT chr2 60483418 60483439 60483435 60483440 +
gagaccaggcaagtcccagatg

SEQ ID NO: 198720 - DNA, 22 bp, Artificial Sequence
  Synthetic oligonucleotide; TTG chr2 60483419 60483440 60483436 60483441 +
agaccaggcaagtcccagatga

SEQ ID NO: 198721 - DNA, 22 bp, Artificial Sequence
  Synthetic oligonucleotide; CTC chr2 60483445 60483466 60483462 60483467 +
aggcaagtccccaggtatagct

SEQ ID NO: 198722 - DNA, 22 bp, Artificial Sequence
  Synthetic oligonucleotide; CTG chr2 60483468 60483489 60483485 60483490 +
cagtccctttagccccagtctg

SEQ ID NO: 198723 - DNA, 22 bp, Artificial Sequence
  Synthetic oligonucleotide; CTT chr2 60483477 60483498 60483494 60483499 +
tagccccagtctgtttctctgt

SEQ ID NO: 198724 - DNA, 22 bp, Artificial Sequence
  Synthetic oligonucleotide; TTT chr2 60483478 60483499 60483495 60483500 +
agccccagtctgtttctctgtc

SEQ ID NO: 198725 - DNA, 22 bp, Artificial Sequence
  Synthetic oligonucleotide; TTA chr2 60483479 60483500 60483496 60483501 +
gccccagtctgtttctctgtcc

SEQ ID NO: 198726 - DNA, 22 bp, Artificial Sequence
  Synthetic oligonucleotide; CTG chr2 60483490 60483511 60483507 60483512 +
tttctctgtccaaggcagaacc

SEQ ID NO: 198727 - DNA, 22 bp, Artificial Sequence
  Synthetic oligonucleotide; TTT chr2 60483493 60483514 60483510 60483515 +
ctctgtccaaggcagaacccaa

SEQ ID NO: 198728 - DNA, 22 bp, Artificial Sequence
  Synthetic oligonucleotide; TTC chr2 60483494 60483515 60483511 60483516 +
tctgtccaaggcagaacccaaa

SEQ ID NO: 198729 - DNA, 22 bp, Artificial Sequence
  Synthetic oligonucleotide; CTC chr2 60483496 60483517 60483513 60483518 +
tgtccaaggcagaacccaaatc

SEQ ID NO: 198730 - DNA, 22 bp, Artificial Sequence
  Synthetic oligonucleotide; CTG chr2 60483498 60483519 60483515 60483520 +
tccaaggcagaacccaaatcaa

SEQ ID NO: 198731 - DNA, 22 bp, Artificial Sequence
  Synthetic oligonucleotide; CTG chr2 60483523 60483544 60483540 60483545 +
ctgtctatgtcatgtgttttga

SEQ ID NO: 198732 - DNA, 22 bp, Artificial Sequence
  Synthetic oligonucleotide; CTG chr2 60483526 60483547 60483543 60483548 +
tctatgtcatgtgttttgattg

SEQ ID NO: 198733 - DNA, 22 bp, Artificial Sequence
  Synthetic oligonucleotide; CTA chr2 60483530 60483551 60483547 60483552 +
tgtcatgtgttttgattgtaat

SEQ ID NO: 198734 - DNA, 22 bp, Artificial Sequence
  Synthetic oligonucleotide; TTT chr2 60483542 60483563 60483559 60483564 +
tgattgtaatatttaagttagg

SEQ ID NO: 198735 - DNA, 22 bp, Artificial Sequence
  Synthetic oligonucleotide; TTT chr2 60483543 60483564 60483560 60483565 +
gattgtaatatttaagttaggg

SEQ ID NO: 198736 - DNA, 22 bp, Artificial Sequence
  Synthetic oligonucleotide; TTG chr2 60483544 60483565 60483561 60483566 +
attgtaatatttaagttagggc

SEQ ID NO: 198737 - DNA, 22 bp, Artificial Sequence
  Synthetic oligonucleotide; TTG chr2 60483548 60483569 60483565 60483570 +
taatatttaagttagggcactg

SEQ ID NO: 198738 - DNA, 22 bp, Artificial Sequence
  Synthetic oligonucleotide; TTT chr2 60483556 60483577 60483573 60483578 +
aagttagggcactgtgttcaac

SEQ ID NO: 198739 - DNA, 22 bp, Artificial Sequence
  Synthetic oligonucleotide; TTA chr2 60483557 60483578 60483574 60483579 +
agttagggcactgtgttcaaca

SEQ ID NO: 198740 - DNA, 22 bp, Artificial Sequence
  Synthetic oligonucleotide; TTA chr2 60483562 60483583 60483579 60483584 +
gggcactgtgttcaacaactca

SEQ ID NO: 198741 - DNA, 22 bp, Artificial Sequence
  Synthetic oligonucleotide; CTG chr2 60483570 60483591 60483587 60483592 +
tgttcaacaactcagaccctgt

SEQ ID NO: 198742 - DNA, 22 bp, Artificial Sequence
  Synthetic oligonucleotide; TTC chr2 60483575 60483596 60483592 60483597 +
aacaactcagaccctgtggaat

SEQ ID NO: 198743 - DNA, 22 bp, Artificial Sequence
  Synthetic oligonucleotide; CTC chr2 60483583 60483604 60483600 60483605 +
agaccctgtggaatgctgcagt

SEQ ID NO: 198744 - DNA, 22 bp, Artificial Sequence
  Synthetic oligonucleotide; CTG chr2 60483591 60483612 60483608 60483613 +
tggaatgctgcagttgtcagaa

SEQ ID NO: 198745 - DNA, 22 bp, Artificial Sequence
  Synthetic oligonucleotide; CTG chr2 60483601 60483622 60483618 60483623 +
cagttgtcagaaataactcaag

SEQ ID NO: 198746 - DNA, 22 bp, Artificial Sequence
  Synthetic oligonucleotide; TTG chr2 60483607 60483628 60483624 60483629 +
tcagaaataactcaagagagga

SEQ ID NO: 198747 - DNA, 22 bp, Artificial Sequence
  Synthetic oligonucleotide; CTC chr2 60483620 60483641 60483637 60483642 +
aagagaggatgctcgtccccag

SEQ ID NO: 198748 - DNA, 22 bp, Artificial Sequence
  Synthetic oligonucleotide; CTC chr2 60483634 60483655 60483651 60483656 +
gtccccaggaaacatcaaatga

SEQ ID NO: 198749 - DNA, 22 bp, Artificial Sequence
  Synthetic oligonucleotide; CTG chr2 60483664 60483685 60483681 60483686 +
gcatattagcagacgtggatta

SEQ ID NO: 198750 - DNA, 22 bp, Artificial Sequence
  Synthetic oligonucleotide; TTA chr2 60483672 60483693 60483689 60483694 +
gcagacgtggattacagtaagg

SEQ ID NO: 198751 - DNA, 22 bp, Artificial Sequence
  Synthetic oligonucleotide; TTA chr2 60483686 60483707 60483703 60483708 +
cagtaaggaaaatctaaaacag

SEQ ID NO: 198752 - DNA, 22 bp, Artificial Sequence
  Synthetic oligonucleotide; CTA chr2 60483702 60483723 60483719 60483724 +
aaacagaagatgtatctggatg

SEQ ID NO: 198753 - DNA, 22 bp, Artificial Sequence
  Synthetic oligonucleotide; CTG chr2 60483720 60483741 60483737 60483742 +
gatgcttcagcagacaacaaag

SEQ ID NO: 198754 - DNA, 22 bp, Artificial Sequence
  Synthetic oligonucleotide; CTT chr2 60483727 60483748 60483744 60483749 +
cagcagacaacaaaggaagaat

SEQ ID NO: 198755 - DNA, 22 bp, Artificial Sequence
  Synthetic oligonucleotide; TTC chr2 60483728 60483749 60483745 60483750 +
agcagacaacaaaggaagaatt

SEQ ID NO: 198756 - DNA, 22 bp, Artificial Sequence
  Synthetic oligonucleotide; TTT chr2 60483751 60483772 60483768 60483773 +
ggggactgggtctaagcactcg

SEQ ID NO: 198757 - DNA, 22 bp, Artificial Sequence
  Synthetic oligonucleotide; TTG chr2 60483752 60483773 60483769 60483774 +
gggactgggtctaagcactcgc

SEQ ID NO: 198758 - DNA, 22 bp, Artificial Sequence
  Synthetic oligonucleotide; CTG chr2 60483759 60483780 60483776 60483781 +
ggtctaagcactcgcccaaagc

SEQ ID NO: 198759 - DNA, 22 bp, Artificial Sequence
  Synthetic oligonucleotide; CTA chr2 60483765 60483786 60483782 60483787 +
agcactcgcccaaagcactaga

SEQ ID NO: 198760 - DNA, 22 bp, Artificial Sequence
  Synthetic oligonucleotide; CTC chr2 60483772 60483793 60483789 60483794 +
gcccaaagcactagaaggagga

SEQ ID NO: 198761 - DNA, 22 bp, Artificial Sequence
  Synthetic oligonucleotide; CTA chr2 60483785 60483806 60483802 60483807 +
gaaggaggatttctttttattt

SEQ ID NO: 198762 - DNA, 22 bp, Artificial Sequence
  Synthetic oligonucleotide; TTT chr2 60483797 60483818 60483814 60483819 +
ctttttatttttctttcctatt

SEQ ID NO: 198763 - DNA, 22 bp, Artificial Sequence
  Synthetic oligonucleotide; TTC chr2 60483798 60483819 60483815 60483820 +
tttttatttttctttcctattt

SEQ ID NO: 198764 - DNA, 22 bp, Artificial Sequence
  Synthetic oligonucleotide; CTT chr2 60483800 60483821 60483817 60483822 +
tttatttttctttcctattttt

SEQ ID NO: 198765 - DNA, 22 bp, Artificial Sequence
  Synthetic oligonucleotide; TTT chr2 60483801 60483822 60483818 60483823 +
ttatttttctttcctatttttg

SEQ ID NO: 198766 - DNA, 22 bp, Artificial Sequence
  Synthetic oligonucleotide; TTT chr2 60483802 60483823 60483819 60483824 +
tatttttctttcctatttttgt

SEQ ID NO: 198767 - DNA, 22 bp, Artificial Sequence
  Synthetic oligonucleotide; TTT chr2 60483803 60483824 60483820 60483825 +
atttttctttcctatttttgtt

SEQ ID NO: 198768 - DNA, 22 bp, Artificial Sequence
  Synthetic oligonucleotide; TTA chr2 60483804 60483825 60483821 60483826 +
tttttctttcctatttttgttc

SEQ ID NO: 198769 - DNA, 22 bp, Artificial Sequence
  Synthetic oligonucleotide; TTT chr2 60483807 60483828 60483824 60483829 +
ttctttcctatttttgttcttc

SEQ ID NO: 198770 - DNA, 22 bp, Artificial Sequence
  Synthetic oligonucleotide; TTT chr2 60483808 60483829 60483825 60483830 +
tctttcctatttttgttcttct

SEQ ID NO: 198771 - DNA, 22 bp, Artificial Sequence
  Synthetic oligonucleotide; TTT chr2 60483809 60483830 60483826 60483831 +
ctttcctatttttgttcttctg

SEQ ID NO: 198772 - DNA, 22 bp, Artificial Sequence
  Synthetic oligonucleotide; TTC chr2 60483810 60483831 60483827 60483832 +
tttcctatttttgttcttctgg

SEQ ID NO: 198773 - DNA, 22 bp, Artificial Sequence
  Synthetic oligonucleotide; CTT chr2 60483812 60483833 60483829 60483834 +
tcctatttttgttcttctggtt

SEQ ID NO: 198774 - DNA, 22 bp, Artificial Sequence
  Synthetic oligonucleotide; TTT chr2 60483813 60483834 60483830 60483835 +
cctatttttgttcttctggttg

SEQ ID NO: 198775 - DNA, 22 bp, Artificial Sequence
  Synthetic oligonucleotide; TTC chr2 60483814 60483835 60483831 60483836 +
ctatttttgttcttctggttgt

SEQ ID NO: 198776 - DNA, 22 bp, Artificial Sequence
  Synthetic oligonucleotide; CTA chr2 60483817 60483838 60483834 60483839 +
tttttgttcttctggttgttct

SEQ ID NO: 198777 - DNA, 22 bp, Artificial Sequence
  Synthetic oligonucleotide; TTT chr2 60483820 60483841 60483837 60483842 +
ttgttcttctggttgttctttc

SEQ ID NO: 198778 - DNA, 22 bp, Artificial Sequence
  Synthetic oligonucleotide; TTT chr2 60483821 60483842 60483838 60483843 +
tgttcttctggttgttctttct

SEQ ID NO: 198779 - DNA, 22 bp, Artificial Sequence
  Synthetic oligonucleotide; TTT chr2 60483822 60483843 60483839 60483844 +
gttcttctggttgttctttctt

SEQ ID NO: 198780 - DNA, 22 bp, Artificial Sequence
  Synthetic oligonucleotide; TTG chr2 60483823 60483844 60483840 60483845 +
ttcttctggttgttctttcttt

SEQ ID NO: 198781 - DNA, 22 bp, Artificial Sequence
  Synthetic oligonucleotide; TTC chr2 60483826 60483847 60483843 60483848 +
ttctggttgttctttctttctt

SEQ ID NO: 198782 - DNA, 22 bp, Artificial Sequence
  Synthetic oligonucleotide; CTT chr2 60483828 60483849 60483845 60483850 +
ctggttgttctttctttcttcc

SEQ ID NO: 198783 - DNA, 22 bp, Artificial Sequence
  Synthetic oligonucleotide; TTC chr2 60483829 60483850 60483846 60483851 +
tggttgttctttctttcttcct

SEQ ID NO: 198784 - DNA, 22 bp, Artificial Sequence
  Synthetic oligonucleotide; CTG chr2 60483831 60483852 60483848 60483853 +
gttgttctttctttcttccttt

SEQ ID NO: 198785 - DNA, 22 bp, Artificial Sequence
  Synthetic oligonucleotide; TTG chr2 60483835 60483856 60483852 60483857 +
ttctttctttcttccttttctc

SEQ ID NO: 198786 - DNA, 22 bp, Artificial Sequence
  Synthetic oligonucleotide; TTC chr2 60483838 60483859 60483855 60483860 +
tttctttcttccttttctccct

SEQ ID NO: 198787 - DNA, 22 bp, Artificial Sequence
  Synthetic oligonucleotide; CTT chr2 60483840 60483861 60483857 60483862 +
tctttcttccttttctcccttt

SEQ ID NO: 198788 - DNA, 22 bp, Artificial Sequence
  Synthetic oligonucleotide; TTT chr2 60483841 60483862 60483858 60483863 +
ctttcttccttttctccctttt

SEQ ID NO: 198789 - DNA, 22 bp, Artificial Sequence
  Synthetic oligonucleotide; TTC chr2 60483842 60483863 60483859 60483864 +
tttcttccttttctcccttttt

SEQ ID NO: 198790 - DNA, 22 bp, Artificial Sequence
  Synthetic oligonucleotide; CTT chr2 60483844 60483865 60483861 60483866 +
tcttccttttctcccttttttt

SEQ ID NO: 198791 - DNA, 22 bp, Artificial Sequence
  Synthetic oligonucleotide; TTT chr2 60483845 60483866 60483862 60483867 +
cttccttttctccctttttttc

SEQ ID NO: 198792 - DNA, 22 bp, Artificial Sequence
  Synthetic oligonucleotide; TTC chr2 60483846 60483867 60483863 60483868 +
ttccttttctccctttttttct

SEQ ID NO: 198793 - DNA, 22 bp, Artificial Sequence
  Synthetic oligonucleotide; CTT chr2 60483848 60483869 60483865 60483870 +
ccttttctccctttttttcttt

SEQ ID NO: 198794 - DNA, 22 bp, Artificial Sequence
  Synthetic oligonucleotide; TTC chr2 60483849 60483870 60483866 60483871 +
cttttctccctttttttctttc

SEQ ID NO: 198795 - DNA, 22 bp, Artificial Sequence
  Synthetic oligonucleotide; CTT chr2 60483852 60483873 60483869 60483874 +
ttctccctttttttctttcctt

SEQ ID NO: 198796 - DNA, 22 bp, Artificial Sequence
  Synthetic oligonucleotide; TTT chr2 60483853 60483874 60483870 60483875 +
tctccctttttttctttccttc

SEQ ID NO: 198797 - DNA, 22 bp, Artificial Sequence
  Synthetic oligonucleotide; TTT chr2 60483854 60483875 60483871 60483876 +
ctccctttttttctttccttct

SEQ ID NO: 198798 - DNA, 22 bp, Artificial Sequence
  Synthetic oligonucleotide; TTC chr2 60483855 60483876 60483872 60483877 +
tccctttttttctttccttctt

SEQ ID NO: 198799 - DNA, 22 bp, Artificial Sequence
  Synthetic oligonucleotide; CTC chr2 60483857 60483878 60483874 60483879 +
cctttttttctttccttctttt

SEQ ID NO: 198800 - DNA, 22 bp, Artificial Sequence
  Synthetic oligonucleotide; CTT chr2 60483861 60483882 60483878 60483883 +
tttttctttccttctttttctt

SEQ ID NO: 198801 - DNA, 22 bp, Artificial Sequence
  Synthetic oligonucleotide; TTT chr2 60483862 60483883 60483879 60483884 +
ttttctttccttctttttcttt

SEQ ID NO: 198802 - DNA, 22 bp, Artificial Sequence
  Synthetic oligonucleotide; TTT chr2 60483863 60483884 60483880 60483885 +
tttctttccttctttttctttc

SEQ ID NO: 198803 - DNA, 22 bp, Artificial Sequence
  Synthetic oligonucleotide; TTT chr2 60483864 60483885 60483881 60483886 +
ttctttccttctttttctttct

SEQ ID NO: 198804 - DNA, 22 bp, Artificial Sequence
  Synthetic oligonucleotide; TTT chr2 60483865 60483886 60483882 60483887 +
tctttccttctttttctttctt

SEQ ID NO: 198805 - DNA, 22 bp, Artificial Sequence
  Synthetic oligonucleotide; TTT chr2 60483866 60483887 60483883 60483888 +
ctttccttctttttctttcttg

SEQ ID NO: 198806 - DNA, 22 bp, Artificial Sequence
  Synthetic oligonucleotide; TTC chr2 60483867 60483888 60483884 60483889 +
tttccttctttttctttcttgg

SEQ ID NO: 198807 - DNA, 22 bp, Artificial Sequence
  Synthetic oligonucleotide; CTT chr2 60483869 60483890 60483886 60483891 +
tccttctttttctttcttggtt

SEQ ID NO: 198808 - DNA, 22 bp, Artificial Sequence
  Synthetic oligonucleotide; TTT chr2 60483870 60483891 60483887 60483892 +
ccttctttttctttcttggttg

SEQ ID NO: 198809 - DNA, 22 bp, Artificial Sequence
  Synthetic oligonucleotide; TTC chr2 60483871 60483892 60483888 60483893 +
cttctttttctttcttggttgc

SEQ ID NO: 198810 - DNA, 22 bp, Artificial Sequence
  Synthetic oligonucleotide; CTT chr2 60483874 60483895 60483891 60483896 +
ctttttctttcttggttgcttt

SEQ ID NO: 198811 - DNA, 22 bp, Artificial Sequence
  Synthetic oligonucleotide; TTC chr2 60483875 60483896 60483892 60483897 +
tttttctttcttggttgctttt

SEQ ID NO: 198812 - DNA, 22 bp, Artificial Sequence
  Synthetic oligonucleotide; CTT chr2 60483877 60483898 60483894 60483899 +
tttctttcttggttgctttttt

SEQ ID NO: 198813 - DNA, 22 bp, Artificial Sequence
  Synthetic oligonucleotide; TTT chr2 60483878 60483899 60483895 60483900 +
ttctttcttggttgcttttttt

SEQ ID NO: 198814 - DNA, 22 bp, Artificial Sequence
  Synthetic oligonucleotide; TTT chr2 60483879 60483900 60483896 60483901 +
tctttcttggttgctttttttt

SEQ ID NO: 198815 - DNA, 22 bp, Artificial Sequence
  Synthetic oligonucleotide; TTT chr2 60483880 60483901 60483897 60483902 +
ctttcttggttgcttttttttc

SEQ ID NO: 198816 - DNA, 22 bp, Artificial Sequence
  Synthetic oligonucleotide; TTC chr2 60483881 60483902 60483898 60483903 +
tttcttggttgcttttttttcc

SEQ ID NO: 198817 - DNA, 22 bp, Artificial Sequence
  Synthetic oligonucleotide; CTT chr2 60483883 60483904 60483900 60483905 +
tcttggttgcttttttttcccc

SEQ ID NO: 198818 - DNA, 22 bp, Artificial Sequence
  Synthetic oligonucleotide; TTT chr2 60483884 60483905 60483901 60483906 +
cttggttgcttttttttccccc

SEQ ID NO: 198819 - DNA, 22 bp, Artificial Sequence
  Synthetic oligonucleotide; TTC chr2 60483885 60483906 60483902 60483907 +
ttggttgcttttttttccccct

SEQ ID NO: 198820 - DNA, 22 bp, Artificial Sequence
  Synthetic oligonucleotide; CTT chr2 60483887 60483908 60483904 60483909 +
ggttgcttttttttcccccttt

SEQ ID NO: 198821 - DNA, 22 bp, Artificial Sequence
  Synthetic oligonucleotide; TTG chr2 60483888 60483909 60483905 60483910 +
gttgcttttttttccccctttg

SEQ ID NO: 198822 - DNA, 22 bp, Artificial Sequence
  Synthetic oligonucleotide; TTG chr2 60483892 60483913 60483909 60483914 +
cttttttttccccctttgaaac

SEQ ID NO: 198823 - DNA, 22 bp, Artificial Sequence
  Synthetic oligonucleotide; CTT chr2 60483895 60483916 60483912 60483917 +
ttttttccccctttgaaactga

SEQ ID NO: 198824 - DNA, 22 bp, Artificial Sequence
  Synthetic oligonucleotide; TTT chr2 60483896 60483917 60483913 60483918 +
tttttccccctttgaaactgaa

SEQ ID NO: 198825 - DNA, 22 bp, Artificial Sequence
  Synthetic oligonucleotide; TTT chr2 60483897 60483918 60483914 60483919 +
ttttccccctttgaaactgaac

SEQ ID NO: 198826 - DNA, 22 bp, Artificial Sequence
  Synthetic oligonucleotide; TTT chr2 60483898 60483919 60483915 60483920 +
tttccccctttgaaactgaacc

SEQ ID NO: 198827 - DNA, 22 bp, Artificial Sequence
  Synthetic oligonucleotide; TTT chr2 60483899 60483920 60483916 60483921 +
ttccccctttgaaactgaacca

SEQ ID NO: 198828 - DNA, 22 bp, Artificial Sequence
  Synthetic oligonucleotide; TTT chr2 60483900 60483921 60483917 60483922 +
tccccctttgaaactgaaccat

SEQ ID NO: 198829 - DNA, 22 bp, Artificial Sequence
  Synthetic oligonucleotide; TTT chr2 60483901 60483922 60483918 60483923 +
ccccctttgaaactgaaccatt

SEQ ID NO: 198830 - DNA, 22 bp, Artificial Sequence
  Synthetic oligonucleotide; TTC chr2 60483902 60483923 60483919 60483924 +
cccctttgaaactgaaccatta

SEQ ID NO: 198831 - DNA, 22 bp, Artificial Sequence
  Synthetic oligonucleotide; CTT chr2 60483908 60483929 60483925 60483930 +
tgaaactgaaccattataaatg

SEQ ID NO: 198832 - DNA, 22 bp, Artificial Sequence
  Synthetic oligonucleotide; TTT chr2 60483909 60483930 60483926 60483931 +
gaaactgaaccattataaatga

SEQ ID NO: 198833 - DNA, 22 bp, Artificial Sequence
  Synthetic oligonucleotide; TTG chr2 60483910 60483931 60483927 60483932 +
aaactgaaccattataaatgag

SEQ ID NO: 198834 - DNA, 22 bp, Artificial Sequence
  Synthetic oligonucleotide; CTG chr2 60483916 60483937 60483933 60483938 +
aaccattataaatgagttggtc

SEQ ID NO: 198835 - DNA, 22 bp, Artificial Sequence
  Synthetic oligonucleotide; TTA chr2 60483924 60483945 60483941 60483946 +
taaatgagttggtctcatagct

SEQ ID NO: 198836 - DNA, 22 bp, Artificial Sequence
  Synthetic oligonucleotide; TTG chr2 60483935 60483956 60483952 60483957 +
gtctcatagcttctgttaaaaa

SEQ ID NO: 198837 - DNA, 22 bp, Artificial Sequence
  Synthetic oligonucleotide; CTC chr2 60483940 60483961 60483957 60483962 +
atagcttctgttaaaaatcaga

SEQ ID NO: 198838 - DNA, 22 bp, Artificial Sequence
  Synthetic oligonucleotide; CTT chr2 60483947 60483968 60483964 60483969 +
ctgttaaaaatcagaagcttgt

SEQ ID NO: 198839 - DNA, 22 bp, Artificial Sequence
  Synthetic oligonucleotide; TTC chr2 60483948 60483969 60483965 60483970 +
tgttaaaaatcagaagcttgtt

SEQ ID NO: 198840 - DNA, 22 bp, Artificial Sequence
  Synthetic oligonucleotide; CTG chr2 60483950 60483971 60483967 60483972 +
ttaaaaatcagaagcttgttag

SEQ ID NO: 198841 - DNA, 22 bp, Artificial Sequence
  Synthetic oligonucleotide; TTA chr2 60483953 60483974 60483970 60483975 +
aaaatcagaagcttgttagatg

SEQ ID NO: 198842 - DNA, 22 bp, Artificial Sequence
  Synthetic oligonucleotide; CTT chr2 60483967 60483988 60483984 60483989 +
gttagatgtaatgattatctgc

SEQ ID NO: 198843 - DNA, 22 bp, Artificial Sequence
  Synthetic oligonucleotide; TTG chr2 60483968 60483989 60483985 60483990 +
ttagatgtaatgattatctgca

SEQ ID NO: 198844 - DNA, 22 bp, Artificial Sequence
  Synthetic oligonucleotide; TTA chr2 60483971 60483992 60483988 60483993 +
gatgtaatgattatctgcattg

SEQ ID NO: 198845 - DNA, 22 bp, Artificial Sequence
  Synthetic oligonucleotide; TTA chr2 60483984 60484005 60484001 60484006 +
tctgcattgtgacacttaccgc

SEQ ID NO: 198846 - DNA, 22 bp, Artificial Sequence
  Synthetic oligonucleotide; CTG chr2 60483988 60484009 60484005 60484010 +
cattgtgacacttaccgcgtat

SEQ ID NO: 198847 - DNA, 22 bp, Artificial Sequence
  Synthetic oligonucleotide; TTG chr2 60483993 60484014 60484010 60484015 +
tgacacttaccgcgtatgaggg

SEQ ID NO: 198848 - DNA, 22 bp, Artificial Sequence
  Synthetic oligonucleotide; CTT chr2 60484001 60484022 60484018 60484023 +
accgcgtatgaggggtcttgtc

SEQ ID NO: 198849 - DNA, 22 bp, Artificial Sequence
  Synthetic oligonucleotide; TTA chr2 60484002 60484023 60484019 60484024 +
ccgcgtatgaggggtcttgtcg

SEQ ID NO: 198850 - DNA, 22 bp, Artificial Sequence
  Synthetic oligonucleotide; CTT chr2 60484020 60484041 60484037 60484042 +
gtcgaacagctttactctaatt

SEQ ID NO: 198851 - DNA, 22 bp, Artificial Sequence
  Synthetic oligonucleotide; TTG chr2 60484021 60484042 60484038 60484043 +
tcgaacagctttactctaattt

SEQ ID NO: 198852 - DNA, 22 bp, Artificial Sequence
  Synthetic oligonucleotide; CTT chr2 60484032 60484053 60484049 60484054 +
tactctaatttagagctcctct

SEQ ID NO: 198853 - DNA, 22 bp, Artificial Sequence
  Synthetic oligonucleotide; TTT chr2 60484033 60484054 60484050 60484055 +
actctaatttagagctcctctg

SEQ ID NO: 198854 - DNA, 22 bp, Artificial Sequence
  Synthetic oligonucleotide; TTA chr2 60484034 60484055 60484051 60484056 +
ctctaatttagagctcctctgt

SEQ ID NO: 198855 - DNA, 22 bp, Artificial Sequence
  Synthetic oligonucleotide; CTC chr2 60484037 60484058 60484054 60484059 +
taatttagagctcctctgttaa

SEQ ID NO: 198856 - DNA, 22 bp, Artificial Sequence
  Synthetic oligonucleotide; CTA chr2 60484039 60484060 60484056 60484061 +
atttagagctcctctgttaatt

SEQ ID NO: 198857 - DNA, 22 bp, Artificial Sequence
  Synthetic oligonucleotide; TTT chr2 60484043 60484064 60484060 60484065 +
agagctcctctgttaattagaa

SEQ ID NO: 198858 - DNA, 22 bp, Artificial Sequence
  Synthetic oligonucleotide; TTA chr2 60484044 60484065 60484061 60484066 +
gagctcctctgttaattagaaa

SEQ ID NO: 198859 - DNA, 22 bp, Artificial Sequence
  Synthetic oligonucleotide; CTC chr2 60484050 60484071 60484067 60484072 +
ctctgttaattagaaagccctc

SEQ ID NO: 198860 - DNA, 22 bp, Artificial Sequence
  Synthetic oligonucleotide; CTC chr2 60484053 60484074 60484070 60484075 +
tgttaattagaaagccctcaga

SEQ ID NO: 198861 - DNA, 22 bp, Artificial Sequence
  Synthetic oligonucleotide; CTG chr2 60484055 60484076 60484072 60484077 +
ttaattagaaagccctcagatt

SEQ ID NO: 198862 - DNA, 22 bp, Artificial Sequence
  Synthetic oligonucleotide; TTA chr2 60484058 60484079 60484075 60484080 +
attagaaagccctcagattttc

SEQ ID NO: 198863 - DNA, 22 bp, Artificial Sequence
  Synthetic oligonucleotide; TTA chr2 60484062 60484083 60484079 60484084 +
gaaagccctcagattttctgca

SEQ ID NO: 198864 - DNA, 22 bp, Artificial Sequence
  Synthetic oligonucleotide; CTC chr2 60484072 60484093 60484089 60484094 +
agattttctgcaaatgcaggtc

SEQ ID NO: 198865 - DNA, 22 bp, Artificial Sequence
  Synthetic oligonucleotide; TTT chr2 60484078 60484099 60484095 60484100 +
tctgcaaatgcaggtcactatc

SEQ ID NO: 198866 - DNA, 22 bp, Artificial Sequence
  Synthetic oligonucleotide; TTT chr2 60484079 60484100 60484096 60484101 +
ctgcaaatgcaggtcactatcg

SEQ ID NO: 198867 - DNA, 22 bp, Artificial Sequence
  Synthetic oligonucleotide; TTC chr2 60484080 60484101 60484097 60484102 +
tgcaaatgcaggtcactatcga

SEQ ID NO: 198868 - DNA, 22 bp, Artificial Sequence
  Synthetic oligonucleotide; CTG chr2 60484082 60484103 60484099 60484104 +
caaatgcaggtcactatcgaca

SEQ ID NO: 198869 - DNA, 22 bp, Artificial Sequence
  Synthetic oligonucleotide; CTA chr2 60484098 60484119 60484115 60484120 +
tcgacagctcatgcttttgatg

SEQ ID NO: 198870 - DNA, 22 bp, Artificial Sequence
  Synthetic oligonucleotide; CTC chr2 60484108 60484129 60484125 60484130 +
atgcttttgatgcttcgtctgt

SEQ ID NO: 198871 - DNA, 22 bp, Artificial Sequence
  Synthetic oligonucleotide; CTT chr2 60484114 60484135 60484131 60484136 +
ttgatgcttcgtctgtgacagt

SEQ ID NO: 198872 - DNA, 22 bp, Artificial Sequence
  Synthetic oligonucleotide; TTT chr2 60484115 60484136 60484132 60484137 +
tgatgcttcgtctgtgacagtt

SEQ ID NO: 198873 - DNA, 22 bp, Artificial Sequence
  Synthetic oligonucleotide; TTT chr2 60484116 60484137 60484133 60484138 +
gatgcttcgtctgtgacagttg

SEQ ID NO: 198874 - DNA, 22 bp, Artificial Sequence
  Synthetic oligonucleotide; TTG chr2 60484117 60484138 60484134 60484139 +
atgcttcgtctgtgacagttgt

SEQ ID NO: 198875 - DNA, 22 bp, Artificial Sequence
  Synthetic oligonucleotide; CTT chr2 60484123 60484144 60484140 60484145 +
cgtctgtgacagttgttgggtt

SEQ ID NO: 198876 - DNA, 22 bp, Artificial Sequence
  Synthetic oligonucleotide; TTC chr2 60484124 60484145 60484141 60484146 +
gtctgtgacagttgttgggttg

SEQ ID NO: 198877 - DNA, 22 bp, Artificial Sequence
  Synthetic oligonucleotide; CTG chr2 60484129 60484150 60484146 60484151 +
tgacagttgttgggttgccctt

SEQ ID NO: 198878 - DNA, 22 bp, Artificial Sequence
  Synthetic oligonucleotide; TTG chr2 60484138 60484159 60484155 60484160 +
ttgggttgcccttctaggagct

SEQ ID NO: 198879 - DNA, 22 bp, Artificial Sequence
  Synthetic oligonucleotide; TTG chr2 60484141 60484162 60484158 60484163 +
ggttgcccttctaggagctggc

SEQ ID NO: 198880 - DNA, 22 bp, Artificial Sequence
  Synthetic oligonucleotide; TTG chr2 60484146 60484167 60484163 60484168 +
cccttctaggagctggcagggt

SEQ ID NO: 198881 - DNA, 22 bp, Artificial Sequence
  Synthetic oligonucleotide; CTT chr2 60484151 60484172 60484168 60484173 +
ctaggagctggcagggttgtcc

SEQ ID NO: 198882 - DNA, 22 bp, Artificial Sequence
  Synthetic oligonucleotide; TTC chr2 60484152 60484173 60484169 60484174 +
taggagctggcagggttgtcca

SEQ ID NO: 198883 - DNA, 22 bp, Artificial Sequence
  Synthetic oligonucleotide; CTA chr2 60484154 60484175 60484171 60484176 +
ggagctggcagggttgtccaga

SEQ ID NO: 198884 - DNA, 22 bp, Artificial Sequence
  Synthetic oligonucleotide; CTG chr2 60484161 60484182 60484178 60484183 +
gcagggttgtccagactctgac

SEQ ID NO: 198885 - DNA, 22 bp, Artificial Sequence
  Synthetic oligonucleotide; TTG chr2 60484170 60484191 60484187 60484192 +
tccagactctgacagtgtcaga

SEQ ID NO: 198886 - DNA, 22 bp, Artificial Sequence
  Synthetic oligonucleotide; CTC chr2 60484179 60484200 60484196 60484201 +
tgacagtgtcagaaaatgcagt

SEQ ID NO: 198887 - DNA, 22 bp, Artificial Sequence
  Synthetic oligonucleotide; CTG chr2 60484181 60484202 60484198 60484203 +
acagtgtcagaaaatgcagtca

SEQ ID NO: 198888 - DNA, 22 bp, Artificial Sequence
  Synthetic oligonucleotide; CTG chr2 60484212 60484233 60484229 60484234 +
cttcacaggaagttacacgcaa

SEQ ID NO: 198889 - DNA, 22 bp, Artificial Sequence
  Synthetic oligonucleotide; CTT chr2 60484215 60484236 60484232 60484237 +
cacaggaagttacacgcaaggt

SEQ ID NO: 198890 - DNA, 22 bp, Artificial Sequence
  Synthetic oligonucleotide; TTC chr2 60484216 60484237 60484233 60484238 +
acaggaagttacacgcaaggtc

SEQ ID NO: 198891 - DNA, 22 bp, Artificial Sequence
  Synthetic oligonucleotide; TTA chr2 60484227 60484248 60484244 60484249 +
cacgcaaggtccgcacacagtc

SEQ ID NO: 198892 - DNA, 22 bp, Artificial Sequence
  Synthetic oligonucleotide; TTT chr2 60484254 60484275 60484271 60484276 +
ccctgtagcccagaagcctgat

SEQ ID NO: 198893 - DNA, 22 bp, Artificial Sequence
  Synthetic oligonucleotide; TTC chr2 60484255 60484276 60484272 60484277 +
cctgtagcccagaagcctgatg

SEQ ID NO: 198894 - DNA, 22 bp, Artificial Sequence
  Synthetic oligonucleotide; CTG chr2 60484259 60484280 60484276 60484281 +
tagcccagaagcctgatgaaat

SEQ ID NO: 198895 - DNA, 22 bp, Artificial Sequence
  Synthetic oligonucleotide; CTG chr2 60484274 60484295 60484291 60484296 +
atgaaatctgcactcacattca

SEQ ID NO: 198896 - DNA, 22 bp, Artificial Sequence
  Synthetic oligonucleotide; CTG chr2 60484284 60484305 60484301 60484306 +
cactcacattcagctgaaaata

SEQ ID NO: 198897 - DNA, 22 bp, Artificial Sequence
  Synthetic oligonucleotide; CTC chr2 60484289 60484310 60484306 60484311 +
acattcagctgaaaatagctcg

SEQ ID NO: 198898 - DNA, 22 bp, Artificial Sequence
  Synthetic oligonucleotide; TTC chr2 60484295 60484316 60484312 60484317 +
agctgaaaatagctcgaattcc

SEQ ID NO: 198899 - DNA, 22 bp, Artificial Sequence
  Synthetic oligonucleotide; CTG chr2 60484300 60484321 60484317 60484322 +
aaaatagctcgaattccaaccc

SEQ ID NO: 198900 - DNA, 22 bp, Artificial Sequence
  Synthetic oligonucleotide; CTC chr2 60484310 60484331 60484327 60484332 +
gaattccaaccctctctccccc

SEQ ID NO: 198901 - DNA, 22 bp, Artificial Sequence
  Synthetic oligonucleotide; TTC chr2 60484316 60484337 60484333 60484338 +
caaccctctctccccctgcctc

SEQ ID NO: 198902 - DNA, 22 bp, Artificial Sequence
  Synthetic oligonucleotide; CTC chr2 60484324 60484345 60484341 60484346 +
tctccccctgcctcctctcttc

SEQ ID NO: 198903 - DNA, 22 bp, Artificial Sequence
  Synthetic oligonucleotide; CTC chr2 60484326 60484347 60484343 60484348 +
tccccctgcctcctctcttccc

SEQ ID NO: 198904 - DNA, 22 bp, Artificial Sequence
  Synthetic oligonucleotide; CTC chr2 60484328 60484349 60484345 60484350 +
cccctgcctcctctcttcccct

SEQ ID NO: 198905 - DNA, 22 bp, Artificial Sequence
  Synthetic oligonucleotide; CTG chr2 60484334 60484355 60484351 60484356 +
cctcctctcttccccttttcct

SEQ ID NO: 198906 - DNA, 22 bp, Artificial Sequence
  Synthetic oligonucleotide; CTC chr2 60484338 60484359 60484355 60484360 +
ctctcttccccttttcctcctt

SEQ ID NO: 198907 - DNA, 22 bp, Artificial Sequence
  Synthetic oligonucleotide; CTC chr2 60484341 60484362 60484358 60484363 +
tcttccccttttcctcctttct

SEQ ID NO: 198908 - DNA, 22 bp, Artificial Sequence
  Synthetic oligonucleotide; CTC chr2 60484343 60484364 60484360 60484365 +
ttccccttttcctcctttctac

SEQ ID NO: 198909 - DNA, 22 bp, Artificial Sequence
  Synthetic oligonucleotide; CTT chr2 60484345 60484366 60484362 60484367 +
ccccttttcctcctttctactt

SEQ ID NO: 198910 - DNA, 22 bp, Artificial Sequence
  Synthetic oligonucleotide; TTC chr2 60484346 60484367 60484363 60484368 +
cccttttcctcctttctacttc

SEQ ID NO: 198911 - DNA, 22 bp, Artificial Sequence
  Synthetic oligonucleotide; CTT chr2 60484351 60484372 60484368 60484373 +
ttcctcctttctacttccttgc

SEQ ID NO: 198912 - DNA, 22 bp, Artificial Sequence
  Synthetic oligonucleotide; TTT chr2 60484352 60484373 60484369 60484374 +
tcctcctttctacttccttgcc

SEQ ID NO: 198913 - DNA, 22 bp, Artificial Sequence
  Synthetic oligonucleotide; TTT chr2 60484353 60484374 60484370 60484375 +
cctcctttctacttccttgcct

SEQ ID NO: 198914 - DNA, 22 bp, Artificial Sequence
  Synthetic oligonucleotide; TTC chr2 60484354 60484375 60484371 60484376 +
ctcctttctacttccttgcctc

SEQ ID NO: 198915 - DNA, 22 bp, Artificial Sequence
  Synthetic oligonucleotide; CTC chr2 60484357 60484378 60484374 60484379 +
ctttctacttccttgcctctct

SEQ ID NO: 198916 - DNA, 22 bp, Artificial Sequence
  Synthetic oligonucleotide; CTT chr2 60484360 60484381 60484377 60484382 +
tctacttccttgcctctctttc

SEQ ID NO: 198917 - DNA, 22 bp, Artificial Sequence
  Synthetic oligonucleotide; TTT chr2 60484361 60484382 60484378 60484383 +
ctacttccttgcctctctttct

SEQ ID NO: 198918 - DNA, 22 bp, Artificial Sequence
  Synthetic oligonucleotide; TTC chr2 60484362 60484383 60484379 60484384 +
tacttccttgcctctctttctc

SEQ ID NO: 198919 - DNA, 22 bp, Artificial Sequence
  Synthetic oligonucleotide; CTA chr2 60484364 60484385 60484381 60484386 +
cttccttgcctctctttctcca

SEQ ID NO: 198920 - DNA, 22 bp, Artificial Sequence
  Synthetic oligonucleotide; CTT chr2 60484367 60484388 60484384 60484389 +
ccttgcctctctttctccaacc

SEQ ID NO: 198921 - DNA, 22 bp, Artificial Sequence
  Synthetic oligonucleotide; TTC chr2 60484368 60484389 60484385 60484390 +
cttgcctctctttctccaacct

SEQ ID NO: 198922 - DNA, 22 bp, Artificial Sequence
  Synthetic oligonucleotide; CTT chr2 60484371 60484392 60484388 60484393 +
gcctctctttctccaacctctg

SEQ ID NO: 198923 - DNA, 22 bp, Artificial Sequence
  Synthetic oligonucleotide; TTG chr2 60484372 60484393 60484389 60484394 +
cctctctttctccaacctctgt

SEQ ID NO: 198924 - DNA, 22 bp, Artificial Sequence
  Synthetic oligonucleotide; CTC chr2 60484376 60484397 60484393 60484398 +
tctttctccaacctctgtttcc

SEQ ID NO: 198925 - DNA, 22 bp, Artificial Sequence
  Synthetic oligonucleotide; CTC chr2 60484378 60484399 60484395 60484400 +
tttctccaacctctgtttccag

SEQ ID NO: 198926 - DNA, 22 bp, Artificial Sequence
  Synthetic oligonucleotide; CTT chr2 60484380 60484401 60484397 60484402 +
tctccaacctctgtttccagca

SEQ ID NO: 198927 - DNA, 22 bp, Artificial Sequence
  Synthetic oligonucleotide; TTT chr2 60484381 60484402 60484398 60484403 +
ctccaacctctgtttccagcat

SEQ ID NO: 198928 - DNA, 22 bp, Artificial Sequence
  Synthetic oligonucleotide; TTC chr2 60484382 60484403 60484399 60484404 +
tccaacctctgtttccagcatc

SEQ ID NO: 198929 - DNA, 22 bp, Artificial Sequence
  Synthetic oligonucleotide; CTC chr2 60484384 60484405 60484401 60484406 +
caacctctgtttccagcatctt

SEQ ID NO: 198930 - DNA, 22 bp, Artificial Sequence
  Synthetic oligonucleotide; CTC chr2 60484391 60484412 60484408 60484413 +
tgtttccagcatcttctttctc

SEQ ID NO: 198931 - DNA, 22 bp, Artificial Sequence
  Synthetic oligonucleotide; CTG chr2 60484393 60484414 60484410 60484415 +
tttccagcatcttctttctcat

SEQ ID NO: 198932 - DNA, 22 bp, Artificial Sequence
  Synthetic oligonucleotide; TTT chr2 60484396 60484417 60484413 60484418 +
ccagcatcttctttctcatctt

SEQ ID NO: 198933 - DNA, 22 bp, Artificial Sequence
  Synthetic oligonucleotide; TTC chr2 60484397 60484418 60484414 60484419 +
cagcatcttctttctcatcttc

SEQ ID NO: 198934 - DNA, 22 bp, Artificial Sequence
  Synthetic oligonucleotide; CTT chr2 60484406 60484427 60484423 60484428 +
ctttctcatcttctctctcttt

SEQ ID NO: 198935 - DNA, 22 bp, Artificial Sequence
  Synthetic oligonucleotide; TTC chr2 60484407 60484428 60484424 60484429 +
tttctcatcttctctctcttta

SEQ ID NO: 198936 - DNA, 22 bp, Artificial Sequence
  Synthetic oligonucleotide; CTT chr2 60484409 60484430 60484426 60484431 +
tctcatcttctctctctttagt

SEQ ID NO: 198937 - DNA, 22 bp, Artificial Sequence
  Synthetic oligonucleotide; TTT chr2 60484410 60484431 60484427 60484432 +
ctcatcttctctctctttagtc

SEQ ID NO: 198938 - DNA, 22 bp, Artificial Sequence
  Synthetic oligonucleotide; TTC chr2 60484411 60484432 60484428 60484433 +
tcatcttctctctctttagtcc

SEQ ID NO: 198939 - DNA, 22 bp, Artificial Sequence
  Synthetic oligonucleotide; CTC chr2 60484413 60484434 60484430 60484435 +
atcttctctctctttagtcctc

SEQ ID NO: 198940 - DNA, 22 bp, Artificial Sequence
  Synthetic oligonucleotide; CTT chr2 60484418 60484439 60484435 60484440 +
ctctctctttagtcctcaacaa

SEQ ID NO: 198941 - DNA, 22 bp, Artificial Sequence
  Synthetic oligonucleotide; TTC chr2 60484419 60484440 60484436 60484441 +
tctctctttagtcctcaacaac

SEQ ID NO: 198942 - DNA, 22 bp, Artificial Sequence
  Synthetic oligonucleotide; CTC chr2 60484421 60484442 60484438 60484443 +
tctctttagtcctcaacaactg

SEQ ID NO: 198943 - DNA, 22 bp, Artificial Sequence
  Synthetic oligonucleotide; CTC chr2 60484423 60484444 60484440 60484445 +
tctttagtcctcaacaactggg

SEQ ID NO: 198944 - DNA, 22 bp, Artificial Sequence
  Synthetic oligonucleotide; CTC chr2 60484425 60484446 60484442 60484447 +
tttagtcctcaacaactggggt

SEQ ID NO: 198945 - DNA, 22 bp, Artificial Sequence
  Synthetic oligonucleotide; CTT chr2 60484427 60484448 60484444 60484449 +
tagtcctcaacaactggggtcc

SEQ ID NO: 198946 - DNA, 22 bp, Artificial Sequence
  Synthetic oligonucleotide; TTT chr2 60484428 60484449 60484445 60484450 +
agtcctcaacaactggggtcct

SEQ ID NO: 198947 - DNA, 22 bp, Artificial Sequence
  Synthetic oligonucleotide; TTA chr2 60484429 60484450 60484446 60484451 +
gtcctcaacaactggggtcctc

SEQ ID NO: 198948 - DNA, 22 bp, Artificial Sequence
  Synthetic oligonucleotide; CTC chr2 60484435 60484456 60484452 60484457 +
aacaactggggtcctctgctgt

SEQ ID NO: 198949 - DNA, 22 bp, Artificial Sequence
  Synthetic oligonucleotide; CTG chr2 60484443 60484464 60484460 60484465 +
gggtcctctgctgtcaaaaaca

SEQ ID NO: 198950 - DNA, 22 bp, Artificial Sequence
  Synthetic oligonucleotide; CTC chr2 60484451 60484472 60484468 60484473 +
tgctgtcaaaaacagccacatt

SEQ ID NO: 198951 - DNA, 22 bp, Artificial Sequence
  Synthetic oligonucleotide; CTG chr2 60484453 60484474 60484470 60484475 +
ctgtcaaaaacagccacattca

SEQ ID NO: 198952 - DNA, 22 bp, Artificial Sequence
  Synthetic oligonucleotide; CTG chr2 60484456 60484477 60484473 60484478 +
tcaaaaacagccacattcacca

SEQ ID NO: 198953 - DNA, 22 bp, Artificial Sequence
  Synthetic oligonucleotide; TTC chr2 60484474 60484495 60484491 60484496 +
accagaaagggaagtaggtttt

SEQ ID NO: 198954 - DNA, 22 bp, Artificial Sequence
  Synthetic oligonucleotide; TTT chr2 60484495 60484516 60484512 60484517 +
tacagataaaccgggttgcttt

SEQ ID NO: 198955 - DNA, 22 bp, Artificial Sequence
  Synthetic oligonucleotide; TTT chr2 60484496 60484517 60484513 60484518 +
acagataaaccgggttgctttt

SEQ ID NO: 198956 - DNA, 22 bp, Artificial Sequence
  Synthetic oligonucleotide; TTA chr2 60484497 60484518 60484514 60484519 +
cagataaaccgggttgcttttc

SEQ ID NO: 198957 - DNA, 22 bp, Artificial Sequence
  Synthetic oligonucleotide; TTG chr2 60484513 60484534 60484530 60484535 +
cttttcactgaaacagcagtga

SEQ ID NO: 198958 - DNA, 22 bp, Artificial Sequence
  Synthetic oligonucleotide; CTT chr2 60484516 60484537 60484533 60484538 +
ttcactgaaacagcagtgattg

SEQ ID NO: 198959 - DNA, 22 bp, Artificial Sequence
  Synthetic oligonucleotide; TTT chr2 60484517 60484538 60484534 60484539 +
tcactgaaacagcagtgattgt

SEQ ID NO: 198960 - DNA, 22 bp, Artificial Sequence
  Synthetic oligonucleotide; TTT chr2 60484518 60484539 60484535 60484540 +
cactgaaacagcagtgattgtg

SEQ ID NO: 198961 - DNA, 22 bp, Artificial Sequence
  Synthetic oligonucleotide; TTC chr2 60484519 60484540 60484536 60484541 +
actgaaacagcagtgattgtgg

SEQ ID NO: 198962 - DNA, 22 bp, Artificial Sequence
  Synthetic oligonucleotide; CTG chr2 60484523 60484544 60484540 60484545 +
aaacagcagtgattgtggaaca

SEQ ID NO: 198963 - DNA, 22 bp, Artificial Sequence
  Synthetic oligonucleotide; TTG chr2 60484538 60484559 60484555 60484560 +
tggaacagaaactctcccctcc

SEQ ID NO: 198964 - DNA, 22 bp, Artificial Sequence
  Synthetic oligonucleotide; CTC chr2 60484552 60484573 60484569 60484574 +
tcccctccctgccttttaaata

SEQ ID NO: 198965 - DNA, 22 bp, Artificial Sequence
  Synthetic oligonucleotide; CTC chr2 60484554 60484575 60484571 60484576 +
ccctccctgccttttaaataat

SEQ ID NO: 198966 - DNA, 22 bp, Artificial Sequence
  Synthetic oligonucleotide; CTC chr2 60484559 60484580 60484576 60484581 +
cctgccttttaaataatatttc

SEQ ID NO: 198967 - DNA, 22 bp, Artificial Sequence
  Synthetic oligonucleotide; CTG chr2 60484563 60484584 60484580 60484585 +
ccttttaaataatatttcctat

SEQ ID NO: 198968 - DNA, 22 bp, Artificial Sequence
  Synthetic oligonucleotide; CTT chr2 60484567 60484588 60484584 60484589 +
ttaaataatatttcctattttt

SEQ ID NO: 198969 - DNA, 22 bp, Artificial Sequence
  Synthetic oligonucleotide; TTT chr2 60484568 60484589 60484585 60484590 +
taaataatatttcctatttttt

SEQ ID NO: 198970 - DNA, 22 bp, Artificial Sequence
  Synthetic oligonucleotide; TTT chr2 60484569 60484590 60484586 60484591 +
aaataatatttcctattttttt

SEQ ID NO: 198971 - DNA, 22 bp, Artificial Sequence
  Synthetic oligonucleotide; TTA chr2 60484570 60484591 60484587 60484592 +
aataatatttcctatttttttg

SEQ ID NO: 198972 - DNA, 22 bp, Artificial Sequence
  Synthetic oligonucleotide; TTT chr2 60484580 60484601 60484597 60484602 +
cctatttttttgcaccggtcag

SEQ ID NO: 198973 - DNA, 22 bp, Artificial Sequence
  Synthetic oligonucleotide; TTC chr2 60484581 60484602 60484598 60484603 +
ctatttttttgcaccggtcagc

SEQ ID NO: 198974 - DNA, 22 bp, Artificial Sequence
  Synthetic oligonucleotide; CTA chr2 60484584 60484605 60484601 60484606 +
tttttttgcaccggtcagcagc

SEQ ID NO: 198975 - DNA, 22 bp, Artificial Sequence
  Synthetic oligonucleotide; TTT chr2 60484587 60484608 60484604 60484609 +
ttttgcaccggtcagcagccgc

SEQ ID NO: 198976 - DNA, 22 bp, Artificial Sequence
  Synthetic oligonucleotide; TTT chr2 60484588 60484609 60484605 60484610 +
tttgcaccggtcagcagccgca

SEQ ID NO: 198977 - DNA, 22 bp, Artificial Sequence
  Synthetic oligonucleotide; TTT chr2 60484589 60484610 60484606 60484611 +
ttgcaccggtcagcagccgcac

SEQ ID NO: 198978 - DNA, 22 bp, Artificial Sequence
  Synthetic oligonucleotide; TTT chr2 60484590 60484611 60484607 60484612 +
tgcaccggtcagcagccgcacc

SEQ ID NO: 198979 - DNA, 22 bp, Artificial Sequence
  Synthetic oligonucleotide; TTT chr2 60484591 60484612 60484608 60484613 +
gcaccggtcagcagccgcacct

SEQ ID NO: 198980 - DNA, 22 bp, Artificial Sequence
  Synthetic oligonucleotide; TTG chr2 60484592 60484613 60484609 60484614 +
caccggtcagcagccgcacctg

SEQ ID NO: 198981 - DNA, 22 bp, Artificial Sequence
  Synthetic oligonucleotide; CTG chr2 60484614 60484635 60484631 60484636 +
gtgaggctgaggtcaaggctgt

SEQ ID NO: 198982 - DNA, 22 bp, Artificial Sequence
  Synthetic oligonucleotide; CTG chr2 60484623 60484644 60484640 60484645 +
aggtcaaggctgtacttccaac

SEQ ID NO: 198983 - DNA, 22 bp, Artificial Sequence
  Synthetic oligonucleotide; CTG chr2 60484635 60484656 60484652 60484657 +
tacttccaacatggctcacgtg

SEQ ID NO: 198984 - DNA, 22 bp, Artificial Sequence
  Synthetic oligonucleotide; CTT chr2 60484640 60484661 60484657 60484662 +
ccaacatggctcacgtgttttt

SEQ ID NO: 198985 - DNA, 22 bp, Artificial Sequence
  Synthetic oligonucleotide; TTC chr2 60484641 60484662 60484658 60484663 +
caacatggctcacgtgtttttt

SEQ ID NO: 198986 - DNA, 22 bp, Artificial Sequence
  Synthetic oligonucleotide; CTC chr2 60484652 60484673 60484669 60484674 +
acgtgttttttcttaagagaag

SEQ ID NO: 198987 - DNA, 22 bp, Artificial Sequence
  Synthetic oligonucleotide; TTT chr2 60484660 60484681 60484677 60484682 +
tttcttaagagaagggggaatt

SEQ ID NO: 198988 - DNA, 22 bp, Artificial Sequence
  Synthetic oligonucleotide; TTT chr2 60484661 60484682 60484678 60484683 +
ttcttaagagaagggggaattt

SEQ ID NO: 198989 - DNA, 22 bp, Artificial Sequence
  Synthetic oligonucleotide; TTT chr2 60484662 60484683 60484679 60484684 +
tcttaagagaagggggaatttg

SEQ ID NO: 198990 - DNA, 22 bp, Artificial Sequence
  Synthetic oligonucleotide; TTT chr2 60484663 60484684 60484680 60484685 +
cttaagagaagggggaatttgg

SEQ ID NO: 198991 - DNA, 22 bp, Artificial Sequence
  Synthetic oligonucleotide; TTC chr2 60484664 60484685 60484681 60484686 +
ttaagagaagggggaatttgga

SEQ ID NO: 198992 - DNA, 22 bp, Artificial Sequence
  Synthetic oligonucleotide; CTT chr2 60484666 60484687 60484683 60484688 +
aagagaagggggaatttggagg

SEQ ID NO: 198993 - DNA, 22 bp, Artificial Sequence
  Synthetic oligonucleotide; TTA chr2 60484667 60484688 60484684 60484689 +
agagaagggggaatttggaggg

SEQ ID NO: 198994 - DNA, 22 bp, Artificial Sequence
  Synthetic oligonucleotide; TTT chr2 60484683 60484704 60484700 60484705 +
ggaggggggcaaaaaaagaagg

SEQ ID NO: 198995 - DNA, 22 bp, Artificial Sequence
  Synthetic oligonucleotide; TTG chr2 60484684 60484705 60484701 60484706 +
gaggggggcaaaaaaagaagga

SEQ ID NO: 198996 - DNA, 22 bp, Artificial Sequence
  Synthetic oligonucleotide; TTA chr2 60484724 60484745 60484741 60484746 +
accactcgagaaaaaatgcaca

SEQ ID NO: 198997 - DNA, 22 bp, Artificial Sequence
  Synthetic oligonucleotide; CTC chr2 60484731 60484752 60484748 60484753 +
gagaaaaaatgcacatgggctg

SEQ ID NO: 198998 - DNA, 22 bp, Artificial Sequence
  Synthetic oligonucleotide; CTG chr2 60484753 60484774 60484770 60484775 +
aggtttcctgcccttatcacca

SEQ ID NO: 198999 - DNA, 22 bp, Artificial Sequence
  Synthetic oligonucleotide; TTT chr2 60484759 60484780 60484776 60484781 +
cctgcccttatcaccattccag

SEQ ID NO: 199000 - DNA, 22 bp, Artificial Sequence
  Synthetic oligonucleotide; TTC chr2 60484760 60484781 60484777 60484782 +
ctgcccttatcaccattccagt

SEQ ID NO: 199001 - DNA, 22 bp, Artificial Sequence
  Synthetic oligonucleotide; CTG chr2 60484763 60484784 60484780 60484785 +
cccttatcaccattccagtata

SEQ ID NO: 199002 - DNA, 22 bp, Artificial Sequence
  Synthetic oligonucleotide; CTT chr2 60484768 60484789 60484785 60484790 +
atcaccattccagtataaaacc

SEQ ID NO: 199003 - DNA, 22 bp, Artificial Sequence
  Synthetic oligonucleotide; TTA chr2 60484769 60484790 60484786 60484791 +
tcaccattccagtataaaacct

SEQ ID NO: 199004 - DNA, 22 bp, Artificial Sequence
  Synthetic oligonucleotide; TTC chr2 60484778 60484799 60484795 60484800 +
cagtataaaacctcaaattatg

SEQ ID NO: 199005 - DNA, 22 bp, Artificial Sequence
  Synthetic oligonucleotide; CTC chr2 60484792 60484813 60484809 60484814 +
aaattatgggaattctcactta

SEQ ID NO: 199006 - DNA, 22 bp, Artificial Sequence
  Synthetic oligonucleotide; TTA chr2 60484798 60484819 60484815 60484820 +
tgggaattctcacttaggaaca

SEQ ID NO: 199007 - DNA, 22 bp, Artificial Sequence
  Synthetic oligonucleotide; TTC chr2 60484807 60484828 60484824 60484829 +
tcacttaggaacacctcattat

SEQ ID NO: 199008 - DNA, 22 bp, Artificial Sequence
  Synthetic oligonucleotide; CTC chr2 60484809 60484830 60484826 60484831 +
acttaggaacacctcattatgg

SEQ ID NO: 199009 - DNA, 22 bp, Artificial Sequence
  Synthetic oligonucleotide; CTT chr2 60484813 60484834 60484830 60484835 +
aggaacacctcattatggaaca

SEQ ID NO: 199010 - DNA, 22 bp, Artificial Sequence
  Synthetic oligonucleotide; TTA chr2 60484814 60484835 60484831 60484836 +
ggaacacctcattatggaacat

SEQ ID NO: 199011 - DNA, 22 bp, Artificial Sequence
  Synthetic oligonucleotide; CTC chr2 60484824 60484845 60484841 60484846 +
attatggaacatatgtgctggg

SEQ ID NO: 199012 - DNA, 22 bp, Artificial Sequence
  Synthetic oligonucleotide; TTA chr2 60484828 60484849 60484845 60484850 +
tggaacatatgtgctgggggtc

SEQ ID NO: 199013 - DNA, 22 bp, Artificial Sequence
  Synthetic oligonucleotide; CTG chr2 60484844 60484865 60484861 60484866 +
ggggtctggggagatgggagaa

SEQ ID NO: 199014 - DNA, 22 bp, Artificial Sequence
  Synthetic oligonucleotide; CTG chr2 60484852 60484873 60484869 60484874 +
gggagatgggagaaggggtgtg

SEQ ID NO: 199015 - DNA, 22 bp, Artificial Sequence
  Synthetic oligonucleotide; TTC chr2 60484879 60484900 60484896 60484901 +
atgaccatgtgtgtaaacttgt

SEQ ID NO: 199016 - DNA, 22 bp, Artificial Sequence
  Synthetic oligonucleotide; CTT chr2 60484899 60484920 60484916 60484921 +
gtgtgctccaaattttatcaag

SEQ ID NO: 199017 - DNA, 22 bp, Artificial Sequence
  Synthetic oligonucleotide; TTG chr2 60484900 60484921 60484917 60484922 +
tgtgctccaaattttatcaagt

SEQ ID NO: 199018 - DNA, 22 bp, Artificial Sequence
  Synthetic oligonucleotide; CTC chr2 60484907 60484928 60484924 60484929 +
caaattttatcaagttcaagcc

SEQ ID NO: 199019 - DNA, 22 bp, Artificial Sequence
  Synthetic oligonucleotide; TTT chr2 60484914 60484935 60484931 60484936 +
tatcaagttcaagccaaaaaga

SEQ ID NO: 199020 - DNA, 22 bp, Artificial Sequence
  Synthetic oligonucleotide; TTT chr2 60484915 60484936 60484932 60484937 +
atcaagttcaagccaaaaagaa

SEQ ID NO: 199021 - DNA, 22 bp, Artificial Sequence
  Synthetic oligonucleotide; TTA chr2 60484916 60484937 60484933 60484938 +
tcaagttcaagccaaaaagaaa

SEQ ID NO: 199022 - DNA, 22 bp, Artificial Sequence
  Synthetic oligonucleotide; TTC chr2 60484924 60484945 60484941 60484946 +
aagccaaaaagaaatcctctgt

SEQ ID NO: 199023 - DNA, 22 bp, Artificial Sequence
  Synthetic oligonucleotide; CTC chr2 60484943 60484964 60484960 60484965 +
tgtggcacttgtttaggactta

SEQ ID NO: 199024 - DNA, 22 bp, Artificial Sequence
  Synthetic oligonucleotide; CTG chr2 60484945 60484966 60484962 60484967 +
tggcacttgtttaggacttaaa

SEQ ID NO: 199025 - DNA, 22 bp, Artificial Sequence
  Synthetic oligonucleotide; CTT chr2 60484953 60484974 60484970 60484975 +
gtttaggacttaaaaaaaaaaa

SEQ ID NO: 199026 - DNA, 22 bp, Artificial Sequence
  Synthetic oligonucleotide; TTG chr2 60484954 60484975 60484971 60484976 +
tttaggacttaaaaaaaaaaaa

SEQ ID NO: 199027 - DNA, 22 bp, Artificial Sequence
  Synthetic oligonucleotide; TTT chr2 60484957 60484978 60484974 60484979 +
aggacttaaaaaaaaaaaaaaa

SEQ ID NO: 199028 - DNA, 22 bp, Artificial Sequence
  Synthetic oligonucleotide; TTA chr2 60484958 60484979 60484975 60484980 +
ggacttaaaaaaaaaaaaaaaa

SEQ ID NO: 199029 - DNA, 22 bp, Artificial Sequence
  Synthetic oligonucleotide; CTT chr2 60484964 60484985 60484981 60484986 +
aaaaaaaaaaaaaaaaaaccaa

SEQ ID NO: 199030 - DNA, 22 bp, Artificial Sequence
  Synthetic oligonucleotide; TTA chr2 60484965 60484986 60484982 60484987 +
aaaaaaaaaaaaaaaaaccaac

SEQ ID NO: 199031 - DNA, 22 bp, Artificial Sequence
  Synthetic oligonucleotide; TTT chr2 60485010 60485031 60485027 60485032 +
aaatcaaaataggaaatacaaa

SEQ ID NO: 199032 - DNA, 22 bp, Artificial Sequence
  Synthetic oligonucleotide; TTA chr2 60485011 60485032 60485028 60485033 +
aatcaaaataggaaatacaaaa

SEQ ID NO: 199033 - DNA, 22 bp, Artificial Sequence
  Synthetic oligonucleotide; TTT chr2 60485041 60485062 60485058 60485063 +
gtacaccctcaccaccaccacc

SEQ ID NO: 199034 - DNA, 22 bp, Artificial Sequence
  Synthetic oligonucleotide; TTG chr2 60485042 60485063 60485059 60485064 +
tacaccctcaccaccaccacca

SEQ ID NO: 199035 - DNA, 22 bp, Artificial Sequence
  Synthetic oligonucleotide; CTC chr2 60485051 60485072 60485068 60485073 +
accaccaccaccaaggcatagc

SEQ ID NO: 199036 - DNA, 22 bp, Artificial Sequence
  Synthetic oligonucleotide; CTT chr2 60485076 60485097 60485093 60485098 +
ggaagaaaaaggcatcccttgc

SEQ ID NO: 199037 - DNA, 22 bp, Artificial Sequence
  Synthetic oligonucleotide; TTG chr2 60485077 60485098 60485094 60485099 +
gaagaaaaaggcatcccttgca

SEQ ID NO: 199038 - DNA, 22 bp, Artificial Sequence
  Synthetic oligonucleotide; CTT chr2 60485096 60485117 60485113 60485118 +
gcagccacaatttcgcaagttg

SEQ ID NO: 199039 - DNA, 22 bp, Artificial Sequence
  Synthetic oligonucleotide; TTG chr2 60485097 60485118 60485114 60485119 +
cagccacaatttcgcaagttga

SEQ ID NO: 199040 - DNA, 22 bp, Artificial Sequence
  Synthetic oligonucleotide; TTT chr2 60485109 60485130 60485126 60485131 +
cgcaagttgaccttttcaccag

SEQ ID NO: 199041 - DNA, 22 bp, Artificial Sequence
  Synthetic oligonucleotide; TTC chr2 60485110 60485131 60485127 60485132 +
gcaagttgaccttttcaccagg

SEQ ID NO: 199042 - DNA, 22 bp, Artificial Sequence
  Synthetic oligonucleotide; TTG chr2 60485118 60485139 60485135 60485140 +
accttttcaccaggccagtgcc

SEQ ID NO: 199043 - DNA, 22 bp, Artificial Sequence
  Synthetic oligonucleotide; CTT chr2 60485123 60485144 60485140 60485145 +
ttcaccaggccagtgcctaatt

SEQ ID NO: 199044 - DNA, 22 bp, Artificial Sequence
  Synthetic oligonucleotide; TTT chr2 60485124 60485145 60485141 60485146 +
tcaccaggccagtgcctaattt

SEQ ID NO: 199045 - DNA, 22 bp, Artificial Sequence
  Synthetic oligonucleotide; TTT chr2 60485125 60485146 60485142 60485147 +
caccaggccagtgcctaatttc

SEQ ID NO: 199046 - DNA, 22 bp, Artificial Sequence
  Synthetic oligonucleotide; TTC chr2 60485126 60485147 60485143 60485148 +
accaggccagtgcctaatttcc

SEQ ID NO: 199047 - DNA, 22 bp, Artificial Sequence
  Synthetic oligonucleotide; CTA chr2 60485142 60485163 60485159 60485164 +
atttcctaaacaggccccttct

SEQ ID NO: 199048 - DNA, 22 bp, Artificial Sequence
  Synthetic oligonucleotide; TTT chr2 60485146 60485167 60485163 60485168 +
cctaaacaggccccttcttcct

SEQ ID NO: 199049 - DNA, 22 bp, Artificial Sequence
  Synthetic oligonucleotide; TTC chr2 60485147 60485168 60485164 60485169 +
ctaaacaggccccttcttcctt

SEQ ID NO: 199050 - DNA, 22 bp, Artificial Sequence
  Synthetic oligonucleotide; CTA chr2 60485150 60485171 60485167 60485172 +
aacaggccccttcttccttgaa

SEQ ID NO: 199051 - DNA, 22 bp, Artificial Sequence
  Synthetic oligonucleotide; CTT chr2 60485162 60485183 60485179 60485184 +
cttccttgaagtcactgcaaat

SEQ ID NO: 199052 - DNA, 22 bp, Artificial Sequence
  Synthetic oligonucleotide; TTC chr2 60485163 60485184 60485180 60485185 +
ttccttgaagtcactgcaaata

SEQ ID NO: 199053 - DNA, 22 bp, Artificial Sequence
  Synthetic oligonucleotide; CTT chr2 60485165 60485186 60485182 60485187 +
ccttgaagtcactgcaaataaa

SEQ ID NO: 199054 - DNA, 22 bp, Artificial Sequence
  Synthetic oligonucleotide; TTC chr2 60485166 60485187 60485183 60485188 +
cttgaagtcactgcaaataaat

SEQ ID NO: 199055 - DNA, 22 bp, Artificial Sequence
  Synthetic oligonucleotide; CTT chr2 60485169 60485190 60485186 60485191 +
gaagtcactgcaaataaatgca

SEQ ID NO: 199056 - DNA, 22 bp, Artificial Sequence
  Synthetic oligonucleotide; TTG chr2 60485170 60485191 60485187 60485192 +
aagtcactgcaaataaatgcag

SEQ ID NO: 199057 - DNA, 22 bp, Artificial Sequence
  Synthetic oligonucleotide; CTG chr2 60485179 60485200 60485196 60485201 +
caaataaatgcagtcatccaga

SEQ ID NO: 199058 - DNA, 22 bp, Artificial Sequence
  Synthetic oligonucleotide; CTG chr2 60485217 60485238 60485234 60485239 +
gccttggagttactggcttatg

SEQ ID NO: 199059 - DNA, 22 bp, Artificial Sequence
  Synthetic oligonucleotide; CTT chr2 60485222 60485243 60485239 60485244 +
ggagttactggcttatgaaatg

SEQ ID NO: 199060 - DNA, 22 bp, Artificial Sequence
  Synthetic oligonucleotide; TTG chr2 60485223 60485244 60485240 60485245 +
gagttactggcttatgaaatgc

SEQ ID NO: 199061 - DNA, 22 bp, Artificial Sequence
  Synthetic oligonucleotide; TTA chr2 60485229 60485250 60485246 60485251 +
ctggcttatgaaatgcaatggg

SEQ ID NO: 199062 - DNA, 22 bp, Artificial Sequence
  Synthetic oligonucleotide; CTG chr2 60485232 60485253 60485249 60485254 +
gcttatgaaatgcaatgggatg

SEQ ID NO: 199063 - DNA, 22 bp, Artificial Sequence
  Synthetic oligonucleotide; CTT chr2 60485236 60485257 60485253 60485258 +
atgaaatgcaatgggatgaggt

SEQ ID NO: 199064 - DNA, 22 bp, Artificial Sequence
  Synthetic oligonucleotide; TTA chr2 60485237 60485258 60485254 60485259 +
tgaaatgcaatgggatgaggtg

SEQ ID NO: 199065 - DNA, 22 bp, Artificial Sequence
  Synthetic oligonucleotide; CTG chr2 60485284 60485305 60485301 60485306 +
aacggcacagtgaccaggtagg

SEQ ID NO: 199066 - DNA, 22 bp, Artificial Sequence
  Synthetic oligonucleotide; CTC chr2 60485323 60485344 60485340 60485345 +
cagcaagaatgccaaggatagc

SEQ ID NO: 199067 - DNA, 22 bp, Artificial Sequence
  Synthetic oligonucleotide; CTG chr2 60485348 60485369 60485365 60485370 +
cagtgggttattagccccagca

SEQ ID NO: 199068 - DNA, 22 bp, Artificial Sequence
  Synthetic oligonucleotide; TTA chr2 60485358 60485379 60485375 60485380 +
ttagccccagcagggcccatgc

SEQ ID NO: 199069 - DNA, 22 bp, Artificial Sequence
  Synthetic oligonucleotide; TTA chr2 60485361 60485382 60485378 60485383 +
gccccagcagggcccatgcctc

SEQ ID NO: 199070 - DNA, 22 bp, Artificial Sequence
  Synthetic oligonucleotide; CTC chr2 60485383 60485404 60485400 60485405 +
tacggccatgttgctgtcatct

SEQ ID NO: 199071 - DNA, 22 bp, Artificial Sequence
  Synthetic oligonucleotide; CTA chr2 60485385 60485406 60485402 60485407 +
cggccatgttgctgtcatcttc

SEQ ID NO: 199072 - DNA, 22 bp, Artificial Sequence
  Synthetic oligonucleotide; TTG chr2 60485396 60485417 60485413 60485418 +
ctgtcatcttcgttcttggcta

SEQ ID NO: 199073 - DNA, 22 bp, Artificial Sequence
  Synthetic oligonucleotide; CTG chr2 60485399 60485420 60485416 60485421 +
tcatcttcgttcttggctagca

SEQ ID NO: 199074 - DNA, 22 bp, Artificial Sequence
  Synthetic oligonucleotide; CTT chr2 60485406 60485427 60485423 60485428 +
cgttcttggctagcagatgcta

SEQ ID NO: 199075 - DNA, 22 bp, Artificial Sequence
  Synthetic oligonucleotide; TTC chr2 60485407 60485428 60485424 60485429 +
gttcttggctagcagatgctag

SEQ ID NO: 199076 - DNA, 22 bp, Artificial Sequence
  Synthetic oligonucleotide; TTC chr2 60485411 60485432 60485428 60485433 +
ttggctagcagatgctagtccc

SEQ ID NO: 199077 - DNA, 22 bp, Artificial Sequence
  Synthetic oligonucleotide; CTT chr2 60485413 60485434 60485430 60485435 +
ggctagcagatgctagtcccag

SEQ ID NO: 199078 - DNA, 22 bp, Artificial Sequence
  Synthetic oligonucleotide; TTG chr2 60485414 60485435 60485431 60485436 +
gctagcagatgctagtcccagg

SEQ ID NO: 199079 - DNA, 22 bp, Artificial Sequence
  Synthetic oligonucleotide; CTA chr2 60485418 60485439 60485435 60485440 +
gcagatgctagtcccaggaatg

SEQ ID NO: 199080 - DNA, 22 bp, Artificial Sequence
  Synthetic oligonucleotide; CTA chr2 60485428 60485449 60485445 60485450 +
gtcccaggaatgtcctccatgc

SEQ ID NO: 199081 - DNA, 22 bp, Artificial Sequence
  Synthetic oligonucleotide; CTC chr2 60485445 60485466 60485462 60485467 +
catgcctttaagctaactgcaa

SEQ ID NO: 199082 - DNA, 22 bp, Artificial Sequence
  Synthetic oligonucleotide; CTT chr2 60485453 60485474 60485470 60485475 +
taagctaactgcaaaaacagaa

SEQ ID NO: 199083 - DNA, 22 bp, Artificial Sequence
  Synthetic oligonucleotide; TTT chr2 60485454 60485475 60485471 60485476 +
aagctaactgcaaaaacagaac

SEQ ID NO: 199084 - DNA, 22 bp, Artificial Sequence
  Synthetic oligonucleotide; TTA chr2 60485455 60485476 60485472 60485477 +
agctaactgcaaaaacagaacg

SEQ ID NO: 199085 - DNA, 22 bp, Artificial Sequence
  Synthetic oligonucleotide; CTA chr2 60485460 60485481 60485477 60485482 +
actgcaaaaacagaacggtgtg

SEQ ID NO: 199086 - DNA, 22 bp, Artificial Sequence
  Synthetic oligonucleotide; CTG chr2 60485464 60485485 60485481 60485486 +
caaaaacagaacggtgtgagcc

SEQ ID NO: 199087 - DNA, 22 bp, Artificial Sequence
  Synthetic oligonucleotide; CTC chr2 60485504 60485525 60485521 60485526 +
ttttatattctacctataaggg

SEQ ID NO: 199088 - DNA, 22 bp, Artificial Sequence
  Synthetic oligonucleotide; CTT chr2 60485506 60485527 60485523 60485528 +
ttatattctacctataagggaa

SEQ ID NO: 199089 - DNA, 22 bp, Artificial Sequence
  Synthetic oligonucleotide; TTT chr2 60485507 60485528 60485524 60485529 +
tatattctacctataagggaaa

SEQ ID NO: 199090 - DNA, 22 bp, Artificial Sequence
  Synthetic oligonucleotide; TTT chr2 60485508 60485529 60485525 60485530 +
atattctacctataagggaaaa

SEQ ID NO: 199091 - DNA, 22 bp, Artificial Sequence
  Synthetic oligonucleotide; TTA chr2 60485509 60485530 60485526 60485531 +
tattctacctataagggaaaaa

SEQ ID NO: 199092 - DNA, 22 bp, Artificial Sequence
  Synthetic oligonucleotide; TTC chr2 60485514 60485535 60485531 60485536 +
tacctataagggaaaaataaac

SEQ ID NO: 199093 - DNA, 22 bp, Artificial Sequence
  Synthetic oligonucleotide; CTA chr2 60485516 60485537 60485533 60485538 +
cctataagggaaaaataaacct

SEQ ID NO: 199094 - DNA, 22 bp, Artificial Sequence
  Synthetic oligonucleotide; CTA chr2 60485520 60485541 60485537 60485542 +
taagggaaaaataaacctagac

SEQ ID NO: 199095 - DNA, 22 bp, Artificial Sequence
  Synthetic oligonucleotide; CTA chr2 60485539 60485560 60485556 60485561 +
gacctggaaaacaatgtgtaaa

SEQ ID NO: 199096 - DNA, 22 bp, Artificial Sequence
  Synthetic oligonucleotide; CTG chr2 60485545 60485566 60485562 60485567 +
gaaaacaatgtgtaaagtggca

SEQ ID NO: 199097 - DNA, 22 bp, Artificial Sequence
  Synthetic oligonucleotide; CTC chr2 60485582 60485603 60485599 60485604 +
atttaaaaagaaaaaccctcca

SEQ ID NO: 199098 - DNA, 22 bp, Artificial Sequence
  Synthetic oligonucleotide; TTT chr2 60485586 60485607 60485603 60485608 +
aaaaagaaaaaccctccatcca

SEQ ID NO: 199099 - DNA, 22 bp, Artificial Sequence
  Synthetic oligonucleotide; TTA chr2 60485587 60485608 60485604 60485609 +
aaaagaaaaaccctccatccaa

SEQ ID NO: 199100 - DNA, 22 bp, Artificial Sequence
  Synthetic oligonucleotide; CTC chr2 60485602 60485623 60485619 60485624 +
catccaacgtcacgaagctgct

SEQ ID NO: 199101 - DNA, 22 bp, Artificial Sequence
  Synthetic oligonucleotide; CTG chr2 60485622 60485643 60485639 60485644 +
ctgaatattaggttcctgggaa

SEQ ID NO: 199102 - DNA, 22 bp, Artificial Sequence
  Synthetic oligonucleotide; CTG chr2 60485625 60485646 60485642 60485647 +
aatattaggttcctgggaagct

SEQ ID NO: 199103 - DNA, 22 bp, Artificial Sequence
  Synthetic oligonucleotide; TTA chr2 60485632 60485653 60485649 60485654 +
ggttcctgggaagctgtcccag

SEQ ID NO: 199104 - DNA, 22 bp, Artificial Sequence
  Synthetic oligonucleotide; TTC chr2 60485637 60485658 60485654 60485659 +
ctgggaagctgtcccagcaacc

SEQ ID NO: 199105 - DNA, 22 bp, Artificial Sequence
  Synthetic oligonucleotide; CTG chr2 60485640 60485661 60485657 60485662 +
ggaagctgtcccagcaacctag

SEQ ID NO: 199106 - DNA, 22 bp, Artificial Sequence
  Synthetic oligonucleotide; CTG chr2 60485648 60485669 60485665 60485670 +
tcccagcaacctagatatgaga

SEQ ID NO: 199107 - DNA, 22 bp, Artificial Sequence
  Synthetic oligonucleotide; CTA chr2 60485661 60485682 60485678 60485683 +
gatatgagaaacaacgcttgct

SEQ ID NO: 199108 - DNA, 22 bp, Artificial Sequence
  Synthetic oligonucleotide; CTT chr2 60485680 60485701 60485697 60485702 +
gctattctggggtgagaagtga

SEQ ID NO: 199109 - DNA, 22 bp, Artificial Sequence
  Synthetic oligonucleotide; TTG chr2 60485681 60485702 60485698 60485703 +
ctattctggggtgagaagtgaa

SEQ ID NO: 199110 - DNA, 22 bp, Artificial Sequence
  Synthetic oligonucleotide; CTA chr2 60485684 60485705 60485701 60485706 +
ttctggggtgagaagtgaagtt

SEQ ID NO: 199111 - DNA, 22 bp, Artificial Sequence
  Synthetic oligonucleotide; TTC chr2 60485687 60485708 60485704 60485709 +
tggggtgagaagtgaagttgcc

SEQ ID NO: 199112 - DNA, 22 bp, Artificial Sequence
  Synthetic oligonucleotide; CTG chr2 60485689 60485710 60485706 60485711 +
gggtgagaagtgaagttgcctt

SEQ ID NO: 199113 - DNA, 22 bp, Artificial Sequence
  Synthetic oligonucleotide; TTG chr2 60485707 60485728 60485724 60485729 +
cctttcactcgggactgtcaaa

SEQ ID NO: 199114 - DNA, 22 bp, Artificial Sequence
  Synthetic oligonucleotide; CTT chr2 60485711 60485732 60485728 60485733 +
tcactcgggactgtcaaacaca

SEQ ID NO: 199115 - DNA, 22 bp, Artificial Sequence
  Synthetic oligonucleotide; TTT chr2 60485712 60485733 60485729 60485734 +
cactcgggactgtcaaacacag

SEQ ID NO: 199116 - DNA, 22 bp, Artificial Sequence
  Synthetic oligonucleotide; TTC chr2 60485713 60485734 60485730 60485735 +
actcgggactgtcaaacacagt

SEQ ID NO: 199117 - DNA, 22 bp, Artificial Sequence
  Synthetic oligonucleotide; CTC chr2 60485717 60485738 60485734 60485739 +
gggactgtcaaacacagtctat

SEQ ID NO: 199118 - DNA, 22 bp, Artificial Sequence
  Synthetic oligonucleotide; CTG chr2 60485724 60485745 60485741 60485746 +
tcaaacacagtctataaatacc

SEQ ID NO: 199119 - DNA, 22 bp, Artificial Sequence
  Synthetic oligonucleotide; CTA chr2 60485738 60485759 60485755 60485760 +
taaataccagcaatgccccttg

SEQ ID NO: 199120 - DNA, 22 bp, Artificial Sequence
  Synthetic oligonucleotide; CTT chr2 60485759 60485780 60485776 60485781 +
gtgaactacgggctgagctcaa

SEQ ID NO: 199121 - DNA, 22 bp, Artificial Sequence
  Synthetic oligonucleotide; TTG chr2 60485760 60485781 60485777 60485782 +
tgaactacgggctgagctcaac

SEQ ID NO: 199122 - DNA, 22 bp, Artificial Sequence
  Synthetic oligonucleotide; CTA chr2 60485767 60485788 60485784 60485789 +
cgggctgagctcaacccagaga

SEQ ID NO: 199123 - DNA, 22 bp, Artificial Sequence
  Synthetic oligonucleotide; CTG chr2 60485774 60485795 60485791 60485796 +
agctcaacccagagaaggcaag

SEQ ID NO: 199124 - DNA, 22 bp, Artificial Sequence
  Synthetic oligonucleotide; CTC chr2 60485779 60485800 60485796 60485801 +
aacccagagaaggcaagtgttt

SEQ ID NO: 199125 - DNA, 22 bp, Artificial Sequence
  Synthetic oligonucleotide; TTT chr2 60485801 60485822 60485818 60485823 +
cccaaaggtcacacagcaattc

SEQ ID NO: 199126 - DNA, 22 bp, Artificial Sequence
  Synthetic oligonucleotide; TTC chr2 60485802 60485823 60485819 60485824 +
ccaaaggtcacacagcaattcc

SEQ ID NO: 199127 - DNA, 22 bp, Artificial Sequence
  Synthetic oligonucleotide; TTC chr2 60485823 60485844 60485840 60485845 +
caggtcccccagaagtagccct

SEQ ID NO: 199128 - DNA, 22 bp, Artificial Sequence
  Synthetic oligonucleotide; CTT chr2 60485846 60485867 60485863 60485868 +
caccagatggatcccatcacca

SEQ ID NO: 199129 - DNA, 22 bp, Artificial Sequence
  Synthetic oligonucleotide; TTC chr2 60485847 60485868 60485864 60485869 +
accagatggatcccatcaccag

SEQ ID NO: 199130 - DNA, 22 bp, Artificial Sequence
  Synthetic oligonucleotide; CTC chr2 60485876 60485897 60485893 60485898 +
ttggaaataatacattgctgca

SEQ ID NO: 199131 - DNA, 22 bp, Artificial Sequence
  Synthetic oligonucleotide; CTT chr2 60485878 60485899 60485895 60485900 +
ggaaataatacattgctgcatc

SEQ ID NO: 199132 - DNA, 22 bp, Artificial Sequence
  Synthetic oligonucleotide; TTG chr2 60485879 60485900 60485896 60485901 +
gaaataatacattgctgcatct

SEQ ID NO: 199133 - DNA, 22 bp, Artificial Sequence
  Synthetic oligonucleotide; TTG chr2 60485893 60485914 60485910 60485915 +
ctgcatctgattctcattttca

SEQ ID NO: 199134 - DNA, 22 bp, Artificial Sequence
  Synthetic oligonucleotide; CTG chr2 60485896 60485917 60485913 60485918 +
catctgattctcattttcaaca

SEQ ID NO: 199135 - DNA, 22 bp, Artificial Sequence
  Synthetic oligonucleotide; CTG chr2 60485902 60485923 60485919 60485924 +
attctcattttcaacaagaagg

SEQ ID NO: 199136 - DNA, 22 bp, Artificial Sequence
  Synthetic oligonucleotide; TTC chr2 60485906 60485927 60485923 60485928 +
tcattttcaacaagaaggctga

SEQ ID NO: 199137 - DNA, 22 bp, Artificial Sequence
  Synthetic oligonucleotide; CTC chr2 60485908 60485929 60485925 60485930 +
attttcaacaagaaggctgagg

SEQ ID NO: 199138 - DNA, 22 bp, Artificial Sequence
  Synthetic oligonucleotide; TTT chr2 60485912 60485933 60485929 60485934 +
tcaacaagaaggctgaggaatg

SEQ ID NO: 199139 - DNA, 22 bp, Artificial Sequence
  Synthetic oligonucleotide; TTT chr2 60485913 60485934 60485930 60485935 +
caacaagaaggctgaggaatga

SEQ ID NO: 199140 - DNA, 22 bp, Artificial Sequence
  Synthetic oligonucleotide; TTC chr2 60485914 60485935 60485931 60485936 +
aacaagaaggctgaggaatgag

SEQ ID NO: 199141 - DNA, 22 bp, Artificial Sequence
  Synthetic oligonucleotide; CTG chr2 60485927 60485948 60485944 60485949 +
aggaatgagattgcacatttta

SEQ ID NO: 199142 - DNA, 22 bp, Artificial Sequence
  Synthetic oligonucleotide; TTG chr2 60485940 60485961 60485957 60485962 +
cacattttagtttccttcccca

SEQ ID NO: 199143 - DNA, 22 bp, Artificial Sequence
  Synthetic oligonucleotide; TTT chr2 60485947 60485968 60485964 60485969 +
tagtttccttccccaactttct

SEQ ID NO: 199144 - DNA, 22 bp, Artificial Sequence
  Synthetic oligonucleotide; TTT chr2 60485948 60485969 60485965 60485970 +
agtttccttccccaactttctt

SEQ ID NO: 199145 - DNA, 22 bp, Artificial Sequence
  Synthetic oligonucleotide; TTA chr2 60485949 60485970 60485966 60485971 +
gtttccttccccaactttcttt

SEQ ID NO: 199146 - DNA, 22 bp, Artificial Sequence
  Synthetic oligonucleotide; TTT chr2 60485953 60485974 60485970 60485975 +
ccttccccaactttctttctcc

SEQ ID NO: 199147 - DNA, 22 bp, Artificial Sequence
  Synthetic oligonucleotide; TTC chr2 60485954 60485975 60485971 60485976 +
cttccccaactttctttctcca

SEQ ID NO: 199148 - DNA, 22 bp, Artificial Sequence
  Synthetic oligonucleotide; CTT chr2 60485957 60485978 60485974 60485979 +
ccccaactttctttctccaacc

SEQ ID NO: 199149 - DNA, 22 bp, Artificial Sequence
  Synthetic oligonucleotide; TTC chr2 60485958 60485979 60485975 60485980 +
cccaactttctttctccaacct

SEQ ID NO: 199150 - DNA, 22 bp, Artificial Sequence
  Synthetic oligonucleotide; CTT chr2 60485966 60485987 60485983 60485988 +
tctttctccaaccttctgctct

SEQ ID NO: 199151 - DNA, 22 bp, Artificial Sequence
  Synthetic oligonucleotide; TTT chr2 60485967 60485988 60485984 60485989 +
ctttctccaaccttctgctctg

SEQ ID NO: 199152 - DNA, 22 bp, Artificial Sequence
  Synthetic oligonucleotide; TTC chr2 60485968 60485989 60485985 60485990 +
tttctccaaccttctgctctgg

SEQ ID NO: 199153 - DNA, 22 bp, Artificial Sequence
  Synthetic oligonucleotide; CTT chr2 60485970 60485991 60485987 60485992 +
tctccaaccttctgctctggtt

SEQ ID NO: 199154 - DNA, 22 bp, Artificial Sequence
  Synthetic oligonucleotide; TTT chr2 60485971 60485992 60485988 60485993 +
ctccaaccttctgctctggttc

SEQ ID NO: 199155 - DNA, 22 bp, Artificial Sequence
  Synthetic oligonucleotide; TTC chr2 60485972 60485993 60485989 60485994 +
tccaaccttctgctctggttct

SEQ ID NO: 199156 - DNA, 22 bp, Artificial Sequence
  Synthetic oligonucleotide; CTC chr2 60485974 60485995 60485991 60485996 +
caaccttctgctctggttctcc

SEQ ID NO: 199157 - DNA, 22 bp, Artificial Sequence
  Synthetic oligonucleotide; CTT chr2 60485981 60486002 60485998 60486003 +
ctgctctggttctcctctcccc

SEQ ID NO: 199158 - DNA, 22 bp, Artificial Sequence
  Synthetic oligonucleotide; TTC chr2 60485982 60486003 60485999 60486004 +
tgctctggttctcctctccccc

SEQ ID NO: 199159 - DNA, 22 bp, Artificial Sequence
  Synthetic oligonucleotide; CTG chr2 60485984 60486005 60486001 60486006 +
ctctggttctcctctcccccac

SEQ ID NO: 199160 - DNA, 22 bp, Artificial Sequence
  Synthetic oligonucleotide; CTC chr2 60485987 60486008 60486004 60486009 +
tggttctcctctcccccaccac

SEQ ID NO: 199161 - DNA, 22 bp, Artificial Sequence
  Synthetic oligonucleotide; CTG chr2 60485989 60486010 60486006 60486011 +
gttctcctctcccccaccacac

SEQ ID NO: 199162 - DNA, 22 bp, Artificial Sequence
  Synthetic oligonucleotide; TTC chr2 60485993 60486014 60486010 60486015 +
tcctctcccccaccacacgtac

SEQ ID NO: 199163 - DNA, 22 bp, Artificial Sequence
  Synthetic oligonucleotide; CTC chr2 60485995 60486016 60486012 60486017 +
ctctcccccaccacacgtacaa

SEQ ID NO: 199164 - DNA, 22 bp, Artificial Sequence
  Synthetic oligonucleotide; CTC chr2 60485998 60486019 60486015 60486020 +
tcccccaccacacgtacaaaaa

SEQ ID NO: 199165 - DNA, 22 bp, Artificial Sequence
  Synthetic oligonucleotide; CTC chr2 60486000 60486021 60486017 60486022 +
ccccaccacacgtacaaaaaaa

SEQ ID NO: 199166 - DNA, 22 bp, Artificial Sequence
  Synthetic oligonucleotide; CTT chr2 60486027 60486048 60486044 60486049 +
tttagtatgtttagggatctat

SEQ ID NO: 199167 - DNA, 22 bp, Artificial Sequence
  Synthetic oligonucleotide; TTT chr2 60486028 60486049 60486045 60486050 +
ttagtatgtttagggatctatt

SEQ ID NO: 199168 - DNA, 22 bp, Artificial Sequence
  Synthetic oligonucleotide; TTT chr2 60486029 60486050 60486046 60486051 +
tagtatgtttagggatctattt

SEQ ID NO: 199169 - DNA, 22 bp, Artificial Sequence
  Synthetic oligonucleotide; TTT chr2 60486030 60486051 60486047 60486052 +
agtatgtttagggatctatttc

SEQ ID NO: 199170 - DNA, 22 bp, Artificial Sequence
  Synthetic oligonucleotide; TTA chr2 60486031 60486052 60486048 60486053 +
gtatgtttagggatctatttcc

SEQ ID NO: 199171 - DNA, 22 bp, Artificial Sequence
  Synthetic oligonucleotide; TTT chr2 60486039 60486060 60486056 60486061 +
agggatctatttccatatctac

SEQ ID NO: 199172 - DNA, 22 bp, Artificial Sequence
  Synthetic oligonucleotide; TTA chr2 60486040 60486061 60486057 60486062 +
gggatctatttccatatctacc

SEQ ID NO: 199173 - DNA, 22 bp, Artificial Sequence
  Synthetic oligonucleotide; CTA chr2 60486048 60486069 60486065 60486070 +
tttccatatctacccaaaatct

SEQ ID NO: 199174 - DNA, 22 bp, Artificial Sequence
  Synthetic oligonucleotide; TTT chr2 60486051 60486072 60486068 60486073 +
ccatatctacccaaaatctcca

SEQ ID NO: 199175 - DNA, 22 bp, Artificial Sequence
  Synthetic oligonucleotide; TTC chr2 60486052 60486073 60486069 60486074 +
catatctacccaaaatctccaa

SEQ ID NO: 199176 - DNA, 22 bp, Artificial Sequence
  Synthetic oligonucleotide; CTA chr2 60486060 60486081 60486077 60486082 +
cccaaaatctccaagccccttg

SEQ ID NO: 199177 - DNA, 22 bp, Artificial Sequence
  Synthetic oligonucleotide; CTC chr2 60486071 60486092 60486088 60486093 +
caagccccttgttctatcagca

SEQ ID NO: 199178 - DNA, 22 bp, Artificial Sequence
  Synthetic oligonucleotide; CTT chr2 60486081 60486102 60486098 60486103 +
gttctatcagcaggtcaagagt

SEQ ID NO: 199179 - DNA, 22 bp, Artificial Sequence
  Synthetic oligonucleotide; TTG chr2 60486082 60486103 60486099 60486104 +
ttctatcagcaggtcaagagta

SEQ ID NO: 199180 - DNA, 22 bp, Artificial Sequence
  Synthetic oligonucleotide; TTC chr2 60486085 60486106 60486102 60486107 +
tatcagcaggtcaagagtagag

SEQ ID NO: 199181 - DNA, 22 bp, Artificial Sequence
  Synthetic oligonucleotide; CTA chr2 60486087 60486108 60486104 60486109 +
tcagcaggtcaagagtagagaa

SEQ ID NO: 199182 - DNA, 22 bp, Artificial Sequence
  Synthetic oligonucleotide; CTG chr2 60486112 60486133 60486129 60486134 +
tgacaagctgttctccattctg

SEQ ID NO: 199183 - DNA, 22 bp, Artificial Sequence
  Synthetic oligonucleotide; CTG chr2 60486122 60486143 60486139 60486144 +
ttctccattctgaaatggattt

SEQ ID NO: 199184 - DNA, 22 bp, Artificial Sequence
  Synthetic oligonucleotide; TTC chr2 60486125 60486146 60486142 60486147 +
tccattctgaaatggatttgac

SEQ ID NO: 199185 - DNA, 22 bp, Artificial Sequence
  Synthetic oligonucleotide; CTC chr2 60486127 60486148 60486144 60486149 +
cattctgaaatggatttgactg

SEQ ID NO: 199186 - DNA, 22 bp, Artificial Sequence
  Synthetic oligonucleotide; TTC chr2 60486132 60486153 60486149 60486154 +
tgaaatggatttgactgaacag

SEQ ID NO: 199187 - DNA, 22 bp, Artificial Sequence
  Synthetic oligonucleotide; CTG chr2 60486134 60486155 60486151 60486156 +
aaatggatttgactgaacagct

SEQ ID NO: 199188 - DNA, 22 bp, Artificial Sequence
  Synthetic oligonucleotide; TTT chr2 60486144 60486165 60486161 60486166 +
gactgaacagctgctgaaaggc

SEQ ID NO: 199189 - DNA, 22 bp, Artificial Sequence
  Synthetic oligonucleotide; TTG chr2 60486145 60486166 60486162 60486167 +
actgaacagctgctgaaaggca

SEQ ID NO: 199190 - DNA, 22 bp, Artificial Sequence
  Synthetic oligonucleotide; CTG chr2 60486149 60486170 60486166 60486171 +
aacagctgctgaaaggcaagac

SEQ ID NO: 199191 - DNA, 22 bp, Artificial Sequence
  Synthetic oligonucleotide; CTG chr2 60486157 60486178 60486174 60486179 +
ctgaaaggcaagacatcctagg

SEQ ID NO: 199192 - DNA, 22 bp, Artificial Sequence
  Synthetic oligonucleotide; CTG chr2 60486160 60486181 60486177 60486182 +
aaaggcaagacatcctagggag

SEQ ID NO: 199193 - DNA, 22 bp, Artificial Sequence
  Synthetic oligonucleotide; CTA chr2 60486177 60486198 60486194 60486199 +
gggagactggtactggggattt

SEQ ID NO: 199194 - DNA, 22 bp, Artificial Sequence
  Synthetic oligonucleotide; CTG chr2 60486186 60486207 60486203 60486208 +
gtactggggatttcagggtcct

SEQ ID NO: 199195 - DNA, 22 bp, Artificial Sequence
  Synthetic oligonucleotide; CTG chr2 60486192 60486213 60486209 60486214 +
gggatttcagggtccttgttct

SEQ ID NO: 199196 - DNA, 22 bp, Artificial Sequence
  Synthetic oligonucleotide; TTT chr2 60486199 60486220 60486216 60486221 +
cagggtccttgttctgtgggtg

SEQ ID NO: 199197 - DNA, 22 bp, Artificial Sequence
  Synthetic oligonucleotide; TTC chr2 60486200 60486221 60486217 60486222 +
agggtccttgttctgtgggtgg

SEQ ID NO: 199198 - DNA, 22 bp, Artificial Sequence
  Synthetic oligonucleotide; CTT chr2 60486209 60486230 60486226 60486231 +
gttctgtgggtggaccatggct

SEQ ID NO: 199199 - DNA, 22 bp, Artificial Sequence
  Synthetic oligonucleotide; TTG chr2 60486210 60486231 60486227 60486232 +
ttctgtgggtggaccatggctc

SEQ ID NO: 199200 - DNA, 22 bp, Artificial Sequence
  Synthetic oligonucleotide; TTC chr2 60486213 60486234 60486230 60486235 +
tgtgggtggaccatggctcctt

SEQ ID NO: 199201 - DNA, 22 bp, Artificial Sequence
  Synthetic oligonucleotide; CTG chr2 60486215 60486236 60486232 60486237 +
tgggtggaccatggctcctttc

SEQ ID NO: 199202 - DNA, 22 bp, Artificial Sequence
  Synthetic oligonucleotide; CTC chr2 60486232 60486253 60486249 60486254 +
ctttccagagaatgacttgtga

SEQ ID NO: 199203 - DNA, 22 bp, Artificial Sequence
  Synthetic oligonucleotide; CTT chr2 60486235 60486256 60486252 60486257 +
tccagagaatgacttgtgattt

SEQ ID NO: 199204 - DNA, 22 bp, Artificial Sequence
  Synthetic oligonucleotide; TTT chr2 60486236 60486257 60486253 60486258 +
ccagagaatgacttgtgatttg

SEQ ID NO: 199205 - DNA, 22 bp, Artificial Sequence
  Synthetic oligonucleotide; TTC chr2 60486237 60486258 60486254 60486259 +
cagagaatgacttgtgatttgt

SEQ ID NO: 199206 - DNA, 22 bp, Artificial Sequence
  Synthetic oligonucleotide; CTT chr2 60486250 60486271 60486267 60486272 +
gtgatttgttctctctcctaca

SEQ ID NO: 199207 - DNA, 22 bp, Artificial Sequence
  Synthetic oligonucleotide; TTG chr2 60486251 60486272 60486268 60486273 +
tgatttgttctctctcctacac

SEQ ID NO: 199208 - DNA, 22 bp, Artificial Sequence
  Synthetic oligonucleotide; TTT chr2 60486257 60486278 60486274 60486279 +
gttctctctcctacacatcaaa

SEQ ID NO: 199209 - DNA, 22 bp, Artificial Sequence
  Synthetic oligonucleotide; TTG chr2 60486258 60486279 60486275 60486280 +
ttctctctcctacacatcaaag

SEQ ID NO: 199210 - DNA, 22 bp, Artificial Sequence
  Synthetic oligonucleotide; TTC chr2 60486261 60486282 60486278 60486283 +
tctctcctacacatcaaagtga

SEQ ID NO: 199211 - DNA, 22 bp, Artificial Sequence
  Synthetic oligonucleotide; CTC chr2 60486263 60486284 60486280 60486285 +
tctcctacacatcaaagtgaga

SEQ ID NO: 199212 - DNA, 22 bp, Artificial Sequence
  Synthetic oligonucleotide; CTC chr2 60486265 60486286 60486282 60486287 +
tcctacacatcaaagtgagaca

SEQ ID NO: 199213 - DNA, 22 bp, Artificial Sequence
  Synthetic oligonucleotide; CTC chr2 60486267 60486288 60486284 60486289 +
ctacacatcaaagtgagacacc

SEQ ID NO: 199214 - DNA, 22 bp, Artificial Sequence
  Synthetic oligonucleotide; CTA chr2 60486270 60486291 60486287 60486292 +
cacatcaaagtgagacaccaat

SEQ ID NO: 199215 - DNA, 22 bp, Artificial Sequence
  Synthetic oligonucleotide; CTC chr2 60486300 60486321 60486317 60486322 +
tactggcccaccttgccccacc

SEQ ID NO: 199216 - DNA, 22 bp, Artificial Sequence
  Synthetic oligonucleotide; CTA chr2 60486302 60486323 60486319 60486324 +
ctggcccaccttgccccacctc

SEQ ID NO: 199217 - DNA, 22 bp, Artificial Sequence
  Synthetic oligonucleotide; CTG chr2 60486305 60486326 60486322 60486327 +
gcccaccttgccccacctccaa

SEQ ID NO: 199218 - DNA, 22 bp, Artificial Sequence
  Synthetic oligonucleotide; CTT chr2 60486314 60486335 60486331 60486336 +
gccccacctccaatttggcaac

SEQ ID NO: 199219 - DNA, 22 bp, Artificial Sequence
  Synthetic oligonucleotide; TTG chr2 60486315 60486336 60486332 60486337 +
ccccacctccaatttggcaact

SEQ ID NO: 199220 - DNA, 22 bp, Artificial Sequence
  Synthetic oligonucleotide; CTC chr2 60486324 60486345 60486341 60486346 +
caatttggcaactttgcctcct

SEQ ID NO: 199221 - DNA, 22 bp, Artificial Sequence
  Synthetic oligonucleotide; TTT chr2 60486330 60486351 60486347 60486352 +
ggcaactttgcctccttctcac

SEQ ID NO: 199222 - DNA, 22 bp, Artificial Sequence
  Synthetic oligonucleotide; TTG chr2 60486331 60486352 60486348 60486353 +
gcaactttgcctccttctcaca

SEQ ID NO: 199223 - DNA, 22 bp, Artificial Sequence
  Synthetic oligonucleotide; CTT chr2 60486338 60486359 60486355 60486360 +
tgcctccttctcacacaatgag

SEQ ID NO: 199224 - DNA, 22 bp, Artificial Sequence
  Synthetic oligonucleotide; TTT chr2 60486339 60486360 60486356 60486361 +
gcctccttctcacacaatgaga

SEQ ID NO: 199225 - DNA, 22 bp, Artificial Sequence
  Synthetic oligonucleotide; TTG chr2 60486340 60486361 60486357 60486362 +
cctccttctcacacaatgagaa

SEQ ID NO: 199226 - DNA, 22 bp, Artificial Sequence
  Synthetic oligonucleotide; CTC chr2 60486344 60486365 60486361 60486366 +
cttctcacacaatgagaaagaa

SEQ ID NO: 199227 - DNA, 22 bp, Artificial Sequence
  Synthetic oligonucleotide; CTT chr2 60486347 60486368 60486364 60486369 +
ctcacacaatgagaaagaacgg

SEQ ID NO: 199228 - DNA, 22 bp, Artificial Sequence
  Synthetic oligonucleotide; TTC chr2 60486348 60486369 60486365 60486370 +
tcacacaatgagaaagaacgga

SEQ ID NO: 199229 - DNA, 22 bp, Artificial Sequence
  Synthetic oligonucleotide; CTC chr2 60486350 60486371 60486367 60486372 +
acacaatgagaaagaacggata

SEQ ID NO: 199230 - DNA, 22 bp, Artificial Sequence
  Synthetic oligonucleotide; TTC chr2 60486381 60486402 60486398 60486403 +
taagagttcactttctgcacat

SEQ ID NO: 199231 - DNA, 22 bp, Artificial Sequence
  Synthetic oligonucleotide; CTA chr2 60486383 60486404 60486400 60486405 +
agagttcactttctgcacatat

SEQ ID NO: 199232 - DNA, 22 bp, Artificial Sequence
  Synthetic oligonucleotide; TTC chr2 60486390 60486411 60486407 60486412 +
actttctgcacatatgtgtagt

SEQ ID NO: 199233 - DNA, 22 bp, Artificial Sequence
  Synthetic oligonucleotide; CTT chr2 60486394 60486415 60486411 60486416 +
tctgcacatatgtgtagttaag

SEQ ID NO: 199234 - DNA, 22 bp, Artificial Sequence
  Synthetic oligonucleotide; TTT chr2 60486395 60486416 60486412 60486417 +
ctgcacatatgtgtagttaagt

SEQ ID NO: 199235 - DNA, 22 bp, Artificial Sequence
  Synthetic oligonucleotide; TTC chr2 60486396 60486417 60486413 60486418 +
tgcacatatgtgtagttaagta

SEQ ID NO: 199236 - DNA, 22 bp, Artificial Sequence
  Synthetic oligonucleotide; CTG chr2 60486398 60486419 60486415 60486420 +
cacatatgtgtagttaagtact

SEQ ID NO: 199237 - DNA, 22 bp, Artificial Sequence
  Synthetic oligonucleotide; TTA chr2 60486414 60486435 60486431 60486436 +
agtactgaagtgagaaattcaa

SEQ ID NO: 199238 - DNA, 22 bp, Artificial Sequence
  Synthetic oligonucleotide; CTG chr2 60486421 60486442 60486438 60486443 +
aagtgagaaattcaagaaaact

SEQ ID NO: 199239 - DNA, 22 bp, Artificial Sequence
  Synthetic oligonucleotide; TTC chr2 60486434 60486455 60486451 60486456 +
aagaaaactatacttaggcaca

SEQ ID NO: 199240 - DNA, 22 bp, Artificial Sequence
  Synthetic oligonucleotide; CTA chr2 60486444 60486465 60486461 60486466 +
tacttaggcacacacacacaca

SEQ ID NO: 199241 - DNA, 22 bp, Artificial Sequence
  Synthetic oligonucleotide; CTT chr2 60486449 60486470 60486466 60486471 +
aggcacacacacacacattttg

SEQ ID NO: 199242 - DNA, 22 bp, Artificial Sequence
  Synthetic oligonucleotide; TTA chr2 60486450 60486471 60486467 60486472 +
ggcacacacacacacattttga

SEQ ID NO: 199243 - DNA, 22 bp, Artificial Sequence
  Synthetic oligonucleotide; TTT chr2 60486469 60486490 60486486 60486491 +
tgagagataatttctaaagacc

SEQ ID NO: 199244 - DNA, 22 bp, Artificial Sequence
  Synthetic oligonucleotide; TTT chr2 60486470 60486491 60486487 60486492 +
gagagataatttctaaagacct

SEQ ID NO: 199245 - DNA, 22 bp, Artificial Sequence
  Synthetic oligonucleotide; TTG chr2 60486471 60486492 60486488 60486493 +
agagataatttctaaagaccta

SEQ ID NO: 199246 - DNA, 22 bp, Artificial Sequence
  Synthetic oligonucleotide; TTT chr2 60486482 60486503 60486499 60486504 +
ctaaagacctaccaatctaaga

SEQ ID NO: 199247 - DNA, 22 bp, Artificial Sequence
  Synthetic oligonucleotide; TTC chr2 60486483 60486504 60486500 60486505 +
taaagacctaccaatctaagat

SEQ ID NO: 199248 - DNA, 22 bp, Artificial Sequence
  Synthetic oligonucleotide; CTA chr2 60486485 60486506 60486502 60486507 +
aagacctaccaatctaagatac

SEQ ID NO: 199249 - DNA, 22 bp, Artificial Sequence
  Synthetic oligonucleotide; CTA chr2 60486493 60486514 60486510 60486515 +
ccaatctaagatactgaaagaa

SEQ ID NO: 199250 - DNA, 22 bp, Artificial Sequence
  Synthetic oligonucleotide; CTA chr2 60486501 60486522 60486518 60486523 +
agatactgaaagaaaatggcta

SEQ ID NO: 199251 - DNA, 22 bp, Artificial Sequence
  Synthetic oligonucleotide; CTG chr2 60486509 60486530 60486526 60486531 +
aaagaaaatggctacatcaggc

SEQ ID NO: 199252 - DNA, 22 bp, Artificial Sequence
  Synthetic oligonucleotide; CTA chr2 60486523 60486544 60486540 60486545 +
catcaggcccagaaaagccttg

SEQ ID NO: 199253 - DNA, 22 bp, Artificial Sequence
  Synthetic oligonucleotide; CTT chr2 60486544 60486565 60486561 60486566 +
gaaattttccctatccacagac

SEQ ID NO: 199254 - DNA, 22 bp, Artificial Sequence
  Synthetic oligonucleotide; TTG chr2 60486545 60486566 60486562 60486567 +
aaattttccctatccacagacc

SEQ ID NO: 199255 - DNA, 22 bp, Artificial Sequence
  Synthetic oligonucleotide; TTT chr2 60486551 60486572 60486568 60486573 +
tccctatccacagaccacagcc

SEQ ID NO: 199256 - DNA, 22 bp, Artificial Sequence
  Synthetic oligonucleotide; TTT chr2 60486552 60486573 60486569 60486574 +
ccctatccacagaccacagccc

SEQ ID NO: 199257 - DNA, 22 bp, Artificial Sequence
  Synthetic oligonucleotide; TTC chr2 60486553 60486574 60486570 60486575 +
cctatccacagaccacagccct

SEQ ID NO: 199258 - DNA, 22 bp, Artificial Sequence
  Synthetic oligonucleotide; CTA chr2 60486557 60486578 60486574 60486579 +
tccacagaccacagccctgtga

SEQ ID NO: 199259 - DNA, 22 bp, Artificial Sequence
  Synthetic oligonucleotide; CTG chr2 60486576 60486597 60486593 60486598 +
tgatggacatgagatcctctgg

SEQ ID NO: 199260 - DNA, 22 bp, Artificial Sequence
  Synthetic oligonucleotide; CTC chr2 60486595 60486616 60486612 60486617 +
tggctttgagatgaataatgca

SEQ ID NO: 199261 - DNA, 22 bp, Artificial Sequence
  Synthetic oligonucleotide; CTG chr2 60486597 60486618 60486614 60486619 +
gctttgagatgaataatgcaca

SEQ ID NO: 199262 - DNA, 22 bp, Artificial Sequence
  Synthetic oligonucleotide; CTT chr2 60486601 60486622 60486618 60486623 +
tgagatgaataatgcacagaaa

SEQ ID NO: 199263 - DNA, 22 bp, Artificial Sequence
  Synthetic oligonucleotide; TTT chr2 60486602 60486623 60486619 60486624 +
gagatgaataatgcacagaaat

SEQ ID NO: 199264 - DNA, 22 bp, Artificial Sequence
  Synthetic oligonucleotide; TTG chr2 60486603 60486624 60486620 60486625 +
agatgaataatgcacagaaatg

SEQ ID NO: 199265 - DNA, 22 bp, Artificial Sequence
  Synthetic oligonucleotide; TTA chr2 60486642 60486663 60486659 60486664 +
gctggcagattattaccagaca

SEQ ID NO: 199266 - DNA, 22 bp, Artificial Sequence
  Synthetic oligonucleotide; CTG chr2 60486646 60486667 60486663 60486668 +
gcagattattaccagacatgtg

SEQ ID NO: 199267 - DNA, 22 bp, Artificial Sequence
  Synthetic oligonucleotide; TTA chr2 60486654 60486675 60486671 60486676 +
ttaccagacatgtgaacatgcc

SEQ ID NO: 199268 - DNA, 22 bp, Artificial Sequence
  Synthetic oligonucleotide; TTA chr2 60486657 60486678 60486674 60486679 +
ccagacatgtgaacatgccaac

SEQ ID NO: 199269 - DNA, 22 bp, Artificial Sequence
  Synthetic oligonucleotide; CTC chr2 60486681 60486702 60486698 60486703 +
aacatcaggattgggcctgaaa

SEQ ID NO: 199270 - DNA, 22 bp, Artificial Sequence
  Synthetic oligonucleotide; TTG chr2 60486694 60486715 60486711 60486716 +
ggcctgaaacttctctcaggaa

SEQ ID NO: 199271 - DNA, 22 bp, Artificial Sequence
  Synthetic oligonucleotide; CTG chr2 60486700 60486721 60486717 60486722 +
aaacttctctcaggaaggcctt

SEQ ID NO: 199272 - DNA, 22 bp, Artificial Sequence
  Synthetic oligonucleotide; CTT chr2 60486706 60486727 60486723 60486728 +
ctctcaggaaggccttgatagc

SEQ ID NO: 199273 - DNA, 22 bp, Artificial Sequence
  Synthetic oligonucleotide; TTC chr2 60486707 60486728 60486724 60486729 +
tctcaggaaggccttgatagca

SEQ ID NO: 199274 - DNA, 22 bp, Artificial Sequence
  Synthetic oligonucleotide; CTC chr2 60486709 60486730 60486726 60486731 +
tcaggaaggccttgatagcatt

SEQ ID NO: 199275 - DNA, 22 bp, Artificial Sequence
  Synthetic oligonucleotide; CTC chr2 60486711 60486732 60486728 60486733 +
aggaaggccttgatagcattag

SEQ ID NO: 199276 - DNA, 22 bp, Artificial Sequence
  Synthetic oligonucleotide; CTT chr2 60486722 60486743 60486739 60486744 +
gatagcattagatggttgacag

SEQ ID NO: 199277 - DNA, 22 bp, Artificial Sequence
  Synthetic oligonucleotide; TTG chr2 60486723 60486744 60486740 60486745 +
atagcattagatggttgacaga

SEQ ID NO: 199278 - DNA, 22 bp, Artificial Sequence
  Synthetic oligonucleotide; TTA chr2 60486732 60486753 60486749 60486754 +
gatggttgacagaggtattaca

SEQ ID NO: 199279 - DNA, 22 bp, Artificial Sequence
  Synthetic oligonucleotide; TTG chr2 60486740 60486761 60486757 60486762 +
acagaggtattacagtgtgaca

SEQ ID NO: 199280 - DNA, 22 bp, Artificial Sequence
  Synthetic oligonucleotide; TTA chr2 60486752 60486773 60486769 60486774 +
cagtgtgacagagtctgagccc

SEQ ID NO: 199281 - DNA, 22 bp, Artificial Sequence
  Synthetic oligonucleotide; CTG chr2 60486769 60486790 60486786 60486791 +
agcccacagtctgagaatgacc

SEQ ID NO: 199282 - DNA, 22 bp, Artificial Sequence
  Synthetic oligonucleotide; CTG chr2 60486782 60486803 60486799 60486804 +
agaatgaccacatcccttccca

SEQ ID NO: 199283 - DNA, 22 bp, Artificial Sequence
  Synthetic oligonucleotide; CTT chr2 60486800 60486821 60486817 60486822 +
cccagggagacgttcccactca

SEQ ID NO: 199284 - DNA, 22 bp, Artificial Sequence
  Synthetic oligonucleotide; TTC chr2 60486801 60486822 60486818 60486823 +
ccagggagacgttcccactcaa

SEQ ID NO: 199285 - DNA, 22 bp, Artificial Sequence
  Synthetic oligonucleotide; TTC chr2 60486815 60486836 60486832 60486837 +
ccactcaacaccctgggaagac

SEQ ID NO: 199286 - DNA, 22 bp, Artificial Sequence
  Synthetic oligonucleotide; CTC chr2 60486821 60486842 60486838 60486843 +
aacaccctgggaagactactgc

SEQ ID NO: 199287 - DNA, 22 bp, Artificial Sequence
  Synthetic oligonucleotide; CTG chr2 60486830 60486851 60486847 60486852 +
ggaagactactgcgaatcactc

SEQ ID NO: 199288 - DNA, 22 bp, Artificial Sequence
  Synthetic oligonucleotide; CTA chr2 60486839 60486860 60486856 60486861 +
ctgcgaatcactctgtctctca

SEQ ID NO: 199289 - DNA, 22 bp, Artificial Sequence
  Synthetic oligonucleotide; CTG chr2 60486842 60486863 60486859 60486864 +
cgaatcactctgtctctcaaac

SEQ ID NO: 199290 - DNA, 22 bp, Artificial Sequence
  Synthetic oligonucleotide; CTC chr2 60486852 60486873 60486869 60486874 +
tgtctctcaaacctggccatgg

SEQ ID NO: 199291 - DNA, 22 bp, Artificial Sequence
  Synthetic oligonucleotide; CTG chr2 60486854 60486875 60486871 60486876 +
tctctcaaacctggccatggct

SEQ ID NO: 199292 - DNA, 22 bp, Artificial Sequence
  Synthetic oligonucleotide; CTC chr2 60486858 60486879 60486875 60486880 +
tcaaacctggccatggctcagc

SEQ ID NO: 199293 - DNA, 22 bp, Artificial Sequence
  Synthetic oligonucleotide; CTC chr2 60486860 60486881 60486877 60486882 +
aaacctggccatggctcagccc

SEQ ID NO: 199294 - DNA, 22 bp, Artificial Sequence
  Synthetic oligonucleotide; CTG chr2 60486867 60486888 60486884 60486889 +
gccatggctcagcccacgccct

SEQ ID NO: 199295 - DNA, 22 bp, Artificial Sequence
  Synthetic oligonucleotide; CTC chr2 60486877 60486898 60486894 60486899 +
agcccacgccctttcatgtatt

SEQ ID NO: 199296 - DNA, 22 bp, Artificial Sequence
  Synthetic oligonucleotide; CTT chr2 60486890 60486911 60486907 60486912 +
tcatgtatttgcccttttccct

SEQ ID NO: 199297 - DNA, 22 bp, Artificial Sequence
  Synthetic oligonucleotide; TTT chr2 60486891 60486912 60486908 60486913 +
catgtatttgcccttttccctg

SEQ ID NO: 199298 - DNA, 22 bp, Artificial Sequence
  Synthetic oligonucleotide; TTC chr2 60486892 60486913 60486909 60486914 +
atgtatttgcccttttccctgc

SEQ ID NO: 199299 - DNA, 22 bp, Artificial Sequence
  Synthetic oligonucleotide; TTT chr2 60486900 60486921 60486917 60486922 +
gcccttttccctgctaacagaa

SEQ ID NO: 199300 - DNA, 22 bp, Artificial Sequence
  Synthetic oligonucleotide; TTG chr2 60486901 60486922 60486918 60486923 +
cccttttccctgctaacagaaa

SEQ ID NO: 199301 - DNA, 22 bp, Artificial Sequence
  Synthetic oligonucleotide; CTT chr2 60486906 60486927 60486923 60486928 +
ttccctgctaacagaaatggaa

SEQ ID NO: 199302 - DNA, 22 bp, Artificial Sequence
  Synthetic oligonucleotide; TTT chr2 60486907 60486928 60486924 60486929 +
tccctgctaacagaaatggaat

SEQ ID NO: 199303 - DNA, 22 bp, Artificial Sequence
  Synthetic oligonucleotide; TTT chr2 60486908 60486929 60486925 60486930 +
ccctgctaacagaaatggaatc

SEQ ID NO: 199304 - DNA, 22 bp, Artificial Sequence
  Synthetic oligonucleotide; TTC chr2 60486909 60486930 60486926 60486931 +
cctgctaacagaaatggaatca

SEQ ID NO: 199305 - DNA, 22 bp, Artificial Sequence
  Synthetic oligonucleotide; CTG chr2 60486913 60486934 60486930 60486935 +
ctaacagaaatggaatcagaac

SEQ ID NO: 199306 - DNA, 22 bp, Artificial Sequence
  Synthetic oligonucleotide; CTA chr2 60486916 60486937 60486933 60486938 +
acagaaatggaatcagaacaaa

SEQ ID NO: 199307 - DNA, 22 bp, Artificial Sequence
  Synthetic oligonucleotide; TTA chr2 60486941 60486962 60486958 60486963 +
atatttaattttaagattacta

SEQ ID NO: 199308 - DNA, 22 bp, Artificial Sequence
  Synthetic oligonucleotide; TTT chr2 60486947 60486968 60486964 60486969 +
aattttaagattactattctat

SEQ ID NO: 199309 - DNA, 22 bp, Artificial Sequence
  Synthetic oligonucleotide; TTA chr2 60486948 60486969 60486965 60486970 +
attttaagattactattctatc

SEQ ID NO: 199310 - DNA, 22 bp, Artificial Sequence
  Synthetic oligonucleotide; TTT chr2 60486952 60486973 60486969 60486974 +
taagattactattctatcagaa

SEQ ID NO: 199311 - DNA, 22 bp, Artificial Sequence
  Synthetic oligonucleotide; TTT chr2 60486953 60486974 60486970 60486975 +
aagattactattctatcagaat

SEQ ID NO: 199312 - DNA, 22 bp, Artificial Sequence
  Synthetic oligonucleotide; TTA chr2 60486954 60486975 60486971 60486976 +
agattactattctatcagaata

SEQ ID NO: 199313 - DNA, 22 bp, Artificial Sequence
  Synthetic oligonucleotide; TTA chr2 60486960 60486981 60486977 60486982 +
ctattctatcagaataaaaaag

SEQ ID NO: 199314 - DNA, 22 bp, Artificial Sequence
  Synthetic oligonucleotide; CTA chr2 60486963 60486984 60486980 60486985 +
ttctatcagaataaaaaagact

SEQ ID NO: 199315 - DNA, 22 bp, Artificial Sequence
  Synthetic oligonucleotide; TTC chr2 60486966 60486987 60486983 60486988 +
tatcagaataaaaaagactcgg

SEQ ID NO: 199316 - DNA, 22 bp, Artificial Sequence
  Synthetic oligonucleotide; CTA chr2 60486968 60486989 60486985 60486990 +
tcagaataaaaaagactcggga

SEQ ID NO: 199317 - DNA, 22 bp, Artificial Sequence
  Synthetic oligonucleotide; CTC chr2 60486986 60487007 60487003 60487008 +
gggagattcaaagcgaaggcaa

SEQ ID NO: 199318 - DNA, 22 bp, Artificial Sequence
  Synthetic oligonucleotide; TTC chr2 60486995 60487016 60487012 60487017 +
aaagcgaaggcaaatgcccctc

SEQ ID NO: 199319 - DNA, 22 bp, Artificial Sequence
  Synthetic oligonucleotide; CTC chr2 60487017 60487038 60487034 60487039 +
ctttaagtctaacgttgctatt

SEQ ID NO: 199320 - DNA, 22 bp, Artificial Sequence
  Synthetic oligonucleotide; CTT chr2 60487020 60487041 60487037 60487042 +
taagtctaacgttgctattcag

SEQ ID NO: 199321 - DNA, 22 bp, Artificial Sequence
  Synthetic oligonucleotide; TTT chr2 60487021 60487042 60487038 60487043 +
aagtctaacgttgctattcagg

SEQ ID NO: 199322 - DNA, 22 bp, Artificial Sequence
  Synthetic oligonucleotide; TTA chr2 60487022 60487043 60487039 60487044 +
agtctaacgttgctattcaggc

SEQ ID NO: 199323 - DNA, 22 bp, Artificial Sequence
  Synthetic oligonucleotide; CTA chr2 60487028 60487049 60487045 60487050 +
acgttgctattcaggcatttag

SEQ ID NO: 199324 - DNA, 22 bp, Artificial Sequence
  Synthetic oligonucleotide; TTG chr2 60487034 60487055 60487051 60487056 +
ctattcaggcatttaggagcgc

SEQ ID NO: 199325 - DNA, 22 bp, Artificial Sequence
  Synthetic oligonucleotide; CTA chr2 60487037 60487058 60487054 60487059 +
ttcaggcatttaggagcgctag

SEQ ID NO: 199326 - DNA, 22 bp, Artificial Sequence
  Synthetic oligonucleotide; TTC chr2 60487040 60487061 60487057 60487062 +
aggcatttaggagcgctagaca

SEQ ID NO: 199327 - DNA, 22 bp, Artificial Sequence
  Synthetic oligonucleotide; TTT chr2 60487048 60487069 60487065 60487070 +
aggagcgctagacacagtgagt

SEQ ID NO: 199328 - DNA, 22 bp, Artificial Sequence
  Synthetic oligonucleotide; TTA chr2 60487049 60487070 60487066 60487071 +
ggagcgctagacacagtgagtt

SEQ ID NO: 199329 - DNA, 22 bp, Artificial Sequence
  Synthetic oligonucleotide; CTA chr2 60487058 60487079 60487075 60487080 +
gacacagtgagtttccctgcct

SEQ ID NO: 199330 - DNA, 22 bp, Artificial Sequence
  Synthetic oligonucleotide; TTT chr2 60487072 60487093 60487089 60487094 +
ccctgcctccaacctgtgattt

SEQ ID NO: 199331 - DNA, 22 bp, Artificial Sequence
  Synthetic oligonucleotide; TTC chr2 60487073 60487094 60487090 60487095 +
cctgcctccaacctgtgatttg

SEQ ID NO: 199332 - DNA, 22 bp, Artificial Sequence
  Synthetic oligonucleotide; CTG chr2 60487077 60487098 60487094 60487099 +
cctccaacctgtgatttgccac

SEQ ID NO: 199333 - DNA, 22 bp, Artificial Sequence
  Synthetic oligonucleotide; CTC chr2 60487081 60487102 60487098 60487103 +
caacctgtgatttgccacaagg

SEQ ID NO: 199334 - DNA, 22 bp, Artificial Sequence
  Synthetic oligonucleotide; CTG chr2 60487088 60487109 60487105 60487110 +
tgatttgccacaaggcaggaag

SEQ ID NO: 199335 - DNA, 22 bp, Artificial Sequence
  Synthetic oligonucleotide; TTT chr2 60487094 60487115 60487111 60487116 +
gccacaaggcaggaaggggaag

SEQ ID NO: 199336 - DNA, 22 bp, Artificial Sequence
  Synthetic oligonucleotide; TTG chr2 60487095 60487116 60487112 60487117 +
ccacaaggcaggaaggggaagg

SEQ ID NO: 199337 - DNA, 22 bp, Artificial Sequence
  Synthetic oligonucleotide; CTA chr2 60487134 60487155 60487151 60487156 +
agtgtgtgaagttctaaccttt

SEQ ID NO: 199338 - DNA, 22 bp, Artificial Sequence
  Synthetic oligonucleotide; TTC chr2 60487148 60487169 60487165 60487170 +
taaccttttacccatgtaatga

SEQ ID NO: 199339 - DNA, 22 bp, Artificial Sequence
  Synthetic oligonucleotide; CTA chr2 60487150 60487171 60487167 60487172 +
accttttacccatgtaatgatc

SEQ ID NO: 199340 - DNA, 22 bp, Artificial Sequence
  Synthetic oligonucleotide; CTT chr2 60487155 60487176 60487172 60487177 +
ttacccatgtaatgatctagtt

SEQ ID NO: 199341 - DNA, 22 bp, Artificial Sequence
  Synthetic oligonucleotide; TTT chr2 60487156 60487177 60487173 60487178 +
tacccatgtaatgatctagtta

SEQ ID NO: 199342 - DNA, 22 bp, Artificial Sequence
  Synthetic oligonucleotide; TTT chr2 60487157 60487178 60487174 60487179 +
acccatgtaatgatctagttaa

SEQ ID NO: 199343 - DNA, 22 bp, Artificial Sequence
  Synthetic oligonucleotide; TTA chr2 60487158 60487179 60487175 60487180 +
cccatgtaatgatctagttaat

SEQ ID NO: 199344 - DNA, 22 bp, Artificial Sequence
  Synthetic oligonucleotide; CTA chr2 60487174 60487195 60487191 60487196 +
gttaatgtaatattttgccttt

SEQ ID NO: 199345 - DNA, 22 bp, Artificial Sequence
  Synthetic oligonucleotide; TTA chr2 60487178 60487199 60487195 60487200 +
atgtaatattttgcctttaatc

SEQ ID NO: 199346 - DNA, 22 bp, Artificial Sequence
  Synthetic oligonucleotide; TTT chr2 60487189 60487210 60487206 60487211 +
tgcctttaatcaatgaaagagt

SEQ ID NO: 199347 - DNA, 22 bp, Artificial Sequence
  Synthetic oligonucleotide; TTT chr2 60487190 60487211 60487207 60487212 +
gcctttaatcaatgaaagagta

SEQ ID NO: 199348 - DNA, 22 bp, Artificial Sequence
  Synthetic oligonucleotide; TTG chr2 60487191 60487212 60487208 60487213 +
cctttaatcaatgaaagagtaa

SEQ ID NO: 199349 - DNA, 22 bp, Artificial Sequence
  Synthetic oligonucleotide; CTT chr2 60487195 60487216 60487212 60487217 +
taatcaatgaaagagtaagata

SEQ ID NO: 199350 - DNA, 22 bp, Artificial Sequence
  Synthetic oligonucleotide; TTT chr2 60487196 60487217 60487213 60487218 +
aatcaatgaaagagtaagataa

SEQ ID NO: 199351 - DNA, 22 bp, Artificial Sequence
  Synthetic oligonucleotide; TTA chr2 60487197 60487218 60487214 60487219 +
atcaatgaaagagtaagataat

SEQ ID NO: 199352 - DNA, 22 bp, Artificial Sequence
  Synthetic oligonucleotide; TTT chr2 60487221 60487242 60487238 60487243 +
gatatcctataaaactccctaa

SEQ ID NO: 199353 - DNA, 22 bp, Artificial Sequence
  Synthetic oligonucleotide; TTG chr2 60487222 60487243 60487239 60487244 +
atatcctataaaactccctaac

SEQ ID NO: 199354 - DNA, 22 bp, Artificial Sequence
  Synthetic oligonucleotide; CTA chr2 60487230 60487251 60487247 60487252 +
taaaactccctaacctatattt

SEQ ID NO: 199355 - DNA, 22 bp, Artificial Sequence
  Synthetic oligonucleotide; CTC chr2 60487238 60487259 60487255 60487260 +
cctaacctatattttgcaagtc

SEQ ID NO: 199356 - DNA, 22 bp, Artificial Sequence
  Synthetic oligonucleotide; CTA chr2 60487242 60487263 60487259 60487264 +
acctatattttgcaagtcgatt

SEQ ID NO: 199357 - DNA, 22 bp, Artificial Sequence
  Synthetic oligonucleotide; CTA chr2 60487247 60487268 60487264 60487269 +
tattttgcaagtcgattagcta

SEQ ID NO: 199358 - DNA, 22 bp, Artificial Sequence
  Synthetic oligonucleotide; TTT chr2 60487252 60487273 60487269 60487274 +
tgcaagtcgattagctaagctc

SEQ ID NO: 199359 - DNA, 22 bp, Artificial Sequence
  Synthetic oligonucleotide; TTT chr2 60487253 60487274 60487270 60487275 +
gcaagtcgattagctaagctct

SEQ ID NO: 199360 - DNA, 22 bp, Artificial Sequence
  Synthetic oligonucleotide; TTG chr2 60487254 60487275 60487271 60487276 +
caagtcgattagctaagctctt

SEQ ID NO: 199361 - DNA, 22 bp, Artificial Sequence
  Synthetic oligonucleotide; TTA chr2 60487265 60487286 60487282 60487287 +
gctaagctcttcatgctaatgt

SEQ ID NO: 199362 - DNA, 22 bp, Artificial Sequence
  Synthetic oligonucleotide; CTA chr2 60487269 60487290 60487286 60487291 +
agctcttcatgctaatgtcagc

SEQ ID NO: 199363 - DNA, 22 bp, Artificial Sequence
  Synthetic oligonucleotide; CTC chr2 60487274 60487295 60487291 60487296 +
ttcatgctaatgtcagcagagc

SEQ ID NO: 199364 - DNA, 22 bp, Artificial Sequence
  Synthetic oligonucleotide; CTT chr2 60487276 60487297 60487293 60487298 +
catgctaatgtcagcagagccc

SEQ ID NO: 199365 - DNA, 22 bp, Artificial Sequence
  Synthetic oligonucleotide; TTC chr2 60487277 60487298 60487294 60487299 +
atgctaatgtcagcagagccca

SEQ ID NO: 199366 - DNA, 22 bp, Artificial Sequence
  Synthetic oligonucleotide; CTA chr2 60487283 60487304 60487300 60487305 +
atgtcagcagagcccatgttac

SEQ ID NO: 199367 - DNA, 22 bp, Artificial Sequence
  Synthetic oligonucleotide; TTA chr2 60487304 60487325 60487321 60487326 +
catctccagtcaggctttcagg

SEQ ID NO: 199368 - DNA, 22 bp, Artificial Sequence
  Synthetic oligonucleotide; CTC chr2 60487310 60487331 60487327 60487332 +
cagtcaggctttcaggtgtctg

SEQ ID NO: 199369 - DNA, 22 bp, Artificial Sequence
  Synthetic oligonucleotide; CTT chr2 60487321 60487342 60487338 60487343 +
tcaggtgtctgcaccccacaat

SEQ ID NO: 199370 - DNA, 22 bp, Artificial Sequence
  Synthetic oligonucleotide; TTT chr2 60487322 60487343 60487339 60487344 +
caggtgtctgcaccccacaatg

SEQ ID NO: 199371 - DNA, 22 bp, Artificial Sequence
  Synthetic oligonucleotide; TTC chr2 60487323 60487344 60487340 60487345 +
aggtgtctgcaccccacaatgc

SEQ ID NO: 199372 - DNA, 22 bp, Artificial Sequence
  Synthetic oligonucleotide; CTG chr2 60487332 60487353 60487349 60487354 +
caccccacaatgccacacaccg

SEQ ID NO: 199373 - DNA, 22 bp, Artificial Sequence
  Synthetic oligonucleotide; TTC chr2 60487374 60487395 60487391 60487396 +
agcagggggagcagtgtagtgg

SEQ ID NO: 199374 - DNA, 22 bp, Artificial Sequence
  Synthetic oligonucleotide; TTA chr2 60487403 60487424 60487420 60487425 +
cgttttcgtcatctgtatggaa

SEQ ID NO: 199375 - DNA, 22 bp, Artificial Sequence
  Synthetic oligonucleotide; TTT chr2 60487408 60487429 60487425 60487430 +
tcgtcatctgtatggaaattgg

SEQ ID NO: 199376 - DNA, 22 bp, Artificial Sequence
  Synthetic oligonucleotide; TTT chr2 60487409 60487430 60487426 60487431 +
cgtcatctgtatggaaattggg

SEQ ID NO: 199377 - DNA, 22 bp, Artificial Sequence
  Synthetic oligonucleotide; TTC chr2 60487410 60487431 60487427 60487432 +
gtcatctgtatggaaattggga

SEQ ID NO: 199378 - DNA, 22 bp, Artificial Sequence
  Synthetic oligonucleotide; CTG chr2 60487418 60487439 60487435 60487440 +
tatggaaattgggaaatcgtct

SEQ ID NO: 199379 - DNA, 22 bp, Artificial Sequence
  Synthetic oligonucleotide; TTG chr2 60487429 60487450 60487446 60487451 +
ggaaatcgtcttctcaaatgta

SEQ ID NO: 199380 - DNA, 22 bp, Artificial Sequence
  Synthetic oligonucleotide; CTT chr2 60487441 60487462 60487458 60487463 +
ctcaaatgtagattatcttccc

SEQ ID NO: 199381 - DNA, 22 bp, Artificial Sequence
  Synthetic oligonucleotide; TTC chr2 60487442 60487463 60487459 60487464 +
tcaaatgtagattatcttccct

SEQ ID NO: 199382 - DNA, 22 bp, Artificial Sequence
  Synthetic oligonucleotide; CTC chr2 60487444 60487465 60487461 60487466 +
aaatgtagattatcttcccttg

SEQ ID NO: 199383 - DNA, 22 bp, Artificial Sequence
  Synthetic oligonucleotide; TTA chr2 60487456 60487477 60487473 60487478 +
tcttcccttgggatccttctgg

SEQ ID NO: 199384 - DNA, 22 bp, Artificial Sequence
  Synthetic oligonucleotide; CTT chr2 60487460 60487481 60487477 60487482 +
cccttgggatccttctggaggg

SEQ ID NO: 199385 - DNA, 22 bp, Artificial Sequence
  Synthetic oligonucleotide; TTC chr2 60487461 60487482 60487478 60487483 +
ccttgggatccttctggagggc

SEQ ID NO: 199386 - DNA, 22 bp, Artificial Sequence
  Synthetic oligonucleotide; CTT chr2 60487465 60487486 60487482 60487487 +
gggatccttctggagggctata

SEQ ID NO: 199387 - DNA, 22 bp, Artificial Sequence
  Synthetic oligonucleotide; TTG chr2 60487466 60487487 60487483 60487488 +
ggatccttctggagggctataa

SEQ ID NO: 199388 - DNA, 22 bp, Artificial Sequence
  Synthetic oligonucleotide; CTT chr2 60487474 60487495 60487491 60487496 +
ctggagggctataaataataga

SEQ ID NO: 199389 - DNA, 22 bp, Artificial Sequence
  Synthetic oligonucleotide; TTC chr2 60487475 60487496 60487492 60487497 +
tggagggctataaataatagaa

SEQ ID NO: 199390 - DNA, 22 bp, Artificial Sequence
  Synthetic oligonucleotide; CTG chr2 60487477 60487498 60487494 60487499 +
gagggctataaataatagaaca

SEQ ID NO: 199391 - DNA, 22 bp, Artificial Sequence
  Synthetic oligonucleotide; CTA chr2 60487485 60487506 60487502 60487507 +
taaataatagaacatactaatc

SEQ ID NO: 199392 - DNA, 22 bp, Artificial Sequence
  Synthetic oligonucleotide; CTA chr2 60487504 60487525 60487521 60487526 +
atcaacattagatatttaaaaa

SEQ ID NO: 199393 - DNA, 22 bp, Artificial Sequence
  Synthetic oligonucleotide; TTA chr2 60487514 60487535 60487531 60487536 +
gatatttaaaaatgaatacaga

SEQ ID NO: 199394 - DNA, 22 bp, Artificial Sequence
  Synthetic oligonucleotide; TTT chr2 60487521 60487542 60487538 60487543 +
aaaaatgaatacagattcagat

SEQ ID NO: 199395 - DNA, 22 bp, Artificial Sequence
  Synthetic oligonucleotide; TTA chr2 60487522 60487543 60487539 60487544 +
aaaatgaatacagattcagatt

SEQ ID NO: 199396 - DNA, 22 bp, Artificial Sequence
  Synthetic oligonucleotide; TTC chr2 60487539 60487560 60487556 60487561 +
agattaagggaaaactaaatga

SEQ ID NO: 199397 - DNA, 22 bp, Artificial Sequence
  Synthetic oligonucleotide; TTA chr2 60487545 60487566 60487562 60487567 +
agggaaaactaaatgatgcctt

SEQ ID NO: 199398 - DNA, 22 bp, Artificial Sequence
  Synthetic oligonucleotide; CTA chr2 60487556 60487577 60487573 60487578 +
aatgatgcctttataaaatcca

SEQ ID NO: 199399 - DNA, 22 bp, Artificial Sequence
  Synthetic oligonucleotide; CTT chr2 60487567 60487588 60487584 60487589 +
tataaaatccagaacaaaacaa

SEQ ID NO: 199400 - DNA, 22 bp, Artificial Sequence
  Synthetic oligonucleotide; TTT chr2 60487568 60487589 60487585 60487590 +
ataaaatccagaacaaaacaaa

SEQ ID NO: 199401 - DNA, 22 bp, Artificial Sequence
  Synthetic oligonucleotide; TTA chr2 60487569 60487590 60487586 60487591 +
taaaatccagaacaaaacaaaa

SEQ ID NO: 199402 - DNA, 22 bp, Artificial Sequence
  Synthetic oligonucleotide; CTT chr2 60487618 60487639 60487635 60487640 +
agcggatcccccttaagttagc

SEQ ID NO: 199403 - DNA, 22 bp, Artificial Sequence
  Synthetic oligonucleotide; TTA chr2 60487619 60487640 60487636 60487641 +
gcggatcccccttaagttagcc

SEQ ID NO: 199404 - DNA, 22 bp, Artificial Sequence
  Synthetic oligonucleotide; CTT chr2 60487632 60487653 60487649 60487654 +
aagttagccctattctctggca

SEQ ID NO: 199405 - DNA, 22 bp, Artificial Sequence
  Synthetic oligonucleotide; TTA chr2 60487633 60487654 60487650 60487655 +
agttagccctattctctggcaa

SEQ ID NO: 199406 - DNA, 22 bp, Artificial Sequence
  Synthetic oligonucleotide; TTA chr2 60487638 60487659 60487655 60487660 +
gccctattctctggcaaccaca

SEQ ID NO: 199407 - DNA, 22 bp, Artificial Sequence
  Synthetic oligonucleotide; CTA chr2 60487644 60487665 60487661 60487666 +
ttctctggcaaccacaccagcc

SEQ ID NO: 199408 - DNA, 22 bp, Artificial Sequence
  Synthetic oligonucleotide; TTC chr2 60487647 60487668 60487664 60487669 +
tctggcaaccacaccagccttt

SEQ ID NO: 199409 - DNA, 22 bp, Artificial Sequence
  Synthetic oligonucleotide; CTC chr2 60487649 60487670 60487666 60487671 +
tggcaaccacaccagcctttaa

SEQ ID NO: 199410 - DNA, 22 bp, Artificial Sequence
  Synthetic oligonucleotide; CTG chr2 60487651 60487672 60487668 60487673 +
gcaaccacaccagcctttaacg

SEQ ID NO: 199411 - DNA, 22 bp, Artificial Sequence
  Synthetic oligonucleotide; CTT chr2 60487668 60487689 60487685 60487690 +
taacgagggtgttcaaagtaac

SEQ ID NO: 199412 - DNA, 22 bp, Artificial Sequence
  Synthetic oligonucleotide; TTT chr2 60487669 60487690 60487686 60487691 +
aacgagggtgttcaaagtaacc

SEQ ID NO: 199413 - DNA, 22 bp, Artificial Sequence
  Synthetic oligonucleotide; TTA chr2 60487670 60487691 60487687 60487692 +
acgagggtgttcaaagtaacca

SEQ ID NO: 199414 - DNA, 22 bp, Artificial Sequence
  Synthetic oligonucleotide; TTC chr2 60487682 60487703 60487699 60487704 +
aaagtaaccatttcccactccc

SEQ ID NO: 199415 - DNA, 22 bp, Artificial Sequence
  Synthetic oligonucleotide; TTT chr2 60487695 60487716 60487712 60487717 +
cccactcccttatttatgagca

SEQ ID NO: 199416 - DNA, 22 bp, Artificial Sequence
  Synthetic oligonucleotide; TTC chr2 60487696 60487717 60487713 60487718 +
ccactcccttatttatgagcag

SEQ ID NO: 199417 - DNA, 22 bp, Artificial Sequence
  Synthetic oligonucleotide; CTC chr2 60487702 60487723 60487719 60487724 +
ccttatttatgagcagcagaat

SEQ ID NO: 199418 - DNA, 22 bp, Artificial Sequence
  Synthetic oligonucleotide; CTT chr2 60487706 60487727 60487723 60487728 +
atttatgagcagcagaatgtaa

SEQ ID NO: 199419 - DNA, 22 bp, Artificial Sequence
  Synthetic oligonucleotide; TTA chr2 60487707 60487728 60487724 60487729 +
tttatgagcagcagaatgtaaa

SEQ ID NO: 199420 - DNA, 22 bp, Artificial Sequence
  Synthetic oligonucleotide; TTT chr2 60487710 60487731 60487727 60487732 +
atgagcagcagaatgtaaaaag

SEQ ID NO: 199421 - DNA, 22 bp, Artificial Sequence
  Synthetic oligonucleotide; TTA chr2 60487711 60487732 60487728 60487733 +
tgagcagcagaatgtaaaaagc

SEQ ID NO: 199422 - DNA, 22 bp, Artificial Sequence
  Synthetic oligonucleotide; CTT chr2 60487742 60487763 60487759 60487764 +
aattttaatgcggtaattttct

SEQ ID NO: 199423 - DNA, 22 bp, Artificial Sequence
  Synthetic oligonucleotide; TTA chr2 60487743 60487764 60487760 60487765 +
attttaatgcggtaattttctc

SEQ ID NO: 199424 - DNA, 22 bp, Artificial Sequence
  Synthetic oligonucleotide; TTT chr2 60487747 60487768 60487764 60487769 +
taatgcggtaattttctcatca

SEQ ID NO: 199425 - DNA, 22 bp, Artificial Sequence
  Synthetic oligonucleotide; TTT chr2 60487748 60487769 60487765 60487770 +
aatgcggtaattttctcatcaa

SEQ ID NO: 199426 - DNA, 22 bp, Artificial Sequence
  Synthetic oligonucleotide; TTA chr2 60487749 60487770 60487766 60487771 +
atgcggtaattttctcatcaac

SEQ ID NO: 199427 - DNA, 22 bp, Artificial Sequence
  Synthetic oligonucleotide; TTT chr2 60487761 60487782 60487778 60487783 +
tctcatcaaccattctatctaa

SEQ ID NO: 199428 - DNA, 22 bp, Artificial Sequence
  Synthetic oligonucleotide; TTT chr2 60487762 60487783 60487779 60487784 +
ctcatcaaccattctatctaag

SEQ ID NO: 199429 - DNA, 22 bp, Artificial Sequence
  Synthetic oligonucleotide; TTC chr2 60487763 60487784 60487780 60487785 +
tcatcaaccattctatctaagg

SEQ ID NO: 199430 - DNA, 22 bp, Artificial Sequence
  Synthetic oligonucleotide; CTC chr2 60487765 60487786 60487782 60487787 +
atcaaccattctatctaaggaa

SEQ ID NO: 199431 - DNA, 22 bp, Artificial Sequence
  Synthetic oligonucleotide; TTC chr2 60487776 60487797 60487793 60487798 +
tatctaaggaagctgcagaaag

SEQ ID NO: 199432 - DNA, 22 bp, Artificial Sequence
  Synthetic oligonucleotide; CTA chr2 60487778 60487799 60487795 60487800 +
tctaaggaagctgcagaaaggt

SEQ ID NO: 199433 - DNA, 22 bp, Artificial Sequence
  Synthetic oligonucleotide; CTA chr2 60487782 60487803 60487799 60487804 +
aggaagctgcagaaaggtgaaa

SEQ ID NO: 199434 - DNA, 22 bp, Artificial Sequence
  Synthetic oligonucleotide; CTG chr2 60487791 60487812 60487808 60487813 +
cagaaaggtgaaaactggaaat

SEQ ID NO: 199435 - DNA, 22 bp, Artificial Sequence
  Synthetic oligonucleotide; CTG chr2 60487808 60487829 60487825 60487830 +
gaaatttatgaacctttaatgg

SEQ ID NO: 199436 - DNA, 22 bp, Artificial Sequence
  Synthetic oligonucleotide; TTT chr2 60487815 60487836 60487832 60487837 +
atgaacctttaatgggaaatct

SEQ ID NO: 199437 - DNA, 22 bp, Artificial Sequence
  Synthetic oligonucleotide; TTA chr2 60487816 60487837 60487833 60487838 +
tgaacctttaatgggaaatctg

SEQ ID NO: 199438 - DNA, 22 bp, Artificial Sequence
  Synthetic oligonucleotide; CTT chr2 60487824 60487845 60487841 60487846 +
taatgggaaatctggataagaa

SEQ ID NO: 199439 - DNA, 22 bp, Artificial Sequence
  Synthetic oligonucleotide; TTT chr2 60487825 60487846 60487842 60487847 +
aatgggaaatctggataagaat

SEQ ID NO: 199440 - DNA, 22 bp, Artificial Sequence
  Synthetic oligonucleotide; TTA chr2 60487826 60487847 60487843 60487848 +
atgggaaatctggataagaatt

SEQ ID NO: 199441 - DNA, 22 bp, Artificial Sequence
  Synthetic oligonucleotide; CTG chr2 60487838 60487859 60487855 60487860 +
gataagaatttggtctaaatat

SEQ ID NO: 199442 - DNA, 22 bp, Artificial Sequence
  Synthetic oligonucleotide; TTT chr2 60487849 60487870 60487866 60487871 +
ggtctaaatatatgaagaggaa

SEQ ID NO: 199443 - DNA, 22 bp, Artificial Sequence
  Synthetic oligonucleotide; TTG chr2 60487850 60487871 60487867 60487872 +
gtctaaatatatgaagaggaac

SEQ ID NO: 199444 - DNA, 22 bp, Artificial Sequence
  Synthetic oligonucleotide; CTA chr2 60487855 60487876 60487872 60487877 +
aatatatgaagaggaacatgga

SEQ ID NO: 199445 - DNA, 22 bp, Artificial Sequence
  Synthetic oligonucleotide; CTG chr2 60487883 60487904 60487900 60487905 +
gcacaaacacaaaatgcaagta

SEQ ID NO: 199446 - DNA, 22 bp, Artificial Sequence
  Synthetic oligonucleotide; CTC chr2 60487908 60487929 60487925 60487930 +
caactccagctccctgataaca

SEQ ID NO: 199447 - DNA, 22 bp, Artificial Sequence
  Synthetic oligonucleotide; CTC chr2 60487914 60487935 60487931 60487936 +
cagctccctgataacatctgcc

SEQ ID NO: 199448 - DNA, 22 bp, Artificial Sequence
  Synthetic oligonucleotide; CTC chr2 60487920 60487941 60487937 60487942 +
cctgataacatctgccactaaa

SEQ ID NO: 199449 - DNA, 22 bp, Artificial Sequence
  Synthetic oligonucleotide; CTG chr2 60487924 60487945 60487941 60487946 +
ataacatctgccactaaaggtt

SEQ ID NO: 199450 - DNA, 22 bp, Artificial Sequence
  Synthetic oligonucleotide; CTG chr2 60487934 60487955 60487951 60487956 +
ccactaaaggtttactgacttg

SEQ ID NO: 199451 - DNA, 22 bp, Artificial Sequence
  Synthetic oligonucleotide; CTA chr2 60487940 60487961 60487957 60487962 +
aaggtttactgacttggttttc

SEQ ID NO: 199452 - DNA, 22 bp, Artificial Sequence
  Synthetic oligonucleotide; TTT chr2 60487947 60487968 60487964 60487969 +
actgacttggttttcccaactc

SEQ ID NO: 199453 - DNA, 22 bp, Artificial Sequence
  Synthetic oligonucleotide; TTA chr2 60487948 60487969 60487965 60487970 +
ctgacttggttttcccaactct

SEQ ID NO: 199454 - DNA, 22 bp, Artificial Sequence
  Synthetic oligonucleotide; CTG chr2 60487951 60487972 60487968 60487973 +
acttggttttcccaactctaga

SEQ ID NO: 199455 - DNA, 22 bp, Artificial Sequence
  Synthetic oligonucleotide; CTT chr2 60487955 60487976 60487972 60487977 +
ggttttcccaactctagaatgg

SEQ ID NO: 199456 - DNA, 22 bp, Artificial Sequence
  Synthetic oligonucleotide; TTG chr2 60487956 60487977 60487973 60487978 +
gttttcccaactctagaatgga

SEQ ID NO: 199457 - DNA, 22 bp, Artificial Sequence
  Synthetic oligonucleotide; TTT chr2 60487960 60487981 60487977 60487982 +
tcccaactctagaatggagccc

SEQ ID NO: 199458 - DNA, 22 bp, Artificial Sequence
  Synthetic oligonucleotide; TTT chr2 60487961 60487982 60487978 60487983 +
cccaactctagaatggagccct

SEQ ID NO: 199459 - DNA, 22 bp, Artificial Sequence
  Synthetic oligonucleotide; TTC chr2 60487962 60487983 60487979 60487984 +
ccaactctagaatggagccctc

SEQ ID NO: 199460 - DNA, 22 bp, Artificial Sequence
  Synthetic oligonucleotide; CTC chr2 60487969 60487990 60487986 60487991 +
tagaatggagccctcatctaaa

SEQ ID NO: 199461 - DNA, 22 bp, Artificial Sequence
  Synthetic oligonucleotide; CTA chr2 60487971 60487992 60487988 60487993 +
gaatggagccctcatctaaacc

SEQ ID NO: 199462 - DNA, 22 bp, Artificial Sequence
  Synthetic oligonucleotide; CTC chr2 60487984 60488005 60488001 60488006 +
atctaaacctggggaagcaata

SEQ ID NO: 199463 - DNA, 22 bp, Artificial Sequence
  Synthetic oligonucleotide; CTA chr2 60487989 60488010 60488006 60488011 +
aacctggggaagcaatatatga

SEQ ID NO: 199464 - DNA, 22 bp, Artificial Sequence
  Synthetic oligonucleotide; CTG chr2 60487995 60488016 60488012 60488017 +
gggaagcaatatatgaacaatt

SEQ ID NO: 199465 - DNA, 22 bp, Artificial Sequence
  Synthetic oligonucleotide; TTA chr2 60488018 60488039 60488035 60488040 +
gatattaaatgcttatagatcc

SEQ ID NO: 199466 - DNA, 22 bp, Artificial Sequence
  Synthetic oligonucleotide; TTA chr2 60488025 60488046 60488042 60488047 +
aatgcttatagatccctctctg

SEQ ID NO: 199467 - DNA, 22 bp, Artificial Sequence
  Synthetic oligonucleotide; CTT chr2 60488032 60488053 60488049 60488054 +
atagatccctctctgtgctatt

SEQ ID NO: 199468 - DNA, 22 bp, Artificial Sequence
  Synthetic oligonucleotide; TTA chr2 60488033 60488054 60488050 60488055 +
tagatccctctctgtgctatta

SEQ ID NO: 199469 - DNA, 22 bp, Artificial Sequence
  Synthetic oligonucleotide; CTC chr2 60488043 60488064 60488060 60488065 +
tctgtgctattacttttgacct

SEQ ID NO: 199470 - DNA, 22 bp, Artificial Sequence
  Synthetic oligonucleotide; CTC chr2 60488045 60488066 60488062 60488067 +
tgtgctattacttttgacctgg

SEQ ID NO: 199471 - DNA, 22 bp, Artificial Sequence
  Synthetic oligonucleotide; CTG chr2 60488047 60488068 60488064 60488069 +
tgctattacttttgacctgggt

SEQ ID NO: 199472 - DNA, 22 bp, Artificial Sequence
  Synthetic oligonucleotide; CTA chr2 60488052 60488073 60488069 60488074 +
ttacttttgacctgggttttaa

SEQ ID NO: 199473 - DNA, 22 bp, Artificial Sequence
  Synthetic oligonucleotide; TTA chr2 60488055 60488076 60488072 60488077 +
cttttgacctgggttttaaaaa

SEQ ID NO: 199474 - DNA, 22 bp, Artificial Sequence
  Synthetic oligonucleotide; CTT chr2 60488058 60488079 60488075 60488080 +
ttgacctgggttttaaaaacac

SEQ ID NO: 199475 - DNA, 22 bp, Artificial Sequence
  Synthetic oligonucleotide; TTT chr2 60488059 60488080 60488076 60488081 +
tgacctgggttttaaaaacaca

SEQ ID NO: 199476 - DNA, 22 bp, Artificial Sequence
  Synthetic oligonucleotide; TTT chr2 60488060 60488081 60488077 60488082 +
gacctgggttttaaaaacacag

SEQ ID NO: 199477 - DNA, 22 bp, Artificial Sequence
  Synthetic oligonucleotide; TTG chr2 60488061 60488082 60488078 60488083 +
acctgggttttaaaaacacagt

SEQ ID NO: 199478 - DNA, 22 bp, Artificial Sequence
  Synthetic oligonucleotide; CTG chr2 60488066 60488087 60488083 60488088 +
ggttttaaaaacacagtaacac

SEQ ID NO: 199479 - DNA, 22 bp, Artificial Sequence
  Synthetic oligonucleotide; TTT chr2 60488071 60488092 60488088 60488093 +
taaaaacacagtaacacttaca

SEQ ID NO: 199480 - DNA, 22 bp, Artificial Sequence
  Synthetic oligonucleotide; TTT chr2 60488072 60488093 60488089 60488094 +
aaaaacacagtaacacttacaa

SEQ ID NO: 199481 - DNA, 22 bp, Artificial Sequence
  Synthetic oligonucleotide; TTA chr2 60488073 60488094 60488090 60488095 +
aaaacacagtaacacttacaat

SEQ ID NO: 199482 - DNA, 22 bp, Artificial Sequence
  Synthetic oligonucleotide; CTT chr2 60488090 60488111 60488107 60488112 +
acaatttattctcattatgtag

SEQ ID NO: 199483 - DNA, 22 bp, Artificial Sequence
  Synthetic oligonucleotide; TTA chr2 60488091 60488112 60488108 60488113 +
caatttattctcattatgtaga

SEQ ID NO: 199484 - DNA, 22 bp, Artificial Sequence
  Synthetic oligonucleotide; TTT chr2 60488097 60488118 60488114 60488119 +
attctcattatgtagaaacatt

SEQ ID NO: 199485 - DNA, 22 bp, Artificial Sequence
  Synthetic oligonucleotide; TTA chr2 60488098 60488119 60488115 60488120 +
ttctcattatgtagaaacattt

SEQ ID NO: 199486 - DNA, 22 bp, Artificial Sequence
  Synthetic oligonucleotide; TTC chr2 60488101 60488122 60488118 60488123 +
tcattatgtagaaacatttaaa

SEQ ID NO: 199487 - DNA, 22 bp, Artificial Sequence
  Synthetic oligonucleotide; CTC chr2 60488103 60488124 60488120 60488125 +
attatgtagaaacatttaaatt

SEQ ID NO: 199488 - DNA, 22 bp, Artificial Sequence
  Synthetic oligonucleotide; TTA chr2 60488107 60488128 60488124 60488129 +
tgtagaaacatttaaattatcc

SEQ ID NO: 199489 - DNA, 22 bp, Artificial Sequence
  Synthetic oligonucleotide; TTT chr2 60488120 60488141 60488137 60488142 +
aaattatcctggaagagtttgt

SEQ ID NO: 199490 - DNA, 22 bp, Artificial Sequence
  Synthetic oligonucleotide; TTA chr2 60488121 60488142 60488138 60488143 +
aattatcctggaagagtttgtc

SEQ ID NO: 199491 - DNA, 22 bp, Artificial Sequence
  Synthetic oligonucleotide; TTA chr2 60488126 60488147 60488143 60488148 +
tcctggaagagtttgtctcacg

SEQ ID NO: 199492 - DNA, 22 bp, Artificial Sequence
  Synthetic oligonucleotide; CTG chr2 60488131 60488152 60488148 60488153 +
gaagagtttgtctcacgggctg

SEQ ID NO: 199493 - DNA, 22 bp, Artificial Sequence
  Synthetic oligonucleotide; TTT chr2 60488140 60488161 60488157 60488162 +
gtctcacgggctgttcaaagag

SEQ ID NO: 199494 - DNA, 22 bp, Artificial Sequence
  Synthetic oligonucleotide; TTG chr2 60488141 60488162 60488158 60488163 +
tctcacgggctgttcaaagagt

SEQ ID NO: 199495 - DNA, 22 bp, Artificial Sequence
  Synthetic oligonucleotide; CTC chr2 60488145 60488166 60488162 60488167 +
acgggctgttcaaagagtgttt

SEQ ID NO: 199496 - DNA, 22 bp, Artificial Sequence
  Synthetic oligonucleotide; CTG chr2 60488153 60488174 60488170 60488175 +
ttcaaagagtgtttcttccttt

SEQ ID NO: 199497 - DNA, 22 bp, Artificial Sequence
  Synthetic oligonucleotide; TTC chr2 60488156 60488177 60488173 60488178 +
aaagagtgtttcttcctttcct

SEQ ID NO: 199498 - DNA, 22 bp, Artificial Sequence
  Synthetic oligonucleotide; TTT chr2 60488167 60488188 60488184 60488189 +
cttcctttccttctaggaacat

SEQ ID NO: 199499 - DNA, 22 bp, Artificial Sequence
  Synthetic oligonucleotide; TTC chr2 60488168 60488189 60488185 60488190 +
ttcctttccttctaggaacatg

SEQ ID NO: 199500 - DNA, 22 bp, Artificial Sequence
  Synthetic oligonucleotide; CTT chr2 60488170 60488191 60488187 60488192 +
cctttccttctaggaacatgag

SEQ ID NO: 199501 - DNA, 22 bp, Artificial Sequence
  Synthetic oligonucleotide; TTC chr2 60488171 60488192 60488188 60488193 +
ctttccttctaggaacatgagg

SEQ ID NO: 199502 - DNA, 22 bp, Artificial Sequence
  Synthetic oligonucleotide; CTT chr2 60488174 60488195 60488191 60488196 +
tccttctaggaacatgaggagt

SEQ ID NO: 199503 - DNA, 22 bp, Artificial Sequence
  Synthetic oligonucleotide; TTT chr2 60488175 60488196 60488192 60488197 +
ccttctaggaacatgaggagtg

SEQ ID NO: 199504 - DNA, 22 bp, Artificial Sequence
  Synthetic oligonucleotide; TTC chr2 60488176 60488197 60488193 60488198 +
cttctaggaacatgaggagtga

SEQ ID NO: 199505 - DNA, 22 bp, Artificial Sequence
  Synthetic oligonucleotide; CTT chr2 60488179 60488200 60488196 60488201 +
ctaggaacatgaggagtgaatc

SEQ ID NO: 199506 - DNA, 22 bp, Artificial Sequence
  Synthetic oligonucleotide; TTC chr2 60488180 60488201 60488197 60488202 +
taggaacatgaggagtgaatct

SEQ ID NO: 199507 - DNA, 22 bp, Artificial Sequence
  Synthetic oligonucleotide; CTA chr2 60488182 60488203 60488199 60488204 +
ggaacatgaggagtgaatctga

SEQ ID NO: 199508 - DNA, 22 bp, Artificial Sequence
  Synthetic oligonucleotide; CTG chr2 60488203 60488224 60488220 60488225 +
actatttcatcaaagcctgtaa

SEQ ID NO: 199509 - DNA, 22 bp, Artificial Sequence
  Synthetic oligonucleotide; CTA chr2 60488207 60488228 60488224 60488229 +
tttcatcaaagcctgtaaaaga

SEQ ID NO: 199510 - DNA, 22 bp, Artificial Sequence
  Synthetic oligonucleotide; TTT chr2 60488210 60488231 60488227 60488232 +
catcaaagcctgtaaaagatac

SEQ ID NO: 199511 - DNA, 22 bp, Artificial Sequence
  Synthetic oligonucleotide; TTC chr2 60488211 60488232 60488228 60488233 +
atcaaagcctgtaaaagatacc

SEQ ID NO: 199512 - DNA, 22 bp, Artificial Sequence
  Synthetic oligonucleotide; CTG chr2 60488222 60488243 60488239 60488244 +
taaaagatacctgagtcatgat

SEQ ID NO: 199513 - DNA, 22 bp, Artificial Sequence
  Synthetic oligonucleotide; CTG chr2 60488235 60488256 60488252 60488257 +
agtcatgattttaactgaacaa

SEQ ID NO: 199514 - DNA, 22 bp, Artificial Sequence
  Synthetic oligonucleotide; TTT chr2 60488246 60488267 60488263 60488268 +
taactgaacaatgtctccaaga

SEQ ID NO: 199515 - DNA, 22 bp, Artificial Sequence
  Synthetic oligonucleotide; TTT chr2 60488247 60488268 60488264 60488269 +
aactgaacaatgtctccaagaa

SEQ ID NO: 199516 - DNA, 22 bp, Artificial Sequence
  Synthetic oligonucleotide; TTA chr2 60488248 60488269 60488265 60488270 +
actgaacaatgtctccaagaat

SEQ ID NO: 199517 - DNA, 22 bp, Artificial Sequence
  Synthetic oligonucleotide; CTG chr2 60488252 60488273 60488269 60488274 +
aacaatgtctccaagaattcag

SEQ ID NO: 199518 - DNA, 22 bp, Artificial Sequence
  Synthetic oligonucleotide; CTC chr2 60488263 60488284 60488280 60488285 +
caagaattcagactgtgagagg

SEQ ID NO: 199519 - DNA, 22 bp, Artificial Sequence
  Synthetic oligonucleotide; TTC chr2 60488272 60488293 60488289 60488294 +
agactgtgagagggggaagaag

SEQ ID NO: 199520 - DNA, 22 bp, Artificial Sequence
  Synthetic oligonucleotide; CTG chr2 60488278 60488299 60488295 60488300 +
tgagagggggaagaagaccgtc

SEQ ID NO: 199521 - DNA, 22 bp, Artificial Sequence
  Synthetic oligonucleotide; CTC chr2 60488302 60488323 60488319 60488324 +
tttggtgcagtgggaattgcca

SEQ ID NO: 199522 - DNA, 22 bp, Artificial Sequence
  Synthetic oligonucleotide; CTT chr2 60488304 60488325 60488321 60488326 +
tggtgcagtgggaattgccatt

SEQ ID NO: 199523 - DNA, 22 bp, Artificial Sequence
  Synthetic oligonucleotide; TTT chr2 60488305 60488326 60488322 60488327 +
ggtgcagtgggaattgccattg

SEQ ID NO: 199524 - DNA, 22 bp, Artificial Sequence
  Synthetic oligonucleotide; TTG chr2 60488306 60488327 60488323 60488328 +
gtgcagtgggaattgccattgt

SEQ ID NO: 199525 - DNA, 22 bp, Artificial Sequence
  Synthetic oligonucleotide; TTG chr2 60488321 60488342 60488338 60488343 +
ccattgtgtcctccctggttcc

SEQ ID NO: 199526 - DNA, 22 bp, Artificial Sequence
  Synthetic oligonucleotide; TTG chr2 60488327 60488348 60488344 60488349 +
tgtcctccctggttcctctcct

SEQ ID NO: 199527 - DNA, 22 bp, Artificial Sequence
  Synthetic oligonucleotide; CTC chr2 60488334 60488355 60488351 60488356 +
cctggttcctctcctctgtcct

SEQ ID NO: 199528 - DNA, 22 bp, Artificial Sequence
  Synthetic oligonucleotide; CTG chr2 60488338 60488359 60488355 60488360 +
gttcctctcctctgtccttggc

SEQ ID NO: 199529 - DNA, 22 bp, Artificial Sequence
  Synthetic oligonucleotide; TTC chr2 60488342 60488363 60488359 60488364 +
ctctcctctgtccttggcaatc

SEQ ID NO: 199530 - DNA, 22 bp, Artificial Sequence
  Synthetic oligonucleotide; CTC chr2 60488345 60488366 60488362 60488367 +
tcctctgtccttggcaatccag

SEQ ID NO: 199531 - DNA, 22 bp, Artificial Sequence
  Synthetic oligonucleotide; CTC chr2 60488347 60488368 60488364 60488369 +
ctctgtccttggcaatccagtt

SEQ ID NO: 199532 - DNA, 22 bp, Artificial Sequence
  Synthetic oligonucleotide; CTC chr2 60488350 60488371 60488367 60488372 +
tgtccttggcaatccagttaca

SEQ ID NO: 199533 - DNA, 22 bp, Artificial Sequence
  Synthetic oligonucleotide; CTG chr2 60488352 60488373 60488369 60488374 +
tccttggcaatccagttacaat

SEQ ID NO: 199534 - DNA, 22 bp, Artificial Sequence
  Synthetic oligonucleotide; CTT chr2 60488357 60488378 60488374 60488379 +
ggcaatccagttacaatttgac

SEQ ID NO: 199535 - DNA, 22 bp, Artificial Sequence
  Synthetic oligonucleotide; TTG chr2 60488358 60488379 60488375 60488380 +
gcaatccagttacaatttgaca

SEQ ID NO: 199536 - DNA, 22 bp, Artificial Sequence
  Synthetic oligonucleotide; TTA chr2 60488370 60488391 60488387 60488392 +
caatttgacagcatttaaagat

SEQ ID NO: 199537 - DNA, 22 bp, Artificial Sequence
  Synthetic oligonucleotide; TTT chr2 60488376 60488397 60488393 60488398 +
gacagcatttaaagatgacagt

SEQ ID NO: 199538 - DNA, 22 bp, Artificial Sequence
  Synthetic oligonucleotide; TTG chr2 60488377 60488398 60488394 60488399 +
acagcatttaaagatgacagta

SEQ ID NO: 199539 - DNA, 22 bp, Artificial Sequence
  Synthetic oligonucleotide; TTT chr2 60488386 60488407 60488403 60488408 +
aaagatgacagtacttgagata

SEQ ID NO: 199540 - DNA, 22 bp, Artificial Sequence
  Synthetic oligonucleotide; TTA chr2 60488387 60488408 60488404 60488409 +
aagatgacagtacttgagataa

SEQ ID NO: 199541 - DNA, 22 bp, Artificial Sequence
  Synthetic oligonucleotide; CTT chr2 60488402 60488423 60488419 60488424 +
gagataataggacaatgccata

SEQ ID NO: 199542 - DNA, 22 bp, Artificial Sequence
  Synthetic oligonucleotide; TTG chr2 60488403 60488424 60488420 60488425 +
agataataggacaatgccataa

SEQ ID NO: 199543 - DNA, 22 bp, Artificial Sequence
  Synthetic oligonucleotide; TTA chr2 60488433 60488454 60488450 60488455 +
cagcaaatgtgaaagaaaggac

SEQ ID NO: 199544 - DNA, 22 bp, Artificial Sequence
  Synthetic oligonucleotide; CTG chr2 60488469 60488490 60488486 60488491 +
tcatttaggtaatgtcatctat

SEQ ID NO: 199545 - DNA, 22 bp, Artificial Sequence
  Synthetic oligonucleotide; TTT chr2 60488475 60488496 60488492 60488497 +
aggtaatgtcatctatgatcag

SEQ ID NO: 199546 - DNA, 22 bp, Artificial Sequence
  Synthetic oligonucleotide; TTA chr2 60488476 60488497 60488493 60488498 +
ggtaatgtcatctatgatcagt

SEQ ID NO: 199547 - DNA, 22 bp, Artificial Sequence
  Synthetic oligonucleotide; CTA chr2 60488490 60488511 60488507 60488512 +
tgatcagtttttgtttcatttt

SEQ ID NO: 199548 - DNA, 22 bp, Artificial Sequence
  Synthetic oligonucleotide; TTT chr2 60488500 60488521 60488517 60488522 +
ttgtttcattttttgctgacac

SEQ ID NO: 199549 - DNA, 22 bp, Artificial Sequence
  Synthetic oligonucleotide; TTT chr2 60488501 60488522 60488518 60488523 +
tgtttcattttttgctgacaca

SEQ ID NO: 199550 - DNA, 22 bp, Artificial Sequence
  Synthetic oligonucleotide; TTT chr2 60488502 60488523 60488519 60488524 +
gtttcattttttgctgacacag

SEQ ID NO: 199551 - DNA, 22 bp, Artificial Sequence
  Synthetic oligonucleotide; TTG chr2 60488503 60488524 60488520 60488525 +
tttcattttttgctgacacaga

SEQ ID NO: 199552 - DNA, 22 bp, Artificial Sequence
  Synthetic oligonucleotide; TTT chr2 60488506 60488527 60488523 60488528 +
cattttttgctgacacagaact

SEQ ID NO: 199553 - DNA, 22 bp, Artificial Sequence
  Synthetic oligonucleotide; TTC chr2 60488507 60488528 60488524 60488529 +
attttttgctgacacagaactc

SEQ ID NO: 199554 - DNA, 22 bp, Artificial Sequence
  Synthetic oligonucleotide; TTT chr2 60488511 60488532 60488528 60488533 +
tttgctgacacagaactcagtg

SEQ ID NO: 199555 - DNA, 22 bp, Artificial Sequence
  Synthetic oligonucleotide; TTT chr2 60488512 60488533 60488529 60488534 +
ttgctgacacagaactcagtgc

SEQ ID NO: 199556 - DNA, 22 bp, Artificial Sequence
  Synthetic oligonucleotide; TTT chr2 60488513 60488534 60488530 60488535 +
tgctgacacagaactcagtgct

SEQ ID NO: 199557 - DNA, 22 bp, Artificial Sequence
  Synthetic oligonucleotide; TTT chr2 60488514 60488535 60488531 60488536 +
gctgacacagaactcagtgcta

SEQ ID NO: 199558 - DNA, 22 bp, Artificial Sequence
  Synthetic oligonucleotide; TTG chr2 60488515 60488536 60488532 60488537 +
ctgacacagaactcagtgctac

SEQ ID NO: 199559 - DNA, 22 bp, Artificial Sequence
  Synthetic oligonucleotide; CTG chr2 60488518 60488539 60488535 60488540 +
acacagaactcagtgctactta

SEQ ID NO: 199560 - DNA, 22 bp, Artificial Sequence
  Synthetic oligonucleotide; CTC chr2 60488529 60488550 60488546 60488551 +
agtgctacttatacaattcact

SEQ ID NO: 199561 - DNA, 22 bp, Artificial Sequence
  Synthetic oligonucleotide; CTA chr2 60488536 60488557 60488553 60488558 +
cttatacaattcactggaaacc

SEQ ID NO: 199562 - DNA, 22 bp, Artificial Sequence
  Synthetic oligonucleotide; CTT chr2 60488539 60488560 60488556 60488561 +
atacaattcactggaaaccctg

SEQ ID NO: 199563 - DNA, 22 bp, Artificial Sequence
  Synthetic oligonucleotide; TTA chr2 60488540 60488561 60488557 60488562 +
tacaattcactggaaaccctgt

SEQ ID NO: 199564 - DNA, 22 bp, Artificial Sequence
  Synthetic oligonucleotide; TTC chr2 60488548 60488569 60488565 60488570 +
actggaaaccctgttatggctg

SEQ ID NO: 199565 - DNA, 22 bp, Artificial Sequence
  Synthetic oligonucleotide; CTG chr2 60488552 60488573 60488569 60488574 +
gaaaccctgttatggctgtaaa

SEQ ID NO: 199566 - DNA, 22 bp, Artificial Sequence
  Synthetic oligonucleotide; CTG chr2 60488561 60488582 60488578 60488583 +
ttatggctgtaaatagtttgct

SEQ ID NO: 199567 - DNA, 22 bp, Artificial Sequence
  Synthetic oligonucleotide; TTA chr2 60488564 60488585 60488581 60488586 +
tggctgtaaatagtttgcttcc

SEQ ID NO: 199568 - DNA, 22 bp, Artificial Sequence
  Synthetic oligonucleotide; CTG chr2 60488570 60488591 60488587 60488592 +
taaatagtttgcttcccccaat

SEQ ID NO: 199569 - DNA, 22 bp, Artificial Sequence
  Synthetic oligonucleotide; TTT chr2 60488580 60488601 60488597 60488602 +
gcttcccccaatgaaagaaaat

SEQ ID NO: 199570 - DNA, 22 bp, Artificial Sequence
  Synthetic oligonucleotide; TTG chr2 60488581 60488602 60488598 60488603 +
cttcccccaatgaaagaaaata

SEQ ID NO: 199571 - DNA, 22 bp, Artificial Sequence
  Synthetic oligonucleotide; CTT chr2 60488584 60488605 60488601 60488606 +
cccccaatgaaagaaaatactt

SEQ ID NO: 199572 - DNA, 22 bp, Artificial Sequence
  Synthetic oligonucleotide; TTC chr2 60488585 60488606 60488602 60488607 +
ccccaatgaaagaaaatactta

SEQ ID NO: 199573 - DNA, 22 bp, Artificial Sequence
  Synthetic oligonucleotide; CTT chr2 60488606 60488627 60488623 60488628 +
actgtactgcaggggaattcgg

SEQ ID NO: 199574 - DNA, 22 bp, Artificial Sequence
  Synthetic oligonucleotide; TTA chr2 60488607 60488628 60488624 60488629 +
ctgtactgcaggggaattcggt

SEQ ID NO: 199575 - DNA, 22 bp, Artificial Sequence
  Synthetic oligonucleotide; CTG chr2 60488610 60488631 60488627 60488632 +
tactgcaggggaattcggtaaa

SEQ ID NO: 199576 - DNA, 22 bp, Artificial Sequence
  Synthetic oligonucleotide; CTG chr2 60488615 60488636 60488632 60488637 +
caggggaattcggtaaaacttt

SEQ ID NO: 199577 - DNA, 22 bp, Artificial Sequence
  Synthetic oligonucleotide; TTC chr2 60488626 60488647 60488643 60488648 +
ggtaaaactttctagttttgct

SEQ ID NO: 199578 - DNA, 22 bp, Artificial Sequence
  Synthetic oligonucleotide; CTT chr2 60488636 60488657 60488653 60488658 +
tctagttttgcttaacatgaaa

SEQ ID NO: 199579 - DNA, 22 bp, Artificial Sequence
  Synthetic oligonucleotide; TTT chr2 60488637 60488658 60488654 60488659 +
ctagttttgcttaacatgaaaa

SEQ ID NO: 199580 - DNA, 22 bp, Artificial Sequence
  Synthetic oligonucleotide; TTC chr2 60488638 60488659 60488655 60488660 +
tagttttgcttaacatgaaaat

SEQ ID NO: 199581 - DNA, 22 bp, Artificial Sequence
  Synthetic oligonucleotide; CTA chr2 60488640 60488661 60488657 60488662 +
gttttgcttaacatgaaaataa

SEQ ID NO: 199582 - DNA, 22 bp, Artificial Sequence
  Synthetic oligonucleotide; TTT chr2 60488644 60488665 60488661 60488666 +
tgcttaacatgaaaataataac

SEQ ID NO: 199583 - DNA, 22 bp, Artificial Sequence
  Synthetic oligonucleotide; TTT chr2 60488645 60488666 60488662 60488667 +
gcttaacatgaaaataataaca

SEQ ID NO: 199584 - DNA, 22 bp, Artificial Sequence
  Synthetic oligonucleotide; TTG chr2 60488646 60488667 60488663 60488668 +
cttaacatgaaaataataacaa

SEQ ID NO: 199585 - DNA, 22 bp, Artificial Sequence
  Synthetic oligonucleotide; CTT chr2 60488649 60488670 60488666 60488671 +
aacatgaaaataataacaaaaa

SEQ ID NO: 199586 - DNA, 22 bp, Artificial Sequence
  Synthetic oligonucleotide; TTA chr2 60488650 60488671 60488667 60488672 +
acatgaaaataataacaaaaaa

SEQ ID NO: 199587 - DNA, 22 bp, Artificial Sequence
  Synthetic oligonucleotide; TTT chr2 60488675 60488696 60488692 60488697 +
caaatcagtatcaatagccaaa

SEQ ID NO: 199588 - DNA, 22 bp, Artificial Sequence
  Synthetic oligonucleotide; TTC chr2 60488676 60488697 60488693 60488698 +
aaatcagtatcaatagccaaag

SEQ ID NO: 199589 - DNA, 22 bp, Artificial Sequence
  Synthetic oligonucleotide; CTA chr2 60488714 60488735 60488731 60488736 +
aagccactgctacccaaaacga

SEQ ID NO: 199590 - DNA, 22 bp, Artificial Sequence
  Synthetic oligonucleotide; CTG chr2 60488723 60488744 60488740 60488745 +
ctacccaaaacgattttgtttg

SEQ ID NO: 199591 - DNA, 22 bp, Artificial Sequence
  Synthetic oligonucleotide; CTA chr2 60488726 60488747 60488743 60488748 +
cccaaaacgattttgtttgttt

SEQ ID NO: 199592 - DNA, 22 bp, Artificial Sequence
  Synthetic oligonucleotide; TTT chr2 60488739 60488760 60488756 60488761 +
tgtttgtttgtttgtttgtttg

SEQ ID NO: 199593 - DNA, 22 bp, Artificial Sequence
  Synthetic oligonucleotide; TTT chr2 60488740 60488761 60488757 60488762 +
gtttgtttgtttgtttgtttgt

SEQ ID NO: 199594 - DNA, 22 bp, Artificial Sequence
  Synthetic oligonucleotide; TTG chr2 60488741 60488762 60488758 60488763 +
tttgtttgtttgtttgtttgtt

SEQ ID NO: 199595 - DNA, 22 bp, Artificial Sequence
  Synthetic oligonucleotide; TTT chr2 60488744 60488765 60488761 60488766 +
gtttgtttgtttgtttgtttgt

SEQ ID NO: 199596 - DNA, 22 bp, Artificial Sequence
  Synthetic oligonucleotide; TTG chr2 60488745 60488766 60488762 60488767 +
tttgtttgtttgtttgtttgtt

SEQ ID NO: 199597 - DNA, 22 bp, Artificial Sequence
  Synthetic oligonucleotide; TTT chr2 60488748 60488769 60488765 60488770 +
gtttgtttgtttgtttgttttt

SEQ ID NO: 199598 - DNA, 22 bp, Artificial Sequence
  Synthetic oligonucleotide; TTG chr2 60488749 60488770 60488766 60488771 +
tttgtttgtttgtttgtttttt

SEQ ID NO: 199599 - DNA, 22 bp, Artificial Sequence
  Synthetic oligonucleotide; TTT chr2 60488752 60488773 60488769 60488774 +
gtttgtttgtttgttttttgtt

SEQ ID NO: 199600 - DNA, 22 bp, Artificial Sequence
  Synthetic oligonucleotide; TTG chr2 60488753 60488774 60488770 60488775 +
tttgtttgtttgttttttgttt

SEQ ID NO: 199601 - DNA, 22 bp, Artificial Sequence
  Synthetic oligonucleotide; TTT chr2 60488756 60488777 60488773 60488778 +
gtttgtttgttttttgtttctg

SEQ ID NO: 199602 - DNA, 22 bp, Artificial Sequence
  Synthetic oligonucleotide; TTG chr2 60488757 60488778 60488774 60488779 +
tttgtttgttttttgtttctga

SEQ ID NO: 199603 - DNA, 22 bp, Artificial Sequence
  Synthetic oligonucleotide; TTT chr2 60488760 60488781 60488777 60488782 +
gtttgttttttgtttctgaggt

SEQ ID NO: 199604 - DNA, 22 bp, Artificial Sequence
  Synthetic oligonucleotide; TTG chr2 60488761 60488782 60488778 60488783 +
tttgttttttgtttctgaggtg

SEQ ID NO: 199605 - DNA, 22 bp, Artificial Sequence
  Synthetic oligonucleotide; TTT chr2 60488764 60488785 60488781 60488786 +
gttttttgtttctgaggtggag

SEQ ID NO: 199606 - DNA, 22 bp, Artificial Sequence
  Synthetic oligonucleotide; TTG chr2 60488765 60488786 60488782 60488787 +
ttttttgtttctgaggtggagt

SEQ ID NO: 199607 - DNA, 22 bp, Artificial Sequence
  Synthetic oligonucleotide; TTT chr2 60488768 60488789 60488785 60488790 +
tttgtttctgaggtggagtttc

SEQ ID NO: 199608 - DNA, 22 bp, Artificial Sequence
  Synthetic oligonucleotide; TTT chr2 60488769 60488790 60488786 60488791 +
ttgtttctgaggtggagtttcg

SEQ ID NO: 199609 - DNA, 22 bp, Artificial Sequence
  Synthetic oligonucleotide; TTT chr2 60488770 60488791 60488787 60488792 +
tgtttctgaggtggagtttcgc

SEQ ID NO: 199610 - DNA, 22 bp, Artificial Sequence
  Synthetic oligonucleotide; TTT chr2 60488771 60488792 60488788 60488793 +
gtttctgaggtggagtttcgct

SEQ ID NO: 199611 - DNA, 22 bp, Artificial Sequence
  Synthetic oligonucleotide; TTG chr2 60488772 60488793 60488789 60488794 +
tttctgaggtggagtttcgctc

SEQ ID NO: 199612 - DNA, 22 bp, Artificial Sequence
  Synthetic oligonucleotide; TTT chr2 60488775 60488796 60488792 60488797 +
ctgaggtggagtttcgctcttg

SEQ ID NO: 199613 - DNA, 22 bp, Artificial Sequence
  Synthetic oligonucleotide; TTC chr2 60488776 60488797 60488793 60488798 +
tgaggtggagtttcgctcttgt

SEQ ID NO: 199614 - DNA, 22 bp, Artificial Sequence
  Synthetic oligonucleotide; CTG chr2 60488778 60488799 60488795 60488800 +
aggtggagtttcgctcttgttg

SEQ ID NO: 199615 - DNA, 22 bp, Artificial Sequence
  Synthetic oligonucleotide; TTT chr2 60488789 60488810 60488806 60488811 +
cgctcttgttgcccgggctgga

SEQ ID NO: 199616 - DNA, 22 bp, Artificial Sequence
  Synthetic oligonucleotide; TTC chr2 60488790 60488811 60488807 60488812 +
gctcttgttgcccgggctggag

SEQ ID NO: 199617 - DNA, 22 bp, Artificial Sequence
  Synthetic oligonucleotide; CTC chr2 60488794 60488815 60488811 60488816 +
ttgttgcccgggctggagtgca

SEQ ID NO: 199618 - DNA, 22 bp, Artificial Sequence
  Synthetic oligonucleotide; CTT chr2 60488796 60488817 60488813 60488818 +
gttgcccgggctggagtgcaat

SEQ ID NO: 199619 - DNA, 22 bp, Artificial Sequence
  Synthetic oligonucleotide; TTG chr2 60488797 60488818 60488814 60488819 +
ttgcccgggctggagtgcaatg

SEQ ID NO: 199620 - DNA, 22 bp, Artificial Sequence
  Synthetic oligonucleotide; TTG chr2 60488800 60488821 60488817 60488822 +
cccgggctggagtgcaatggcg

SEQ ID NO: 199621 - DNA, 22 bp, Artificial Sequence
  Synthetic oligonucleotide; CTG chr2 60488809 60488830 60488826 60488831 +
gagtgcaatggcgcaatctcgg

SEQ ID NO: 199622 - DNA, 22 bp, Artificial Sequence
  Synthetic oligonucleotide; CTC chr2 60488829 60488850 60488846 60488851 +
ggctcaccgcaatctccgcctc

SEQ ID NO: 199623 - DNA, 22 bp, Artificial Sequence
  Synthetic oligonucleotide; CTC chr2 60488834 60488855 60488851 60488856 +
accgcaatctccgcctcccggg

SEQ ID NO: 199624 - DNA, 22 bp, Artificial Sequence
  Synthetic oligonucleotide; CTC chr2 60488845 60488866 60488862 60488867 +
cgcctcccgggttcaagcgatt

SEQ ID NO: 199625 - DNA, 22 bp, Artificial Sequence
  Synthetic oligonucleotide; CTC chr2 60488851 60488872 60488868 60488873 +
ccgggttcaagcgattctcctg

SEQ ID NO: 199626 - DNA, 22 bp, Artificial Sequence
  Synthetic oligonucleotide; TTC chr2 60488859 60488880 60488876 60488881 +
aagcgattctcctgcctcagcc

SEQ ID NO: 199627 - DNA, 22 bp, Artificial Sequence
  Synthetic oligonucleotide; TTC chr2 60488868 60488889 60488885 60488890 +
tcctgcctcagcctcccaagta

SEQ ID NO: 199628 - DNA, 22 bp, Artificial Sequence
  Synthetic oligonucleotide; CTC chr2 60488870 60488891 60488887 60488892 +
ctgcctcagcctcccaagtagc

SEQ ID NO: 199629 - DNA, 22 bp, Artificial Sequence
  Synthetic oligonucleotide; CTG chr2 60488873 60488894 60488890 60488895 +
cctcagcctcccaagtagctgg

SEQ ID NO: 199630 - DNA, 22 bp, Artificial Sequence
  Synthetic oligonucleotide; CTC chr2 60488877 60488898 60488894 60488899 +
agcctcccaagtagctgggatt

SEQ ID NO: 199631 - DNA, 22 bp, Artificial Sequence
  Synthetic oligonucleotide; CTC chr2 60488883 60488904 60488900 60488905 +
ccaagtagctgggattataggc

SEQ ID NO: 199632 - DNA, 22 bp, Artificial Sequence
  Synthetic oligonucleotide; CTG chr2 60488894 60488915 60488911 60488916 +
ggattataggcatgcgccacca

SEQ ID NO: 199633 - DNA, 22 bp, Artificial Sequence
  Synthetic oligonucleotide; TTA chr2 60488900 60488921 60488917 60488922 +
taggcatgcgccaccacacgcg

SEQ ID NO: 199634 - DNA, 22 bp, Artificial Sequence
  Synthetic oligonucleotide; CTA chr2 60488926 60488947 60488943 60488948 +
atttctgtatttttggtagaga

SEQ ID NO: 199635 - DNA, 22 bp, Artificial Sequence
  Synthetic oligonucleotide; TTT chr2 60488930 60488951 60488947 60488952 +
ctgtatttttggtagagacggg

SEQ ID NO: 199636 - DNA, 22 bp, Artificial Sequence
  Synthetic oligonucleotide; TTC chr2 60488931 60488952 60488948 60488953 +
tgtatttttggtagagacgggg

SEQ ID NO: 199637 - DNA, 22 bp, Artificial Sequence
  Synthetic oligonucleotide; CTG chr2 60488933 60488954 60488950 60488955 +
tatttttggtagagacggggtt

SEQ ID NO: 199638 - DNA, 22 bp, Artificial Sequence
  Synthetic oligonucleotide; TTT chr2 60488938 60488959 60488955 60488960 +
ttggtagagacggggtttctcc

SEQ ID NO: 199639 - DNA, 22 bp, Artificial Sequence
  Synthetic oligonucleotide; TTT chr2 60488939 60488960 60488956 60488961 +
tggtagagacggggtttctcca

SEQ ID NO: 199640 - DNA, 22 bp, Artificial Sequence
  Synthetic oligonucleotide; TTT chr2 60488940 60488961 60488957 60488962 +
ggtagagacggggtttctccat

SEQ ID NO: 199641 - DNA, 22 bp, Artificial Sequence
  Synthetic oligonucleotide; TTG chr2 60488941 60488962 60488958 60488963 +
gtagagacggggtttctccatg

SEQ ID NO: 199642 - DNA, 22 bp, Artificial Sequence
  Synthetic oligonucleotide; TTT chr2 60488956 60488977 60488973 60488978 +
ctccatgttggtcaggctggtc

SEQ ID NO: 199643 - DNA, 22 bp, Artificial Sequence
  Synthetic oligonucleotide; TTC chr2 60488957 60488978 60488974 60488979 +
tccatgttggtcaggctggtct

SEQ ID NO: 199644 - DNA, 22 bp, Artificial Sequence
  Synthetic oligonucleotide; CTC chr2 60488959 60488980 60488976 60488981 +
catgttggtcaggctggtctca

SEQ ID NO: 199645 - DNA, 22 bp, Artificial Sequence
  Synthetic oligonucleotide; TTG chr2 60488966 60488987 60488983 60488988 +
gtcaggctggtctcaaactccc

SEQ ID NO: 199646 - DNA, 22 bp, Artificial Sequence
  Synthetic oligonucleotide; CTG chr2 60488975 60488996 60488992 60488997 +
gtctcaaactcccgaccttagg

SEQ ID NO: 199647 - DNA, 22 bp, Artificial Sequence
  Synthetic oligonucleotide; CTC chr2 60488980 60489001 60488997 60489002 +
aaactcccgaccttaggtgatc

SEQ ID NO: 199648 - DNA, 22 bp, Artificial Sequence
  Synthetic oligonucleotide; CTC chr2 60488986 60489007 60489003 60489008 +
ccgaccttaggtgatccaccca

SEQ ID NO: 199649 - DNA, 22 bp, Artificial Sequence
  Synthetic oligonucleotide; CTT chr2 60488994 60489015 60489011 60489016 +
aggtgatccacccacctcagcc

SEQ ID NO: 199650 - DNA, 22 bp, Artificial Sequence
  Synthetic oligonucleotide; TTA chr2 60488995 60489016 60489012 60489017 +
ggtgatccacccacctcagcct

SEQ ID NO: 199651 - DNA, 22 bp, Artificial Sequence
  Synthetic oligonucleotide; CTC chr2 60489012 60489033 60489029 60489034 +
agcctcccaaagtgctgggatt

SEQ ID NO: 199652 - DNA, 22 bp, Artificial Sequence
  Synthetic oligonucleotide; CTC chr2 60489018 60489039 60489035 60489040 +
ccaaagtgctgggattataggc

SEQ ID NO: 199653 - DNA, 22 bp, Artificial Sequence
  Synthetic oligonucleotide; CTG chr2 60489029 60489050 60489046 60489051 +
ggattataggcataagctacca

SEQ ID NO: 199654 - DNA, 22 bp, Artificial Sequence
  Synthetic oligonucleotide; TTA chr2 60489035 60489056 60489052 60489057 +
taggcataagctaccacaccca

SEQ ID NO: 199655 - DNA, 22 bp, Artificial Sequence
  Synthetic oligonucleotide; CTA chr2 60489048 60489069 60489065 60489070 +
ccacacccagccatacccaaaa

SEQ ID NO: 199656 - DNA, 22 bp, Artificial Sequence
  Synthetic oligonucleotide; TTT chr2 60489077 60489098 60489094 60489099 +
atcttcaaagaaaaaaaatgct

SEQ ID NO: 199657 - DNA, 22 bp, Artificial Sequence
  Synthetic oligonucleotide; TTA chr2 60489078 60489099 60489095 60489100 +
tcttcaaagaaaaaaaatgctg

SEQ ID NO: 199658 - DNA, 22 bp, Artificial Sequence
  Synthetic oligonucleotide; CTT chr2 60489082 60489103 60489099 60489104 +
caaagaaaaaaaatgctgtgtg

SEQ ID NO: 199659 - DNA, 22 bp, Artificial Sequence
  Synthetic oligonucleotide; TTC chr2 60489083 60489104 60489100 60489105 +
aaagaaaaaaaatgctgtgtgt

SEQ ID NO: 199660 - DNA, 22 bp, Artificial Sequence
  Synthetic oligonucleotide; CTG chr2 60489100 60489121 60489117 60489122 +
tgtgtcctaaataataggtggt

SEQ ID NO: 199661 - DNA, 22 bp, Artificial Sequence
  Synthetic oligonucleotide; CTA chr2 60489109 60489130 60489126 60489131 +
aataataggtggtcaaaatgtt

SEQ ID NO: 199662 - DNA, 22 bp, Artificial Sequence
  Synthetic oligonucleotide; TTT chr2 60489132 60489153 60489149 60489154 +
ctaaagggtaccttagacccca

SEQ ID NO: 199663 - DNA, 22 bp, Artificial Sequence
  Synthetic oligonucleotide; TTC chr2 60489133 60489154 60489150 60489155 +
taaagggtaccttagaccccaa

SEQ ID NO: 199664 - DNA, 22 bp, Artificial Sequence
  Synthetic oligonucleotide; CTA chr2 60489135 60489156 60489152 60489157 +
aagggtaccttagaccccaatt

SEQ ID NO: 199665 - DNA, 22 bp, Artificial Sequence
  Synthetic oligonucleotide; CTT chr2 60489146 60489167 60489163 60489168 +
agaccccaattaaactgttgct

SEQ ID NO: 199666 - DNA, 22 bp, Artificial Sequence
  Synthetic oligonucleotide; TTA chr2 60489147 60489168 60489164 60489169 +
gaccccaattaaactgttgctt

SEQ ID NO: 199667 - DNA, 22 bp, Artificial Sequence
  Synthetic oligonucleotide; TTA chr2 60489158 60489179 60489175 60489180 +
aactgttgctttagagtttggg

SEQ ID NO: 199668 - DNA, 22 bp, Artificial Sequence
  Synthetic oligonucleotide; CTG chr2 60489163 60489184 60489180 60489185 +
ttgctttagagtttggggaaaa

SEQ ID NO: 199669 - DNA, 22 bp, Artificial Sequence
  Synthetic oligonucleotide; TTG chr2 60489166 60489187 60489183 60489188 +
ctttagagtttggggaaaataa

SEQ ID NO: 199670 - DNA, 22 bp, Artificial Sequence
  Synthetic oligonucleotide; CTT chr2 60489169 60489190 60489186 60489191 +
tagagtttggggaaaataaagt

SEQ ID NO: 199671 - DNA, 22 bp, Artificial Sequence
  Synthetic oligonucleotide; TTT chr2 60489170 60489191 60489187 60489192 +
agagtttggggaaaataaagtg

SEQ ID NO: 199672 - DNA, 22 bp, Artificial Sequence
  Synthetic oligonucleotide; TTA chr2 60489171 60489192 60489188 60489193 +
gagtttggggaaaataaagtgg

SEQ ID NO: 199673 - DNA, 22 bp, Artificial Sequence
  Synthetic oligonucleotide; TTT chr2 60489177 60489198 60489194 60489199 +
ggggaaaataaagtggaaacac

SEQ ID NO: 199674 - DNA, 22 bp, Artificial Sequence
  Synthetic oligonucleotide; TTG chr2 60489178 60489199 60489195 60489200 +
gggaaaataaagtggaaacacc

SEQ ID NO: 199675 - DNA, 22 bp, Artificial Sequence
  Synthetic oligonucleotide; CTA chr2 60489202 60489223 60489219 60489224 +
actaaattcacactgtgagagc

SEQ ID NO: 199676 - DNA, 22 bp, Artificial Sequence
  Synthetic oligonucleotide; CTA chr2 60489206 60489227 60489223 60489228 +
aattcacactgtgagagccagt

SEQ ID NO: 199677 - DNA, 22 bp, Artificial Sequence
  Synthetic oligonucleotide; TTC chr2 60489211 60489232 60489228 60489233 +
acactgtgagagccagtcaaca

SEQ ID NO: 199678 - DNA, 22 bp, Artificial Sequence
  Synthetic oligonucleotide; CTG chr2 60489217 60489238 60489234 60489239 +
tgagagccagtcaacactagcc

SEQ ID NO: 199679 - DNA, 22 bp, Artificial Sequence
  Synthetic oligonucleotide; CTA chr2 60489236 60489257 60489253 60489258 +
gcccacatgccaatggggtcct

SEQ ID NO: 199680 - DNA, 22 bp, Artificial Sequence
  Synthetic oligonucleotide; CTT chr2 60489259 60489280 60489276 60489281 +
gtcagtcacttacactatttct

SEQ ID NO: 199681 - DNA, 22 bp, Artificial Sequence
  Synthetic oligonucleotide; TTG chr2 60489260 60489281 60489277 60489282 +
tcagtcacttacactatttctc

SEQ ID NO: 199682 - DNA, 22 bp, Artificial Sequence
  Synthetic oligonucleotide; CTT chr2 60489270 60489291 60489287 60489292 +
acactatttctcattccatttc

SEQ ID NO: 199683 - DNA, 22 bp, Artificial Sequence
  Synthetic oligonucleotide; TTA chr2 60489271 60489292 60489288 60489293 +
cactatttctcattccatttct

SEQ ID NO: 199684 - DNA, 22 bp, Artificial Sequence
  Synthetic oligonucleotide; CTA chr2 60489276 60489297 60489293 60489298 +
tttctcattccatttcttttat

SEQ ID NO: 199685 - DNA, 22 bp, Artificial Sequence
  Synthetic oligonucleotide; TTT chr2 60489279 60489300 60489296 60489301 +
ctcattccatttcttttatgtc

SEQ ID NO: 199686 - DNA, 22 bp, Artificial Sequence
  Synthetic oligonucleotide; TTC chr2 60489280 60489301 60489297 60489302 +
tcattccatttcttttatgtca

SEQ ID NO: 199687 - DNA, 22 bp, Artificial Sequence
  Synthetic oligonucleotide; CTC chr2 60489282 60489303 60489299 60489304 +
attccatttcttttatgtcatt

SEQ ID NO: 199688 - DNA, 22 bp, Artificial Sequence
  Synthetic oligonucleotide; TTC chr2 60489286 60489307 60489303 60489308 +
catttcttttatgtcattttgc

SEQ ID NO: 199689 - DNA, 22 bp, Artificial Sequence
  Synthetic oligonucleotide; TTT chr2 60489291 60489312 60489308 60489313 +
cttttatgtcattttgcccaca

SEQ ID NO: 199690 - DNA, 22 bp, Artificial Sequence
  Synthetic oligonucleotide; TTC chr2 60489292 60489313 60489309 60489314 +
ttttatgtcattttgcccacaa

SEQ ID NO: 199691 - DNA, 22 bp, Artificial Sequence
  Synthetic oligonucleotide; CTT chr2 60489294 60489315 60489311 60489316 +
ttatgtcattttgcccacaaca

SEQ ID NO: 199692 - DNA, 22 bp, Artificial Sequence
  Synthetic oligonucleotide; TTT chr2 60489295 60489316 60489312 60489317 +
tatgtcattttgcccacaacat

SEQ ID NO: 199693 - DNA, 22 bp, Artificial Sequence
  Synthetic oligonucleotide; TTT chr2 60489296 60489317 60489313 60489318 +
atgtcattttgcccacaacata

SEQ ID NO: 199694 - DNA, 22 bp, Artificial Sequence
  Synthetic oligonucleotide; TTA chr2 60489297 60489318 60489314 60489319 +
tgtcattttgcccacaacatat

SEQ ID NO: 199695 - DNA, 22 bp, Artificial Sequence
  Synthetic oligonucleotide; TTT chr2 60489305 60489326 60489322 60489327 +
tgcccacaacatatccaaattc

SEQ ID NO: 199696 - DNA, 22 bp, Artificial Sequence
  Synthetic oligonucleotide; TTT chr2 60489306 60489327 60489323 60489328 +
gcccacaacatatccaaattca

SEQ ID NO: 199697 - DNA, 22 bp, Artificial Sequence
  Synthetic oligonucleotide; TTG chr2 60489307 60489328 60489324 60489329 +
cccacaacatatccaaattcat

SEQ ID NO: 199698 - DNA, 22 bp, Artificial Sequence
  Synthetic oligonucleotide; TTC chr2 60489327 60489348 60489344 60489349 +
atacaatagaggcatttggaac

SEQ ID NO: 199699 - DNA, 22 bp, Artificial Sequence
  Synthetic oligonucleotide; TTT chr2 60489344 60489365 60489361 60489366 +
ggaacccagtgctactctgctt

SEQ ID NO: 199700 - DNA, 22 bp, Artificial Sequence
  Synthetic oligonucleotide; TTG chr2 60489345 60489366 60489362 60489367 +
gaacccagtgctactctgcttc

SEQ ID NO: 199701 - DNA, 22 bp, Artificial Sequence
  Synthetic oligonucleotide; CTA chr2 60489358 60489379 60489375 60489380 +
ctctgcttcctaactaatttct

SEQ ID NO: 199702 - DNA, 22 bp, Artificial Sequence
  Synthetic oligonucleotide; CTC chr2 60489361 60489382 60489378 60489383 +
tgcttcctaactaatttctgcc

SEQ ID NO: 199703 - DNA, 22 bp, Artificial Sequence
  Synthetic oligonucleotide; CTG chr2 60489363 60489384 60489380 60489385 +
cttcctaactaatttctgccgc

SEQ ID NO: 199704 - DNA, 22 bp, Artificial Sequence
  Synthetic oligonucleotide; CTT chr2 60489366 60489387 60489383 60489388 +
cctaactaatttctgccgctgg

SEQ ID NO: 199705 - DNA, 22 bp, Artificial Sequence
  Synthetic oligonucleotide; TTC chr2 60489367 60489388 60489384 60489389 +
ctaactaatttctgccgctgga

SEQ ID NO: 199706 - DNA, 22 bp, Artificial Sequence
  Synthetic oligonucleotide; CTA chr2 60489370 60489391 60489387 60489392 +
actaatttctgccgctggaagt

SEQ ID NO: 199707 - DNA, 22 bp, Artificial Sequence
  Synthetic oligonucleotide; CTA chr2 60489374 60489395 60489391 60489396 +
atttctgccgctggaagtttgt

SEQ ID NO: 199708 - DNA, 22 bp, Artificial Sequence
  Synthetic oligonucleotide; TTT chr2 60489378 60489399 60489395 60489400 +
ctgccgctggaagtttgttcct

SEQ ID NO: 199709 - DNA, 22 bp, Artificial Sequence
  Synthetic oligonucleotide; TTC chr2 60489379 60489400 60489396 60489401 +
tgccgctggaagtttgttccta

SEQ ID NO: 199710 - DNA, 22 bp, Artificial Sequence
  Synthetic oligonucleotide; CTG chr2 60489381 60489402 60489398 60489403 +
ccgctggaagtttgttcctaaa

SEQ ID NO: 199711 - DNA, 22 bp, Artificial Sequence
  Synthetic oligonucleotide; CTG chr2 60489387 60489408 60489404 60489409 +
gaagtttgttcctaaagccacc

SEQ ID NO: 199712 - DNA, 22 bp, Artificial Sequence
  Synthetic oligonucleotide; TTT chr2 60489394 60489415 60489411 60489416 +
gttcctaaagccaccaagtctc

SEQ ID NO: 199713 - DNA, 22 bp, Artificial Sequence
  Synthetic oligonucleotide; TTG chr2 60489395 60489416 60489412 60489417 +
ttcctaaagccaccaagtctcc

SEQ ID NO: 199714 - DNA, 22 bp, Artificial Sequence
  Synthetic oligonucleotide; TTC chr2 60489398 60489419 60489415 60489420 +
ctaaagccaccaagtctcctag

SEQ ID NO: 199715 - DNA, 22 bp, Artificial Sequence
  Synthetic oligonucleotide; CTA chr2 60489401 60489422 60489418 60489423 +
aagccaccaagtctcctagaag

SEQ ID NO: 199716 - DNA, 22 bp, Artificial Sequence
  Synthetic oligonucleotide; CTC chr2 60489416 60489437 60489433 60489438 +
ctagaagcccttatttcttggc

SEQ ID NO: 199717 - DNA, 22 bp, Artificial Sequence
  Synthetic oligonucleotide; CTA chr2 60489419 60489440 60489436 60489441 +
gaagcccttatttcttggcagt

SEQ ID NO: 199718 - DNA, 22 bp, Artificial Sequence
  Synthetic oligonucleotide; CTT chr2 60489428 60489449 60489445 60489450 +
atttcttggcagtaaacacacg

SEQ ID NO: 199719 - DNA, 22 bp, Artificial Sequence
  Synthetic oligonucleotide; TTA chr2 60489429 60489450 60489446 60489451 +
tttcttggcagtaaacacacgg

SEQ ID NO: 199720 - DNA, 22 bp, Artificial Sequence
  Synthetic oligonucleotide; TTT chr2 60489432 60489453 60489449 60489454 +
cttggcagtaaacacacggcgg

SEQ ID NO: 199721 - DNA, 22 bp, Artificial Sequence
  Synthetic oligonucleotide; TTC chr2 60489433 60489454 60489450 60489455 +
ttggcagtaaacacacggcggc

SEQ ID NO: 199722 - DNA, 22 bp, Artificial Sequence
  Synthetic oligonucleotide; CTT chr2 60489435 60489456 60489452 60489457 +
ggcagtaaacacacggcggccc

SEQ ID NO: 199723 - DNA, 22 bp, Artificial Sequence
  Synthetic oligonucleotide; TTG chr2 60489436 60489457 60489453 60489458 +
gcagtaaacacacggcggccct

SEQ ID NO: 199724 - DNA, 22 bp, Artificial Sequence
  Synthetic oligonucleotide; CTG chr2 60489459 60489480 60489476 60489481 +
cgtgccattaaaatagctgcct

SEQ ID NO: 199725 - DNA, 22 bp, Artificial Sequence
  Synthetic oligonucleotide; TTA chr2 60489469 60489490 60489486 60489491 +
aaatagctgcctcatcatccag

SEQ ID NO: 199726 - DNA, 22 bp, Artificial Sequence
  Synthetic oligonucleotide; CTG chr2 60489478 60489499 60489495 60489500 +
cctcatcatccaggatgacaaa

SEQ ID NO: 199727 - DNA, 22 bp, Artificial Sequence
  Synthetic oligonucleotide; CTC chr2 60489482 60489503 60489499 60489504 +
atcatccaggatgacaaacagc

SEQ ID NO: 199728 - DNA, 22 bp, Artificial Sequence
  Synthetic oligonucleotide; CTG chr2 60489511 60489532 60489528 60489533 +
tgtgccaagtgaccagccacaa

SEQ ID NO: 199729 - DNA, 22 bp, Artificial Sequence
  Synthetic oligonucleotide; CTT chr2 60489543 60489564 60489560 60489565 +
gtttgaccagcacctatctcaa

SEQ ID NO: 199730 - DNA, 22 bp, Artificial Sequence
  Synthetic oligonucleotide; TTG chr2 60489544 60489565 60489561 60489566 +
tttgaccagcacctatctcaaa

SEQ ID NO: 199731 - DNA, 22 bp, Artificial Sequence
  Synthetic oligonucleotide; TTT chr2 60489547 60489568 60489564 60489569 +
gaccagcacctatctcaaaaga

SEQ ID NO: 199732 - DNA, 22 bp, Artificial Sequence
  Synthetic oligonucleotide; TTG chr2 60489548 60489569 60489565 60489570 +
accagcacctatctcaaaagaa

SEQ ID NO: 199733 - DNA, 22 bp, Artificial Sequence
  Synthetic oligonucleotide; CTA chr2 60489559 60489580 60489576 60489581 +
tctcaaaagaaaattctgagta

SEQ ID NO: 199734 - DNA, 22 bp, Artificial Sequence
  Synthetic oligonucleotide; CTC chr2 60489563 60489584 60489580 60489585 +
aaaagaaaattctgagtagaag

SEQ ID NO: 199735 - DNA, 22 bp, Artificial Sequence
  Synthetic oligonucleotide; TTC chr2 60489575 60489596 60489592 60489597 +
tgagtagaagaggaagcacctg

SEQ ID NO: 199736 - DNA, 22 bp, Artificial Sequence
  Synthetic oligonucleotide; CTG chr2 60489577 60489598 60489594 60489599 +
agtagaagaggaagcacctgaa

SEQ ID NO: 199737 - DNA, 22 bp, Artificial Sequence
  Synthetic oligonucleotide; CTG chr2 60489597 60489618 60489614 60489619 +
aaggaagctgaaaagaaagtct

SEQ ID NO: 199738 - DNA, 22 bp, Artificial Sequence
  Synthetic oligonucleotide; CTG chr2 60489607 60489628 60489624 60489629 +
aaaagaaagtctgacatttgaa

SEQ ID NO: 199739 - DNA, 22 bp, Artificial Sequence
  Synthetic oligonucleotide; CTG chr2 60489620 60489641 60489637 60489642 +
acatttgaaattctaacagagg

SEQ ID NO: 199740 - DNA, 22 bp, Artificial Sequence
  Synthetic oligonucleotide; TTT chr2 60489626 60489647 60489643 60489648 +
gaaattctaacagaggttcttt

SEQ ID NO: 199741 - DNA, 22 bp, Artificial Sequence
  Synthetic oligonucleotide; TTG chr2 60489627 60489648 60489644 60489649 +
aaattctaacagaggttctttc

SEQ ID NO: 199742 - DNA, 22 bp, Artificial Sequence
  Synthetic oligonucleotide; TTC chr2 60489633 60489654 60489650 60489655 +
taacagaggttctttcccctct

SEQ ID NO: 199743 - DNA, 22 bp, Artificial Sequence
  Synthetic oligonucleotide; CTA chr2 60489635 60489656 60489652 60489657 +
acagaggttctttcccctctag

SEQ ID NO: 199744 - DNA, 22 bp, Artificial Sequence
  Synthetic oligonucleotide; TTC chr2 60489645 60489666 60489662 60489667 +
tttcccctctaggacactctgg

SEQ ID NO: 199745 - DNA, 22 bp, Artificial Sequence
  Synthetic oligonucleotide; CTT chr2 60489647 60489668 60489664 60489669 +
tcccctctaggacactctgggt

SEQ ID NO: 199746 - DNA, 22 bp, Artificial Sequence
  Synthetic oligonucleotide; TTT chr2 60489648 60489669 60489665 60489670 +
cccctctaggacactctgggtc

SEQ ID NO: 199747 - DNA, 22 bp, Artificial Sequence
  Synthetic oligonucleotide; TTC chr2 60489649 60489670 60489666 60489671 +
ccctctaggacactctgggtca

SEQ ID NO: 199748 - DNA, 22 bp, Artificial Sequence
  Synthetic oligonucleotide; CTC chr2 60489654 60489675 60489671 60489676 +
taggacactctgggtcactagc

SEQ ID NO: 199749 - DNA, 22 bp, Artificial Sequence
  Synthetic oligonucleotide; CTA chr2 60489656 60489677 60489673 60489678 +
ggacactctgggtcactagcat

SEQ ID NO: 199750 - DNA, 22 bp, Artificial Sequence
  Synthetic oligonucleotide; CTC chr2 60489664 60489685 60489681 60489686 +
tgggtcactagcatctctgctt

SEQ ID NO: 199751 - DNA, 22 bp, Artificial Sequence
  Synthetic oligonucleotide; CTG chr2 60489666 60489687 60489683 60489688 +
ggtcactagcatctctgctttc

SEQ ID NO: 199752 - DNA, 22 bp, Artificial Sequence
  Synthetic oligonucleotide; CTA chr2 60489674 60489695 60489691 60489696 +
gcatctctgctttccttgttcc

SEQ ID NO: 199753 - DNA, 22 bp, Artificial Sequence
  Synthetic oligonucleotide; CTC chr2 60489681 60489702 60489698 60489703 +
tgctttccttgttccctggctc

SEQ ID NO: 199754 - DNA, 22 bp, Artificial Sequence
  Synthetic oligonucleotide; CTG chr2 60489683 60489704 60489700 60489705 +
ctttccttgttccctggctcat

SEQ ID NO: 199755 - DNA, 22 bp, Artificial Sequence
  Synthetic oligonucleotide; CTT chr2 60489686 60489707 60489703 60489708 +
tccttgttccctggctcatctc

SEQ ID NO: 199756 - DNA, 22 bp, Artificial Sequence
  Synthetic oligonucleotide; TTT chr2 60489687 60489708 60489704 60489709 +
ccttgttccctggctcatctcc

SEQ ID NO: 199757 - DNA, 22 bp, Artificial Sequence
  Synthetic oligonucleotide; TTC chr2 60489688 60489709 60489705 60489710 +
cttgttccctggctcatctcct

SEQ ID NO: 199758 - DNA, 22 bp, Artificial Sequence
  Synthetic oligonucleotide; CTT chr2 60489691 60489712 60489708 60489713 +
gttccctggctcatctcctgag

SEQ ID NO: 199759 - DNA, 22 bp, Artificial Sequence
  Synthetic oligonucleotide; TTG chr2 60489692 60489713 60489709 60489714 +
ttccctggctcatctcctgagc

SEQ ID NO: 199760 - DNA, 22 bp, Artificial Sequence
  Synthetic oligonucleotide; TTC chr2 60489695 60489716 60489712 60489717 +
cctggctcatctcctgagcccc

SEQ ID NO: 199761 - DNA, 22 bp, Artificial Sequence
  Synthetic oligonucleotide; CTG chr2 60489699 60489720 60489716 60489721 +
gctcatctcctgagcccccggg

SEQ ID NO: 199762 - DNA, 22 bp, Artificial Sequence
  Synthetic oligonucleotide; CTC chr2 60489703 60489724 60489720 60489725 +
atctcctgagcccccgggccgt

SEQ ID NO: 199763 - DNA, 22 bp, Artificial Sequence
  Synthetic oligonucleotide; CTC chr2 60489708 60489729 60489725 60489730 +
ctgagcccccgggccgttctcc

SEQ ID NO: 199764 - DNA, 22 bp, Artificial Sequence
  Synthetic oligonucleotide; CTG chr2 60489711 60489732 60489728 60489733 +
agcccccgggccgttctccttt

SEQ ID NO: 199765 - DNA, 22 bp, Artificial Sequence
  Synthetic oligonucleotide; TTC chr2 60489727 60489748 60489744 60489749 +
tcctttccaactgtctatttac

SEQ ID NO: 199766 - DNA, 22 bp, Artificial Sequence
  Synthetic oligonucleotide; CTC chr2 60489729 60489750 60489746 60489751 +
ctttccaactgtctatttacta

SEQ ID NO: 199767 - DNA, 22 bp, Artificial Sequence
  Synthetic oligonucleotide; CTT chr2 60489732 60489753 60489749 60489754 +
tccaactgtctatttactaacc

SEQ ID NO: 199768 - DNA, 22 bp, Artificial Sequence
  Synthetic oligonucleotide; TTT chr2 60489733 60489754 60489750 60489755 +
ccaactgtctatttactaacca

SEQ ID NO: 199769 - DNA, 22 bp, Artificial Sequence
  Synthetic oligonucleotide; TTC chr2 60489734 60489755 60489751 60489756 +
caactgtctatttactaaccac

SEQ ID NO: 199770 - DNA, 22 bp, Artificial Sequence
  Synthetic oligonucleotide; CTG chr2 60489740 60489761 60489757 60489762 +
tctatttactaaccacttttat

SEQ ID NO: 199771 - DNA, 22 bp, Artificial Sequence
  Synthetic oligonucleotide; CTA chr2 60489744 60489765 60489761 60489766 +
tttactaaccacttttatcagc

SEQ ID NO: 199772 - DNA, 22 bp, Artificial Sequence
  Synthetic oligonucleotide; TTT chr2 60489747 60489768 60489764 60489769 +
actaaccacttttatcagcccc

SEQ ID NO: 199773 - DNA, 22 bp, Artificial Sequence
  Synthetic oligonucleotide; TTA chr2 60489748 60489769 60489765 60489770 +
ctaaccacttttatcagccccc

SEQ ID NO: 199774 - DNA, 22 bp, Artificial Sequence
  Synthetic oligonucleotide; CTA chr2 60489751 60489772 60489768 60489773 +
accacttttatcagcccccctc

SEQ ID NO: 199775 - DNA, 22 bp, Artificial Sequence
  Synthetic oligonucleotide; CTT chr2 60489758 60489779 60489775 60489780 +
ttatcagcccccctctcacccc

SEQ ID NO: 199776 - DNA, 22 bp, Artificial Sequence
  Synthetic oligonucleotide; TTT chr2 60489759 60489780 60489776 60489781 +
tatcagcccccctctcacccca

SEQ ID NO: 199777 - DNA, 22 bp, Artificial Sequence
  Synthetic oligonucleotide; TTT chr2 60489760 60489781 60489777 60489782 +
atcagcccccctctcaccccat

SEQ ID NO: 199778 - DNA, 22 bp, Artificial Sequence
  Synthetic oligonucleotide; TTA chr2 60489761 60489782 60489778 60489783 +
tcagcccccctctcaccccatc

SEQ ID NO: 199779 - DNA, 22 bp, Artificial Sequence
  Synthetic oligonucleotide; CTC chr2 60489773 60489794 60489790 60489795 +
tcaccccatccaaaaatgttta

SEQ ID NO: 199780 - DNA, 22 bp, Artificial Sequence
  Synthetic oligonucleotide; CTC chr2 60489775 60489796 60489792 60489797 +
accccatccaaaaatgtttact

SEQ ID NO: 199781 - DNA, 22 bp, Artificial Sequence
  Synthetic oligonucleotide; TTT chr2 60489794 60489815 60489811 60489816 +
actcaagttcaggctagcttaa

SEQ ID NO: 199782 - DNA, 22 bp, Artificial Sequence
  Synthetic oligonucleotide; TTA chr2 60489795 60489816 60489812 60489817 +
ctcaagttcaggctagcttaat

SEQ ID NO: 199783 - DNA, 22 bp, Artificial Sequence
  Synthetic oligonucleotide; CTC chr2 60489798 60489819 60489815 60489820 +
aagttcaggctagcttaataac

SEQ ID NO: 199784 - DNA, 22 bp, Artificial Sequence
  Synthetic oligonucleotide; TTC chr2 60489804 60489825 60489821 60489826 +
aggctagcttaataacccccaa

SEQ ID NO: 199785 - DNA, 22 bp, Artificial Sequence
  Synthetic oligonucleotide; CTA chr2 60489810 60489831 60489827 60489832 +
gcttaataacccccaaagcagg

SEQ ID NO: 199786 - DNA, 22 bp, Artificial Sequence
  Synthetic oligonucleotide; CTT chr2 60489814 60489835 60489831 60489836 +
aataacccccaaagcaggagga

SEQ ID NO: 199787 - DNA, 22 bp, Artificial Sequence
  Synthetic oligonucleotide; TTA chr2 60489815 60489836 60489832 60489837 +
ataacccccaaagcaggaggac

SEQ ID NO: 199788 - DNA, 22 bp, Artificial Sequence
  Synthetic oligonucleotide; CTA chr2 60489841 60489862 60489858 60489863 +
ttaaagagagatcacagggata

SEQ ID NO: 199789 - DNA, 22 bp, Artificial Sequence
  Synthetic oligonucleotide; TTA chr2 60489844 60489865 60489861 60489866 +
aagagagatcacagggatatga

SEQ ID NO: 199790 - DNA, 22 bp, Artificial Sequence
  Synthetic oligonucleotide; TTT chr2 60489870 60489891 60489887 60489892 +
tgatgcctgccttattttgtca

SEQ ID NO: 199791 - DNA, 22 bp, Artificial Sequence
  Synthetic oligonucleotide; TTT chr2 60489871 60489892 60489888 60489893 +
gatgcctgccttattttgtcac

SEQ ID NO: 199792 - DNA, 22 bp, Artificial Sequence
  Synthetic oligonucleotide; TTG chr2 60489872 60489893 60489889 60489894 +
atgcctgccttattttgtcaca

SEQ ID NO: 199793 - DNA, 22 bp, Artificial Sequence
  Synthetic oligonucleotide; CTG chr2 60489879 60489900 60489896 60489901 +
ccttattttgtcacatatcatc

SEQ ID NO: 199794 - DNA, 22 bp, Artificial Sequence
  Synthetic oligonucleotide; CTT chr2 60489883 60489904 60489900 60489905 +
attttgtcacatatcatcaaaa

SEQ ID NO: 199795 - DNA, 22 bp, Artificial Sequence
  Synthetic oligonucleotide; TTA chr2 60489884 60489905 60489901 60489906 +
ttttgtcacatatcatcaaaat

SEQ ID NO: 199796 - DNA, 22 bp, Artificial Sequence
  Synthetic oligonucleotide; TTT chr2 60489887 60489908 60489904 60489909 +
tgtcacatatcatcaaaatgat

SEQ ID NO: 199797 - DNA, 22 bp, Artificial Sequence
  Synthetic oligonucleotide; TTT chr2 60489888 60489909 60489905 60489910 +
gtcacatatcatcaaaatgata

SEQ ID NO: 199798 - DNA, 22 bp, Artificial Sequence
  Synthetic oligonucleotide; TTG chr2 60489889 60489910 60489906 60489911 +
tcacatatcatcaaaatgataa

SEQ ID NO: 199799 - DNA, 22 bp, Artificial Sequence
  Synthetic oligonucleotide; CTA chr2 60489917 60489938 60489934 60489939 +
tcatgaaacaccatccatgccc

SEQ ID NO: 199800 - DNA, 22 bp, Artificial Sequence
  Synthetic oligonucleotide; CTG chr2 60489941 60489962 60489958 60489963 +
agtatcccaacatggatggact

SEQ ID NO: 199801 - DNA, 22 bp, Artificial Sequence
  Synthetic oligonucleotide; CTG chr2 60489964 60489985 60489981 60489986 +
gaggagagggacaagggaccaa

SEQ ID NO: 199802 - DNA, 22 bp, Artificial Sequence
  Synthetic oligonucleotide; CTG chr2 60489997 60490018 60490014 60490019 +
atgggcccttgattctgaacgt

SEQ ID NO: 199803 - DNA, 22 bp, Artificial Sequence
  Synthetic oligonucleotide; CTT chr2 60490007 60490028 60490024 60490029 +
gattctgaacgtcattcctgcc

SEQ ID NO: 199804 - DNA, 22 bp, Artificial Sequence
  Synthetic oligonucleotide; TTG chr2 60490008 60490029 60490025 60490030 +
attctgaacgtcattcctgccc

SEQ ID NO: 199805 - DNA, 22 bp, Artificial Sequence
  Synthetic oligonucleotide; TTC chr2 60490012 60490033 60490029 60490034 +
tgaacgtcattcctgcccactc

SEQ ID NO: 199806 - DNA, 22 bp, Artificial Sequence
  Synthetic oligonucleotide; CTG chr2 60490014 60490035 60490031 60490036 +
aacgtcattcctgcccactccc

SEQ ID NO: 199807 - DNA, 22 bp, Artificial Sequence
  Synthetic oligonucleotide; TTC chr2 60490024 60490045 60490041 60490046 +
ctgcccactccccatctgcaat

SEQ ID NO: 199808 - DNA, 22 bp, Artificial Sequence
  Synthetic oligonucleotide; CTG chr2 60490027 60490048 60490044 60490049 +
cccactccccatctgcaatggg

SEQ ID NO: 199809 - DNA, 22 bp, Artificial Sequence
  Synthetic oligonucleotide; CTC chr2 60490034 60490055 60490051 60490056 +
cccatctgcaatgggggcaaag

SEQ ID NO: 199810 - DNA, 22 bp, Artificial Sequence
  Synthetic oligonucleotide; CTG chr2 60490042 60490063 60490059 60490064 +
caatgggggcaaaggcaaaagg

SEQ ID NO: 199811 - DNA, 22 bp, Artificial Sequence
  Synthetic oligonucleotide; CTT chr2 60490071 60490092 60490088 60490093 +
tccaagatttaaacagtcctct

SEQ ID NO: 199812 - DNA, 22 bp, Artificial Sequence
  Synthetic oligonucleotide; TTT chr2 60490072 60490093 60490089 60490094 +
ccaagatttaaacagtcctcta

SEQ ID NO: 199813 - DNA, 22 bp, Artificial Sequence
  Synthetic oligonucleotide; TTC chr2 60490073 60490094 60490090 60490095 +
caagatttaaacagtcctctat

SEQ ID NO: 199814 - DNA, 22 bp, Artificial Sequence
  Synthetic oligonucleotide; TTT chr2 60490081 60490102 60490098 60490103 +
aaacagtcctctatattagtaa

SEQ ID NO: 199815 - DNA, 22 bp, Artificial Sequence
  Synthetic oligonucleotide; TTA chr2 60490082 60490103 60490099 60490104 +
aacagtcctctatattagtaac

SEQ ID NO: 199816 - DNA, 22 bp, Artificial Sequence
  Synthetic oligonucleotide; CTC chr2 60490092 60490113 60490109 60490114 +
tatattagtaacagacccatgt

SEQ ID NO: 199817 - DNA, 22 bp, Artificial Sequence
  Synthetic oligonucleotide; CTA chr2 60490094 60490115 60490111 60490116 +
tattagtaacagacccatgtgc

SEQ ID NO: 199818 - DNA, 22 bp, Artificial Sequence
  Synthetic oligonucleotide; TTA chr2 60490099 60490120 60490116 60490121 +
gtaacagacccatgtgctaggc

SEQ ID NO: 199819 - DNA, 22 bp, Artificial Sequence
  Synthetic oligonucleotide; CTA chr2 60490118 60490139 60490135 60490140 +
ggctcctacaatatctggttcc

SEQ ID NO: 199820 - DNA, 22 bp, Artificial Sequence
  Synthetic oligonucleotide; CTC chr2 60490123 60490144 60490140 60490145 +
ctacaatatctggttccattct

SEQ ID NO: 199821 - DNA, 22 bp, Artificial Sequence
  Synthetic oligonucleotide; CTA chr2 60490126 60490147 60490143 60490148 +
caatatctggttccattctgct

SEQ ID NO: 199822 - DNA, 22 bp, Artificial Sequence
  Synthetic oligonucleotide; CTG chr2 60490135 60490156 60490152 60490157 +
gttccattctgctagtgaaagg

SEQ ID NO: 199823 - DNA, 22 bp, Artificial Sequence
  Synthetic oligonucleotide; TTC chr2 60490139 60490160 60490156 60490161 +
cattctgctagtgaaaggaaac

SEQ ID NO: 199824 - DNA, 22 bp, Artificial Sequence
  Synthetic oligonucleotide; TTC chr2 60490144 60490165 60490161 60490166 +
tgctagtgaaaggaaaccctac

SEQ ID NO: 199825 - DNA, 22 bp, Artificial Sequence
  Synthetic oligonucleotide; CTG chr2 60490146 60490167 60490163 60490168 +
ctagtgaaaggaaaccctacgg

SEQ ID NO: 199826 - DNA, 22 bp, Artificial Sequence
  Synthetic oligonucleotide; CTA chr2 60490149 60490170 60490166 60490171 +
gtgaaaggaaaccctacggtca

SEQ ID NO: 199827 - DNA, 22 bp, Artificial Sequence
  Synthetic oligonucleotide; CTA chr2 60490165 60490186 60490182 60490187 +
cggtcaaccaactccatcctct

SEQ ID NO: 199828 - DNA, 22 bp, Artificial Sequence
  Synthetic oligonucleotide; CTC chr2 60490179 60490200 60490196 60490201 +
catcctctagaacatataagtc

SEQ ID NO: 199829 - DNA, 22 bp, Artificial Sequence
  Synthetic oligonucleotide; CTC chr2 60490186 60490207 60490203 60490208 +
tagaacatataagtcaacaggg

SEQ ID NO: 199830 - DNA, 22 bp, Artificial Sequence
  Synthetic oligonucleotide; CTA chr2 60490188 60490209 60490205 60490210 +
gaacatataagtcaacagggga

SEQ ID NO: 199831 - DNA, 22 bp, Artificial Sequence
  Synthetic oligonucleotide; CTC chr2 60490216 60490237 60490233 60490238 +
ggcatgaagggtataacagaga

SEQ ID NO: 199832 - DNA, 22 bp, Artificial Sequence
  Synthetic oligonucleotide; TTT chr2 60490242 60490263 60490259 60490264 +
caacaactcatccacccccttt

SEQ ID NO: 199833 - DNA, 22 bp, Artificial Sequence
  Synthetic oligonucleotide; TTC chr2 60490243 60490264 60490260 60490265 +
aacaactcatccaccccctttg

SEQ ID NO: 199834 - DNA, 22 bp, Artificial Sequence
  Synthetic oligonucleotide; CTC chr2 60490251 60490272 60490268 60490273 +
atccaccccctttgcagagtcc

SEQ ID NO: 199835 - DNA, 22 bp, Artificial Sequence
  Synthetic oligonucleotide; CTT chr2 60490263 60490284 60490280 60490285 +
tgcagagtcctcacttaacatc

SEQ ID NO: 199836 - DNA, 22 bp, Artificial Sequence
  Synthetic oligonucleotide; TTT chr2 60490264 60490285 60490281 60490286 +
gcagagtcctcacttaacatcc

SEQ ID NO: 199837 - DNA, 22 bp, Artificial Sequence
  Synthetic oligonucleotide; TTG chr2 60490265 60490286 60490282 60490287 +
cagagtcctcacttaacatccc

SEQ ID NO: 199838 - DNA, 22 bp, Artificial Sequence
  Synthetic oligonucleotide; CTC chr2 60490275 60490296 60490292 60490297 +
acttaacatcccctagcatgct

SEQ ID NO: 199839 - DNA, 22 bp, Artificial Sequence
  Synthetic oligonucleotide; CTT chr2 60490279 60490300 60490296 60490301 +
aacatcccctagcatgctgcct

SEQ ID NO: 199840 - DNA, 22 bp, Artificial Sequence
  Synthetic oligonucleotide; TTA chr2 60490280 60490301 60490297 60490302 +
acatcccctagcatgctgcctt

SEQ ID NO: 199841 - DNA, 22 bp, Artificial Sequence
  Synthetic oligonucleotide; CTA chr2 60490290 60490311 60490307 60490312 +
gcatgctgcctttgtcttctga

SEQ ID NO: 199842 - DNA, 22 bp, Artificial Sequence
  Synthetic oligonucleotide; CTG chr2 60490298 60490319 60490315 60490320 +
cctttgtcttctgatcagagta

SEQ ID NO: 199843 - DNA, 22 bp, Artificial Sequence
  Synthetic oligonucleotide; CTT chr2 60490302 60490323 60490319 60490324 +
tgtcttctgatcagagtatttc

SEQ ID NO: 199844 - DNA, 22 bp, Artificial Sequence
  Synthetic oligonucleotide; TTT chr2 60490303 60490324 60490320 60490325 +
gtcttctgatcagagtatttca

SEQ ID NO: 199845 - DNA, 22 bp, Artificial Sequence
  Synthetic oligonucleotide; TTG chr2 60490304 60490325 60490321 60490326 +
tcttctgatcagagtatttcag

SEQ ID NO: 199846 - DNA, 22 bp, Artificial Sequence
  Synthetic oligonucleotide; CTT chr2 60490308 60490329 60490325 60490330 +
ctgatcagagtatttcagcagc

SEQ ID NO: 199847 - DNA, 22 bp, Artificial Sequence
  Synthetic oligonucleotide; TTC chr2 60490309 60490330 60490326 60490331 +
tgatcagagtatttcagcagcc

SEQ ID NO: 199848 - DNA, 22 bp, Artificial Sequence
  Synthetic oligonucleotide; CTG chr2 60490311 60490332 60490328 60490333 +
atcagagtatttcagcagccct

SEQ ID NO: 199849 - DNA, 22 bp, Artificial Sequence
  Synthetic oligonucleotide; TTT chr2 60490323 60490344 60490340 60490345 +
cagcagccctctgtgatctata

SEQ ID NO: 199850 - DNA, 22 bp, Artificial Sequence
  Synthetic oligonucleotide; TTC chr2 60490324 60490345 60490341 60490346 +
agcagccctctgtgatctatag

SEQ ID NO: 199851 - DNA, 22 bp, Artificial Sequence
  Synthetic oligonucleotide; CTC chr2 60490334 60490355 60490351 60490356 +
tgtgatctataggatatggtcc

SEQ ID NO: 199852 - DNA, 22 bp, Artificial Sequence
  Synthetic oligonucleotide; CTG chr2 60490336 60490357 60490353 60490358 +
tgatctataggatatggtccaa

SEQ ID NO: 199853 - DNA, 22 bp, Artificial Sequence
  Synthetic oligonucleotide; CTA chr2 60490343 60490364 60490360 60490365 +
taggatatggtccaactcctta

SEQ ID NO: 199854 - DNA, 22 bp, Artificial Sequence
  Synthetic oligonucleotide; CTC chr2 60490361 60490382 60490378 60490383 +
cttaagccatcattccagagct

SEQ ID NO: 199855 - DNA, 22 bp, Artificial Sequence
  Synthetic oligonucleotide; CTT chr2 60490364 60490385 60490381 60490386 +
aagccatcattccagagctcca

SEQ ID NO: 199856 - DNA, 22 bp, Artificial Sequence
  Synthetic oligonucleotide; TTA chr2 60490365 60490386 60490382 60490387 +
agccatcattccagagctccac

SEQ ID NO: 199857 - DNA, 22 bp, Artificial Sequence
  Synthetic oligonucleotide; TTC chr2 60490376 60490397 60490393 60490398 +
cagagctccacaatccaactcc

SEQ ID NO: 199858 - DNA, 22 bp, Artificial Sequence
  Synthetic oligonucleotide; CTC chr2 60490384 60490405 60490401 60490406 +
cacaatccaactccaattttct

SEQ ID NO: 199859 - DNA, 22 bp, Artificial Sequence
  Synthetic oligonucleotide; CTC chr2 60490397 60490418 60490414 60490419 +
caattttctattccagtcttag

SEQ ID NO: 199860 - DNA, 22 bp, Artificial Sequence
  Synthetic oligonucleotide; TTT chr2 60490403 60490424 60490420 60490425 +
tctattccagtcttagttcccc

SEQ ID NO: 199861 - DNA, 22 bp, Artificial Sequence
  Synthetic oligonucleotide; TTT chr2 60490404 60490425 60490421 60490426 +
ctattccagtcttagttccccg

SEQ ID NO: 199862 - DNA, 22 bp, Artificial Sequence
  Synthetic oligonucleotide; TTC chr2 60490405 60490426 60490422 60490427 +
tattccagtcttagttccccgt

SEQ ID NO: 199863 - DNA, 22 bp, Artificial Sequence
  Synthetic oligonucleotide; CTA chr2 60490407 60490428 60490424 60490429 +
ttccagtcttagttccccgtac

SEQ ID NO: 199864 - DNA, 22 bp, Artificial Sequence
  Synthetic oligonucleotide; TTC chr2 60490410 60490431 60490427 60490432 +
cagtcttagttccccgtaccca

SEQ ID NO: 199865 - DNA, 22 bp, Artificial Sequence
  Synthetic oligonucleotide; CTT chr2 60490417 60490438 60490434 60490439 +
agttccccgtacccatcaagga

SEQ ID NO: 199866 - DNA, 22 bp, Artificial Sequence
  Synthetic oligonucleotide; TTA chr2 60490418 60490439 60490435 60490440 +
gttccccgtacccatcaaggaa

SEQ ID NO: 199867 - DNA, 22 bp, Artificial Sequence
  Synthetic oligonucleotide; TTC chr2 60490422 60490443 60490439 60490444 +
cccgtacccatcaaggaaaata

SEQ ID NO: 199868 - DNA, 22 bp, Artificial Sequence
  Synthetic oligonucleotide; TTC chr2 60490447 60490468 60490464 60490469 +
tgcccaagtaaaaatcccttcc

SEQ ID NO: 199869 - DNA, 22 bp, Artificial Sequence
  Synthetic oligonucleotide; CTG chr2 60490449 60490470 60490466 60490471 +
cccaagtaaaaatcccttccgt

SEQ ID NO: 199870 - DNA, 22 bp, Artificial Sequence
  Synthetic oligonucleotide; CTT chr2 60490467 60490488 60490484 60490489 +
ccgttctcatttccttcctggc

SEQ ID NO: 199871 - DNA, 22 bp, Artificial Sequence
  Synthetic oligonucleotide; TTC chr2 60490468 60490489 60490485 60490490 +
cgttctcatttccttcctggct

SEQ ID NO: 199872 - DNA, 22 bp, Artificial Sequence
  Synthetic oligonucleotide; TTC chr2 60490473 60490494 60490490 60490495 +
tcatttccttcctggcttttct

SEQ ID NO: 199873 - DNA, 22 bp, Artificial Sequence
  Synthetic oligonucleotide; CTC chr2 60490475 60490496 60490492 60490497 +
atttccttcctggcttttcttc

SEQ ID NO: 199874 - DNA, 22 bp, Artificial Sequence
  Synthetic oligonucleotide; TTT chr2 60490479 60490500 60490496 60490501 +
ccttcctggcttttcttcttct

SEQ ID NO: 199875 - DNA, 22 bp, Artificial Sequence
  Synthetic oligonucleotide; TTC chr2 60490480 60490501 60490497 60490502 +
cttcctggcttttcttcttctt

SEQ ID NO: 199876 - DNA, 22 bp, Artificial Sequence
  Synthetic oligonucleotide; CTT chr2 60490483 60490504 60490500 60490505 +
cctggcttttcttcttcttctc

SEQ ID NO: 199877 - DNA, 22 bp, Artificial Sequence
  Synthetic oligonucleotide; TTC chr2 60490484 60490505 60490501 60490506 +
ctggcttttcttcttcttctct

SEQ ID NO: 199878 - DNA, 22 bp, Artificial Sequence
  Synthetic oligonucleotide; CTG chr2 60490487 60490508 60490504 60490509 +
gcttttcttcttcttctcttac

SEQ ID NO: 199879 - DNA, 22 bp, Artificial Sequence
  Synthetic oligonucleotide; CTT chr2 60490491 60490512 60490508 60490513 +
ttcttcttcttctcttacctcc

SEQ ID NO: 199880 - DNA, 22 bp, Artificial Sequence
  Synthetic oligonucleotide; TTT chr2 60490492 60490513 60490509 60490514 +
tcttcttcttctcttacctcct

SEQ ID NO: 199881 - DNA, 22 bp, Artificial Sequence
  Synthetic oligonucleotide; TTT chr2 60490493 60490514 60490510 60490515 +
cttcttcttctcttacctcctg

SEQ ID NO: 199882 - DNA, 22 bp, Artificial Sequence
  Synthetic oligonucleotide; TTC chr2 60490494 60490515 60490511 60490516 +
ttcttcttctcttacctcctgg

SEQ ID NO: 199883 - DNA, 22 bp, Artificial Sequence
  Synthetic oligonucleotide; CTT chr2 60490496 60490517 60490513 60490518 +
cttcttctcttacctcctggaa

SEQ ID NO: 199884 - DNA, 22 bp, Artificial Sequence
  Synthetic oligonucleotide; TTC chr2 60490497 60490518 60490514 60490519 +
ttcttctcttacctcctggaat

SEQ ID NO: 199885 - DNA, 22 bp, Artificial Sequence
  Synthetic oligonucleotide; CTT chr2 60490499 60490520 60490516 60490521 +
cttctcttacctcctggaatcc

SEQ ID NO: 199886 - DNA, 22 bp, Artificial Sequence
  Synthetic oligonucleotide; TTC chr2 60490500 60490521 60490517 60490522 +
ttctcttacctcctggaatcct

SEQ ID NO: 199887 - DNA, 22 bp, Artificial Sequence
  Synthetic oligonucleotide; CTT chr2 60490502 60490523 60490519 60490524 +
ctcttacctcctggaatcctgc

SEQ ID NO: 199888 - DNA, 22 bp, Artificial Sequence
  Synthetic oligonucleotide; TTC chr2 60490503 60490524 60490520 60490525 +
tcttacctcctggaatcctgct

SEQ ID NO: 199889 - DNA, 22 bp, Artificial Sequence
  Synthetic oligonucleotide; CTC chr2 60490505 60490526 60490522 60490527 +
ttacctcctggaatcctgctca

SEQ ID NO: 199890 - DNA, 22 bp, Artificial Sequence
  Synthetic oligonucleotide; CTT chr2 60490507 60490528 60490524 60490529 +
acctcctggaatcctgctcata

SEQ ID NO: 199891 - DNA, 22 bp, Artificial Sequence
  Synthetic oligonucleotide; TTA chr2 60490508 60490529 60490525 60490530 +
cctcctggaatcctgctcatac

SEQ ID NO: 199892 - DNA, 22 bp, Artificial Sequence
  Synthetic oligonucleotide; CTC chr2 60490512 60490533 60490529 60490534 +
ctggaatcctgctcatacttca

SEQ ID NO: 199893 - DNA, 22 bp, Artificial Sequence
  Synthetic oligonucleotide; CTG chr2 60490515 60490536 60490532 60490537 +
gaatcctgctcatacttcaagg

SEQ ID NO: 199894 - DNA, 22 bp, Artificial Sequence
  Synthetic oligonucleotide; CTG chr2 60490523 60490544 60490540 60490545 +
ctcatacttcaaggcctcaatg

SEQ ID NO: 199895 - DNA, 22 bp, Artificial Sequence
  Synthetic oligonucleotide; CTC chr2 60490526 60490547 60490543 60490548 +
atacttcaaggcctcaatgaag

SEQ ID NO: 199896 - DNA, 22 bp, Artificial Sequence
  Synthetic oligonucleotide; CTT chr2 60490532 60490553 60490549 60490554 +
caaggcctcaatgaaggtctac

SEQ ID NO: 199897 - DNA, 22 bp, Artificial Sequence
  Synthetic oligonucleotide; TTC chr2 60490533 60490554 60490550 60490555 +
aaggcctcaatgaaggtctacc

SEQ ID NO: 199898 - DNA, 22 bp, Artificial Sequence
  Synthetic oligonucleotide; CTC chr2 60490541 60490562 60490558 60490563 +
aatgaaggtctacctagtcacc

SEQ ID NO: 199899 - DNA, 22 bp, Artificial Sequence
  Synthetic oligonucleotide; CTA chr2 60490553 60490574 60490570 60490575 +
cctagtcaccttagcaagaaga

SEQ ID NO: 199900 - DNA, 22 bp, Artificial Sequence
  Synthetic oligonucleotide; CTA chr2 60490557 60490578 60490574 60490579 +
gtcaccttagcaagaagaatca

SEQ ID NO: 199901 - DNA, 22 bp, Artificial Sequence
  Synthetic oligonucleotide; CTT chr2 60490565 60490586 60490582 60490587 +
agcaagaagaatcaatctcatc

SEQ ID NO: 199902 - DNA, 22 bp, Artificial Sequence
  Synthetic oligonucleotide; TTA chr2 60490566 60490587 60490583 60490588 +
gcaagaagaatcaatctcatcc

SEQ ID NO: 199903 - DNA, 22 bp, Artificial Sequence
  Synthetic oligonucleotide; CTC chr2 60490584 60490605 60490601 60490606 +
atccttctccaacctcatagaa

SEQ ID NO: 199904 - DNA, 22 bp, Artificial Sequence
  Synthetic oligonucleotide; CTT chr2 60490590 60490611 60490607 60490612 +
ctccaacctcatagaacactca

SEQ ID NO: 199905 - DNA, 22 bp, Artificial Sequence
  Synthetic oligonucleotide; TTC chr2 60490591 60490612 60490608 60490613 +
tccaacctcatagaacactcat

SEQ ID NO: 199906 - DNA, 22 bp, Artificial Sequence
  Synthetic oligonucleotide; CTC chr2 60490593 60490614 60490610 60490615 +
caacctcatagaacactcatcc

SEQ ID NO: 199907 - DNA, 22 bp, Artificial Sequence
  Synthetic oligonucleotide; CTC chr2 60490600 60490621 60490617 60490622 +
atagaacactcatcccatgcac

SEQ ID NO: 199908 - DNA, 22 bp, Artificial Sequence
  Synthetic oligonucleotide; CTC chr2 60490611 60490632 60490628 60490633 +
atcccatgcaccactccctgac

SEQ ID NO: 199909 - DNA, 22 bp, Artificial Sequence
  Synthetic oligonucleotide; CTC chr2 60490627 60490648 60490644 60490649 +
cctgactcatatctaggcctta

SEQ ID NO: 199910 - DNA, 22 bp, Artificial Sequence
  Synthetic oligonucleotide; CTG chr2 60490631 60490652 60490648 60490653 +
actcatatctaggccttacatt

SEQ ID NO: 199911 - DNA, 22 bp, Artificial Sequence
  Synthetic oligonucleotide; CTC chr2 60490635 60490656 60490652 60490657 +
atatctaggccttacattgctg

SEQ ID NO: 199912 - DNA, 22 bp, Artificial Sequence
  Synthetic oligonucleotide; CTA chr2 60490642 60490663 60490659 60490664 +
ggccttacattgctggttaacc

SEQ ID NO: 199913 - DNA, 22 bp, Artificial Sequence
  Synthetic oligonucleotide; CTT chr2 60490648 60490669 60490665 60490670 +
acattgctggttaaccctctat

SEQ ID NO: 199914 - DNA, 22 bp, Artificial Sequence
  Synthetic oligonucleotide; TTA chr2 60490649 60490670 60490666 60490671 +
cattgctggttaaccctctatg

SEQ ID NO: 199915 - DNA, 22 bp, Artificial Sequence
  Synthetic oligonucleotide; TTG chr2 60490654 60490675 60490671 60490676 +
ctggttaaccctctatgcctct

SEQ ID NO: 199916 - DNA, 22 bp, Artificial Sequence
  Synthetic oligonucleotide; CTG chr2 60490657 60490678 60490674 60490679 +
gttaaccctctatgcctctaat

SEQ ID NO: 199917 - DNA, 22 bp, Artificial Sequence
  Synthetic oligonucleotide; TTA chr2 60490661 60490682 60490678 60490683 +
accctctatgcctctaattaat

SEQ ID NO: 199918 - DNA, 22 bp, Artificial Sequence
  Synthetic oligonucleotide; CTC chr2 60490667 60490688 60490684 60490689 +
tatgcctctaattaatttcatg

SEQ ID NO: 199919 - DNA, 22 bp, Artificial Sequence
  Synthetic oligonucleotide; CTA chr2 60490669 60490690 60490686 60490691 +
tgcctctaattaatttcatgtg

SEQ ID NO: 199920 - DNA, 22 bp, Artificial Sequence
  Synthetic oligonucleotide; CTC chr2 60490675 60490696 60490692 60490697 +
taattaatttcatgtgttccca

SEQ ID NO: 199921 - DNA, 22 bp, Artificial Sequence
  Synthetic oligonucleotide; CTA chr2 60490677 60490698 60490694 60490699 +
attaatttcatgtgttcccaat

SEQ ID NO: 199922 - DNA, 22 bp, Artificial Sequence
  Synthetic oligonucleotide; TTA chr2 60490681 60490702 60490698 60490703 +
atttcatgtgttcccaatgagt

SEQ ID NO: 199923 - DNA, 22 bp, Artificial Sequence
  Synthetic oligonucleotide; TTT chr2 60490685 60490706 60490702 60490707 +
catgtgttcccaatgagtttct

SEQ ID NO: 199924 - DNA, 22 bp, Artificial Sequence
  Synthetic oligonucleotide; TTC chr2 60490686 60490707 60490703 60490708 +
atgtgttcccaatgagtttctt

SEQ ID NO: 199925 - DNA, 22 bp, Artificial Sequence
  Synthetic oligonucleotide; TTC chr2 60490694 60490715 60490711 60490716 +
ccaatgagtttcttcaatacag

SEQ ID NO: 199926 - DNA, 22 bp, Artificial Sequence
  Synthetic oligonucleotide; TTT chr2 60490705 60490726 60490722 60490727 +
cttcaatacagggactctttct

SEQ ID NO: 199927 - DNA, 22 bp, Artificial Sequence
  Synthetic oligonucleotide; TTC chr2 60490706 60490727 60490723 60490728 +
ttcaatacagggactctttctc

SEQ ID NO: 199928 - DNA, 22 bp, Artificial Sequence
  Synthetic oligonucleotide; CTT chr2 60490708 60490729 60490725 60490730 +
caatacagggactctttctcct

SEQ ID NO: 199929 - DNA, 22 bp, Artificial Sequence
  Synthetic oligonucleotide; TTC chr2 60490709 60490730 60490726 60490731 +
aatacagggactctttctccta

SEQ ID NO: 199930 - DNA, 22 bp, Artificial Sequence
  Synthetic oligonucleotide; CTC chr2 60490722 60490743 60490739 60490744 +
tttctcctacttgcttctatta

SEQ ID NO: 199931 - DNA, 22 bp, Artificial Sequence
  Synthetic oligonucleotide; CTT chr2 60490724 60490745 60490741 60490746 +
tctcctacttgcttctattata

SEQ ID NO: 199932 - DNA, 22 bp, Artificial Sequence
  Synthetic oligonucleotide; TTT chr2 60490725 60490746 60490742 60490747 +
ctcctacttgcttctattatat

SEQ ID NO: 199933 - DNA, 22 bp, Artificial Sequence
  Synthetic oligonucleotide; TTC chr2 60490726 60490747 60490743 60490748 +
tcctacttgcttctattatatt

SEQ ID NO: 199934 - DNA, 22 bp, Artificial Sequence
  Synthetic oligonucleotide; CTC chr2 60490728 60490749 60490745 60490750 +
ctacttgcttctattatatttg

SEQ ID NO: 199935 - DNA, 22 bp, Artificial Sequence
  Synthetic oligonucleotide; CTA chr2 60490731 60490752 60490748 60490753 +
cttgcttctattatatttgaaa

SEQ ID NO: 199936 - DNA, 22 bp, Artificial Sequence
  Synthetic oligonucleotide; CTT chr2 60490734 60490755 60490751 60490756 +
gcttctattatatttgaaagta

SEQ ID NO: 199937 - DNA, 22 bp, Artificial Sequence
  Synthetic oligonucleotide; TTG chr2 60490735 60490756 60490752 60490757 +
cttctattatatttgaaagtac

SEQ ID NO: 199938 - DNA, 22 bp, Artificial Sequence
  Synthetic oligonucleotide; CTT chr2 60490738 60490759 60490755 60490760 +
ctattatatttgaaagtaccag

SEQ ID NO: 199939 - DNA, 22 bp, Artificial Sequence
  Synthetic oligonucleotide; TTC chr2 60490739 60490760 60490756 60490761 +
tattatatttgaaagtaccagc

SEQ ID NO: 199940 - DNA, 22 bp, Artificial Sequence
  Synthetic oligonucleotide; CTA chr2 60490741 60490762 60490758 60490763 +
ttatatttgaaagtaccagcac

SEQ ID NO: 199941 - DNA, 22 bp, Artificial Sequence
  Synthetic oligonucleotide; TTA chr2 60490744 60490765 60490761 60490766 +
tatttgaaagtaccagcacagc

SEQ ID NO: 199942 - DNA, 22 bp, Artificial Sequence
  Synthetic oligonucleotide; TTT chr2 60490749 60490770 60490766 60490771 +
gaaagtaccagcacagcatgtg

SEQ ID NO: 199943 - DNA, 22 bp, Artificial Sequence
  Synthetic oligonucleotide; TTG chr2 60490750 60490771 60490767 60490772 +
aaagtaccagcacagcatgtga

SEQ ID NO: 199944 - DNA, 22 bp, Artificial Sequence
  Synthetic oligonucleotide; TTC chr2 60490782 60490803 60490799 60490804 +
atatattctaggaattcaacaa

SEQ ID NO: 199945 - DNA, 22 bp, Artificial Sequence
  Synthetic oligonucleotide; TTC chr2 60490790 60490811 60490807 60490812 +
taggaattcaacaaatagcata

SEQ ID NO: 199946 - DNA, 22 bp, Artificial Sequence
  Synthetic oligonucleotide; CTA chr2 60490792 60490813 60490809 60490814 +
ggaattcaacaaatagcatata

SEQ ID NO: 199947 - DNA, 22 bp, Artificial Sequence
  Synthetic oligonucleotide; TTC chr2 60490799 60490820 60490816 60490821 +
aacaaatagcatataaatgact

SEQ ID NO: 199948 - DNA, 22 bp, Artificial Sequence
  Synthetic oligonucleotide; CTG chr2 60490822 60490843 60490839 60490844 +
atttaccttcctaaaagggaag

SEQ ID NO: 199949 - DNA, 22 bp, Artificial Sequence
  Synthetic oligonucleotide; TTT chr2 60490826 60490847 60490843 60490848 +
accttcctaaaagggaagttat

SEQ ID NO: 199950 - DNA, 22 bp, Artificial Sequence
  Synthetic oligonucleotide; TTA chr2 60490827 60490848 60490844 60490849 +
ccttcctaaaagggaagttatt

SEQ ID NO: 199951 - DNA, 22 bp, Artificial Sequence
  Synthetic oligonucleotide; CTT chr2 60490831 60490852 60490848 60490853 +
cctaaaagggaagttatttttc

SEQ ID NO: 199952 - DNA, 22 bp, Artificial Sequence
  Synthetic oligonucleotide; TTC chr2 60490832 60490853 60490849 60490854 +
ctaaaagggaagttatttttcc

SEQ ID NO: 199953 - DNA, 22 bp, Artificial Sequence
  Synthetic oligonucleotide; CTA chr2 60490835 60490856 60490852 60490857 +
aaagggaagttatttttccaaa

SEQ ID NO: 199954 - DNA, 22 bp, Artificial Sequence
  Synthetic oligonucleotide; TTA chr2 60490847 60490868 60490864 60490869 +
tttttccaaatatcatttctgt

SEQ ID NO: 199955 - DNA, 22 bp, Artificial Sequence
  Synthetic oligonucleotide; TTT chr2 60490850 60490871 60490867 60490872 +
ttccaaatatcatttctgttca

SEQ ID NO: 199956 - DNA, 22 bp, Artificial Sequence
  Synthetic oligonucleotide; TTT chr2 60490851 60490872 60490868 60490873 +
tccaaatatcatttctgttcaa

SEQ ID NO: 199957 - DNA, 22 bp, Artificial Sequence
  Synthetic oligonucleotide; TTT chr2 60490852 60490873 60490869 60490874 +
ccaaatatcatttctgttcaaa

SEQ ID NO: 199958 - DNA, 22 bp, Artificial Sequence
  Synthetic oligonucleotide; TTC chr2 60490853 60490874 60490870 60490875 +
caaatatcatttctgttcaaaa

SEQ ID NO: 199959 - DNA, 22 bp, Artificial Sequence
  Synthetic oligonucleotide; TTT chr2 60490865 60490886 60490882 60490887 +
ctgttcaaaatggtaattttaa

SEQ ID NO: 199960 - DNA, 22 bp, Artificial Sequence
  Synthetic oligonucleotide; TTC chr2 60490866 60490887 60490883 60490888 +
tgttcaaaatggtaattttaac

SEQ ID NO: 199961 - DNA, 22 bp, Artificial Sequence
  Synthetic oligonucleotide; CTG chr2 60490868 60490889 60490885 60490890 +
ttcaaaatggtaattttaacct

SEQ ID NO: 199962 - DNA, 22 bp, Artificial Sequence
  Synthetic oligonucleotide; TTC chr2 60490871 60490892 60490888 60490893 +
aaaatggtaattttaaccttct

SEQ ID NO: 199963 - DNA, 22 bp, Artificial Sequence
  Synthetic oligonucleotide; TTT chr2 60490884 60490905 60490901 60490906 +
taaccttcttagcacccacaaa

SEQ ID NO: 199964 - DNA, 22 bp, Artificial Sequence
  Synthetic oligonucleotide; TTT chr2 60490885 60490906 60490902 60490907 +
aaccttcttagcacccacaaac

SEQ ID NO: 199965 - DNA, 22 bp, Artificial Sequence
  Synthetic oligonucleotide; TTA chr2 60490886 60490907 60490903 60490908 +
accttcttagcacccacaaaca

SEQ ID NO: 199966 - DNA, 22 bp, Artificial Sequence
  Synthetic oligonucleotide; CTT chr2 60490891 60490912 60490908 60490913 +
cttagcacccacaaacatttcc

SEQ ID NO: 199967 - DNA, 22 bp, Artificial Sequence
  Synthetic oligonucleotide; TTC chr2 60490892 60490913 60490909 60490914 +
ttagcacccacaaacatttccc

SEQ ID NO: 199968 - DNA, 22 bp, Artificial Sequence
  Synthetic oligonucleotide; CTT chr2 60490894 60490915 60490911 60490916 +
agcacccacaaacatttccctt

SEQ ID NO: 199969 - DNA, 22 bp, Artificial Sequence
  Synthetic oligonucleotide; TTA chr2 60490895 60490916 60490912 60490917 +
gcacccacaaacatttcccttc

SEQ ID NO: 199970 - DNA, 22 bp, Artificial Sequence
  Synthetic oligonucleotide; TTT chr2 60490911 60490932 60490928 60490933 +
cccttctgatatctacttgaac

SEQ ID NO: 199971 - DNA, 22 bp, Artificial Sequence
  Synthetic oligonucleotide; TTC chr2 60490912 60490933 60490929 60490934 +
ccttctgatatctacttgaact

SEQ ID NO: 199972 - DNA, 22 bp, Artificial Sequence
  Synthetic oligonucleotide; CTT chr2 60490916 60490937 60490933 60490938 +
ctgatatctacttgaactttca

SEQ ID NO: 199973 - DNA, 22 bp, Artificial Sequence
  Synthetic oligonucleotide; TTC chr2 60490917 60490938 60490934 60490939 +
tgatatctacttgaactttcag

SEQ ID NO: 199974 - DNA, 22 bp, Artificial Sequence
  Synthetic oligonucleotide; CTG chr2 60490919 60490940 60490936 60490941 +
atatctacttgaactttcagat

SEQ ID NO: 199975 - DNA, 22 bp, Artificial Sequence
  Synthetic oligonucleotide; CTA chr2 60490926 60490947 60490943 60490948 +
cttgaactttcagataaaaaaa

SEQ ID NO: 199976 - DNA, 22 bp, Artificial Sequence
  Synthetic oligonucleotide; CTT chr2 60490929 60490950 60490946 60490951 +
gaactttcagataaaaaaaaaa

SEQ ID NO: 199977 - DNA, 22 bp, Artificial Sequence
  Synthetic oligonucleotide; TTG chr2 60490930 60490951 60490947 60490952 +
aactttcagataaaaaaaaaaa

SEQ ID NO: 199978 - DNA, 22 bp, Artificial Sequence
  Synthetic oligonucleotide; CTT chr2 60490935 60490956 60490952 60490957 +
tcagataaaaaaaaaaaagcaa

SEQ ID NO: 199979 - DNA, 22 bp, Artificial Sequence
  Synthetic oligonucleotide; TTT chr2 60490936 60490957 60490953 60490958 +
cagataaaaaaaaaaaagcaag

SEQ ID NO: 199980 - DNA, 22 bp, Artificial Sequence
  Synthetic oligonucleotide; TTC chr2 60490937 60490958 60490954 60490959 +
agataaaaaaaaaaaagcaagt

SEQ ID NO: 199981 - DNA, 22 bp, Artificial Sequence
  Synthetic oligonucleotide; TTG chr2 60490961 60490982 60490978 60490983 +
cagtaacatgttatgctacaca

SEQ ID NO: 199982 - DNA, 22 bp, Artificial Sequence
  Synthetic oligonucleotide; TTA chr2 60490974 60490995 60490991 60490996 +
tgctacacaaagattagcatga

SEQ ID NO: 199983 - DNA, 22 bp, Artificial Sequence
  Synthetic oligonucleotide; CTA chr2 60490979 60491000 60490996 60491001 +
cacaaagattagcatgaatatc

SEQ ID NO: 199984 - DNA, 22 bp, Artificial Sequence
  Synthetic oligonucleotide; TTA chr2 60490990 60491011 60491007 60491012 +
gcatgaatatccaccctcttta

SEQ ID NO: 199985 - DNA, 22 bp, Artificial Sequence
  Synthetic oligonucleotide; CTC chr2 60491008 60491029 60491025 60491030 +
tttaaacagccaccccacaccc

SEQ ID NO: 199986 - DNA, 22 bp, Artificial Sequence
  Synthetic oligonucleotide; CTT chr2 60491010 60491031 60491027 60491032 +
taaacagccaccccacaccctg

SEQ ID NO: 199987 - DNA, 22 bp, Artificial Sequence
  Synthetic oligonucleotide; TTT chr2 60491011 60491032 60491028 60491033 +
aaacagccaccccacaccctgg

SEQ ID NO: 199988 - DNA, 22 bp, Artificial Sequence
  Synthetic oligonucleotide; TTA chr2 60491012 60491033 60491029 60491034 +
aacagccaccccacaccctgga

SEQ ID NO: 199989 - DNA, 22 bp, Artificial Sequence
  Synthetic oligonucleotide; CTG chr2 60491032 60491053 60491049 60491054 +
gagaagagcaaatgtgaagttt

SEQ ID NO: 199990 - DNA, 22 bp, Artificial Sequence
  Synthetic oligonucleotide; TTT chr2 60491054 60491075 60491071 60491076 +
atgtgccaaccagactgtgcgc

SEQ ID NO: 199991 - DNA, 22 bp, Artificial Sequence
  Synthetic oligonucleotide; TTA chr2 60491055 60491076 60491072 60491077 +
tgtgccaaccagactgtgcgcc

SEQ ID NO: 199992 - DNA, 22 bp, Artificial Sequence
  Synthetic oligonucleotide; CTG chr2 60491071 60491092 60491088 60491093 +
tgcgccaggttggtaaagtctg

SEQ ID NO: 199993 - DNA, 22 bp, Artificial Sequence
  Synthetic oligonucleotide; TTG chr2 60491083 60491104 60491100 60491105 +
gtaaagtctgacagagttacca

SEQ ID NO: 199994 - DNA, 22 bp, Artificial Sequence
  Synthetic oligonucleotide; CTG chr2 60491093 60491114 60491110 60491115 +
acagagttaccaaaaaatgaca

SEQ ID NO: 199995 - DNA, 22 bp, Artificial Sequence
  Synthetic oligonucleotide; TTA chr2 60491102 60491123 60491119 60491124 +
ccaaaaaatgacaacatcttct

SEQ ID NO: 199996 - DNA, 22 bp, Artificial Sequence
  Synthetic oligonucleotide; CTT chr2 60491122 60491143 60491139 60491144 +
ctatatgtgaagcccaactacg

SEQ ID NO: 199997 - DNA, 22 bp, Artificial Sequence
  Synthetic oligonucleotide; TTC chr2 60491123 60491144 60491140 60491145 +
tatatgtgaagcccaactacgt

SEQ ID NO: 199998 - DNA, 22 bp, Artificial Sequence
  Synthetic oligonucleotide; CTA chr2 60491125 60491146 60491142 60491147 +
tatgtgaagcccaactacgtgg

SEQ ID NO: 199999 - DNA, 22 bp, Artificial Sequence
  Synthetic oligonucleotide; CTA chr2 60491142 60491163 60491159 60491164 +
cgtggttgtgcaactctatagc

SEQ ID NO: 200000 - DNA, 22 bp, Artificial Sequence
  Synthetic oligonucleotide; TTG chr2 60491150 60491171 60491167 60491172 +
tgcaactctatagctgactttc

SEQ ID NO: 200001 - DNA, 22 bp, Artificial Sequence
  Synthetic oligonucleotide; CTC chr2 60491158 60491179 60491175 60491180 +
tatagctgactttcaaccatgg

SEQ ID NO: 200002 - DNA, 22 bp, Artificial Sequence
  Synthetic oligonucleotide; CTA chr2 60491160 60491181 60491177 60491182 +
tagctgactttcaaccatggtc

SEQ ID NO: 200003 - DNA, 22 bp, Artificial Sequence
  Synthetic oligonucleotide; CTG chr2 60491166 60491187 60491183 60491188 +
actttcaaccatggtcatctgc

SEQ ID NO: 200004 - DNA, 22 bp, Artificial Sequence
  Synthetic oligonucleotide; CTT chr2 60491170 60491191 60491187 60491192 +
tcaaccatggtcatctgcaaag

SEQ ID NO: 200005 - DNA, 22 bp, Artificial Sequence
  Synthetic oligonucleotide; TTT chr2 60491171 60491192 60491188 60491193 +
caaccatggtcatctgcaaaga

SEQ ID NO: 200006 - DNA, 22 bp, Artificial Sequence
  Synthetic oligonucleotide; TTC chr2 60491172 60491193 60491189 60491194 +
aaccatggtcatctgcaaagaa

SEQ ID NO: 200007 - DNA, 22 bp, Artificial Sequence
  Synthetic oligonucleotide; CTG chr2 60491187 60491208 60491204 60491209 +
caaagaagttagtctcagccac

SEQ ID NO: 200008 - DNA, 22 bp, Artificial Sequence
  Synthetic oligonucleotide; TTA chr2 60491198 60491219 60491215 60491220 +
gtctcagccacctgcgcatcct

SEQ ID NO: 200009 - DNA, 22 bp, Artificial Sequence
  Synthetic oligonucleotide; CTC chr2 60491203 60491224 60491220 60491225 +
agccacctgcgcatcctcaatg

SEQ ID NO: 200010 - DNA, 22 bp, Artificial Sequence
  Synthetic oligonucleotide; CTG chr2 60491212 60491233 60491229 60491234 +
cgcatcctcaatgcaaaaagct

SEQ ID NO: 200011 - DNA, 22 bp, Artificial Sequence
  Synthetic oligonucleotide; CTC chr2 60491221 60491242 60491238 60491243 +
aatgcaaaaagctaagttctaa

SEQ ID NO: 200012 - DNA, 22 bp, Artificial Sequence
  Synthetic oligonucleotide; CTA chr2 60491235 60491256 60491252 60491257 +
agttctaaaaacgtattcttaa

SEQ ID NO: 200013 - DNA, 22 bp, Artificial Sequence
  Synthetic oligonucleotide; TTC chr2 60491240 60491261 60491257 60491262 +
taaaaacgtattcttaatgctg

SEQ ID NO: 200014 - DNA, 22 bp, Artificial Sequence
  Synthetic oligonucleotide; CTA chr2 60491242 60491263 60491259 60491264 +
aaaacgtattcttaatgctgtt

SEQ ID NO: 200015 - DNA, 22 bp, Artificial Sequence
  Synthetic oligonucleotide; TTC chr2 60491253 60491274 60491270 60491275 +
ttaatgctgttttaaatgcagc

SEQ ID NO: 200016 - DNA, 22 bp, Artificial Sequence
  Synthetic oligonucleotide; CTT chr2 60491255 60491276 60491272 60491277 +
aatgctgttttaaatgcagcac

SEQ ID NO: 200017 - DNA, 22 bp, Artificial Sequence
  Synthetic oligonucleotide; TTA chr2 60491256 60491277 60491273 60491278 +
atgctgttttaaatgcagcact

SEQ ID NO: 200018 - DNA, 22 bp, Artificial Sequence
  Synthetic oligonucleotide; CTG chr2 60491262 60491283 60491279 60491284 +
ttttaaatgcagcactactaaa

SEQ ID NO: 200019 - DNA, 22 bp, Artificial Sequence
  Synthetic oligonucleotide; TTT chr2 60491265 60491286 60491282 60491287 +
taaatgcagcactactaaaaag

SEQ ID NO: 200020 - DNA, 22 bp, Artificial Sequence
  Synthetic oligonucleotide; TTT chr2 60491266 60491287 60491283 60491288 +
aaatgcagcactactaaaaagg

SEQ ID NO: 200021 - DNA, 22 bp, Artificial Sequence
  Synthetic oligonucleotide; TTA chr2 60491267 60491288 60491284 60491289 +
aatgcagcactactaaaaagga

SEQ ID NO: 200022 - DNA, 22 bp, Artificial Sequence
  Synthetic oligonucleotide; CTA chr2 60491279 60491300 60491296 60491301 +
ctaaaaaggacctcattttgat

SEQ ID NO: 200023 - DNA, 22 bp, Artificial Sequence
  Synthetic oligonucleotide; CTA chr2 60491282 60491303 60491299 60491304 +
aaaaggacctcattttgatgcc

SEQ ID NO: 200024 - DNA, 22 bp, Artificial Sequence
  Synthetic oligonucleotide; CTC chr2 60491293 60491314 60491310 60491315 +
attttgatgccagagggcagca

SEQ ID NO: 200025 - DNA, 22 bp, Artificial Sequence
  Synthetic oligonucleotide; TTT chr2 60491297 60491318 60491314 60491319 +
tgatgccagagggcagcaaaca

SEQ ID NO: 200026 - DNA, 22 bp, Artificial Sequence
  Synthetic oligonucleotide; TTT chr2 60491298 60491319 60491315 60491320 +
gatgccagagggcagcaaacat

SEQ ID NO: 200027 - DNA, 22 bp, Artificial Sequence
  Synthetic oligonucleotide; TTG chr2 60491299 60491320 60491316 60491321 +
atgccagagggcagcaaacatg

SEQ ID NO: 200028 - DNA, 22 bp, Artificial Sequence
  Synthetic oligonucleotide; CTT chr2 60491328 60491349 60491345 60491350 +
ttggcccccttcagctattaag

SEQ ID NO: 200029 - DNA, 22 bp, Artificial Sequence
  Synthetic oligonucleotide; TTT chr2 60491329 60491350 60491346 60491351 +
tggcccccttcagctattaagt

SEQ ID NO: 200030 - DNA, 22 bp, Artificial Sequence
  Synthetic oligonucleotide; TTT chr2 60491330 60491351 60491347 60491352 +
ggcccccttcagctattaagta

SEQ ID NO: 200031 - DNA, 22 bp, Artificial Sequence
  Synthetic oligonucleotide; TTG chr2 60491331 60491352 60491348 60491353 +
gcccccttcagctattaagtac

SEQ ID NO: 200032 - DNA, 22 bp, Artificial Sequence
  Synthetic oligonucleotide; CTT chr2 60491339 60491360 60491356 60491361 +
cagctattaagtacagtaaaag

SEQ ID NO: 200033 - DNA, 22 bp, Artificial Sequence
  Synthetic oligonucleotide; TTC chr2 60491340 60491361 60491357 60491362 +
agctattaagtacagtaaaagg

SEQ ID NO: 200034 - DNA, 22 bp, Artificial Sequence
  Synthetic oligonucleotide; CTA chr2 60491345 60491366 60491362 60491367 +
ttaagtacagtaaaaggaagtc

SEQ ID NO: 200035 - DNA, 22 bp, Artificial Sequence
  Synthetic oligonucleotide; TTA chr2 60491348 60491369 60491365 60491370 +
agtacagtaaaaggaagtccta

SEQ ID NO: 200036 - DNA, 22 bp, Artificial Sequence
  Synthetic oligonucleotide; CTA chr2 60491370 60491391 60491387 60491392 +
actatcatttgaaatgctcccg

SEQ ID NO: 200037 - DNA, 22 bp, Artificial Sequence
  Synthetic oligonucleotide; CTA chr2 60491374 60491395 60491391 60491396 +
tcatttgaaatgctcccggcca

SEQ ID NO: 200038 - DNA, 22 bp, Artificial Sequence
  Synthetic oligonucleotide; TTT chr2 60491380 60491401 60491397 60491402 +
gaaatgctcccggccaggcgct

SEQ ID NO: 200039 - DNA, 22 bp, Artificial Sequence
  Synthetic oligonucleotide; TTG chr2 60491381 60491402 60491398 60491403 +
aaatgctcccggccaggcgctg

SEQ ID NO: 200040 - DNA, 22 bp, Artificial Sequence
  Synthetic oligonucleotide; CTC chr2 60491389 60491410 60491406 60491411 +
ccggccaggcgctgtggctcac

SEQ ID NO: 200041 - DNA, 22 bp, Artificial Sequence
  Synthetic oligonucleotide; CTG chr2 60491403 60491424 60491420 60491425 +
tggctcacacctgtaatcccag

SEQ ID NO: 200042 - DNA, 22 bp, Artificial Sequence
  Synthetic oligonucleotide; CTC chr2 60491409 60491430 60491426 60491431 +
acacctgtaatcccagcacttt

SEQ ID NO: 200043 - DNA, 22 bp, Artificial Sequence
  Synthetic oligonucleotide; CTG chr2 60491416 60491437 60491433 60491438 +
taatcccagcactttgggaggc

SEQ ID NO: 200044 - DNA, 22 bp, Artificial Sequence
  Synthetic oligonucleotide; CTT chr2 60491430 60491451 60491447 60491452 +
tgggaggccggggcaggaggat

SEQ ID NO: 200045 - DNA, 22 bp, Artificial Sequence
  Synthetic oligonucleotide; TTT chr2 60491431 60491452 60491448 60491453 +
gggaggccggggcaggaggatc

SEQ ID NO: 200046 - DNA, 22 bp, Artificial Sequence
  Synthetic oligonucleotide; TTG chr2 60491432 60491453 60491449 60491454 +
ggaggccggggcaggaggatca

SEQ ID NO: 200047 - DNA, 22 bp, Artificial Sequence
  Synthetic oligonucleotide; CTG chr2 60491458 60491479 60491475 60491480 +
aggtcaggagttcaagatcagt

SEQ ID NO: 200048 - DNA, 22 bp, Artificial Sequence
  Synthetic oligonucleotide; TTC chr2 60491471 60491492 60491488 60491493 +
aagatcagtttggacaacacag

SEQ ID NO: 200049 - DNA, 22 bp, Artificial Sequence
  Synthetic oligonucleotide; TTT chr2 60491482 60491503 60491499 60491504 +
ggacaacacagtgaaaccccgt

SEQ ID NO: 200050 - DNA, 22 bp, Artificial Sequence
  Synthetic oligonucleotide; TTG chr2 60491483 60491504 60491500 60491505 +
gacaacacagtgaaaccccgtc

SEQ ID NO: 200051 - DNA, 22 bp, Artificial Sequence
  Synthetic oligonucleotide; CTC chr2 60491507 60491528 60491524 60491529 +
tactaaaaatacaaaattagcc

SEQ ID NO: 200052 - DNA, 22 bp, Artificial Sequence
  Synthetic oligonucleotide; CTA chr2 60491509 60491530 60491526 60491531 +
ctaaaaatacaaaattagccgg

SEQ ID NO: 200053 - DNA, 22 bp, Artificial Sequence
  Synthetic oligonucleotide; CTA chr2 60491512 60491533 60491529 60491534 +
aaaatacaaaattagccgggca

SEQ ID NO: 200054 - DNA, 22 bp, Artificial Sequence
  Synthetic oligonucleotide; TTA chr2 60491526 60491547 60491543 60491548 +
gccgggcatggtaatacatgcc

SEQ ID NO: 200055 - DNA, 22 bp, Artificial Sequence
  Synthetic oligonucleotide; CTG chr2 60491550 60491571 60491567 60491572 +
taatctcagctactcgggaggc

SEQ ID NO: 200056 - DNA, 22 bp, Artificial Sequence
  Synthetic oligonucleotide; CTC chr2 60491557 60491578 60491574 60491579 +
agctactcgggaggctgaggca

SEQ ID NO: 200057 - DNA, 22 bp, Artificial Sequence
  Synthetic oligonucleotide; CTA chr2 60491562 60491583 60491579 60491584 +
ctcgggaggctgaggcaggaga

SEQ ID NO: 200058 - DNA, 22 bp, Artificial Sequence
  Synthetic oligonucleotide; CTC chr2 60491565 60491586 60491582 60491587 +
gggaggctgaggcaggagatcg

SEQ ID NO: 200059 - DNA, 22 bp, Artificial Sequence
  Synthetic oligonucleotide; CTG chr2 60491574 60491595 60491591 60491596 +
aggcaggagatcgcttgaacct

SEQ ID NO: 200060 - DNA, 22 bp, Artificial Sequence
  Synthetic oligonucleotide; CTT chr2 60491590 60491611 60491607 60491612 +
gaacctgggaggcagaagatgc

SEQ ID NO: 200061 - DNA, 22 bp, Artificial Sequence
  Synthetic oligonucleotide; TTG chr2 60491591 60491612 60491608 60491613 +
aacctgggaggcagaagatgca

SEQ ID NO: 200062 - DNA, 22 bp, Artificial Sequence
  Synthetic oligonucleotide; CTG chr2 60491597 60491618 60491614 60491619 +
ggaggcagaagatgcagtgagc

SEQ ID NO: 200063 - DNA, 22 bp, Artificial Sequence
  Synthetic oligonucleotide; TTG chr2 60491635 60491656 60491652 60491657 +
cattccagcccgggcaacaaga

SEQ ID NO: 200064 - DNA, 22 bp, Artificial Sequence
  Synthetic oligonucleotide; TTC chr2 60491640 60491661 60491657 60491662 +
cagcccgggcaacaagagtaaa

SEQ ID NO: 200065 - DNA, 22 bp, Artificial Sequence
  Synthetic oligonucleotide; CTC chr2 60491666 60491687 60491683 60491688 +
cgtctcaccaaaaaaagaaaaa

SEQ ID NO: 200066 - DNA, 22 bp, Artificial Sequence
  Synthetic oligonucleotide; CTC chr2 60491672 60491693 60491689 60491694 +
accaaaaaaagaaaaaagaaaa

SEQ ID NO: 200067 - DNA, 22 bp, Artificial Sequence
  Synthetic oligonucleotide; CTC chr2 60491717 60491738 60491734 60491739 +
ccctcagttctccaggctgggc

SEQ ID NO: 200068 - DNA, 22 bp, Artificial Sequence
  Synthetic oligonucleotide; CTC chr2 60491722 60491743 60491739 60491744 +
agttctccaggctgggctgact

SEQ ID NO: 200069 - DNA, 22 bp, Artificial Sequence
  Synthetic oligonucleotide; TTC chr2 60491727 60491748 60491744 60491749 +
tccaggctgggctgactgccca

SEQ ID NO: 200070 - DNA, 22 bp, Artificial Sequence
  Synthetic oligonucleotide; CTC chr2 60491729 60491750 60491746 60491751 +
caggctgggctgactgcccacg

SEQ ID NO: 200071 - DNA, 22 bp, Artificial Sequence
  Synthetic oligonucleotide; CTG chr2 60491736 60491757 60491753 60491758 +
ggctgactgcccacgtcaaaac

SEQ ID NO: 200072 - DNA, 22 bp, Artificial Sequence
  Synthetic oligonucleotide; CTG chr2 60491741 60491762 60491758 60491763 +
actgcccacgtcaaaacaccct

SEQ ID NO: 200073 - DNA, 22 bp, Artificial Sequence
  Synthetic oligonucleotide; CTG chr2 60491745 60491766 60491762 60491767 +
cccacgtcaaaacaccctaggc

SEQ ID NO: 200074 - DNA, 22 bp, Artificial Sequence
  Synthetic oligonucleotide; CTA chr2 60491764 60491785 60491781 60491786 +
ggcatcatcactccgtgttgag

SEQ ID NO: 200075 - DNA, 22 bp, Artificial Sequence
  Synthetic oligonucleotide; CTC chr2 60491777 60491798 60491794 60491799 +
cgtgttgagagccaagtggcca

SEQ ID NO: 200076 - DNA, 22 bp, Artificial Sequence
  Synthetic oligonucleotide; TTG chr2 60491784 60491805 60491801 60491806 +
agagccaagtggccaggtagga

SEQ ID NO: 200077 - DNA, 22 bp, Artificial Sequence
  Synthetic oligonucleotide; CTA chr2 60491816 60491837 60491833 60491838 +
cgcaggcacagacgttttccat

SEQ ID NO: 200078 - DNA, 22 bp, Artificial Sequence
  Synthetic oligonucleotide; TTT chr2 60491833 60491854 60491850 60491855 +
tccatgttaagaacccaaatcc

SEQ ID NO: 200079 - DNA, 22 bp, Artificial Sequence
  Synthetic oligonucleotide; TTT chr2 60491834 60491855 60491851 60491856 +
ccatgttaagaacccaaatcca

SEQ ID NO: 200080 - DNA, 22 bp, Artificial Sequence
  Synthetic oligonucleotide; TTC chr2 60491835 60491856 60491852 60491857 +
catgttaagaacccaaatccat

SEQ ID NO: 200081 - DNA, 22 bp, Artificial Sequence
  Synthetic oligonucleotide; TTA chr2 60491842 60491863 60491859 60491864 +
agaacccaaatccatacagtcc

SEQ ID NO: 200082 - DNA, 22 bp, Artificial Sequence
  Synthetic oligonucleotide; CTT chr2 60491866 60491887 60491883 60491888 +
agcacccaaataggttcagaaa

SEQ ID NO: 200083 - DNA, 22 bp, Artificial Sequence
  Synthetic oligonucleotide; TTA chr2 60491867 60491888 60491884 60491889 +
gcacccaaataggttcagaaaa

SEQ ID NO: 200084 - DNA, 22 bp, Artificial Sequence
  Synthetic oligonucleotide; TTC chr2 60491883 60491904 60491900 60491905 +
agaaaaggcagtccacacaaat

SEQ ID NO: 200085 - DNA, 22 bp, Artificial Sequence
  Synthetic oligonucleotide; CTG chr2 60491908 60491929 60491925 60491930 +
ccaaataaatgaagttcagata

SEQ ID NO: 200086 - DNA, 22 bp, Artificial Sequence
  Synthetic oligonucleotide; TTC chr2 60491925 60491946 60491942 60491947 +
agatattgcatttacgctaaat

SEQ ID NO: 200087 - DNA, 22 bp, Artificial Sequence
  Synthetic oligonucleotide; TTG chr2 60491933 60491954 60491950 60491955 +
catttacgctaaataccttgga

SEQ ID NO: 200088 - DNA, 22 bp, Artificial Sequence
  Synthetic oligonucleotide; TTT chr2 60491938 60491959 60491955 60491960 +
acgctaaataccttggaaattg

SEQ ID NO: 200089 - DNA, 22 bp, Artificial Sequence
  Synthetic oligonucleotide; TTA chr2 60491939 60491960 60491956 60491961 +
cgctaaataccttggaaattga

SEQ ID NO: 200090 - DNA, 22 bp, Artificial Sequence
  Synthetic oligonucleotide; CTA chr2 60491944 60491965 60491961 60491966 +
aataccttggaaattgagaggg

SEQ ID NO: 200091 - DNA, 22 bp, Artificial Sequence
  Synthetic oligonucleotide; CTT chr2 60491952 60491973 60491969 60491974 +
ggaaattgagagggaatctgga

SEQ ID NO: 200092 - DNA, 22 bp, Artificial Sequence
  Synthetic oligonucleotide; TTG chr2 60491953 60491974 60491970 60491975 +
gaaattgagagggaatctggag

SEQ ID NO: 200093 - DNA, 22 bp, Artificial Sequence
  Synthetic oligonucleotide; TTG chr2 60491960 60491981 60491977 60491982 +
agagggaatctggagaggaaga

SEQ ID NO: 200094 - DNA, 22 bp, Artificial Sequence
  Synthetic oligonucleotide; CTG chr2 60491972 60491993 60491989 60491994 +
gagaggaagatggatgtaggaa

SEQ ID NO: 200095 - DNA, 22 bp, Artificial Sequence
  Synthetic oligonucleotide; CTC chr2 60492008 60492029 60492025 60492030 +
actttacaggaattcagcacag

SEQ ID NO: 200096 - DNA, 22 bp, Artificial Sequence
  Synthetic oligonucleotide; CTT chr2 60492012 60492033 60492029 60492034 +
tacaggaattcagcacaggaga

SEQ ID NO: 200097 - DNA, 22 bp, Artificial Sequence
  Synthetic oligonucleotide; TTT chr2 60492013 60492034 60492030 60492035 +
acaggaattcagcacaggagat

SEQ ID NO: 200098 - DNA, 22 bp, Artificial Sequence
  Synthetic oligonucleotide; TTA chr2 60492014 60492035 60492031 60492036 +
caggaattcagcacaggagatg

SEQ ID NO: 200099 - DNA, 22 bp, Artificial Sequence
  Synthetic oligonucleotide; TTC chr2 60492023 60492044 60492040 60492045 +
agcacaggagatgctacattgt

SEQ ID NO: 200100 - DNA, 22 bp, Artificial Sequence
  Synthetic oligonucleotide; CTA chr2 60492039 60492060 60492056 60492061 +
cattgttagcatctccgcttaa

SEQ ID NO: 200101 - DNA, 22 bp, Artificial Sequence
  Synthetic oligonucleotide; TTG chr2 60492044 60492065 60492061 60492066 +
ttagcatctccgcttaaggaga

SEQ ID NO: 200102 - DNA, 22 bp, Artificial Sequence
  Synthetic oligonucleotide; TTA chr2 60492047 60492068 60492064 60492069 +
gcatctccgcttaaggagaaga

SEQ ID NO: 200103 - DNA, 22 bp, Artificial Sequence
  Synthetic oligonucleotide; CTC chr2 60492054 60492075 60492071 60492076 +
cgcttaaggagaagacatactg

SEQ ID NO: 200104 - DNA, 22 bp, Artificial Sequence
  Synthetic oligonucleotide; CTT chr2 60492059 60492080 60492076 60492081 +
aaggagaagacatactgatgaa

SEQ ID NO: 200105 - DNA, 22 bp, Artificial Sequence
  Synthetic oligonucleotide; TTA chr2 60492060 60492081 60492077 60492082 +
aggagaagacatactgatgaat

SEQ ID NO: 200106 - DNA, 22 bp, Artificial Sequence
  Synthetic oligonucleotide; CTG chr2 60492076 60492097 60492093 60492098 +
atgaataagactgagttggtga

SEQ ID NO: 200107 - DNA, 22 bp, Artificial Sequence
  Synthetic oligonucleotide; CTG chr2 60492089 60492110 60492106 60492111 +
agttggtgacaggcacagtggc

SEQ ID NO: 200108 - DNA, 22 bp, Artificial Sequence
  Synthetic oligonucleotide; TTG chr2 60492094 60492115 60492111 60492116 +
gtgacaggcacagtggctctcg

SEQ ID NO: 200109 - DNA, 22 bp, Artificial Sequence
  Synthetic oligonucleotide; CTC chr2 60492113 60492134 60492130 60492135 +
tcgcctgtaatcccagcacttt

SEQ ID NO: 200110 - DNA, 22 bp, Artificial Sequence
  Synthetic oligonucleotide; CTC chr2 60492115 60492136 60492132 60492137 +
gcctgtaatcccagcactttgg

SEQ ID NO: 200111 - DNA, 22 bp, Artificial Sequence
  Synthetic oligonucleotide; CTG chr2 60492120 60492141 60492137 60492142 +
taatcccagcactttgggaggt

SEQ ID NO: 200112 - DNA, 22 bp, Artificial Sequence
  Synthetic oligonucleotide; CTT chr2 60492134 60492155 60492151 60492156 +
tgggaggtcaaggcaggaggat

SEQ ID NO: 200113 - DNA, 22 bp, Artificial Sequence
  Synthetic oligonucleotide; TTT chr2 60492135 60492156 60492152 60492157 +
gggaggtcaaggcaggaggatc

SEQ ID NO: 200114 - DNA, 22 bp, Artificial Sequence
  Synthetic oligonucleotide; TTG chr2 60492136 60492157 60492153 60492158 +
ggaggtcaaggcaggaggatca

SEQ ID NO: 200115 - DNA, 22 bp, Artificial Sequence
  Synthetic oligonucleotide; CTG chr2 60492161 60492182 60492178 60492183 +
gagcccaggagttcaagaccag

SEQ ID NO: 200116 - DNA, 22 bp, Artificial Sequence
  Synthetic oligonucleotide; TTC chr2 60492175 60492196 60492192 60492197 +
aagaccagcctgggcaacaggg

SEQ ID NO: 200117 - DNA, 22 bp, Artificial Sequence
  Synthetic oligonucleotide; CTG chr2 60492187 60492208 60492204 60492209 +
ggcaacagggagaaactccatc

SEQ ID NO: 200118 - DNA, 22 bp, Artificial Sequence
  Synthetic oligonucleotide; CTC chr2 60492205 60492226 60492222 60492227 +
catctctacaaaattagccagg

SEQ ID NO: 200119 - DNA, 22 bp, Artificial Sequence
  Synthetic oligonucleotide; CTC chr2 60492211 60492232 60492228 60492233 +
tacaaaattagccaggcatggt

SEQ ID NO: 200120 - DNA, 22 bp, Artificial Sequence
  Synthetic oligonucleotide; CTA chr2 60492213 60492234 60492230 60492235 +
caaaattagccaggcatggtgg

SEQ ID NO: 200121 - DNA, 22 bp, Artificial Sequence
  Synthetic oligonucleotide; TTA chr2 60492221 60492242 60492238 60492243 +
gccaggcatggtggcatgcacc

SEQ ID NO: 200122 - DNA, 22 bp, Artificial Sequence
  Synthetic oligonucleotide; CTG chr2 60492245 60492266 60492262 60492267 +
tcgtcccagctactcaggaggc

SEQ ID NO: 200123 - DNA, 22 bp, Artificial Sequence
  Synthetic oligonucleotide; CTA chr2 60492257 60492278 60492274 60492279 +
ctcaggaggctgaggtgacagg

SEQ ID NO: 200124 - DNA, 22 bp, Artificial Sequence
  Synthetic oligonucleotide; CTC chr2 60492260 60492281 60492277 60492282 +
aggaggctgaggtgacaggatg

SEQ ID NO: 200125 - DNA, 22 bp, Artificial Sequence
  Synthetic oligonucleotide; CTG chr2 60492269 60492290 60492286 60492291 +
aggtgacaggatggcttgagcc

SEQ ID NO: 200126 - DNA, 22 bp, Artificial Sequence
  Synthetic oligonucleotide; CTT chr2 60492286 60492307 60492303 60492308 +
gagcctaggagatcaaggctgc

SEQ ID NO: 200127 - DNA, 22 bp, Artificial Sequence
  Synthetic oligonucleotide; TTG chr2 60492287 60492308 60492304 60492309 +
agcctaggagatcaaggctgca

SEQ ID NO: 200128 - DNA, 22 bp, Artificial Sequence
  Synthetic oligonucleotide; CTA chr2 60492293 60492314 60492310 60492315 +
ggagatcaaggctgcagtgagc

SEQ ID NO: 200129 - DNA, 22 bp, Artificial Sequence
  Synthetic oligonucleotide; CTG chr2 60492307 60492328 60492324 60492329 +
cagtgagctatgaacatgccac

SEQ ID NO: 200130 - DNA, 22 bp, Artificial Sequence
  Synthetic oligonucleotide; CTA chr2 60492317 60492338 60492334 60492339 +
tgaacatgccactacactctag

SEQ ID NO: 200131 - DNA, 22 bp, Artificial Sequence
  Synthetic oligonucleotide; CTA chr2 60492331 60492352 60492348 60492353 +
cactctagcctaggcaacacag

SEQ ID NO: 200132 - DNA, 22 bp, Artificial Sequence
  Synthetic oligonucleotide; CTC chr2 60492336 60492357 60492353 60492358 +
tagcctaggcaacacagcgaga

SEQ ID NO: 200133 - DNA, 22 bp, Artificial Sequence
  Synthetic oligonucleotide; CTA chr2 60492338 60492359 60492355 60492360 +
gcctaggcaacacagcgagacc

SEQ ID NO: 200134 - DNA, 22 bp, Artificial Sequence
  Synthetic oligonucleotide; CTA chr2 60492343 60492364 60492360 60492365 +
ggcaacacagcgagaccctgtc

SEQ ID NO: 200135 - DNA, 22 bp, Artificial Sequence
  Synthetic oligonucleotide; CTG chr2 60492363 60492384 60492380 60492385 +
tctcaaaaacaaacaaacaaac

SEQ ID NO: 200136 - DNA, 22 bp, Artificial Sequence
  Synthetic oligonucleotide; CTC chr2 60492367 60492388 60492384 60492389 +
aaaaacaaacaaacaaacaaac

SEQ ID NO: 200137 - DNA, 22 bp, Artificial Sequence
  Synthetic oligonucleotide; CTA chr2 60492401 60492422 60492418 60492423 +
attgggctaatgtttagaataa

SEQ ID NO: 200138 - DNA, 22 bp, Artificial Sequence
  Synthetic oligonucleotide; TTG chr2 60492405 60492426 60492422 60492427 +
ggctaatgtttagaataaatgt

SEQ ID NO: 200139 - DNA, 22 bp, Artificial Sequence
  Synthetic oligonucleotide; CTA chr2 60492410 60492431 60492427 60492432 +
atgtttagaataaatgtatttc

SEQ ID NO: 200140 - DNA, 22 bp, Artificial Sequence
  Synthetic oligonucleotide; TTT chr2 60492416 60492437 60492433 60492438 +
agaataaatgtatttctaggga

SEQ ID NO: 200141 - DNA, 22 bp, Artificial Sequence
  Synthetic oligonucleotide; TTA chr2 60492417 60492438 60492434 60492439 +
gaataaatgtatttctagggaa

SEQ ID NO: 200142 - DNA, 22 bp, Artificial Sequence
  Synthetic oligonucleotide; TTT chr2 60492431 60492452 60492448 60492453 +
ctagggaagaaaaaaacttagt

SEQ ID NO: 200143 - DNA, 22 bp, Artificial Sequence
  Synthetic oligonucleotide; TTC chr2 60492432 60492453 60492449 60492454 +
tagggaagaaaaaaacttagtt

SEQ ID NO: 200144 - DNA, 22 bp, Artificial Sequence
  Synthetic oligonucleotide; CTA chr2 60492434 60492455 60492451 60492456 +
gggaagaaaaaaacttagttgg

SEQ ID NO: 200145 - DNA, 22 bp, Artificial Sequence
  Synthetic oligonucleotide; CTT chr2 60492450 60492471 60492467 60492472 +
agttgggtactccctccccttt

SEQ ID NO: 200146 - DNA, 22 bp, Artificial Sequence
  Synthetic oligonucleotide; TTA chr2 60492451 60492472 60492468 60492473 +
gttgggtactccctcccctttt

SEQ ID NO: 200147 - DNA, 22 bp, Artificial Sequence
  Synthetic oligonucleotide; TTG chr2 60492455 60492476 60492472 60492477 +
ggtactccctcccctttttact

SEQ ID NO: 200148 - DNA, 22 bp, Artificial Sequence
  Synthetic oligonucleotide; CTC chr2 60492462 60492483 60492479 60492484 +
cctcccctttttactttttgaa

SEQ ID NO: 200149 - DNA, 22 bp, Artificial Sequence
  Synthetic oligonucleotide; CTC chr2 60492466 60492487 60492483 60492488 +
ccctttttactttttgaagcct

SEQ ID NO: 200150 - DNA, 22 bp, Artificial Sequence
  Synthetic oligonucleotide; CTT chr2 60492471 60492492 60492488 60492493 +
tttactttttgaagcctgctgg

SEQ ID NO: 200151 - DNA, 22 bp, Artificial Sequence
  Synthetic oligonucleotide; TTT chr2 60492472 60492493 60492489 60492494 +
ttactttttgaagcctgctgga

SEQ ID NO: 200152 - DNA, 22 bp, Artificial Sequence
  Synthetic oligonucleotide; TTT chr2 60492473 60492494 60492490 60492495 +
tactttttgaagcctgctggaa

SEQ ID NO: 200153 - DNA, 22 bp, Artificial Sequence
  Synthetic oligonucleotide; TTT chr2 60492474 60492495 60492491 60492496 +
actttttgaagcctgctggaat

SEQ ID NO: 200154 - DNA, 22 bp, Artificial Sequence
  Synthetic oligonucleotide; TTA chr2 60492475 60492496 60492492 60492497 +
ctttttgaagcctgctggaatt

SEQ ID NO: 200155 - DNA, 22 bp, Artificial Sequence
  Synthetic oligonucleotide; CTT chr2 60492478 60492499 60492495 60492500 +
tttgaagcctgctggaattcta

SEQ ID NO: 200156 - DNA, 22 bp, Artificial Sequence
  Synthetic oligonucleotide; TTT chr2 60492479 60492500 60492496 60492501 +
ttgaagcctgctggaattctag

SEQ ID NO: 200157 - DNA, 22 bp, Artificial Sequence
  Synthetic oligonucleotide; TTT chr2 60492480 60492501 60492497 60492502 +
tgaagcctgctggaattctagg

SEQ ID NO: 200158 - DNA, 22 bp, Artificial Sequence
  Synthetic oligonucleotide; TTT chr2 60492481 60492502 60492498 60492503 +
gaagcctgctggaattctagga

SEQ ID NO: 200159 - DNA, 22 bp, Artificial Sequence
  Synthetic oligonucleotide; TTG chr2 60492482 60492503 60492499 60492504 +
aagcctgctggaattctaggaa

SEQ ID NO: 200160 - DNA, 22 bp, Artificial Sequence
  Synthetic oligonucleotide; CTG chr2 60492489 60492510 60492506 60492511 +
ctggaattctaggaaaacagat

SEQ ID NO: 200161 - DNA, 22 bp, Artificial Sequence
  Synthetic oligonucleotide; CTG chr2 60492492 60492513 60492509 60492514 +
gaattctaggaaaacagatttc

SEQ ID NO: 200162 - DNA, 22 bp, Artificial Sequence
  Synthetic oligonucleotide; TTC chr2 60492498 60492519 60492515 60492520 +
taggaaaacagatttcctcccc

SEQ ID NO: 200163 - DNA, 22 bp, Artificial Sequence
  Synthetic oligonucleotide; CTA chr2 60492500 60492521 60492517 60492522 +
ggaaaacagatttcctcccctt

SEQ ID NO: 200164 - DNA, 22 bp, Artificial Sequence
  Synthetic oligonucleotide; TTT chr2 60492513 60492534 60492530 60492535 +
cctccccttgctctctccttcc

SEQ ID NO: 200165 - DNA, 22 bp, Artificial Sequence
  Synthetic oligonucleotide; TTC chr2 60492514 60492535 60492531 60492536 +
ctccccttgctctctccttcct

SEQ ID NO: 200166 - DNA, 22 bp, Artificial Sequence
  Synthetic oligonucleotide; CTC chr2 60492517 60492538 60492534 60492539 +
cccttgctctctccttcctcac

SEQ ID NO: 200167 - DNA, 22 bp, Artificial Sequence
  Synthetic oligonucleotide; CTT chr2 60492522 60492543 60492539 60492544 +
gctctctccttcctcacatact

SEQ ID NO: 200168 - DNA, 22 bp, Artificial Sequence
  Synthetic oligonucleotide; TTG chr2 60492523 60492544 60492540 60492545 +
ctctctccttcctcacatactc

SEQ ID NO: 200169 - DNA, 22 bp, Artificial Sequence
  Synthetic oligonucleotide; CTC chr2 60492526 60492547 60492543 60492548 +
tctccttcctcacatactcacc

SEQ ID NO: 200170 - DNA, 22 bp, Artificial Sequence
  Synthetic oligonucleotide; CTC chr2 60492528 60492549 60492545 60492550 +
tccttcctcacatactcaccag

SEQ ID NO: 200171 - DNA, 22 bp, Artificial Sequence
  Synthetic oligonucleotide; CTC chr2 60492530 60492551 60492547 60492552 +
cttcctcacatactcaccagta

SEQ ID NO: 200172 - DNA, 22 bp, Artificial Sequence
  Synthetic oligonucleotide; CTT chr2 60492533 60492554 60492550 60492555 +
cctcacatactcaccagtactc

SEQ ID NO: 200173 - DNA, 22 bp, Artificial Sequence
  Synthetic oligonucleotide; TTC chr2 60492534 60492555 60492551 60492556 +
ctcacatactcaccagtactca

SEQ ID NO: 200174 - DNA, 22 bp, Artificial Sequence
  Synthetic oligonucleotide; CTC chr2 60492537 60492558 60492554 60492559 +
acatactcaccagtactcatgc

SEQ ID NO: 200175 - DNA, 22 bp, Artificial Sequence
  Synthetic oligonucleotide; CTC chr2 60492545 60492566 60492562 60492567 +
accagtactcatgcgcttctca

SEQ ID NO: 200176 - DNA, 22 bp, Artificial Sequence
  Synthetic oligonucleotide; CTC chr2 60492555 60492576 60492572 60492577 +
atgcgcttctcagacccaaatg

SEQ ID NO: 200177 - DNA, 22 bp, Artificial Sequence
  Synthetic oligonucleotide; CTT chr2 60492563 60492584 60492580 60492585 +
ctcagacccaaatgctctgctt

SEQ ID NO: 200178 - DNA, 22 bp, Artificial Sequence
  Synthetic oligonucleotide; TTC chr2 60492564 60492585 60492581 60492586 +
tcagacccaaatgctctgctta

SEQ ID NO: 200179 - DNA, 22 bp, Artificial Sequence
  Synthetic oligonucleotide; CTC chr2 60492566 60492587 60492583 60492588 +
agacccaaatgctctgcttatg

SEQ ID NO: 200180 - DNA, 22 bp, Artificial Sequence
  Synthetic oligonucleotide; CTC chr2 60492580 60492601 60492597 60492602 +
tgcttatggtggataaccccat

SEQ ID NO: 200181 - DNA, 22 bp, Artificial Sequence
  Synthetic oligonucleotide; CTG chr2 60492582 60492603 60492599 60492604 +
cttatggtggataaccccatct

SEQ ID NO: 200182 - DNA, 22 bp, Artificial Sequence
  Synthetic oligonucleotide; CTT chr2 60492585 60492606 60492602 60492607 +
atggtggataaccccatctcag

SEQ ID NO: 200183 - DNA, 22 bp, Artificial Sequence
  Synthetic oligonucleotide; TTA chr2 60492586 60492607 60492603 60492608 +
tggtggataaccccatctcagt

SEQ ID NO: 200184 - DNA, 22 bp, Artificial Sequence
  Synthetic oligonucleotide; CTC chr2 60492605 60492626 60492622 60492627 +
agtgggcctccctctctctctc

SEQ ID NO: 200185 - DNA, 22 bp, Artificial Sequence
  Synthetic oligonucleotide; CTC chr2 60492615 60492636 60492632 60492637 +
cctctctctctctctctctctc

SEQ ID NO: 200186 - DNA, 22 bp, Artificial Sequence
  Synthetic oligonucleotide; CTC chr2 60492619 60492640 60492636 60492641 +
tctctctctctctctctctctc

SEQ ID NO: 200187 - DNA, 22 bp, Artificial Sequence
  Synthetic oligonucleotide; CTC chr2 60492621 60492642 60492638 60492643 +
tctctctctctctctctctctc

SEQ ID NO: 200188 - DNA, 22 bp, Artificial Sequence
  Synthetic oligonucleotide; CTC chr2 60492623 60492644 60492640 60492645 +
tctctctctctctctctctctg

SEQ ID NO: 200189 - DNA, 22 bp, Artificial Sequence
  Synthetic oligonucleotide; CTC chr2 60492625 60492646 60492642 60492647 +
tctctctctctctctctctgtc

SEQ ID NO: 200190 - DNA, 22 bp, Artificial Sequence
  Synthetic oligonucleotide; CTC chr2 60492627 60492648 60492644 60492649 +
tctctctctctctctctgtcat

SEQ ID NO: 200191 - DNA, 22 bp, Artificial Sequence
  Synthetic oligonucleotide; CTC chr2 60492629 60492650 60492646 60492651 +
tctctctctctctctgtcatta

SEQ ID NO: 200192 - DNA, 22 bp, Artificial Sequence
  Synthetic oligonucleotide; CTC chr2 60492631 60492652 60492648 60492653 +
tctctctctctctgtcattacc

SEQ ID NO: 200193 - DNA, 22 bp, Artificial Sequence
  Synthetic oligonucleotide; CTC chr2 60492633 60492654 60492650 60492655 +
tctctctctctgtcattaccaa

SEQ ID NO: 200194 - DNA, 22 bp, Artificial Sequence
  Synthetic oligonucleotide; CTC chr2 60492635 60492656 60492652 60492657 +
tctctctctgtcattaccaact

SEQ ID NO: 200195 - DNA, 22 bp, Artificial Sequence
  Synthetic oligonucleotide; CTC chr2 60492637 60492658 60492654 60492659 +
tctctctgtcattaccaacttc

SEQ ID NO: 200196 - DNA, 22 bp, Artificial Sequence
  Synthetic oligonucleotide; CTC chr2 60492639 60492660 60492656 60492661 +
tctctgtcattaccaacttcta

SEQ ID NO: 200197 - DNA, 22 bp, Artificial Sequence
  Synthetic oligonucleotide; CTC chr2 60492641 60492662 60492658 60492663 +
tctgtcattaccaacttctata

SEQ ID NO: 200198 - DNA, 22 bp, Artificial Sequence
  Synthetic oligonucleotide; CTC chr2 60492643 60492664 60492660 60492665 +
tgtcattaccaacttctataaa

SEQ ID NO: 200199 - DNA, 22 bp, Artificial Sequence
  Synthetic oligonucleotide; CTG chr2 60492645 60492666 60492662 60492667 +
tcattaccaacttctataaaat

SEQ ID NO: 200200 - DNA, 22 bp, Artificial Sequence
  Synthetic oligonucleotide; TTA chr2 60492651 60492672 60492668 60492673 +
ccaacttctataaaatctcaga

SEQ ID NO: 200201 - DNA, 22 bp, Artificial Sequence
  Synthetic oligonucleotide; CTT chr2 60492658 60492679 60492675 60492680 +
ctataaaatctcagaatacaaa

SEQ ID NO: 200202 - DNA, 22 bp, Artificial Sequence
  Synthetic oligonucleotide; TTC chr2 60492659 60492680 60492676 60492681 +
tataaaatctcagaatacaaag

SEQ ID NO: 200203 - DNA, 22 bp, Artificial Sequence
  Synthetic oligonucleotide; CTA chr2 60492661 60492682 60492678 60492683 +
taaaatctcagaatacaaaggg

SEQ ID NO: 200204 - DNA, 22 bp, Artificial Sequence
  Synthetic oligonucleotide; CTC chr2 60492670 60492691 60492687 60492692 +
agaatacaaagggcattctcat

SEQ ID NO: 200205 - DNA, 22 bp, Artificial Sequence
  Synthetic oligonucleotide; TTC chr2 60492688 60492709 60492705 60492710 +
tcatttccctgaaatgtacttt

SEQ ID NO: 200206 - DNA, 22 bp, Artificial Sequence
  Synthetic oligonucleotide; CTC chr2 60492690 60492711 60492707 60492712 +
atttccctgaaatgtactttgg

SEQ ID NO: 200207 - DNA, 22 bp, Artificial Sequence
  Synthetic oligonucleotide; TTT chr2 60492694 60492715 60492711 60492716 +
ccctgaaatgtactttggtgct

SEQ ID NO: 200208 - DNA, 22 bp, Artificial Sequence
  Synthetic oligonucleotide; TTC chr2 60492695 60492716 60492712 60492717 +
cctgaaatgtactttggtgcta

SEQ ID NO: 200209 - DNA, 22 bp, Artificial Sequence
  Synthetic oligonucleotide; CTG chr2 60492699 60492720 60492716 60492721 +
aaatgtactttggtgctaccct

SEQ ID NO: 200210 - DNA, 22 bp, Artificial Sequence
  Synthetic oligonucleotide; CTT chr2 60492709 60492730 60492726 60492731 +
tggtgctaccctgaaagacggc

SEQ ID NO: 200211 - DNA, 22 bp, Artificial Sequence
  Synthetic oligonucleotide; TTT chr2 60492710 60492731 60492727 60492732 +
ggtgctaccctgaaagacggct

SEQ ID NO: 200212 - DNA, 22 bp, Artificial Sequence
  Synthetic oligonucleotide; TTG chr2 60492711 60492732 60492728 60492733 +
gtgctaccctgaaagacggcta

SEQ ID NO: 200213 - DNA, 22 bp, Artificial Sequence
  Synthetic oligonucleotide; CTA chr2 60492717 60492738 60492734 60492739 +
ccctgaaagacggctagagtct

SEQ ID NO: 200214 - DNA, 22 bp, Artificial Sequence
  Synthetic oligonucleotide; CTG chr2 60492722 60492743 60492739 60492744 +
aaagacggctagagtcttgagg

SEQ ID NO: 200215 - DNA, 22 bp, Artificial Sequence
  Synthetic oligonucleotide; CTA chr2 60492733 60492754 60492750 60492755 +
gagtcttgaggagacccaaaca

SEQ ID NO: 200216 - DNA, 22 bp, Artificial Sequence
  Synthetic oligonucleotide; CTT chr2 60492740 60492761 60492757 60492762 +
gaggagacccaaacagttaaag

SEQ ID NO: 200217 - DNA, 22 bp, Artificial Sequence
  Synthetic oligonucleotide; TTG chr2 60492741 60492762 60492758 60492763 +
aggagacccaaacagttaaagg

SEQ ID NO: 200218 - DNA, 22 bp, Artificial Sequence
  Synthetic oligonucleotide; TTA chr2 60492759 60492780 60492776 60492781 +
aaggttacagacagacttggtt

SEQ ID NO: 200219 - DNA, 22 bp, Artificial Sequence
  Synthetic oligonucleotide; TTA chr2 60492766 60492787 60492783 60492788 +
cagacagacttggttccactcc

SEQ ID NO: 200220 - DNA, 22 bp, Artificial Sequence
  Synthetic oligonucleotide; CTT chr2 60492777 60492798 60492794 60492799 +
ggttccactccagtggtgggtg

SEQ ID NO: 200221 - DNA, 22 bp, Artificial Sequence
  Synthetic oligonucleotide; TTG chr2 60492778 60492799 60492795 60492800 +
gttccactccagtggtgggtgt

SEQ ID NO: 200222 - DNA, 22 bp, Artificial Sequence
  Synthetic oligonucleotide; TTC chr2 60492782 60492803 60492799 60492804 +
cactccagtggtgggtgttttg

SEQ ID NO: 200223 - DNA, 22 bp, Artificial Sequence
  Synthetic oligonucleotide; CTC chr2 60492787 60492808 60492804 60492809 +
cagtggtgggtgttttgttttg

SEQ ID NO: 200224 - DNA, 22 bp, Artificial Sequence
  Synthetic oligonucleotide; TTT chr2 60492802 60492823 60492819 60492824 +
tgttttgtttcgctttagcttt

SEQ ID NO: 200225 - DNA, 22 bp, Artificial Sequence
  Synthetic oligonucleotide; TTT chr2 60492803 60492824 60492820 60492825 +
gttttgtttcgctttagcttta

SEQ ID NO: 200226 - DNA, 22 bp, Artificial Sequence
  Synthetic oligonucleotide; TTG chr2 60492804 60492825 60492821 60492826 +
ttttgtttcgctttagctttat

SEQ ID NO: 200227 - DNA, 22 bp, Artificial Sequence
  Synthetic oligonucleotide; TTT chr2 60492807 60492828 60492824 60492829 +
tgtttcgctttagctttattaa

SEQ ID NO: 200228 - DNA, 22 bp, Artificial Sequence
  Synthetic oligonucleotide; TTT chr2 60492808 60492829 60492825 60492830 +
gtttcgctttagctttattaag

SEQ ID NO: 200229 - DNA, 22 bp, Artificial Sequence
  Synthetic oligonucleotide; TTG chr2 60492809 60492830 60492826 60492831 +
tttcgctttagctttattaagg

SEQ ID NO: 200230 - DNA, 22 bp, Artificial Sequence
  Synthetic oligonucleotide; TTT chr2 60492812 60492833 60492829 60492834 +
cgctttagctttattaaggtat

SEQ ID NO: 200231 - DNA, 22 bp, Artificial Sequence
  Synthetic oligonucleotide; TTC chr2 60492813 60492834 60492830 60492835 +
gctttagctttattaaggtata

SEQ ID NO: 200232 - DNA, 22 bp, Artificial Sequence
  Synthetic oligonucleotide; CTT chr2 60492817 60492838 60492834 60492839 +
tagctttattaaggtatacttt

SEQ ID NO: 200233 - DNA, 22 bp, Artificial Sequence
  Synthetic oligonucleotide; TTT chr2 60492818 60492839 60492835 60492840 +
agctttattaaggtatacttta

SEQ ID NO: 200234 - DNA, 22 bp, Artificial Sequence
  Synthetic oligonucleotide; TTA chr2 60492819 60492840 60492836 60492841 +
gctttattaaggtatactttac

SEQ ID NO: 200235 - DNA, 22 bp, Artificial Sequence
  Synthetic oligonucleotide; CTT chr2 60492823 60492844 60492840 60492845 +
tattaaggtatactttacatac

SEQ ID NO: 200236 - DNA, 22 bp, Artificial Sequence
  Synthetic oligonucleotide; TTT chr2 60492824 60492845 60492841 60492846 +
attaaggtatactttacataca

SEQ ID NO: 200237 - DNA, 22 bp, Artificial Sequence
  Synthetic oligonucleotide; TTA chr2 60492825 60492846 60492842 60492847 +
ttaaggtatactttacatacaa

SEQ ID NO: 200238 - DNA, 22 bp, Artificial Sequence
  Synthetic oligonucleotide; TTA chr2 60492828 60492849 60492845 60492850 +
aggtatactttacatacaacaa

SEQ ID NO: 200239 - DNA, 22 bp, Artificial Sequence
  Synthetic oligonucleotide; CTT chr2 60492838 60492859 60492855 60492860 +
tacatacaacaaaagtcattca

SEQ ID NO: 200240 - DNA, 22 bp, Artificial Sequence
  Synthetic oligonucleotide; TTT chr2 60492839 60492860 60492856 60492861 +
acatacaacaaaagtcattcat

SEQ ID NO: 200241 - DNA, 22 bp, Artificial Sequence
  Synthetic oligonucleotide; TTA chr2 60492840 60492861 60492857 60492862 +
catacaacaaaagtcattcatt

SEQ ID NO: 200242 - DNA, 22 bp, Artificial Sequence
  Synthetic oligonucleotide; TTC chr2 60492859 60492880 60492876 60492881 +
attttaagtgtacagttggatt

SEQ ID NO: 200243 - DNA, 22 bp, Artificial Sequence
  Synthetic oligonucleotide; TTT chr2 60492863 60492884 60492880 60492885 +
taagtgtacagttggattcaat

SEQ ID NO: 200244 - DNA, 22 bp, Artificial Sequence
  Synthetic oligonucleotide; TTT chr2 60492864 60492885 60492881 60492886 +
aagtgtacagttggattcaatt

SEQ ID NO: 200245 - DNA, 22 bp, Artificial Sequence
  Synthetic oligonucleotide; TTA chr2 60492865 60492886 60492882 60492887 +
agtgtacagttggattcaattt

SEQ ID NO: 200246 - DNA, 22 bp, Artificial Sequence
  Synthetic oligonucleotide; TTG chr2 60492877 60492898 60492894 60492899 +
gattcaatttgccagttgtata

SEQ ID NO: 200247 - DNA, 22 bp, Artificial Sequence
  Synthetic oligonucleotide; TTC chr2 60492882 60492903 60492899 60492904 +
aatttgccagttgtatacagct

SEQ ID NO: 200248 - DNA, 22 bp, Artificial Sequence
  Synthetic oligonucleotide; TTT chr2 60492887 60492908 60492904 60492909 +
gccagttgtatacagctgtgtg

SEQ ID NO: 200249 - DNA, 22 bp, Artificial Sequence
  Synthetic oligonucleotide; TTG chr2 60492888 60492909 60492905 60492910 +
ccagttgtatacagctgtgtgg

SEQ ID NO: 200250 - DNA, 22 bp, Artificial Sequence
  Synthetic oligonucleotide; TTG chr2 60492895 60492916 60492912 60492917 +
tatacagctgtgtggcctccac

SEQ ID NO: 200251 - DNA, 22 bp, Artificial Sequence
  Synthetic oligonucleotide; CTG chr2 60492905 60492926 60492922 60492927 +
tgtggcctccaccaaaatcaag

SEQ ID NO: 200252 - DNA, 22 bp, Artificial Sequence
  Synthetic oligonucleotide; CTC chr2 60492914 60492935 60492931 60492936 +
caccaaaatcaagatacagaac

SEQ ID NO: 200253 - DNA, 22 bp, Artificial Sequence
  Synthetic oligonucleotide; CTA chr2 60492951 60492972 60492968 60492973 +
gaaagccccctcatgccccttt

SEQ ID NO: 200254 - DNA, 22 bp, Artificial Sequence
  Synthetic oligonucleotide; CTC chr2 60492963 60492984 60492980 60492985 +
atgcccctttgctgtcaatccc

SEQ ID NO: 200255 - DNA, 22 bp, Artificial Sequence
  Synthetic oligonucleotide; CTT chr2 60492972 60492993 60492989 60492994 +
tgctgtcaatccccttccctaa

SEQ ID NO: 200256 - DNA, 22 bp, Artificial Sequence
  Synthetic oligonucleotide; TTT chr2 60492973 60492994 60492990 60492995 +
gctgtcaatccccttccctaac

SEQ ID NO: 200257 - DNA, 22 bp, Artificial Sequence
  Synthetic oligonucleotide; TTG chr2 60492974 60492995 60492991 60492996 +
ctgtcaatccccttccctaacc

SEQ ID NO: 200258 - DNA, 22 bp, Artificial Sequence
  Synthetic oligonucleotide; CTG chr2 60492977 60492998 60492994 60492999 +
tcaatccccttccctaaccctc

SEQ ID NO: 200259 - DNA, 22 bp, Artificial Sequence
  Synthetic oligonucleotide; CTT chr2 60492988 60493009 60493005 60493010 +
ccctaaccctctgaccccttcc

SEQ ID NO: 200260 - DNA, 22 bp, Artificial Sequence
  Synthetic oligonucleotide; TTC chr2 60492989 60493010 60493006 60493011 +
cctaaccctctgaccccttcct

SEQ ID NO: 200261 - DNA, 22 bp, Artificial Sequence
  Synthetic oligonucleotide; CTA chr2 60492993 60493014 60493010 60493015 +
accctctgaccccttccttcta

SEQ ID NO: 200262 - DNA, 22 bp, Artificial Sequence
  Synthetic oligonucleotide; CTC chr2 60492999 60493020 60493016 60493021 +
tgaccccttccttctaaccact

SEQ ID NO: 200263 - DNA, 22 bp, Artificial Sequence
  Synthetic oligonucleotide; CTG chr2 60493001 60493022 60493018 60493023 +
accccttccttctaaccactga

SEQ ID NO: 200264 - DNA, 22 bp, Artificial Sequence
  Synthetic oligonucleotide; CTT chr2 60493008 60493029 60493025 60493030 +
ccttctaaccactgaaccccca

SEQ ID NO: 200265 - DNA, 22 bp, Artificial Sequence
  Synthetic oligonucleotide; TTC chr2 60493009 60493030 60493026 60493031 +
cttctaaccactgaacccccac

SEQ ID NO: 200266 - DNA, 22 bp, Artificial Sequence
  Synthetic oligonucleotide; CTT chr2 60493012 60493033 60493029 60493034 +
ctaaccactgaacccccaccta

SEQ ID NO: 200267 - DNA, 22 bp, Artificial Sequence
  Synthetic oligonucleotide; TTC chr2 60493013 60493034 60493030 60493035 +
taaccactgaacccccacctac

SEQ ID NO: 200268 - DNA, 22 bp, Artificial Sequence
  Synthetic oligonucleotide; CTA chr2 60493015 60493036 60493032 60493037 +
accactgaacccccacctacca

SEQ ID NO: 200269 - DNA, 22 bp, Artificial Sequence
  Synthetic oligonucleotide; CTG chr2 60493022 60493043 60493039 60493044 +
aacccccacctaccaccacagt

SEQ ID NO: 200270 - DNA, 22 bp, Artificial Sequence
  Synthetic oligonucleotide; CTA chr2 60493034 60493055 60493051 60493056 +
ccaccacagtgttgagaattct

SEQ ID NO: 200271 - DNA, 22 bp, Artificial Sequence
  Synthetic oligonucleotide; TTG chr2 60493048 60493069 60493065 60493070 +
agaattctagaatttgttacaa

SEQ ID NO: 200272 - DNA, 22 bp, Artificial Sequence
  Synthetic oligonucleotide; TTC chr2 60493055 60493076 60493072 60493077 +
tagaatttgttacaaatggact

SEQ ID NO: 200273 - DNA, 22 bp, Artificial Sequence
  Synthetic oligonucleotide; CTA chr2 60493057 60493078 60493074 60493079 +
gaatttgttacaaatggactca

SEQ ID NO: 200274 - DNA, 22 bp, Artificial Sequence
  Synthetic oligonucleotide; TTT chr2 60493063 60493084 60493080 60493085 +
gttacaaatggactcatacagg

SEQ ID NO: 200275 - DNA, 22 bp, Artificial Sequence
  Synthetic oligonucleotide; TTG chr2 60493064 60493085 60493081 60493086 +
ttacaaatggactcatacagga

SEQ ID NO: 200276 - DNA, 22 bp, Artificial Sequence
  Synthetic oligonucleotide; TTA chr2 60493067 60493088 60493084 60493089 +
caaatggactcatacaggatat

SEQ ID NO: 200277 - DNA, 22 bp, Artificial Sequence
  Synthetic oligonucleotide; CTC chr2 60493078 60493099 60493095 60493100 +
atacaggatatcgtcttttgtg

SEQ ID NO: 200278 - DNA, 22 bp, Artificial Sequence
  Synthetic oligonucleotide; CTT chr2 60493095 60493116 60493112 60493117 +
ttgtgtttaatttcttccacag

SEQ ID NO: 200279 - DNA, 22 bp, Artificial Sequence
  Synthetic oligonucleotide; TTT chr2 60493096 60493117 60493113 60493118 +
tgtgtttaatttcttccacaga

SEQ ID NO: 200280 - DNA, 22 bp, Artificial Sequence
  Synthetic oligonucleotide; TTT chr2 60493097 60493118 60493114 60493119 +
gtgtttaatttcttccacagag

SEQ ID NO: 200281 - DNA, 22 bp, Artificial Sequence
  Synthetic oligonucleotide; TTG chr2 60493098 60493119 60493115 60493120 +
tgtttaatttcttccacagagc

SEQ ID NO: 200282 - DNA, 22 bp, Artificial Sequence
  Synthetic oligonucleotide; TTT chr2 60493103 60493124 60493120 60493125 +
aatttcttccacagagcagaat

SEQ ID NO: 200283 - DNA, 22 bp, Artificial Sequence
  Synthetic oligonucleotide; TTA chr2 60493104 60493125 60493121 60493126 +
atttcttccacagagcagaatg

SEQ ID NO: 200284 - DNA, 22 bp, Artificial Sequence
  Synthetic oligonucleotide; TTT chr2 60493108 60493129 60493125 60493130 +
cttccacagagcagaatgattc

SEQ ID NO: 200285 - DNA, 22 bp, Artificial Sequence
  Synthetic oligonucleotide; TTC chr2 60493109 60493130 60493126 60493131 +
ttccacagagcagaatgattct

SEQ ID NO: 200286 - DNA, 22 bp, Artificial Sequence
  Synthetic oligonucleotide; CTT chr2 60493111 60493132 60493128 60493133 +
ccacagagcagaatgattctgg

SEQ ID NO: 200287 - DNA, 22 bp, Artificial Sequence
  Synthetic oligonucleotide; TTC chr2 60493112 60493133 60493129 60493134 +
cacagagcagaatgattctggg

SEQ ID NO: 200288 - DNA, 22 bp, Artificial Sequence
  Synthetic oligonucleotide; TTC chr2 60493130 60493151 60493147 60493152 +
tgggattcatccatggtgtgga

SEQ ID NO: 200289 - DNA, 22 bp, Artificial Sequence
  Synthetic oligonucleotide; CTG chr2 60493132 60493153 60493149 60493154 +
ggattcatccatggtgtggagt

SEQ ID NO: 200290 - DNA, 22 bp, Artificial Sequence
  Synthetic oligonucleotide; TTC chr2 60493138 60493159 60493155 60493160 +
atccatggtgtggagtgtgtta

SEQ ID NO: 200291 - DNA, 22 bp, Artificial Sequence
  Synthetic oligonucleotide; TTA chr2 60493160 60493181 60493177 60493182 +
ctctttcattcttctactgttg

SEQ ID NO: 200292 - DNA, 22 bp, Artificial Sequence
  Synthetic oligonucleotide; CTC chr2 60493163 60493184 60493180 60493185 +
tttcattcttctactgttgagt

SEQ ID NO: 200293 - DNA, 22 bp, Artificial Sequence
  Synthetic oligonucleotide; CTT chr2 60493165 60493186 60493182 60493187 +
tcattcttctactgttgagttg

SEQ ID NO: 200294 - DNA, 22 bp, Artificial Sequence
  Synthetic oligonucleotide; TTT chr2 60493166 60493187 60493183 60493188 +
cattcttctactgttgagttgt

SEQ ID NO: 200295 - DNA, 22 bp, Artificial Sequence
  Synthetic oligonucleotide; TTC chr2 60493167 60493188 60493184 60493189 +
attcttctactgttgagttgta

SEQ ID NO: 200296 - DNA, 22 bp, Artificial Sequence
  Synthetic oligonucleotide; TTC chr2 60493171 60493192 60493188 60493193 +
ttctactgttgagttgtattcc

SEQ ID NO: 200297 - DNA, 22 bp, Artificial Sequence
  Synthetic oligonucleotide; CTT chr2 60493173 60493194 60493190 60493195 +
ctactgttgagttgtattccac

SEQ ID NO: 200298 - DNA, 22 bp, Artificial Sequence
  Synthetic oligonucleotide; TTC chr2 60493174 60493195 60493191 60493196 +
tactgttgagttgtattccacc

SEQ ID NO: 200299 - DNA, 22 bp, Artificial Sequence
  Synthetic oligonucleotide; CTA chr2 60493176 60493197 60493193 60493198 +
ctgttgagttgtattccaccat

SEQ ID NO: 200300 - DNA, 22 bp, Artificial Sequence
  Synthetic oligonucleotide; CTG chr2 60493179 60493200 60493196 60493201 +
ttgagttgtattccaccatagg

SEQ ID NO: 200301 - DNA, 22 bp, Artificial Sequence
  Synthetic oligonucleotide; TTG chr2 60493182 60493203 60493199 60493204 +
agttgtattccaccatagggcg

SEQ ID NO: 200302 - DNA, 22 bp, Artificial Sequence
  Synthetic oligonucleotide; TTG chr2 60493187 60493208 60493204 60493209 +
tattccaccatagggcgtttat

SEQ ID NO: 200303 - DNA, 22 bp, Artificial Sequence
  Synthetic oligonucleotide; TTC chr2 60493192 60493213 60493209 60493214 +
caccatagggcgtttatccatt

SEQ ID NO: 200304 - DNA, 22 bp, Artificial Sequence
  Synthetic oligonucleotide; TTT chr2 60493207 60493228 60493224 60493229 +
atccattcaacctattggttgc

SEQ ID NO: 200305 - DNA, 22 bp, Artificial Sequence
  Synthetic oligonucleotide; TTA chr2 60493208 60493229 60493225 60493230 +
tccattcaacctattggttgcc

SEQ ID NO: 200306 - DNA, 22 bp, Artificial Sequence
  Synthetic oligonucleotide; TTC chr2 60493215 60493236 60493232 60493237 +
aacctattggttgccatgtggg

SEQ ID NO: 200307 - DNA, 22 bp, Artificial Sequence
  Synthetic oligonucleotide; CTA chr2 60493221 60493242 60493238 60493243 +
ttggttgccatgtgggttgtga

SEQ ID NO: 200308 - DNA, 22 bp, Artificial Sequence
  Synthetic oligonucleotide; TTG chr2 60493224 60493245 60493241 60493246 +
gttgccatgtgggttgtgacca

SEQ ID NO: 200309 - DNA, 22 bp, Artificial Sequence
  Synthetic oligonucleotide; TTG chr2 60493228 60493249 60493245 60493250 +
ccatgtgggttgtgaccacttt

SEQ ID NO: 200310 - DNA, 22 bp, Artificial Sequence
  Synthetic oligonucleotide; TTG chr2 60493240 60493261 60493257 60493262 +
tgaccactttttgaccactatg

SEQ ID NO: 200311 - DNA, 22 bp, Artificial Sequence
  Synthetic oligonucleotide; CTT chr2 60493249 60493270 60493266 60493271 +
tttgaccactatgaacagtgct

SEQ ID NO: 200312 - DNA, 22 bp, Artificial Sequence
  Synthetic oligonucleotide; TTT chr2 60493250 60493271 60493267 60493272 +
ttgaccactatgaacagtgcta

SEQ ID NO: 200313 - DNA, 22 bp, Artificial Sequence
  Synthetic oligonucleotide; TTT chr2 60493251 60493272 60493268 60493273 +
tgaccactatgaacagtgctac

SEQ ID NO: 200314 - DNA, 22 bp, Artificial Sequence
  Synthetic oligonucleotide; TTT chr2 60493252 60493273 60493269 60493274 +
gaccactatgaacagtgctaca

SEQ ID NO: 200315 - DNA, 22 bp, Artificial Sequence
  Synthetic oligonucleotide; TTG chr2 60493253 60493274 60493270 60493275 +
accactatgaacagtgctacaa

SEQ ID NO: 200316 - DNA, 22 bp, Artificial Sequence
  Synthetic oligonucleotide; CTA chr2 60493260 60493281 60493277 60493282 +
tgaacagtgctacaatggacac

SEQ ID NO: 200317 - DNA, 22 bp, Artificial Sequence
  Synthetic oligonucleotide; CTA chr2 60493272 60493293 60493289 60493294 +
caatggacactgtgtagatgtg

SEQ ID NO: 200318 - DNA, 22 bp, Artificial Sequence
  Synthetic oligonucleotide; CTG chr2 60493284 60493305 60493301 60493306 +
tgtagatgtgtttataggaatg

SEQ ID NO: 200319 - DNA, 22 bp, Artificial Sequence
  Synthetic oligonucleotide; TTT chr2 60493297 60493318 60493314 60493319 +
ataggaatgtatgtctacattt

SEQ ID NO: 200320 - DNA, 22 bp, Artificial Sequence
  Synthetic oligonucleotide; TTA chr2 60493298 60493319 60493315 60493320 +
taggaatgtatgtctacatttc

SEQ ID NO: 200321 - DNA, 22 bp, Artificial Sequence
  Synthetic oligonucleotide; CTA chr2 60493314 60493335 60493331 60493336 +
catttctcttaggtaaacatct

SEQ ID NO: 200322 - DNA, 22 bp, Artificial Sequence
  Synthetic oligonucleotide; TTT chr2 60493319 60493340 60493336 60493341 +
ctcttaggtaaacatctaaggc

SEQ ID NO: 200323 - DNA, 22 bp, Artificial Sequence
  Synthetic oligonucleotide; TTC chr2 60493320 60493341 60493337 60493342 +
tcttaggtaaacatctaaggca

SEQ ID NO: 200324 - DNA, 22 bp, Artificial Sequence
  Synthetic oligonucleotide; CTC chr2 60493322 60493343 60493339 60493344 +
ttaggtaaacatctaaggcatt

SEQ ID NO: 200325 - DNA, 22 bp, Artificial Sequence
  Synthetic oligonucleotide; CTT chr2 60493324 60493345 60493341 60493346 +
aggtaaacatctaaggcatttc

SEQ ID NO: 200326 - DNA, 22 bp, Artificial Sequence
  Synthetic oligonucleotide; TTA chr2 60493325 60493346 60493342 60493347 +
ggtaaacatctaaggcatttcg

SEQ ID NO: 200327 - DNA, 22 bp, Artificial Sequence
  Synthetic oligonucleotide; CTA chr2 60493337 60493358 60493354 60493359 +
aggcatttcgagaacacagaaa

SEQ ID NO: 200328 - DNA, 22 bp, Artificial Sequence
  Synthetic oligonucleotide; TTT chr2 60493345 60493366 60493362 60493367 +
cgagaacacagaaaaggttttg

SEQ ID NO: 200329 - DNA, 22 bp, Artificial Sequence
  Synthetic oligonucleotide; TTC chr2 60493346 60493367 60493363 60493368 +
gagaacacagaaaaggttttga

SEQ ID NO: 200330 - DNA, 22 bp, Artificial Sequence
  Synthetic oligonucleotide; TTT chr2 60493365 60493386 60493382 60493387 +
tgagtttgagtccagggagccc

SEQ ID NO: 200331 - DNA, 22 bp, Artificial Sequence
  Synthetic oligonucleotide; TTT chr2 60493366 60493387 60493383 60493388 +
gagtttgagtccagggagccct

SEQ ID NO: 200332 - DNA, 22 bp, Artificial Sequence
  Synthetic oligonucleotide; TTG chr2 60493367 60493388 60493384 60493389 +
agtttgagtccagggagccctc

SEQ ID NO: 200333 - DNA, 22 bp, Artificial Sequence
  Synthetic oligonucleotide; TTT chr2 60493372 60493393 60493389 60493394 +
gagtccagggagccctcatttt

SEQ ID NO: 200334 - DNA, 22 bp, Artificial Sequence
  Synthetic oligonucleotide; TTG chr2 60493373 60493394 60493390 60493395 +
agtccagggagccctcattttg

SEQ ID NO: 200335 - DNA, 22 bp, Artificial Sequence
  Synthetic oligonucleotide; CTC chr2 60493389 60493410 60493406 60493411 +
attttgtcatcctccaggctgc

SEQ ID NO: 200336 - DNA, 22 bp, Artificial Sequence
  Synthetic oligonucleotide; TTT chr2 60493393 60493414 60493410 60493415 +
tgtcatcctccaggctgccccc

SEQ ID NO: 200337 - DNA, 22 bp, Artificial Sequence
  Synthetic oligonucleotide; TTT chr2 60493394 60493415 60493411 60493416 +
gtcatcctccaggctgcccccc

SEQ ID NO: 200338 - DNA, 22 bp, Artificial Sequence
  Synthetic oligonucleotide; TTG chr2 60493395 60493416 60493412 60493417 +
tcatcctccaggctgcccccct

SEQ ID NO: 200339 - DNA, 22 bp, Artificial Sequence
  Synthetic oligonucleotide; CTC chr2 60493403 60493424 60493420 60493425 +
caggctgcccccctcccacccc

SEQ ID NO: 200340 - DNA, 22 bp, Artificial Sequence
  Synthetic oligonucleotide; CTG chr2 60493410 60493431 60493427 60493432 +
cccccctcccaccccattccct

SEQ ID NO: 200341 - DNA, 22 bp, Artificial Sequence
  Synthetic oligonucleotide; CTC chr2 60493418 60493439 60493435 60493440 +
ccaccccattccctggagagtt

SEQ ID NO: 200342 - DNA, 22 bp, Artificial Sequence
  Synthetic oligonucleotide; TTC chr2 60493429 60493450 60493446 60493451 +
cctggagagttcaactccaaac

SEQ ID NO: 200343 - DNA, 22 bp, Artificial Sequence
  Synthetic oligonucleotide; CTG chr2 60493433 60493454 60493450 60493455 +
gagagttcaactccaaacccta

SEQ ID NO: 200344 - DNA, 22 bp, Artificial Sequence
  Synthetic oligonucleotide; TTC chr2 60493441 60493462 60493458 60493463 +
aactccaaaccctatatcccag

SEQ ID NO: 200345 - DNA, 22 bp, Artificial Sequence
  Synthetic oligonucleotide; CTC chr2 60493446 60493467 60493463 60493468 +
caaaccctatatcccagctatc

SEQ ID NO: 200346 - DNA, 22 bp, Artificial Sequence
  Synthetic oligonucleotide; CTA chr2 60493455 60493476 60493472 60493477 +
tatcccagctatctgtttggct

SEQ ID NO: 200347 - DNA, 22 bp, Artificial Sequence
  Synthetic oligonucleotide; CTA chr2 60493466 60493487 60493483 60493488 +
tctgtttggctcagctaccaaa

SEQ ID NO: 200348 - DNA, 22 bp, Artificial Sequence
  Synthetic oligonucleotide; CTG chr2 60493470 60493491 60493487 60493492 +
tttggctcagctaccaaatgtc

SEQ ID NO: 200349 - DNA, 22 bp, Artificial Sequence
  Synthetic oligonucleotide; TTT chr2 60493473 60493494 60493490 60493495 +
ggctcagctaccaaatgtcatc

SEQ ID NO: 200350 - DNA, 22 bp, Artificial Sequence
  Synthetic oligonucleotide; TTG chr2 60493474 60493495 60493491 60493496 +
gctcagctaccaaatgtcatcc

SEQ ID NO: 200351 - DNA, 22 bp, Artificial Sequence
  Synthetic oligonucleotide; CTC chr2 60493478 60493499 60493495 60493500 +
agctaccaaatgtcatcctatt

SEQ ID NO: 200352 - DNA, 22 bp, Artificial Sequence
  Synthetic oligonucleotide; CTA chr2 60493483 60493504 60493500 60493505 +
ccaaatgtcatcctattccgaa

SEQ ID NO: 200353 - DNA, 22 bp, Artificial Sequence
  Synthetic oligonucleotide; CTA chr2 60493498 60493519 60493515 60493520 +
ttccgaatagaaacctctccac

SEQ ID NO: 200354 - DNA, 22 bp, Artificial Sequence
  Synthetic oligonucleotide; TTC chr2 60493501 60493522 60493518 60493523 +
cgaatagaaacctctccactac

SEQ ID NO: 200355 - DNA, 22 bp, Artificial Sequence
  Synthetic oligonucleotide; CTC chr2 60493515 60493536 60493532 60493537 +
tccactacactaaggaaatgat

SEQ ID NO: 200356 - DNA, 22 bp, Artificial Sequence
  Synthetic oligonucleotide; CTC chr2 60493517 60493538 60493534 60493539 +
cactacactaaggaaatgatgg

SEQ ID NO: 200357 - DNA, 22 bp, Artificial Sequence
  Synthetic oligonucleotide; CTA chr2 60493522 60493543 60493539 60493544 +
cactaaggaaatgatgggaaga

SEQ ID NO: 200358 - DNA, 22 bp, Artificial Sequence
  Synthetic oligonucleotide; CTA chr2 60493527 60493548 60493544 60493549 +
aggaaatgatgggaagagaccc

SEQ ID NO: 200359 - DNA, 22 bp, Artificial Sequence
  Synthetic oligonucleotide; TTC chr2 60493559 60493580 60493576 60493581 +
ttaaaatgggcattcatttgaa

SEQ ID NO: 200360 - DNA, 22 bp, Artificial Sequence
  Synthetic oligonucleotide; CTT chr2 60493561 60493582 60493578 60493583 +
aaaatgggcattcatttgaatc

SEQ ID NO: 200361 - DNA, 22 bp, Artificial Sequence
  Synthetic oligonucleotide; TTA chr2 60493562 60493583 60493579 60493584 +
aaatgggcattcatttgaatca

SEQ ID NO: 200362 - DNA, 22 bp, Artificial Sequence
  Synthetic oligonucleotide; TTC chr2 60493574 60493595 60493591 60493596 +
atttgaatcaggccaaataaat

SEQ ID NO: 200363 - DNA, 22 bp, Artificial Sequence
  Synthetic oligonucleotide; TTT chr2 60493578 60493599 60493595 60493600 +
gaatcaggccaaataaattgga

SEQ ID NO: 200364 - DNA, 22 bp, Artificial Sequence
  Synthetic oligonucleotide; TTG chr2 60493579 60493600 60493596 60493601 +
aatcaggccaaataaattggac

SEQ ID NO: 200365 - DNA, 22 bp, Artificial Sequence
  Synthetic oligonucleotide; TTG chr2 60493598 60493619 60493615 60493620 +
gactctgggtcagagataactt

SEQ ID NO: 200366 - DNA, 22 bp, Artificial Sequence
  Synthetic oligonucleotide; CTC chr2 60493603 60493624 60493620 60493625 +
tgggtcagagataacttaagtg

SEQ ID NO: 200367 - DNA, 22 bp, Artificial Sequence
  Synthetic oligonucleotide; CTG chr2 60493605 60493626 60493622 60493627 +
ggtcagagataacttaagtgtg

SEQ ID NO: 200368 - DNA, 22 bp, Artificial Sequence
  Synthetic oligonucleotide; CTT chr2 60493620 60493641 60493637 60493642 +
aagtgtggtgttcggagtccta

SEQ ID NO: 200369 - DNA, 22 bp, Artificial Sequence
  Synthetic oligonucleotide; TTA chr2 60493621 60493642 60493638 60493643 +
agtgtggtgttcggagtcctaa

SEQ ID NO: 200370 - DNA, 22 bp, Artificial Sequence
  Synthetic oligonucleotide; TTC chr2 60493633 60493654 60493650 60493655 +
ggagtcctaagagcccccacta

SEQ ID NO: 200371 - DNA, 22 bp, Artificial Sequence
  Synthetic oligonucleotide; CTA chr2 60493642 60493663 60493659 60493664 +
agagcccccactagctcagaaa

SEQ ID NO: 200372 - DNA, 22 bp, Artificial Sequence
  Synthetic oligonucleotide; CTA chr2 60493655 60493676 60493672 60493677 +
gctcagaaatggacttagttga

SEQ ID NO: 200373 - DNA, 22 bp, Artificial Sequence
  Synthetic oligonucleotide; CTC chr2 60493659 60493680 60493676 60493681 +
agaaatggacttagttgacctc

SEQ ID NO: 200374 - DNA, 22 bp, Artificial Sequence
  Synthetic oligonucleotide; CTT chr2 60493671 60493692 60493688 60493693 +
agttgacctcccccattagcag

SEQ ID NO: 200375 - DNA, 22 bp, Artificial Sequence
  Synthetic oligonucleotide; TTA chr2 60493672 60493693 60493689 60493694 +
gttgacctcccccattagcagc

SEQ ID NO: 200376 - DNA, 22 bp, Artificial Sequence
  Synthetic oligonucleotide; TTG chr2 60493676 60493697 60493693 60493698 +
acctcccccattagcagcatgg

SEQ ID NO: 200377 - DNA, 22 bp, Artificial Sequence
  Synthetic oligonucleotide; CTC chr2 60493681 60493702 60493698 60493703 +
ccccattagcagcatggagagt

SEQ ID NO: 200378 - DNA, 22 bp, Artificial Sequence
  Synthetic oligonucleotide; TTA chr2 60493689 60493710 60493706 60493711 +
gcagcatggagagtcaaggaga

SEQ ID NO: 200379 - DNA, 22 bp, Artificial Sequence
  Synthetic oligonucleotide; CTT chr2 60493717 60493738 60493734 60493739 +
ctaccttgccaaaggccttggg

SEQ ID NO: 200380 - DNA, 22 bp, Artificial Sequence
  Synthetic oligonucleotide; TTC chr2 60493718 60493739 60493735 60493740 +
taccttgccaaaggccttggga

SEQ ID NO: 200381 - DNA, 22 bp, Artificial Sequence
  Synthetic oligonucleotide; CTA chr2 60493720 60493741 60493737 60493742 +
ccttgccaaaggccttgggaag

SEQ ID NO: 200382 - DNA, 22 bp, Artificial Sequence
  Synthetic oligonucleotide; CTT chr2 60493724 60493745 60493741 60493746 +
gccaaaggccttgggaagaaag

SEQ ID NO: 200383 - DNA, 22 bp, Artificial Sequence
  Synthetic oligonucleotide; TTG chr2 60493725 60493746 60493742 60493747 +
ccaaaggccttgggaagaaaga

SEQ ID NO: 200384 - DNA, 22 bp, Artificial Sequence
  Synthetic oligonucleotide; CTT chr2 60493736 60493757 60493753 60493758 +
gggaagaaagacagcatcaagg

SEQ ID NO: 200385 - DNA, 22 bp, Artificial Sequence
  Synthetic oligonucleotide; TTG chr2 60493737 60493758 60493754 60493759 +
ggaagaaagacagcatcaaggt

SEQ ID NO: 200386 - DNA, 22 bp, Artificial Sequence
  Synthetic oligonucleotide; CTC chr2 60493762 60493783 60493779 60493784 +
acacaacactccagggaggcag

SEQ ID NO: 200387 - DNA, 22 bp, Artificial Sequence
  Synthetic oligonucleotide; CTC chr2 60493773 60493794 60493790 60493795 +
cagggaggcagctgctgcccag

SEQ ID NO: 200388 - DNA, 22 bp, Artificial Sequence
  Synthetic oligonucleotide; CTG chr2 60493787 60493808 60493804 60493809 +
ctgcccagtgctgtggacagca

SEQ ID NO: 200389 - DNA, 22 bp, Artificial Sequence
  Synthetic oligonucleotide; CTG chr2 60493790 60493811 60493807 60493812 +
cccagtgctgtggacagcaaag

SEQ ID NO: 200390 - DNA, 22 bp, Artificial Sequence
  Synthetic oligonucleotide; CTG chr2 60493800 60493821 60493817 60493822 +
tggacagcaaagcttcagtgca

SEQ ID NO: 200391 - DNA, 22 bp, Artificial Sequence
  Synthetic oligonucleotide; CTT chr2 60493815 60493836 60493832 60493837 +
cagtgcaggaaattaagattcc

SEQ ID NO: 200392 - DNA, 22 bp, Artificial Sequence
  Synthetic oligonucleotide; TTC chr2 60493816 60493837 60493833 60493838 +
agtgcaggaaattaagattccc

SEQ ID NO: 200393 - DNA, 22 bp, Artificial Sequence
  Synthetic oligonucleotide; TTA chr2 60493830 60493851 60493847 60493852 +
agattccccctgcctccccctc

SEQ ID NO: 200394 - DNA, 22 bp, Artificial Sequence
  Synthetic oligonucleotide; TTC chr2 60493836 60493857 60493853 60493858 +
cccctgcctccccctcccccat

SEQ ID NO: 200395 - DNA, 22 bp, Artificial Sequence
  Synthetic oligonucleotide; CTG chr2 60493842 60493863 60493859 60493864 +
cctccccctcccccatcctcat

SEQ ID NO: 200396 - DNA, 22 bp, Artificial Sequence
  Synthetic oligonucleotide; CTC chr2 60493846 60493867 60493863 60493868 +
cccctcccccatcctcatcagc

SEQ ID NO: 200397 - DNA, 22 bp, Artificial Sequence
  Synthetic oligonucleotide; CTC chr2 60493852 60493873 60493869 60493874 +
ccccatcctcatcagcttggcc

SEQ ID NO: 200398 - DNA, 22 bp, Artificial Sequence
  Synthetic oligonucleotide; CTC chr2 60493862 60493883 60493879 60493884 +
atcagcttggccatggcagggc

SEQ ID NO: 200399 - DNA, 22 bp, Artificial Sequence
  Synthetic oligonucleotide; CTT chr2 60493870 60493891 60493887 60493892 +
ggccatggcagggctgggggat

SEQ ID NO: 200400 - DNA, 22 bp, Artificial Sequence
  Synthetic oligonucleotide; TTG chr2 60493871 60493892 60493888 60493893 +
gccatggcagggctgggggatc

SEQ ID NO: 200401 - DNA, 22 bp, Artificial Sequence
  Synthetic oligonucleotide; CTG chr2 60493886 60493907 60493903 60493908 +
ggggatcagaggtgaacaggaa

SEQ ID NO: 200402 - DNA, 22 bp, Artificial Sequence
  Synthetic oligonucleotide; CTG chr2 60493923 60493944 60493940 60493945 +
ggggagacagggcctccagtgg

SEQ ID NO: 200403 - DNA, 22 bp, Artificial Sequence
  Synthetic oligonucleotide; CTC chr2 60493939 60493960 60493956 60493961 +
cagtgggaccagagctgagtgg

SEQ ID NO: 200404 - DNA, 22 bp, Artificial Sequence
  Synthetic oligonucleotide; CTG chr2 60493956 60493977 60493973 60493978 +
agtggcctcaggcagtggcgga

SEQ ID NO: 200405 - DNA, 22 bp, Artificial Sequence
  Synthetic oligonucleotide; CTC chr2 60493965 60493986 60493982 60493987 +
aggcagtggcggaagctgatta

SEQ ID NO: 200406 - DNA, 22 bp, Artificial Sequence
  Synthetic oligonucleotide; CTG chr2 60493983 60494004 60494000 60494005 +
attaaaggaaggtacggggagt

SEQ ID NO: 200407 - DNA, 22 bp, Artificial Sequence
  Synthetic oligonucleotide; TTA chr2 60493987 60494008 60494004 60494009 +
aaggaaggtacggggagtggag

SEQ ID NO: 200408 - DNA, 22 bp, Artificial Sequence
  Synthetic oligonucleotide; CTT chr2 60494041 60494062 60494058 60494063 +
agacaacaatgcaagggggaga

SEQ ID NO: 200409 - DNA, 22 bp, Artificial Sequence
  Synthetic oligonucleotide; TTA chr2 60494042 60494063 60494059 60494064 +
gacaacaatgcaagggggagaa

SEQ ID NO: 200410 - DNA, 22 bp, Artificial Sequence
  Synthetic oligonucleotide; CTG chr2 60494068 60494089 60494085 60494090 +
aagaaaacagaacagagaccac

SEQ ID NO: 200411 - DNA, 22 bp, Artificial Sequence
  Synthetic oligonucleotide; CTA chr2 60494092 60494113 60494109 60494114 +
ctggcaataaacagagagaaag

SEQ ID NO: 200412 - DNA, 22 bp, Artificial Sequence
  Synthetic oligonucleotide; CTG chr2 60494095 60494116 60494112 60494117 +
gcaataaacagagagaaagtga

SEQ ID NO: 200413 - DNA, 22 bp, Artificial Sequence
  Synthetic oligonucleotide; CTA chr2 60494141 60494162 60494158 60494163 +
cattacttaagaaacctgagca

SEQ ID NO: 200414 - DNA, 22 bp, Artificial Sequence
  Synthetic oligonucleotide; TTA chr2 60494146 60494167 60494163 60494168 +
cttaagaaacctgagcacattc

SEQ ID NO: 200415 - DNA, 22 bp, Artificial Sequence
  Synthetic oligonucleotide; CTT chr2 60494149 60494170 60494166 60494171 +
aagaaacctgagcacattctta

SEQ ID NO: 200416 - DNA, 22 bp, Artificial Sequence
  Synthetic oligonucleotide; TTA chr2 60494150 60494171 60494167 60494172 +
agaaacctgagcacattcttac

SEQ ID NO: 200417 - DNA, 22 bp, Artificial Sequence
  Synthetic oligonucleotide; CTG chr2 60494159 60494180 60494176 60494181 +
agcacattcttacgcctagggc

SEQ ID NO: 200418 - DNA, 22 bp, Artificial Sequence
  Synthetic oligonucleotide; TTC chr2 60494168 60494189 60494185 60494190 +
ttacgcctagggcaataaatac

SEQ ID NO: 200419 - DNA, 22 bp, Artificial Sequence
  Synthetic oligonucleotide; CTT chr2 60494170 60494191 60494187 60494192 +
acgcctagggcaataaatacat

SEQ ID NO: 200420 - DNA, 22 bp, Artificial Sequence
  Synthetic oligonucleotide; TTA chr2 60494171 60494192 60494188 60494193 +
cgcctagggcaataaatacatc

SEQ ID NO: 200421 - DNA, 22 bp, Artificial Sequence
  Synthetic oligonucleotide; CTA chr2 60494177 60494198 60494194 60494199 +
gggcaataaatacatccttgag

SEQ ID NO: 200422 - DNA, 22 bp, Artificial Sequence
  Synthetic oligonucleotide; CTT chr2 60494196 60494217 60494213 60494218 +
gagctacacaggctaagcaaga

SEQ ID NO: 200423 - DNA, 22 bp, Artificial Sequence
  Synthetic oligonucleotide; TTG chr2 60494197 60494218 60494214 60494219 +
agctacacaggctaagcaagag

SEQ ID NO: 200424 - DNA, 22 bp, Artificial Sequence
  Synthetic oligonucleotide; CTA chr2 60494202 60494223 60494219 60494224 +
cacaggctaagcaagagtgaga

SEQ ID NO: 200425 - DNA, 22 bp, Artificial Sequence
  Synthetic oligonucleotide; CTA chr2 60494211 60494232 60494228 60494233 +
agcaagagtgagagagggtgat

SEQ ID NO: 200426 - DNA, 22 bp, Artificial Sequence
  Synthetic oligonucleotide; CTG chr2 60494237 60494258 60494254 60494259 +
acaggccacatgggagagtggg

SEQ ID NO: 200427 - DNA, 22 bp, Artificial Sequence
  Synthetic oligonucleotide; CTG chr2 60494272 60494293 60494289 60494294 +
ggagctgggagtttggcttctc

SEQ ID NO: 200428 - DNA, 22 bp, Artificial Sequence
  Synthetic oligonucleotide; CTG chr2 60494279 60494300 60494296 60494301 +
ggagtttggcttctcatctgtg

SEQ ID NO: 200429 - DNA, 22 bp, Artificial Sequence
  Synthetic oligonucleotide; TTT chr2 60494286 60494307 60494303 60494308 +
ggcttctcatctgtgcatggcc

SEQ ID NO: 200430 - DNA, 22 bp, Artificial Sequence
  Synthetic oligonucleotide; TTG chr2 60494287 60494308 60494304 60494309 +
gcttctcatctgtgcatggcct

SEQ ID NO: 200431 - DNA, 22 bp, Artificial Sequence
  Synthetic oligonucleotide; CTT chr2 60494291 60494312 60494308 60494313 +
ctcatctgtgcatggcctctaa

SEQ ID NO: 200432 - DNA, 22 bp, Artificial Sequence
  Synthetic oligonucleotide; TTC chr2 60494292 60494313 60494309 60494314 +
tcatctgtgcatggcctctaaa

SEQ ID NO: 200433 - DNA, 22 bp, Artificial Sequence
  Synthetic oligonucleotide; CTC chr2 60494294 60494315 60494311 60494316 +
atctgtgcatggcctctaaact

SEQ ID NO: 200434 - DNA, 22 bp, Artificial Sequence
  Synthetic oligonucleotide; CTG chr2 60494299 60494320 60494316 60494321 +
tgcatggcctctaaactgggca

SEQ ID NO: 200435 - DNA, 22 bp, Artificial Sequence
  Synthetic oligonucleotide; CTC chr2 60494310 60494331 60494327 60494332 +
taaactgggcagtgaccatggc

SEQ ID NO: 200436 - DNA, 22 bp, Artificial Sequence
  Synthetic oligonucleotide; CTA chr2 60494312 60494333 60494329 60494334 +
aactgggcagtgaccatggcct

SEQ ID NO: 200437 - DNA, 22 bp, Artificial Sequence
  Synthetic oligonucleotide; CTG chr2 60494317 60494338 60494334 60494339 +
ggcagtgaccatggcctggtca

SEQ ID NO: 200438 - DNA, 22 bp, Artificial Sequence
  Synthetic oligonucleotide; CTG chr2 60494335 60494356 60494352 60494357 +
gtcacctccccactctggacct

SEQ ID NO: 200439 - DNA, 22 bp, Artificial Sequence
  Synthetic oligonucleotide; CTC chr2 60494343 60494364 60494360 60494365 +
cccactctggacctgggttgcc

SEQ ID NO: 200440 - DNA, 22 bp, Artificial Sequence
  Synthetic oligonucleotide; CTC chr2 60494350 60494371 60494367 60494372 +
tggacctgggttgcccctctgt

SEQ ID NO: 200441 - DNA, 22 bp, Artificial Sequence
  Synthetic oligonucleotide; CTG chr2 60494352 60494373 60494369 60494374 +
gacctgggttgcccctctgtaa

SEQ ID NO: 200442 - DNA, 22 bp, Artificial Sequence
  Synthetic oligonucleotide; CTG chr2 60494358 60494379 60494375 60494380 +
ggttgcccctctgtaaacaagg

SEQ ID NO: 200443 - DNA, 22 bp, Artificial Sequence
  Synthetic oligonucleotide; TTG chr2 60494363 60494384 60494380 60494385 +
cccctctgtaaacaaggaggtt

SEQ ID NO: 200444 - DNA, 22 bp, Artificial Sequence
  Synthetic oligonucleotide; CTC chr2 60494369 60494390 60494386 60494391 +
tgtaaacaaggaggttgtaata

SEQ ID NO: 200445 - DNA, 22 bp, Artificial Sequence
  Synthetic oligonucleotide; CTG chr2 60494371 60494392 60494388 60494393 +
taaacaaggaggttgtaataaa

SEQ ID NO: 200446 - DNA, 22 bp, Artificial Sequence
  Synthetic oligonucleotide; TTG chr2 60494386 60494407 60494403 60494408 +
taataaattatctccaataccc

SEQ ID NO: 200447 - DNA, 22 bp, Artificial Sequence
  Synthetic oligonucleotide; TTA chr2 60494396 60494417 60494413 60494418 +
tctccaataccctaatgtctta

SEQ ID NO: 200448 - DNA, 22 bp, Artificial Sequence
  Synthetic oligonucleotide; CTC chr2 60494400 60494421 60494417 60494422 +
caataccctaatgtcttataaa

SEQ ID NO: 200449 - DNA, 22 bp, Artificial Sequence
  Synthetic oligonucleotide; CTA chr2 60494410 60494431 60494427 60494432 +
atgtcttataaatcttatgcaa

SEQ ID NO: 200450 - DNA, 22 bp, Artificial Sequence
  Synthetic oligonucleotide; CTT chr2 60494417 60494438 60494434 60494439 +
ataaatcttatgcaatttttgc

SEQ ID NO: 200451 - DNA, 22 bp, Artificial Sequence
  Synthetic oligonucleotide; TTA chr2 60494418 60494439 60494435 60494440 +
taaatcttatgcaatttttgcc

SEQ ID NO: 200452 - DNA, 22 bp, Artificial Sequence
  Synthetic oligonucleotide; CTT chr2 60494426 60494447 60494443 60494448 +
atgcaatttttgccaagatggg

SEQ ID NO: 200453 - DNA, 22 bp, Artificial Sequence
  Synthetic oligonucleotide; TTA chr2 60494427 60494448 60494444 60494449 +
tgcaatttttgccaagatggga

SEQ ID NO: 200454 - DNA, 22 bp, Artificial Sequence
  Synthetic oligonucleotide; TTT chr2 60494435 60494456 60494452 60494457 +
ttgccaagatgggagtatgggg

SEQ ID NO: 200455 - DNA, 22 bp, Artificial Sequence
  Synthetic oligonucleotide; TTT chr2 60494436 60494457 60494453 60494458 +
tgccaagatgggagtatgggga

SEQ ID NO: 200456 - DNA, 22 bp, Artificial Sequence
  Synthetic oligonucleotide; TTT chr2 60494437 60494458 60494454 60494459 +
gccaagatgggagtatggggag

SEQ ID NO: 200457 - DNA, 22 bp, Artificial Sequence
  Synthetic oligonucleotide; TTG chr2 60494438 60494459 60494455 60494460 +
ccaagatgggagtatggggaga

SEQ ID NO: 200458 - DNA, 22 bp, Artificial Sequence
  Synthetic oligonucleotide; CTC chr2 60494485 60494506 60494502 60494507 +
agtgagatgagatatcaaaggg

SEQ ID NO: 200459 - DNA, 22 bp, Artificial Sequence
  Synthetic oligonucleotide; TTC chr2 60494521 60494542 60494538 60494543 +
attccatctccctaatctccaa

SEQ ID NO: 200460 - DNA, 22 bp, Artificial Sequence
  Synthetic oligonucleotide; TTC chr2 60494525 60494546 60494542 60494547 +
catctccctaatctccaattgg

SEQ ID NO: 200461 - DNA, 22 bp, Artificial Sequence
  Synthetic oligonucleotide; CTC chr2 60494531 60494552 60494548 60494553 +
cctaatctccaattggcaaagc

SEQ ID NO: 200462 - DNA, 22 bp, Artificial Sequence
  Synthetic oligonucleotide; CTA chr2 60494535 60494556 60494552 60494557 +
atctccaattggcaaagccaga

SEQ ID NO: 200463 - DNA, 22 bp, Artificial Sequence
  Synthetic oligonucleotide; CTC chr2 60494540 60494561 60494557 60494562 +
caattggcaaagccagacttgg

SEQ ID NO: 200464 - DNA, 22 bp, Artificial Sequence
  Synthetic oligonucleotide; TTG chr2 60494546 60494567 60494563 60494568 +
gcaaagccagacttggggcaat

SEQ ID NO: 200465 - DNA, 22 bp, Artificial Sequence
  Synthetic oligonucleotide; CTT chr2 60494560 60494581 60494577 60494582 +
ggggcaatacagactggttctg

SEQ ID NO: 200466 - DNA, 22 bp, Artificial Sequence
  Synthetic oligonucleotide; TTG chr2 60494561 60494582 60494578 60494583 +
gggcaatacagactggttctgt

SEQ ID NO: 200467 - DNA, 22 bp, Artificial Sequence
  Synthetic oligonucleotide; CTG chr2 60494576 60494597 60494593 60494598 +
gttctgtgatgacaaataactc

SEQ ID NO: 200468 - DNA, 22 bp, Artificial Sequence
  Synthetic oligonucleotide; TTC chr2 60494580 60494601 60494597 60494602 +
tgtgatgacaaataactcctag

SEQ ID NO: 200469 - DNA, 22 bp, Artificial Sequence
  Synthetic oligonucleotide; CTG chr2 60494582 60494603 60494599 60494604 +
tgatgacaaataactcctagct

SEQ ID NO: 200470 - DNA, 22 bp, Artificial Sequence
  Synthetic oligonucleotide; CTC chr2 60494598 60494619 60494615 60494620 +
ctagctcattcctaatgattta

SEQ ID NO: 200471 - DNA, 22 bp, Artificial Sequence
  Synthetic oligonucleotide; CTA chr2 60494601 60494622 60494618 60494623 +
gctcattcctaatgatttatca

SEQ ID NO: 200472 - DNA, 22 bp, Artificial Sequence
  Synthetic oligonucleotide; CTC chr2 60494605 60494626 60494622 60494627 +
attcctaatgatttatcaccaa

SEQ ID NO: 200473 - DNA, 22 bp, Artificial Sequence
  Synthetic oligonucleotide; TTC chr2 60494609 60494630 60494626 60494631 +
ctaatgatttatcaccaaatgt

SEQ ID NO: 200474 - DNA, 22 bp, Artificial Sequence
  Synthetic oligonucleotide; CTA chr2 60494612 60494633 60494629 60494634 +
atgatttatcaccaaatgttct

SEQ ID NO: 200475 - DNA, 22 bp, Artificial Sequence
  Synthetic oligonucleotide; TTT chr2 60494619 60494640 60494636 60494641 +
atcaccaaatgttctttcttca

SEQ ID NO: 200476 - DNA, 22 bp, Artificial Sequence
  Synthetic oligonucleotide; TTA chr2 60494620 60494641 60494637 60494642 +
tcaccaaatgttctttcttcag

SEQ ID NO: 200477 - DNA, 22 bp, Artificial Sequence
  Synthetic oligonucleotide; TTC chr2 60494633 60494654 60494650 60494655 +
tttcttcagctggaatttaaaa

SEQ ID NO: 200478 - DNA, 22 bp, Artificial Sequence
  Synthetic oligonucleotide; CTT chr2 60494635 60494656 60494652 60494657 +
tcttcagctggaatttaaaata

SEQ ID NO: 200479 - DNA, 22 bp, Artificial Sequence
  Synthetic oligonucleotide; TTT chr2 60494636 60494657 60494653 60494658 +
cttcagctggaatttaaaatat

SEQ ID NO: 200480 - DNA, 22 bp, Artificial Sequence
  Synthetic oligonucleotide; TTC chr2 60494637 60494658 60494654 60494659 +
ttcagctggaatttaaaatatg

SEQ ID NO: 200481 - DNA, 22 bp, Artificial Sequence
  Synthetic oligonucleotide; CTT chr2 60494639 60494660 60494656 60494661 +
cagctggaatttaaaatatgga

SEQ ID NO: 200482 - DNA, 22 bp, Artificial Sequence
  Synthetic oligonucleotide; TTC chr2 60494640 60494661 60494657 60494662 +
agctggaatttaaaatatggac

SEQ ID NO: 200483 - DNA, 22 bp, Artificial Sequence
  Synthetic oligonucleotide; CTG chr2 60494645 60494666 60494662 60494667 +
gaatttaaaatatggactcatc

SEQ ID NO: 200484 - DNA, 22 bp, Artificial Sequence
  Synthetic oligonucleotide; TTT chr2 60494651 60494672 60494668 60494673 +
aaaatatggactcatccgtaaa

SEQ ID NO: 200485 - DNA, 22 bp, Artificial Sequence
  Synthetic oligonucleotide; TTA chr2 60494652 60494673 60494669 60494674 +
aaatatggactcatccgtaaaa

SEQ ID NO: 200486 - DNA, 22 bp, Artificial Sequence
  Synthetic oligonucleotide; CTC chr2 60494664 60494685 60494681 60494686 +
atccgtaaaataggaataataa

SEQ ID NO: 200487 - DNA, 22 bp, Artificial Sequence
  Synthetic oligonucleotide; CTT chr2 60494698 60494719 60494715 60494720 +
catagggtttgtatgaaaataa

SEQ ID NO: 200488 - DNA, 22 bp, Artificial Sequence
  Synthetic oligonucleotide; TTC chr2 60494699 60494720 60494716 60494721 +
atagggtttgtatgaaaataaa

SEQ ID NO: 200489 - DNA, 22 bp, Artificial Sequence
  Synthetic oligonucleotide; TTT chr2 60494708 60494729 60494725 60494730 +
gtatgaaaataaaatgagtgcg

SEQ ID NO: 200490 - DNA, 22 bp, Artificial Sequence
  Synthetic oligonucleotide; TTG chr2 60494709 60494730 60494726 60494731 +
tatgaaaataaaatgagtgcgt

SEQ ID NO: 200491 - DNA, 22 bp, Artificial Sequence
  Synthetic oligonucleotide; TTT chr2 60494735 60494756 60494752 60494757 +
gtaaagttcctagagcagagta

SEQ ID NO: 200492 - DNA, 22 bp, Artificial Sequence
  Synthetic oligonucleotide; TTG chr2 60494736 60494757 60494753 60494758 +
taaagttcctagagcagagtaa

SEQ ID NO: 200493 - DNA, 22 bp, Artificial Sequence
  Synthetic oligonucleotide; TTC chr2 60494744 60494765 60494761 60494766 +
ctagagcagagtaagtgctccg

SEQ ID NO: 200494 - DNA, 22 bp, Artificial Sequence
  Synthetic oligonucleotide; CTA chr2 60494747 60494768 60494764 60494769 +
gagcagagtaagtgctccgagc

SEQ ID NO: 200495 - DNA, 22 bp, Artificial Sequence
  Synthetic oligonucleotide; CTC chr2 60494764 60494785 60494781 60494786 +
cgagcttgtgaactaaaatgct

SEQ ID NO: 200496 - DNA, 22 bp, Artificial Sequence
  Synthetic oligonucleotide; CTT chr2 60494771 60494792 60494788 60494793 +
gtgaactaaaatgctgcctcct

SEQ ID NO: 200497 - DNA, 22 bp, Artificial Sequence
  Synthetic oligonucleotide; TTG chr2 60494772 60494793 60494789 60494794 +
tgaactaaaatgctgcctcctg

SEQ ID NO: 200498 - DNA, 22 bp, Artificial Sequence
  Synthetic oligonucleotide; CTA chr2 60494779 60494800 60494796 60494801 +
aaatgctgcctcctggtattta

SEQ ID NO: 200499 - DNA, 22 bp, Artificial Sequence
  Synthetic oligonucleotide; CTG chr2 60494787 60494808 60494804 60494809 +
cctcctggtatttattagttac

SEQ ID NO: 200500 - DNA, 22 bp, Artificial Sequence
  Synthetic oligonucleotide; CTC chr2 60494791 60494812 60494808 60494813 +
ctggtatttattagttacacct

SEQ ID NO: 200501 - DNA, 22 bp, Artificial Sequence
  Synthetic oligonucleotide; CTG chr2 60494794 60494815 60494811 60494816 +
gtatttattagttacacctcag

SEQ ID NO: 200502 - DNA, 22 bp, Artificial Sequence
  Synthetic oligonucleotide; TTT chr2 60494800 60494821 60494817 60494822 +
attagttacacctcagcagaaa

SEQ ID NO: 200503 - DNA, 22 bp, Artificial Sequence
  Synthetic oligonucleotide; TTA chr2 60494801 60494822 60494818 60494823 +
ttagttacacctcagcagaaac

SEQ ID NO: 200504 - DNA, 22 bp, Artificial Sequence
  Synthetic oligonucleotide; TTA chr2 60494804 60494825 60494821 60494826 +
gttacacctcagcagaaacaaa

SEQ ID NO: 200505 - DNA, 22 bp, Artificial Sequence
  Synthetic oligonucleotide; TTA chr2 60494808 60494829 60494825 60494830 +
cacctcagcagaaacaaagtta

SEQ ID NO: 200506 - DNA, 22 bp, Artificial Sequence
  Synthetic oligonucleotide; CTC chr2 60494814 60494835 60494831 60494836 +
agcagaaacaaagttatcaggc

SEQ ID NO: 200507 - DNA, 22 bp, Artificial Sequence
  Synthetic oligonucleotide; TTA chr2 60494830 60494851 60494847 60494852 +
tcaggccctttccccaattcct

SEQ ID NO: 200508 - DNA, 22 bp, Artificial Sequence
  Synthetic oligonucleotide; CTT chr2 60494840 60494861 60494857 60494862 +
tccccaattcctagtttgggtc

SEQ ID NO: 200509 - DNA, 22 bp, Artificial Sequence
  Synthetic oligonucleotide; TTT chr2 60494841 60494862 60494858 60494863 +
ccccaattcctagtttgggtca

SEQ ID NO: 200510 - DNA, 22 bp, Artificial Sequence
  Synthetic oligonucleotide; TTC chr2 60494842 60494863 60494859 60494864 +
cccaattcctagtttgggtcag

SEQ ID NO: 200511 - DNA, 22 bp, Artificial Sequence
  Synthetic oligonucleotide; TTC chr2 60494850 60494871 60494867 60494872 +
ctagtttgggtcagaagaaaag

SEQ ID NO: 200512 - DNA, 22 bp, Artificial Sequence
  Synthetic oligonucleotide; CTA chr2 60494853 60494874 60494870 60494875 +
gtttgggtcagaagaaaaggga

SEQ ID NO: 200513 - DNA, 22 bp, Artificial Sequence
  Synthetic oligonucleotide; TTT chr2 60494857 60494878 60494874 60494879 +
gggtcagaagaaaagggaaaag

SEQ ID NO: 200514 - DNA, 22 bp, Artificial Sequence
  Synthetic oligonucleotide; TTG chr2 60494858 60494879 60494875 60494880 +
ggtcagaagaaaagggaaaagg

SEQ ID NO: 200515 - DNA, 22 bp, Artificial Sequence
  Synthetic oligonucleotide; TTG chr2 60494929 60494950 60494946 60494951 +
ggaacacagatcctaacacagt

SEQ ID NO: 200516 - DNA, 22 bp, Artificial Sequence
  Synthetic oligonucleotide; CTA chr2 60494944 60494965 60494961 60494966 +
acacagtagctggtacctgata

SEQ ID NO: 200517 - DNA, 22 bp, Artificial Sequence
  Synthetic oligonucleotide; CTG chr2 60494956 60494977 60494973 60494978 +
gtacctgataggtgcctatatg

SEQ ID NO: 200518 - DNA, 22 bp, Artificial Sequence
  Synthetic oligonucleotide; CTG chr2 60494963 60494984 60494980 60494985 +
ataggtgcctatatgtgatgga

SEQ ID NO: 200519 - DNA, 22 bp, Artificial Sequence
  Synthetic oligonucleotide; CTA chr2 60494974 60494995 60494991 60494996 +
tatgtgatggatgggtggacag

SEQ ID NO: 200520 - DNA, 22 bp, Artificial Sequence
  Synthetic oligonucleotide; TTA chr2 60495022 60495043 60495039 60495044 +
tgaggaggggagagtgcagaca

SEQ ID NO: 200521 - DNA, 22 bp, Artificial Sequence
  Synthetic oligonucleotide; CTT chr2 60495054 60495075 60495071 60495076 +
cacctcctttacaattttggga

SEQ ID NO: 200522 - DNA, 22 bp, Artificial Sequence
  Synthetic oligonucleotide; TTC chr2 60495055 60495076 60495072 60495077 +
acctcctttacaattttgggag

SEQ ID NO: 200523 - DNA, 22 bp, Artificial Sequence
  Synthetic oligonucleotide; CTC chr2 60495060 60495081 60495077 60495082 +
ctttacaattttgggagtccac

SEQ ID NO: 200524 - DNA, 22 bp, Artificial Sequence
  Synthetic oligonucleotide; CTT chr2 60495063 60495084 60495080 60495085 +
tacaattttgggagtccacacg

SEQ ID NO: 200525 - DNA, 22 bp, Artificial Sequence
  Synthetic oligonucleotide; TTT chr2 60495064 60495085 60495081 60495086 +
acaattttgggagtccacacgg

SEQ ID NO: 200526 - DNA, 22 bp, Artificial Sequence
  Synthetic oligonucleotide; TTA chr2 60495065 60495086 60495082 60495087 +
caattttgggagtccacacggc

SEQ ID NO: 200527 - DNA, 22 bp, Artificial Sequence
  Synthetic oligonucleotide; TTT chr2 60495071 60495092 60495088 60495093 +
tgggagtccacacggcatggca

SEQ ID NO: 200528 - DNA, 22 bp, Artificial Sequence
  Synthetic oligonucleotide; TTT chr2 60495072 60495093 60495089 60495094 +
gggagtccacacggcatggcat

SEQ ID NO: 200529 - DNA, 22 bp, Artificial Sequence
  Synthetic oligonucleotide; TTG chr2 60495073 60495094 60495090 60495095 +
ggagtccacacggcatggcata

SEQ ID NO: 200530 - DNA, 22 bp, Artificial Sequence
  Synthetic oligonucleotide; TTA chr2 60495102 60495123 60495119 60495124 +
tttcattcccattgagaaataa

SEQ ID NO: 200531 - DNA, 22 bp, Artificial Sequence
  Synthetic oligonucleotide; TTT chr2 60495105 60495126 60495122 60495127 +
cattcccattgagaaataaaat

SEQ ID NO: 200532 - DNA, 22 bp, Artificial Sequence
  Synthetic oligonucleotide; TTC chr2 60495106 60495127 60495123 60495128 +
attcccattgagaaataaaatc

SEQ ID NO: 200533 - DNA, 22 bp, Artificial Sequence
  Synthetic oligonucleotide; TTC chr2 60495110 60495131 60495127 60495132 +
ccattgagaaataaaatccaat

SEQ ID NO: 200534 - DNA, 22 bp, Artificial Sequence
  Synthetic oligonucleotide; TTG chr2 60495116 60495137 60495133 60495138 +
agaaataaaatccaattctcca

SEQ ID NO: 200535 - DNA, 22 bp, Artificial Sequence
  Synthetic oligonucleotide; TTC chr2 60495134 60495155 60495151 60495156 +
tccatcaccaagagagccttcc

SEQ ID NO: 200536 - DNA, 22 bp, Artificial Sequence
  Synthetic oligonucleotide; CTC chr2 60495136 60495157 60495153 60495158 +
catcaccaagagagccttccga

SEQ ID NO: 200537 - DNA, 22 bp, Artificial Sequence
  Synthetic oligonucleotide; CTT chr2 60495154 60495175 60495171 60495176 +
ccgaaagaggcccccctgggca

SEQ ID NO: 200538 - DNA, 22 bp, Artificial Sequence
  Synthetic oligonucleotide; TTC chr2 60495155 60495176 60495172 60495177 +
cgaaagaggcccccctgggcaa

SEQ ID NO: 200539 - DNA, 22 bp, Artificial Sequence
  Synthetic oligonucleotide; CTG chr2 60495172 60495193 60495189 60495194 +
ggcaaacggccaccgatggaga

SEQ ID NO: 200540 - DNA, 22 bp, Artificial Sequence
  Synthetic oligonucleotide; CTG chr2 60495200 60495221 60495217 60495222 +
ccagtcctcttctaccccaccc

SEQ ID NO: 200541 - DNA, 22 bp, Artificial Sequence
  Synthetic oligonucleotide; CTC chr2 60495209 60495230 60495226 60495231 +
ttctaccccacccacgccccca

SEQ ID NO: 200542 - DNA, 22 bp, Artificial Sequence
  Synthetic oligonucleotide; CTT chr2 60495211 60495232 60495228 60495233 +
ctaccccacccacgcccccacc

SEQ ID NO: 200543 - DNA, 22 bp, Artificial Sequence
  Synthetic oligonucleotide; TTC chr2 60495212 60495233 60495229 60495234 +
taccccacccacgcccccaccc

SEQ ID NO: 200544 - DNA, 22 bp, Artificial Sequence
  Synthetic oligonucleotide; CTA chr2 60495214 60495235 60495231 60495236 +
ccccacccacgcccccacccta

SEQ ID NO: 200545 - DNA, 22 bp, Artificial Sequence
  Synthetic oligonucleotide; CTA chr2 60495236 60495257 60495253 60495258 +
atcagaggccaaacccttcctg

SEQ ID NO: 200546 - DNA, 22 bp, Artificial Sequence
  Synthetic oligonucleotide; CTT chr2 60495254 60495275 60495271 60495276 +
cctggagcctgtgataaaagca

SEQ ID NO: 200547 - DNA, 22 bp, Artificial Sequence
  Synthetic oligonucleotide; TTC chr2 60495255 60495276 60495272 60495277 +
ctggagcctgtgataaaagcaa

SEQ ID NO: 200548 - DNA, 22 bp, Artificial Sequence
  Synthetic oligonucleotide; CTG chr2 60495258 60495279 60495275 60495280 +
gagcctgtgataaaagcaactg

SEQ ID NO: 200549 - DNA, 22 bp, Artificial Sequence
  Synthetic oligonucleotide; CTG chr2 60495265 60495286 60495282 60495287 +
tgataaaagcaactgttagctt

SEQ ID NO: 200550 - DNA, 22 bp, Artificial Sequence
  Synthetic oligonucleotide; CTG chr2 60495280 60495301 60495297 60495302 +
ttagcttgcactagactagctt

SEQ ID NO: 200551 - DNA, 22 bp, Artificial Sequence
  Synthetic oligonucleotide; TTA chr2 60495283 60495304 60495300 60495305 +
gcttgcactagactagcttcaa

SEQ ID NO: 200552 - DNA, 22 bp, Artificial Sequence
  Synthetic oligonucleotide; CTT chr2 60495287 60495308 60495304 60495309 +
gcactagactagcttcaaagtt

SEQ ID NO: 200553 - DNA, 22 bp, Artificial Sequence
  Synthetic oligonucleotide; TTG chr2 60495288 60495309 60495305 60495310 +
cactagactagcttcaaagttg

SEQ ID NO: 200554 - DNA, 22 bp, Artificial Sequence
  Synthetic oligonucleotide; CTA chr2 60495293 60495314 60495310 60495315 +
gactagcttcaaagttgtattg

SEQ ID NO: 200555 - DNA, 22 bp, Artificial Sequence
  Synthetic oligonucleotide; CTA chr2 60495298 60495319 60495315 60495320 +
gcttcaaagttgtattgaccct

SEQ ID NO: 200556 - DNA, 22 bp, Artificial Sequence
  Synthetic oligonucleotide; CTT chr2 60495302 60495323 60495319 60495324 +
caaagttgtattgaccctggtg

SEQ ID NO: 200557 - DNA, 22 bp, Artificial Sequence
  Synthetic oligonucleotide; TTC chr2 60495303 60495324 60495320 60495325 +
aaagttgtattgaccctggtgt

SEQ ID NO: 200558 - DNA, 22 bp, Artificial Sequence
  Synthetic oligonucleotide; TTG chr2 60495310 60495331 60495327 60495332 +
tattgaccctggtgtgttatgt

SEQ ID NO: 200559 - DNA, 22 bp, Artificial Sequence
  Synthetic oligonucleotide; TTG chr2 60495315 60495336 60495332 60495337 +
accctggtgtgttatgtctaag

SEQ ID NO: 200560 - DNA, 22 bp, Artificial Sequence
  Synthetic oligonucleotide; CTG chr2 60495321 60495342 60495338 60495343 +
gtgtgttatgtctaagagtaga

SEQ ID NO: 200561 - DNA, 22 bp, Artificial Sequence
  Synthetic oligonucleotide; TTA chr2 60495329 60495350 60495346 60495351 +
tgtctaagagtagatgccatat

SEQ ID NO: 200562 - DNA, 22 bp, Artificial Sequence
  Synthetic oligonucleotide; CTA chr2 60495335 60495356 60495352 60495357 +
agagtagatgccatatctcttt

SEQ ID NO: 200563 - DNA, 22 bp, Artificial Sequence
  Synthetic oligonucleotide; CTC chr2 60495354 60495375 60495371 60495376 +
ttttctggcctatgttattacc

SEQ ID NO: 200564 - DNA, 22 bp, Artificial Sequence
  Synthetic oligonucleotide; CTT chr2 60495356 60495377 60495373 60495378 +
ttctggcctatgttattacctg

SEQ ID NO: 200565 - DNA, 22 bp, Artificial Sequence
  Synthetic oligonucleotide; TTT chr2 60495357 60495378 60495374 60495379 +
tctggcctatgttattacctgt

SEQ ID NO: 200566 - DNA, 22 bp, Artificial Sequence
  Synthetic oligonucleotide; TTT chr2 60495358 60495379 60495375 60495380 +
ctggcctatgttattacctgta

SEQ ID NO: 200567 - DNA, 22 bp, Artificial Sequence
  Synthetic oligonucleotide; TTC chr2 60495359 60495380 60495376 60495381 +
tggcctatgttattacctgtat

SEQ ID NO: 200568 - DNA, 22 bp, Artificial Sequence
  Synthetic oligonucleotide; CTG chr2 60495361 60495382 60495378 60495383 +
gcctatgttattacctgtatgg

SEQ ID NO: 200569 - DNA, 22 bp, Artificial Sequence
  Synthetic oligonucleotide; CTA chr2 60495366 60495387 60495383 60495388 +
tgttattacctgtatggacttt

SEQ ID NO: 200570 - DNA, 22 bp, Artificial Sequence
  Synthetic oligonucleotide; TTA chr2 60495371 60495392 60495388 60495393 +
ttacctgtatggactttgcact

SEQ ID NO: 200571 - DNA, 22 bp, Artificial Sequence
  Synthetic oligonucleotide; TTA chr2 60495374 60495395 60495391 60495396 +
cctgtatggactttgcactgga

SEQ ID NO: 200572 - DNA, 22 bp, Artificial Sequence
  Synthetic oligonucleotide; CTG chr2 60495378 60495399 60495395 60495400 +
tatggactttgcactggaatca

SEQ ID NO: 200573 - DNA, 22 bp, Artificial Sequence
  Synthetic oligonucleotide; CTT chr2 60495387 60495408 60495404 60495409 +
tgcactggaatcagctatctgc

SEQ ID NO: 200574 - DNA, 22 bp, Artificial Sequence
  Synthetic oligonucleotide; TTT chr2 60495388 60495409 60495405 60495410 +
gcactggaatcagctatctgct

SEQ ID NO: 200575 - DNA, 22 bp, Artificial Sequence
  Synthetic oligonucleotide; TTG chr2 60495389 60495410 60495406 60495411 +
cactggaatcagctatctgctc

SEQ ID NO: 200576 - DNA, 22 bp, Artificial Sequence
  Synthetic oligonucleotide; CTG chr2 60495394 60495415 60495411 60495416 +
gaatcagctatctgctcttact

SEQ ID NO: 200577 - DNA, 22 bp, Artificial Sequence
  Synthetic oligonucleotide; CTA chr2 60495404 60495425 60495421 60495426 +
tctgctcttacttatgcacacc

SEQ ID NO: 200578 - DNA, 22 bp, Artificial Sequence
  Synthetic oligonucleotide; CTG chr2 60495408 60495429 60495425 60495430 +
ctcttacttatgcacacctggg

SEQ ID NO: 200579 - DNA, 22 bp, Artificial Sequence
  Synthetic oligonucleotide; CTC chr2 60495411 60495432 60495428 60495433 +
ttacttatgcacacctggggca

SEQ ID NO: 200580 - DNA, 22 bp, Artificial Sequence
  Synthetic oligonucleotide; CTT chr2 60495413 60495434 60495430 60495435 +
acttatgcacacctggggcata

SEQ ID NO: 200581 - DNA, 22 bp, Artificial Sequence
  Synthetic oligonucleotide; TTA chr2 60495414 60495435 60495431 60495436 +
cttatgcacacctggggcatag

SEQ ID NO: 200582 - DNA, 22 bp, Artificial Sequence
  Synthetic oligonucleotide; CTT chr2 60495417 60495438 60495434 60495439 +
atgcacacctggggcatagagc

SEQ ID NO: 200583 - DNA, 22 bp, Artificial Sequence
  Synthetic oligonucleotide; TTA chr2 60495418 60495439 60495435 60495440 +
tgcacacctggggcatagagcc

SEQ ID NO: 200584 - DNA, 22 bp, Artificial Sequence
  Synthetic oligonucleotide; CTG chr2 60495428 60495449 60495445 60495450 +
gggcatagagccagccctgtat

SEQ ID NO: 200585 - DNA, 22 bp, Artificial Sequence
  Synthetic oligonucleotide; CTG chr2 60495447 60495468 60495464 60495469 +
tatcgcttttcagccatctcac

SEQ ID NO: 200586 - DNA, 22 bp, Artificial Sequence
  Synthetic oligonucleotide; CTT chr2 60495455 60495476 60495472 60495477 +
ttcagccatctcactacagata

SEQ ID NO: 200587 - DNA, 22 bp, Artificial Sequence
  Synthetic oligonucleotide; TTT chr2 60495456 60495477 60495473 60495478 +
tcagccatctcactacagataa

SEQ ID NO: 200588 - DNA, 22 bp, Artificial Sequence
  Synthetic oligonucleotide; TTT chr2 60495457 60495478 60495474 60495479 +
cagccatctcactacagataac

SEQ ID NO: 200589 - DNA, 22 bp, Artificial Sequence
  Synthetic oligonucleotide; TTC chr2 60495458 60495479 60495475 60495480 +
agccatctcactacagataact

SEQ ID NO: 200590 - DNA, 22 bp, Artificial Sequence
  Synthetic oligonucleotide; CTC chr2 60495467 60495488 60495484 60495489 +
actacagataactcccaagtcc

SEQ ID NO: 200591 - DNA, 22 bp, Artificial Sequence
  Synthetic oligonucleotide; CTA chr2 60495471 60495492 60495488 60495493 +
cagataactcccaagtcctgtc

SEQ ID NO: 200592 - DNA, 22 bp, Artificial Sequence
  Synthetic oligonucleotide; CTC chr2 60495481 60495502 60495498 60495503 +
ccaagtcctgtctagctgcctt

SEQ ID NO: 200593 - DNA, 22 bp, Artificial Sequence
  Synthetic oligonucleotide; CTG chr2 60495491 60495512 60495508 60495513 +
tctagctgccttccttatcaca

SEQ ID NO: 200594 - DNA, 22 bp, Artificial Sequence
  Synthetic oligonucleotide; CTA chr2 60495495 60495516 60495512 60495517 +
gctgccttccttatcacaggaa

SEQ ID NO: 200595 - DNA, 22 bp, Artificial Sequence
  Synthetic oligonucleotide; CTG chr2 60495499 60495520 60495516 60495521 +
ccttccttatcacaggaatagc

SEQ ID NO: 200596 - DNA, 22 bp, Artificial Sequence
  Synthetic oligonucleotide; CTT chr2 60495503 60495524 60495520 60495525 +
ccttatcacaggaatagcaccc

SEQ ID NO: 200597 - DNA, 22 bp, Artificial Sequence
  Synthetic oligonucleotide; TTC chr2 60495504 60495525 60495521 60495526 +
cttatcacaggaatagcaccca

SEQ ID NO: 200598 - DNA, 22 bp, Artificial Sequence
  Synthetic oligonucleotide; CTT chr2 60495507 60495528 60495524 60495529 +
atcacaggaatagcacccaagg

SEQ ID NO: 200599 - DNA, 22 bp, Artificial Sequence
  Synthetic oligonucleotide; TTA chr2 60495508 60495529 60495525 60495530 +
tcacaggaatagcacccaaggt

SEQ ID NO: 200600 - DNA, 22 bp, Artificial Sequence
  Synthetic oligonucleotide; CTC chr2 60495543 60495564 60495560 60495565 +
agagtagaaccccctataaact

SEQ ID NO: 200601 - DNA, 22 bp, Artificial Sequence
  Synthetic oligonucleotide; CTA chr2 60495559 60495580 60495576 60495581 +
taaactagtctggtttgcccat

SEQ ID NO: 200602 - DNA, 22 bp, Artificial Sequence
  Synthetic oligonucleotide; CTA chr2 60495566 60495587 60495583 60495588 +
gtctggtttgcccatggggcac

SEQ ID NO: 200603 - DNA, 22 bp, Artificial Sequence
  Synthetic oligonucleotide; CTG chr2 60495571 60495592 60495588 60495593 +
gtttgcccatggggcacagtca

SEQ ID NO: 200604 - DNA, 22 bp, Artificial Sequence
  Synthetic oligonucleotide; TTT chr2 60495575 60495596 60495592 60495597 +
gcccatggggcacagtcaggct

SEQ ID NO: 200605 - DNA, 22 bp, Artificial Sequence
  Synthetic oligonucleotide; TTG chr2 60495576 60495597 60495593 60495598 +
cccatggggcacagtcaggctg

SEQ ID NO: 200606 - DNA, 22 bp, Artificial Sequence
  Synthetic oligonucleotide; CTG chr2 60495598 60495619 60495615 60495620 +
ttttccagggtggggtgcagac

SEQ ID NO: 200607 - DNA, 22 bp, Artificial Sequence
  Synthetic oligonucleotide; TTT chr2 60495601 60495622 60495618 60495623 +
tccagggtggggtgcagacatt

SEQ ID NO: 200608 - DNA, 22 bp, Artificial Sequence
  Synthetic oligonucleotide; TTT chr2 60495602 60495623 60495619 60495624 +
ccagggtggggtgcagacattc

SEQ ID NO: 200609 - DNA, 22 bp, Artificial Sequence
  Synthetic oligonucleotide; TTC chr2 60495603 60495624 60495620 60495625 +
cagggtggggtgcagacattct

SEQ ID NO: 200610 - DNA, 22 bp, Artificial Sequence
  Synthetic oligonucleotide; TTC chr2 60495624 60495645 60495641 60495646 +
tctgcctgttgtgatgcttaca

SEQ ID NO: 200611 - DNA, 22 bp, Artificial Sequence
  Synthetic oligonucleotide; CTC chr2 60495626 60495647 60495643 60495648 +
tgcctgttgtgatgcttacata

SEQ ID NO: 200612 - DNA, 22 bp, Artificial Sequence
  Synthetic oligonucleotide; CTG chr2 60495628 60495649 60495645 60495650 +
cctgttgtgatgcttacatata

SEQ ID NO: 200613 - DNA, 22 bp, Artificial Sequence
  Synthetic oligonucleotide; CTG chr2 60495632 60495653 60495649 60495654 +
ttgtgatgcttacatataacgt

SEQ ID NO: 200614 - DNA, 22 bp, Artificial Sequence
  Synthetic oligonucleotide; TTG chr2 60495635 60495656 60495652 60495657 +
tgatgcttacatataacgtcat

SEQ ID NO: 200615 - DNA, 22 bp, Artificial Sequence
  Synthetic oligonucleotide; CTT chr2 60495643 60495664 60495660 60495665 +
acatataacgtcataacagaca

SEQ ID NO: 200616 - DNA, 22 bp, Artificial Sequence
  Synthetic oligonucleotide; TTA chr2 60495644 60495665 60495661 60495666 +
catataacgtcataacagacac

SEQ ID NO: 200617 - DNA, 22 bp, Artificial Sequence
  Synthetic oligonucleotide; TTG chr2 60495678 60495699 60495695 60495700 +
tgatccctgtggtttgagagtt

SEQ ID NO: 200618 - DNA, 22 bp, Artificial Sequence
  Synthetic oligonucleotide; CTG chr2 60495687 60495708 60495704 60495709 +
tggtttgagagtttggagcttc

SEQ ID NO: 200619 - DNA, 22 bp, Artificial Sequence
  Synthetic oligonucleotide; TTT chr2 60495693 60495714 60495710 60495715 +
gagagtttggagcttccctaaa

SEQ ID NO: 200620 - DNA, 22 bp, Artificial Sequence
  Synthetic oligonucleotide; TTG chr2 60495694 60495715 60495711 60495716 +
agagtttggagcttccctaaaa

SEQ ID NO: 200621 - DNA, 22 bp, Artificial Sequence
  Synthetic oligonucleotide; TTT chr2 60495701 60495722 60495718 60495723 +
ggagcttccctaaaagtcaaaa

SEQ ID NO: 200622 - DNA, 22 bp, Artificial Sequence
  Synthetic oligonucleotide; TTG chr2 60495702 60495723 60495719 60495724 +
gagcttccctaaaagtcaaaat

SEQ ID NO: 200623 - DNA, 22 bp, Artificial Sequence
  Synthetic oligonucleotide; CTT chr2 60495708 60495729 60495725 60495730 +
ccctaaaagtcaaaatattctc

SEQ ID NO: 200624 - DNA, 22 bp, Artificial Sequence
  Synthetic oligonucleotide; TTC chr2 60495709 60495730 60495726 60495731 +
cctaaaagtcaaaatattctca

SEQ ID NO: 200625 - DNA, 22 bp, Artificial Sequence
  Synthetic oligonucleotide; CTA chr2 60495713 60495734 60495730 60495735 +
aaagtcaaaatattctcaatgg

SEQ ID NO: 200626 - DNA, 22 bp, Artificial Sequence
  Synthetic oligonucleotide; TTC chr2 60495728 60495749 60495745 60495750 +
tcaatgggccctcaatcagcac

SEQ ID NO: 200627 - DNA, 22 bp, Artificial Sequence
  Synthetic oligonucleotide; CTC chr2 60495730 60495751 60495747 60495752 +
aatgggccctcaatcagcacat

SEQ ID NO: 200628 - DNA, 22 bp, Artificial Sequence
  Synthetic oligonucleotide; CTC chr2 60495741 60495762 60495758 60495763 +
aatcagcacatacacacaaaag

SEQ ID NO: 200629 - DNA, 22 bp, Artificial Sequence
  Synthetic oligonucleotide; CTG chr2 60495770 60495791 60495787 60495792 +
gaaaactgtaattcttttcctg

SEQ ID NO: 200630 - DNA, 22 bp, Artificial Sequence
  Synthetic oligonucleotide; CTG chr2 60495778 60495799 60495795 60495800 +
taattcttttcctgctcaaaga

SEQ ID NO: 200631 - DNA, 22 bp, Artificial Sequence
  Synthetic oligonucleotide; TTC chr2 60495784 60495805 60495801 60495806 +
ttttcctgctcaaagacaggca

SEQ ID NO: 200632 - DNA, 22 bp, Artificial Sequence
  Synthetic oligonucleotide; CTT chr2 60495786 60495807 60495803 60495808 +
ttcctgctcaaagacaggcaat

SEQ ID NO: 200633 - DNA, 22 bp, Artificial Sequence
  Synthetic oligonucleotide; TTT chr2 60495787 60495808 60495804 60495809 +
tcctgctcaaagacaggcaatt

SEQ ID NO: 200634 - DNA, 22 bp, Artificial Sequence
  Synthetic oligonucleotide; TTT chr2 60495788 60495809 60495805 60495810 +
cctgctcaaagacaggcaattc

SEQ ID NO: 200635 - DNA, 22 bp, Artificial Sequence
  Synthetic oligonucleotide; TTC chr2 60495789 60495810 60495806 60495811 +
ctgctcaaagacaggcaattca

SEQ ID NO: 200636 - DNA, 22 bp, Artificial Sequence
  Synthetic oligonucleotide; CTG chr2 60495792 60495813 60495809 60495814 +
ctcaaagacaggcaattcaata

SEQ ID NO: 200637 - DNA, 22 bp, Artificial Sequence
  Synthetic oligonucleotide; CTC chr2 60495795 60495816 60495812 60495817 +
aaagacaggcaattcaataccc

SEQ ID NO: 200638 - DNA, 22 bp, Artificial Sequence
  Synthetic oligonucleotide; TTC chr2 60495810 60495831 60495827 60495832 +
aataccccttcccccaaccaaa

SEQ ID NO: 200639 - DNA, 22 bp, Artificial Sequence
  Synthetic oligonucleotide; CTT chr2 60495820 60495841 60495837 60495842 +
cccccaaccaaaaacccttgcc

SEQ ID NO: 200640 - DNA, 22 bp, Artificial Sequence
  Synthetic oligonucleotide; TTC chr2 60495821 60495842 60495838 60495843 +
ccccaaccaaaaacccttgcca

SEQ ID NO: 200641 - DNA, 22 bp, Artificial Sequence
  Synthetic oligonucleotide; CTT chr2 60495839 60495860 60495856 60495861 +
gccaccatgggagcctggggca

SEQ ID NO: 200642 - DNA, 22 bp, Artificial Sequence
  Synthetic oligonucleotide; TTG chr2 60495840 60495861 60495857 60495862 +
ccaccatgggagcctggggcag

SEQ ID NO: 200643 - DNA, 22 bp, Artificial Sequence
  Synthetic oligonucleotide; CTG chr2 60495856 60495877 60495873 60495878 +
gggcagagaaggcacagtgaag

SEQ ID NO: 200644 - DNA, 22 bp, Artificial Sequence
  Synthetic oligonucleotide; CTG chr2 60495886 60495907 60495903 60495908 +
taattccaggctctaaatggtg

SEQ ID NO: 200645 - DNA, 22 bp, Artificial Sequence
  Synthetic oligonucleotide; TTC chr2 60495892 60495913 60495909 60495914 +
caggctctaaatggtgctgtca

SEQ ID NO: 200646 - DNA, 22 bp, Artificial Sequence
  Synthetic oligonucleotide; CTC chr2 60495899 60495920 60495916 60495921 +
taaatggtgctgtcatttttct

SEQ ID NO: 200647 - DNA, 22 bp, Artificial Sequence
  Synthetic oligonucleotide; CTA chr2 60495901 60495922 60495918 60495923 +
aatggtgctgtcatttttctga

SEQ ID NO: 200648 - DNA, 22 bp, Artificial Sequence
  Synthetic oligonucleotide; CTG chr2 60495911 60495932 60495928 60495933 +
tcatttttctgagagtctctaa

SEQ ID NO: 200649 - DNA, 22 bp, Artificial Sequence
  Synthetic oligonucleotide; TTT chr2 60495917 60495938 60495934 60495939 +
ttctgagagtctctaaattaca

SEQ ID NO: 200650 - DNA, 22 bp, Artificial Sequence
  Synthetic oligonucleotide; TTT chr2 60495918 60495939 60495935 60495940 +
tctgagagtctctaaattacaa

SEQ ID NO: 200651 - DNA, 22 bp, Artificial Sequence
  Synthetic oligonucleotide; TTT chr2 60495919 60495940 60495936 60495941 +
ctgagagtctctaaattacaag

SEQ ID NO: 200652 - DNA, 22 bp, Artificial Sequence
  Synthetic oligonucleotide; TTC chr2 60495920 60495941 60495937 60495942 +
tgagagtctctaaattacaagg

SEQ ID NO: 200653 - DNA, 22 bp, Artificial Sequence
  Synthetic oligonucleotide; CTG chr2 60495922 60495943 60495939 60495944 +
agagtctctaaattacaagggt

SEQ ID NO: 200654 - DNA, 22 bp, Artificial Sequence
  Synthetic oligonucleotide; CTC chr2 60495930 60495951 60495947 60495952 +
taaattacaagggtgttttcac

SEQ ID NO: 200655 - DNA, 22 bp, Artificial Sequence
  Synthetic oligonucleotide; CTA chr2 60495932 60495953 60495949 60495954 +
aattacaagggtgttttcacta

SEQ ID NO: 200656 - DNA, 22 bp, Artificial Sequence
  Synthetic oligonucleotide; TTA chr2 60495937 60495958 60495954 60495959 +
caagggtgttttcactattctt

SEQ ID NO: 200657 - DNA, 22 bp, Artificial Sequence
  Synthetic oligonucleotide; TTT chr2 60495948 60495969 60495965 60495970 +
tcactattcttagctatttttt

SEQ ID NO: 200658 - DNA, 22 bp, Artificial Sequence
  Synthetic oligonucleotide; TTT chr2 60495949 60495970 60495966 60495971 +
cactattcttagctatttttta

SEQ ID NO: 200659 - DNA, 22 bp, Artificial Sequence
  Synthetic oligonucleotide; TTC chr2 60495950 60495971 60495967 60495972 +
actattcttagctattttttaa

SEQ ID NO: 200660 - DNA, 22 bp, Artificial Sequence
  Synthetic oligonucleotide; CTA chr2 60495954 60495975 60495971 60495976 +
ttcttagctattttttaaaaca

SEQ ID NO: 200661 - DNA, 22 bp, Artificial Sequence
  Synthetic oligonucleotide; TTC chr2 60495957 60495978 60495974 60495979 +
ttagctattttttaaaacacct

SEQ ID NO: 200662 - DNA, 22 bp, Artificial Sequence
  Synthetic oligonucleotide; CTT chr2 60495959 60495980 60495976 60495981 +
agctattttttaaaacacctaa

SEQ ID NO: 200663 - DNA, 22 bp, Artificial Sequence
  Synthetic oligonucleotide; TTA chr2 60495960 60495981 60495977 60495982 +
gctattttttaaaacacctaag

SEQ ID NO: 200664 - DNA, 22 bp, Artificial Sequence
  Synthetic oligonucleotide; CTA chr2 60495964 60495985 60495981 60495986 +
ttttttaaaacacctaagaaac

SEQ ID NO: 200665 - DNA, 22 bp, Artificial Sequence
  Synthetic oligonucleotide; TTT chr2 60495967 60495988 60495984 60495989 +
tttaaaacacctaagaaacata

SEQ ID NO: 200666 - DNA, 22 bp, Artificial Sequence
  Synthetic oligonucleotide; TTT chr2 60495968 60495989 60495985 60495990 +
ttaaaacacctaagaaacatac

SEQ ID NO: 200667 - DNA, 22 bp, Artificial Sequence
  Synthetic oligonucleotide; TTT chr2 60495969 60495990 60495986 60495991 +
taaaacacctaagaaacatact

SEQ ID NO: 200668 - DNA, 22 bp, Artificial Sequence
  Synthetic oligonucleotide; TTT chr2 60495970 60495991 60495987 60495992 +
aaaacacctaagaaacatactg

SEQ ID NO: 200669 - DNA, 22 bp, Artificial Sequence
  Synthetic oligonucleotide; TTA chr2 60495971 60495992 60495988 60495993 +
aaacacctaagaaacatactgc

SEQ ID NO: 200670 - DNA, 22 bp, Artificial Sequence
  Synthetic oligonucleotide; CTA chr2 60495980 60496001 60495997 60496002 +
agaaacatactgcagctctgga

SEQ ID NO: 200671 - DNA, 22 bp, Artificial Sequence
  Synthetic oligonucleotide; CTG chr2 60495992 60496013 60496009 60496014 +
cagctctggaaaagagaacaaa

SEQ ID NO: 200672 - DNA, 22 bp, Artificial Sequence
  Synthetic oligonucleotide; CTC chr2 60495998 60496019 60496015 60496020 +
tggaaaagagaacaaacaaacc

SEQ ID NO: 200673 - DNA, 22 bp, Artificial Sequence
  Synthetic oligonucleotide; CTG chr2 60496000 60496021 60496017 60496022 +
gaaaagagaacaaacaaaccaa

SEQ ID NO: 200674 - DNA, 22 bp, Artificial Sequence
  Synthetic oligonucleotide; CTC chr2 60496048 60496069 60496065 60496070 +
atatgtgaaaagtcaattgata

SEQ ID NO: 200675 - DNA, 22 bp, Artificial Sequence
  Synthetic oligonucleotide; TTG chr2 60496067 60496088 60496084 60496089 +
ataatgaaggctttaggataac

SEQ ID NO: 200676 - DNA, 22 bp, Artificial Sequence
  Synthetic oligonucleotide; CTT chr2 60496080 60496101 60496097 60496102 +
taggataaccggaggggagatg

SEQ ID NO: 200677 - DNA, 22 bp, Artificial Sequence
  Synthetic oligonucleotide; TTT chr2 60496081 60496102 60496098 60496103 +
aggataaccggaggggagatga

SEQ ID NO: 200678 - DNA, 22 bp, Artificial Sequence
  Synthetic oligonucleotide; TTA chr2 60496082 60496103 60496099 60496104 +
ggataaccggaggggagatgat

SEQ ID NO: 200679 - DNA, 22 bp, Artificial Sequence
  Synthetic oligonucleotide; TTG chr2 60496106 60496127 60496123 60496128 +
aaagcaatgcacctgtgcagga

SEQ ID NO: 200680 - DNA, 22 bp, Artificial Sequence
  Synthetic oligonucleotide; CTG chr2 60496121 60496142 60496138 60496143 +
tgcaggaaatggattacggaaa

SEQ ID NO: 200681 - DNA, 22 bp, Artificial Sequence
  Synthetic oligonucleotide; TTA chr2 60496137 60496158 60496154 60496159 +
cggaaacagggaattgttcatg

SEQ ID NO: 200682 - DNA, 22 bp, Artificial Sequence
  Synthetic oligonucleotide; TTG chr2 60496153 60496174 60496170 60496175 +
ttcatgaaatcccagaaaacca

SEQ ID NO: 200683 - DNA, 22 bp, Artificial Sequence
  Synthetic oligonucleotide; TTC chr2 60496156 60496177 60496173 60496178 +
atgaaatcccagaaaaccagaa

SEQ ID NO: 200684 - DNA, 22 bp, Artificial Sequence
  Synthetic oligonucleotide; TTC chr2 60496190 60496211 60496207 60496212 +
tggaagtcggaaaaacaaatca

SEQ ID NO: 200685 - DNA, 22 bp, Artificial Sequence
  Synthetic oligonucleotide; CTG chr2 60496192 60496213 60496209 60496214 +
gaagtcggaaaaacaaatcatg

SEQ ID NO: 200686 - DNA, 22 bp, Artificial Sequence
  Synthetic oligonucleotide; CTT chr2 60496218 60496239 60496235 60496240 +
aagcaatggaagtccaatacac

SEQ ID NO: 200687 - DNA, 22 bp, Artificial Sequence
  Synthetic oligonucleotide; TTA chr2 60496219 60496240 60496236 60496241 +
agcaatggaagtccaatacacg

SEQ ID NO: 200688 - DNA, 22 bp, Artificial Sequence
  Synthetic oligonucleotide; TTT chr2 60496244 60496265 60496261 60496266 +
acagaatgccttgtcccacgag

SEQ ID NO: 200689 - DNA, 22 bp, Artificial Sequence
  Synthetic oligonucleotide; TTA chr2 60496245 60496266 60496262 60496267 +
cagaatgccttgtcccacgagg

SEQ ID NO: 200690 - DNA, 22 bp, Artificial Sequence
  Synthetic oligonucleotide; CTT chr2 60496256 60496277 60496273 60496278 +
gtcccacgaggcaacacaggct

SEQ ID NO: 200691 - DNA, 22 bp, Artificial Sequence
  Synthetic oligonucleotide; TTG chr2 60496257 60496278 60496274 60496279 +
tcccacgaggcaacacaggcta

SEQ ID NO: 200692 - DNA, 22 bp, Artificial Sequence
  Synthetic oligonucleotide; CTA chr2 60496279 60496300 60496296 60496301 +
ccacagatgggggacagggtgg

SEQ ID NO: 200693 - DNA, 22 bp, Artificial Sequence
  Synthetic oligonucleotide; TTA chr2 60496325 60496346 60496342 60496347 +
ctgaggggcaaagggatagccc

SEQ ID NO: 200694 - DNA, 22 bp, Artificial Sequence
  Synthetic oligonucleotide; CTG chr2 60496328 60496349 60496345 60496350 +
aggggcaaagggatagccctat

SEQ ID NO: 200695 - DNA, 22 bp, Artificial Sequence
  Synthetic oligonucleotide; CTA chr2 60496349 60496370 60496366 60496371 +
tgaggcaagtgtccagggcaga

SEQ ID NO: 200696 - DNA, 22 bp, Artificial Sequence
  Synthetic oligonucleotide; CTG chr2 60496375 60496396 60496392 60496397 +
gagctttgtgaaaccatttccc

SEQ ID NO: 200697 - DNA, 22 bp, Artificial Sequence
  Synthetic oligonucleotide; CTT chr2 60496381 60496402 60496398 60496403 +
tgtgaaaccatttcccaggcag

SEQ ID NO: 200698 - DNA, 22 bp, Artificial Sequence
  Synthetic oligonucleotide; TTT chr2 60496382 60496403 60496399 60496404 +
gtgaaaccatttcccaggcaga

SEQ ID NO: 200699 - DNA, 22 bp, Artificial Sequence
  Synthetic oligonucleotide; TTG chr2 60496383 60496404 60496400 60496405 +
tgaaaccatttcccaggcagag

SEQ ID NO: 200700 - DNA, 22 bp, Artificial Sequence
  Synthetic oligonucleotide; TTT chr2 60496394 60496415 60496411 60496416 +
cccaggcagagacagagcacta

SEQ ID NO: 200701 - DNA, 22 bp, Artificial Sequence
  Synthetic oligonucleotide; TTC chr2 60496395 60496416 60496412 60496417 +
ccaggcagagacagagcactag

SEQ ID NO: 200702 - DNA, 22 bp, Artificial Sequence
  Synthetic oligonucleotide; CTA chr2 60496416 60496437 60496433 60496438 +
ggctggtgctgccagtctgaca

SEQ ID NO: 200703 - DNA, 22 bp, Artificial Sequence
  Synthetic oligonucleotide; CTG chr2 60496421 60496442 60496438 60496443 +
gtgctgccagtctgacaataag

SEQ ID NO: 200704 - DNA, 22 bp, Artificial Sequence
  Synthetic oligonucleotide; CTG chr2 60496427 60496448 60496444 60496449 +
ccagtctgacaataagtctgcc

SEQ ID NO: 200705 - DNA, 22 bp, Artificial Sequence
  Synthetic oligonucleotide; CTG chr2 60496435 60496456 60496452 60496457 +
acaataagtctgccattgtcct

SEQ ID NO: 200706 - DNA, 22 bp, Artificial Sequence
  Synthetic oligonucleotide; CTG chr2 60496447 60496468 60496464 60496469 +
ccattgtcctctggtcagctct

SEQ ID NO: 200707 - DNA, 22 bp, Artificial Sequence
  Synthetic oligonucleotide; TTG chr2 60496453 60496474 60496470 60496475 +
tcctctggtcagctctggacac

SEQ ID NO: 200708 - DNA, 22 bp, Artificial Sequence
  Synthetic oligonucleotide; CTC chr2 60496458 60496479 60496475 60496480 +
tggtcagctctggacacacagc

SEQ ID NO: 200709 - DNA, 22 bp, Artificial Sequence
  Synthetic oligonucleotide; CTG chr2 60496460 60496481 60496477 60496482 +
gtcagctctggacacacagcaa

SEQ ID NO: 200710 - DNA, 22 bp, Artificial Sequence
  Synthetic oligonucleotide; CTC chr2 60496468 60496489 60496485 60496490 +
tggacacacagcaaaagtgagt

SEQ ID NO: 200711 - DNA, 22 bp, Artificial Sequence
  Synthetic oligonucleotide; CTG chr2 60496470 60496491 60496487 60496492 +
gacacacagcaaaagtgagttc

SEQ ID NO: 200712 - DNA, 22 bp, Artificial Sequence
  Synthetic oligonucleotide; TTC chr2 60496492 60496513 60496509 60496514 +
agagtagcctgaagcaggaaag

SEQ ID NO: 200713 - DNA, 22 bp, Artificial Sequence
  Synthetic oligonucleotide; CTG chr2 60496503 60496524 60496520 60496525 +
aagcaggaaagagggaagagag

SEQ ID NO: 200714 - DNA, 22 bp, Artificial Sequence
  Synthetic oligonucleotide; CTA chr2 60496539 60496560 60496556 60496561 +
tcttccactttgctgcaggttc

SEQ ID NO: 200715 - DNA, 22 bp, Artificial Sequence
  Synthetic oligonucleotide; CTT chr2 60496543 60496564 60496560 60496565 +
ccactttgctgcaggttcaagg

SEQ ID NO: 200716 - DNA, 22 bp, Artificial Sequence
  Synthetic oligonucleotide; TTC chr2 60496544 60496565 60496561 60496566 +
cactttgctgcaggttcaaggc

SEQ ID NO: 200717 - DNA, 22 bp, Artificial Sequence
  Synthetic oligonucleotide; CTT chr2 60496549 60496570 60496566 60496571 +
tgctgcaggttcaaggcaagga

SEQ ID NO: 200718 - DNA, 22 bp, Artificial Sequence
  Synthetic oligonucleotide; TTT chr2 60496550 60496571 60496567 60496572 +
gctgcaggttcaaggcaaggat

SEQ ID NO: 200719 - DNA, 22 bp, Artificial Sequence
  Synthetic oligonucleotide; TTG chr2 60496551 60496572 60496568 60496573 +
ctgcaggttcaaggcaaggatt

SEQ ID NO: 200720 - DNA, 22 bp, Artificial Sequence
  Synthetic oligonucleotide; CTG chr2 60496554 60496575 60496571 60496576 +
caggttcaaggcaaggatttga

SEQ ID NO: 200721 - DNA, 22 bp, Artificial Sequence
  Synthetic oligonucleotide; TTC chr2 60496561 60496582 60496578 60496583 +
aaggcaaggatttgagacagtt

SEQ ID NO: 200722 - DNA, 22 bp, Artificial Sequence
  Synthetic oligonucleotide; TTT chr2 60496574 60496595 60496591 60496596 +
gagacagttaccccttctggaa

SEQ ID NO: 200723 - DNA, 22 bp, Artificial Sequence
  Synthetic oligonucleotide; TTG chr2 60496575 60496596 60496592 60496597 +
agacagttaccccttctggaag

SEQ ID NO: 200724 - DNA, 22 bp, Artificial Sequence
  Synthetic oligonucleotide; TTA chr2 60496584 60496605 60496601 60496606 +
ccccttctggaagagcctggtg

SEQ ID NO: 200725 - DNA, 22 bp, Artificial Sequence
  Synthetic oligonucleotide; CTT chr2 60496590 60496611 60496607 60496612 +
ctggaagagcctggtgagtaca

SEQ ID NO: 200726 - DNA, 22 bp, Artificial Sequence
  Synthetic oligonucleotide; TTC chr2 60496591 60496612 60496608 60496613 +
tggaagagcctggtgagtacat

SEQ ID NO: 200727 - DNA, 22 bp, Artificial Sequence
  Synthetic oligonucleotide; CTG chr2 60496593 60496614 60496610 60496615 +
gaagagcctggtgagtacatct

SEQ ID NO: 200728 - DNA, 22 bp, Artificial Sequence
  Synthetic oligonucleotide; CTG chr2 60496603 60496624 60496620 60496625 +
gtgagtacatctctcctgcctt

SEQ ID NO: 200729 - DNA, 22 bp, Artificial Sequence
  Synthetic oligonucleotide; CTC chr2 60496616 60496637 60496633 60496638 +
tcctgccttgtacaaccctctc

SEQ ID NO: 200730 - DNA, 22 bp, Artificial Sequence
  Synthetic oligonucleotide; CTC chr2 60496618 60496639 60496635 60496640 +
ctgccttgtacaaccctctctc

SEQ ID NO: 200731 - DNA, 22 bp, Artificial Sequence
  Synthetic oligonucleotide; CTG chr2 60496621 60496642 60496638 60496643 +
ccttgtacaaccctctctcctc

SEQ ID NO: 200732 - DNA, 22 bp, Artificial Sequence
  Synthetic oligonucleotide; CTT chr2 60496625 60496646 60496642 60496647 +
gtacaaccctctctcctcaccg

SEQ ID NO: 200733 - DNA, 22 bp, Artificial Sequence
  Synthetic oligonucleotide; TTG chr2 60496626 60496647 60496643 60496648 +
tacaaccctctctcctcaccga

SEQ ID NO: 200734 - DNA, 22 bp, Artificial Sequence
  Synthetic oligonucleotide; CTC chr2 60496636 60496657 60496653 60496658 +
tctcctcaccgactttctctcc

SEQ ID NO: 200735 - DNA, 22 bp, Artificial Sequence
  Synthetic oligonucleotide; CTC chr2 60496638 60496659 60496655 60496660 +
tcctcaccgactttctctccca

SEQ ID NO: 200736 - DNA, 22 bp, Artificial Sequence
  Synthetic oligonucleotide; CTC chr2 60496640 60496661 60496657 60496662 +
ctcaccgactttctctcccagc

SEQ ID NO: 200737 - DNA, 22 bp, Artificial Sequence
  Synthetic oligonucleotide; CTC chr2 60496643 60496664 60496660 60496665 +
accgactttctctcccagcagc

SEQ ID NO: 200738 - DNA, 22 bp, Artificial Sequence
  Synthetic oligonucleotide; CTT chr2 60496651 60496672 60496668 60496673 +
tctctcccagcagccagcaggg

SEQ ID NO: 200739 - DNA, 22 bp, Artificial Sequence
  Synthetic oligonucleotide; TTT chr2 60496652 60496673 60496669 60496674 +
ctctcccagcagccagcagggg

SEQ ID NO: 200740 - DNA, 22 bp, Artificial Sequence
  Synthetic oligonucleotide; TTC chr2 60496653 60496674 60496670 60496675 +
tctcccagcagccagcaggggc

SEQ ID NO: 200741 - DNA, 22 bp, Artificial Sequence
  Synthetic oligonucleotide; CTC chr2 60496655 60496676 60496672 60496677 +
tcccagcagccagcaggggcct

SEQ ID NO: 200742 - DNA, 22 bp, Artificial Sequence
  Synthetic oligonucleotide; CTC chr2 60496657 60496678 60496674 60496679 +
ccagcagccagcaggggcctgg

SEQ ID NO: 200743 - DNA, 22 bp, Artificial Sequence
  Synthetic oligonucleotide; CTG chr2 60496678 60496699 60496695 60496700 +
ggccatttatggaatgcaagcc

SEQ ID NO: 200744 - DNA, 22 bp, Artificial Sequence
  Synthetic oligonucleotide; TTT chr2 60496686 60496707 60496703 60496708 +
atggaatgcaagccctgaccac

SEQ ID NO: 200745 - DNA, 22 bp, Artificial Sequence
  Synthetic oligonucleotide; TTA chr2 60496687 60496708 60496704 60496709 +
tggaatgcaagccctgaccaca

SEQ ID NO: 200746 - DNA, 22 bp, Artificial Sequence
  Synthetic oligonucleotide; CTG chr2 60496703 60496724 60496720 60496725 +
accacacagacttacttacatg

SEQ ID NO: 200747 - DNA, 22 bp, Artificial Sequence
  Synthetic oligonucleotide; CTT chr2 60496716 60496737 60496733 60496738 +
acttacatgccaggacagccac

SEQ ID NO: 200748 - DNA, 22 bp, Artificial Sequence
  Synthetic oligonucleotide; TTA chr2 60496717 60496738 60496734 60496739 +
cttacatgccaggacagccacc

SEQ ID NO: 200749 - DNA, 22 bp, Artificial Sequence
  Synthetic oligonucleotide; CTT chr2 60496720 60496741 60496737 60496742 +
acatgccaggacagccaccagg

SEQ ID NO: 200750 - DNA, 22 bp, Artificial Sequence
  Synthetic oligonucleotide; TTA chr2 60496721 60496742 60496738 60496743 +
catgccaggacagccaccaggt

SEQ ID NO: 200751 - DNA, 22 bp, Artificial Sequence
  Synthetic oligonucleotide; CTT chr2 60496749 60496770 60496766 60496771 +
tcccactctaggttccactgtg

SEQ ID NO: 200752 - DNA, 22 bp, Artificial Sequence
  Synthetic oligonucleotide; TTT chr2 60496750 60496771 60496767 60496772 +
cccactctaggttccactgtga

SEQ ID NO: 200753 - DNA, 22 bp, Artificial Sequence
  Synthetic oligonucleotide; TTC chr2 60496751 60496772 60496768 60496773 +
ccactctaggttccactgtgag

SEQ ID NO: 200754 - DNA, 22 bp, Artificial Sequence
  Synthetic oligonucleotide; CTC chr2 60496757 60496778 60496774 60496779 +
taggttccactgtgagtgctct

SEQ ID NO: 200755 - DNA, 22 bp, Artificial Sequence
  Synthetic oligonucleotide; CTA chr2 60496759 60496780 60496776 60496781 +
ggttccactgtgagtgctctct

SEQ ID NO: 200756 - DNA, 22 bp, Artificial Sequence
  Synthetic oligonucleotide; TTC chr2 60496764 60496785 60496781 60496786 +
cactgtgagtgctctctctctc

SEQ ID NO: 200757 - DNA, 22 bp, Artificial Sequence
  Synthetic oligonucleotide; CTG chr2 60496769 60496790 60496786 60496791 +
tgagtgctctctctctctctct

SEQ ID NO: 200758 - DNA, 22 bp, Artificial Sequence
  Synthetic oligonucleotide; CTC chr2 60496778 60496799 60496795 60496800 +
tctctctctctctctctcacta

SEQ ID NO: 200759 - DNA, 22 bp, Artificial Sequence
  Synthetic oligonucleotide; CTC chr2 60496780 60496801 60496797 60496802 +
tctctctctctctctcactatg

SEQ ID NO: 200760 - DNA, 22 bp, Artificial Sequence
  Synthetic oligonucleotide; CTC chr2 60496782 60496803 60496799 60496804 +
tctctctctctctcactatgct

SEQ ID NO: 200761 - DNA, 22 bp, Artificial Sequence
  Synthetic oligonucleotide; CTC chr2 60496784 60496805 60496801 60496806 +
tctctctctctcactatgctcc

SEQ ID NO: 200762 - DNA, 22 bp, Artificial Sequence
  Synthetic oligonucleotide; CTC chr2 60496786 60496807 60496803 60496808 +
tctctctctcactatgctccca

SEQ ID NO: 200763 - DNA, 22 bp, Artificial Sequence
  Synthetic oligonucleotide; CTC chr2 60496788 60496809 60496805 60496810 +
tctctctcactatgctcccaag

SEQ ID NO: 200764 - DNA, 22 bp, Artificial Sequence
  Synthetic oligonucleotide; CTC chr2 60496790 60496811 60496807 60496812 +
tctctcactatgctcccaagag

SEQ ID NO: 200765 - DNA, 22 bp, Artificial Sequence
  Synthetic oligonucleotide; CTC chr2 60496792 60496813 60496809 60496814 +
tctcactatgctcccaagagga

SEQ ID NO: 200766 - DNA, 22 bp, Artificial Sequence
  Synthetic oligonucleotide; CTC chr2 60496794 60496815 60496811 60496816 +
tcactatgctcccaagaggagt

SEQ ID NO: 200767 - DNA, 22 bp, Artificial Sequence
  Synthetic oligonucleotide; CTC chr2 60496796 60496817 60496813 60496818 +
actatgctcccaagaggagtct

SEQ ID NO: 200768 - DNA, 22 bp, Artificial Sequence
  Synthetic oligonucleotide; CTA chr2 60496800 60496821 60496817 60496822 +
tgctcccaagaggagtcttaca

SEQ ID NO: 200769 - DNA, 22 bp, Artificial Sequence
  Synthetic oligonucleotide; CTC chr2 60496805 60496826 60496822 60496827 +
ccaagaggagtcttacatcaac

SEQ ID NO: 200770 - DNA, 22 bp, Artificial Sequence
  Synthetic oligonucleotide; CTT chr2 60496819 60496840 60496836 60496841 +
acatcaaccccttcctcaaatc

SEQ ID NO: 200771 - DNA, 22 bp, Artificial Sequence
  Synthetic oligonucleotide; TTA chr2 60496820 60496841 60496837 60496842 +
catcaaccccttcctcaaatct

SEQ ID NO: 200772 - DNA, 22 bp, Artificial Sequence
  Synthetic oligonucleotide; CTT chr2 60496832 60496853 60496849 60496854 +
cctcaaatctccctcactggat

SEQ ID NO: 200773 - DNA, 22 bp, Artificial Sequence
  Synthetic oligonucleotide; TTC chr2 60496833 60496854 60496850 60496855 +
ctcaaatctccctcactggatg

SEQ ID NO: 200774 - DNA, 22 bp, Artificial Sequence
  Synthetic oligonucleotide; CTC chr2 60496836 60496857 60496853 60496858 +
aaatctccctcactggatgtca

SEQ ID NO: 200775 - DNA, 22 bp, Artificial Sequence
  Synthetic oligonucleotide; CTC chr2 60496843 60496864 60496860 60496865 +
cctcactggatgtcacagtcat

SEQ ID NO: 200776 - DNA, 22 bp, Artificial Sequence
  Synthetic oligonucleotide; CTC chr2 60496847 60496868 60496864 60496869 +
actggatgtcacagtcataggc

SEQ ID NO: 200777 - DNA, 22 bp, Artificial Sequence
  Synthetic oligonucleotide; CTG chr2 60496851 60496872 60496868 60496873 +
gatgtcacagtcataggcctga

SEQ ID NO: 200778 - DNA, 22 bp, Artificial Sequence
  Synthetic oligonucleotide; CTG chr2 60496872 60496893 60496889 60496894 +
aaaagcagcatgcaaactgaat

SEQ ID NO: 200779 - DNA, 22 bp, Artificial Sequence
  Synthetic oligonucleotide; CTG chr2 60496891 60496912 60496908 60496913 +
aatttttgtaaagcaggaccca

SEQ ID NO: 200780 - DNA, 22 bp, Artificial Sequence
  Synthetic oligonucleotide; TTT chr2 60496896 60496917 60496913 60496918 +
ttgtaaagcaggacccatttcc

SEQ ID NO: 200781 - DNA, 22 bp, Artificial Sequence
  Synthetic oligonucleotide; TTT chr2 60496897 60496918 60496914 60496919 +
tgtaaagcaggacccatttccc

SEQ ID NO: 200782 - DNA, 22 bp, Artificial Sequence
  Synthetic oligonucleotide; TTT chr2 60496898 60496919 60496915 60496920 +
gtaaagcaggacccatttcccc

SEQ ID NO: 200783 - DNA, 22 bp, Artificial Sequence
  Synthetic oligonucleotide; TTG chr2 60496899 60496920 60496916 60496921 +
taaagcaggacccatttcccca

SEQ ID NO: 200784 - DNA, 22 bp, Artificial Sequence
  Synthetic oligonucleotide; TTT chr2 60496916 60496937 60496933 60496938 +
ccccatggacagtcataagaga

SEQ ID NO: 200785 - DNA, 22 bp, Artificial Sequence
  Synthetic oligonucleotide; TTC chr2 60496917 60496938 60496934 60496939 +
cccatggacagtcataagagat

SEQ ID NO: 200786 - DNA, 22 bp, Artificial Sequence
  Synthetic oligonucleotide; CTT chr2 60496961 60496982 60496978 60496983 +
aatttctgtcttcacgattact

SEQ ID NO: 200787 - DNA, 22 bp, Artificial Sequence
  Synthetic oligonucleotide; TTA chr2 60496962 60496983 60496979 60496984 +
atttctgtcttcacgattactt

SEQ ID NO: 200788 - DNA, 22 bp, Artificial Sequence
  Synthetic oligonucleotide; TTT chr2 60496966 60496987 60496983 60496988 +
ctgtcttcacgattacttcacg

SEQ ID NO: 200789 - DNA, 22 bp, Artificial Sequence
  Synthetic oligonucleotide; TTC chr2 60496967 60496988 60496984 60496989 +
tgtcttcacgattacttcacga

SEQ ID NO: 200790 - DNA, 22 bp, Artificial Sequence
  Synthetic oligonucleotide; CTG chr2 60496969 60496990 60496986 60496991 +
tcttcacgattacttcacgata

SEQ ID NO: 200791 - DNA, 22 bp, Artificial Sequence
  Synthetic oligonucleotide; CTT chr2 60496973 60496994 60496990 60496995 +
cacgattacttcacgataaatc

SEQ ID NO: 200792 - DNA, 22 bp, Artificial Sequence
  Synthetic oligonucleotide; TTC chr2 60496974 60496995 60496991 60496996 +
acgattacttcacgataaatct

SEQ ID NO: 200793 - DNA, 22 bp, Artificial Sequence
  Synthetic oligonucleotide; TTA chr2 60496981 60497002 60496998 60497003 +
cttcacgataaatctggattcc

SEQ ID NO: 200794 - DNA, 22 bp, Artificial Sequence
  Synthetic oligonucleotide; CTT chr2 60496984 60497005 60497001 60497006 +
cacgataaatctggattccaaa

SEQ ID NO: 200795 - DNA, 22 bp, Artificial Sequence
  Synthetic oligonucleotide; TTC chr2 60496985 60497006 60497002 60497007 +
acgataaatctggattccaaag

SEQ ID NO: 200796 - DNA, 22 bp, Artificial Sequence
  Synthetic oligonucleotide; CTG chr2 60496997 60497018 60497014 60497019 +
gattccaaagggactataagct

SEQ ID NO: 200797 - DNA, 22 bp, Artificial Sequence
  Synthetic oligonucleotide; TTC chr2 60497002 60497023 60497019 60497024 +
caaagggactataagctctcac

SEQ ID NO: 200798 - DNA, 22 bp, Artificial Sequence
  Synthetic oligonucleotide; CTA chr2 60497013 60497034 60497030 60497035 +
taagctctcacatggaaggaag

SEQ ID NO: 200799 - DNA, 22 bp, Artificial Sequence
  Synthetic oligonucleotide; CTC chr2 60497020 60497041 60497037 60497042 +
tcacatggaaggaagcaagatc

SEQ ID NO: 200800 - DNA, 22 bp, Artificial Sequence
  Synthetic oligonucleotide; CTC chr2 60497022 60497043 60497039 60497044 +
acatggaaggaagcaagatctc

SEQ ID NO: 200801 - DNA, 22 bp, Artificial Sequence
  Synthetic oligonucleotide; CTC chr2 60497044 60497065 60497061 60497066 +
tactcctcccccagtgttgagt

SEQ ID NO: 200802 - DNA, 22 bp, Artificial Sequence
  Synthetic oligonucleotide; CTA chr2 60497046 60497067 60497063 60497068 +
ctcctcccccagtgttgagtgg

SEQ ID NO: 200803 - DNA, 22 bp, Artificial Sequence
  Synthetic oligonucleotide; CTC chr2 60497049 60497070 60497066 60497071 +
ctcccccagtgttgagtggaca

SEQ ID NO: 200804 - DNA, 22 bp, Artificial Sequence
  Synthetic oligonucleotide; CTC chr2 60497052 60497073 60497069 60497074 +
ccccagtgttgagtggacaggg

SEQ ID NO: 200805 - DNA, 22 bp, Artificial Sequence
  Synthetic oligonucleotide; TTG chr2 60497063 60497084 60497080 60497085 +
agtggacagggagtacaccgca

SEQ ID NO: 200806 - DNA, 22 bp, Artificial Sequence
  Synthetic oligonucleotide; CTG chr2 60497093 60497114 60497110 60497115 +
ttggccaaccaattctaattcc

SEQ ID NO: 200807 - DNA, 22 bp, Artificial Sequence
  Synthetic oligonucleotide; TTG chr2 60497096 60497117 60497113 60497118 +
gccaaccaattctaattccctt

SEQ ID NO: 200808 - DNA, 22 bp, Artificial Sequence
  Synthetic oligonucleotide; TTC chr2 60497108 60497129 60497125 60497130 +
taattccctttagctagcatcc

SEQ ID NO: 200809 - DNA, 22 bp, Artificial Sequence
  Synthetic oligonucleotide; CTA chr2 60497110 60497131 60497127 60497132 +
attccctttagctagcatcccc

SEQ ID NO: 200810 - DNA, 22 bp, Artificial Sequence
  Synthetic oligonucleotide; TTC chr2 60497114 60497135 60497131 60497136 +
cctttagctagcatcccctaag

SEQ ID NO: 200811 - DNA, 22 bp, Artificial Sequence
  Synthetic oligonucleotide; CTT chr2 60497118 60497139 60497135 60497140 +
tagctagcatcccctaagctag

SEQ ID NO: 200812 - DNA, 22 bp, Artificial Sequence
  Synthetic oligonucleotide; TTT chr2 60497119 60497140 60497136 60497141 +
agctagcatcccctaagctaga

SEQ ID NO: 200813 - DNA, 22 bp, Artificial Sequence
  Synthetic oligonucleotide; TTA chr2 60497120 60497141 60497137 60497142 +
gctagcatcccctaagctagag

SEQ ID NO: 200814 - DNA, 22 bp, Artificial Sequence
  Synthetic oligonucleotide; CTA chr2 60497124 60497145 60497141 60497146 +
gcatcccctaagctagagctag

SEQ ID NO: 200815 - DNA, 22 bp, Artificial Sequence
  Synthetic oligonucleotide; CTA chr2 60497134 60497155 60497151 60497156 +
agctagagctagagctagagct

SEQ ID NO: 200816 - DNA, 22 bp, Artificial Sequence
  Synthetic oligonucleotide; CTA chr2 60497139 60497160 60497156 60497161 +
gagctagagctagagctatttc

SEQ ID NO: 200817 - DNA, 22 bp, Artificial Sequence
  Synthetic oligonucleotide; CTA chr2 60497145 60497166 60497162 60497167 +
gagctagagctatttccttgca

SEQ ID NO: 200818 - DNA, 22 bp, Artificial Sequence
  Synthetic oligonucleotide; CTA chr2 60497151 60497172 60497168 60497173 +
gagctatttccttgcagccttc

SEQ ID NO: 200819 - DNA, 22 bp, Artificial Sequence
  Synthetic oligonucleotide; CTA chr2 60497157 60497178 60497174 60497179 +
tttccttgcagccttccttttc

SEQ ID NO: 200820 - DNA, 22 bp, Artificial Sequence
  Synthetic oligonucleotide; TTT chr2 60497160 60497181 60497177 60497182 +
ccttgcagccttccttttctct

SEQ ID NO: 200821 - DNA, 22 bp, Artificial Sequence
  Synthetic oligonucleotide; TTC chr2 60497161 60497182 60497178 60497183 +
cttgcagccttccttttctcta

SEQ ID NO: 200822 - DNA, 22 bp, Artificial Sequence
  Synthetic oligonucleotide; CTT chr2 60497164 60497185 60497181 60497186 +
gcagccttccttttctctagca

SEQ ID NO: 200823 - DNA, 22 bp, Artificial Sequence
  Synthetic oligonucleotide; TTG chr2 60497165 60497186 60497182 60497187 +
cagccttccttttctctagcaa

SEQ ID NO: 200824 - DNA, 22 bp, Artificial Sequence
  Synthetic oligonucleotide; CTT chr2 60497172 60497193 60497189 60497194 +
ccttttctctagcaaagtcctt

SEQ ID NO: 200825 - DNA, 22 bp, Artificial Sequence
  Synthetic oligonucleotide; TTC chr2 60497173 60497194 60497190 60497195 +
cttttctctagcaaagtccttc

SEQ ID NO: 200826 - DNA, 22 bp, Artificial Sequence
  Synthetic oligonucleotide; CTT chr2 60497176 60497197 60497193 60497198 +
ttctctagcaaagtccttccat

SEQ ID NO: 200827 - DNA, 22 bp, Artificial Sequence
  Synthetic oligonucleotide; TTT chr2 60497177 60497198 60497194 60497199 +
tctctagcaaagtccttccatg

SEQ ID NO: 200828 - DNA, 22 bp, Artificial Sequence
  Synthetic oligonucleotide; TTT chr2 60497178 60497199 60497195 60497200 +
ctctagcaaagtccttccatgc

SEQ ID NO: 200829 - DNA, 22 bp, Artificial Sequence
  Synthetic oligonucleotide; TTC chr2 60497179 60497200 60497196 60497201 +
tctagcaaagtccttccatgca

SEQ ID NO: 200830 - DNA, 22 bp, Artificial Sequence
  Synthetic oligonucleotide; CTC chr2 60497181 60497202 60497198 60497203 +
tagcaaagtccttccatgcagt

SEQ ID NO: 200831 - DNA, 22 bp, Artificial Sequence
  Synthetic oligonucleotide; CTA chr2 60497183 60497204 60497200 60497205 +
gcaaagtccttccatgcagtag

SEQ ID NO: 200832 - DNA, 22 bp, Artificial Sequence
  Synthetic oligonucleotide; CTT chr2 60497194 60497215 60497211 60497216 +
ccatgcagtagctaatgacctg

SEQ ID NO: 200833 - DNA, 22 bp, Artificial Sequence
  Synthetic oligonucleotide; TTC chr2 60497195 60497216 60497212 60497217 +
catgcagtagctaatgacctgt

SEQ ID NO: 200834 - DNA, 22 bp, Artificial Sequence
  Synthetic oligonucleotide; CTA chr2 60497208 60497229 60497225 60497230 +
atgacctgtaaacacttaatga

SEQ ID NO: 200835 - DNA, 22 bp, Artificial Sequence
  Synthetic oligonucleotide; CTG chr2 60497216 60497237 60497233 60497238 +
taaacacttaatgagctagaga

SEQ ID NO: 200836 - DNA, 22 bp, Artificial Sequence
  Synthetic oligonucleotide; CTT chr2 60497225 60497246 60497242 60497247 +
aatgagctagagaaacattcca

SEQ ID NO: 200837 - DNA, 22 bp, Artificial Sequence
  Synthetic oligonucleotide; TTA chr2 60497226 60497247 60497243 60497248 +
atgagctagagaaacattccat

SEQ ID NO: 200838 - DNA, 22 bp, Artificial Sequence
  Synthetic oligonucleotide; CTA chr2 60497234 60497255 60497251 60497256 +
gagaaacattccattgaaagga

SEQ ID NO: 200839 - DNA, 22 bp, Artificial Sequence
  Synthetic oligonucleotide; TTC chr2 60497245 60497266 60497262 60497267 +
cattgaaaggaataccactgtg

SEQ ID NO: 200840 - DNA, 22 bp, Artificial Sequence
  Synthetic oligonucleotide; TTG chr2 60497250 60497271 60497267 60497272 +
aaaggaataccactgtgcatcc

SEQ ID NO: 200841 - DNA, 22 bp, Artificial Sequence
  Synthetic oligonucleotide; CTG chr2 60497265 60497286 60497282 60497287 +
tgcatccttttgtaaagagggg

SEQ ID NO: 200842 - DNA, 22 bp, Artificial Sequence
  Synthetic oligonucleotide; CTT chr2 60497274 60497295 60497291 60497296 +
ttgtaaagaggggggaaaatct

SEQ ID NO: 200843 - DNA, 22 bp, Artificial Sequence
  Synthetic oligonucleotide; TTT chr2 60497275 60497296 60497292 60497297 +
tgtaaagaggggggaaaatctt

SEQ ID NO: 200844 - DNA, 22 bp, Artificial Sequence
  Synthetic oligonucleotide; TTT chr2 60497276 60497297 60497293 60497298 +
gtaaagaggggggaaaatcttt

SEQ ID NO: 200845 - DNA, 22 bp, Artificial Sequence
  Synthetic oligonucleotide; TTG chr2 60497277 60497298 60497294 60497299 +
taaagaggggggaaaatctttt

SEQ ID NO: 200846 - DNA, 22 bp, Artificial Sequence
  Synthetic oligonucleotide; CTT chr2 60497297 60497318 60497314 60497319 +
ttgtaaaacgaagcatcgcctt

SEQ ID NO: 200847 - DNA, 22 bp, Artificial Sequence
  Synthetic oligonucleotide; TTT chr2 60497298 60497319 60497315 60497320 +
tgtaaaacgaagcatcgccttt

SEQ ID NO: 200848 - DNA, 22 bp, Artificial Sequence
  Synthetic oligonucleotide; TTT chr2 60497299 60497320 60497316 60497321 +
gtaaaacgaagcatcgccttta

SEQ ID NO: 200849 - DNA, 22 bp, Artificial Sequence
  Synthetic oligonucleotide; TTG chr2 60497300 60497321 60497317 60497322 +
taaaacgaagcatcgcctttaa

SEQ ID NO: 200850 - DNA, 22 bp, Artificial Sequence
  Synthetic oligonucleotide; CTT chr2 60497319 60497340 60497336 60497341 +
taactgctctgtttgatcaagt

SEQ ID NO: 200851 - DNA, 22 bp, Artificial Sequence
  Synthetic oligonucleotide; TTT chr2 60497320 60497341 60497337 60497342 +
aactgctctgtttgatcaagtc

SEQ ID NO: 200852 - DNA, 22 bp, Artificial Sequence
  Synthetic oligonucleotide; TTA chr2 60497321 60497342 60497338 60497343 +
actgctctgtttgatcaagtca

SEQ ID NO: 200853 - DNA, 22 bp, Artificial Sequence
  Synthetic oligonucleotide; CTG chr2 60497325 60497346 60497342 60497347 +
ctctgtttgatcaagtcagatt

SEQ ID NO: 200854 - DNA, 22 bp, Artificial Sequence
  Synthetic oligonucleotide; CTC chr2 60497328 60497349 60497345 60497350 +
tgtttgatcaagtcagattttt

SEQ ID NO: 200855 - DNA, 22 bp, Artificial Sequence
  Synthetic oligonucleotide; CTG chr2 60497330 60497351 60497347 60497352 +
tttgatcaagtcagatttttca

SEQ ID NO: 200856 - DNA, 22 bp, Artificial Sequence
  Synthetic oligonucleotide; TTT chr2 60497333 60497354 60497350 60497355 +
gatcaagtcagatttttcagaa

SEQ ID NO: 200857 - DNA, 22 bp, Artificial Sequence
  Synthetic oligonucleotide; TTG chr2 60497334 60497355 60497351 60497356 +
atcaagtcagatttttcagaat

SEQ ID NO: 200858 - DNA, 22 bp, Artificial Sequence
  Synthetic oligonucleotide; TTT chr2 60497348 60497369 60497365 60497370 +
ttcagaatatgaatagctagta

SEQ ID NO: 200859 - DNA, 22 bp, Artificial Sequence
  Synthetic oligonucleotide; TTT chr2 60497349 60497370 60497366 60497371 +
tcagaatatgaatagctagtat

SEQ ID NO: 200860 - DNA, 22 bp, Artificial Sequence
  Synthetic oligonucleotide; TTT chr2 60497350 60497371 60497367 60497372 +
cagaatatgaatagctagtatt

SEQ ID NO: 200861 - DNA, 22 bp, Artificial Sequence
  Synthetic oligonucleotide; TTC chr2 60497351 60497372 60497368 60497373 +
agaatatgaatagctagtattc

SEQ ID NO: 200862 - DNA, 22 bp, Artificial Sequence
  Synthetic oligonucleotide; CTA chr2 60497367 60497388 60497384 60497389 +
gtattcaagcatatatgaactg

SEQ ID NO: 200863 - DNA, 22 bp, Artificial Sequence
  Synthetic oligonucleotide; TTC chr2 60497373 60497394 60497390 60497395 +
aagcatatatgaactgtcttta

SEQ ID NO: 200864 - DNA, 22 bp, Artificial Sequence
  Synthetic oligonucleotide; CTG chr2 60497389 60497410 60497406 60497411 +
tctttaagttaatcaatcccta

SEQ ID NO: 200865 - DNA, 22 bp, Artificial Sequence
  Synthetic oligonucleotide; CTT chr2 60497393 60497414 60497410 60497415 +
taagttaatcaatccctagaaa

SEQ ID NO: 200866 - DNA, 22 bp, Artificial Sequence
  Synthetic oligonucleotide; TTT chr2 60497394 60497415 60497411 60497416 +
aagttaatcaatccctagaaac

SEQ ID NO: 200867 - DNA, 22 bp, Artificial Sequence
  Synthetic oligonucleotide; TTA chr2 60497395 60497416 60497412 60497417 +
agttaatcaatccctagaaact

SEQ ID NO: 200868 - DNA, 22 bp, Artificial Sequence
  Synthetic oligonucleotide; TTA chr2 60497400 60497421 60497417 60497422 +
atcaatccctagaaactagccc

SEQ ID NO: 200869 - DNA, 22 bp, Artificial Sequence
  Synthetic oligonucleotide; CTA chr2 60497411 60497432 60497428 60497433 +
gaaactagccctcaggttagca

SEQ ID NO: 200870 - DNA, 22 bp, Artificial Sequence
  Synthetic oligonucleotide; CTA chr2 60497418 60497439 60497435 60497440 +
gccctcaggttagcaggccaag

SEQ ID NO: 200871 - DNA, 22 bp, Artificial Sequence
  Synthetic oligonucleotide; CTC chr2 60497424 60497445 60497441 60497446 +
aggttagcaggccaaggatata

SEQ ID NO: 200872 - DNA, 22 bp, Artificial Sequence
  Synthetic oligonucleotide; TTA chr2 60497430 60497451 60497447 60497452 +
gcaggccaaggatatatgagag

SEQ ID NO: 200873 - DNA, 22 bp, Artificial Sequence
  Synthetic oligonucleotide; CTT chr2 60497457 60497478 60497474 60497479 +
tgaagtctagacttaaactgcc

SEQ ID NO: 200874 - DNA, 22 bp, Artificial Sequence
  Synthetic oligonucleotide; TTT chr2 60497458 60497479 60497475 60497480 +
gaagtctagacttaaactgccg

SEQ ID NO: 200875 - DNA, 22 bp, Artificial Sequence
  Synthetic oligonucleotide; TTG chr2 60497459 60497480 60497476 60497481 +
aagtctagacttaaactgccgc

SEQ ID NO: 200876 - DNA, 22 bp, Artificial Sequence
  Synthetic oligonucleotide; CTA chr2 60497466 60497487 60497483 60497488 +
gacttaaactgccgctcctgaa

SEQ ID NO: 200877 - DNA, 22 bp, Artificial Sequence
  Synthetic oligonucleotide; CTT chr2 60497471 60497492 60497488 60497493 +
aaactgccgctcctgaattgaa

SEQ ID NO: 200878 - DNA, 22 bp, Artificial Sequence
  Synthetic oligonucleotide; TTA chr2 60497472 60497493 60497489 60497494 +
aactgccgctcctgaattgaat

SEQ ID NO: 200879 - DNA, 22 bp, Artificial Sequence
  Synthetic oligonucleotide; CTG chr2 60497477 60497498 60497494 60497499 +
ccgctcctgaattgaattagaa

SEQ ID NO: 200880 - DNA, 22 bp, Artificial Sequence
  Synthetic oligonucleotide; CTC chr2 60497483 60497504 60497500 60497505 +
ctgaattgaattagaacattcc

SEQ ID NO: 200881 - DNA, 22 bp, Artificial Sequence
  Synthetic oligonucleotide; CTG chr2 60497486 60497507 60497503 60497508 +
aattgaattagaacattccagg

SEQ ID NO: 200882 - DNA, 22 bp, Artificial Sequence
  Synthetic oligonucleotide; TTG chr2 60497491 60497512 60497508 60497513 +
aattagaacattccaggtagac

SEQ ID NO: 200883 - DNA, 22 bp, Artificial Sequence
  Synthetic oligonucleotide; TTA chr2 60497496 60497517 60497513 60497518 +
gaacattccaggtagacagatt

SEQ ID NO: 200884 - DNA, 22 bp, Artificial Sequence
  Synthetic oligonucleotide; TTC chr2 60497504 60497525 60497521 60497526 +
caggtagacagattcatggccc

SEQ ID NO: 200885 - DNA, 22 bp, Artificial Sequence
  Synthetic oligonucleotide; TTC chr2 60497519 60497540 60497536 60497541 +
atggcccctaacatcaggaatc

SEQ ID NO: 200886 - DNA, 22 bp, Artificial Sequence
  Synthetic oligonucleotide; CTA chr2 60497529 60497550 60497546 60497551 +
acatcaggaatcagctagaaac

SEQ ID NO: 200887 - DNA, 22 bp, Artificial Sequence
  Synthetic oligonucleotide; CTA chr2 60497546 60497567 60497563 60497568 +
gaaactcaatcggctcttacca

SEQ ID NO: 200888 - DNA, 22 bp, Artificial Sequence
  Synthetic oligonucleotide; CTC chr2 60497553 60497574 60497570 60497575 +
aatcggctcttaccagtcacta

SEQ ID NO: 200889 - DNA, 22 bp, Artificial Sequence
  Synthetic oligonucleotide; CTC chr2 60497562 60497583 60497579 60497584 +
ttaccagtcactacctacgtca

SEQ ID NO: 200890 - DNA, 22 bp, Artificial Sequence
  Synthetic oligonucleotide; CTT chr2 60497564 60497585 60497581 60497586 +
accagtcactacctacgtcagt

SEQ ID NO: 200891 - DNA, 22 bp, Artificial Sequence
  Synthetic oligonucleotide; TTA chr2 60497565 60497586 60497582 60497587 +
ccagtcactacctacgtcagtg

SEQ ID NO: 200892 - DNA, 22 bp, Artificial Sequence
  Synthetic oligonucleotide; CTA chr2 60497575 60497596 60497592 60497597 +
cctacgtcagtgccatatccta

SEQ ID NO: 200893 - DNA, 22 bp, Artificial Sequence
  Synthetic oligonucleotide; CTA chr2 60497579 60497600 60497596 60497601 +
cgtcagtgccatatcctataat

SEQ ID NO: 200894 - DNA, 22 bp, Artificial Sequence
  Synthetic oligonucleotide; CTA chr2 60497597 60497618 60497614 60497619 +
taatggtgatgataatgaccat

SEQ ID NO: 200895 - DNA, 22 bp, Artificial Sequence
  Synthetic oligonucleotide; TTA chr2 60497621 60497642 60497638 60497643 +
tgatgatgataataataataat

SEQ ID NO: 200896 - DNA, 22 bp, Artificial Sequence
  Synthetic oligonucleotide; CTT chr2 60497648 60497669 60497665 60497670 +
ccactggatggcactttgcacc

SEQ ID NO: 200897 - DNA, 22 bp, Artificial Sequence
  Synthetic oligonucleotide; TTC chr2 60497649 60497670 60497666 60497671 +
cactggatggcactttgcacct

SEQ ID NO: 200898 - DNA, 22 bp, Artificial Sequence
  Synthetic oligonucleotide; CTG chr2 60497654 60497675 60497671 60497676 +
gatggcactttgcaccttccag

SEQ ID NO: 200899 - DNA, 22 bp, Artificial Sequence
  Synthetic oligonucleotide; CTT chr2 60497664 60497685 60497681 60497686 +
tgcaccttccagagcaatttaa

SEQ ID NO: 200900 - DNA, 22 bp, Artificial Sequence
  Synthetic oligonucleotide; TTT chr2 60497665 60497686 60497682 60497687 +
gcaccttccagagcaatttaac

SEQ ID NO: 200901 - DNA, 22 bp, Artificial Sequence
  Synthetic oligonucleotide; TTG chr2 60497666 60497687 60497683 60497688 +
caccttccagagcaatttaaca

SEQ ID NO: 200902 - DNA, 22 bp, Artificial Sequence
  Synthetic oligonucleotide; CTT chr2 60497672 60497693 60497689 60497694 +
ccagagcaatttaacatccttt

SEQ ID NO: 200903 - DNA, 22 bp, Artificial Sequence
  Synthetic oligonucleotide; TTC chr2 60497673 60497694 60497690 60497695 +
cagagcaatttaacatccttta

SEQ ID NO: 200904 - DNA, 22 bp, Artificial Sequence
  Synthetic oligonucleotide; TTT chr2 60497684 60497705 60497701 60497706 +
aacatcctttactttttttgga

SEQ ID NO: 200905 - DNA, 22 bp, Artificial Sequence
  Synthetic oligonucleotide; TTA chr2 60497685 60497706 60497702 60497707 +
acatcctttactttttttggaa

SEQ ID NO: 200906 - DNA, 22 bp, Artificial Sequence
  Synthetic oligonucleotide; CTT chr2 60497693 60497714 60497710 60497715 +
tactttttttggaaggccttca

SEQ ID NO: 200907 - DNA, 22 bp, Artificial Sequence
  Synthetic oligonucleotide; TTT chr2 60497694 60497715 60497711 60497716 +
actttttttggaaggccttcag

SEQ ID NO: 200908 - DNA, 22 bp, Artificial Sequence
  Synthetic oligonucleotide; TTA chr2 60497695 60497716 60497712 60497717 +
ctttttttggaaggccttcagg

SEQ ID NO: 200909 - DNA, 22 bp, Artificial Sequence
  Synthetic oligonucleotide; CTT chr2 60497698 60497719 60497715 60497720 +
tttttggaaggccttcaggtcc

SEQ ID NO: 200910 - DNA, 22 bp, Artificial Sequence
  Synthetic oligonucleotide; TTT chr2 60497699 60497720 60497716 60497721 +
ttttggaaggccttcaggtcca

SEQ ID NO: 200911 - DNA, 22 bp, Artificial Sequence
  Synthetic oligonucleotide; TTT chr2 60497700 60497721 60497717 60497722 +
tttggaaggccttcaggtccag

SEQ ID NO: 200912 - DNA, 22 bp, Artificial Sequence
  Synthetic oligonucleotide; TTT chr2 60497701 60497722 60497718 60497723 +
ttggaaggccttcaggtccagc

SEQ ID NO: 200913 - DNA, 22 bp, Artificial Sequence
  Synthetic oligonucleotide; TTT chr2 60497702 60497723 60497719 60497724 +
tggaaggccttcaggtccagcc

SEQ ID NO: 200914 - DNA, 22 bp, Artificial Sequence
  Synthetic oligonucleotide; TTT chr2 60497703 60497724 60497720 60497725 +
ggaaggccttcaggtccagcct

SEQ ID NO: 200915 - DNA, 22 bp, Artificial Sequence
  Synthetic oligonucleotide; TTG chr2 60497704 60497725 60497721 60497726 +
gaaggccttcaggtccagcctc

SEQ ID NO: 200916 - DNA, 22 bp, Artificial Sequence
  Synthetic oligonucleotide; CTT chr2 60497713 60497734 60497730 60497735 +
caggtccagcctcctactcttc

SEQ ID NO: 200917 - DNA, 22 bp, Artificial Sequence
  Synthetic oligonucleotide; TTC chr2 60497714 60497735 60497731 60497736 +
aggtccagcctcctactcttct

SEQ ID NO: 200918 - DNA, 22 bp, Artificial Sequence
  Synthetic oligonucleotide; CTC chr2 60497726 60497747 60497743 60497748 +
ctactcttctctttctctgaac

SEQ ID NO: 200919 - DNA, 22 bp, Artificial Sequence
  Synthetic oligonucleotide; CTA chr2 60497729 60497750 60497746 60497751 +
ctcttctctttctctgaactat

SEQ ID NO: 200920 - DNA, 22 bp, Artificial Sequence
  Synthetic oligonucleotide; CTC chr2 60497732 60497753 60497749 60497754 +
ttctctttctctgaactatcac

SEQ ID NO: 200921 - DNA, 22 bp, Artificial Sequence
  Synthetic oligonucleotide; CTT chr2 60497734 60497755 60497751 60497756 +
ctctttctctgaactatcacct

SEQ ID NO: 200922 - DNA, 22 bp, Artificial Sequence
  Synthetic oligonucleotide; TTC chr2 60497735 60497756 60497752 60497757 +
tctttctctgaactatcacctt

SEQ ID NO: 200923 - DNA, 22 bp, Artificial Sequence
  Synthetic oligonucleotide; CTC chr2 60497737 60497758 60497754 60497759 +
tttctctgaactatcaccttac

SEQ ID NO: 200924 - DNA, 22 bp, Artificial Sequence
  Synthetic oligonucleotide; CTT chr2 60497739 60497760 60497756 60497761 +
tctctgaactatcaccttacta

SEQ ID NO: 200925 - DNA, 22 bp, Artificial Sequence
  Synthetic oligonucleotide; TTT chr2 60497740 60497761 60497757 60497762 +
ctctgaactatcaccttactat

SEQ ID NO: 200926 - DNA, 22 bp, Artificial Sequence
  Synthetic oligonucleotide; TTC chr2 60497741 60497762 60497758 60497763 +
tctgaactatcaccttactata

SEQ ID NO: 200927 - DNA, 22 bp, Artificial Sequence
  Synthetic oligonucleotide; CTC chr2 60497743 60497764 60497760 60497765 +
tgaactatcaccttactatagg

SEQ ID NO: 200928 - DNA, 22 bp, Artificial Sequence
  Synthetic oligonucleotide; CTG chr2 60497745 60497766 60497762 60497767 +
aactatcaccttactataggca

SEQ ID NO: 200929 - DNA, 22 bp, Artificial Sequence
  Synthetic oligonucleotide; CTA chr2 60497750 60497771 60497767 60497772 +
tcaccttactataggcacatat

SEQ ID NO: 200930 - DNA, 22 bp, Artificial Sequence
  Synthetic oligonucleotide; CTT chr2 60497757 60497778 60497774 60497779 +
actataggcacatatttccccc

SEQ ID NO: 200931 - DNA, 22 bp, Artificial Sequence
  Synthetic oligonucleotide; TTA chr2 60497758 60497779 60497775 60497780 +
ctataggcacatatttccccca

SEQ ID NO: 200932 - DNA, 22 bp, Artificial Sequence
  Synthetic oligonucleotide; CTA chr2 60497761 60497782 60497778 60497783 +
taggcacatatttcccccaaag

SEQ ID NO: 200933 - DNA, 22 bp, Artificial Sequence
  Synthetic oligonucleotide; TTT chr2 60497774 60497795 60497791 60497796 +
cccccaaaggactcagtggcct

SEQ ID NO: 200934 - DNA, 22 bp, Artificial Sequence
  Synthetic oligonucleotide; TTC chr2 60497775 60497796 60497792 60497797 +
ccccaaaggactcagtggcctc

SEQ ID NO: 200935 - DNA, 22 bp, Artificial Sequence
  Synthetic oligonucleotide; CTC chr2 60497788 60497809 60497805 60497810 +
agtggcctcttttgtctcattt

SEQ ID NO: 200936 - DNA, 22 bp, Artificial Sequence
  Synthetic oligonucleotide; CTC chr2 60497797 60497818 60497814 60497819 +
ttttgtctcatttctccctttg

SEQ ID NO: 200937 - DNA, 22 bp, Artificial Sequence
  Synthetic oligonucleotide; CTT chr2 60497799 60497820 60497816 60497821 +
ttgtctcatttctccctttgct

SEQ ID NO: 200938 - DNA, 22 bp, Artificial Sequence
  Synthetic oligonucleotide; TTT chr2 60497800 60497821 60497817 60497822 +
tgtctcatttctccctttgctg

SEQ ID NO: 200939 - DNA, 22 bp, Artificial Sequence
  Synthetic oligonucleotide; TTT chr2 60497801 60497822 60497818 60497823 +
gtctcatttctccctttgctga

SEQ ID NO: 200940 - DNA, 22 bp, Artificial Sequence
  Synthetic oligonucleotide; TTG chr2 60497802 60497823 60497819 60497824 +
tctcatttctccctttgctgat

SEQ ID NO: 200941 - DNA, 22 bp, Artificial Sequence
  Synthetic oligonucleotide; CTC chr2 60497806 60497827 60497823 60497828 +
atttctccctttgctgatgatc

SEQ ID NO: 200942 - DNA, 22 bp, Artificial Sequence
  Synthetic oligonucleotide; TTT chr2 60497810 60497831 60497827 60497832 +
ctccctttgctgatgatccagt

SEQ ID NO: 200943 - DNA, 22 bp, Artificial Sequence
  Synthetic oligonucleotide; TTC chr2 60497811 60497832 60497828 60497833 +
tccctttgctgatgatccagta

SEQ ID NO: 200944 - DNA, 22 bp, Artificial Sequence
  Synthetic oligonucleotide; CTC chr2 60497813 60497834 60497830 60497835 +
cctttgctgatgatccagtaga

SEQ ID NO: 200945 - DNA, 22 bp, Artificial Sequence
  Synthetic oligonucleotide; CTT chr2 60497817 60497838 60497834 60497839 +
tgctgatgatccagtagagaaa

SEQ ID NO: 200946 - DNA, 22 bp, Artificial Sequence
  Synthetic oligonucleotide; TTT chr2 60497818 60497839 60497835 60497840 +
gctgatgatccagtagagaaat

SEQ ID NO: 200947 - DNA, 22 bp, Artificial Sequence
  Synthetic oligonucleotide; TTG chr2 60497819 60497840 60497836 60497841 +
ctgatgatccagtagagaaatg

SEQ ID NO: 200948 - DNA, 22 bp, Artificial Sequence
  Synthetic oligonucleotide; CTG chr2 60497822 60497843 60497839 60497844 +
atgatccagtagagaaatgatc

SEQ ID NO: 200949 - DNA, 22 bp, Artificial Sequence
  Synthetic oligonucleotide; CTG chr2 60497856 60497877 60497873 60497878 +
cacattgtcctaaatgaaacca

SEQ ID NO: 200950 - DNA, 22 bp, Artificial Sequence
  Synthetic oligonucleotide; TTG chr2 60497863 60497884 60497880 60497885 +
tcctaaatgaaaccaagcttcc

SEQ ID NO: 200951 - DNA, 22 bp, Artificial Sequence
  Synthetic oligonucleotide; CTA chr2 60497868 60497889 60497885 60497890 +
aatgaaaccaagcttcctctgc

SEQ ID NO: 200952 - DNA, 22 bp, Artificial Sequence
  Synthetic oligonucleotide; CTT chr2 60497883 60497904 60497900 60497905 +
cctctgcaggatggaagtgagc

SEQ ID NO: 200953 - DNA, 22 bp, Artificial Sequence
  Synthetic oligonucleotide; TTC chr2 60497884 60497905 60497901 60497906 +
ctctgcaggatggaagtgagcc

SEQ ID NO: 200954 - DNA, 22 bp, Artificial Sequence
  Synthetic oligonucleotide; CTC chr2 60497887 60497908 60497904 60497909 +
tgcaggatggaagtgagccagg

SEQ ID NO: 200955 - DNA, 22 bp, Artificial Sequence
  Synthetic oligonucleotide; CTG chr2 60497889 60497910 60497906 60497911 +
caggatggaagtgagccaggtg

SEQ ID NO: 200956 - DNA, 22 bp, Artificial Sequence
  Synthetic oligonucleotide; CTG chr2 60497928 60497949 60497945 60497950 +
gacccaccgcttcattggccga

SEQ ID NO: 200957 - DNA, 22 bp, Artificial Sequence
  Synthetic oligonucleotide; CTT chr2 60497940 60497961 60497957 60497962 +
cattggccgaggatgaccccat

SEQ ID NO: 200958 - DNA, 22 bp, Artificial Sequence
  Synthetic oligonucleotide; TTC chr2 60497941 60497962 60497958 60497963 +
attggccgaggatgaccccata

SEQ ID NO: 200959 - DNA, 22 bp, Artificial Sequence
  Synthetic oligonucleotide; TTG chr2 60497945 60497966 60497962 60497967 +
gccgaggatgaccccataaagg

SEQ ID NO: 200960 - DNA, 22 bp, Artificial Sequence
  Synthetic oligonucleotide; TTG chr2 60497978 60497999 60497995 60498000 +
cagagattgctatgcacaaaat

SEQ ID NO: 200961 - DNA, 22 bp, Artificial Sequence
  Synthetic oligonucleotide; TTG chr2 60497987 60498008 60498004 60498009 +
ctatgcacaaaatccaagaggc

SEQ ID NO: 200962 - DNA, 22 bp, Artificial Sequence
  Synthetic oligonucleotide; CTA chr2 60497990 60498011 60498007 60498012 +
tgcacaaaatccaagaggccca

SEQ ID NO: 200963 - DNA, 22 bp, Artificial Sequence
  Synthetic oligonucleotide; CTG chr2 60498041 60498062 60498058 60498063 +
gcagaccctcaagagcaggggt

SEQ ID NO: 200964 - DNA, 22 bp, Artificial Sequence
  Synthetic oligonucleotide; CTC chr2 60498051 60498072 60498068 60498073 +
aagagcaggggtcttctctttg

SEQ ID NO: 200965 - DNA, 22 bp, Artificial Sequence
  Synthetic oligonucleotide; CTT chr2 60498066 60498087 60498083 60498088 +
ctctttgggggaggacatcact

SEQ ID NO: 200966 - DNA, 22 bp, Artificial Sequence
  Synthetic oligonucleotide; TTC chr2 60498067 60498088 60498084 60498089 +
tctttgggggaggacatcactc

SEQ ID NO: 200967 - DNA, 22 bp, Artificial Sequence
  Synthetic oligonucleotide; CTC chr2 60498069 60498090 60498086 60498091 +
tttgggggaggacatcactctt

SEQ ID NO: 200968 - DNA, 22 bp, Artificial Sequence
  Synthetic oligonucleotide; CTT chr2 60498071 60498092 60498088 60498093 +
tgggggaggacatcactcttag

SEQ ID NO: 200969 - DNA, 22 bp, Artificial Sequence
  Synthetic oligonucleotide; TTT chr2 60498072 60498093 60498089 60498094 +
gggggaggacatcactcttagc

SEQ ID NO: 200970 - DNA, 22 bp, Artificial Sequence
  Synthetic oligonucleotide; TTG chr2 60498073 60498094 60498090 60498095 +
ggggaggacatcactcttagca

SEQ ID NO: 200971 - DNA, 22 bp, Artificial Sequence
  Synthetic oligonucleotide; CTC chr2 60498089 60498110 60498106 60498111 +
ttagcagggctggggtgagtca

SEQ ID NO: 200972 - DNA, 22 bp, Artificial Sequence
  Synthetic oligonucleotide; CTT chr2 60498091 60498112 60498108 60498113 +
agcagggctggggtgagtcaaa

SEQ ID NO: 200973 - DNA, 22 bp, Artificial Sequence
  Synthetic oligonucleotide; TTA chr2 60498092 60498113 60498109 60498114 +
gcagggctggggtgagtcaaaa

SEQ ID NO: 200974 - DNA, 22 bp, Artificial Sequence
  Synthetic oligonucleotide; CTG chr2 60498101 60498122 60498118 60498123 +
gggtgagtcaaaagtctgggag

SEQ ID NO: 200975 - DNA, 22 bp, Artificial Sequence
  Synthetic oligonucleotide; CTG chr2 60498119 60498140 60498136 60498141 +
ggagaatggaggtgtggagggg

SEQ ID NO: 200976 - DNA, 22 bp, Artificial Sequence
  Synthetic oligonucleotide; CTG chr2 60498148 60498169 60498165 60498170 +
ggtcagaccccaagcaggaagg

SEQ ID NO: 200977 - DNA, 22 bp, Artificial Sequence
  Synthetic oligonucleotide; CTC chr2 60498175 60498196 60498192 60498197 +
tatgtagacgggtgtgtggctc

SEQ ID NO: 200978 - DNA, 22 bp, Artificial Sequence
  Synthetic oligonucleotide; CTA chr2 60498177 60498198 60498194 60498199 +
tgtagacgggtgtgtggctcct

SEQ ID NO: 200979 - DNA, 22 bp, Artificial Sequence
  Synthetic oligonucleotide; CTC chr2 60498197 60498218 60498214 60498219 +
cttaaggtgacccagcagccct

SEQ ID NO: 200980 - DNA, 22 bp, Artificial Sequence
  Synthetic oligonucleotide; CTT chr2 60498200 60498221 60498217 60498222 +
aaggtgacccagcagccctggg

SEQ ID NO: 200981 - DNA, 22 bp, Artificial Sequence
  Synthetic oligonucleotide; TTA chr2 60498201 60498222 60498218 60498223 +
aggtgacccagcagccctgggc

SEQ ID NO: 200982 - DNA, 22 bp, Artificial Sequence
  Synthetic oligonucleotide; CTG chr2 60498220 60498241 60498237 60498242 +
ggcacagaagtggtgcgtggag

SEQ ID NO: 200983 - DNA, 22 bp, Artificial Sequence
  Synthetic oligonucleotide; CTG chr2 60498274 60498295 60498291 60498296 +
tcagaagaggccctggacactg

SEQ ID NO: 200984 - DNA, 22 bp, Artificial Sequence
  Synthetic oligonucleotide; CTG chr2 60498289 60498310 60498306 60498311 +
gacactgaaggctgggcacagc

SEQ ID NO: 200985 - DNA, 22 bp, Artificial Sequence
  Synthetic oligonucleotide; CTG chr2 60498296 60498317 60498313 60498318 +
aaggctgggcacagccttgggg

SEQ ID NO: 200986 - DNA, 22 bp, Artificial Sequence
  Synthetic oligonucleotide; CTG chr2 60498303 60498324 60498320 60498325 +
ggcacagccttggggaccgctc

SEQ ID NO: 200987 - DNA, 22 bp, Artificial Sequence
  Synthetic oligonucleotide; CTT chr2 60498314 60498335 60498331 60498336 +
ggggaccgctcacaggacatgc

SEQ ID NO: 200988 - DNA, 22 bp, Artificial Sequence
  Synthetic oligonucleotide; TTG chr2 60498315 60498336 60498332 60498337 +
gggaccgctcacaggacatgca

SEQ ID NO: 200989 - DNA, 22 bp, Artificial Sequence
  Synthetic oligonucleotide; CTC chr2 60498325 60498346 60498342 60498347 +
acaggacatgcagcagtgtgtg

SEQ ID NO: 200990 - DNA, 22 bp, Artificial Sequence
  Synthetic oligonucleotide; CTC chr2 60498357 60498378 60498374 60498379 +
cctaccgcgacccctatcagtg

SEQ ID NO: 200991 - DNA, 22 bp, Artificial Sequence
  Synthetic oligonucleotide; CTA chr2 60498361 60498382 60498378 60498383 +
ccgcgacccctatcagtgccga

SEQ ID NO: 200992 - DNA, 22 bp, Artificial Sequence
  Synthetic oligonucleotide; CTA chr2 60498373 60498394 60498390 60498395 +
tcagtgccgaccaagcacacaa

SEQ ID NO: 200993 - DNA, 22 bp, Artificial Sequence
  Synthetic oligonucleotide; CTG chr2 60498412 60498433 60498429 60498434 +
ggctggacagaggggtcccaca

SEQ ID NO: 200994 - DNA, 22 bp, Artificial Sequence
  Synthetic oligonucleotide; CTG chr2 60498417 60498438 60498434 60498439 +
gacagaggggtcccacaagatc

SEQ ID NO: 200995 - DNA, 22 bp, Artificial Sequence
  Synthetic oligonucleotide; CTG chr2 60498454 60498475 60498471 60498476 +
agaaggtggggagctcacagcc

SEQ ID NO: 200996 - DNA, 22 bp, Artificial Sequence
  Synthetic oligonucleotide; CTC chr2 60498470 60498491 60498487 60498492 +
acagcctccaagcattgcatca

SEQ ID NO: 200997 - DNA, 22 bp, Artificial Sequence
  Synthetic oligonucleotide; CTC chr2 60498478 60498499 60498495 60498500 +
caagcattgcatcatcctggta

SEQ ID NO: 200998 - DNA, 22 bp, Artificial Sequence
  Synthetic oligonucleotide; TTG chr2 60498487 60498508 60498504 60498509 +
catcatcctggtaccaggaagg

SEQ ID NO: 200999 - DNA, 22 bp, Artificial Sequence
  Synthetic oligonucleotide; CTG chr2 60498497 60498518 60498514 60498519 +
gtaccaggaaggcaatgggctg

SEQ ID NO: 201000 - DNA, 22 bp, Artificial Sequence
  Synthetic oligonucleotide; CTG chr2 60498519 60498540 60498536 60498541 +
ccccatacccacttcccttcct

SEQ ID NO: 201001 - DNA, 22 bp, Artificial Sequence
  Synthetic oligonucleotide; CTT chr2 60498533 60498554 60498550 60498555 +
cccttcctagaattggcctggg

SEQ ID NO: 201002 - DNA, 22 bp, Artificial Sequence
  Synthetic oligonucleotide; TTC chr2 60498534 60498555 60498551 60498556 +
ccttcctagaattggcctggga

SEQ ID NO: 201003 - DNA, 22 bp, Artificial Sequence
  Synthetic oligonucleotide; CTT chr2 60498538 60498559 60498555 60498560 +
cctagaattggcctgggacatt

SEQ ID NO: 201004 - DNA, 22 bp, Artificial Sequence
  Synthetic oligonucleotide; TTC chr2 60498539 60498560 60498556 60498561 +
ctagaattggcctgggacattc

SEQ ID NO: 201005 - DNA, 22 bp, Artificial Sequence
  Synthetic oligonucleotide; CTA chr2 60498542 60498563 60498559 60498564 +
gaattggcctgggacattcatt

SEQ ID NO: 201006 - DNA, 22 bp, Artificial Sequence
  Synthetic oligonucleotide; TTG chr2 60498548 60498569 60498565 60498570 +
gcctgggacattcattatttag

SEQ ID NO: 201007 - DNA, 22 bp, Artificial Sequence
  Synthetic oligonucleotide; CTG chr2 60498553 60498574 60498570 60498575 +
ggacattcattatttagccacc

SEQ ID NO: 201008 - DNA, 22 bp, Artificial Sequence
  Synthetic oligonucleotide; TTC chr2 60498561 60498582 60498578 60498583 +
attatttagccacctctggcac

SEQ ID NO: 201009 - DNA, 22 bp, Artificial Sequence
  Synthetic oligonucleotide; TTA chr2 60498565 60498586 60498582 60498587 +
tttagccacctctggcacctgc

SEQ ID NO: 201010 - DNA, 22 bp, Artificial Sequence
  Synthetic oligonucleotide; TTT chr2 60498568 60498589 60498585 60498590 +
agccacctctggcacctgcatt

SEQ ID NO: 201011 - DNA, 22 bp, Artificial Sequence
  Synthetic oligonucleotide; TTA chr2 60498569 60498590 60498586 60498591 +
gccacctctggcacctgcattt

SEQ ID NO: 201012 - DNA, 22 bp, Artificial Sequence
  Synthetic oligonucleotide; CTC chr2 60498577 60498598 60498594 60498599 +
tggcacctgcatttgtttttca

SEQ ID NO: 201013 - DNA, 22 bp, Artificial Sequence
  Synthetic oligonucleotide; CTG chr2 60498579 60498600 60498596 60498601 +
gcacctgcatttgtttttcaaa

SEQ ID NO: 201014 - DNA, 22 bp, Artificial Sequence
  Synthetic oligonucleotide; CTG chr2 60498586 60498607 60498603 60498608 +
catttgtttttcaaattttaat

SEQ ID NO: 201015 - DNA, 22 bp, Artificial Sequence
  Synthetic oligonucleotide; TTT chr2 60498591 60498612 60498608 60498613 +
gtttttcaaattttaatagcaa

SEQ ID NO: 201016 - DNA, 22 bp, Artificial Sequence
  Synthetic oligonucleotide; TTG chr2 60498592 60498613 60498609 60498614 +
tttttcaaattttaatagcaaa

SEQ ID NO: 201017 - DNA, 22 bp, Artificial Sequence
  Synthetic oligonucleotide; TTT chr2 60498595 60498616 60498612 60498617 +
ttcaaattttaatagcaaatag

SEQ ID NO: 201018 - DNA, 22 bp, Artificial Sequence
  Synthetic oligonucleotide; TTT chr2 60498596 60498617 60498613 60498618 +
tcaaattttaatagcaaatagg

SEQ ID NO: 201019 - DNA, 22 bp, Artificial Sequence
  Synthetic oligonucleotide; TTT chr2 60498597 60498618 60498614 60498619 +
caaattttaatagcaaataggc

SEQ ID NO: 201020 - DNA, 22 bp, Artificial Sequence
  Synthetic oligonucleotide; TTC chr2 60498598 60498619 60498615 60498620 +
aaattttaatagcaaataggct

SEQ ID NO: 201021 - DNA, 22 bp, Artificial Sequence
  Synthetic oligonucleotide; TTT chr2 60498604 60498625 60498621 60498626 +
taatagcaaataggcttagtgt

SEQ ID NO: 201022 - DNA, 22 bp, Artificial Sequence
  Synthetic oligonucleotide; TTT chr2 60498605 60498626 60498622 60498627 +
aatagcaaataggcttagtgtg

SEQ ID NO: 201023 - DNA, 22 bp, Artificial Sequence
  Synthetic oligonucleotide; TTA chr2 60498606 60498627 60498623 60498628 +
atagcaaataggcttagtgtgc

SEQ ID NO: 201024 - DNA, 22 bp, Artificial Sequence
  Synthetic oligonucleotide; CTT chr2 60498621 60498642 60498638 60498643 +
agtgtgctgggcagagctgagc

SEQ ID NO: 201025 - DNA, 22 bp, Artificial Sequence
  Synthetic oligonucleotide; TTA chr2 60498622 60498643 60498639 60498644 +
gtgtgctgggcagagctgagca

SEQ ID NO: 201026 - DNA, 22 bp, Artificial Sequence
  Synthetic oligonucleotide; CTG chr2 60498630 60498651 60498647 60498652 +
ggcagagctgagcagaggtgat

SEQ ID NO: 201027 - DNA, 22 bp, Artificial Sequence
  Synthetic oligonucleotide; CTG chr2 60498640 60498661 60498657 60498662 +
agcagaggtgatctgacccctc

SEQ ID NO: 201028 - DNA, 22 bp, Artificial Sequence
  Synthetic oligonucleotide; CTG chr2 60498655 60498676 60498672 60498677 +
acccctctacctactcacataa

SEQ ID NO: 201029 - DNA, 22 bp, Artificial Sequence
  Synthetic oligonucleotide; CTC chr2 60498662 60498683 60498679 60498684 +
tacctactcacataagatcagt

SEQ ID NO: 201030 - DNA, 22 bp, Artificial Sequence
  Synthetic oligonucleotide; CTA chr2 60498664 60498685 60498681 60498686 +
cctactcacataagatcagtaa

SEQ ID NO: 201031 - DNA, 22 bp, Artificial Sequence
  Synthetic oligonucleotide; CTA chr2 60498668 60498689 60498685 60498690 +
ctcacataagatcagtaaagag

SEQ ID NO: 201032 - DNA, 22 bp, Artificial Sequence
  Synthetic oligonucleotide; CTC chr2 60498671 60498692 60498688 60498693 +
acataagatcagtaaagagaag

SEQ ID NO: 201033 - DNA, 22 bp, Artificial Sequence
  Synthetic oligonucleotide; CTA chr2 60498741 60498762 60498758 60498763 +
taggtccaagttcgtacagacc

SEQ ID NO: 201034 - DNA, 22 bp, Artificial Sequence
  Synthetic oligonucleotide; TTC chr2 60498754 60498775 60498771 60498776 +
gtacagacccagccagactgcc

SEQ ID NO: 201035 - DNA, 22 bp, Artificial Sequence
  Synthetic oligonucleotide; CTG chr2 60498774 60498795 60498791 60498796 +
ccagttctctgaggagctagag

SEQ ID NO: 201036 - DNA, 22 bp, Artificial Sequence
  Synthetic oligonucleotide; TTC chr2 60498781 60498802 60498798 60498803 +
tctgaggagctagagacttgtg

SEQ ID NO: 201037 - DNA, 22 bp, Artificial Sequence
  Synthetic oligonucleotide; CTC chr2 60498783 60498804 60498800 60498805 +
tgaggagctagagacttgtggc

SEQ ID NO: 201038 - DNA, 22 bp, Artificial Sequence
  Synthetic oligonucleotide; CTG chr2 60498785 60498806 60498802 60498807 +
aggagctagagacttgtggctt

SEQ ID NO: 201039 - DNA, 22 bp, Artificial Sequence
  Synthetic oligonucleotide; CTA chr2 60498793 60498814 60498810 60498815 +
gagacttgtggcttaaggaagc

SEQ ID NO: 201040 - DNA, 22 bp, Artificial Sequence
  Synthetic oligonucleotide; CTT chr2 60498800 60498821 60498817 60498822 +
gtggcttaaggaagcctctctg

SEQ ID NO: 201041 - DNA, 22 bp, Artificial Sequence
  Synthetic oligonucleotide; TTG chr2 60498801 60498822 60498818 60498823 +
tggcttaaggaagcctctctga

SEQ ID NO: 201042 - DNA, 22 bp, Artificial Sequence
  Synthetic oligonucleotide; CTT chr2 60498807 60498828 60498824 60498829 +
aaggaagcctctctgatggatg

SEQ ID NO: 201043 - DNA, 22 bp, Artificial Sequence
  Synthetic oligonucleotide; TTA chr2 60498808 60498829 60498825 60498830 +
aggaagcctctctgatggatgt

SEQ ID NO: 201044 - DNA, 22 bp, Artificial Sequence
  Synthetic oligonucleotide; CTC chr2 60498818 60498839 60498835 60498840 +
tctgatggatgtactaatatgt

SEQ ID NO: 201045 - DNA, 22 bp, Artificial Sequence
  Synthetic oligonucleotide; CTC chr2 60498820 60498841 60498837 60498842 +
tgatggatgtactaatatgtat

SEQ ID NO: 201046 - DNA, 22 bp, Artificial Sequence
  Synthetic oligonucleotide; CTG chr2 60498822 60498843 60498839 60498844 +
atggatgtactaatatgtatgt

SEQ ID NO: 201047 - DNA, 22 bp, Artificial Sequence
  Synthetic oligonucleotide; CTA chr2 60498834 60498855 60498851 60498856 +
atatgtatgtaccttatacata

SEQ ID NO: 201048 - DNA, 22 bp, Artificial Sequence
  Synthetic oligonucleotide; CTT chr2 60498849 60498870 60498866 60498871 +
atacatacatttgaattacctg

SEQ ID NO: 201049 - DNA, 22 bp, Artificial Sequence
  Synthetic oligonucleotide; TTA chr2 60498850 60498871 60498867 60498872 +
tacatacatttgaattacctgt

SEQ ID NO: 201050 - DNA, 22 bp, Artificial Sequence
  Synthetic oligonucleotide; TTT chr2 60498861 60498882 60498878 60498883 +
gaattacctgtaaatcttgatc

SEQ ID NO: 201051 - DNA, 22 bp, Artificial Sequence
  Synthetic oligonucleotide; TTG chr2 60498862 60498883 60498879 60498884 +
aattacctgtaaatcttgatca

SEQ ID NO: 201052 - DNA, 22 bp, Artificial Sequence
  Synthetic oligonucleotide; TTA chr2 60498867 60498888 60498884 60498889 +
cctgtaaatcttgatcaaactc

SEQ ID NO: 201053 - DNA, 22 bp, Artificial Sequence
  Synthetic oligonucleotide; CTG chr2 60498871 60498892 60498888 60498893 +
taaatcttgatcaaactcagat

SEQ ID NO: 201054 - DNA, 22 bp, Artificial Sequence
  Synthetic oligonucleotide; CTT chr2 60498879 60498900 60498896 60498901 +
gatcaaactcagatgactgtcc

SEQ ID NO: 201055 - DNA, 22 bp, Artificial Sequence
  Synthetic oligonucleotide; TTG chr2 60498880 60498901 60498897 60498902 +
atcaaactcagatgactgtcca

SEQ ID NO: 201056 - DNA, 22 bp, Artificial Sequence
  Synthetic oligonucleotide; CTC chr2 60498889 60498910 60498906 60498911 +
agatgactgtccaactcatcca

SEQ ID NO: 201057 - DNA, 22 bp, Artificial Sequence
  Synthetic oligonucleotide; CTG chr2 60498898 60498919 60498915 60498920 +
tccaactcatccagaaactacg

SEQ ID NO: 201058 - DNA, 22 bp, Artificial Sequence
  Synthetic oligonucleotide; CTC chr2 60498906 60498927 60498923 60498928 +
atccagaaactacgtttgtcta

SEQ ID NO: 201059 - DNA, 22 bp, Artificial Sequence
  Synthetic oligonucleotide; CTA chr2 60498918 60498939 60498935 60498940 +
cgtttgtctaatagaacaggaa

SEQ ID NO: 201060 - DNA, 22 bp, Artificial Sequence
  Synthetic oligonucleotide; TTT chr2 60498923 60498944 60498940 60498945 +
gtctaatagaacaggaagcagg

SEQ ID NO: 201061 - DNA, 22 bp, Artificial Sequence
  Synthetic oligonucleotide; TTG chr2 60498924 60498945 60498941 60498946 +
tctaatagaacaggaagcaggt

SEQ ID NO: 201062 - DNA, 22 bp, Artificial Sequence
  Synthetic oligonucleotide; CTA chr2 60498928 60498949 60498945 60498950 +
atagaacaggaagcaggtggtg

SEQ ID NO: 201063 - DNA, 22 bp, Artificial Sequence
  Synthetic oligonucleotide; TTG chr2 60498974 60498995 60498991 60498996 +
atgagaggcagggccagtgttt

SEQ ID NO: 201064 - DNA, 22 bp, Artificial Sequence
  Synthetic oligonucleotide; TTT chr2 60498996 60499017 60499013 60499018 +
cttcttcattttccattccact

SEQ ID NO: 201065 - DNA, 22 bp, Artificial Sequence
  Synthetic oligonucleotide; TTC chr2 60498997 60499018 60499014 60499019 +
ttcttcattttccattccactg

SEQ ID NO: 201066 - DNA, 22 bp, Artificial Sequence
  Synthetic oligonucleotide; CTT chr2 60498999 60499020 60499016 60499021 +
cttcattttccattccactgat

SEQ ID NO: 201067 - DNA, 22 bp, Artificial Sequence
  Synthetic oligonucleotide; TTC chr2 60499000 60499021 60499017 60499022 +
ttcattttccattccactgatt

SEQ ID NO: 201068 - DNA, 22 bp, Artificial Sequence
  Synthetic oligonucleotide; CTT chr2 60499002 60499023 60499019 60499024 +
cattttccattccactgattct

SEQ ID NO: 201069 - DNA, 22 bp, Artificial Sequence
  Synthetic oligonucleotide; TTC chr2 60499003 60499024 60499020 60499025 +
attttccattccactgattctg

SEQ ID NO: 201070 - DNA, 22 bp, Artificial Sequence
  Synthetic oligonucleotide; TTT chr2 60499007 60499028 60499024 60499029 +
tccattccactgattctgtccc

SEQ ID NO: 201071 - DNA, 22 bp, Artificial Sequence
  Synthetic oligonucleotide; TTT chr2 60499008 60499029 60499025 60499030 +
ccattccactgattctgtcccc

SEQ ID NO: 201072 - DNA, 22 bp, Artificial Sequence
  Synthetic oligonucleotide; TTC chr2 60499009 60499030 60499026 60499031 +
cattccactgattctgtcccca

SEQ ID NO: 201073 - DNA, 22 bp, Artificial Sequence
  Synthetic oligonucleotide; TTC chr2 60499014 60499035 60499031 60499036 +
cactgattctgtccccacacag

SEQ ID NO: 201074 - DNA, 22 bp, Artificial Sequence
  Synthetic oligonucleotide; CTG chr2 60499019 60499040 60499036 60499041 +
attctgtccccacacaggcatc

SEQ ID NO: 201075 - DNA, 22 bp, Artificial Sequence
  Synthetic oligonucleotide; TTC chr2 60499023 60499044 60499040 60499045 +
tgtccccacacaggcatccaaa

SEQ ID NO: 201076 - DNA, 22 bp, Artificial Sequence
  Synthetic oligonucleotide; CTG chr2 60499025 60499046 60499042 60499047 +
tccccacacaggcatccaaagg

SEQ ID NO: 201077 - DNA, 22 bp, Artificial Sequence
  Synthetic oligonucleotide; CTA chr2 60499058 60499079 60499075 60499080 +
cagctacagtccatttctcgct

SEQ ID NO: 201078 - DNA, 22 bp, Artificial Sequence
  Synthetic oligonucleotide; CTA chr2 60499064 60499085 60499081 60499086 +
cagtccatttctcgctggcttt

SEQ ID NO: 201079 - DNA, 22 bp, Artificial Sequence
  Synthetic oligonucleotide; TTT chr2 60499074 60499095 60499091 60499096 +
ctcgctggcttttctgggagat

SEQ ID NO: 201080 - DNA, 22 bp, Artificial Sequence
  Synthetic oligonucleotide; TTC chr2 60499075 60499096 60499092 60499097 +
tcgctggcttttctgggagatc

SEQ ID NO: 201081 - DNA, 22 bp, Artificial Sequence
  Synthetic oligonucleotide; CTC chr2 60499077 60499098 60499094 60499099 +
gctggcttttctgggagatcac

SEQ ID NO: 201082 - DNA, 22 bp, Artificial Sequence
  Synthetic oligonucleotide; CTG chr2 60499081 60499102 60499098 60499103 +
gcttttctgggagatcacccta

SEQ ID NO: 201083 - DNA, 22 bp, Artificial Sequence
  Synthetic oligonucleotide; CTT chr2 60499085 60499106 60499102 60499107 +
ttctgggagatcaccctacaat

SEQ ID NO: 201084 - DNA, 22 bp, Artificial Sequence
  Synthetic oligonucleotide; TTT chr2 60499086 60499107 60499103 60499108 +
tctgggagatcaccctacaatg

SEQ ID NO: 201085 - DNA, 22 bp, Artificial Sequence
  Synthetic oligonucleotide; TTT chr2 60499087 60499108 60499104 60499109 +
ctgggagatcaccctacaatgt

SEQ ID NO: 201086 - DNA, 22 bp, Artificial Sequence
  Synthetic oligonucleotide; TTC chr2 60499088 60499109 60499105 60499110 +
tgggagatcaccctacaatgtg

SEQ ID NO: 201087 - DNA, 22 bp, Artificial Sequence
  Synthetic oligonucleotide; CTG chr2 60499090 60499111 60499107 60499112 +
ggagatcaccctacaatgtgtt

SEQ ID NO: 201088 - DNA, 22 bp, Artificial Sequence
  Synthetic oligonucleotide; CTA chr2 60499103 60499124 60499120 60499125 +
caatgtgttccccagtattcag

SEQ ID NO: 201089 - DNA, 22 bp, Artificial Sequence
  Synthetic oligonucleotide; TTC chr2 60499113 60499134 60499130 60499135 +
cccagtattcaggtttctgggc

SEQ ID NO: 201090 - DNA, 22 bp, Artificial Sequence
  Synthetic oligonucleotide; TTC chr2 60499123 60499144 60499140 60499145 +
aggtttctgggctgccattatc

SEQ ID NO: 201091 - DNA, 22 bp, Artificial Sequence
  Synthetic oligonucleotide; TTT chr2 60499129 60499150 60499146 60499151 +
ctgggctgccattatcttctct

SEQ ID NO: 201092 - DNA, 22 bp, Artificial Sequence
  Synthetic oligonucleotide; TTC chr2 60499130 60499151 60499147 60499152 +
tgggctgccattatcttctctg

SEQ ID NO: 201093 - DNA, 22 bp, Artificial Sequence
  Synthetic oligonucleotide; CTG chr2 60499132 60499153 60499149 60499154 +
ggctgccattatcttctctggt

SEQ ID NO: 201094 - DNA, 22 bp, Artificial Sequence
  Synthetic oligonucleotide; CTG chr2 60499137 60499158 60499154 60499159 +
ccattatcttctctggtctcgg

SEQ ID NO: 201095 - DNA, 22 bp, Artificial Sequence
  Synthetic oligonucleotide; TTA chr2 60499143 60499164 60499160 60499165 +
tcttctctggtctcggggccca

SEQ ID NO: 201096 - DNA, 22 bp, Artificial Sequence
  Synthetic oligonucleotide; CTT chr2 60499147 60499168 60499164 60499169 +
ctctggtctcggggcccaagcc

SEQ ID NO: 201097 - DNA, 22 bp, Artificial Sequence
  Synthetic oligonucleotide; TTC chr2 60499148 60499169 60499165 60499170 +
tctggtctcggggcccaagcca

SEQ ID NO: 201098 - DNA, 22 bp, Artificial Sequence
  Synthetic oligonucleotide; CTC chr2 60499150 60499171 60499167 60499172 +
tggtctcggggcccaagccaaa

SEQ ID NO: 201099 - DNA, 22 bp, Artificial Sequence
  Synthetic oligonucleotide; CTG chr2 60499152 60499173 60499169 60499174 +
gtctcggggcccaagccaaaga

SEQ ID NO: 201100 - DNA, 22 bp, Artificial Sequence
  Synthetic oligonucleotide; CTC chr2 60499157 60499178 60499174 60499179 +
ggggcccaagccaaagagctgg

SEQ ID NO: 201101 - DNA, 22 bp, Artificial Sequence
  Synthetic oligonucleotide; CTG chr2 60499178 60499199 60499195 60499200 +
gagaacagtatctggccacaga

SEQ ID NO: 201102 - DNA, 22 bp, Artificial Sequence
  Synthetic oligonucleotide; CTG chr2 60499192 60499213 60499209 60499214 +
gccacagaacctaaggcctggt

SEQ ID NO: 201103 - DNA, 22 bp, Artificial Sequence
  Synthetic oligonucleotide; CTA chr2 60499205 60499226 60499222 60499227 +
aggcctggtagagcaagacagc

SEQ ID NO: 201104 - DNA, 22 bp, Artificial Sequence
  Synthetic oligonucleotide; CTG chr2 60499212 60499233 60499229 60499234 +
gtagagcaagacagccatgtgc

SEQ ID NO: 201105 - DNA, 22 bp, Artificial Sequence
  Synthetic oligonucleotide; CTT chr2 60499256 60499277 60499273 60499278 +
ccgtcactcccacagagctgca

SEQ ID NO: 201106 - DNA, 22 bp, Artificial Sequence
  Synthetic oligonucleotide; TTC chr2 60499257 60499278 60499274 60499279 +
cgtcactcccacagagctgcag

SEQ ID NO: 201107 - DNA, 22 bp, Artificial Sequence
  Synthetic oligonucleotide; CTC chr2 60499265 60499286 60499282 60499287 +
ccacagagctgcaggggtgtga

SEQ ID NO: 201108 - DNA, 22 bp, Artificial Sequence
  Synthetic oligonucleotide; CTG chr2 60499276 60499297 60499293 60499298 +
caggggtgtgacgcccctgccc

SEQ ID NO: 201109 - DNA, 22 bp, Artificial Sequence
  Synthetic oligonucleotide; CTG chr2 60499295 60499316 60499312 60499317 +
cccagccatacccttctgggcc

SEQ ID NO: 201110 - DNA, 22 bp, Artificial Sequence
  Synthetic oligonucleotide; CTT chr2 60499310 60499331 60499327 60499332 +
ctgggccacagtgctggaggct

SEQ ID NO: 201111 - DNA, 22 bp, Artificial Sequence
  Synthetic oligonucleotide; TTC chr2 60499311 60499332 60499328 60499333 +
tgggccacagtgctggaggctg

SEQ ID NO: 201112 - DNA, 22 bp, Artificial Sequence
  Synthetic oligonucleotide; CTG chr2 60499313 60499334 60499330 60499335 +
ggccacagtgctggaggctgaa

SEQ ID NO: 201113 - DNA, 22 bp, Artificial Sequence
  Synthetic oligonucleotide; CTG chr2 60499326 60499347 60499343 60499348 +
gaggctgaagtcaaagcccatc

SEQ ID NO: 201114 - DNA, 22 bp, Artificial Sequence
  Synthetic oligonucleotide; CTG chr2 60499333 60499354 60499350 60499355 +
aagtcaaagcccatcgtgcctt

SEQ ID NO: 201115 - DNA, 22 bp, Artificial Sequence
  Synthetic oligonucleotide; CTT chr2 60499355 60499376 60499372 60499377 +
attccttcaggagcaatactcc

SEQ ID NO: 201116 - DNA, 22 bp, Artificial Sequence
  Synthetic oligonucleotide; TTA chr2 60499356 60499377 60499373 60499378 +
ttccttcaggagcaatactcct

SEQ ID NO: 201117 - DNA, 22 bp, Artificial Sequence
  Synthetic oligonucleotide; TTC chr2 60499359 60499380 60499376 60499381 +
cttcaggagcaatactcctggg

SEQ ID NO: 201118 - DNA, 22 bp, Artificial Sequence
  Synthetic oligonucleotide; CTT chr2 60499362 60499383 60499379 60499384 +
caggagcaatactcctgggaaa

SEQ ID NO: 201119 - DNA, 22 bp, Artificial Sequence
  Synthetic oligonucleotide; TTC chr2 60499363 60499384 60499380 60499385 +
aggagcaatactcctgggaaag

SEQ ID NO: 201120 - DNA, 22 bp, Artificial Sequence
  Synthetic oligonucleotide; CTC chr2 60499376 60499397 60499393 60499398 +
ctgggaaaggttgcacattctg

SEQ ID NO: 201121 - DNA, 22 bp, Artificial Sequence
  Synthetic oligonucleotide; CTG chr2 60499379 60499400 60499396 60499401 +
ggaaaggttgcacattctgtaa

SEQ ID NO: 201122 - DNA, 22 bp, Artificial Sequence
  Synthetic oligonucleotide; TTG chr2 60499389 60499410 60499406 60499411 +
cacattctgtaactcctctaag

SEQ ID NO: 201123 - DNA, 22 bp, Artificial Sequence
  Synthetic oligonucleotide; TTC chr2 60499396 60499417 60499413 60499418 +
tgtaactcctctaagtgatatt

SEQ ID NO: 201124 - DNA, 22 bp, Artificial Sequence
  Synthetic oligonucleotide; CTG chr2 60499398 60499419 60499415 60499420 +
taactcctctaagtgatatttc

SEQ ID NO: 201125 - DNA, 22 bp, Artificial Sequence
  Synthetic oligonucleotide; CTC chr2 60499404 60499425 60499421 60499426 +
ctctaagtgatatttcttccca

SEQ ID NO: 201126 - DNA, 22 bp, Artificial Sequence
  Synthetic oligonucleotide; CTC chr2 60499407 60499428 60499424 60499429 +
taagtgatatttcttcccaggg

SEQ ID NO: 201127 - DNA, 22 bp, Artificial Sequence
  Synthetic oligonucleotide; CTA chr2 60499409 60499430 60499426 60499431 +
agtgatatttcttcccaggggc

SEQ ID NO: 201128 - DNA, 22 bp, Artificial Sequence
  Synthetic oligonucleotide; TTT chr2 60499419 60499440 60499436 60499441 +
cttcccaggggcaaaaaaggaa

SEQ ID NO: 201129 - DNA, 22 bp, Artificial Sequence
  Synthetic oligonucleotide; TTC chr2 60499420 60499441 60499437 60499442 +
ttcccaggggcaaaaaaggaaa

SEQ ID NO: 201130 - DNA, 22 bp, Artificial Sequence
  Synthetic oligonucleotide; CTT chr2 60499422 60499443 60499439 60499444 +
cccaggggcaaaaaaggaaatt

SEQ ID NO: 201131 - DNA, 22 bp, Artificial Sequence
  Synthetic oligonucleotide; TTC chr2 60499423 60499444 60499440 60499445 +
ccaggggcaaaaaaggaaatta

SEQ ID NO: 201132 - DNA, 22 bp, Artificial Sequence
  Synthetic oligonucleotide; TTA chr2 60499445 60499466 60499462 60499467 +
gccccattttatagataaagag

SEQ ID NO: 201133 - DNA, 22 bp, Artificial Sequence
  Synthetic oligonucleotide; TTT chr2 60499454 60499475 60499471 60499476 +
tatagataaagagcctgaggcc

SEQ ID NO: 201134 - DNA, 22 bp, Artificial Sequence
  Synthetic oligonucleotide; TTT chr2 60499455 60499476 60499472 60499477 +
atagataaagagcctgaggccc

SEQ ID NO: 201135 - DNA, 22 bp, Artificial Sequence
  Synthetic oligonucleotide; TTA chr2 60499456 60499477 60499473 60499478 +
tagataaagagcctgaggccca

SEQ ID NO: 201136 - DNA, 22 bp, Artificial Sequence
  Synthetic oligonucleotide; CTG chr2 60499471 60499492 60499488 60499493 +
aggcccaataggctgattgact

SEQ ID NO: 201137 - DNA, 22 bp, Artificial Sequence
  Synthetic oligonucleotide; CTG chr2 60499486 60499507 60499503 60499508 +
attgacttgtccggggccacct

SEQ ID NO: 201138 - DNA, 22 bp, Artificial Sequence
  Synthetic oligonucleotide; TTG chr2 60499490 60499511 60499507 60499512 +
acttgtccggggccacctagcc

SEQ ID NO: 201139 - DNA, 22 bp, Artificial Sequence
  Synthetic oligonucleotide; CTT chr2 60499494 60499515 60499511 60499516 +
gtccggggccacctagccagca

SEQ ID NO: 201140 - DNA, 22 bp, Artificial Sequence
  Synthetic oligonucleotide; TTG chr2 60499495 60499516 60499512 60499517 +
tccggggccacctagccagcag

SEQ ID NO: 201141 - DNA, 22 bp, Artificial Sequence
  Synthetic oligonucleotide; CTA chr2 60499509 60499530 60499526 60499531 +
gccagcaggtgaaaagactcat

SEQ ID NO: 201142 - DNA, 22 bp, Artificial Sequence
  Synthetic oligonucleotide; CTC chr2 60499529 60499550 60499546 60499551 +
atgtgtagctgactttagagtc

SEQ ID NO: 201143 - DNA, 22 bp, Artificial Sequence
  Synthetic oligonucleotide; CTG chr2 60499540 60499561 60499557 60499562 +
actttagagtccaagctccttc

SEQ ID NO: 201144 - DNA, 22 bp, Artificial Sequence
  Synthetic oligonucleotide; CTT chr2 60499544 60499565 60499561 60499566 +
tagagtccaagctccttcaacg

SEQ ID NO: 201145 - DNA, 22 bp, Artificial Sequence
  Synthetic oligonucleotide; TTT chr2 60499545 60499566 60499562 60499567 +
agagtccaagctccttcaacgt

SEQ ID NO: 201146 - DNA, 22 bp, Artificial Sequence
  Synthetic oligonucleotide; TTA chr2 60499546 60499567 60499563 60499568 +
gagtccaagctccttcaacgtc

SEQ ID NO: 201147 - DNA, 22 bp, Artificial Sequence
  Synthetic oligonucleotide; CTC chr2 60499558 60499579 60499575 60499580 +
cttcaacgtcccactttctcaa

SEQ ID NO: 201148 - DNA, 22 bp, Artificial Sequence
  Synthetic oligonucleotide; CTT chr2 60499561 60499582 60499578 60499583 +
caacgtcccactttctcaagac

SEQ ID NO: 201149 - DNA, 22 bp, Artificial Sequence
  Synthetic oligonucleotide; TTC chr2 60499562 60499583 60499579 60499584 +
aacgtcccactttctcaagaca

SEQ ID NO: 201150 - DNA, 22 bp, Artificial Sequence
  Synthetic oligonucleotide; CTT chr2 60499574 60499595 60499591 60499596 +
tctcaagacagtgtttgccacg

SEQ ID NO: 201151 - DNA, 22 bp, Artificial Sequence
  Synthetic oligonucleotide; TTT chr2 60499575 60499596 60499592 60499597 +
ctcaagacagtgtttgccacgg

SEQ ID NO: 201152 - DNA, 22 bp, Artificial Sequence
  Synthetic oligonucleotide; TTC chr2 60499576 60499597 60499593 60499598 +
tcaagacagtgtttgccacggg

SEQ ID NO: 201153 - DNA, 22 bp, Artificial Sequence
  Synthetic oligonucleotide; CTC chr2 60499578 60499599 60499595 60499600 +
aagacagtgtttgccacgggcc

SEQ ID NO: 201154 - DNA, 22 bp, Artificial Sequence
  Synthetic oligonucleotide; TTT chr2 60499590 60499611 60499607 60499612 +
gccacgggccagggctagcaaa

SEQ ID NO: 201155 - DNA, 22 bp, Artificial Sequence
  Synthetic oligonucleotide; TTG chr2 60499591 60499612 60499608 60499613 +
ccacgggccagggctagcaaaa

SEQ ID NO: 201156 - DNA, 22 bp, Artificial Sequence
  Synthetic oligonucleotide; CTA chr2 60499607 60499628 60499624 60499629 +
gcaaaaagacccctccaacccc

SEQ ID NO: 201157 - DNA, 22 bp, Artificial Sequence
  Synthetic oligonucleotide; CTC chr2 60499622 60499643 60499639 60499644 +
caacccctcatacctccccacc

SEQ ID NO: 201158 - DNA, 22 bp, Artificial Sequence
  Synthetic oligonucleotide; CTC chr2 60499631 60499652 60499648 60499653 +
atacctccccaccaaccccatg

SEQ ID NO: 201159 - DNA, 22 bp, Artificial Sequence
  Synthetic oligonucleotide; CTC chr2 60499638 60499659 60499655 60499660 +
cccaccaaccccatgcaggtgt

SEQ ID NO: 201160 - DNA, 22 bp, Artificial Sequence
  Synthetic oligonucleotide; CTC chr2 60499686 60499707 60499703 60499708 +
cccggaccaaaggggtggacag

SEQ ID NO: 201161 - DNA, 22 bp, Artificial Sequence
  Synthetic oligonucleotide; CTG chr2 60499713 60499734 60499730 60499735 +
aaggaaaccgctcaaccttgag

SEQ ID NO: 201162 - DNA, 22 bp, Artificial Sequence
  Synthetic oligonucleotide; CTC chr2 60499726 60499747 60499743 60499748 +
aaccttgagtggagaggctgct

SEQ ID NO: 201163 - DNA, 22 bp, Artificial Sequence
  Synthetic oligonucleotide; CTT chr2 60499732 60499753 60499749 60499754 +
gagtggagaggctgctgtgaaa

SEQ ID NO: 201164 - DNA, 22 bp, Artificial Sequence
  Synthetic oligonucleotide; TTG chr2 60499733 60499754 60499750 60499755 +
agtggagaggctgctgtgaaac

SEQ ID NO: 201165 - DNA, 22 bp, Artificial Sequence
  Synthetic oligonucleotide; CTG chr2 60499746 60499767 60499763 60499768 +
ctgtgaaacagctctgggcagc

SEQ ID NO: 201166 - DNA, 22 bp, Artificial Sequence
  Synthetic oligonucleotide; CTG chr2 60499749 60499770 60499766 60499771 +
tgaaacagctctgggcagcacc

SEQ ID NO: 201167 - DNA, 22 bp, Artificial Sequence
  Synthetic oligonucleotide; CTC chr2 60499760 60499781 60499777 60499782 +
tgggcagcacctgggccacagc

SEQ ID NO: 201168 - DNA, 22 bp, Artificial Sequence
  Synthetic oligonucleotide; CTG chr2 60499762 60499783 60499779 60499784 +
ggcagcacctgggccacagcat

SEQ ID NO: 201169 - DNA, 22 bp, Artificial Sequence
  Synthetic oligonucleotide; CTG chr2 60499773 60499794 60499790 60499795 +
ggccacagcatgtggaaggaga

SEQ ID NO: 201170 - DNA, 22 bp, Artificial Sequence
  Synthetic oligonucleotide; TTC chr2 60499802 60499823 60499819 60499824 +
ctaagctgcctggtactctgcc

SEQ ID NO: 201171 - DNA, 22 bp, Artificial Sequence
  Synthetic oligonucleotide; CTA chr2 60499805 60499826 60499822 60499827 +
agctgcctggtactctgccatc

SEQ ID NO: 201172 - DNA, 22 bp, Artificial Sequence
  Synthetic oligonucleotide; CTG chr2 60499810 60499831 60499827 60499832 +
cctggtactctgccatctgtct

SEQ ID NO: 201173 - DNA, 22 bp, Artificial Sequence
  Synthetic oligonucleotide; CTG chr2 60499814 60499835 60499831 60499836 +
gtactctgccatctgtcttctc

SEQ ID NO: 201174 - DNA, 22 bp, Artificial Sequence
  Synthetic oligonucleotide; CTC chr2 60499820 60499841 60499837 60499842 +
tgccatctgtcttctcttcctc

SEQ ID NO: 201175 - DNA, 22 bp, Artificial Sequence
  Synthetic oligonucleotide; CTG chr2 60499822 60499843 60499839 60499844 +
ccatctgtcttctcttcctcct

SEQ ID NO: 201176 - DNA, 22 bp, Artificial Sequence
  Synthetic oligonucleotide; CTG chr2 60499829 60499850 60499846 60499851 +
tcttctcttcctcctaatccat

SEQ ID NO: 201177 - DNA, 22 bp, Artificial Sequence
  Synthetic oligonucleotide; CTT chr2 60499833 60499854 60499850 60499855 +
ctcttcctcctaatccataagc

SEQ ID NO: 201178 - DNA, 22 bp, Artificial Sequence
  Synthetic oligonucleotide; TTC chr2 60499834 60499855 60499851 60499856 +
tcttcctcctaatccataagca

SEQ ID NO: 201179 - DNA, 22 bp, Artificial Sequence
  Synthetic oligonucleotide; CTC chr2 60499836 60499857 60499853 60499858 +
ttcctcctaatccataagcacc

SEQ ID NO: 201180 - DNA, 22 bp, Artificial Sequence
  Synthetic oligonucleotide; CTT chr2 60499838 60499859 60499855 60499860 +
cctcctaatccataagcaccag

SEQ ID NO: 201181 - DNA, 22 bp, Artificial Sequence
  Synthetic oligonucleotide; TTC chr2 60499839 60499860 60499856 60499861 +
ctcctaatccataagcaccaga

SEQ ID NO: 201182 - DNA, 22 bp, Artificial Sequence
  Synthetic oligonucleotide; CTC chr2 60499842 60499863 60499859 60499864 +
ctaatccataagcaccagacct

SEQ ID NO: 201183 - DNA, 22 bp, Artificial Sequence
  Synthetic oligonucleotide; CTA chr2 60499845 60499866 60499862 60499867 +
atccataagcaccagacctcaa

SEQ ID NO: 201184 - DNA, 22 bp, Artificial Sequence
  Synthetic oligonucleotide; CTC chr2 60499865 60499886 60499882 60499887 +
aagccccatgtgcagctccgga

SEQ ID NO: 201185 - DNA, 22 bp, Artificial Sequence
  Synthetic oligonucleotide; CTC chr2 60499883 60499904 60499900 60499905 +
cggaagctgctagacctcaagc

SEQ ID NO: 201186 - DNA, 22 bp, Artificial Sequence
  Synthetic oligonucleotide; CTG chr2 60499892 60499913 60499909 60499914 +
ctagacctcaagcaggactaag

SEQ ID NO: 201187 - DNA, 22 bp, Artificial Sequence
  Synthetic oligonucleotide; CTA chr2 60499895 60499916 60499912 60499917 +
gacctcaagcaggactaagatt

SEQ ID NO: 201188 - DNA, 22 bp, Artificial Sequence
  Synthetic oligonucleotide; CTC chr2 60499901 60499922 60499918 60499923 +
aagcaggactaagattcggaga

SEQ ID NO: 201189 - DNA, 22 bp, Artificial Sequence
  Synthetic oligonucleotide; CTA chr2 60499912 60499933 60499929 60499934 +
agattcggagagagcagccacc

SEQ ID NO: 201190 - DNA, 22 bp, Artificial Sequence
  Synthetic oligonucleotide; TTC chr2 60499918 60499939 60499935 60499940 +
ggagagagcagccaccgacctg

SEQ ID NO: 201191 - DNA, 22 bp, Artificial Sequence
  Synthetic oligonucleotide; CTG chr2 60499940 60499961 60499957 60499962 +
gctcctcccaggcaggccagcc

SEQ ID NO: 201192 - DNA, 22 bp, Artificial Sequence
  Synthetic oligonucleotide; CTC chr2 60499944 60499965 60499961 60499966 +
ctcccaggcaggccagcccagg

SEQ ID NO: 201193 - DNA, 22 bp, Artificial Sequence
  Synthetic oligonucleotide; CTC chr2 60499947 60499968 60499964 60499969 +
ccaggcaggccagcccaggtga

SEQ ID NO: 201194 - DNA, 22 bp, Artificial Sequence
  Synthetic oligonucleotide; CTC chr2 60499976 60499997 60499993 60499998 +
cagccaggcactcaccccactg

SEQ ID NO: 201195 - DNA, 22 bp, Artificial Sequence
  Synthetic oligonucleotide; CTC chr2 60499989 60500010 60500006 60500011 +
accccactgccaggctgtttac

SEQ ID NO: 201196 - DNA, 22 bp, Artificial Sequence
  Synthetic oligonucleotide; CTG chr2 60499998 60500019 60500015 60500020 +
ccaggctgtttactcttagctg

SEQ ID NO: 201197 - DNA, 22 bp, Artificial Sequence
  Synthetic oligonucleotide; CTG chr2 60500006 60500027 60500023 60500028 +
tttactcttagctggtgtttgt

SEQ ID NO: 201198 - DNA, 22 bp, Artificial Sequence
  Synthetic oligonucleotide; TTT chr2 60500009 60500030 60500026 60500031 +
actcttagctggtgtttgtctc

SEQ ID NO: 201199 - DNA, 22 bp, Artificial Sequence
  Synthetic oligonucleotide; TTA chr2 60500010 60500031 60500027 60500032 +
ctcttagctggtgtttgtctcc

SEQ ID NO: 201200 - DNA, 22 bp, Artificial Sequence
  Synthetic oligonucleotide; CTC chr2 60500013 60500034 60500030 60500035 +
ttagctggtgtttgtctcctgt

SEQ ID NO: 201201 - DNA, 22 bp, Artificial Sequence
  Synthetic oligonucleotide; CTT chr2 60500015 60500036 60500032 60500037 +
agctggtgtttgtctcctgtct

SEQ ID NO: 201202 - DNA, 22 bp, Artificial Sequence
  Synthetic oligonucleotide; TTA chr2 60500016 60500037 60500033 60500038 +
gctggtgtttgtctcctgtctg

SEQ ID NO: 201203 - DNA, 22 bp, Artificial Sequence
  Synthetic oligonucleotide; CTG chr2 60500020 60500041 60500037 60500042 +
gtgtttgtctcctgtctgctct

SEQ ID NO: 201204 - DNA, 22 bp, Artificial Sequence
  Synthetic oligonucleotide; TTT chr2 60500026 60500047 60500043 60500048 +
gtctcctgtctgctctactgta

SEQ ID NO: 201205 - DNA, 22 bp, Artificial Sequence
  Synthetic oligonucleotide; TTG chr2 60500027 60500048 60500044 60500049 +
tctcctgtctgctctactgtag

SEQ ID NO: 201206 - DNA, 22 bp, Artificial Sequence
  Synthetic oligonucleotide; CTC chr2 60500031 60500052 60500048 60500053 +
ctgtctgctctactgtagctcc

SEQ ID NO: 201207 - DNA, 22 bp, Artificial Sequence
  Synthetic oligonucleotide; CTG chr2 60500034 60500055 60500051 60500056 +
tctgctctactgtagctccctc

SEQ ID NO: 201208 - DNA, 22 bp, Artificial Sequence
  Synthetic oligonucleotide; CTG chr2 60500038 60500059 60500055 60500060 +
ctctactgtagctccctccctc

SEQ ID NO: 201209 - DNA, 22 bp, Artificial Sequence
  Synthetic oligonucleotide; CTC chr2 60500041 60500062 60500058 60500063 +
tactgtagctccctccctcctc

SEQ ID NO: 201210 - DNA, 22 bp, Artificial Sequence
  Synthetic oligonucleotide; CTA chr2 60500043 60500064 60500060 60500065 +
ctgtagctccctccctcctctc

SEQ ID NO: 201211 - DNA, 22 bp, Artificial Sequence
  Synthetic oligonucleotide; CTG chr2 60500046 60500067 60500063 60500068 +
tagctccctccctcctctcctc

SEQ ID NO: 201212 - DNA, 22 bp, Artificial Sequence
  Synthetic oligonucleotide; CTC chr2 60500052 60500073 60500069 60500074 +
cctccctcctctcctcctttcg

SEQ ID NO: 201213 - DNA, 22 bp, Artificial Sequence
  Synthetic oligonucleotide; CTC chr2 60500056 60500077 60500073 60500078 +
cctcctctcctcctttcggtcc

SEQ ID NO: 201214 - DNA, 22 bp, Artificial Sequence
  Synthetic oligonucleotide; CTC chr2 60500060 60500081 60500077 60500082 +
ctctcctcctttcggtcctctg

SEQ ID NO: 201215 - DNA, 22 bp, Artificial Sequence
  Synthetic oligonucleotide; CTC chr2 60500063 60500084 60500080 60500085 +
tcctcctttcggtcctctgccc

SEQ ID NO: 201216 - DNA, 22 bp, Artificial Sequence
  Synthetic oligonucleotide; CTC chr2 60500065 60500086 60500082 60500087 +
ctcctttcggtcctctgcccag

SEQ ID NO: 201217 - DNA, 22 bp, Artificial Sequence
  Synthetic oligonucleotide; CTC chr2 60500068 60500089 60500085 60500090 +
ctttcggtcctctgcccaggcc

SEQ ID NO: 201218 - DNA, 22 bp, Artificial Sequence
  Synthetic oligonucleotide; CTT chr2 60500071 60500092 60500088 60500093 +
tcggtcctctgcccaggcctgc

SEQ ID NO: 201219 - DNA, 22 bp, Artificial Sequence
  Synthetic oligonucleotide; TTT chr2 60500072 60500093 60500089 60500094 +
cggtcctctgcccaggcctgcc

SEQ ID NO: 201220 - DNA, 22 bp, Artificial Sequence
  Synthetic oligonucleotide; TTC chr2 60500073 60500094 60500090 60500095 +
ggtcctctgcccaggcctgcct

SEQ ID NO: 201221 - DNA, 22 bp, Artificial Sequence
  Synthetic oligonucleotide; CTC chr2 60500080 60500101 60500097 60500102 +
tgcccaggcctgcctgaggctg

SEQ ID NO: 201222 - DNA, 22 bp, Artificial Sequence
  Synthetic oligonucleotide; CTG chr2 60500082 60500103 60500099 60500104 +
cccaggcctgcctgaggctgcc

SEQ ID NO: 201223 - DNA, 22 bp, Artificial Sequence
  Synthetic oligonucleotide; CTG chr2 60500092 60500113 60500109 60500114 +
cctgaggctgcctgccagtgag

SEQ ID NO: 201224 - DNA, 22 bp, Artificial Sequence
  Synthetic oligonucleotide; CTG chr2 60500096 60500117 60500113 60500118 +
aggctgcctgccagtgagattg

SEQ ID NO: 201225 - DNA, 22 bp, Artificial Sequence
  Synthetic oligonucleotide; CTG chr2 60500102 60500123 60500119 60500124 +
cctgccagtgagattgcatgtc

SEQ ID NO: 201226 - DNA, 22 bp, Artificial Sequence
  Synthetic oligonucleotide; CTG chr2 60500106 60500127 60500123 60500128 +
ccagtgagattgcatgtcaggg

SEQ ID NO: 201227 - DNA, 22 bp, Artificial Sequence
  Synthetic oligonucleotide; TTG chr2 60500118 60500139 60500135 60500140 +
catgtcagggctttgccctggg

SEQ ID NO: 201228 - DNA, 22 bp, Artificial Sequence
  Synthetic oligonucleotide; CTT chr2 60500131 60500152 60500148 60500153 +
tgccctgggcactgagggctag

SEQ ID NO: 201229 - DNA, 22 bp, Artificial Sequence
  Synthetic oligonucleotide; TTT chr2 60500132 60500153 60500149 60500154 +
gccctgggcactgagggctagg

SEQ ID NO: 201230 - DNA, 22 bp, Artificial Sequence
  Synthetic oligonucleotide; TTG chr2 60500133 60500154 60500150 60500155 +
ccctgggcactgagggctaggg

SEQ ID NO: 201231 - DNA, 22 bp, Artificial Sequence
  Synthetic oligonucleotide; CTG chr2 60500138 60500159 60500155 60500160 +
ggcactgagggctagggtgccc

SEQ ID NO: 201232 - DNA, 22 bp, Artificial Sequence
  Synthetic oligonucleotide; CTG chr2 60500145 60500166 60500162 60500167 +
agggctagggtgcccagaggcc

SEQ ID NO: 201233 - DNA, 22 bp, Artificial Sequence
  Synthetic oligonucleotide; CTA chr2 60500152 60500173 60500169 60500174 +
gggtgcccagaggcctgcggct

SEQ ID NO: 201234 - DNA, 22 bp, Artificial Sequence
  Synthetic oligonucleotide; CTG chr2 60500169 60500190 60500186 60500191 +
cggctgtgccctggatggaaaa

SEQ ID NO: 201235 - DNA, 22 bp, Artificial Sequence
  Synthetic oligonucleotide; CTG chr2 60500175 60500196 60500192 60500197 +
tgccctggatggaaaaccagca

SEQ ID NO: 201236 - DNA, 22 bp, Artificial Sequence
  Synthetic oligonucleotide; CTG chr2 60500182 60500203 60500199 60500204 +
gatggaaaaccagcagcctgca

SEQ ID NO: 201237 - DNA, 22 bp, Artificial Sequence
  Synthetic oligonucleotide; CTG chr2 60500202 60500223 60500219 60500224 +
caaagctgtgggggcagcacag

SEQ ID NO: 201238 - DNA, 22 bp, Artificial Sequence
  Synthetic oligonucleotide; CTG chr2 60500210 60500231 60500227 60500232 +
tgggggcagcacaggacctgtg

SEQ ID NO: 201239 - DNA, 22 bp, Artificial Sequence
  Synthetic oligonucleotide; CTG chr2 60500230 60500251 60500247 60500252 +
tgtgtgagagcggtggtcttga

SEQ ID NO: 201240 - DNA, 22 bp, Artificial Sequence
  Synthetic oligonucleotide; CTT chr2 60500250 60500271 60500267 60500272 +
gagagtgaaagtggacaagtca

SEQ ID NO: 201241 - DNA, 22 bp, Artificial Sequence
  Synthetic oligonucleotide; TTG chr2 60500251 60500272 60500268 60500273 +
agagtgaaagtggacaagtcaa

SEQ ID NO: 201242 - DNA, 22 bp, Artificial Sequence
  Synthetic oligonucleotide; TTC chr2 60500325 60500346 60500342 60500347 +
ccggggccagttcccccattat

SEQ ID NO: 201243 - DNA, 22 bp, Artificial Sequence
  Synthetic oligonucleotide; TTC chr2 60500338 60500359 60500355 60500360 +
ccccattatgcactgcctctgc

SEQ ID NO: 201244 - DNA, 22 bp, Artificial Sequence
  Synthetic oligonucleotide; TTA chr2 60500346 60500367 60500363 60500368 +
tgcactgcctctgcttccccgc

SEQ ID NO: 201245 - DNA, 22 bp, Artificial Sequence
  Synthetic oligonucleotide; CTG chr2 60500353 60500374 60500370 60500375 +
cctctgcttccccgccaccatt

SEQ ID NO: 201246 - DNA, 22 bp, Artificial Sequence
  Synthetic oligonucleotide; CTC chr2 60500357 60500378 60500374 60500379 +
tgcttccccgccaccattaacc

SEQ ID NO: 201247 - DNA, 22 bp, Artificial Sequence
  Synthetic oligonucleotide; CTG chr2 60500359 60500380 60500376 60500381 +
cttccccgccaccattaaccgt

SEQ ID NO: 201248 - DNA, 22 bp, Artificial Sequence
  Synthetic oligonucleotide; CTT chr2 60500362 60500383 60500379 60500384 +
ccccgccaccattaaccgtgcc

SEQ ID NO: 201249 - DNA, 22 bp, Artificial Sequence
  Synthetic oligonucleotide; TTC chr2 60500363 60500384 60500380 60500385 +
cccgccaccattaaccgtgcct

SEQ ID NO: 201250 - DNA, 22 bp, Artificial Sequence
  Synthetic oligonucleotide; TTA chr2 60500376 60500397 60500393 60500398 +
accgtgcctctgtgggctgaca

SEQ ID NO: 201251 - DNA, 22 bp, Artificial Sequence
  Synthetic oligonucleotide; CTC chr2 60500386 60500407 60500403 60500408 +
tgtgggctgacagatgtgcctt

SEQ ID NO: 201252 - DNA, 22 bp, Artificial Sequence
  Synthetic oligonucleotide; CTG chr2 60500388 60500409 60500405 60500410 +
tgggctgacagatgtgccttca

SEQ ID NO: 201253 - DNA, 22 bp, Artificial Sequence
  Synthetic oligonucleotide; CTG chr2 60500395 60500416 60500412 60500417 +
acagatgtgccttcagagaagg

SEQ ID NO: 201254 - DNA, 22 bp, Artificial Sequence
  Synthetic oligonucleotide; CTT chr2 60500408 60500429 60500425 60500430 +
cagagaagggcagggagcagct

SEQ ID NO: 201255 - DNA, 22 bp, Artificial Sequence
  Synthetic oligonucleotide; TTC chr2 60500409 60500430 60500426 60500431 +
agagaagggcagggagcagctg

SEQ ID NO: 201256 - DNA, 22 bp, Artificial Sequence
  Synthetic oligonucleotide; CTG chr2 60500431 60500452 60500448 60500453 +
ggggcctggccagagcaatcat

SEQ ID NO: 201257 - DNA, 22 bp, Artificial Sequence
  Synthetic oligonucleotide; CTG chr2 60500439 60500460 60500456 60500461 +
gccagagcaatcatcccagcag

SEQ ID NO: 201258 - DNA, 22 bp, Artificial Sequence
  Synthetic oligonucleotide; CTT chr2 60500467 60500488 60500484 60500489 +
acatcagagcaggcagcctacc

SEQ ID NO: 201259 - DNA, 22 bp, Artificial Sequence
  Synthetic oligonucleotide; TTA chr2 60500468 60500489 60500485 60500490 +
catcagagcaggcagcctaccc

SEQ ID NO: 201260 - DNA, 22 bp, Artificial Sequence
  Synthetic oligonucleotide; CTA chr2 60500487 60500508 60500504 60500509 +
cccaagagccagggaaggaagg

SEQ ID NO: 201261 - DNA, 22 bp, Artificial Sequence
  Synthetic oligonucleotide; CTG chr2 60500519 60500540 60500536 60500541 +
agaaaaaatggcagaagaatgg

SEQ ID NO: 201262 - DNA, 22 bp, Artificial Sequence
  Synthetic oligonucleotide; CTA chr2 60500550 60500571 60500567 60500572 +
cgtgtattgatggaataaacca

SEQ ID NO: 201263 - DNA, 22 bp, Artificial Sequence
  Synthetic oligonucleotide; TTG chr2 60500559 60500580 60500576 60500581 +
atggaataaaccagacacccca

SEQ ID NO: 201264 - DNA, 22 bp, Artificial Sequence
  Synthetic oligonucleotide; CTT chr2 60500586 60500607 60500603 60500608 +
cccaactcctcaggacagggtt

SEQ ID NO: 201265 - DNA, 22 bp, Artificial Sequence
  Synthetic oligonucleotide; TTC chr2 60500587 60500608 60500604 60500609 +
ccaactcctcaggacagggttc

SEQ ID NO: 201266 - DNA, 22 bp, Artificial Sequence
  Synthetic oligonucleotide; CTC chr2 60500594 60500615 60500611 60500616 +
ctcaggacagggttcagagcta

SEQ ID NO: 201267 - DNA, 22 bp, Artificial Sequence
  Synthetic oligonucleotide; CTC chr2 60500597 60500618 60500614 60500619 +
aggacagggttcagagctaggc

SEQ ID NO: 201268 - DNA, 22 bp, Artificial Sequence
  Synthetic oligonucleotide; TTC chr2 60500609 60500630 60500626 60500631 +
agagctaggctggtggctgcta

SEQ ID NO: 201269 - DNA, 22 bp, Artificial Sequence
  Synthetic oligonucleotide; CTA chr2 60500616 60500637 60500633 60500638 +
ggctggtggctgctacacagag

SEQ ID NO: 201270 - DNA, 22 bp, Artificial Sequence
  Synthetic oligonucleotide; CTG chr2 60500621 60500642 60500638 60500643 +
gtggctgctacacagagacagc

SEQ ID NO: 201271 - DNA, 22 bp, Artificial Sequence
  Synthetic oligonucleotide; CTG chr2 60500628 60500649 60500645 60500650 +
ctacacagagacagcaccctcc

SEQ ID NO: 201272 - DNA, 22 bp, Artificial Sequence
  Synthetic oligonucleotide; CTA chr2 60500631 60500652 60500648 60500653 +
cacagagacagcaccctccacc

SEQ ID NO: 201273 - DNA, 22 bp, Artificial Sequence
  Synthetic oligonucleotide; CTC chr2 60500649 60500670 60500666 60500671 +
caccagttaaggtataagacaa

SEQ ID NO: 201274 - DNA, 22 bp, Artificial Sequence
  Synthetic oligonucleotide; TTA chr2 60500658 60500679 60500675 60500680 +
aggtataagacaaggtataagg

SEQ ID NO: 201275 - DNA, 22 bp, Artificial Sequence
  Synthetic oligonucleotide; CTG chr2 60500683 60500704 60500700 60500705 +
atgggctgtaggcatcaaacct

SEQ ID NO: 201276 - DNA, 22 bp, Artificial Sequence
  Synthetic oligonucleotide; CTG chr2 60500691 60500712 60500708 60500713 +
taggcatcaaacctggaactca

SEQ ID NO: 201277 - DNA, 22 bp, Artificial Sequence
  Synthetic oligonucleotide; CTG chr2 60500706 60500727 60500723 60500728 +
gaactcacagtcggggcacctc

SEQ ID NO: 201278 - DNA, 22 bp, Artificial Sequence
  Synthetic oligonucleotide; CTC chr2 60500712 60500733 60500729 60500734 +
acagtcggggcacctcacttca

SEQ ID NO: 201279 - DNA, 22 bp, Artificial Sequence
  Synthetic oligonucleotide; CTC chr2 60500728 60500749 60500745 60500750 +
acttcaagccttggtggatagg

SEQ ID NO: 201280 - DNA, 22 bp, Artificial Sequence
  Synthetic oligonucleotide; CTT chr2 60500732 60500753 60500749 60500754 +
caagccttggtggataggtaag

SEQ ID NO: 201281 - DNA, 22 bp, Artificial Sequence
  Synthetic oligonucleotide; TTC chr2 60500733 60500754 60500750 60500755 +
aagccttggtggataggtaaga

SEQ ID NO: 201282 - DNA, 22 bp, Artificial Sequence
  Synthetic oligonucleotide; CTT chr2 60500740 60500761 60500757 60500762 +
ggtggataggtaagatgaacac

SEQ ID NO: 201283 - DNA, 22 bp, Artificial Sequence
  Synthetic oligonucleotide; TTG chr2 60500741 60500762 60500758 60500763 +
gtggataggtaagatgaacact

SEQ ID NO: 201284 - DNA, 22 bp, Artificial Sequence
  Synthetic oligonucleotide; CTC chr2 60500764 60500785 60500781 60500786 +
aggctcccaagttagacagatg

SEQ ID NO: 201285 - DNA, 22 bp, Artificial Sequence
  Synthetic oligonucleotide; CTC chr2 60500770 60500791 60500787 60500792 +
ccaagttagacagatgagctgg

SEQ ID NO: 201286 - DNA, 22 bp, Artificial Sequence
  Synthetic oligonucleotide; TTA chr2 60500778 60500799 60500795 60500800 +
gacagatgagctggatccttca

SEQ ID NO: 201287 - DNA, 22 bp, Artificial Sequence
  Synthetic oligonucleotide; CTG chr2 60500791 60500812 60500808 60500813 +
gatccttcatctaccaccaatt

SEQ ID NO: 201288 - DNA, 22 bp, Artificial Sequence
  Synthetic oligonucleotide; CTT chr2 60500798 60500819 60500815 60500820 +
catctaccaccaatttcctggc

SEQ ID NO: 201289 - DNA, 22 bp, Artificial Sequence
  Synthetic oligonucleotide; TTC chr2 60500799 60500820 60500816 60500821 +
atctaccaccaatttcctggct

SEQ ID NO: 201290 - DNA, 22 bp, Artificial Sequence
  Synthetic oligonucleotide; CTA chr2 60500804 60500825 60500821 60500826 +
ccaccaatttcctggctgtgtg

SEQ ID NO: 201291 - DNA, 22 bp, Artificial Sequence
  Synthetic oligonucleotide; TTT chr2 60500814 60500835 60500831 60500836 +
cctggctgtgtgtctgggagca

SEQ ID NO: 201292 - DNA, 22 bp, Artificial Sequence
  Synthetic oligonucleotide; TTC chr2 60500815 60500836 60500832 60500837 +
ctggctgtgtgtctgggagcag

SEQ ID NO: 201293 - DNA, 22 bp, Artificial Sequence
  Synthetic oligonucleotide; CTG chr2 60500818 60500839 60500835 60500840 +
gctgtgtgtctgggagcagctc

SEQ ID NO: 201294 - DNA, 22 bp, Artificial Sequence
  Synthetic oligonucleotide; CTG chr2 60500822 60500843 60500839 60500844 +
tgtgtctgggagcagctcttta

SEQ ID NO: 201295 - DNA, 22 bp, Artificial Sequence
  Synthetic oligonucleotide; CTG chr2 60500830 60500851 60500847 60500852 +
ggagcagctctttaacctctcc

SEQ ID NO: 201296 - DNA, 22 bp, Artificial Sequence
  Synthetic oligonucleotide; CTC chr2 60500840 60500861 60500857 60500862 +
tttaacctctccaagcctcagt

SEQ ID NO: 201297 - DNA, 22 bp, Artificial Sequence
  Synthetic oligonucleotide; CTT chr2 60500842 60500863 60500859 60500864 +
taacctctccaagcctcagttt

SEQ ID NO: 201298 - DNA, 22 bp, Artificial Sequence
  Synthetic oligonucleotide; TTT chr2 60500843 60500864 60500860 60500865 +
aacctctccaagcctcagtttc

SEQ ID NO: 201299 - DNA, 22 bp, Artificial Sequence
  Synthetic oligonucleotide; TTA chr2 60500844 60500865 60500861 60500866 +
acctctccaagcctcagtttct

SEQ ID NO: 201300 - DNA, 22 bp, Artificial Sequence
  Synthetic oligonucleotide; CTC chr2 60500849 60500870 60500866 60500871 +
tccaagcctcagtttcttcact

SEQ ID NO: 201301 - DNA, 22 bp, Artificial Sequence
  Synthetic oligonucleotide; CTC chr2 60500851 60500872 60500868 60500873 +
caagcctcagtttcttcactgg

SEQ ID NO: 201302 - DNA, 22 bp, Artificial Sequence
  Synthetic oligonucleotide; CTC chr2 60500859 60500880 60500876 60500881 +
agtttcttcactggtaaaatgt

SEQ ID NO: 201303 - DNA, 22 bp, Artificial Sequence
  Synthetic oligonucleotide; TTT chr2 60500864 60500885 60500881 60500886 +
cttcactggtaaaatgtgtatg

SEQ ID NO: 201304 - DNA, 22 bp, Artificial Sequence
  Synthetic oligonucleotide; TTC chr2 60500865 60500886 60500882 60500887 +
ttcactggtaaaatgtgtatga

SEQ ID NO: 201305 - DNA, 22 bp, Artificial Sequence
  Synthetic oligonucleotide; CTT chr2 60500867 60500888 60500884 60500889 +
cactggtaaaatgtgtatgatg

SEQ ID NO: 201306 - DNA, 22 bp, Artificial Sequence
  Synthetic oligonucleotide; TTC chr2 60500868 60500889 60500885 60500890 +
actggtaaaatgtgtatgatga

SEQ ID NO: 201307 - DNA, 22 bp, Artificial Sequence
  Synthetic oligonucleotide; CTG chr2 60500872 60500893 60500889 60500894 +
gtaaaatgtgtatgatgacatt

SEQ ID NO: 201308 - DNA, 22 bp, Artificial Sequence
  Synthetic oligonucleotide; TTG chr2 60500895 60500916 60500912 60500917 +
tatggccaacctggggttgctg

SEQ ID NO: 201309 - DNA, 22 bp, Artificial Sequence
  Synthetic oligonucleotide; CTG chr2 60500908 60500929 60500925 60500930 +
gggttgctgatggaactagtta

SEQ ID NO: 201310 - DNA, 22 bp, Artificial Sequence
  Synthetic oligonucleotide; TTG chr2 60500914 60500935 60500931 60500936 +
ctgatggaactagttaaaagag

SEQ ID NO: 201311 - DNA, 22 bp, Artificial Sequence
  Synthetic oligonucleotide; CTG chr2 60500917 60500938 60500934 60500939 +
atggaactagttaaaagagtgt

SEQ ID NO: 201312 - DNA, 22 bp, Artificial Sequence
  Synthetic oligonucleotide; CTA chr2 60500926 60500947 60500943 60500948 +
gttaaaagagtgtctgtgaagc

SEQ ID NO: 201313 - DNA, 22 bp, Artificial Sequence
  Synthetic oligonucleotide; TTA chr2 60500930 60500951 60500947 60500952 +
aaagagtgtctgtgaagcaagc

SEQ ID NO: 201314 - DNA, 22 bp, Artificial Sequence
  Synthetic oligonucleotide; CTG chr2 60500942 60500963 60500959 60500964 +
tgaagcaagcctagctgggtgg

SEQ ID NO: 201315 - DNA, 22 bp, Artificial Sequence
  Synthetic oligonucleotide; CTA chr2 60500955 60500976 60500972 60500977 +
gctgggtgggcttgcaagcatt

SEQ ID NO: 201316 - DNA, 22 bp, Artificial Sequence
  Synthetic oligonucleotide; CTG chr2 60500959 60500980 60500976 60500981 +
ggtgggcttgcaagcatttctg

SEQ ID NO: 201317 - DNA, 22 bp, Artificial Sequence
  Synthetic oligonucleotide; CTT chr2 60500968 60500989 60500985 60500990 +
gcaagcatttctgggtcgctgc

SEQ ID NO: 201318 - DNA, 22 bp, Artificial Sequence
  Synthetic oligonucleotide; TTG chr2 60500969 60500990 60500986 60500991 +
caagcatttctgggtcgctgca

SEQ ID NO: 201319 - DNA, 22 bp, Artificial Sequence
  Synthetic oligonucleotide; TTT chr2 60500978 60500999 60500995 60501000 +
ctgggtcgctgcatcctcctct

SEQ ID NO: 201320 - DNA, 22 bp, Artificial Sequence
  Synthetic oligonucleotide; TTC chr2 60500979 60501000 60500996 60501001 +
tgggtcgctgcatcctcctctg

SEQ ID NO: 201321 - DNA, 22 bp, Artificial Sequence
  Synthetic oligonucleotide; CTG chr2 60500981 60501002 60500998 60501003 +
ggtcgctgcatcctcctctgta

SEQ ID NO: 201322 - DNA, 22 bp, Artificial Sequence
  Synthetic oligonucleotide; CTG chr2 60500989 60501010 60501006 60501011 +
catcctcctctgtaaaatggga

SEQ ID NO: 201323 - DNA, 22 bp, Artificial Sequence
  Synthetic oligonucleotide; CTC chr2 60500996 60501017 60501013 60501018 +
ctctgtaaaatgggagaaccct

SEQ ID NO: 201324 - DNA, 22 bp, Artificial Sequence
  Synthetic oligonucleotide; CTC chr2 60500999 60501020 60501016 60501021 +
tgtaaaatgggagaaccctgaa

SEQ ID NO: 201325 - DNA, 22 bp, Artificial Sequence
  Synthetic oligonucleotide; CTG chr2 60501001 60501022 60501018 60501023 +
taaaatgggagaaccctgaact

SEQ ID NO: 201326 - DNA, 22 bp, Artificial Sequence
  Synthetic oligonucleotide; CTG chr2 60501019 60501040 60501036 60501041 +
aactgctcagccgacctcatgg

SEQ ID NO: 201327 - DNA, 22 bp, Artificial Sequence
  Synthetic oligonucleotide; CTG chr2 60501024 60501045 60501041 60501046 +
ctcagccgacctcatggttgac

SEQ ID NO: 201328 - DNA, 22 bp, Artificial Sequence
  Synthetic oligonucleotide; CTC chr2 60501027 60501048 60501044 60501049 +
agccgacctcatggttgactca

SEQ ID NO: 201329 - DNA, 22 bp, Artificial Sequence
  Synthetic oligonucleotide; CTC chr2 60501037 60501058 60501054 60501059 +
atggttgactcactcagcaaca

SEQ ID NO: 201330 - DNA, 22 bp, Artificial Sequence
  Synthetic oligonucleotide; TTG chr2 60501044 60501065 60501061 60501066 +
actcactcagcaacagaggtct

SEQ ID NO: 201331 - DNA, 22 bp, Artificial Sequence
  Synthetic oligonucleotide; CTC chr2 60501048 60501069 60501065 60501070 +
actcagcaacagaggtctccac

SEQ ID NO: 201332 - DNA, 22 bp, Artificial Sequence
  Synthetic oligonucleotide; CTC chr2 60501052 60501073 60501069 60501074 +
agcaacagaggtctccacagga

SEQ ID NO: 201333 - DNA, 22 bp, Artificial Sequence
  Synthetic oligonucleotide; CTC chr2 60501067 60501088 60501084 60501089 +
cacaggagccctgcccacatga

SEQ ID NO: 201334 - DNA, 22 bp, Artificial Sequence
  Synthetic oligonucleotide; CTG chr2 60501080 60501101 60501097 60501102 +
cccacatgagacatctttggca

SEQ ID NO: 201335 - DNA, 22 bp, Artificial Sequence
  Synthetic oligonucleotide; CTT chr2 60501097 60501118 60501114 60501119 +
tggcacatcttctgaaacaaga

SEQ ID NO: 201336 - DNA, 22 bp, Artificial Sequence
  Synthetic oligonucleotide; TTT chr2 60501098 60501119 60501115 60501120 +
ggcacatcttctgaaacaagac

SEQ ID NO: 201337 - DNA, 22 bp, Artificial Sequence
  Synthetic oligonucleotide; TTG chr2 60501099 60501120 60501116 60501121 +
gcacatcttctgaaacaagacc

SEQ ID NO: 201338 - DNA, 22 bp, Artificial Sequence
  Synthetic oligonucleotide; CTT chr2 60501108 60501129 60501125 60501130 +
ctgaaacaagacctgtttctgg

SEQ ID NO: 201339 - DNA, 22 bp, Artificial Sequence
  Synthetic oligonucleotide; TTC chr2 60501109 60501130 60501126 60501131 +
tgaaacaagacctgtttctgga

SEQ ID NO: 201340 - DNA, 22 bp, Artificial Sequence
  Synthetic oligonucleotide; CTG chr2 60501111 60501132 60501128 60501133 +
aaacaagacctgtttctggaaa

SEQ ID NO: 201341 - DNA, 22 bp, Artificial Sequence
  Synthetic oligonucleotide; CTG chr2 60501123 60501144 60501140 60501145 +
tttctggaaagttgttggtaaa

SEQ ID NO: 201342 - DNA, 22 bp, Artificial Sequence
  Synthetic oligonucleotide; TTT chr2 60501126 60501147 60501143 60501148 +
ctggaaagttgttggtaaacat

SEQ ID NO: 201343 - DNA, 22 bp, Artificial Sequence
  Synthetic oligonucleotide; TTC chr2 60501127 60501148 60501144 60501149 +
tggaaagttgttggtaaacatc

SEQ ID NO: 201344 - DNA, 22 bp, Artificial Sequence
  Synthetic oligonucleotide; CTG chr2 60501129 60501150 60501146 60501151 +
gaaagttgttggtaaacatcca

SEQ ID NO: 201345 - DNA, 22 bp, Artificial Sequence
  Synthetic oligonucleotide; TTG chr2 60501137 60501158 60501154 60501159 +
ttggtaaacatccaattttgca

SEQ ID NO: 201346 - DNA, 22 bp, Artificial Sequence
  Synthetic oligonucleotide; TTG chr2 60501140 60501161 60501157 60501162 +
gtaaacatccaattttgcactt

SEQ ID NO: 201347 - DNA, 22 bp, Artificial Sequence
  Synthetic oligonucleotide; TTT chr2 60501155 60501176 60501172 60501177 +
tgcacttatttatattattgtt

SEQ ID NO: 201348 - DNA, 22 bp, Artificial Sequence
  Synthetic oligonucleotide; TTT chr2 60501156 60501177 60501173 60501178 +
gcacttatttatattattgttt

SEQ ID NO: 201349 - DNA, 22 bp, Artificial Sequence
  Synthetic oligonucleotide; TTG chr2 60501157 60501178 60501174 60501179 +
cacttatttatattattgtttc

SEQ ID NO: 201350 - DNA, 22 bp, Artificial Sequence
  Synthetic oligonucleotide; CTT chr2 60501162 60501183 60501179 60501184 +
atttatattattgtttcagaaa

SEQ ID NO: 201351 - DNA, 22 bp, Artificial Sequence
  Synthetic oligonucleotide; TTA chr2 60501163 60501184 60501180 60501185 +
tttatattattgtttcagaaac

SEQ ID NO: 201352 - DNA, 22 bp, Artificial Sequence
  Synthetic oligonucleotide; TTT chr2 60501166 60501187 60501183 60501188 +
atattattgtttcagaaacact

SEQ ID NO: 201353 - DNA, 22 bp, Artificial Sequence
  Synthetic oligonucleotide; TTA chr2 60501167 60501188 60501184 60501189 +
tattattgtttcagaaacacta

SEQ ID NO: 201354 - DNA, 22 bp, Artificial Sequence
  Synthetic oligonucleotide; TTA chr2 60501172 60501193 60501189 60501194 +
ttgtttcagaaacactaccttc

SEQ ID NO: 201355 - DNA, 22 bp, Artificial Sequence
  Synthetic oligonucleotide; TTG chr2 60501175 60501196 60501192 60501197 +
tttcagaaacactaccttcatt

SEQ ID NO: 201356 - DNA, 22 bp, Artificial Sequence
  Synthetic oligonucleotide; TTT chr2 60501178 60501199 60501195 60501200 +
cagaaacactaccttcattctg

SEQ ID NO: 201357 - DNA, 22 bp, Artificial Sequence
  Synthetic oligonucleotide; TTC chr2 60501179 60501200 60501196 60501201 +
agaaacactaccttcattctgc

SEQ ID NO: 201358 - DNA, 22 bp, Artificial Sequence
  Synthetic oligonucleotide; CTA chr2 60501189 60501210 60501206 60501211 +
ccttcattctgctttgattcaa

SEQ ID NO: 201359 - DNA, 22 bp, Artificial Sequence
  Synthetic oligonucleotide; CTT chr2 60501193 60501214 60501210 60501215 +
cattctgctttgattcaatggc

SEQ ID NO: 201360 - DNA, 22 bp, Artificial Sequence
  Synthetic oligonucleotide; TTC chr2 60501194 60501215 60501211 60501216 +
attctgctttgattcaatggca

SEQ ID NO: 201361 - DNA, 22 bp, Artificial Sequence
  Synthetic oligonucleotide; TTC chr2 60501198 60501219 60501215 60501220 +
tgctttgattcaatggcagcca

SEQ ID NO: 201362 - DNA, 22 bp, Artificial Sequence
  Synthetic oligonucleotide; CTG chr2 60501200 60501221 60501217 60501222 +
ctttgattcaatggcagccaat

SEQ ID NO: 201363 - DNA, 22 bp, Artificial Sequence
  Synthetic oligonucleotide; CTT chr2 60501203 60501224 60501220 60501225 +
tgattcaatggcagccaattta

SEQ ID NO: 201364 - DNA, 22 bp, Artificial Sequence
  Synthetic oligonucleotide; TTT chr2 60501204 60501225 60501221 60501226 +
gattcaatggcagccaatttaa

SEQ ID NO: 201365 - DNA, 22 bp, Artificial Sequence
  Synthetic oligonucleotide; TTG chr2 60501205 60501226 60501222 60501227 +
attcaatggcagccaatttaat

SEQ ID NO: 201366 - DNA, 22 bp, Artificial Sequence
  Synthetic oligonucleotide; TTC chr2 60501209 60501230 60501226 60501231 +
aatggcagccaatttaattcat

SEQ ID NO: 201367 - DNA, 22 bp, Artificial Sequence
  Synthetic oligonucleotide; TTT chr2 60501224 60501245 60501241 60501246 +
aattcatttggtccaaacctgt

SEQ ID NO: 201368 - DNA, 22 bp, Artificial Sequence
  Synthetic oligonucleotide; TTA chr2 60501225 60501246 60501242 60501247 +
attcatttggtccaaacctgta

SEQ ID NO: 201369 - DNA, 22 bp, Artificial Sequence
  Synthetic oligonucleotide; TTC chr2 60501229 60501250 60501246 60501251 +
atttggtccaaacctgtagtgc

SEQ ID NO: 201370 - DNA, 22 bp, Artificial Sequence
  Synthetic oligonucleotide; TTT chr2 60501233 60501254 60501250 60501255 +
ggtccaaacctgtagtgctact

SEQ ID NO: 201371 - DNA, 22 bp, Artificial Sequence
  Synthetic oligonucleotide; TTG chr2 60501234 60501255 60501251 60501256 +
gtccaaacctgtagtgctactt

SEQ ID NO: 201372 - DNA, 22 bp, Artificial Sequence
  Synthetic oligonucleotide; CTG chr2 60501245 60501266 60501262 60501267 +
tagtgctacttgccagaacaaa

SEQ ID NO: 201373 - DNA, 22 bp, Artificial Sequence
  Synthetic oligonucleotide; CTA chr2 60501253 60501274 60501270 60501275 +
cttgccagaacaaaatggaatg

SEQ ID NO: 201374 - DNA, 22 bp, Artificial Sequence
  Synthetic oligonucleotide; CTT chr2 60501256 60501277 60501273 60501278 +
gccagaacaaaatggaatgagc

SEQ ID NO: 201375 - DNA, 22 bp, Artificial Sequence
  Synthetic oligonucleotide; TTG chr2 60501257 60501278 60501274 60501279 +
ccagaacaaaatggaatgagcc

SEQ ID NO: 201376 - DNA, 22 bp, Artificial Sequence
  Synthetic oligonucleotide; CTC chr2 60501281 60501302 60501298 60501303 +
attccctgccctcaaggagctc

SEQ ID NO: 201377 - DNA, 22 bp, Artificial Sequence
  Synthetic oligonucleotide; TTC chr2 60501285 60501306 60501302 60501307 +
cctgccctcaaggagctcacag

SEQ ID NO: 201378 - DNA, 22 bp, Artificial Sequence
  Synthetic oligonucleotide; CTG chr2 60501289 60501310 60501306 60501311 +
ccctcaaggagctcacagtcca

SEQ ID NO: 201379 - DNA, 22 bp, Artificial Sequence
  Synthetic oligonucleotide; CTC chr2 60501294 60501315 60501311 60501316 +
aaggagctcacagtccagtggc

SEQ ID NO: 201380 - DNA, 22 bp, Artificial Sequence
  Synthetic oligonucleotide; CTC chr2 60501303 60501324 60501320 60501325 +
acagtccagtggctctgtcttt

SEQ ID NO: 201381 - DNA, 22 bp, Artificial Sequence
  Synthetic oligonucleotide; CTC chr2 60501318 60501339 60501335 60501340 +
tgtctttaatatctataagagc

SEQ ID NO: 201382 - DNA, 22 bp, Artificial Sequence
  Synthetic oligonucleotide; CTG chr2 60501320 60501341 60501337 60501342 +
tctttaatatctataagagcac

SEQ ID NO: 201383 - DNA, 22 bp, Artificial Sequence
  Synthetic oligonucleotide; CTT chr2 60501324 60501345 60501341 60501346 +
taatatctataagagcacaggt

SEQ ID NO: 201384 - DNA, 22 bp, Artificial Sequence
  Synthetic oligonucleotide; TTT chr2 60501325 60501346 60501342 60501347 +
aatatctataagagcacaggta

SEQ ID NO: 201385 - DNA, 22 bp, Artificial Sequence
  Synthetic oligonucleotide; TTA chr2 60501326 60501347 60501343 60501348 +
atatctataagagcacaggtaa

SEQ ID NO: 201386 - DNA, 22 bp, Artificial Sequence
  Synthetic oligonucleotide; CTA chr2 60501333 60501354 60501350 60501355 +
taagagcacaggtaagtgtcac

SEQ ID NO: 201387 - DNA, 22 bp, Artificial Sequence
  Synthetic oligonucleotide; CTT chr2 60501372 60501393 60501389 60501394 +
tgggggaaatgaagaacactct

SEQ ID NO: 201388 - DNA, 22 bp, Artificial Sequence
  Synthetic oligonucleotide; TTT chr2 60501373 60501394 60501390 60501395 +
gggggaaatgaagaacactctt

SEQ ID NO: 201389 - DNA, 22 bp, Artificial Sequence
  Synthetic oligonucleotide; TTG chr2 60501374 60501395 60501391 60501396 +
ggggaaatgaagaacactcttg

SEQ ID NO: 201390 - DNA, 22 bp, Artificial Sequence
  Synthetic oligonucleotide; CTC chr2 60501393 60501414 60501410 60501415 +
ttgtaatatgattaatcacttc

SEQ ID NO: 201391 - DNA, 22 bp, Artificial Sequence
  Synthetic oligonucleotide; CTT chr2 60501395 60501416 60501412 60501417 +
gtaatatgattaatcacttcca

SEQ ID NO: 201392 - DNA, 22 bp, Artificial Sequence
  Synthetic oligonucleotide; TTG chr2 60501396 60501417 60501413 60501418 +
taatatgattaatcacttccaa

SEQ ID NO: 201393 - DNA, 22 bp, Artificial Sequence
  Synthetic oligonucleotide; TTA chr2 60501407 60501428 60501424 60501429 +
atcacttccaaatactttacct

SEQ ID NO: 201394 - DNA, 22 bp, Artificial Sequence
  Synthetic oligonucleotide; CTT chr2 60501414 60501435 60501431 60501436 +
ccaaatactttacctggtttgt

SEQ ID NO: 201395 - DNA, 22 bp, Artificial Sequence
  Synthetic oligonucleotide; TTC chr2 60501415 60501436 60501432 60501437 +
caaatactttacctggtttgta

SEQ ID NO: 201396 - DNA, 22 bp, Artificial Sequence
  Synthetic oligonucleotide; CTT chr2 60501424 60501445 60501441 60501446 +
tacctggtttgtaagttctctt

SEQ ID NO: 201397 - DNA, 22 bp, Artificial Sequence
  Synthetic oligonucleotide; TTT chr2 60501425 60501446 60501442 60501447 +
acctggtttgtaagttctcttt

SEQ ID NO: 201398 - DNA, 22 bp, Artificial Sequence
  Synthetic oligonucleotide; TTA chr2 60501426 60501447 60501443 60501448 +
cctggtttgtaagttctctttc

SEQ ID NO: 201399 - DNA, 22 bp, Artificial Sequence
  Synthetic oligonucleotide; CTG chr2 60501430 60501451 60501447 60501452 +
gtttgtaagttctctttcgggt

SEQ ID NO: 201400 - DNA, 22 bp, Artificial Sequence
  Synthetic oligonucleotide; TTT chr2 60501434 60501455 60501451 60501456 +
gtaagttctctttcgggtgctt

SEQ ID NO: 201401 - DNA, 22 bp, Artificial Sequence
  Synthetic oligonucleotide; TTG chr2 60501435 60501456 60501452 60501457 +
taagttctctttcgggtgcttc

SEQ ID NO: 201402 - DNA, 22 bp, Artificial Sequence
  Synthetic oligonucleotide; TTC chr2 60501442 60501463 60501459 60501464 +
tctttcgggtgcttccctgagt

SEQ ID NO: 201403 - DNA, 22 bp, Artificial Sequence
  Synthetic oligonucleotide; CTC chr2 60501444 60501465 60501461 60501466 +
tttcgggtgcttccctgagtgg

SEQ ID NO: 201404 - DNA, 22 bp, Artificial Sequence
  Synthetic oligonucleotide; CTT chr2 60501446 60501467 60501463 60501468 +
tcgggtgcttccctgagtggca

SEQ ID NO: 201405 - DNA, 22 bp, Artificial Sequence
  Synthetic oligonucleotide; TTT chr2 60501447 60501468 60501464 60501469 +
cgggtgcttccctgagtggcaa

SEQ ID NO: 201406 - DNA, 22 bp, Artificial Sequence
  Synthetic oligonucleotide; TTC chr2 60501448 60501469 60501465 60501470 +
gggtgcttccctgagtggcaag

SEQ ID NO: 201407 - DNA, 22 bp, Artificial Sequence
  Synthetic oligonucleotide; CTT chr2 60501456 60501477 60501473 60501478 +
ccctgagtggcaagagggaaag

SEQ ID NO: 201408 - DNA, 22 bp, Artificial Sequence
  Synthetic oligonucleotide; TTC chr2 60501457 60501478 60501474 60501479 +
cctgagtggcaagagggaaagg

SEQ ID NO: 201409 - DNA, 22 bp, Artificial Sequence
  Synthetic oligonucleotide; CTG chr2 60501461 60501482 60501478 60501483 +
agtggcaagagggaaaggcctt

SEQ ID NO: 201410 - DNA, 22 bp, Artificial Sequence
  Synthetic oligonucleotide; CTT chr2 60501483 60501504 60501500 60501505 +
ttgcaagtactgacaccgcttt

SEQ ID NO: 201411 - DNA, 22 bp, Artificial Sequence
  Synthetic oligonucleotide; TTT chr2 60501484 60501505 60501501 60501506 +
tgcaagtactgacaccgctttc

SEQ ID NO: 201412 - DNA, 22 bp, Artificial Sequence
  Synthetic oligonucleotide; TTT chr2 60501485 60501506 60501502 60501507 +
gcaagtactgacaccgctttct

SEQ ID NO: 201413 - DNA, 22 bp, Artificial Sequence
  Synthetic oligonucleotide; TTG chr2 60501486 60501507 60501503 60501508 +
caagtactgacaccgctttctt

SEQ ID NO: 201414 - DNA, 22 bp, Artificial Sequence
  Synthetic oligonucleotide; CTG chr2 60501495 60501516 60501512 60501517 +
acaccgctttcttttttttttt

SEQ ID NO: 201415 - DNA, 22 bp, Artificial Sequence
  Synthetic oligonucleotide; CTT chr2 60501504 60501525 60501521 60501526 +
tctttttttttttttttttttt

SEQ ID NO: 201416 - DNA, 22 bp, Artificial Sequence
  Synthetic oligonucleotide; TTT chr2 60501505 60501526 60501522 60501527 +
cttttttttttttttttttttt

SEQ ID NO: 201417 - DNA, 22 bp, Artificial Sequence
  Synthetic oligonucleotide; TTC chr2 60501506 60501527 60501523 60501528 +
tttttttttttttttttttttg

SEQ ID NO: 201418 - DNA, 22 bp, Artificial Sequence
  Synthetic oligonucleotide; CTT chr2 60501508 60501529 60501525 60501530 +
tttttttttttttttttttgag

SEQ ID NO: 201419 - DNA, 22 bp, Artificial Sequence
  Synthetic oligonucleotide; TTT chr2 60501509 60501530 60501526 60501531 +
ttttttttttttttttttgaga

SEQ ID NO: 201420 - DNA, 22 bp, Artificial Sequence
  Synthetic oligonucleotide; TTT chr2 60501510 60501531 60501527 60501532 +
tttttttttttttttttgagac

SEQ ID NO: 201421 - DNA, 22 bp, Artificial Sequence
  Synthetic oligonucleotide; TTT chr2 60501511 60501532 60501528 60501533 +
ttttttttttttttttgagaca

SEQ ID NO: 201422 - DNA, 22 bp, Artificial Sequence
  Synthetic oligonucleotide; TTT chr2 60501512 60501533 60501529 60501534 +
tttttttttttttttgagacag

SEQ ID NO: 201423 - DNA, 22 bp, Artificial Sequence
  Synthetic oligonucleotide; TTT chr2 60501513 60501534 60501530 60501535 +
ttttttttttttttgagacaga

SEQ ID NO: 201424 - DNA, 22 bp, Artificial Sequence
  Synthetic oligonucleotide; TTT chr2 60501514 60501535 60501531 60501536 +
tttttttttttttgagacagag

SEQ ID NO: 201425 - DNA, 22 bp, Artificial Sequence
  Synthetic oligonucleotide; TTT chr2 60501515 60501536 60501532 60501537 +
ttttttttttttgagacagagt

SEQ ID NO: 201426 - DNA, 22 bp, Artificial Sequence
  Synthetic oligonucleotide; TTT chr2 60501516 60501537 60501533 60501538 +
tttttttttttgagacagagtt

SEQ ID NO: 201427 - DNA, 22 bp, Artificial Sequence
  Synthetic oligonucleotide; TTT chr2 60501517 60501538 60501534 60501539 +
ttttttttttgagacagagttt

SEQ ID NO: 201428 - DNA, 22 bp, Artificial Sequence
  Synthetic oligonucleotide; TTT chr2 60501518 60501539 60501535 60501540 +
tttttttttgagacagagtttc

SEQ ID NO: 201429 - DNA, 22 bp, Artificial Sequence
  Synthetic oligonucleotide; TTT chr2 60501519 60501540 60501536 60501541 +
ttttttttgagacagagtttcg

SEQ ID NO: 201430 - DNA, 22 bp, Artificial Sequence
  Synthetic oligonucleotide; TTT chr2 60501520 60501541 60501537 60501542 +
tttttttgagacagagtttcgc

SEQ ID NO: 201431 - DNA, 22 bp, Artificial Sequence
  Synthetic oligonucleotide; TTT chr2 60501521 60501542 60501538 60501543 +
ttttttgagacagagtttcgct

SEQ ID NO: 201432 - DNA, 22 bp, Artificial Sequence
  Synthetic oligonucleotide; TTT chr2 60501522 60501543 60501539 60501544 +
tttttgagacagagtttcgctc

SEQ ID NO: 201433 - DNA, 22 bp, Artificial Sequence
  Synthetic oligonucleotide; TTT chr2 60501523 60501544 60501540 60501545 +
ttttgagacagagtttcgctct

SEQ ID NO: 201434 - DNA, 22 bp, Artificial Sequence
  Synthetic oligonucleotide; TTT chr2 60501524 60501545 60501541 60501546 +
tttgagacagagtttcgctctt

SEQ ID NO: 201435 - DNA, 22 bp, Artificial Sequence
  Synthetic oligonucleotide; TTT chr2 60501525 60501546 60501542 60501547 +
ttgagacagagtttcgctcttg

SEQ ID NO: 201436 - DNA, 22 bp, Artificial Sequence
  Synthetic oligonucleotide; TTT chr2 60501526 60501547 60501543 60501548 +
tgagacagagtttcgctcttgt

SEQ ID NO: 201437 - DNA, 22 bp, Artificial Sequence
  Synthetic oligonucleotide; TTT chr2 60501527 60501548 60501544 60501549 +
gagacagagtttcgctcttgtt

SEQ ID NO: 201438 - DNA, 22 bp, Artificial Sequence
  Synthetic oligonucleotide; TTG chr2 60501528 60501549 60501545 60501550 +
agacagagtttcgctcttgttg

SEQ ID NO: 201439 - DNA, 22 bp, Artificial Sequence
  Synthetic oligonucleotide; TTT chr2 60501539 60501560 60501556 60501561 +
cgctcttgttgcccaggctggg

SEQ ID NO: 201440 - DNA, 22 bp, Artificial Sequence
  Synthetic oligonucleotide; TTC chr2 60501540 60501561 60501557 60501562 +
gctcttgttgcccaggctgggg

SEQ ID NO: 201441 - DNA, 22 bp, Artificial Sequence
  Synthetic oligonucleotide; CTC chr2 60501544 60501565 60501561 60501566 +
ttgttgcccaggctggggtgca

SEQ ID NO: 201442 - DNA, 22 bp, Artificial Sequence
  Synthetic oligonucleotide; CTT chr2 60501546 60501567 60501563 60501568 +
gttgcccaggctggggtgcaat

SEQ ID NO: 201443 - DNA, 22 bp, Artificial Sequence
  Synthetic oligonucleotide; TTG chr2 60501547 60501568 60501564 60501569 +
ttgcccaggctggggtgcaatg

SEQ ID NO: 201444 - DNA, 22 bp, Artificial Sequence
  Synthetic oligonucleotide; TTG chr2 60501550 60501571 60501567 60501572 +
cccaggctggggtgcaatggtg

SEQ ID NO: 201445 - DNA, 22 bp, Artificial Sequence
  Synthetic oligonucleotide; CTG chr2 60501559 60501580 60501576 60501581 +
gggtgcaatggtgtgatctcgg

SEQ ID NO: 201446 - DNA, 22 bp, Artificial Sequence
  Synthetic oligonucleotide; CTC chr2 60501579 60501600 60501596 60501601 +
ggctcaccacctctgcctcctg

SEQ ID NO: 201447 - DNA, 22 bp, Artificial Sequence
  Synthetic oligonucleotide; CTC chr2 60501584 60501605 60501601 60501606 +
accacctctgcctcctgggttc

SEQ ID NO: 201448 - DNA, 22 bp, Artificial Sequence
  Synthetic oligonucleotide; CTC chr2 60501592 60501613 60501609 60501614 +
tgcctcctgggttcaagcaatt

SEQ ID NO: 201449 - DNA, 22 bp, Artificial Sequence
  Synthetic oligonucleotide; CTG chr2 60501594 60501615 60501611 60501616 +
cctcctgggttcaagcaattct

SEQ ID NO: 201450 - DNA, 22 bp, Artificial Sequence
  Synthetic oligonucleotide; CTC chr2 60501598 60501619 60501615 60501620 +
ctgggttcaagcaattctcctc

SEQ ID NO: 201451 - DNA, 22 bp, Artificial Sequence
  Synthetic oligonucleotide; CTG chr2 60501601 60501622 60501618 60501623 +
ggttcaagcaattctcctccct

SEQ ID NO: 201452 - DNA, 22 bp, Artificial Sequence
  Synthetic oligonucleotide; TTC chr2 60501606 60501627 60501623 60501628 +
aagcaattctcctccctcagcc

SEQ ID NO: 201453 - DNA, 22 bp, Artificial Sequence
  Synthetic oligonucleotide; TTC chr2 60501615 60501636 60501632 60501637 +
tcctccctcagcctcctgagta

SEQ ID NO: 201454 - DNA, 22 bp, Artificial Sequence
  Synthetic oligonucleotide; CTC chr2 60501617 60501638 60501634 60501639 +
ctccctcagcctcctgagtagc

SEQ ID NO: 201455 - DNA, 22 bp, Artificial Sequence
  Synthetic oligonucleotide; CTC chr2 60501620 60501641 60501637 60501642 +
cctcagcctcctgagtagctgg

SEQ ID NO: 201456 - DNA, 22 bp, Artificial Sequence
  Synthetic oligonucleotide; CTC chr2 60501624 60501645 60501641 60501646 +
agcctcctgagtagctgggatt

SEQ ID NO: 201457 - DNA, 22 bp, Artificial Sequence
  Synthetic oligonucleotide; CTC chr2 60501630 60501651 60501647 60501652 +
ctgagtagctgggattacaggc

SEQ ID NO: 201458 - DNA, 22 bp, Artificial Sequence
  Synthetic oligonucleotide; CTG chr2 60501633 60501654 60501650 60501655 +
agtagctgggattacaggcatg

SEQ ID NO: 201459 - DNA, 22 bp, Artificial Sequence
  Synthetic oligonucleotide; CTG chr2 60501641 60501662 60501658 60501663 +
ggattacaggcatgtgcgacca

SEQ ID NO: 201460 - DNA, 22 bp, Artificial Sequence
  Synthetic oligonucleotide; TTA chr2 60501647 60501668 60501664 60501669 +
caggcatgtgcgaccatgcctg

SEQ ID NO: 201461 - DNA, 22 bp, Artificial Sequence
  Synthetic oligonucleotide; CTG chr2 60501669 60501690 60501686 60501691 +
gctaagtttatatttttaatag

SEQ ID NO: 201462 - DNA, 22 bp, Artificial Sequence
  Synthetic oligonucleotide; CTA chr2 60501673 60501694 60501690 60501695 +
agtttatatttttaatagagat

SEQ ID NO: 201463 - DNA, 22 bp, Artificial Sequence
  Synthetic oligonucleotide; TTT chr2 60501678 60501699 60501695 60501700 +
atatttttaatagagatgaggt

SEQ ID NO: 201464 - DNA, 22 bp, Artificial Sequence
  Synthetic oligonucleotide; TTA chr2 60501679 60501700 60501696 60501701 +
tatttttaatagagatgaggtt

SEQ ID NO: 201465 - DNA, 22 bp, Artificial Sequence
  Synthetic oligonucleotide; TTT chr2 60501684 60501705 60501701 60501706 +
ttaatagagatgaggtttctcc

SEQ ID NO: 201466 - DNA, 22 bp, Artificial Sequence
  Synthetic oligonucleotide; TTT chr2 60501685 60501706 60501702 60501707 +
taatagagatgaggtttctcca

SEQ ID NO: 201467 - DNA, 22 bp, Artificial Sequence
  Synthetic oligonucleotide; TTT chr2 60501686 60501707 60501703 60501708 +
aatagagatgaggtttctccat

SEQ ID NO: 201468 - DNA, 22 bp, Artificial Sequence
  Synthetic oligonucleotide; TTA chr2 60501687 60501708 60501704 60501709 +
atagagatgaggtttctccatg

SEQ ID NO: 201469 - DNA, 22 bp, Artificial Sequence
  Synthetic oligonucleotide; TTT chr2 60501702 60501723 60501719 60501724 +
ctccatgttggtcaggctggtc

SEQ ID NO: 201470 - DNA, 22 bp, Artificial Sequence
  Synthetic oligonucleotide; TTC chr2 60501703 60501724 60501720 60501725 +
tccatgttggtcaggctggtct

SEQ ID NO: 201471 - DNA, 22 bp, Artificial Sequence
  Synthetic oligonucleotide; CTC chr2 60501705 60501726 60501722 60501727 +
catgttggtcaggctggtctca

SEQ ID NO: 201472 - DNA, 22 bp, Artificial Sequence
  Synthetic oligonucleotide; TTG chr2 60501712 60501733 60501729 60501734 +
gtcaggctggtctcaaactctt

SEQ ID NO: 201473 - DNA, 22 bp, Artificial Sequence
  Synthetic oligonucleotide; CTG chr2 60501721 60501742 60501738 60501743 +
gtctcaaactcttgacctcagg

SEQ ID NO: 201474 - DNA, 22 bp, Artificial Sequence
  Synthetic oligonucleotide; CTC chr2 60501726 60501747 60501743 60501748 +
aaactcttgacctcaggtgatc

SEQ ID NO: 201475 - DNA, 22 bp, Artificial Sequence
  Synthetic oligonucleotide; CTC chr2 60501732 60501753 60501749 60501754 +
ttgacctcaggtgatctaccca

SEQ ID NO: 201476 - DNA, 22 bp, Artificial Sequence
  Synthetic oligonucleotide; CTT chr2 60501734 60501755 60501751 60501756 +
gacctcaggtgatctacccacc

SEQ ID NO: 201477 - DNA, 22 bp, Artificial Sequence
  Synthetic oligonucleotide; TTG chr2 60501735 60501756 60501752 60501757 +
acctcaggtgatctacccacct

SEQ ID NO: 201478 - DNA, 22 bp, Artificial Sequence
  Synthetic oligonucleotide; CTC chr2 60501740 60501761 60501757 60501762 +
aggtgatctacccacctcggcc

SEQ ID NO: 201479 - DNA, 22 bp, Artificial Sequence
  Synthetic oligonucleotide; CTA chr2 60501750 60501771 60501767 60501772 +
cccacctcggcctcccaaagtg

SEQ ID NO: 201480 - DNA, 22 bp, Artificial Sequence
  Synthetic oligonucleotide; CTC chr2 60501758 60501779 60501775 60501780 +
ggcctcccaaagtgctggaatt

SEQ ID NO: 201481 - DNA, 22 bp, Artificial Sequence
  Synthetic oligonucleotide; CTC chr2 60501764 60501785 60501781 60501786 +
ccaaagtgctggaattacagac

SEQ ID NO: 201482 - DNA, 22 bp, Artificial Sequence
  Synthetic oligonucleotide; CTG chr2 60501775 60501796 60501792 60501797 +
gaattacagacgtgagccactg

SEQ ID NO: 201483 - DNA, 22 bp, Artificial Sequence
  Synthetic oligonucleotide; TTA chr2 60501781 60501802 60501798 60501803 +
cagacgtgagccactgcgccca

SEQ ID NO: 201484 - DNA, 22 bp, Artificial Sequence
  Synthetic oligonucleotide; CTG chr2 60501797 60501818 60501814 60501819 +
cgcccagccttacactgctttc

SEQ ID NO: 201485 - DNA, 22 bp, Artificial Sequence
  Synthetic oligonucleotide; CTT chr2 60501808 60501829 60501825 60501830 +
acactgctttcttaattacagc

SEQ ID NO: 201486 - DNA, 22 bp, Artificial Sequence
  Synthetic oligonucleotide; TTA chr2 60501809 60501830 60501826 60501831 +
cactgctttcttaattacagca

SEQ ID NO: 201487 - DNA, 22 bp, Artificial Sequence
  Synthetic oligonucleotide; CTG chr2 60501814 60501835 60501831 60501836 +
ctttcttaattacagcagtgtg

SEQ ID NO: 201488 - DNA, 22 bp, Artificial Sequence
  Synthetic oligonucleotide; CTT chr2 60501817 60501838 60501834 60501839 +
tcttaattacagcagtgtgctc

SEQ ID NO: 201489 - DNA, 22 bp, Artificial Sequence
  Synthetic oligonucleotide; TTT chr2 60501818 60501839 60501835 60501840 +
cttaattacagcagtgtgctca

SEQ ID NO: 201490 - DNA, 22 bp, Artificial Sequence
  Synthetic oligonucleotide; TTC chr2 60501819 60501840 60501836 60501841 +
ttaattacagcagtgtgctcat

SEQ ID NO: 201491 - DNA, 22 bp, Artificial Sequence
  Synthetic oligonucleotide; CTT chr2 60501821 60501842 60501838 60501843 +
aattacagcagtgtgctcatct

SEQ ID NO: 201492 - DNA, 22 bp, Artificial Sequence
  Synthetic oligonucleotide; TTA chr2 60501822 60501843 60501839 60501844 +
attacagcagtgtgctcatctc

SEQ ID NO: 201493 - DNA, 22 bp, Artificial Sequence
  Synthetic oligonucleotide; TTA chr2 60501826 60501847 60501843 60501848 +
cagcagtgtgctcatctcacat

SEQ ID NO: 201494 - DNA, 22 bp, Artificial Sequence
  Synthetic oligonucleotide; CTC chr2 60501839 60501860 60501856 60501861 +
atctcacataaaaatttaagac

SEQ ID NO: 201495 - DNA, 22 bp, Artificial Sequence
  Synthetic oligonucleotide; CTC chr2 60501844 60501865 60501861 60501866 +
acataaaaatttaagacgggaa

SEQ ID NO: 201496 - DNA, 22 bp, Artificial Sequence
  Synthetic oligonucleotide; TTT chr2 60501856 60501877 60501873 60501878 +
aagacgggaaaacaggaagatg

SEQ ID NO: 201497 - DNA, 22 bp, Artificial Sequence
  Synthetic oligonucleotide; TTA chr2 60501857 60501878 60501874 60501879 +
agacgggaaaacaggaagatgc

SEQ ID NO: 201498 - DNA, 22 bp, Artificial Sequence
  Synthetic oligonucleotide; TTC chr2 60501883 60501904 60501900 60501905 +
tgagaagttatatcagcccctc

SEQ ID NO: 201499 - DNA, 22 bp, Artificial Sequence
  Synthetic oligonucleotide; CTG chr2 60501885 60501906 60501902 60501907 +
agaagttatatcagcccctctg

SEQ ID NO: 201500 - DNA, 22 bp, Artificial Sequence
  Synthetic oligonucleotide; TTA chr2 60501893 60501914 60501910 60501915 +
tatcagcccctctgcctctcta

SEQ ID NO: 201501 - DNA, 22 bp, Artificial Sequence
  Synthetic oligonucleotide; CTC chr2 60501905 60501926 60501922 60501927 +
tgcctctctacattccaaaaca

SEQ ID NO: 201502 - DNA, 22 bp, Artificial Sequence
  Synthetic oligonucleotide; CTG chr2 60501907 60501928 60501924 60501929 +
cctctctacattccaaaacagc

SEQ ID NO: 201503 - DNA, 22 bp, Artificial Sequence
  Synthetic oligonucleotide; CTC chr2 60501911 60501932 60501928 60501933 +
tctacattccaaaacagccttt

SEQ ID NO: 201504 - DNA, 22 bp, Artificial Sequence
  Synthetic oligonucleotide; CTC chr2 60501913 60501934 60501930 60501935 +
tacattccaaaacagcctttta

SEQ ID NO: 201505 - DNA, 22 bp, Artificial Sequence
  Synthetic oligonucleotide; CTA chr2 60501915 60501936 60501932 60501937 +
cattccaaaacagccttttatt

SEQ ID NO: 201506 - DNA, 22 bp, Artificial Sequence
  Synthetic oligonucleotide; TTC chr2 60501920 60501941 60501937 60501942 +
caaaacagccttttattctaat

SEQ ID NO: 201507 - DNA, 22 bp, Artificial Sequence
  Synthetic oligonucleotide; CTT chr2 60501932 60501953 60501949 60501954 +
ttattctaattattttactagt

SEQ ID NO: 201508 - DNA, 22 bp, Artificial Sequence
  Synthetic oligonucleotide; TTT chr2 60501933 60501954 60501950 60501955 +
tattctaattattttactagtg

SEQ ID NO: 201509 - DNA, 22 bp, Artificial Sequence
  Synthetic oligonucleotide; TTT chr2 60501934 60501955 60501951 60501956 +
attctaattattttactagtga

SEQ ID NO: 201510 - DNA, 22 bp, Artificial Sequence
  Synthetic oligonucleotide; TTA chr2 60501935 60501956 60501952 60501957 +
ttctaattattttactagtgaa

SEQ ID NO: 201511 - DNA, 22 bp, Artificial Sequence
  Synthetic oligonucleotide; TTC chr2 60501938 60501959 60501955 60501960 +
taattattttactagtgaatta

SEQ ID NO: 201512 - DNA, 22 bp, Artificial Sequence
  Synthetic oligonucleotide; CTA chr2 60501940 60501961 60501957 60501962 +
attattttactagtgaattatg

SEQ ID NO: 201513 - DNA, 22 bp, Artificial Sequence
  Synthetic oligonucleotide; TTA chr2 60501944 60501965 60501961 60501966 +
ttttactagtgaattatggaat

SEQ ID NO: 201514 - DNA, 22 bp, Artificial Sequence
  Synthetic oligonucleotide; TTT chr2 60501947 60501968 60501964 60501969 +
tactagtgaattatggaataaa

SEQ ID NO: 201515 - DNA, 22 bp, Artificial Sequence
  Synthetic oligonucleotide; TTT chr2 60501948 60501969 60501965 60501970 +
actagtgaattatggaataaag

SEQ ID NO: 201516 - DNA, 22 bp, Artificial Sequence
  Synthetic oligonucleotide; TTA chr2 60501949 60501970 60501966 60501971 +
ctagtgaattatggaataaagt

SEQ ID NO: 201517 - DNA, 22 bp, Artificial Sequence
  Synthetic oligonucleotide; CTA chr2 60501952 60501973 60501969 60501974 +
gtgaattatggaataaagtagt

SEQ ID NO: 201518 - DNA, 22 bp, Artificial Sequence
  Synthetic oligonucleotide; TTA chr2 60501960 60501981 60501977 60501982 +
tggaataaagtagtattatgtt

SEQ ID NO: 201519 - DNA, 22 bp, Artificial Sequence
  Synthetic oligonucleotide; TTA chr2 60501978 60501999 60501995 60502000 +
tgtttctttctacacaacttgt

SEQ ID NO: 201520 - DNA, 22 bp, Artificial Sequence
  Synthetic oligonucleotide; TTT chr2 60501983 60502004 60502000 60502005 +
ctttctacacaacttgtgttgc

SEQ ID NO: 201521 - DNA, 22 bp, Artificial Sequence
  Synthetic oligonucleotide; TTC chr2 60501984 60502005 60502001 60502006 +
tttctacacaacttgtgttgca

SEQ ID NO: 201522 - DNA, 22 bp, Artificial Sequence
  Synthetic oligonucleotide; CTT chr2 60501986 60502007 60502003 60502008 +
tctacacaacttgtgttgcact

SEQ ID NO: 201523 - DNA, 22 bp, Artificial Sequence
  Synthetic oligonucleotide; TTT chr2 60501987 60502008 60502004 60502009 +
ctacacaacttgtgttgcacta

SEQ ID NO: 201524 - DNA, 22 bp, Artificial Sequence
  Synthetic oligonucleotide; TTC chr2 60501988 60502009 60502005 60502010 +
tacacaacttgtgttgcactag

SEQ ID NO: 201525 - DNA, 22 bp, Artificial Sequence
  Synthetic oligonucleotide; CTA chr2 60501990 60502011 60502007 60502012 +
cacaacttgtgttgcactaggt

SEQ ID NO: 201526 - DNA, 22 bp, Artificial Sequence
  Synthetic oligonucleotide; CTT chr2 60501998 60502019 60502015 60502020 +
gtgttgcactaggtgaaatctc

SEQ ID NO: 201527 - DNA, 22 bp, Artificial Sequence
  Synthetic oligonucleotide; TTG chr2 60501999 60502020 60502016 60502021 +
tgttgcactaggtgaaatctca

SEQ ID NO: 201528 - DNA, 22 bp, Artificial Sequence
  Synthetic oligonucleotide; TTG chr2 60502004 60502025 60502021 60502026 +
cactaggtgaaatctcaggcta

SEQ ID NO: 201529 - DNA, 22 bp, Artificial Sequence
  Synthetic oligonucleotide; CTA chr2 60502009 60502030 60502026 60502031 +
ggtgaaatctcaggctaacaga

SEQ ID NO: 201530 - DNA, 22 bp, Artificial Sequence
  Synthetic oligonucleotide; CTC chr2 60502020 60502041 60502037 60502042 +
aggctaacagagcttcagggag

SEQ ID NO: 201531 - DNA, 22 bp, Artificial Sequence
  Synthetic oligonucleotide; CTA chr2 60502026 60502047 60502043 60502048 +
acagagcttcagggaggaaagg

SEQ ID NO: 201532 - DNA, 22 bp, Artificial Sequence
  Synthetic oligonucleotide; CTT chr2 60502035 60502056 60502052 60502057 +
cagggaggaaaggccagaccaa

SEQ ID NO: 201533 - DNA, 22 bp, Artificial Sequence
  Synthetic oligonucleotide; TTC chr2 60502036 60502057 60502053 60502058 +
agggaggaaaggccagaccaaa

SEQ ID NO: 201534 - DNA, 22 bp, Artificial Sequence
  Synthetic oligonucleotide; CTC chr2 60502068 60502089 60502085 60502090 +
actccacagagaagctgtacca

SEQ ID NO: 201535 - DNA, 22 bp, Artificial Sequence
  Synthetic oligonucleotide; CTC chr2 60502072 60502093 60502089 60502094 +
cacagagaagctgtaccaccag

SEQ ID NO: 201536 - DNA, 22 bp, Artificial Sequence
  Synthetic oligonucleotide; CTG chr2 60502085 60502106 60502102 60502107 +
taccaccagaagtcctggaaaa

SEQ ID NO: 201537 - DNA, 22 bp, Artificial Sequence
  Synthetic oligonucleotide; CTG chr2 60502102 60502123 60502119 60502124 +
gaaaactgagaggtttgcatgt

SEQ ID NO: 201538 - DNA, 22 bp, Artificial Sequence
  Synthetic oligonucleotide; CTG chr2 60502110 60502131 60502127 60502132 +
agaggtttgcatgttgtaacaa

SEQ ID NO: 201539 - DNA, 22 bp, Artificial Sequence
  Synthetic oligonucleotide; TTT chr2 60502118 60502139 60502135 60502140 +
gcatgttgtaacaatgcaactc

SEQ ID NO: 201540 - DNA, 22 bp, Artificial Sequence
  Synthetic oligonucleotide; TTG chr2 60502119 60502140 60502136 60502141 +
catgttgtaacaatgcaactca

SEQ ID NO: 201541 - DNA, 22 bp, Artificial Sequence
  Synthetic oligonucleotide; TTG chr2 60502126 60502147 60502143 60502148 +
taacaatgcaactcaagactat

SEQ ID NO: 201542 - DNA, 22 bp, Artificial Sequence
  Synthetic oligonucleotide; CTC chr2 60502140 60502161 60502157 60502162 +
aagactatcagaatgatatgaa

SEQ ID NO: 201543 - DNA, 22 bp, Artificial Sequence
  Synthetic oligonucleotide; CTA chr2 60502147 60502168 60502164 60502169 +
tcagaatgatatgaatatttgt

SEQ ID NO: 201544 - DNA, 22 bp, Artificial Sequence
  Synthetic oligonucleotide; TTT chr2 60502167 60502188 60502184 60502189 +
gtatagatacttatcaaagcaa

SEQ ID NO: 201545 - DNA, 22 bp, Artificial Sequence
  Synthetic oligonucleotide; TTG chr2 60502168 60502189 60502185 60502190 +
tatagatacttatcaaagcaac

SEQ ID NO: 201546 - DNA, 22 bp, Artificial Sequence
  Synthetic oligonucleotide; CTT chr2 60502179 60502200 60502196 60502201 +
atcaaagcaacaatcagagatc

SEQ ID NO: 201547 - DNA, 22 bp, Artificial Sequence
  Synthetic oligonucleotide; TTA chr2 60502180 60502201 60502197 60502202 +
tcaaagcaacaatcagagatca

SEQ ID NO: 201548 - DNA, 22 bp, Artificial Sequence
  Synthetic oligonucleotide; CTC chr2 60502210 60502231 60502227 60502232 +
caaatgagcttacagtttatga

SEQ ID NO: 201549 - DNA, 22 bp, Artificial Sequence
  Synthetic oligonucleotide; CTT chr2 60502221 60502242 60502238 60502243 +
acagtttatgatcctgctttgt

SEQ ID NO: 201550 - DNA, 22 bp, Artificial Sequence
  Synthetic oligonucleotide; TTA chr2 60502222 60502243 60502239 60502244 +
cagtttatgatcctgctttgta

SEQ ID NO: 201551 - DNA, 22 bp, Artificial Sequence
  Synthetic oligonucleotide; TTT chr2 60502228 60502249 60502245 60502250 +
atgatcctgctttgtaaaagct

SEQ ID NO: 201552 - DNA, 22 bp, Artificial Sequence
  Synthetic oligonucleotide; TTA chr2 60502229 60502250 60502246 60502251 +
tgatcctgctttgtaaaagctg

SEQ ID NO: 201553 - DNA, 22 bp, Artificial Sequence
  Synthetic oligonucleotide; CTG chr2 60502237 60502258 60502254 60502259 +
ctttgtaaaagctggtgaaaca

SEQ ID NO: 201554 - DNA, 22 bp, Artificial Sequence
  Synthetic oligonucleotide; CTT chr2 60502240 60502261 60502257 60502262 +
tgtaaaagctggtgaaacaaaa

SEQ ID NO: 201555 - DNA, 22 bp, Artificial Sequence
  Synthetic oligonucleotide; TTT chr2 60502241 60502262 60502258 60502263 +
gtaaaagctggtgaaacaaaat

SEQ ID NO: 201556 - DNA, 22 bp, Artificial Sequence
  Synthetic oligonucleotide; TTG chr2 60502242 60502263 60502259 60502264 +
taaaagctggtgaaacaaaatg

SEQ ID NO: 201557 - DNA, 22 bp, Artificial Sequence
  Synthetic oligonucleotide; CTG chr2 60502251 60502272 60502268 60502273 +
gtgaaacaaaatgatggatagc

SEQ ID NO: 201558 - DNA, 22 bp, Artificial Sequence
  Synthetic oligonucleotide; TTT chr2 60502279 60502300 60502296 60502301 +
gctgagctccaaagtcagggag

SEQ ID NO: 201559 - DNA, 22 bp, Artificial Sequence
  Synthetic oligonucleotide; TTG chr2 60502280 60502301 60502297 60502302 +
ctgagctccaaagtcagggagt

SEQ ID NO: 201560 - DNA, 22 bp, Artificial Sequence
  Synthetic oligonucleotide; CTG chr2 60502283 60502304 60502300 60502305 +
agctccaaagtcagggagtagg

SEQ ID NO: 201561 - DNA, 22 bp, Artificial Sequence
  Synthetic oligonucleotide; CTC chr2 60502288 60502309 60502305 60502310 +
caaagtcagggagtaggtaaac

SEQ ID NO: 201562 - DNA, 22 bp, Artificial Sequence
  Synthetic oligonucleotide; CTC chr2 60502329 60502350 60502346 60502351 +
cctcctggctctcctctacatt

SEQ ID NO: 201563 - DNA, 22 bp, Artificial Sequence
  Synthetic oligonucleotide; CTC chr2 60502333 60502354 60502350 60502355 +
ctggctctcctctacattctgt

SEQ ID NO: 201564 - DNA, 22 bp, Artificial Sequence
  Synthetic oligonucleotide; CTG chr2 60502336 60502357 60502353 60502358 +
gctctcctctacattctgtgag

SEQ ID NO: 201565 - DNA, 22 bp, Artificial Sequence
  Synthetic oligonucleotide; CTC chr2 60502340 60502361 60502357 60502362 +
tcctctacattctgtgagcaaa

SEQ ID NO: 201566 - DNA, 22 bp, Artificial Sequence
  Synthetic oligonucleotide; CTC chr2 60502342 60502363 60502359 60502364 +
ctctacattctgtgagcaaacg

SEQ ID NO: 201567 - DNA, 22 bp, Artificial Sequence
  Synthetic oligonucleotide; CTC chr2 60502345 60502366 60502362 60502367 +
tacattctgtgagcaaacggaa

SEQ ID NO: 201568 - DNA, 22 bp, Artificial Sequence
  Synthetic oligonucleotide; CTA chr2 60502347 60502368 60502364 60502369 +
cattctgtgagcaaacggaaaa

SEQ ID NO: 201569 - DNA, 22 bp, Artificial Sequence
  Synthetic oligonucleotide; TTC chr2 60502352 60502373 60502369 60502374 +
tgtgagcaaacggaaaaataaa

SEQ ID NO: 201570 - DNA, 22 bp, Artificial Sequence
  Synthetic oligonucleotide; CTG chr2 60502354 60502375 60502371 60502376 +
tgagcaaacggaaaaataaacc

SEQ ID NO: 201571 - DNA, 22 bp, Artificial Sequence
  Synthetic oligonucleotide; CTC chr2 60502391 60502412 60502408 60502413 +
agcctaataaaactgcacagac

SEQ ID NO: 201572 - DNA, 22 bp, Artificial Sequence
  Synthetic oligonucleotide; CTA chr2 60502397 60502418 60502414 60502419 +
ataaaactgcacagacagaata

SEQ ID NO: 201573 - DNA, 22 bp, Artificial Sequence
  Synthetic oligonucleotide; CTG chr2 60502406 60502427 60502423 60502428 +
cacagacagaataacttcttca

SEQ ID NO: 201574 - DNA, 22 bp, Artificial Sequence
  Synthetic oligonucleotide; CTT chr2 60502423 60502444 60502440 60502445 +
cttcatcagattcagaagagta

SEQ ID NO: 201575 - DNA, 22 bp, Artificial Sequence
  Synthetic oligonucleotide; TTC chr2 60502424 60502445 60502441 60502446 +
ttcatcagattcagaagagtag

SEQ ID NO: 201576 - DNA, 22 bp, Artificial Sequence
  Synthetic oligonucleotide; CTT chr2 60502426 60502447 60502443 60502448 +
catcagattcagaagagtagca

SEQ ID NO: 201577 - DNA, 22 bp, Artificial Sequence
  Synthetic oligonucleotide; TTC chr2 60502427 60502448 60502444 60502449 +
atcagattcagaagagtagcag

SEQ ID NO: 201578 - DNA, 22 bp, Artificial Sequence
  Synthetic oligonucleotide; TTC chr2 60502436 60502457 60502453 60502458 +
agaagagtagcagggggtttct

SEQ ID NO: 201579 - DNA, 22 bp, Artificial Sequence
  Synthetic oligonucleotide; TTT chr2 60502456 60502477 60502473 60502478 +
ctcgctagcacagatttgagct

SEQ ID NO: 201580 - DNA, 22 bp, Artificial Sequence
  Synthetic oligonucleotide; TTC chr2 60502457 60502478 60502474 60502479 +
tcgctagcacagatttgagctc

SEQ ID NO: 201581 - DNA, 22 bp, Artificial Sequence
  Synthetic oligonucleotide; CTC chr2 60502459 60502480 60502476 60502481 +
gctagcacagatttgagctctg

SEQ ID NO: 201582 - DNA, 22 bp, Artificial Sequence
  Synthetic oligonucleotide; CTA chr2 60502463 60502484 60502480 60502485 +
gcacagatttgagctctgccat

SEQ ID NO: 201583 - DNA, 22 bp, Artificial Sequence
  Synthetic oligonucleotide; TTT chr2 60502473 60502494 60502490 60502495 +
gagctctgccatcacacacttt

SEQ ID NO: 201584 - DNA, 22 bp, Artificial Sequence
  Synthetic oligonucleotide; TTG chr2 60502474 60502495 60502491 60502496 +
agctctgccatcacacactttg

SEQ ID NO: 201585 - DNA, 22 bp, Artificial Sequence
  Synthetic oligonucleotide; CTC chr2 60502479 60502500 60502496 60502501 +
tgccatcacacactttgtacat

SEQ ID NO: 201586 - DNA, 22 bp, Artificial Sequence
  Synthetic oligonucleotide; CTG chr2 60502481 60502502 60502498 60502503 +
ccatcacacactttgtacatac

SEQ ID NO: 201587 - DNA, 22 bp, Artificial Sequence
  Synthetic oligonucleotide; CTT chr2 60502494 60502515 60502511 60502516 +
tgtacatacaattctgggatct

SEQ ID NO: 201588 - DNA, 22 bp, Artificial Sequence
  Synthetic oligonucleotide; TTT chr2 60502495 60502516 60502512 60502517 +
gtacatacaattctgggatctc

SEQ ID NO: 201589 - DNA, 22 bp, Artificial Sequence
  Synthetic oligonucleotide; TTG chr2 60502496 60502517 60502513 60502518 +
tacatacaattctgggatctca

SEQ ID NO: 201590 - DNA, 22 bp, Artificial Sequence
  Synthetic oligonucleotide; TTC chr2 60502508 60502529 60502525 60502530 +
tgggatctcaggtattgctcct

SEQ ID NO: 201591 - DNA, 22 bp, Artificial Sequence
  Synthetic oligonucleotide; CTG chr2 60502510 60502531 60502527 60502532 +
ggatctcaggtattgctcctaa

SEQ ID NO: 201592 - DNA, 22 bp, Artificial Sequence
  Synthetic oligonucleotide; CTC chr2 60502517 60502538 60502534 60502539 +
aggtattgctcctaaagaaaga

SEQ ID NO: 201593 - DNA, 22 bp, Artificial Sequence
  Synthetic oligonucleotide; TTG chr2 60502525 60502546 60502542 60502547 +
ctcctaaagaaagagccagctt

SEQ ID NO: 201594 - DNA, 22 bp, Artificial Sequence
  Synthetic oligonucleotide; CTC chr2 60502528 60502549 60502545 60502550 +
ctaaagaaagagccagcttcct

SEQ ID NO: 201595 - DNA, 22 bp, Artificial Sequence
  Synthetic oligonucleotide; CTA chr2 60502531 60502552 60502548 60502553 +
aagaaagagccagcttccttct

SEQ ID NO: 201596 - DNA, 22 bp, Artificial Sequence
  Synthetic oligonucleotide; CTT chr2 60502547 60502568 60502564 60502569 +
ccttctcttatcttcctccaac

SEQ ID NO: 201597 - DNA, 22 bp, Artificial Sequence
  Synthetic oligonucleotide; TTC chr2 60502548 60502569 60502565 60502570 +
cttctcttatcttcctccaaca

SEQ ID NO: 201598 - DNA, 22 bp, Artificial Sequence
  Synthetic oligonucleotide; CTT chr2 60502551 60502572 60502568 60502573 +
ctcttatcttcctccaacatcc

SEQ ID NO: 201599 - DNA, 22 bp, Artificial Sequence
  Synthetic oligonucleotide; TTC chr2 60502552 60502573 60502569 60502574 +
tcttatcttcctccaacatcca

SEQ ID NO: 201600 - DNA, 22 bp, Artificial Sequence
  Synthetic oligonucleotide; CTC chr2 60502554 60502575 60502571 60502576 +
ttatcttcctccaacatccaaa

SEQ ID NO: 201601 - DNA, 22 bp, Artificial Sequence
  Synthetic oligonucleotide; CTT chr2 60502556 60502577 60502573 60502578 +
atcttcctccaacatccaaaag

SEQ ID NO: 201602 - DNA, 22 bp, Artificial Sequence
  Synthetic oligonucleotide; TTA chr2 60502557 60502578 60502574 60502579 +
tcttcctccaacatccaaaagc

SEQ ID NO: 201603 - DNA, 22 bp, Artificial Sequence
  Synthetic oligonucleotide; CTT chr2 60502561 60502582 60502578 60502583 +
cctccaacatccaaaagcagtg

SEQ ID NO: 201604 - DNA, 22 bp, Artificial Sequence
  Synthetic oligonucleotide; TTC chr2 60502562 60502583 60502579 60502584 +
ctccaacatccaaaagcagtgt

SEQ ID NO: 201605 - DNA, 22 bp, Artificial Sequence
  Synthetic oligonucleotide; CTC chr2 60502565 60502586 60502582 60502587 +
caacatccaaaagcagtgttca

SEQ ID NO: 201606 - DNA, 22 bp, Artificial Sequence
  Synthetic oligonucleotide; TTC chr2 60502586 60502607 60502603 60502608 +
acacccaatcccatgctttcta

SEQ ID NO: 201607 - DNA, 22 bp, Artificial Sequence
  Synthetic oligonucleotide; CTT chr2 60502604 60502625 60502621 60502626 +
tctaatattaaaatatgaattt

SEQ ID NO: 201608 - DNA, 22 bp, Artificial Sequence
  Synthetic oligonucleotide; TTT chr2 60502605 60502626 60502622 60502627 +
ctaatattaaaatatgaattta

SEQ ID NO: 201609 - DNA, 22 bp, Artificial Sequence
  Synthetic oligonucleotide; TTC chr2 60502606 60502627 60502623 60502628 +
taatattaaaatatgaatttaa

SEQ ID NO: 201610 - DNA, 22 bp, Artificial Sequence
  Synthetic oligonucleotide; CTA chr2 60502608 60502629 60502625 60502630 +
atattaaaatatgaatttaaga

SEQ ID NO: 201611 - DNA, 22 bp, Artificial Sequence
  Synthetic oligonucleotide; TTA chr2 60502614 60502635 60502631 60502636 +
aaatatgaatttaagaaatacc

SEQ ID NO: 201612 - DNA, 22 bp, Artificial Sequence
  Synthetic oligonucleotide; TTT chr2 60502626 60502647 60502643 60502648 +
aagaaataccagtgaaaagaga

SEQ ID NO: 201613 - DNA, 22 bp, Artificial Sequence
  Synthetic oligonucleotide; TTA chr2 60502627 60502648 60502644 60502649 +
agaaataccagtgaaaagagat

SEQ ID NO: 201614 - DNA, 22 bp, Artificial Sequence
  Synthetic oligonucleotide; TTT chr2 60502651 60502672 60502668 60502673 +
tttaaaccagaaactctttgtg

SEQ ID NO: 201615 - DNA, 22 bp, Artificial Sequence
  Synthetic oligonucleotide; TTT chr2 60502652 60502673 60502669 60502674 +
ttaaaccagaaactctttgtgt

SEQ ID NO: 201616 - DNA, 22 bp, Artificial Sequence
  Synthetic oligonucleotide; TTT chr2 60502653 60502674 60502670 60502675 +
taaaccagaaactctttgtgtt

SEQ ID NO: 201617 - DNA, 22 bp, Artificial Sequence
  Synthetic oligonucleotide; TTT chr2 60502654 60502675 60502671 60502676 +
aaaccagaaactctttgtgttg

SEQ ID NO: 201618 - DNA, 22 bp, Artificial Sequence
  Synthetic oligonucleotide; TTA chr2 60502655 60502676 60502672 60502677 +
aaccagaaactctttgtgttgt

SEQ ID NO: 201619 - DNA, 22 bp, Artificial Sequence
  Synthetic oligonucleotide; CTC chr2 60502667 60502688 60502684 60502689 +
tttgtgttgtaatgttcttgat

SEQ ID NO: 201620 - DNA, 22 bp, Artificial Sequence
  Synthetic oligonucleotide; CTT chr2 60502669 60502690 60502686 60502691 +
tgtgttgtaatgttcttgatat

SEQ ID NO: 201621 - DNA, 22 bp, Artificial Sequence
  Synthetic oligonucleotide; TTT chr2 60502670 60502691 60502687 60502692 +
gtgttgtaatgttcttgatatg

SEQ ID NO: 201622 - DNA, 22 bp, Artificial Sequence
  Synthetic oligonucleotide; TTG chr2 60502671 60502692 60502688 60502693 +
tgttgtaatgttcttgatatgt

SEQ ID NO: 201623 - DNA, 22 bp, Artificial Sequence
  Synthetic oligonucleotide; TTG chr2 60502676 60502697 60502693 60502698 +
taatgttcttgatatgttaata

SEQ ID NO: 201624 - DNA, 22 bp, Artificial Sequence
  Synthetic oligonucleotide; TTC chr2 60502684 60502705 60502701 60502706 +
ttgatatgttaataaaactgtt

SEQ ID NO: 201625 - DNA, 22 bp, Artificial Sequence
  Synthetic oligonucleotide; CTT chr2 60502686 60502707 60502703 60502708 +
gatatgttaataaaactgtttt

SEQ ID NO: 201626 - DNA, 22 bp, Artificial Sequence
  Synthetic oligonucleotide; TTG chr2 60502687 60502708 60502704 60502709 +
atatgttaataaaactgttttc

SEQ ID NO: 201627 - DNA, 22 bp, Artificial Sequence
  Synthetic oligonucleotide; TTA chr2 60502695 60502716 60502712 60502717 +
ataaaactgttttcaatcatca

SEQ ID NO: 201628 - DNA, 22 bp, Artificial Sequence
  Synthetic oligonucleotide; CTG chr2 60502704 60502725 60502721 60502726 +
ttttcaatcatcatcagagaaa

SEQ ID NO: 201629 - DNA, 22 bp, Artificial Sequence
  Synthetic oligonucleotide; TTT chr2 60502707 60502728 60502724 60502729 +
tcaatcatcatcagagaaaaac

SEQ ID NO: 201630 - DNA, 22 bp, Artificial Sequence
  Synthetic oligonucleotide; TTT chr2 60502708 60502729 60502725 60502730 +
caatcatcatcagagaaaaaca

SEQ ID NO: 201631 - DNA, 22 bp, Artificial Sequence
  Synthetic oligonucleotide; TTC chr2 60502709 60502730 60502726 60502731 +
aatcatcatcagagaaaaacaa

SEQ ID NO: 201632 - DNA, 22 bp, Artificial Sequence
  Synthetic oligonucleotide; TTT chr2 60502735 60502756 60502752 60502757 +
acctctgatcatggtagcacag

SEQ ID NO: 201633 - DNA, 22 bp, Artificial Sequence
  Synthetic oligonucleotide; TTA chr2 60502736 60502757 60502753 60502758 +
cctctgatcatggtagcacagt

SEQ ID NO: 201634 - DNA, 22 bp, Artificial Sequence
  Synthetic oligonucleotide; CTC chr2 60502740 60502761 60502757 60502762 +
tgatcatggtagcacagtagag

SEQ ID NO: 201635 - DNA, 22 bp, Artificial Sequence
  Synthetic oligonucleotide; CTG chr2 60502742 60502763 60502759 60502764 +
atcatggtagcacagtagagca

SEQ ID NO: 201636 - DNA, 22 bp, Artificial Sequence
  Synthetic oligonucleotide; CTC chr2 60502776 60502797 60502793 60502798 +
aattggtgatcaaaagaaataa

SEQ ID NO: 201637 - DNA, 22 bp, Artificial Sequence
  Synthetic oligonucleotide; TTG chr2 60502781 60502802 60502798 60502803 +
gtgatcaaaagaaataaattct

SEQ ID NO: 201638 - DNA, 22 bp, Artificial Sequence
  Synthetic oligonucleotide; TTC chr2 60502802 60502823 60502819 60502824 +
tagtcctgtcacccagaaacta

SEQ ID NO: 201639 - DNA, 22 bp, Artificial Sequence
  Synthetic oligonucleotide; CTA chr2 60502804 60502825 60502821 60502826 +
gtcctgtcacccagaaactatg

SEQ ID NO: 201640 - DNA, 22 bp, Artificial Sequence
  Synthetic oligonucleotide; CTG chr2 60502810 60502831 60502827 60502832 +
tcacccagaaactatgtgacca

SEQ ID NO: 201641 - DNA, 22 bp, Artificial Sequence
  Synthetic oligonucleotide; CTA chr2 60502824 60502845 60502841 60502846 +
tgtgaccaggggaggtacttaa

SEQ ID NO: 201642 - DNA, 22 bp, Artificial Sequence
  Synthetic oligonucleotide; CTT chr2 60502844 60502865 60502861 60502866 +
aatctctaagagaatcaagtct

SEQ ID NO: 201643 - DNA, 22 bp, Artificial Sequence
  Synthetic oligonucleotide; TTA chr2 60502845 60502866 60502862 60502867 +
atctctaagagaatcaagtctc

SEQ ID NO: 201644 - DNA, 22 bp, Artificial Sequence
  Synthetic oligonucleotide; CTC chr2 60502850 60502871 60502867 60502872 +
taagagaatcaagtctcgagtg

SEQ ID NO: 201645 - DNA, 22 bp, Artificial Sequence
  Synthetic oligonucleotide; CTA chr2 60502852 60502873 60502869 60502874 +
agagaatcaagtctcgagtggg

SEQ ID NO: 201646 - DNA, 22 bp, Artificial Sequence
  Synthetic oligonucleotide; CTC chr2 60502867 60502888 60502884 60502889 +
gagtgggtaaaatgagctgggg

SEQ ID NO: 201647 - DNA, 22 bp, Artificial Sequence
  Synthetic oligonucleotide; CTG chr2 60502886 60502907 60502903 60502908 +
gggaaggagtgaaccagtgaga

SEQ ID NO: 201648 - DNA, 22 bp, Artificial Sequence
  Synthetic oligonucleotide; CTG chr2 60502918 60502939 60502935 60502940 +
gtctgtctggggctcccagaag

SEQ ID NO: 201649 - DNA, 22 bp, Artificial Sequence
  Synthetic oligonucleotide; CTG chr2 60502923 60502944 60502940 60502945 +
tctggggctcccagaagacaca

SEQ ID NO: 201650 - DNA, 22 bp, Artificial Sequence
  Synthetic oligonucleotide; CTG chr2 60502927 60502948 60502944 60502949 +
gggctcccagaagacacagcca

SEQ ID NO: 201651 - DNA, 22 bp, Artificial Sequence
  Synthetic oligonucleotide; CTC chr2 60502933 60502954 60502950 60502955 +
ccagaagacacagccagacttc

SEQ ID NO: 201652 - DNA, 22 bp, Artificial Sequence
  Synthetic oligonucleotide; CTT chr2 60502954 60502975 60502971 60502976 +
ctttcttgctcttgtccaaaca

SEQ ID NO: 201653 - DNA, 22 bp, Artificial Sequence
  Synthetic oligonucleotide; TTC chr2 60502955 60502976 60502972 60502977 +
tttcttgctcttgtccaaacac

SEQ ID NO: 201654 - DNA, 22 bp, Artificial Sequence
  Synthetic oligonucleotide; CTT chr2 60502957 60502978 60502974 60502979 +
tcttgctcttgtccaaacacct

SEQ ID NO: 201655 - DNA, 22 bp, Artificial Sequence
  Synthetic oligonucleotide; TTT chr2 60502958 60502979 60502975 60502980 +
cttgctcttgtccaaacacctc

SEQ ID NO: 201656 - DNA, 22 bp, Artificial Sequence
  Synthetic oligonucleotide; TTC chr2 60502959 60502980 60502976 60502981 +
ttgctcttgtccaaacacctcc

SEQ ID NO: 201657 - DNA, 22 bp, Artificial Sequence
  Synthetic oligonucleotide; CTT chr2 60502961 60502982 60502978 60502983 +
gctcttgtccaaacacctcctt

SEQ ID NO: 201658 - DNA, 22 bp, Artificial Sequence
  Synthetic oligonucleotide; TTG chr2 60502962 60502983 60502979 60502984 +
ctcttgtccaaacacctccttg

SEQ ID NO: 201659 - DNA, 22 bp, Artificial Sequence
  Synthetic oligonucleotide; CTC chr2 60502965 60502986 60502982 60502987 +
ttgtccaaacacctccttgtct

SEQ ID NO: 201660 - DNA, 22 bp, Artificial Sequence
  Synthetic oligonucleotide; CTT chr2 60502967 60502988 60502984 60502989 +
gtccaaacacctccttgtcttt

SEQ ID NO: 201661 - DNA, 22 bp, Artificial Sequence
  Synthetic oligonucleotide; TTG chr2 60502968 60502989 60502985 60502990 +
tccaaacacctccttgtctttt

SEQ ID NO: 201662 - DNA, 22 bp, Artificial Sequence
  Synthetic oligonucleotide; CTC chr2 60502980 60503001 60502997 60503002 +
cttgtcttttaaggcctgggct

SEQ ID NO: 201663 - DNA, 22 bp, Artificial Sequence
  Synthetic oligonucleotide; CTT chr2 60502983 60503004 60503000 60503005 +
gtcttttaaggcctgggctgtc

SEQ ID NO: 201664 - DNA, 22 bp, Artificial Sequence
  Synthetic oligonucleotide; TTG chr2 60502984 60503005 60503001 60503006 +
tcttttaaggcctgggctgtct

SEQ ID NO: 201665 - DNA, 22 bp, Artificial Sequence
  Synthetic oligonucleotide; CTT chr2 60502988 60503009 60503005 60503010 +
ttaaggcctgggctgtctaggg

SEQ ID NO: 201666 - DNA, 22 bp, Artificial Sequence
  Synthetic oligonucleotide; TTT chr2 60502989 60503010 60503006 60503011 +
taaggcctgggctgtctagggg

SEQ ID NO: 201667 - DNA, 22 bp, Artificial Sequence
  Synthetic oligonucleotide; TTT chr2 60502990 60503011 60503007 60503012 +
aaggcctgggctgtctaggggg

SEQ ID NO: 201668 - DNA, 22 bp, Artificial Sequence
  Synthetic oligonucleotide; TTA chr2 60502991 60503012 60503008 60503013 +
aggcctgggctgtctaggggga

SEQ ID NO: 201669 - DNA, 22 bp, Artificial Sequence
  Synthetic oligonucleotide; CTG chr2 60502998 60503019 60503015 60503020 +
ggctgtctagggggatggctac

SEQ ID NO: 201670 - DNA, 22 bp, Artificial Sequence
  Synthetic oligonucleotide; CTG chr2 60503003 60503024 60503020 60503025 +
tctagggggatggctactggct

SEQ ID NO: 201671 - DNA, 22 bp, Artificial Sequence
  Synthetic oligonucleotide; CTA chr2 60503007 60503028 60503024 60503029 +
gggggatggctactggcttgga

SEQ ID NO: 201672 - DNA, 22 bp, Artificial Sequence
  Synthetic oligonucleotide; CTA chr2 60503019 60503040 60503036 60503041 +
ctggcttggagcaaaaccaacg

SEQ ID NO: 201673 - DNA, 22 bp, Artificial Sequence
  Synthetic oligonucleotide; CTG chr2 60503022 60503043 60503039 60503044 +
gcttggagcaaaaccaacgtgt

SEQ ID NO: 201674 - DNA, 22 bp, Artificial Sequence
  Synthetic oligonucleotide; CTT chr2 60503026 60503047 60503043 60503048 +
ggagcaaaaccaacgtgtctgt

SEQ ID NO: 201675 - DNA, 22 bp, Artificial Sequence
  Synthetic oligonucleotide; TTG chr2 60503027 60503048 60503044 60503049 +
gagcaaaaccaacgtgtctgtc

SEQ ID NO: 201676 - DNA, 22 bp, Artificial Sequence
  Synthetic oligonucleotide; CTG chr2 60503047 60503068 60503064 60503069 +
tcatcttaatacacacggaatg

SEQ ID NO: 201677 - DNA, 22 bp, Artificial Sequence
  Synthetic oligonucleotide; CTT chr2 60503054 60503075 60503071 60503076 +
aatacacacggaatgtgttgaa

SEQ ID NO: 201678 - DNA, 22 bp, Artificial Sequence
  Synthetic oligonucleotide; TTA chr2 60503055 60503076 60503072 60503077 +
atacacacggaatgtgttgaaa

SEQ ID NO: 201679 - DNA, 22 bp, Artificial Sequence
  Synthetic oligonucleotide; TTG chr2 60503074 60503095 60503091 60503096 +
aaatgaaggtgtctgtgtggaa

SEQ ID NO: 201680 - DNA, 22 bp, Artificial Sequence
  Synthetic oligonucleotide; CTG chr2 60503089 60503110 60503106 60503111 +
tgtggaagggacagacccagat

SEQ ID NO: 201681 - DNA, 22 bp, Artificial Sequence
  Synthetic oligonucleotide; CTC chr2 60503117 60503138 60503134 60503139 +
tgcatttgtcctggcaatggga

SEQ ID NO: 201682 - DNA, 22 bp, Artificial Sequence
  Synthetic oligonucleotide; CTG chr2 60503119 60503140 60503136 60503141 +
catttgtcctggcaatgggagc

SEQ ID NO: 201683 - DNA, 22 bp, Artificial Sequence
  Synthetic oligonucleotide; TTT chr2 60503124 60503145 60503141 60503146 +
gtcctggcaatgggagcaggaa

SEQ ID NO: 201684 - DNA, 22 bp, Artificial Sequence
  Synthetic oligonucleotide; TTG chr2 60503125 60503146 60503142 60503147 +
tcctggcaatgggagcaggaat

SEQ ID NO: 201685 - DNA, 22 bp, Artificial Sequence
  Synthetic oligonucleotide; CTG chr2 60503130 60503151 60503147 60503152 +
gcaatgggagcaggaatgagtc

SEQ ID NO: 201686 - DNA, 22 bp, Artificial Sequence
  Synthetic oligonucleotide; CTT chr2 60503158 60503179 60503175 60503180 +
ctctaaacctggtcactcctag

SEQ ID NO: 201687 - DNA, 22 bp, Artificial Sequence
  Synthetic oligonucleotide; TTC chr2 60503159 60503180 60503176 60503181 +
tctaaacctggtcactcctagt

SEQ ID NO: 201688 - DNA, 22 bp, Artificial Sequence
  Synthetic oligonucleotide; CTC chr2 60503161 60503182 60503178 60503183 +
taaacctggtcactcctagtcc

SEQ ID NO: 201689 - DNA, 22 bp, Artificial Sequence
  Synthetic oligonucleotide; CTA chr2 60503163 60503184 60503180 60503185 +
aacctggtcactcctagtccca

SEQ ID NO: 201690 - DNA, 22 bp, Artificial Sequence
  Synthetic oligonucleotide; CTG chr2 60503169 60503190 60503186 60503191 +
gtcactcctagtcccaagatgg

SEQ ID NO: 201691 - DNA, 22 bp, Artificial Sequence
  Synthetic oligonucleotide; CTC chr2 60503176 60503197 60503193 60503198 +
ctagtcccaagatggagaagcc

SEQ ID NO: 201692 - DNA, 22 bp, Artificial Sequence
  Synthetic oligonucleotide; CTA chr2 60503179 60503200 60503196 60503201 +
gtcccaagatggagaagccaca

SEQ ID NO: 201693 - DNA, 22 bp, Artificial Sequence
  Synthetic oligonucleotide; CTT chr2 60503209 60503230 60503226 60503231 +
gatcatgttagccccattctgc

SEQ ID NO: 201694 - DNA, 22 bp, Artificial Sequence
  Synthetic oligonucleotide; TTG chr2 60503210 60503231 60503227 60503232 +
atcatgttagccccattctgca

SEQ ID NO: 201695 - DNA, 22 bp, Artificial Sequence
  Synthetic oligonucleotide; TTA chr2 60503219 60503240 60503236 60503241 +
gccccattctgcagcctcagga

SEQ ID NO: 201696 - DNA, 22 bp, Artificial Sequence
  Synthetic oligonucleotide; TTC chr2 60503228 60503249 60503245 60503250 +
tgcagcctcaggaggctctgac

SEQ ID NO: 201697 - DNA, 22 bp, Artificial Sequence
  Synthetic oligonucleotide; CTG chr2 60503230 60503251 60503247 60503252 +
cagcctcaggaggctctgacca

SEQ ID NO: 201698 - DNA, 22 bp, Artificial Sequence
  Synthetic oligonucleotide; CTC chr2 60503237 60503258 60503254 60503259 +
aggaggctctgaccaggtggaa

SEQ ID NO: 201699 - DNA, 22 bp, Artificial Sequence
  Synthetic oligonucleotide; CTC chr2 60503246 60503267 60503263 60503268 +
tgaccaggtggaaagccagaat

SEQ ID NO: 201700 - DNA, 22 bp, Artificial Sequence
  Synthetic oligonucleotide; CTG chr2 60503248 60503269 60503265 60503270 +
accaggtggaaagccagaatgg

SEQ ID NO: 201701 - DNA, 22 bp, Artificial Sequence
  Synthetic oligonucleotide; CTG chr2 60503311 60503332 60503328 60503333 +
caaggagcctcacttctccagg

SEQ ID NO: 201702 - DNA, 22 bp, Artificial Sequence
  Synthetic oligonucleotide; CTC chr2 60503322 60503343 60503339 60503344 +
acttctccaggcattgtgactt

SEQ ID NO: 201703 - DNA, 22 bp, Artificial Sequence
  Synthetic oligonucleotide; CTT chr2 60503326 60503347 60503343 60503348 +
ctccaggcattgtgacttttta

SEQ ID NO: 201704 - DNA, 22 bp, Artificial Sequence
  Synthetic oligonucleotide; TTC chr2 60503327 60503348 60503344 60503349 +
tccaggcattgtgactttttat

SEQ ID NO: 201705 - DNA, 22 bp, Artificial Sequence
  Synthetic oligonucleotide; CTC chr2 60503329 60503350 60503346 60503351 +
caggcattgtgactttttatta

SEQ ID NO: 201706 - DNA, 22 bp, Artificial Sequence
  Synthetic oligonucleotide; TTG chr2 60503338 60503359 60503355 60503360 +
tgactttttattaaaaaccctt

SEQ ID NO: 201707 - DNA, 22 bp, Artificial Sequence
  Synthetic oligonucleotide; CTT chr2 60503344 60503365 60503361 60503366 +
tttattaaaaacccttacccat

SEQ ID NO: 201708 - DNA, 22 bp, Artificial Sequence
  Synthetic oligonucleotide; TTT chr2 60503345 60503366 60503362 60503367 +
ttattaaaaacccttacccatg

SEQ ID NO: 201709 - DNA, 22 bp, Artificial Sequence
  Synthetic oligonucleotide; TTT chr2 60503346 60503367 60503363 60503368 +
tattaaaaacccttacccatgc

SEQ ID NO: 201710 - DNA, 22 bp, Artificial Sequence
  Synthetic oligonucleotide; TTT chr2 60503347 60503368 60503364 60503369 +
attaaaaacccttacccatgcc

SEQ ID NO: 201711 - DNA, 22 bp, Artificial Sequence
  Synthetic oligonucleotide; TTA chr2 60503348 60503369 60503365 60503370 +
ttaaaaacccttacccatgcca

SEQ ID NO: 201712 - DNA, 22 bp, Artificial Sequence
  Synthetic oligonucleotide; TTA chr2 60503351 60503372 60503368 60503373 +
aaaacccttacccatgccaccc

SEQ ID NO: 201713 - DNA, 22 bp, Artificial Sequence
  Synthetic oligonucleotide; CTT chr2 60503360 60503381 60503377 60503382 +
acccatgccacccaccgcagcc

SEQ ID NO: 201714 - DNA, 22 bp, Artificial Sequence
  Synthetic oligonucleotide; TTA chr2 60503361 60503382 60503378 60503383 +
cccatgccacccaccgcagcct

SEQ ID NO: 201715 - DNA, 22 bp, Artificial Sequence
  Synthetic oligonucleotide; CTG chr2 60503384 60503405 60503401 60503406 +
gacaggcattccaggagccaga

SEQ ID NO: 201716 - DNA, 22 bp, Artificial Sequence
  Synthetic oligonucleotide; TTC chr2 60503395 60503416 60503412 60503417 +
caggagccagacatgtccctgg

SEQ ID NO: 201717 - DNA, 22 bp, Artificial Sequence
  Synthetic oligonucleotide; CTG chr2 60503416 60503437 60503433 60503438 +
gaagacagtaggctattgcttc

SEQ ID NO: 201718 - DNA, 22 bp, Artificial Sequence
  Synthetic oligonucleotide; CTA chr2 60503431 60503452 60503448 60503453 +
ttgcttcctctgagcactgcaa

SEQ ID NO: 201719 - DNA, 22 bp, Artificial Sequence
  Synthetic oligonucleotide; TTG chr2 60503434 60503455 60503451 60503456 +
cttcctctgagcactgcaacaa

SEQ ID NO: 201720 - DNA, 22 bp, Artificial Sequence
  Synthetic oligonucleotide; CTT chr2 60503437 60503458 60503454 60503459 +
cctctgagcactgcaacaattt

SEQ ID NO: 201721 - DNA, 22 bp, Artificial Sequence
  Synthetic oligonucleotide; TTC chr2 60503438 60503459 60503455 60503460 +
ctctgagcactgcaacaatttt

SEQ ID NO: 201722 - DNA, 22 bp, Artificial Sequence
  Synthetic oligonucleotide; CTC chr2 60503441 60503462 60503458 60503463 +
tgagcactgcaacaattttctc

SEQ ID NO: 201723 - DNA, 22 bp, Artificial Sequence
  Synthetic oligonucleotide; CTG chr2 60503443 60503464 60503460 60503465 +
agcactgcaacaattttctctg

SEQ ID NO: 201724 - DNA, 22 bp, Artificial Sequence
  Synthetic oligonucleotide; CTG chr2 60503450 60503471 60503467 60503472 +
caacaattttctctggaccctc

SEQ ID NO: 201725 - DNA, 22 bp, Artificial Sequence
  Synthetic oligonucleotide; TTT chr2 60503459 60503480 60503476 60503481 +
tctctggaccctctcctccacc

SEQ ID NO: 201726 - DNA, 22 bp, Artificial Sequence
  Synthetic oligonucleotide; TTT chr2 60503460 60503481 60503477 60503482 +
ctctggaccctctcctccacct

SEQ ID NO: 201727 - DNA, 22 bp, Artificial Sequence
  Synthetic oligonucleotide; TTC chr2 60503461 60503482 60503478 60503483 +
tctggaccctctcctccaccta

SEQ ID NO: 201728 - DNA, 22 bp, Artificial Sequence
  Synthetic oligonucleotide; CTC chr2 60503463 60503484 60503480 60503485 +
tggaccctctcctccacctatt

SEQ ID NO: 201729 - DNA, 22 bp, Artificial Sequence
  Synthetic oligonucleotide; CTG chr2 60503465 60503486 60503482 60503487 +
gaccctctcctccacctattca

SEQ ID NO: 201730 - DNA, 22 bp, Artificial Sequence
  Synthetic oligonucleotide; CTC chr2 60503472 60503493 60503489 60503494 +
tcctccacctattcacagatgg

SEQ ID NO: 201731 - DNA, 22 bp, Artificial Sequence
  Synthetic oligonucleotide; CTC chr2 60503474 60503495 60503491 60503496 +
ctccacctattcacagatgggg

SEQ ID NO: 201732 - DNA, 22 bp, Artificial Sequence
  Synthetic oligonucleotide; CTC chr2 60503477 60503498 60503494 60503499 +
cacctattcacagatggggcat

SEQ ID NO: 201733 - DNA, 22 bp, Artificial Sequence
  Synthetic oligonucleotide; CTA chr2 60503483 60503504 60503500 60503505 +
ttcacagatggggcataaccct

SEQ ID NO: 201734 - DNA, 22 bp, Artificial Sequence
  Synthetic oligonucleotide; TTC chr2 60503486 60503507 60503503 60503508 +
acagatggggcataaccctccc

SEQ ID NO: 201735 - DNA, 22 bp, Artificial Sequence
  Synthetic oligonucleotide; CTC chr2 60503506 60503527 60503523 60503528 +
cctcctatccattagattgccc

SEQ ID NO: 201736 - DNA, 22 bp, Artificial Sequence
  Synthetic oligonucleotide; CTC chr2 60503510 60503531 60503527 60503532 +
ctatccattagattgcccaaat

SEQ ID NO: 201737 - DNA, 22 bp, Artificial Sequence
  Synthetic oligonucleotide; CTA chr2 60503513 60503534 60503530 60503535 +
tccattagattgcccaaatctg

SEQ ID NO: 201738 - DNA, 22 bp, Artificial Sequence
  Synthetic oligonucleotide; TTA chr2 60503520 60503541 60503537 60503542 +
gattgcccaaatctgggaaaat

SEQ ID NO: 201739 - DNA, 22 bp, Artificial Sequence
  Synthetic oligonucleotide; TTG chr2 60503525 60503546 60503542 60503547 +
cccaaatctgggaaaataatgt

SEQ ID NO: 201740 - DNA, 22 bp, Artificial Sequence
  Synthetic oligonucleotide; CTG chr2 60503535 60503556 60503552 60503557 +
ggaaaataatgtgtggcgctca

SEQ ID NO: 201741 - DNA, 22 bp, Artificial Sequence
  Synthetic oligonucleotide; CTC chr2 60503556 60503577 60503573 60503578 +
aggtctgagtgcagaccaagct

SEQ ID NO: 201742 - DNA, 22 bp, Artificial Sequence
  Synthetic oligonucleotide; CTG chr2 60503563 60503584 60503580 60503585 +
agtgcagaccaagctcccaata

SEQ ID NO: 201743 - DNA, 22 bp, Artificial Sequence
  Synthetic oligonucleotide; CTC chr2 60503579 60503600 60503596 60503601 +
ccaataccagtggctctttcag

SEQ ID NO: 201744 - DNA, 22 bp, Artificial Sequence
  Synthetic oligonucleotide; CTC chr2 60503595 60503616 60503612 60503617 +
tttcaggcttacaaagccttgg

SEQ ID NO: 201745 - DNA, 22 bp, Artificial Sequence
  Synthetic oligonucleotide; CTT chr2 60503597 60503618 60503614 60503619 +
tcaggcttacaaagccttggtg

SEQ ID NO: 201746 - DNA, 22 bp, Artificial Sequence
  Synthetic oligonucleotide; TTT chr2 60503598 60503619 60503615 60503620 +
caggcttacaaagccttggtgg

SEQ ID NO: 201747 - DNA, 22 bp, Artificial Sequence
  Synthetic oligonucleotide; TTC chr2 60503599 60503620 60503616 60503621 +
aggcttacaaagccttggtggt

SEQ ID NO: 201748 - DNA, 22 bp, Artificial Sequence
  Synthetic oligonucleotide; CTT chr2 60503605 60503626 60503622 60503627 +
acaaagccttggtggtttccac

SEQ ID NO: 201749 - DNA, 22 bp, Artificial Sequence
  Synthetic oligonucleotide; TTA chr2 60503606 60503627 60503623 60503628 +
caaagccttggtggtttccaca

SEQ ID NO: 201750 - DNA, 22 bp, Artificial Sequence
  Synthetic oligonucleotide; CTT chr2 60503615 60503636 60503632 60503637 +
ggtggtttccacacccagcagt

SEQ ID NO: 201751 - DNA, 22 bp, Artificial Sequence
  Synthetic oligonucleotide; TTG chr2 60503616 60503637 60503633 60503638 +
gtggtttccacacccagcagtt

SEQ ID NO: 201752 - DNA, 22 bp, Artificial Sequence
  Synthetic oligonucleotide; TTT chr2 60503623 60503644 60503640 60503645 +
ccacacccagcagttcctaccc

SEQ ID NO: 201753 - DNA, 22 bp, Artificial Sequence
  Synthetic oligonucleotide; TTC chr2 60503624 60503645 60503641 60503646 +
cacacccagcagttcctaccca

SEQ ID NO: 201754 - DNA, 22 bp, Artificial Sequence
  Synthetic oligonucleotide; TTC chr2 60503639 60503660 60503656 60503661 +
ctacccaggactgagaagccct

SEQ ID NO: 201755 - DNA, 22 bp, Artificial Sequence
  Synthetic oligonucleotide; CTA chr2 60503642 60503663 60503659 60503664 +
cccaggactgagaagccctcag

SEQ ID NO: 201756 - DNA, 22 bp, Artificial Sequence
  Synthetic oligonucleotide; CTG chr2 60503652 60503673 60503669 60503674 +
agaagccctcagcaaacaccca

SEQ ID NO: 201757 - DNA, 22 bp, Artificial Sequence
  Synthetic oligonucleotide; CTC chr2 60503662 60503683 60503679 60503684 +
agcaaacacccagatggccctt

SEQ ID NO: 201758 - DNA, 22 bp, Artificial Sequence
  Synthetic oligonucleotide; CTT chr2 60503684 60503705 60503701 60503706 +
gttcaccctcctggaaacctat

SEQ ID NO: 201759 - DNA, 22 bp, Artificial Sequence
  Synthetic oligonucleotide; TTG chr2 60503685 60503706 60503702 60503707 +
ttcaccctcctggaaacctata

SEQ ID NO: 201760 - DNA, 22 bp, Artificial Sequence
  Synthetic oligonucleotide; TTC chr2 60503688 60503709 60503705 60503710 +
accctcctggaaacctatagct

SEQ ID NO: 201761 - DNA, 22 bp, Artificial Sequence
  Synthetic oligonucleotide; CTC chr2 60503694 60503715 60503711 60503716 +
ctggaaacctatagctgccagg

SEQ ID NO: 201762 - DNA, 22 bp, Artificial Sequence
  Synthetic oligonucleotide; CTG chr2 60503697 60503718 60503714 60503719 +
gaaacctatagctgccagggaa

SEQ ID NO: 201763 - DNA, 22 bp, Artificial Sequence
  Synthetic oligonucleotide; CTA chr2 60503705 60503726 60503722 60503727 +
tagctgccagggaaatgtgaca

SEQ ID NO: 201764 - DNA, 22 bp, Artificial Sequence
  Synthetic oligonucleotide; CTG chr2 60503711 60503732 60503728 60503733 +
ccagggaaatgtgacattttgt

SEQ ID NO: 201765 - DNA, 22 bp, Artificial Sequence
  Synthetic oligonucleotide; TTT chr2 60503730 60503751 60503747 60503752 +
tgtgaggactaatttaacccgc

SEQ ID NO: 201766 - DNA, 22 bp, Artificial Sequence
  Synthetic oligonucleotide; TTT chr2 60503731 60503752 60503748 60503753 +
gtgaggactaatttaacccgcc

SEQ ID NO: 201767 - DNA, 22 bp, Artificial Sequence
  Synthetic oligonucleotide; TTG chr2 60503732 60503753 60503749 60503754 +
tgaggactaatttaacccgcct

SEQ ID NO: 201768 - DNA, 22 bp, Artificial Sequence
  Synthetic oligonucleotide; CTA chr2 60503741 60503762 60503758 60503763 +
atttaacccgcctagaagattt

SEQ ID NO: 201769 - DNA, 22 bp, Artificial Sequence
  Synthetic oligonucleotide; TTT chr2 60503745 60503766 60503762 60503767 +
aacccgcctagaagatttagga

SEQ ID NO: 201770 - DNA, 22 bp, Artificial Sequence
  Synthetic oligonucleotide; TTA chr2 60503746 60503767 60503763 60503768 +
acccgcctagaagatttaggag

SEQ ID NO: 201771 - DNA, 22 bp, Artificial Sequence
  Synthetic oligonucleotide; CTA chr2 60503755 60503776 60503772 60503777 +
gaagatttaggagccaagatgc

SEQ ID NO: 201772 - DNA, 22 bp, Artificial Sequence
  Synthetic oligonucleotide; TTT chr2 60503763 60503784 60503780 60503785 +
aggagccaagatgcaaccctaa

SEQ ID NO: 201773 - DNA, 22 bp, Artificial Sequence
  Synthetic oligonucleotide; TTA chr2 60503764 60503785 60503781 60503786 +
ggagccaagatgcaaccctaaa

SEQ ID NO: 201774 - DNA, 22 bp, Artificial Sequence
  Synthetic oligonucleotide; CTA chr2 60503784 60503805 60503801 60503806 +
aagcccactgcaagggacaata

SEQ ID NO: 201775 - DNA, 22 bp, Artificial Sequence
  Synthetic oligonucleotide; CTG chr2 60503794 60503815 60503811 60503816 +
caagggacaatattctggatct

SEQ ID NO: 201776 - DNA, 22 bp, Artificial Sequence
  Synthetic oligonucleotide; TTC chr2 60503809 60503830 60503826 60503831 +
tggatcttttgtcagagcttta

SEQ ID NO: 201777 - DNA, 22 bp, Artificial Sequence
  Synthetic oligonucleotide; CTG chr2 60503811 60503832 60503828 60503833 +
gatcttttgtcagagctttatt

SEQ ID NO: 201778 - DNA, 22 bp, Artificial Sequence
  Synthetic oligonucleotide; CTT chr2 60503817 60503838 60503834 60503839 +
ttgtcagagctttattatttta

SEQ ID NO: 201779 - DNA, 22 bp, Artificial Sequence
  Synthetic oligonucleotide; TTT chr2 60503818 60503839 60503835 60503840 +
tgtcagagctttattattttaa

SEQ ID NO: 201780 - DNA, 22 bp, Artificial Sequence
  Synthetic oligonucleotide; TTT chr2 60503819 60503840 60503836 60503841 +
gtcagagctttattattttaat

SEQ ID NO: 201781 - DNA, 22 bp, Artificial Sequence
  Synthetic oligonucleotide; TTG chr2 60503820 60503841 60503837 60503842 +
tcagagctttattattttaata

SEQ ID NO: 201782 - DNA, 22 bp, Artificial Sequence
  Synthetic oligonucleotide; CTT chr2 60503829 60503850 60503846 60503851 +
tattattttaataaaattttta

SEQ ID NO: 201783 - DNA, 22 bp, Artificial Sequence
  Synthetic oligonucleotide; TTT chr2 60503830 60503851 60503847 60503852 +
attattttaataaaatttttat

SEQ ID NO: 201784 - DNA, 22 bp, Artificial Sequence
  Synthetic oligonucleotide; TTA chr2 60503831 60503852 60503848 60503853 +
ttattttaataaaatttttata

SEQ ID NO: 201785 - DNA, 22 bp, Artificial Sequence
  Synthetic oligonucleotide; TTA chr2 60503834 60503855 60503851 60503856 +
ttttaataaaatttttatatta

SEQ ID NO: 201786 - DNA, 22 bp, Artificial Sequence
  Synthetic oligonucleotide; TTT chr2 60503837 60503858 60503854 60503859 +
taataaaatttttatattaaac

SEQ ID NO: 201787 - DNA, 22 bp, Artificial Sequence
  Synthetic oligonucleotide; TTT chr2 60503838 60503859 60503855 60503860 +
aataaaatttttatattaaaca

SEQ ID NO: 201788 - DNA, 22 bp, Artificial Sequence
  Synthetic oligonucleotide; TTA chr2 60503839 60503860 60503856 60503861 +
ataaaatttttatattaaacag

SEQ ID NO: 201789 - DNA, 22 bp, Artificial Sequence
  Synthetic oligonucleotide; TTT chr2 60503848 60503869 60503865 60503870 +
ttatattaaacagcaattcaca

SEQ ID NO: 201790 - DNA, 22 bp, Artificial Sequence
  Synthetic oligonucleotide; TTT chr2 60503849 60503870 60503866 60503871 +
tatattaaacagcaattcacat

SEQ ID NO: 201791 - DNA, 22 bp, Artificial Sequence
  Synthetic oligonucleotide; TTT chr2 60503850 60503871 60503867 60503872 +
atattaaacagcaattcacatt

SEQ ID NO: 201792 - DNA, 22 bp, Artificial Sequence
  Synthetic oligonucleotide; TTA chr2 60503851 60503872 60503868 60503873 +
tattaaacagcaattcacattc

SEQ ID NO: 201793 - DNA, 22 bp, Artificial Sequence
  Synthetic oligonucleotide; TTA chr2 60503856 60503877 60503873 60503878 +
aacagcaattcacattcatcta

SEQ ID NO: 201794 - DNA, 22 bp, Artificial Sequence
  Synthetic oligonucleotide; TTC chr2 60503867 60503888 60503884 60503889 +
acattcatctaaacctcctgaa

SEQ ID NO: 201795 - DNA, 22 bp, Artificial Sequence
  Synthetic oligonucleotide; TTC chr2 60503873 60503894 60503890 60503895 +
atctaaacctcctgaaaattgg

SEQ ID NO: 201796 - DNA, 22 bp, Artificial Sequence
  Synthetic oligonucleotide; CTA chr2 60503878 60503899 60503895 60503900 +
aacctcctgaaaattggttatt

SEQ ID NO: 201797 - DNA, 22 bp, Artificial Sequence
  Synthetic oligonucleotide; CTC chr2 60503884 60503905 60503901 60503906 +
ctgaaaattggttattggctgc

SEQ ID NO: 201798 - DNA, 22 bp, Artificial Sequence
  Synthetic oligonucleotide; CTG chr2 60503887 60503908 60503904 60503909 +
aaaattggttattggctgcttc

SEQ ID NO: 201799 - DNA, 22 bp, Artificial Sequence
  Synthetic oligonucleotide; TTG chr2 60503894 60503915 60503911 60503916 +
gttattggctgcttcgttgatt

SEQ ID NO: 201800 - DNA, 22 bp, Artificial Sequence
  Synthetic oligonucleotide; TTA chr2 60503898 60503919 60503915 60503920 +
ttggctgcttcgttgattctag

SEQ ID NO: 201801 - DNA, 22 bp, Artificial Sequence
  Synthetic oligonucleotide; TTG chr2 60503901 60503922 60503918 60503923 +
gctgcttcgttgattctagaaa

SEQ ID NO: 201802 - DNA, 22 bp, Artificial Sequence
  Synthetic oligonucleotide; CTG chr2 60503905 60503926 60503922 60503927 +
cttcgttgattctagaaaaaaa

SEQ ID NO: 201803 - DNA, 22 bp, Artificial Sequence
  Synthetic oligonucleotide; CTT chr2 60503908 60503929 60503925 60503930 +
cgttgattctagaaaaaaaaga

SEQ ID NO: 201804 - DNA, 22 bp, Artificial Sequence
  Synthetic oligonucleotide; TTC chr2 60503909 60503930 60503926 60503931 +
gttgattctagaaaaaaaagaa

SEQ ID NO: 201805 - DNA, 22 bp, Artificial Sequence
  Synthetic oligonucleotide; TTG chr2 60503913 60503934 60503930 60503935 +
attctagaaaaaaaagaaagca

SEQ ID NO: 201806 - DNA, 22 bp, Artificial Sequence
  Synthetic oligonucleotide; TTC chr2 60503917 60503938 60503934 60503939 +
tagaaaaaaaagaaagcaagaa

SEQ ID NO: 201807 - DNA, 22 bp, Artificial Sequence
  Synthetic oligonucleotide; CTA chr2 60503919 60503940 60503936 60503941 +
gaaaaaaaagaaagcaagaaat

SEQ ID NO: 201808 - DNA, 22 bp, Artificial Sequence
  Synthetic oligonucleotide; CTG chr2 60503984 60504005 60504001 60504006 +
agtattaaggcccaacccagcc

SEQ ID NO: 201809 - DNA, 22 bp, Artificial Sequence
  Synthetic oligonucleotide; TTA chr2 60503991 60504012 60504008 60504013 +
aggcccaacccagccaaaaccc

SEQ ID NO: 201810 - DNA, 22 bp, Artificial Sequence
  Synthetic oligonucleotide; CTG chr2 60504019 60504040 60504036 60504041 +
ctagaagcctgctggaagccta

SEQ ID NO: 201811 - DNA, 22 bp, Artificial Sequence
  Synthetic oligonucleotide; CTA chr2 60504022 60504043 60504039 60504044 +
gaagcctgctggaagcctacat

SEQ ID NO: 201812 - DNA, 22 bp, Artificial Sequence
  Synthetic oligonucleotide; CTG chr2 60504030 60504051 60504047 60504052 +
ctggaagcctacatggcttcga

SEQ ID NO: 201813 - DNA, 22 bp, Artificial Sequence
  Synthetic oligonucleotide; CTG chr2 60504033 60504054 60504050 60504055 +
gaagcctacatggcttcgagcg

SEQ ID NO: 201814 - DNA, 22 bp, Artificial Sequence
  Synthetic oligonucleotide; CTA chr2 60504041 60504062 60504058 60504063 +
catggcttcgagcggcacattc

SEQ ID NO: 201815 - DNA, 22 bp, Artificial Sequence
  Synthetic oligonucleotide; CTT chr2 60504049 60504070 60504066 60504071 +
cgagcggcacattctgagaact

SEQ ID NO: 201816 - DNA, 22 bp, Artificial Sequence
  Synthetic oligonucleotide; TTC chr2 60504050 60504071 60504067 60504072 +
gagcggcacattctgagaactc

SEQ ID NO: 201817 - DNA, 22 bp, Artificial Sequence
  Synthetic oligonucleotide; TTC chr2 60504063 60504084 60504080 60504085 +
tgagaactctgaagagtaccac

SEQ ID NO: 201818 - DNA, 22 bp, Artificial Sequence
  Synthetic oligonucleotide; CTG chr2 60504065 60504086 60504082 60504087 +
agaactctgaagagtaccactc

SEQ ID NO: 201819 - DNA, 22 bp, Artificial Sequence
  Synthetic oligonucleotide; CTC chr2 60504072 60504093 60504089 60504094 +
tgaagagtaccactcagccgac

SEQ ID NO: 201820 - DNA, 22 bp, Artificial Sequence
  Synthetic oligonucleotide; CTG chr2 60504074 60504095 60504091 60504096 +
aagagtaccactcagccgacac

SEQ ID NO: 201821 - DNA, 22 bp, Artificial Sequence
  Synthetic oligonucleotide; CTC chr2 60504087 60504108 60504104 60504109 +
agccgacactgcccccatgaca

SEQ ID NO: 201822 - DNA, 22 bp, Artificial Sequence
  Synthetic oligonucleotide; CTG chr2 60504098 60504119 60504115 60504120 +
cccccatgacatagggccctgg

SEQ ID NO: 201823 - DNA, 22 bp, Artificial Sequence
  Synthetic oligonucleotide; CTG chr2 60504119 60504140 60504136 60504141 +
gtctcctctttgactcacactt

SEQ ID NO: 201824 - DNA, 22 bp, Artificial Sequence
  Synthetic oligonucleotide; CTC chr2 60504124 60504145 60504141 60504146 +
ctctttgactcacacttgcctg

SEQ ID NO: 201825 - DNA, 22 bp, Artificial Sequence
  Synthetic oligonucleotide; CTC chr2 60504127 60504148 60504144 60504149 +
tttgactcacacttgcctggca

SEQ ID NO: 201826 - DNA, 22 bp, Artificial Sequence
  Synthetic oligonucleotide; CTT chr2 60504129 60504150 60504146 60504151 +
tgactcacacttgcctggcagg

SEQ ID NO: 201827 - DNA, 22 bp, Artificial Sequence
  Synthetic oligonucleotide; TTT chr2 60504130 60504151 60504147 60504152 +
gactcacacttgcctggcagga

SEQ ID NO: 201828 - DNA, 22 bp, Artificial Sequence
  Synthetic oligonucleotide; TTG chr2 60504131 60504152 60504148 60504153 +
actcacacttgcctggcaggac

SEQ ID NO: 201829 - DNA, 22 bp, Artificial Sequence
  Synthetic oligonucleotide; CTC chr2 60504135 60504156 60504152 60504157 +
acacttgcctggcaggactccc

SEQ ID NO: 201830 - DNA, 22 bp, Artificial Sequence
  Synthetic oligonucleotide; CTT chr2 60504141 60504162 60504158 60504163 +
gcctggcaggactccccaaaca

SEQ ID NO: 201831 - DNA, 22 bp, Artificial Sequence
  Synthetic oligonucleotide; TTG chr2 60504142 60504163 60504159 60504164 +
cctggcaggactccccaaacag

SEQ ID NO: 201832 - DNA, 22 bp, Artificial Sequence
  Synthetic oligonucleotide; CTG chr2 60504146 60504167 60504163 60504168 +
gcaggactccccaaacagaaca

SEQ ID NO: 201833 - DNA, 22 bp, Artificial Sequence
  Synthetic oligonucleotide; CTC chr2 60504155 60504176 60504172 60504177 +
cccaaacagaacagagatgctc

SEQ ID NO: 201834 - DNA, 22 bp, Artificial Sequence
  Synthetic oligonucleotide; CTC chr2 60504177 60504198 60504194 60504199 +
agccgggcacaagagagcaggc

SEQ ID NO: 201835 - DNA, 22 bp, Artificial Sequence
  Synthetic oligonucleotide; CTC chr2 60504209 60504230 60504226 60504231 +
atgctgcactgtggtttcccca

SEQ ID NO: 201836 - DNA, 22 bp, Artificial Sequence
  Synthetic oligonucleotide; CTG chr2 60504215 60504236 60504232 60504237 +
cactgtggtttccccagcaatt

SEQ ID NO: 201837 - DNA, 22 bp, Artificial Sequence
  Synthetic oligonucleotide; CTG chr2 60504220 60504241 60504237 60504242 +
tggtttccccagcaattccaga

SEQ ID NO: 201838 - DNA, 22 bp, Artificial Sequence
  Synthetic oligonucleotide; TTT chr2 60504226 60504247 60504243 60504248 +
ccccagcaattccagaactgct

SEQ ID NO: 201839 - DNA, 22 bp, Artificial Sequence
  Synthetic oligonucleotide; TTC chr2 60504227 60504248 60504244 60504249 +
cccagcaattccagaactgctg

SEQ ID NO: 201840 - DNA, 22 bp, Artificial Sequence
  Synthetic oligonucleotide; TTC chr2 60504238 60504259 60504255 60504260 +
cagaactgctgcctaccggcac

SEQ ID NO: 201841 - DNA, 22 bp, Artificial Sequence
  Synthetic oligonucleotide; CTG chr2 60504246 60504267 60504263 60504268 +
ctgcctaccggcacgcatgcag

SEQ ID NO: 201842 - DNA, 22 bp, Artificial Sequence
  Synthetic oligonucleotide; CTG chr2 60504249 60504270 60504266 60504271 +
cctaccggcacgcatgcaggat

SEQ ID NO: 201843 - DNA, 22 bp, Artificial Sequence
  Synthetic oligonucleotide; CTA chr2 60504253 60504274 60504270 60504275 +
ccggcacgcatgcaggatcaat

SEQ ID NO: 201844 - DNA, 22 bp, Artificial Sequence
  Synthetic oligonucleotide; CTT chr2 60504294 60504315 60504311 60504316 +
ctgggtctgcctgggtccaccc

SEQ ID NO: 201845 - DNA, 22 bp, Artificial Sequence
  Synthetic oligonucleotide; TTC chr2 60504295 60504316 60504312 60504317 +
tgggtctgcctgggtccaccct

SEQ ID NO: 201846 - DNA, 22 bp, Artificial Sequence
  Synthetic oligonucleotide; CTG chr2 60504297 60504318 60504314 60504319 +
ggtctgcctgggtccacccttc

SEQ ID NO: 201847 - DNA, 22 bp, Artificial Sequence
  Synthetic oligonucleotide; CTG chr2 60504303 60504324 60504320 60504325 +
cctgggtccacccttcctttct

SEQ ID NO: 201848 - DNA, 22 bp, Artificial Sequence
  Synthetic oligonucleotide; CTG chr2 60504307 60504328 60504324 60504329 +
ggtccacccttcctttcttagt

SEQ ID NO: 201849 - DNA, 22 bp, Artificial Sequence
  Synthetic oligonucleotide; CTT chr2 60504318 60504339 60504335 60504340 +
cctttcttagtcactgcaagat

SEQ ID NO: 201850 - DNA, 22 bp, Artificial Sequence
  Synthetic oligonucleotide; TTC chr2 60504319 60504340 60504336 60504341 +
ctttcttagtcactgcaagatt

SEQ ID NO: 201851 - DNA, 22 bp, Artificial Sequence
  Synthetic oligonucleotide; CTT chr2 60504322 60504343 60504339 60504344 +
tcttagtcactgcaagatttca

SEQ ID NO: 201852 - DNA, 22 bp, Artificial Sequence
  Synthetic oligonucleotide; TTT chr2 60504323 60504344 60504340 60504345 +
cttagtcactgcaagatttcac

SEQ ID NO: 201853 - DNA, 22 bp, Artificial Sequence
  Synthetic oligonucleotide; TTC chr2 60504324 60504345 60504341 60504346 +
ttagtcactgcaagatttcacc

SEQ ID NO: 201854 - DNA, 22 bp, Artificial Sequence
  Synthetic oligonucleotide; CTT chr2 60504326 60504347 60504343 60504348 +
agtcactgcaagatttcaccca

SEQ ID NO: 201855 - DNA, 22 bp, Artificial Sequence
  Synthetic oligonucleotide; TTA chr2 60504327 60504348 60504344 60504349 +
gtcactgcaagatttcacccag

SEQ ID NO: 201856 - DNA, 22 bp, Artificial Sequence
  Synthetic oligonucleotide; CTG chr2 60504334 60504355 60504351 60504356 +
caagatttcacccagcccagcc

SEQ ID NO: 201857 - DNA, 22 bp, Artificial Sequence
  Synthetic oligonucleotide; TTT chr2 60504342 60504363 60504359 60504364 +
cacccagcccagccacccactg

SEQ ID NO: 201858 - DNA, 22 bp, Artificial Sequence
  Synthetic oligonucleotide; TTC chr2 60504343 60504364 60504360 60504365 +
acccagcccagccacccactga

SEQ ID NO: 201859 - DNA, 22 bp, Artificial Sequence
  Synthetic oligonucleotide; CTG chr2 60504364 60504385 60504381 60504386 +
aaaaggcagaggaggccaccta

SEQ ID NO: 201860 - DNA, 22 bp, Artificial Sequence
  Synthetic oligonucleotide; CTA chr2 60504386 60504407 60504403 60504408 +
tctgaatgctaggatatgacac

SEQ ID NO: 201861 - DNA, 22 bp, Artificial Sequence
  Synthetic oligonucleotide; CTG chr2 60504390 60504411 60504407 60504412 +
aatgctaggatatgacacactt

SEQ ID NO: 201862 - DNA, 22 bp, Artificial Sequence
  Synthetic oligonucleotide; CTA chr2 60504397 60504418 60504414 60504419 +
ggatatgacacacttgaacctt

SEQ ID NO: 201863 - DNA, 22 bp, Artificial Sequence
  Synthetic oligonucleotide; CTT chr2 60504412 60504433 60504429 60504434 +
gaaccttcctcctggccagcct

SEQ ID NO: 201864 - DNA, 22 bp, Artificial Sequence
  Synthetic oligonucleotide; TTG chr2 60504413 60504434 60504430 60504435 +
aaccttcctcctggccagcctg

SEQ ID NO: 201865 - DNA, 22 bp, Artificial Sequence
  Synthetic oligonucleotide; CTT chr2 60504419 60504440 60504436 60504441 +
cctcctggccagcctgctctcc

SEQ ID NO: 201866 - DNA, 22 bp, Artificial Sequence
  Synthetic oligonucleotide; TTC chr2 60504420 60504441 60504437 60504442 +
ctcctggccagcctgctctccc

SEQ ID NO: 201867 - DNA, 22 bp, Artificial Sequence
  Synthetic oligonucleotide; CTC chr2 60504423 60504444 60504440 60504445 +
ctggccagcctgctctcccaaa

SEQ ID NO: 201868 - DNA, 22 bp, Artificial Sequence
  Synthetic oligonucleotide; CTG chr2 60504426 60504447 60504443 60504448 +
gccagcctgctctcccaaagaa

SEQ ID NO: 201869 - DNA, 22 bp, Artificial Sequence
  Synthetic oligonucleotide; CTG chr2 60504435 60504456 60504452 60504457 +
ctctcccaaagaaggaataaca

SEQ ID NO: 201870 - DNA, 22 bp, Artificial Sequence
  Synthetic oligonucleotide; CTC chr2 60504438 60504459 60504455 60504460 +
tcccaaagaaggaataacagaa

SEQ ID NO: 201871 - DNA, 22 bp, Artificial Sequence
  Synthetic oligonucleotide; CTC chr2 60504440 60504461 60504457 60504462 +
ccaaagaaggaataacagaaca

SEQ ID NO: 201872 - DNA, 22 bp, Artificial Sequence
  Synthetic oligonucleotide; CTC chr2 60504476 60504497 60504493 60504498 +
tgactacttctggtttgtaaat

SEQ ID NO: 201873 - DNA, 22 bp, Artificial Sequence
  Synthetic oligonucleotide; CTG chr2 60504478 60504499 60504495 60504500 +
actacttctggtttgtaaattt

SEQ ID NO: 201874 - DNA, 22 bp, Artificial Sequence
  Synthetic oligonucleotide; CTA chr2 60504482 60504503 60504499 60504504 +
cttctggtttgtaaatttatac

SEQ ID NO: 201875 - DNA, 22 bp, Artificial Sequence
  Synthetic oligonucleotide; CTT chr2 60504485 60504506 60504502 60504507 +
ctggtttgtaaatttataccaa

SEQ ID NO: 201876 - DNA, 22 bp, Artificial Sequence
  Synthetic oligonucleotide; TTC chr2 60504486 60504507 60504503 60504508 +
tggtttgtaaatttataccaat

SEQ ID NO: 201877 - DNA, 22 bp, Artificial Sequence
  Synthetic oligonucleotide; CTG chr2 60504488 60504509 60504505 60504510 +
gtttgtaaatttataccaatgt

SEQ ID NO: 201878 - DNA, 22 bp, Artificial Sequence
  Synthetic oligonucleotide; TTT chr2 60504492 60504513 60504509 60504514 +
gtaaatttataccaatgttctt

SEQ ID NO: 201879 - DNA, 22 bp, Artificial Sequence
  Synthetic oligonucleotide; TTG chr2 60504493 60504514 60504510 60504515 +
taaatttataccaatgttcttc

SEQ ID NO: 201880 - DNA, 22 bp, Artificial Sequence
  Synthetic oligonucleotide; TTT chr2 60504500 60504521 60504517 60504522 +
ataccaatgttcttcttgaagt

SEQ ID NO: 201881 - DNA, 22 bp, Artificial Sequence
  Synthetic oligonucleotide; TTA chr2 60504501 60504522 60504518 60504523 +
taccaatgttcttcttgaagtg

SEQ ID NO: 201882 - DNA, 22 bp, Artificial Sequence
  Synthetic oligonucleotide; TTC chr2 60504512 60504533 60504529 60504534 +
ttcttgaagtgggagctcagca

SEQ ID NO: 201883 - DNA, 22 bp, Artificial Sequence
  Synthetic oligonucleotide; CTT chr2 60504514 60504535 60504531 60504536 +
cttgaagtgggagctcagcatc

SEQ ID NO: 201884 - DNA, 22 bp, Artificial Sequence
  Synthetic oligonucleotide; TTC chr2 60504515 60504536 60504532 60504537 +
ttgaagtgggagctcagcatcg

SEQ ID NO: 201885 - DNA, 22 bp, Artificial Sequence
  Synthetic oligonucleotide; CTT chr2 60504517 60504538 60504534 60504539 +
gaagtgggagctcagcatcggg

SEQ ID NO: 201886 - DNA, 22 bp, Artificial Sequence
  Synthetic oligonucleotide; TTG chr2 60504518 60504539 60504535 60504540 +
aagtgggagctcagcatcggga

SEQ ID NO: 201887 - DNA, 22 bp, Artificial Sequence
  Synthetic oligonucleotide; CTC chr2 60504530 60504551 60504547 60504552 +
agcatcgggacacccagaaaaa

SEQ ID NO: 201888 - DNA, 22 bp, Artificial Sequence
  Synthetic oligonucleotide; CTC chr2 60504560 60504581 60504577 60504582 +
caaggcaaaaagcaaatagcag

SEQ ID NO: 201889 - DNA, 22 bp, Artificial Sequence
  Synthetic oligonucleotide; CTG chr2 60504592 60504613 60504609 60504614 +
ctgaaacagccaactctgtctc

SEQ ID NO: 201890 - DNA, 22 bp, Artificial Sequence
  Synthetic oligonucleotide; CTG chr2 60504595 60504616 60504612 60504617 +
aaacagccaactctgtctctgt

SEQ ID NO: 201891 - DNA, 22 bp, Artificial Sequence
  Synthetic oligonucleotide; CTC chr2 60504608 60504629 60504625 60504630 +
tgtctctgtctcccccaagccc

SEQ ID NO: 201892 - DNA, 22 bp, Artificial Sequence
  Synthetic oligonucleotide; CTG chr2 60504610 60504631 60504627 60504632 +
tctctgtctcccccaagccctc

SEQ ID NO: 201893 - DNA, 22 bp, Artificial Sequence
  Synthetic oligonucleotide; CTC chr2 60504614 60504635 60504631 60504636 +
tgtctcccccaagccctcctag

SEQ ID NO: 201894 - DNA, 22 bp, Artificial Sequence
  Synthetic oligonucleotide; CTG chr2 60504616 60504637 60504633 60504638 +
tctcccccaagccctcctagtc

SEQ ID NO: 201895 - DNA, 22 bp, Artificial Sequence
  Synthetic oligonucleotide; CTC chr2 60504620 60504641 60504637 60504642 +
ccccaagccctcctagtcagaa

SEQ ID NO: 201896 - DNA, 22 bp, Artificial Sequence
  Synthetic oligonucleotide; CTC chr2 60504632 60504653 60504649 60504654 +
ctagtcagaacgttctctcagc

SEQ ID NO: 201897 - DNA, 22 bp, Artificial Sequence
  Synthetic oligonucleotide; CTA chr2 60504635 60504656 60504652 60504657 +
gtcagaacgttctctcagcatt

SEQ ID NO: 201898 - DNA, 22 bp, Artificial Sequence
  Synthetic oligonucleotide; TTC chr2 60504647 60504668 60504664 60504669 +
tctcagcatttcagcaggtact

SEQ ID NO: 201899 - DNA, 22 bp, Artificial Sequence
  Synthetic oligonucleotide; CTC chr2 60504649 60504670 60504666 60504671 +
tcagcatttcagcaggtactgc

SEQ ID NO: 201900 - DNA, 22 bp, Artificial Sequence
  Synthetic oligonucleotide; CTC chr2 60504651 60504672 60504668 60504673 +
agcatttcagcaggtactgctc

SEQ ID NO: 201901 - DNA, 22 bp, Artificial Sequence
  Synthetic oligonucleotide; TTT chr2 60504658 60504679 60504675 60504680 +
cagcaggtactgctcacctgga

SEQ ID NO: 201902 - DNA, 22 bp, Artificial Sequence
  Synthetic oligonucleotide; TTC chr2 60504659 60504680 60504676 60504681 +
agcaggtactgctcacctggaa

SEQ ID NO: 201903 - DNA, 22 bp, Artificial Sequence
  Synthetic oligonucleotide; CTG chr2 60504670 60504691 60504687 60504692 +
ctcacctggaaatacagctgat

SEQ ID NO: 201904 - DNA, 22 bp, Artificial Sequence
  Synthetic oligonucleotide; CTC chr2 60504673 60504694 60504690 60504695 +
acctggaaatacagctgatgta

SEQ ID NO: 201905 - DNA, 22 bp, Artificial Sequence
  Synthetic oligonucleotide; CTG chr2 60504678 60504699 60504695 60504700 +
gaaatacagctgatgtatttac

SEQ ID NO: 201906 - DNA, 22 bp, Artificial Sequence
  Synthetic oligonucleotide; CTG chr2 60504690 60504711 60504707 60504712 +
atgtatttactgagaagcttct

SEQ ID NO: 201907 - DNA, 22 bp, Artificial Sequence
  Synthetic oligonucleotide; TTT chr2 60504698 60504719 60504715 60504720 +
actgagaagcttcttcaagctt

SEQ ID NO: 201908 - DNA, 22 bp, Artificial Sequence
  Synthetic oligonucleotide; TTA chr2 60504699 60504720 60504716 60504721 +
ctgagaagcttcttcaagcttt

SEQ ID NO: 201909 - DNA, 22 bp, Artificial Sequence
  Synthetic oligonucleotide; CTG chr2 60504702 60504723 60504719 60504724 +
agaagcttcttcaagctttcta

SEQ ID NO: 201910 - DNA, 22 bp, Artificial Sequence
  Synthetic oligonucleotide; CTT chr2 60504710 60504731 60504727 60504732 +
cttcaagctttctactggtgct

SEQ ID NO: 201911 - DNA, 22 bp, Artificial Sequence
  Synthetic oligonucleotide; TTC chr2 60504711 60504732 60504728 60504733 +
ttcaagctttctactggtgctt

SEQ ID NO: 201912 - DNA, 22 bp, Artificial Sequence
  Synthetic oligonucleotide; CTT chr2 60504713 60504734 60504730 60504735 +
caagctttctactggtgcttag

SEQ ID NO: 201913 - DNA, 22 bp, Artificial Sequence
  Synthetic oligonucleotide; TTC chr2 60504714 60504735 60504731 60504736 +
aagctttctactggtgcttagg

SEQ ID NO: 201914 - DNA, 22 bp, Artificial Sequence
  Synthetic oligonucleotide; CTT chr2 60504720 60504741 60504737 60504742 +
tctactggtgcttagggacaat

SEQ ID NO: 201915 - DNA, 22 bp, Artificial Sequence
  Synthetic oligonucleotide; TTT chr2 60504721 60504742 60504738 60504743 +
ctactggtgcttagggacaatg

SEQ ID NO: 201916 - DNA, 22 bp, Artificial Sequence
  Synthetic oligonucleotide; TTC chr2 60504722 60504743 60504739 60504744 +
tactggtgcttagggacaatgc

SEQ ID NO: 201917 - DNA, 22 bp, Artificial Sequence
  Synthetic oligonucleotide; CTA chr2 60504724 60504745 60504741 60504746 +
ctggtgcttagggacaatgcca

SEQ ID NO: 201918 - DNA, 22 bp, Artificial Sequence
  Synthetic oligonucleotide; CTG chr2 60504727 60504748 60504744 60504749 +
gtgcttagggacaatgccaatc

SEQ ID NO: 201919 - DNA, 22 bp, Artificial Sequence
  Synthetic oligonucleotide; CTT chr2 60504733 60504754 60504750 60504755 +
agggacaatgccaatcaagtct

SEQ ID NO: 201920 - DNA, 22 bp, Artificial Sequence
  Synthetic oligonucleotide; TTA chr2 60504734 60504755 60504751 60504756 +
gggacaatgccaatcaagtctt

SEQ ID NO: 201921 - DNA, 22 bp, Artificial Sequence
  Synthetic oligonucleotide; CTT chr2 60504756 60504777 60504773 60504778 +
gaaattatatagagaggtggaa

SEQ ID NO: 201922 - DNA, 22 bp, Artificial Sequence
  Synthetic oligonucleotide; TTG chr2 60504757 60504778 60504774 60504779 +
aaattatatagagaggtggaat

SEQ ID NO: 201923 - DNA, 22 bp, Artificial Sequence
  Synthetic oligonucleotide; TTA chr2 60504763 60504784 60504780 60504785 +
tatagagaggtggaatatcagg

SEQ ID NO: 201924 - DNA, 22 bp, Artificial Sequence
  Synthetic oligonucleotide; CTG chr2 60504795 60504816 60504812 60504817 +
tccctgaaaatgcttaaaagat

SEQ ID NO: 201925 - DNA, 22 bp, Artificial Sequence
  Synthetic oligonucleotide; CTG chr2 60504801 60504822 60504818 60504823 +
aaaatgcttaaaagatcaaact

SEQ ID NO: 201926 - DNA, 22 bp, Artificial Sequence
  Synthetic oligonucleotide; CTT chr2 60504810 60504831 60504827 60504832 +
aaaagatcaaactgattcctat

SEQ ID NO: 201927 - DNA, 22 bp, Artificial Sequence
  Synthetic oligonucleotide; TTA chr2 60504811 60504832 60504828 60504833 +
aaagatcaaactgattcctatc

SEQ ID NO: 201928 - DNA, 22 bp, Artificial Sequence
  Synthetic oligonucleotide; CTG chr2 60504824 60504845 60504841 60504846 +
attcctatcacatgcctcccct

SEQ ID NO: 201929 - DNA, 22 bp, Artificial Sequence
  Synthetic oligonucleotide; TTC chr2 60504828 60504849 60504845 60504850 +
ctatcacatgcctcccctacca

SEQ ID NO: 201930 - DNA, 22 bp, Artificial Sequence
  Synthetic oligonucleotide; CTA chr2 60504831 60504852 60504848 60504853 +
tcacatgcctcccctaccagtg

SEQ ID NO: 201931 - DNA, 22 bp, Artificial Sequence
  Synthetic oligonucleotide; CTC chr2 60504842 60504863 60504859 60504864 +
ccctaccagtgagcgcccacca

SEQ ID NO: 201932 - DNA, 22 bp, Artificial Sequence
  Synthetic oligonucleotide; CTA chr2 60504847 60504868 60504864 60504869 +
ccagtgagcgcccaccactagc

SEQ ID NO: 201933 - DNA, 22 bp, Artificial Sequence
  Synthetic oligonucleotide; CTA chr2 60504867 60504888 60504884 60504889 +
gcttccttgctccaaactatta

SEQ ID NO: 201934 - DNA, 22 bp, Artificial Sequence
  Synthetic oligonucleotide; CTT chr2 60504871 60504892 60504888 60504893 +
ccttgctccaaactattaaaac

SEQ ID NO: 201935 - DNA, 22 bp, Artificial Sequence
  Synthetic oligonucleotide; TTC chr2 60504872 60504893 60504889 60504894 +
cttgctccaaactattaaaaca

SEQ ID NO: 201936 - DNA, 22 bp, Artificial Sequence
  Synthetic oligonucleotide; CTT chr2 60504875 60504896 60504892 60504897 +
gctccaaactattaaaacagag

SEQ ID NO: 201937 - DNA, 22 bp, Artificial Sequence
  Synthetic oligonucleotide; TTG chr2 60504876 60504897 60504893 60504898 +
ctccaaactattaaaacagagc

SEQ ID NO: 201938 - DNA, 22 bp, Artificial Sequence
  Synthetic oligonucleotide; CTC chr2 60504879 60504900 60504896 60504901 +
caaactattaaaacagagcgtc

SEQ ID NO: 201939 - DNA, 22 bp, Artificial Sequence
  Synthetic oligonucleotide; CTA chr2 60504886 60504907 60504903 60504908 +
ttaaaacagagcgtccccccaa

SEQ ID NO: 201940 - DNA, 22 bp, Artificial Sequence
  Synthetic oligonucleotide; TTA chr2 60504889 60504910 60504906 60504911 +
aaacagagcgtccccccaaaaa

SEQ ID NO: 201941 - DNA, 22 bp, Artificial Sequence
  Synthetic oligonucleotide; CTT chr2 60504920 60504941 60504937 60504942 +
ctgcaagccacaacttccctac

SEQ ID NO: 201942 - DNA, 22 bp, Artificial Sequence
  Synthetic oligonucleotide; TTC chr2 60504921 60504942 60504938 60504943 +
tgcaagccacaacttccctacc

SEQ ID NO: 201943 - DNA, 22 bp, Artificial Sequence
  Synthetic oligonucleotide; CTG chr2 60504923 60504944 60504940 60504945 +
caagccacaacttccctaccct

SEQ ID NO: 201944 - DNA, 22 bp, Artificial Sequence
  Synthetic oligonucleotide; CTT chr2 60504936 60504957 60504953 60504958 +
ccctaccctgtgtgcaggctgt

SEQ ID NO: 201945 - DNA, 22 bp, Artificial Sequence
  Synthetic oligonucleotide; TTC chr2 60504937 60504958 60504954 60504959 +
cctaccctgtgtgcaggctgtg

SEQ ID NO: 201946 - DNA, 22 bp, Artificial Sequence
  Synthetic oligonucleotide; CTA chr2 60504941 60504962 60504958 60504963 +
ccctgtgtgcaggctgtggaag

SEQ ID NO: 201947 - DNA, 22 bp, Artificial Sequence
  Synthetic oligonucleotide; CTG chr2 60504946 60504967 60504963 60504968 +
tgtgcaggctgtggaagcgtgg

SEQ ID NO: 201948 - DNA, 22 bp, Artificial Sequence
  Synthetic oligonucleotide; CTG chr2 60504957 60504978 60504974 60504979 +
tggaagcgtggggtggacccag

SEQ ID NO: 201949 - DNA, 22 bp, Artificial Sequence
  Synthetic oligonucleotide; TTC chr2 60504994 60505015 60505011 60505016 +
tggatcagaatccctagtctac

SEQ ID NO: 201950 - DNA, 22 bp, Artificial Sequence
  Synthetic oligonucleotide; CTG chr2 60504996 60505017 60505013 60505018 +
gatcagaatccctagtctaccc

SEQ ID NO: 201951 - DNA, 22 bp, Artificial Sequence
  Synthetic oligonucleotide; CTA chr2 60505010 60505031 60505027 60505032 +
gtctacccctgcggctgcatga

SEQ ID NO: 201952 - DNA, 22 bp, Artificial Sequence
  Synthetic oligonucleotide; CTA chr2 60505015 60505036 60505032 60505037 +
cccctgcggctgcatgagacca

SEQ ID NO: 201953 - DNA, 22 bp, Artificial Sequence
  Synthetic oligonucleotide; CTG chr2 60505021 60505042 60505038 60505043 +
cggctgcatgagaccagacctg

SEQ ID NO: 201954 - DNA, 22 bp, Artificial Sequence
  Synthetic oligonucleotide; CTG chr2 60505027 60505048 60505044 60505049 +
catgagaccagacctgccattt

SEQ ID NO: 201955 - DNA, 22 bp, Artificial Sequence
  Synthetic oligonucleotide; CTG chr2 60505043 60505064 60505060 60505065 +
ccatttaacctctctaagcttc

SEQ ID NO: 201956 - DNA, 22 bp, Artificial Sequence
  Synthetic oligonucleotide; TTT chr2 60505049 60505070 60505066 60505071 +
aacctctctaagcttcaactac

SEQ ID NO: 201957 - DNA, 22 bp, Artificial Sequence
  Synthetic oligonucleotide; TTA chr2 60505050 60505071 60505067 60505072 +
acctctctaagcttcaactacc

SEQ ID NO: 201958 - DNA, 22 bp, Artificial Sequence
  Synthetic oligonucleotide; CTC chr2 60505055 60505076 60505072 60505077 +
tctaagcttcaactaccctttc

SEQ ID NO: 201959 - DNA, 22 bp, Artificial Sequence
  Synthetic oligonucleotide; CTC chr2 60505057 60505078 60505074 60505079 +
taagcttcaactaccctttctc

SEQ ID NO: 201960 - DNA, 22 bp, Artificial Sequence
  Synthetic oligonucleotide; CTA chr2 60505059 60505080 60505076 60505081 +
agcttcaactaccctttctcct

SEQ ID NO: 201961 - DNA, 22 bp, Artificial Sequence
  Synthetic oligonucleotide; CTT chr2 60505064 60505085 60505081 60505086 +
caactaccctttctcctgcctc

SEQ ID NO: 201962 - DNA, 22 bp, Artificial Sequence
  Synthetic oligonucleotide; TTC chr2 60505065 60505086 60505082 60505087 +
aactaccctttctcctgcctct

SEQ ID NO: 201963 - DNA, 22 bp, Artificial Sequence
  Synthetic oligonucleotide; CTA chr2 60505070 60505091 60505087 60505092 +
ccctttctcctgcctcttcaca

SEQ ID NO: 201964 - DNA, 22 bp, Artificial Sequence
  Synthetic oligonucleotide; CTT chr2 60505075 60505096 60505092 60505097 +
tctcctgcctcttcacagggtt

SEQ ID NO: 201965 - DNA, 22 bp, Artificial Sequence
  Synthetic oligonucleotide; TTT chr2 60505076 60505097 60505093 60505098 +
ctcctgcctcttcacagggtta

SEQ ID NO: 201966 - DNA, 22 bp, Artificial Sequence
  Synthetic oligonucleotide; TTC chr2 60505077 60505098 60505094 60505099 +
tcctgcctcttcacagggttac

SEQ ID NO: 201967 - DNA, 22 bp, Artificial Sequence
  Synthetic oligonucleotide; CTC chr2 60505079 60505100 60505096 60505101 +
ctgcctcttcacagggttactc

SEQ ID NO: 201968 - DNA, 22 bp, Artificial Sequence
  Synthetic oligonucleotide; CTG chr2 60505082 60505103 60505099 60505104 +
cctcttcacagggttactcatg

SEQ ID NO: 201969 - DNA, 22 bp, Artificial Sequence
  Synthetic oligonucleotide; CTC chr2 60505086 60505107 60505103 60505108 +
ttcacagggttactcatgaggt

SEQ ID NO: 201970 - DNA, 22 bp, Artificial Sequence
  Synthetic oligonucleotide; CTT chr2 60505088 60505109 60505105 60505110 +
cacagggttactcatgaggtga

SEQ ID NO: 201971 - DNA, 22 bp, Artificial Sequence
  Synthetic oligonucleotide; TTC chr2 60505089 60505110 60505106 60505111 +
acagggttactcatgaggtgag

SEQ ID NO: 201972 - DNA, 22 bp, Artificial Sequence
  Synthetic oligonucleotide; TTA chr2 60505098 60505119 60505115 60505120 +
ctcatgaggtgagtctcaattt

SEQ ID NO: 201973 - DNA, 22 bp, Artificial Sequence
  Synthetic oligonucleotide; CTC chr2 60505101 60505122 60505118 60505123 +
atgaggtgagtctcaatttgac

SEQ ID NO: 201974 - DNA, 22 bp, Artificial Sequence
  Synthetic oligonucleotide; CTC chr2 60505115 60505136 60505132 60505137 +
aatttgacaatactcctcaaag

SEQ ID NO: 201975 - DNA, 22 bp, Artificial Sequence
  Synthetic oligonucleotide; TTT chr2 60505120 60505141 60505137 60505142 +
gacaatactcctcaaagggctt

SEQ ID NO: 201976 - DNA, 22 bp, Artificial Sequence
  Synthetic oligonucleotide; TTG chr2 60505121 60505142 60505138 60505143 +
acaatactcctcaaagggctta

SEQ ID NO: 201977 - DNA, 22 bp, Artificial Sequence
  Synthetic oligonucleotide; CTC chr2 60505130 60505151 60505147 60505152 +
ctcaaagggcttactcaaaaaa

SEQ ID NO: 201978 - DNA, 22 bp, Artificial Sequence
  Synthetic oligonucleotide; CTC chr2 60505133 60505154 60505150 60505155 +
aaagggcttactcaaaaaaaaa

SEQ ID NO: 201979 - DNA, 22 bp, Artificial Sequence
  Synthetic oligonucleotide; CTT chr2 60505142 60505163 60505159 60505164 +
actcaaaaaaaaaatgtgattt

SEQ ID NO: 201980 - DNA, 22 bp, Artificial Sequence
  Synthetic oligonucleotide; TTA chr2 60505143 60505164 60505160 60505165 +
ctcaaaaaaaaaatgtgatttt

SEQ ID NO: 201981 - DNA, 22 bp, Artificial Sequence
  Synthetic oligonucleotide; CTC chr2 60505146 60505167 60505163 60505168 +
aaaaaaaaaatgtgattttatc

SEQ ID NO: 201982 - DNA, 22 bp, Artificial Sequence
  Synthetic oligonucleotide; TTT chr2 60505164 60505185 60505181 60505186 +
tatccgtatcctcattactaac

SEQ ID NO: 201983 - DNA, 22 bp, Artificial Sequence
  Synthetic oligonucleotide; TTT chr2 60505165 60505186 60505182 60505187 +
atccgtatcctcattactaaca

SEQ ID NO: 201984 - DNA, 22 bp, Artificial Sequence
  Synthetic oligonucleotide; TTA chr2 60505166 60505187 60505183 60505188 +
tccgtatcctcattactaacag

SEQ ID NO: 201985 - DNA, 22 bp, Artificial Sequence
  Synthetic oligonucleotide; CTC chr2 60505177 60505198 60505194 60505199 +
attactaacagcacaatggaca

SEQ ID NO: 201986 - DNA, 22 bp, Artificial Sequence
  Synthetic oligonucleotide; TTA chr2 60505181 60505202 60505198 60505203 +
ctaacagcacaatggacattcg

SEQ ID NO: 201987 - DNA, 22 bp, Artificial Sequence
  Synthetic oligonucleotide; CTA chr2 60505184 60505205 60505201 60505206 +
acagcacaatggacattcgaaa

SEQ ID NO: 201988 - DNA, 22 bp, Artificial Sequence
  Synthetic oligonucleotide; TTC chr2 60505202 60505223 60505219 60505224 +
gaaagggatgggcccaattttt

SEQ ID NO: 201989 - DNA, 22 bp, Artificial Sequence
  Synthetic oligonucleotide; TTT chr2 60505222 60505243 60505239 60505244 +
ttcataagccaaaaaagctaga

SEQ ID NO: 201990 - DNA, 22 bp, Artificial Sequence
  Synthetic oligonucleotide; TTT chr2 60505223 60505244 60505240 60505245 +
tcataagccaaaaaagctagag

SEQ ID NO: 201991 - DNA, 22 bp, Artificial Sequence
  Synthetic oligonucleotide; TTT chr2 60505224 60505245 60505241 60505246 +
cataagccaaaaaagctagagg

SEQ ID NO: 201992 - DNA, 22 bp, Artificial Sequence
  Synthetic oligonucleotide; TTC chr2 60505225 60505246 60505242 60505247 +
ataagccaaaaaagctagagga

SEQ ID NO: 201993 - DNA, 22 bp, Artificial Sequence
  Synthetic oligonucleotide; CTA chr2 60505242 60505263 60505259 60505264 +
gaggatcggagagaaaagaagg

SEQ ID NO: 201994 - DNA, 22 bp, Artificial Sequence
  Synthetic oligonucleotide; CTC chr2 60505275 60505296 60505292 60505297 +
agaaacggcttcaagggtgtcc

SEQ ID NO: 201995 - DNA, 22 bp, Artificial Sequence
  Synthetic oligonucleotide; CTT chr2 60505286 60505307 60505303 60505308 +
caagggtgtcctttggcacccc

SEQ ID NO: 201996 - DNA, 22 bp, Artificial Sequence
  Synthetic oligonucleotide; TTC chr2 60505287 60505308 60505304 60505309 +
aagggtgtcctttggcacccca

SEQ ID NO: 201997 - DNA, 22 bp, Artificial Sequence
  Synthetic oligonucleotide; CTT chr2 60505299 60505320 60505316 60505321 +
tggcaccccattcttccagatt

SEQ ID NO: 201998 - DNA, 22 bp, Artificial Sequence
  Synthetic oligonucleotide; TTT chr2 60505300 60505321 60505317 60505322 +
ggcaccccattcttccagattg

SEQ ID NO: 201999 - DNA, 22 bp, Artificial Sequence
  Synthetic oligonucleotide; TTG chr2 60505301 60505322 60505318 60505323 +
gcaccccattcttccagattgt

SEQ ID NO: 202000 - DNA, 22 bp, Artificial Sequence
  Synthetic oligonucleotide; TTC chr2 60505312 60505333 60505329 60505334 +
ttccagattgttccaaatgcct

SEQ ID NO: 202001 - DNA, 22 bp, Artificial Sequence
  Synthetic oligonucleotide; CTT chr2 60505314 60505335 60505331 60505336 +
ccagattgttccaaatgcctgc

SEQ ID NO: 202002 - DNA, 22 bp, Artificial Sequence
  Synthetic oligonucleotide; TTC chr2 60505315 60505336 60505332 60505337 +
cagattgttccaaatgcctgct

SEQ ID NO: 202003 - DNA, 22 bp, Artificial Sequence
  Synthetic oligonucleotide; TTG chr2 60505322 60505343 60505339 60505344 +
ttccaaatgcctgctgcagtaa

SEQ ID NO: 202004 - DNA, 22 bp, Artificial Sequence
  Synthetic oligonucleotide; TTC chr2 60505325 60505346 60505342 60505347 +
caaatgcctgctgcagtaataa

SEQ ID NO: 202005 - DNA, 22 bp, Artificial Sequence
  Synthetic oligonucleotide; CTG chr2 60505335 60505356 60505352 60505357 +
ctgcagtaataacagccccaaa

SEQ ID NO: 202006 - DNA, 22 bp, Artificial Sequence
  Synthetic oligonucleotide; CTG chr2 60505338 60505359 60505355 60505360 +
cagtaataacagccccaaaaga

SEQ ID NO: 202007 - DNA, 22 bp, Artificial Sequence
  Synthetic oligonucleotide; CTT chr2 60505371 60505392 60505388 60505393 +
tgtcaggacttgtaggtgaaat

SEQ ID NO: 202008 - DNA, 22 bp, Artificial Sequence
  Synthetic oligonucleotide; TTT chr2 60505372 60505393 60505389 60505394 +
gtcaggacttgtaggtgaaatg

SEQ ID NO: 202009 - DNA, 22 bp, Artificial Sequence
  Synthetic oligonucleotide; TTG chr2 60505373 60505394 60505390 60505395 +
tcaggacttgtaggtgaaatgt

SEQ ID NO: 202010 - DNA, 22 bp, Artificial Sequence
  Synthetic oligonucleotide; CTT chr2 60505382 60505403 60505399 60505404 +
gtaggtgaaatgtgttggagca

SEQ ID NO: 202011 - DNA, 22 bp, Artificial Sequence
  Synthetic oligonucleotide; TTG chr2 60505383 60505404 60505400 60505405 +
taggtgaaatgtgttggagcag

SEQ ID NO: 202012 - DNA, 22 bp, Artificial Sequence
  Synthetic oligonucleotide; TTG chr2 60505399 60505420 60505416 60505421 +
gagcagctgtcagcttggggaa

SEQ ID NO: 202013 - DNA, 22 bp, Artificial Sequence
  Synthetic oligonucleotide; CTG chr2 60505408 60505429 60505425 60505430 +
tcagcttggggaaaatcactca

SEQ ID NO: 202014 - DNA, 22 bp, Artificial Sequence
  Synthetic oligonucleotide; CTT chr2 60505415 60505436 60505432 60505437 +
ggggaaaatcactcatcaggta

SEQ ID NO: 202015 - DNA, 22 bp, Artificial Sequence
  Synthetic oligonucleotide; TTG chr2 60505416 60505437 60505433 60505438 +
gggaaaatcactcatcaggtag

SEQ ID NO: 202016 - DNA, 22 bp, Artificial Sequence
  Synthetic oligonucleotide; CTC chr2 60505429 60505450 60505446 60505451 +
atcaggtagtcagccgagtgag

SEQ ID NO: 202017 - DNA, 22 bp, Artificial Sequence
  Synthetic oligonucleotide; CTG chr2 60505455 60505476 60505472 60505477 +
ccttcagctggacaaacactgc

SEQ ID NO: 202018 - DNA, 22 bp, Artificial Sequence
  Synthetic oligonucleotide; CTT chr2 60505459 60505480 60505476 60505481 +
cagctggacaaacactgcatcc

SEQ ID NO: 202019 - DNA, 22 bp, Artificial Sequence
  Synthetic oligonucleotide; TTC chr2 60505460 60505481 60505477 60505482 +
agctggacaaacactgcatcca

SEQ ID NO: 202020 - DNA, 22 bp, Artificial Sequence
  Synthetic oligonucleotide; CTG chr2 60505465 60505486 60505482 60505487 +
gacaaacactgcatccacacag

SEQ ID NO: 202021 - DNA, 22 bp, Artificial Sequence
  Synthetic oligonucleotide; CTG chr2 60505476 60505497 60505493 60505498 +
catccacacagggaacaagcgg

SEQ ID NO: 202022 - DNA, 22 bp, Artificial Sequence
  Synthetic oligonucleotide; CTT chr2 60505504 60505525 60505521 60505526 +
tcctgtccttcccttaggggcc

SEQ ID NO: 202023 - DNA, 22 bp, Artificial Sequence
  Synthetic oligonucleotide; TTT chr2 60505505 60505526 60505522 60505527 +
cctgtccttcccttaggggcca

SEQ ID NO: 202024 - DNA, 22 bp, Artificial Sequence
  Synthetic oligonucleotide; TTC chr2 60505506 60505527 60505523 60505528 +
ctgtccttcccttaggggccaa

SEQ ID NO: 202025 - DNA, 22 bp, Artificial Sequence
  Synthetic oligonucleotide; CTG chr2 60505509 60505530 60505526 60505531 +
tccttcccttaggggccaaacc

SEQ ID NO: 202026 - DNA, 22 bp, Artificial Sequence
  Synthetic oligonucleotide; CTT chr2 60505514 60505535 60505531 60505536 +
cccttaggggccaaaccagccc

SEQ ID NO: 202027 - DNA, 22 bp, Artificial Sequence
  Synthetic oligonucleotide; TTC chr2 60505515 60505536 60505532 60505537 +
ccttaggggccaaaccagccct

SEQ ID NO: 202028 - DNA, 22 bp, Artificial Sequence
  Synthetic oligonucleotide; CTT chr2 60505519 60505540 60505536 60505541 +
aggggccaaaccagccctcttt

SEQ ID NO: 202029 - DNA, 22 bp, Artificial Sequence
  Synthetic oligonucleotide; TTA chr2 60505520 60505541 60505537 60505542 +
ggggccaaaccagccctctttt

SEQ ID NO: 202030 - DNA, 22 bp, Artificial Sequence
  Synthetic oligonucleotide; CTC chr2 60505538 60505559 60505555 60505560 +
ttttaccttcttgtccaaccca

SEQ ID NO: 202031 - DNA, 22 bp, Artificial Sequence
  Synthetic oligonucleotide; CTT chr2 60505540 60505561 60505557 60505562 +
ttaccttcttgtccaacccagt

SEQ ID NO: 202032 - DNA, 22 bp, Artificial Sequence
  Synthetic oligonucleotide; TTT chr2 60505541 60505562 60505558 60505563 +
taccttcttgtccaacccagtg

SEQ ID NO: 202033 - DNA, 22 bp, Artificial Sequence
  Synthetic oligonucleotide; TTT chr2 60505542 60505563 60505559 60505564 +
accttcttgtccaacccagtgg

SEQ ID NO: 202034 - DNA, 22 bp, Artificial Sequence
  Synthetic oligonucleotide; TTA chr2 60505543 60505564 60505560 60505565 +
ccttcttgtccaacccagtggg

SEQ ID NO: 202035 - DNA, 22 bp, Artificial Sequence
  Synthetic oligonucleotide; CTT chr2 60505547 60505568 60505564 60505569 +
cttgtccaacccagtgggcctc

SEQ ID NO: 202036 - DNA, 22 bp, Artificial Sequence
  Synthetic oligonucleotide; TTC chr2 60505548 60505569 60505565 60505570 +
ttgtccaacccagtgggcctct

SEQ ID NO: 202037 - DNA, 22 bp, Artificial Sequence
  Synthetic oligonucleotide; CTT chr2 60505550 60505571 60505567 60505572 +
gtccaacccagtgggcctctct

SEQ ID NO: 202038 - DNA, 22 bp, Artificial Sequence
  Synthetic oligonucleotide; TTG chr2 60505551 60505572 60505568 60505573 +
tccaacccagtgggcctctctc

SEQ ID NO: 202039 - DNA, 22 bp, Artificial Sequence
  Synthetic oligonucleotide; CTC chr2 60505569 60505590 60505586 60505591 +
tctccctcaaatgcatacctcc

SEQ ID NO: 202040 - DNA, 22 bp, Artificial Sequence
  Synthetic oligonucleotide; CTC chr2 60505571 60505592 60505588 60505593 +
tccctcaaatgcatacctcctt

SEQ ID NO: 202041 - DNA, 22 bp, Artificial Sequence
  Synthetic oligonucleotide; CTC chr2 60505573 60505594 60505590 60505595 +
cctcaaatgcatacctccttct

SEQ ID NO: 202042 - DNA, 22 bp, Artificial Sequence
  Synthetic oligonucleotide; CTC chr2 60505577 60505598 60505594 60505599 +
aaatgcatacctccttctcttt

SEQ ID NO: 202043 - DNA, 22 bp, Artificial Sequence
  Synthetic oligonucleotide; CTC chr2 60505590 60505611 60505607 60505612 +
cttctctttcctccagctccct

SEQ ID NO: 202044 - DNA, 22 bp, Artificial Sequence
  Synthetic oligonucleotide; CTT chr2 60505593 60505614 60505610 60505615 +
ctctttcctccagctccctaag

SEQ ID NO: 202045 - DNA, 22 bp, Artificial Sequence
  Synthetic oligonucleotide; TTC chr2 60505594 60505615 60505611 60505616 +
tctttcctccagctccctaagc

SEQ ID NO: 202046 - DNA, 22 bp, Artificial Sequence
  Synthetic oligonucleotide; CTC chr2 60505596 60505617 60505613 60505618 +
tttcctccagctccctaagctg

SEQ ID NO: 202047 - DNA, 22 bp, Artificial Sequence
  Synthetic oligonucleotide; CTT chr2 60505598 60505619 60505615 60505620 +
tcctccagctccctaagctgtt

SEQ ID NO: 202048 - DNA, 22 bp, Artificial Sequence
  Synthetic oligonucleotide; TTT chr2 60505599 60505620 60505616 60505621 +
cctccagctccctaagctgttg

SEQ ID NO: 202049 - DNA, 22 bp, Artificial Sequence
  Synthetic oligonucleotide; TTC chr2 60505600 60505621 60505617 60505622 +
ctccagctccctaagctgttgt

SEQ ID NO: 202050 - DNA, 22 bp, Artificial Sequence
  Synthetic oligonucleotide; CTC chr2 60505603 60505624 60505620 60505625 +
cagctccctaagctgttgttca

SEQ ID NO: 202051 - DNA, 22 bp, Artificial Sequence
  Synthetic oligonucleotide; CTC chr2 60505609 60505630 60505626 60505631 +
cctaagctgttgttcagggcac

SEQ ID NO: 202052 - DNA, 22 bp, Artificial Sequence
  Synthetic oligonucleotide; CTA chr2 60505613 60505634 60505630 60505635 +
agctgttgttcagggcacagac

SEQ ID NO: 202053 - DNA, 22 bp, Artificial Sequence
  Synthetic oligonucleotide; CTG chr2 60505618 60505639 60505635 60505640 +
ttgttcagggcacagacagctc

SEQ ID NO: 202054 - DNA, 22 bp, Artificial Sequence
  Synthetic oligonucleotide; TTG chr2 60505621 60505642 60505638 60505643 +
ttcagggcacagacagctcttc

SEQ ID NO: 202055 - DNA, 22 bp, Artificial Sequence
  Synthetic oligonucleotide; TTC chr2 60505624 60505645 60505641 60505646 +
agggcacagacagctcttcagg

SEQ ID NO: 202056 - DNA, 22 bp, Artificial Sequence
  Synthetic oligonucleotide; CTC chr2 60505640 60505661 60505657 60505662 +
ttcaggctgccagagcaagaga

SEQ ID NO: 202057 - DNA, 22 bp, Artificial Sequence
  Synthetic oligonucleotide; CTT chr2 60505642 60505663 60505659 60505664 +
caggctgccagagcaagagagt

SEQ ID NO: 202058 - DNA, 22 bp, Artificial Sequence
  Synthetic oligonucleotide; TTC chr2 60505643 60505664 60505660 60505665 +
aggctgccagagcaagagagtt

SEQ ID NO: 202059 - DNA, 22 bp, Artificial Sequence
  Synthetic oligonucleotide; CTG chr2 60505649 60505670 60505666 60505671 +
ccagagcaagagagttaggaaa

SEQ ID NO: 202060 - DNA, 22 bp, Artificial Sequence
  Synthetic oligonucleotide; TTA chr2 60505666 60505687 60505683 60505688 +
ggaaataacgacccctccacat

SEQ ID NO: 202061 - DNA, 22 bp, Artificial Sequence
  Synthetic oligonucleotide; CTC chr2 60505683 60505704 60505700 60505705 +
cacatgcattcccacctcccgg

SEQ ID NO: 202062 - DNA, 22 bp, Artificial Sequence
  Synthetic oligonucleotide; TTC chr2 60505694 60505715 60505711 60505716 +
ccacctcccggaagcaggggac

SEQ ID NO: 202063 - DNA, 22 bp, Artificial Sequence
  Synthetic oligonucleotide; CTC chr2 60505701 60505722 60505718 60505723 +
ccggaagcaggggacacagctg

SEQ ID NO: 202064 - DNA, 22 bp, Artificial Sequence
  Synthetic oligonucleotide; CTG chr2 60505723 60505744 60505740 60505745 +
gccactctgtgacggagggtgg

SEQ ID NO: 202065 - DNA, 22 bp, Artificial Sequence
  Synthetic oligonucleotide; CTC chr2 60505730 60505751 60505747 60505752 +
tgtgacggagggtgggtaacct

SEQ ID NO: 202066 - DNA, 22 bp, Artificial Sequence
  Synthetic oligonucleotide; CTG chr2 60505732 60505753 60505749 60505754 +
tgacggagggtgggtaacctct

SEQ ID NO: 202067 - DNA, 22 bp, Artificial Sequence
  Synthetic oligonucleotide; CTC chr2 60505753 60505774 60505770 60505775 +
tctacctgggtctatcatttta

SEQ ID NO: 202068 - DNA, 22 bp, Artificial Sequence
  Synthetic oligonucleotide; CTC chr2 60505755 60505776 60505772 60505777 +
tacctgggtctatcattttaga

SEQ ID NO: 202069 - DNA, 22 bp, Artificial Sequence
  Synthetic oligonucleotide; CTA chr2 60505757 60505778 60505774 60505779 +
cctgggtctatcattttagaat

SEQ ID NO: 202070 - DNA, 22 bp, Artificial Sequence
  Synthetic oligonucleotide; CTG chr2 60505761 60505782 60505778 60505783 +
ggtctatcattttagaataaat

SEQ ID NO: 202071 - DNA, 22 bp, Artificial Sequence
  Synthetic oligonucleotide; CTA chr2 60505767 60505788 60505784 60505789 +
tcattttagaataaatcattcg

SEQ ID NO: 202072 - DNA, 22 bp, Artificial Sequence
  Synthetic oligonucleotide; TTT chr2 60505773 60505794 60505790 60505795 +
tagaataaatcattcgtggctg

SEQ ID NO: 202073 - DNA, 22 bp, Artificial Sequence
  Synthetic oligonucleotide; TTT chr2 60505774 60505795 60505791 60505796 +
agaataaatcattcgtggctga

SEQ ID NO: 202074 - DNA, 22 bp, Artificial Sequence
  Synthetic oligonucleotide; TTA chr2 60505775 60505796 60505792 60505797 +
gaataaatcattcgtggctgac

SEQ ID NO: 202075 - DNA, 22 bp, Artificial Sequence
  Synthetic oligonucleotide; TTC chr2 60505788 60505809 60505805 60505810 +
gtggctgactcttaaatgggaa

SEQ ID NO: 202076 - DNA, 22 bp, Artificial Sequence
  Synthetic oligonucleotide; CTG chr2 60505795 60505816 60505812 60505817 +
actcttaaatgggaagggccaa

SEQ ID NO: 202077 - DNA, 22 bp, Artificial Sequence
  Synthetic oligonucleotide; CTC chr2 60505799 60505820 60505816 60505821 +
ttaaatgggaagggccaattac

SEQ ID NO: 202078 - DNA, 22 bp, Artificial Sequence
  Synthetic oligonucleotide; CTT chr2 60505801 60505822 60505818 60505823 +
aaatgggaagggccaattacag

SEQ ID NO: 202079 - DNA, 22 bp, Artificial Sequence
  Synthetic oligonucleotide; TTA chr2 60505802 60505823 60505819 60505824 +
aatgggaagggccaattacaga

SEQ ID NO: 202080 - DNA, 22 bp, Artificial Sequence
  Synthetic oligonucleotide; TTA chr2 60505820 60505841 60505837 60505842 +
cagatatctctgagaacaactc

SEQ ID NO: 202081 - DNA, 22 bp, Artificial Sequence
  Synthetic oligonucleotide; CTC chr2 60505830 60505851 60505847 60505852 +
tgagaacaactctacctgaggg

SEQ ID NO: 202082 - DNA, 22 bp, Artificial Sequence
  Synthetic oligonucleotide; CTG chr2 60505832 60505853 60505849 60505854 +
agaacaactctacctgagggag

SEQ ID NO: 202083 - DNA, 22 bp, Artificial Sequence
  Synthetic oligonucleotide; CTC chr2 60505842 60505863 60505859 60505864 +
tacctgagggagggggaaatcc

SEQ ID NO: 202084 - DNA, 22 bp, Artificial Sequence
  Synthetic oligonucleotide; CTA chr2 60505844 60505865 60505861 60505866 +
cctgagggagggggaaatccct

SEQ ID NO: 202085 - DNA, 22 bp, Artificial Sequence
  Synthetic oligonucleotide; CTG chr2 60505848 60505869 60505865 60505870 +
agggagggggaaatccctccca

SEQ ID NO: 202086 - DNA, 22 bp, Artificial Sequence
  Synthetic oligonucleotide; CTC chr2 60505867 60505888 60505884 60505889 +
ccaaaacaacggtgggcagaaa

SEQ ID NO: 202087 - DNA, 22 bp, Artificial Sequence
  Synthetic oligonucleotide; CTG chr2 60505895 60505916 60505912 60505917 +
catcccgtaaatacccagaagc

SEQ ID NO: 202088 - DNA, 22 bp, Artificial Sequence
  Synthetic oligonucleotide; CTG chr2 60505934 60505955 60505951 60505956 +
gttcgtctgccagatgctgtgg

SEQ ID NO: 202089 - DNA, 22 bp, Artificial Sequence
  Synthetic oligonucleotide; TTC chr2 60505938 60505959 60505955 60505960 +
gtctgccagatgctgtggagat

SEQ ID NO: 202090 - DNA, 22 bp, Artificial Sequence
  Synthetic oligonucleotide; CTG chr2 60505943 60505964 60505960 60505965 +
ccagatgctgtggagatggcat

SEQ ID NO: 202091 - DNA, 22 bp, Artificial Sequence
  Synthetic oligonucleotide; CTG chr2 60505953 60505974 60505970 60505975 +
tggagatggcatggtggcattt

SEQ ID NO: 202092 - DNA, 22 bp, Artificial Sequence
  Synthetic oligonucleotide; TTT chr2 60505975 60505996 60505992 60505997 +
ggtaaataacccaaatagggct

SEQ ID NO: 202093 - DNA, 22 bp, Artificial Sequence
  Synthetic oligonucleotide; TTG chr2 60505976 60505997 60505993 60505998 +
gtaaataacccaaatagggctt

SEQ ID NO: 202094 - DNA, 22 bp, Artificial Sequence
  Synthetic oligonucleotide; CTT chr2 60505998 60506019 60506015 60506020 +
tgcagggtatgggacaccacac

SEQ ID NO: 202095 - DNA, 22 bp, Artificial Sequence
  Synthetic oligonucleotide; TTT chr2 60505999 60506020 60506016 60506021 +
gcagggtatgggacaccacact

SEQ ID NO: 202096 - DNA, 22 bp, Artificial Sequence
  Synthetic oligonucleotide; TTG chr2 60506000 60506021 60506017 60506022 +
cagggtatgggacaccacacta

SEQ ID NO: 202097 - DNA, 22 bp, Artificial Sequence
  Synthetic oligonucleotide; CTA chr2 60506022 60506043 60506039 60506044 +
ggctttgcagcccgggtgaaac

SEQ ID NO: 202098 - DNA, 22 bp, Artificial Sequence
  Synthetic oligonucleotide; CTT chr2 60506027 60506048 60506044 60506049 +
tgcagcccgggtgaaaccagat

SEQ ID NO: 202099 - DNA, 22 bp, Artificial Sequence
  Synthetic oligonucleotide; TTT chr2 60506028 60506049 60506045 60506050 +
gcagcccgggtgaaaccagatg

SEQ ID NO: 202100 - DNA, 22 bp, Artificial Sequence
  Synthetic oligonucleotide; TTG chr2 60506029 60506050 60506046 60506051 +
cagcccgggtgaaaccagatgg

SEQ ID NO: 202101 - DNA, 22 bp, Artificial Sequence
  Synthetic oligonucleotide; CTC chr2 60506074 60506095 60506091 60506096 +
ataggcaagggatgttagcaca

SEQ ID NO: 202102 - DNA, 22 bp, Artificial Sequence
  Synthetic oligonucleotide; TTA chr2 60506091 60506112 60506108 60506113 +
gcacacctaaaaatcccctttc

SEQ ID NO: 202103 - DNA, 22 bp, Artificial Sequence
  Synthetic oligonucleotide; CTA chr2 60506100 60506121 60506117 60506122 +
aaaatcccctttcccagccatc

SEQ ID NO: 202104 - DNA, 22 bp, Artificial Sequence
  Synthetic oligonucleotide; CTT chr2 60506111 60506132 60506128 60506133 +
tcccagccatcctttgacaccc

SEQ ID NO: 202105 - DNA, 22 bp, Artificial Sequence
  Synthetic oligonucleotide; TTT chr2 60506112 60506133 60506129 60506134 +
cccagccatcctttgacaccca

SEQ ID NO: 202106 - DNA, 22 bp, Artificial Sequence
  Synthetic oligonucleotide; TTC chr2 60506113 60506134 60506130 60506135 +
ccagccatcctttgacacccac

SEQ ID NO: 202107 - DNA, 22 bp, Artificial Sequence
  Synthetic oligonucleotide; CTT chr2 60506125 60506146 60506142 60506147 +
tgacacccaccatagaaatcac

SEQ ID NO: 202108 - DNA, 22 bp, Artificial Sequence
  Synthetic oligonucleotide; TTT chr2 60506126 60506147 60506143 60506148 +
gacacccaccatagaaatcaca

SEQ ID NO: 202109 - DNA, 22 bp, Artificial Sequence
  Synthetic oligonucleotide; TTG chr2 60506127 60506148 60506144 60506149 +
acacccaccatagaaatcacag

SEQ ID NO: 202110 - DNA, 22 bp, Artificial Sequence
  Synthetic oligonucleotide; CTG chr2 60506170 60506191 60506187 60506192 +
ggcccaaaatagcctgtcctgt

SEQ ID NO: 202111 - DNA, 22 bp, Artificial Sequence
  Synthetic oligonucleotide; CTG chr2 60506186 60506207 60506203 60506208 +
tcctgttagccaaatgccagca

SEQ ID NO: 202112 - DNA, 22 bp, Artificial Sequence
  Synthetic oligonucleotide; CTG chr2 60506191 60506212 60506208 60506213 +
ttagccaaatgccagcactccc

SEQ ID NO: 202113 - DNA, 22 bp, Artificial Sequence
  Synthetic oligonucleotide; TTA chr2 60506194 60506215 60506211 60506216 +
gccaaatgccagcactcccact

SEQ ID NO: 202114 - DNA, 22 bp, Artificial Sequence
  Synthetic oligonucleotide; CTC chr2 60506211 60506232 60506228 60506233 +
ccactttctctgagggcatgga

SEQ ID NO: 202115 - DNA, 22 bp, Artificial Sequence
  Synthetic oligonucleotide; CTT chr2 60506217 60506238 60506234 60506239 +
tctctgagggcatggaggggag

SEQ ID NO: 202116 - DNA, 22 bp, Artificial Sequence
  Synthetic oligonucleotide; TTT chr2 60506218 60506239 60506235 60506240 +
ctctgagggcatggaggggagg

SEQ ID NO: 202117 - DNA, 22 bp, Artificial Sequence
  Synthetic oligonucleotide; TTC chr2 60506219 60506240 60506236 60506241 +
tctgagggcatggaggggaggc

SEQ ID NO: 202118 - DNA, 22 bp, Artificial Sequence
  Synthetic oligonucleotide; CTC chr2 60506221 60506242 60506238 60506243 +
tgagggcatggaggggaggcag

SEQ ID NO: 202119 - DNA, 22 bp, Artificial Sequence
  Synthetic oligonucleotide; CTG chr2 60506223 60506244 60506240 60506245 +
agggcatggaggggaggcagca

SEQ ID NO: 202120 - DNA, 22 bp, Artificial Sequence
  Synthetic oligonucleotide; CTA chr2 60506249 60506270 60506266 60506271 +
gggctctggcctcctcatttaa

SEQ ID NO: 202121 - DNA, 22 bp, Artificial Sequence
  Synthetic oligonucleotide; CTC chr2 60506255 60506276 60506272 60506277 +
tggcctcctcatttaattctct

SEQ ID NO: 202122 - DNA, 22 bp, Artificial Sequence
  Synthetic oligonucleotide; CTG chr2 60506257 60506278 60506274 60506279 +
gcctcctcatttaattctctct

SEQ ID NO: 202123 - DNA, 22 bp, Artificial Sequence
  Synthetic oligonucleotide; CTC chr2 60506262 60506283 60506279 60506284 +
ctcatttaattctctctgcatc

SEQ ID NO: 202124 - DNA, 22 bp, Artificial Sequence
  Synthetic oligonucleotide; CTC chr2 60506265 60506286 60506282 60506287 +
atttaattctctctgcatcaga

SEQ ID NO: 202125 - DNA, 22 bp, Artificial Sequence
  Synthetic oligonucleotide; TTT chr2 60506269 60506290 60506286 60506291 +
aattctctctgcatcagaggaa

SEQ ID NO: 202126 - DNA, 22 bp, Artificial Sequence
  Synthetic oligonucleotide; TTA chr2 60506270 60506291 60506287 60506292 +
attctctctgcatcagaggaag

SEQ ID NO: 202127 - DNA, 22 bp, Artificial Sequence
  Synthetic oligonucleotide; TTC chr2 60506274 60506295 60506291 60506296 +
tctctgcatcagaggaagagtc

SEQ ID NO: 202128 - DNA, 22 bp, Artificial Sequence
  Synthetic oligonucleotide; CTC chr2 60506276 60506297 60506293 60506298 +
tctgcatcagaggaagagtcac

SEQ ID NO: 202129 - DNA, 22 bp, Artificial Sequence
  Synthetic oligonucleotide; CTC chr2 60506278 60506299 60506295 60506300 +
tgcatcagaggaagagtcacct

SEQ ID NO: 202130 - DNA, 22 bp, Artificial Sequence
  Synthetic oligonucleotide; CTG chr2 60506280 60506301 60506297 60506302 +
catcagaggaagagtcaccttc

SEQ ID NO: 202131 - DNA, 22 bp, Artificial Sequence
  Synthetic oligonucleotide; CTT chr2 60506301 60506322 60506318 60506323 +
cacaggccagctgtggtctgac

SEQ ID NO: 202132 - DNA, 22 bp, Artificial Sequence
  Synthetic oligonucleotide; TTC chr2 60506302 60506323 60506319 60506324 +
acaggccagctgtggtctgact

SEQ ID NO: 202133 - DNA, 22 bp, Artificial Sequence
  Synthetic oligonucleotide; CTG chr2 60506314 60506335 60506331 60506336 +
tggtctgacttgccacatctaa

SEQ ID NO: 202134 - DNA, 22 bp, Artificial Sequence
  Synthetic oligonucleotide; CTG chr2 60506321 60506342 60506338 60506343 +
acttgccacatctaatgccacc

SEQ ID NO: 202135 - DNA, 22 bp, Artificial Sequence
  Synthetic oligonucleotide; CTT chr2 60506325 60506346 60506342 60506347 +
gccacatctaatgccaccaggc

SEQ ID NO: 202136 - DNA, 22 bp, Artificial Sequence
  Synthetic oligonucleotide; TTG chr2 60506326 60506347 60506343 60506348 +
ccacatctaatgccaccaggcc

SEQ ID NO: 202137 - DNA, 22 bp, Artificial Sequence
  Synthetic oligonucleotide; CTA chr2 60506335 60506356 60506352 60506357 +
atgccaccaggccctgccagcg

SEQ ID NO: 202138 - DNA, 22 bp, Artificial Sequence
  Synthetic oligonucleotide; CTG chr2 60506351 60506372 60506368 60506373 +
ccagcggcccccattctggtct

SEQ ID NO: 202139 - DNA, 22 bp, Artificial Sequence
  Synthetic oligonucleotide; TTC chr2 60506367 60506388 60506384 60506389 +
tggtctgtcaaacccctggaaa

SEQ ID NO: 202140 - DNA, 22 bp, Artificial Sequence
  Synthetic oligonucleotide; CTG chr2 60506369 60506390 60506386 60506391 +
gtctgtcaaacccctggaaaac

SEQ ID NO: 202141 - DNA, 22 bp, Artificial Sequence
  Synthetic oligonucleotide; CTG chr2 60506374 60506395 60506391 60506396 +
tcaaacccctggaaaacttcag

SEQ ID NO: 202142 - DNA, 22 bp, Artificial Sequence
  Synthetic oligonucleotide; CTG chr2 60506385 60506406 60506402 60506407 +
gaaaacttcagacagtgttcct

SEQ ID NO: 202143 - DNA, 22 bp, Artificial Sequence
  Synthetic oligonucleotide; CTT chr2 60506393 60506414 60506410 60506415 +
cagacagtgttcctcagatcca

SEQ ID NO: 202144 - DNA, 22 bp, Artificial Sequence
  Synthetic oligonucleotide; TTC chr2 60506394 60506415 60506411 60506416 +
agacagtgttcctcagatccag

SEQ ID NO: 202145 - DNA, 22 bp, Artificial Sequence
  Synthetic oligonucleotide; TTC chr2 60506405 60506426 60506422 60506427 +
ctcagatccaggacagagctgg

SEQ ID NO: 202146 - DNA, 22 bp, Artificial Sequence
  Synthetic oligonucleotide; CTC chr2 60506408 60506429 60506425 60506430 +
agatccaggacagagctggctc

SEQ ID NO: 202147 - DNA, 22 bp, Artificial Sequence
  Synthetic oligonucleotide; CTG chr2 60506426 60506447 60506443 60506448 +
gctcaggacgccacatgggtca

SEQ ID NO: 202148 - DNA, 22 bp, Artificial Sequence
  Synthetic oligonucleotide; CTC chr2 60506430 60506451 60506447 60506452 +
aggacgccacatgggtcaaccc

SEQ ID NO: 202149 - DNA, 22 bp, Artificial Sequence
  Synthetic oligonucleotide; CTC chr2 60506468 60506489 60506485 60506490 +
agaccctccaaggtgacaaaga

SEQ ID NO: 202150 - DNA, 22 bp, Artificial Sequence
  Synthetic oligonucleotide; CTC chr2 60506476 60506497 60506493 60506498 +
caaggtgacaaagacctcacta

SEQ ID NO: 202151 - DNA, 22 bp, Artificial Sequence
  Synthetic oligonucleotide; CTC chr2 60506494 60506515 60506511 60506516 +
actagactgtatctcatttttc

SEQ ID NO: 202152 - DNA, 22 bp, Artificial Sequence
  Synthetic oligonucleotide; CTA chr2 60506498 60506519 60506515 60506520 +
gactgtatctcatttttccagc

SEQ ID NO: 202153 - DNA, 22 bp, Artificial Sequence
  Synthetic oligonucleotide; CTG chr2 60506503 60506524 60506520 60506525 +
tatctcatttttccagcctcag

SEQ ID NO: 202154 - DNA, 22 bp, Artificial Sequence
  Synthetic oligonucleotide; CTC chr2 60506509 60506530 60506526 60506531 +
atttttccagcctcagtgagcc

SEQ ID NO: 202155 - DNA, 22 bp, Artificial Sequence
  Synthetic oligonucleotide; TTT chr2 60506513 60506534 60506530 60506535 +
ttccagcctcagtgagccggcc

SEQ ID NO: 202156 - DNA, 22 bp, Artificial Sequence
  Synthetic oligonucleotide; TTT chr2 60506514 60506535 60506531 60506536 +
tccagcctcagtgagccggccc

SEQ ID NO: 202157 - DNA, 22 bp, Artificial Sequence
  Synthetic oligonucleotide; TTT chr2 60506515 60506536 60506532 60506537 +
ccagcctcagtgagccggcccc

SEQ ID NO: 202158 - DNA, 22 bp, Artificial Sequence
  Synthetic oligonucleotide; TTC chr2 60506516 60506537 60506533 60506538 +
cagcctcagtgagccggcccca

SEQ ID NO: 202159 - DNA, 22 bp, Artificial Sequence
  Synthetic oligonucleotide; CTC chr2 60506523 60506544 60506540 60506545 +
agtgagccggccccagctggca

SEQ ID NO: 202160 - DNA, 22 bp, Artificial Sequence
  Synthetic oligonucleotide; CTG chr2 60506542 60506563 60506559 60506564 +
gcatgctgagtccaggaaagcc

SEQ ID NO: 202161 - DNA, 22 bp, Artificial Sequence
  Synthetic oligonucleotide; CTG chr2 60506550 60506571 60506567 60506572 +
agtccaggaaagccctggctat

SEQ ID NO: 202162 - DNA, 22 bp, Artificial Sequence
  Synthetic oligonucleotide; CTG chr2 60506567 60506588 60506584 60506589 +
gctatacaaaacacagcaccca

SEQ ID NO: 202163 - DNA, 22 bp, Artificial Sequence
  Synthetic oligonucleotide; CTA chr2 60506571 60506592 60506588 60506593 +
tacaaaacacagcacccacgtg

SEQ ID NO: 202164 - DNA, 22 bp, Artificial Sequence
  Synthetic oligonucleotide; CTT chr2 60506597 60506618 60506614 60506619 +
tgtgcatggctgcttagagggc

SEQ ID NO: 202165 - DNA, 22 bp, Artificial Sequence
  Synthetic oligonucleotide; TTT chr2 60506598 60506619 60506615 60506620 +
gtgcatggctgcttagagggct

SEQ ID NO: 202166 - DNA, 22 bp, Artificial Sequence
  Synthetic oligonucleotide; TTG chr2 60506599 60506620 60506616 60506621 +
tgcatggctgcttagagggcta

SEQ ID NO: 202167 - DNA, 22 bp, Artificial Sequence
  Synthetic oligonucleotide; CTG chr2 60506609 60506630 60506626 60506631 +
cttagagggctaatgataaagg

SEQ ID NO: 202168 - DNA, 22 bp, Artificial Sequence
  Synthetic oligonucleotide; CTT chr2 60506612 60506633 60506629 60506634 +
agagggctaatgataaaggcag

SEQ ID NO: 202169 - DNA, 22 bp, Artificial Sequence
  Synthetic oligonucleotide; TTA chr2 60506613 60506634 60506630 60506635 +
gagggctaatgataaaggcagc

SEQ ID NO: 202170 - DNA, 22 bp, Artificial Sequence
  Synthetic oligonucleotide; CTA chr2 60506621 60506642 60506638 60506643 +
atgataaaggcagctcactaag

SEQ ID NO: 202171 - DNA, 22 bp, Artificial Sequence
  Synthetic oligonucleotide; CTC chr2 60506637 60506658 60506654 60506659 +
actaagaaaacgaccgtgccca

SEQ ID NO: 202172 - DNA, 22 bp, Artificial Sequence
  Synthetic oligonucleotide; CTA chr2 60506641 60506662 60506658 60506663 +
agaaaacgaccgtgcccagcag

SEQ ID NO: 202173 - DNA, 22 bp, Artificial Sequence
  Synthetic oligonucleotide; CTC chr2 60506667 60506688 60506684 60506689 +
ctaaatggcgaaggcagcattt

SEQ ID NO: 202174 - DNA, 22 bp, Artificial Sequence
  Synthetic oligonucleotide; CTA chr2 60506670 60506691 60506687 60506692 +
aatggcgaaggcagcatttacc

SEQ ID NO: 202175 - DNA, 22 bp, Artificial Sequence
  Synthetic oligonucleotide; TTT chr2 60506689 60506710 60506706 60506711 +
accactgatgacagccccccgc

SEQ ID NO: 202176 - DNA, 22 bp, Artificial Sequence
  Synthetic oligonucleotide; TTA chr2 60506690 60506711 60506707 60506712 +
ccactgatgacagccccccgca

SEQ ID NO: 202177 - DNA, 22 bp, Artificial Sequence
  Synthetic oligonucleotide; CTG chr2 60506696 60506717 60506713 60506718 +
atgacagccccccgcatgtttc

SEQ ID NO: 202178 - DNA, 22 bp, Artificial Sequence
  Synthetic oligonucleotide; TTT chr2 60506717 60506738 60506734 60506739 +
cctcctaaacgcctgatatata

SEQ ID NO: 202179 - DNA, 22 bp, Artificial Sequence
  Synthetic oligonucleotide; TTC chr2 60506718 60506739 60506735 60506740 +
ctcctaaacgcctgatatatat

SEQ ID NO: 202180 - DNA, 22 bp, Artificial Sequence
  Synthetic oligonucleotide; CTC chr2 60506721 60506742 60506738 60506743 +
ctaaacgcctgatatatatcca

SEQ ID NO: 202181 - DNA, 22 bp, Artificial Sequence
  Synthetic oligonucleotide; CTA chr2 60506724 60506745 60506741 60506746 +
aacgcctgatatatatccattt

SEQ ID NO: 202182 - DNA, 22 bp, Artificial Sequence
  Synthetic oligonucleotide; CTG chr2 60506732 60506753 60506749 60506754 +
atatatatccatttttctgtca

SEQ ID NO: 202183 - DNA, 22 bp, Artificial Sequence
  Synthetic oligonucleotide; TTT chr2 60506746 60506767 60506763 60506768 +
ttctgtcagcaacctcaaataa

SEQ ID NO: 202184 - DNA, 22 bp, Artificial Sequence
  Synthetic oligonucleotide; TTT chr2 60506747 60506768 60506764 60506769 +
tctgtcagcaacctcaaataat

SEQ ID NO: 202185 - DNA, 22 bp, Artificial Sequence
  Synthetic oligonucleotide; TTT chr2 60506748 60506769 60506765 60506770 +
ctgtcagcaacctcaaataatg

SEQ ID NO: 202186 - DNA, 22 bp, Artificial Sequence
  Synthetic oligonucleotide; TTC chr2 60506749 60506770 60506766 60506771 +
tgtcagcaacctcaaataatgt

SEQ ID NO: 202187 - DNA, 22 bp, Artificial Sequence
  Synthetic oligonucleotide; CTG chr2 60506751 60506772 60506768 60506773 +
tcagcaacctcaaataatgtct

SEQ ID NO: 202188 - DNA, 22 bp, Artificial Sequence
  Synthetic oligonucleotide; CTC chr2 60506762 60506783 60506779 60506784 +
aaataatgtctataatgctgag

SEQ ID NO: 202189 - DNA, 22 bp, Artificial Sequence
  Synthetic oligonucleotide; CTA chr2 60506774 60506795 60506791 60506796 +
taatgctgagatttatacatgg

SEQ ID NO: 202190 - DNA, 22 bp, Artificial Sequence
  Synthetic oligonucleotide; CTG chr2 60506782 60506803 60506799 60506804 +
agatttatacatgggtacttat

SEQ ID NO: 202191 - DNA, 22 bp, Artificial Sequence
  Synthetic oligonucleotide; TTT chr2 60506788 60506809 60506805 60506810 +
atacatgggtacttataaatgt

SEQ ID NO: 202192 - DNA, 22 bp, Artificial Sequence
  Synthetic oligonucleotide; TTA chr2 60506789 60506810 60506806 60506811 +
tacatgggtacttataaatgtg

SEQ ID NO: 202193 - DNA, 22 bp, Artificial Sequence
  Synthetic oligonucleotide; CTT chr2 60506802 60506823 60506819 60506824 +
ataaatgtgatttcattatagc

SEQ ID NO: 202194 - DNA, 22 bp, Artificial Sequence
  Synthetic oligonucleotide; TTA chr2 60506803 60506824 60506820 60506825 +
taaatgtgatttcattatagcc

SEQ ID NO: 202195 - DNA, 22 bp, Artificial Sequence
  Synthetic oligonucleotide; TTT chr2 60506815 60506836 60506832 60506837 +
cattatagcctctgcaaaacta

SEQ ID NO: 202196 - DNA, 22 bp, Artificial Sequence
  Synthetic oligonucleotide; TTC chr2 60506816 60506837 60506833 60506838 +
attatagcctctgcaaaactac

SEQ ID NO: 202197 - DNA, 22 bp, Artificial Sequence
  Synthetic oligonucleotide; TTA chr2 60506820 60506841 60506837 60506842 +
tagcctctgcaaaactaccttt

SEQ ID NO: 202198 - DNA, 22 bp, Artificial Sequence
  Synthetic oligonucleotide; CTC chr2 60506827 60506848 60506844 60506849 +
tgcaaaactacctttccgccta

SEQ ID NO: 202199 - DNA, 22 bp, Artificial Sequence
  Synthetic oligonucleotide; CTG chr2 60506829 60506850 60506846 60506851 +
caaaactacctttccgcctaaa

SEQ ID NO: 202200 - DNA, 22 bp, Artificial Sequence
  Synthetic oligonucleotide; CTA chr2 60506837 60506858 60506854 60506859 +
cctttccgcctaaacattcaat

SEQ ID NO: 202201 - DNA, 22 bp, Artificial Sequence
  Synthetic oligonucleotide; CTT chr2 60506841 60506862 60506858 60506863 +
tccgcctaaacattcaattaat

SEQ ID NO: 202202 - DNA, 22 bp, Artificial Sequence
  Synthetic oligonucleotide; TTT chr2 60506842 60506863 60506859 60506864 +
ccgcctaaacattcaattaatg

SEQ ID NO: 202203 - DNA, 22 bp, Artificial Sequence
  Synthetic oligonucleotide; TTC chr2 60506843 60506864 60506860 60506865 +
cgcctaaacattcaattaatgt

SEQ ID NO: 202204 - DNA, 22 bp, Artificial Sequence
  Synthetic oligonucleotide; CTA chr2 60506849 60506870 60506866 60506871 +
aacattcaattaatgtaattaa

SEQ ID NO: 202205 - DNA, 22 bp, Artificial Sequence
  Synthetic oligonucleotide; TTC chr2 60506856 60506877 60506873 60506878 +
aattaatgtaattaaattgcta

SEQ ID NO: 202206 - DNA, 22 bp, Artificial Sequence
  Synthetic oligonucleotide; TTA chr2 60506861 60506882 60506878 60506883 +
atgtaattaaattgctacctga

SEQ ID NO: 202207 - DNA, 22 bp, Artificial Sequence
  Synthetic oligonucleotide; TTA chr2 60506870 60506891 60506887 60506892 +
aattgctacctgatggcattat

SEQ ID NO: 202208 - DNA, 22 bp, Artificial Sequence
  Synthetic oligonucleotide; TTG chr2 60506875 60506896 60506892 60506897 +
ctacctgatggcattatctaat

SEQ ID NO: 202209 - DNA, 22 bp, Artificial Sequence
  Synthetic oligonucleotide; CTA chr2 60506878 60506899 60506895 60506900 +
cctgatggcattatctaattta

SEQ ID NO: 202210 - DNA, 22 bp, Artificial Sequence
  Synthetic oligonucleotide; CTG chr2 60506882 60506903 60506899 60506904 +
atggcattatctaatttaactt

SEQ ID NO: 202211 - DNA, 22 bp, Artificial Sequence
  Synthetic oligonucleotide; TTA chr2 60506891 60506912 60506908 60506913 +
tctaatttaacttgggatccaa

SEQ ID NO: 202212 - DNA, 22 bp, Artificial Sequence
  Synthetic oligonucleotide; CTA chr2 60506895 60506916 60506912 60506917 +
atttaacttgggatccaaacta

SEQ ID NO: 202213 - DNA, 22 bp, Artificial Sequence
  Synthetic oligonucleotide; TTT chr2 60506899 60506920 60506916 60506921 +
aacttgggatccaaactattga

SEQ ID NO: 202214 - DNA, 22 bp, Artificial Sequence
  Synthetic oligonucleotide; TTA chr2 60506900 60506921 60506917 60506922 +
acttgggatccaaactattgaa

SEQ ID NO: 202215 - DNA, 22 bp, Artificial Sequence
  Synthetic oligonucleotide; CTT chr2 60506904 60506925 60506921 60506926 +
gggatccaaactattgaaaagc

SEQ ID NO: 202216 - DNA, 22 bp, Artificial Sequence
  Synthetic oligonucleotide; TTG chr2 60506905 60506926 60506922 60506927 +
ggatccaaactattgaaaagca

SEQ ID NO: 202217 - DNA, 22 bp, Artificial Sequence
  Synthetic oligonucleotide; CTA chr2 60506917 60506938 60506934 60506939 +
ttgaaaagcatgtgccttttaa

SEQ ID NO: 202218 - DNA, 22 bp, Artificial Sequence
  Synthetic oligonucleotide; TTG chr2 60506920 60506941 60506937 60506942 +
aaaagcatgtgccttttaacac

SEQ ID NO: 202219 - DNA, 22 bp, Artificial Sequence
  Synthetic oligonucleotide; CTT chr2 60506935 60506956 60506952 60506957 +
ttaacaccctgactggtaaggc

SEQ ID NO: 202220 - DNA, 22 bp, Artificial Sequence
  Synthetic oligonucleotide; TTT chr2 60506936 60506957 60506953 60506958 +
taacaccctgactggtaaggca

SEQ ID NO: 202221 - DNA, 22 bp, Artificial Sequence
  Synthetic oligonucleotide; TTT chr2 60506937 60506958 60506954 60506959 +
aacaccctgactggtaaggcat

SEQ ID NO: 202222 - DNA, 22 bp, Artificial Sequence
  Synthetic oligonucleotide; TTA chr2 60506938 60506959 60506955 60506960 +
acaccctgactggtaaggcatg

SEQ ID NO: 202223 - DNA, 22 bp, Artificial Sequence
  Synthetic oligonucleotide; CTG chr2 60506946 60506967 60506963 60506968 +
actggtaaggcatgtgatgaac

SEQ ID NO: 202224 - DNA, 22 bp, Artificial Sequence
  Synthetic oligonucleotide; CTG chr2 60506950 60506971 60506967 60506972 +
gtaaggcatgtgatgaacagag

SEQ ID NO: 202225 - DNA, 22 bp, Artificial Sequence
  Synthetic oligonucleotide; CTA chr2 60506975 60506996 60506992 60506997 +
taaacatgttggcgtaactgag

SEQ ID NO: 202226 - DNA, 22 bp, Artificial Sequence
  Synthetic oligonucleotide; TTG chr2 60506986 60507007 60507003 60507008 +
gcgtaactgagctgtttaaaaa

SEQ ID NO: 202227 - DNA, 22 bp, Artificial Sequence
  Synthetic oligonucleotide; CTG chr2 60506995 60507016 60507012 60507017 +
agctgtttaaaaataaattagc

SEQ ID NO: 202228 - DNA, 22 bp, Artificial Sequence
  Synthetic oligonucleotide; CTG chr2 60507000 60507021 60507017 60507022 +
tttaaaaataaattagcaaact

SEQ ID NO: 202229 - DNA, 22 bp, Artificial Sequence
  Synthetic oligonucleotide; TTT chr2 60507003 60507024 60507020 60507025 +
aaaaataaattagcaaactata

SEQ ID NO: 202230 - DNA, 22 bp, Artificial Sequence
  Synthetic oligonucleotide; TTA chr2 60507004 60507025 60507021 60507026 +
aaaataaattagcaaactataa

SEQ ID NO: 202231 - DNA, 22 bp, Artificial Sequence
  Synthetic oligonucleotide; TTA chr2 60507015 60507036 60507032 60507037 +
gcaaactataaaaataaacagt

SEQ ID NO: 202232 - DNA, 22 bp, Artificial Sequence
  Synthetic oligonucleotide; CTA chr2 60507023 60507044 60507040 60507045 +
taaaaataaacagtaacgtaca

SEQ ID NO: 202233 - DNA, 22 bp, Artificial Sequence
  Synthetic oligonucleotide; CTC chr2 60507054 60507075 60507071 60507076 +
aattatgaactaactctaattt

SEQ ID NO: 202234 - DNA, 22 bp, Artificial Sequence
  Synthetic oligonucleotide; TTA chr2 60507059 60507080 60507076 60507081 +
tgaactaactctaatttttgtt

SEQ ID NO: 202235 - DNA, 22 bp, Artificial Sequence
  Synthetic oligonucleotide; CTA chr2 60507066 60507087 60507083 60507088 +
actctaatttttgttctgaaat

SEQ ID NO: 202236 - DNA, 22 bp, Artificial Sequence
  Synthetic oligonucleotide; CTC chr2 60507070 60507091 60507087 60507092 +
taatttttgttctgaaatactg

SEQ ID NO: 202237 - DNA, 22 bp, Artificial Sequence
  Synthetic oligonucleotide; CTA chr2 60507072 60507093 60507089 60507094 +
atttttgttctgaaatactgtc

SEQ ID NO: 202238 - DNA, 22 bp, Artificial Sequence
  Synthetic oligonucleotide; TTT chr2 60507076 60507097 60507093 60507098 +
ttgttctgaaatactgtctttg

SEQ ID NO: 202239 - DNA, 22 bp, Artificial Sequence
  Synthetic oligonucleotide; TTT chr2 60507077 60507098 60507094 60507099 +
tgttctgaaatactgtctttga

SEQ ID NO: 202240 - DNA, 22 bp, Artificial Sequence
  Synthetic oligonucleotide; TTT chr2 60507078 60507099 60507095 60507100 +
gttctgaaatactgtctttgac

SEQ ID NO: 202241 - DNA, 22 bp, Artificial Sequence
  Synthetic oligonucleotide; TTG chr2 60507079 60507100 60507096 60507101 +
ttctgaaatactgtctttgacc

SEQ ID NO: 202242 - DNA, 22 bp, Artificial Sequence
  Synthetic oligonucleotide; TTC chr2 60507082 60507103 60507099 60507104 +
tgaaatactgtctttgacctta

SEQ ID NO: 202243 - DNA, 22 bp, Artificial Sequence
  Synthetic oligonucleotide; CTG chr2 60507084 60507105 60507101 60507106 +
aaatactgtctttgaccttagt

SEQ ID NO: 202244 - DNA, 22 bp, Artificial Sequence
  Synthetic oligonucleotide; CTG chr2 60507092 60507113 60507109 60507114 +
tctttgaccttagtcataaaca

SEQ ID NO: 202245 - DNA, 22 bp, Artificial Sequence
  Synthetic oligonucleotide; CTT chr2 60507096 60507117 60507113 60507118 +
tgaccttagtcataaacaagca

SEQ ID NO: 202246 - DNA, 22 bp, Artificial Sequence
  Synthetic oligonucleotide; TTT chr2 60507097 60507118 60507114 60507119 +
gaccttagtcataaacaagcac

SEQ ID NO: 202247 - DNA, 22 bp, Artificial Sequence
  Synthetic oligonucleotide; TTG chr2 60507098 60507119 60507115 60507120 +
accttagtcataaacaagcact

SEQ ID NO: 202248 - DNA, 22 bp, Artificial Sequence
  Synthetic oligonucleotide; CTT chr2 60507103 60507124 60507120 60507125 +
agtcataaacaagcactattaa

SEQ ID NO: 202249 - DNA, 22 bp, Artificial Sequence
  Synthetic oligonucleotide; TTA chr2 60507104 60507125 60507121 60507126 +
gtcataaacaagcactattaaa

SEQ ID NO: 202250 - DNA, 22 bp, Artificial Sequence
  Synthetic oligonucleotide; CTA chr2 60507121 60507142 60507138 60507143 +
ttaaaaaaacataatatcccaa

SEQ ID NO: 202251 - DNA, 22 bp, Artificial Sequence
  Synthetic oligonucleotide; TTA chr2 60507124 60507145 60507141 60507146 +
aaaaaacataatatcccaacag

SEQ ID NO: 202252 - DNA, 22 bp, Artificial Sequence
  Synthetic oligonucleotide; TTA chr2 60507164 60507185 60507181 60507186 +
aatgctcttctagctctgcaga

SEQ ID NO: 202253 - DNA, 22 bp, Artificial Sequence
  Synthetic oligonucleotide; CTC chr2 60507171 60507192 60507188 60507193 +
ttctagctctgcagaatgcaaa

SEQ ID NO: 202254 - DNA, 22 bp, Artificial Sequence
  Synthetic oligonucleotide; CTT chr2 60507173 60507194 60507190 60507195 +
ctagctctgcagaatgcaaagc

SEQ ID NO: 202255 - DNA, 22 bp, Artificial Sequence
  Synthetic oligonucleotide; TTC chr2 60507174 60507195 60507191 60507196 +
tagctctgcagaatgcaaagca

SEQ ID NO: 202256 - DNA, 22 bp, Artificial Sequence
  Synthetic oligonucleotide; CTA chr2 60507176 60507197 60507193 60507198 +
gctctgcagaatgcaaagcaag

SEQ ID NO: 202257 - DNA, 22 bp, Artificial Sequence
  Synthetic oligonucleotide; CTC chr2 60507180 60507201 60507197 60507202 +
tgcagaatgcaaagcaagacaa

SEQ ID NO: 202258 - DNA, 22 bp, Artificial Sequence
  Synthetic oligonucleotide; CTG chr2 60507182 60507203 60507199 60507204 +
cagaatgcaaagcaagacaagg

SEQ ID NO: 202259 - DNA, 22 bp, Artificial Sequence
  Synthetic oligonucleotide; CTT chr2 60507401 60507422 60507418 60507423 +
gcctttcttgaaaagctagaaa

SEQ ID NO: 202260 - DNA, 22 bp, Artificial Sequence
  Synthetic oligonucleotide; TTG chr2 60507402 60507423 60507419 60507424 +
cctttcttgaaaagctagaaaa

SEQ ID NO: 202261 - DNA, 22 bp, Artificial Sequence
  Synthetic oligonucleotide; CTT chr2 60507406 60507427 60507423 60507428 +
tcttgaaaagctagaaaactgt

SEQ ID NO: 202262 - DNA, 22 bp, Artificial Sequence
  Synthetic oligonucleotide; TTT chr2 60507407 60507428 60507424 60507429 +
cttgaaaagctagaaaactgtg

SEQ ID NO: 202263 - DNA, 22 bp, Artificial Sequence
  Synthetic oligonucleotide; TTC chr2 60507408 60507429 60507425 60507430 +
ttgaaaagctagaaaactgtgt

SEQ ID NO: 202264 - DNA, 22 bp, Artificial Sequence
  Synthetic oligonucleotide; CTT chr2 60507410 60507431 60507427 60507432 +
gaaaagctagaaaactgtgtcc

SEQ ID NO: 202265 - DNA, 22 bp, Artificial Sequence
  Synthetic oligonucleotide; TTG chr2 60507411 60507432 60507428 60507433 +
aaaagctagaaaactgtgtcca

SEQ ID NO: 202266 - DNA, 22 bp, Artificial Sequence
  Synthetic oligonucleotide; CTA chr2 60507419 60507440 60507436 60507441 +
gaaaactgtgtccaaaacctac

SEQ ID NO: 202267 - DNA, 22 bp, Artificial Sequence
  Synthetic oligonucleotide; CTG chr2 60507427 60507448 60507444 60507449 +
tgtccaaaacctacaaagacta

SEQ ID NO: 202268 - DNA, 22 bp, Artificial Sequence
  Synthetic oligonucleotide; CTA chr2 60507440 60507461 60507457 60507462 +
caaagactattgtgctcttgtt

SEQ ID NO: 202269 - DNA, 22 bp, Artificial Sequence
  Synthetic oligonucleotide; CTA chr2 60507449 60507470 60507466 60507471 +
ttgtgctcttgttgacttgaag

SEQ ID NO: 202270 - DNA, 22 bp, Artificial Sequence
  Synthetic oligonucleotide; TTG chr2 60507452 60507473 60507469 60507474 +
tgctcttgttgacttgaagctg

SEQ ID NO: 202271 - DNA, 22 bp, Artificial Sequence
  Synthetic oligonucleotide; CTC chr2 60507457 60507478 60507474 60507479 +
ttgttgacttgaagctgcttcc

SEQ ID NO: 202272 - DNA, 22 bp, Artificial Sequence
  Synthetic oligonucleotide; CTT chr2 60507459 60507480 60507476 60507481 +
gttgacttgaagctgcttccgt

SEQ ID NO: 202273 - DNA, 22 bp, Artificial Sequence
  Synthetic oligonucleotide; TTG chr2 60507460 60507481 60507477 60507482 +
ttgacttgaagctgcttccgtt

SEQ ID NO: 202274 - DNA, 22 bp, Artificial Sequence
  Synthetic oligonucleotide; TTG chr2 60507463 60507484 60507480 60507485 +
acttgaagctgcttccgttcaa

SEQ ID NO: 202275 - DNA, 22 bp, Artificial Sequence
  Synthetic oligonucleotide; CTT chr2 60507467 60507488 60507484 60507489 +
gaagctgcttccgttcaagcca

SEQ ID NO: 202276 - DNA, 22 bp, Artificial Sequence
  Synthetic oligonucleotide; TTG chr2 60507468 60507489 60507485 60507490 +
aagctgcttccgttcaagccag

SEQ ID NO: 202277 - DNA, 22 bp, Artificial Sequence
  Synthetic oligonucleotide; CTG chr2 60507474 60507495 60507491 60507496 +
cttccgttcaagccagaaaagt

SEQ ID NO: 202278 - DNA, 22 bp, Artificial Sequence
  Synthetic oligonucleotide; CTT chr2 60507477 60507498 60507494 60507499 +
ccgttcaagccagaaaagttaa

SEQ ID NO: 202279 - DNA, 22 bp, Artificial Sequence
  Synthetic oligonucleotide; TTC chr2 60507478 60507499 60507495 60507500 +
cgttcaagccagaaaagttaaa

SEQ ID NO: 202280 - DNA, 22 bp, Artificial Sequence
  Synthetic oligonucleotide; TTC chr2 60507483 60507504 60507500 60507505 +
aagccagaaaagttaaaacctt

SEQ ID NO: 202281 - DNA, 22 bp, Artificial Sequence
  Synthetic oligonucleotide; TTA chr2 60507498 60507519 60507515 60507520 +
aaaccttgtgaagtgcttttac

SEQ ID NO: 202282 - DNA, 22 bp, Artificial Sequence
  Synthetic oligonucleotide; CTT chr2 60507505 60507526 60507522 60507527 +
gtgaagtgcttttacattttca

SEQ ID NO: 202283 - DNA, 22 bp, Artificial Sequence
  Synthetic oligonucleotide; TTG chr2 60507506 60507527 60507523 60507528 +
tgaagtgcttttacattttcag

SEQ ID NO: 202284 - DNA, 22 bp, Artificial Sequence
  Synthetic oligonucleotide; CTT chr2 60507516 60507537 60507533 60507538 +
ttacattttcagatgttttgga

SEQ ID NO: 202285 - DNA, 22 bp, Artificial Sequence
  Synthetic oligonucleotide; TTT chr2 60507517 60507538 60507534 60507539 +
tacattttcagatgttttggag

SEQ ID NO: 202286 - DNA, 22 bp, Artificial Sequence
  Synthetic oligonucleotide; TTT chr2 60507518 60507539 60507535 60507540 +
acattttcagatgttttggagt

SEQ ID NO: 202287 - DNA, 22 bp, Artificial Sequence
  Synthetic oligonucleotide; TTA chr2 60507519 60507540 60507536 60507541 +
cattttcagatgttttggagtc

SEQ ID NO: 202288 - DNA, 22 bp, Artificial Sequence
  Synthetic oligonucleotide; TTT chr2 60507524 60507545 60507541 60507546 +
tcagatgttttggagtctctca

SEQ ID NO: 202289 - DNA, 22 bp, Artificial Sequence
  Synthetic oligonucleotide; TTT chr2 60507525 60507546 60507542 60507547 +
cagatgttttggagtctctcaa

SEQ ID NO: 202290 - DNA, 22 bp, Artificial Sequence
  Synthetic oligonucleotide; TTC chr2 60507526 60507547 60507543 60507548 +
agatgttttggagtctctcaag

SEQ ID NO: 202291 - DNA, 22 bp, Artificial Sequence
  Synthetic oligonucleotide; TTT chr2 60507534 60507555 60507551 60507556 +
tggagtctctcaagaaatgagg

SEQ ID NO: 202292 - DNA, 22 bp, Artificial Sequence
  Synthetic oligonucleotide; TTT chr2 60507535 60507556 60507552 60507557 +
ggagtctctcaagaaatgagga

SEQ ID NO: 202293 - DNA, 22 bp, Artificial Sequence
  Synthetic oligonucleotide; TTG chr2 60507536 60507557 60507553 60507558 +
gagtctctcaagaaatgaggac

SEQ ID NO: 202294 - DNA, 22 bp, Artificial Sequence
  Synthetic oligonucleotide; CTC chr2 60507543 60507564 60507560 60507565 +
tcaagaaatgaggacaggcaag

SEQ ID NO: 202295 - DNA, 22 bp, Artificial Sequence
  Synthetic oligonucleotide; CTC chr2 60507545 60507566 60507562 60507567 +
aagaaatgaggacaggcaaggg

SEQ ID NO: 202296 - DNA, 22 bp, Artificial Sequence
  Synthetic oligonucleotide; CTG chr2 60507576 60507597 60507593 60507598 +
tttccacatgcagctgtttcaa

SEQ ID NO: 202297 - DNA, 22 bp, Artificial Sequence
  Synthetic oligonucleotide; TTT chr2 60507579 60507600 60507596 60507601 +
ccacatgcagctgtttcaacag

SEQ ID NO: 202298 - DNA, 22 bp, Artificial Sequence
  Synthetic oligonucleotide; TTC chr2 60507580 60507601 60507597 60507602 +
cacatgcagctgtttcaacagc

SEQ ID NO: 202299 - DNA, 22 bp, Artificial Sequence
  Synthetic oligonucleotide; CTG chr2 60507592 60507613 60507609 60507614 +
tttcaacagctcactgcataac

SEQ ID NO: 202300 - DNA, 22 bp, Artificial Sequence
  Synthetic oligonucleotide; TTT chr2 60507595 60507616 60507612 60507617 +
caacagctcactgcataacaga

SEQ ID NO: 202301 - DNA, 22 bp, Artificial Sequence
  Synthetic oligonucleotide; TTC chr2 60507596 60507617 60507613 60507618 +
aacagctcactgcataacagag

SEQ ID NO: 202302 - DNA, 22 bp, Artificial Sequence
  Synthetic oligonucleotide; CTC chr2 60507604 60507625 60507621 60507626 +
actgcataacagagtctcttac

SEQ ID NO: 202303 - DNA, 22 bp, Artificial Sequence
  Synthetic oligonucleotide; CTG chr2 60507608 60507629 60507625 60507630 +
cataacagagtctcttacacag

SEQ ID NO: 202304 - DNA, 22 bp, Artificial Sequence
  Synthetic oligonucleotide; CTC chr2 60507622 60507643 60507639 60507644 +
ttacacagggctgcctccgcac

SEQ ID NO: 202305 - DNA, 22 bp, Artificial Sequence
  Synthetic oligonucleotide; CTT chr2 60507624 60507645 60507641 60507646 +
acacagggctgcctccgcacct

SEQ ID NO: 202306 - DNA, 22 bp, Artificial Sequence
  Synthetic oligonucleotide; TTA chr2 60507625 60507646 60507642 60507647 +
cacagggctgcctccgcacctg

SEQ ID NO: 202307 - DNA, 22 bp, Artificial Sequence
  Synthetic oligonucleotide; CTG chr2 60507635 60507656 60507652 60507657 +
cctccgcacctgagctgagctt

SEQ ID NO: 202308 - DNA, 22 bp, Artificial Sequence
  Synthetic oligonucleotide; CTC chr2 60507639 60507660 60507656 60507661 +
cgcacctgagctgagcttgctg

SEQ ID NO: 202309 - DNA, 22 bp, Artificial Sequence
  Synthetic oligonucleotide; CTG chr2 60507647 60507668 60507664 60507669 +
agctgagcttgctgtcctaagt

SEQ ID NO: 202310 - DNA, 22 bp, Artificial Sequence
  Synthetic oligonucleotide; CTG chr2 60507652 60507673 60507669 60507674 +
agcttgctgtcctaagtcggct

SEQ ID NO: 202311 - DNA, 22 bp, Artificial Sequence
  Synthetic oligonucleotide; CTT chr2 60507657 60507678 60507674 60507679 +
gctgtcctaagtcggctactgc

SEQ ID NO: 202312 - DNA, 22 bp, Artificial Sequence
  Synthetic oligonucleotide; TTG chr2 60507658 60507679 60507675 60507680 +
ctgtcctaagtcggctactgct

SEQ ID NO: 202313 - DNA, 22 bp, Artificial Sequence
  Synthetic oligonucleotide; CTG chr2 60507661 60507682 60507678 60507683 +
tcctaagtcggctactgcttct

SEQ ID NO: 202314 - DNA, 22 bp, Artificial Sequence
  Synthetic oligonucleotide; CTA chr2 60507666 60507687 60507683 60507688 +
agtcggctactgcttctaagtc

SEQ ID NO: 202315 - DNA, 22 bp, Artificial Sequence
  Synthetic oligonucleotide; CTA chr2 60507675 60507696 60507692 60507697 +
ctgcttctaagtccccagcttt

SEQ ID NO: 202316 - DNA, 22 bp, Artificial Sequence
  Synthetic oligonucleotide; CTG chr2 60507678 60507699 60507695 60507700 +
cttctaagtccccagcttttct

SEQ ID NO: 202317 - DNA, 22 bp, Artificial Sequence
  Synthetic oligonucleotide; CTT chr2 60507681 60507702 60507698 60507703 +
ctaagtccccagcttttctaag

SEQ ID NO: 202318 - DNA, 22 bp, Artificial Sequence
  Synthetic oligonucleotide; TTC chr2 60507682 60507703 60507699 60507704 +
taagtccccagcttttctaaga

SEQ ID NO: 202319 - DNA, 22 bp, Artificial Sequence
  Synthetic oligonucleotide; CTA chr2 60507684 60507705 60507701 60507706 +
agtccccagcttttctaagaca

SEQ ID NO: 202320 - DNA, 22 bp, Artificial Sequence
  Synthetic oligonucleotide; CTT chr2 60507696 60507717 60507713 60507718 +
ttctaagacatatggcagaaat

SEQ ID NO: 202321 - DNA, 22 bp, Artificial Sequence
  Synthetic oligonucleotide; TTT chr2 60507697 60507718 60507714 60507719 +
tctaagacatatggcagaaatg

SEQ ID NO: 202322 - DNA, 22 bp, Artificial Sequence
  Synthetic oligonucleotide; TTT chr2 60507698 60507719 60507715 60507720 +
ctaagacatatggcagaaatgt

SEQ ID NO: 202323 - DNA, 22 bp, Artificial Sequence
  Synthetic oligonucleotide; TTC chr2 60507699 60507720 60507716 60507721 +
taagacatatggcagaaatgtg

SEQ ID NO: 202324 - DNA, 22 bp, Artificial Sequence
  Synthetic oligonucleotide; CTA chr2 60507701 60507722 60507718 60507723 +
agacatatggcagaaatgtgga

SEQ ID NO: 202325 - DNA, 22 bp, Artificial Sequence
  Synthetic oligonucleotide; TTG chr2 60507728 60507749 60507745 60507750 +
tcttccaaacagcacaagacag

SEQ ID NO: 202326 - DNA, 22 bp, Artificial Sequence
  Synthetic oligonucleotide; CTT chr2 60507732 60507753 60507749 60507754 +
ccaaacagcacaagacagaaag

SEQ ID NO: 202327 - DNA, 22 bp, Artificial Sequence
  Synthetic oligonucleotide; TTC chr2 60507733 60507754 60507750 60507755 +
caaacagcacaagacagaaagc

SEQ ID NO: 202328 - DNA, 22 bp, Artificial Sequence
  Synthetic oligonucleotide; CTG chr2 60507810 60507831 60507827 60507832 +
ttgaaactgtatacaggacacg

SEQ ID NO: 202329 - DNA, 22 bp, Artificial Sequence
  Synthetic oligonucleotide; TTG chr2 60507813 60507834 60507830 60507835 +
aaactgtatacaggacacgtct

SEQ ID NO: 202330 - DNA, 22 bp, Artificial Sequence
  Synthetic oligonucleotide; CTG chr2 60507819 60507840 60507836 60507841 +
tatacaggacacgtcttcacag

SEQ ID NO: 202331 - DNA, 22 bp, Artificial Sequence
  Synthetic oligonucleotide; CTT chr2 60507836 60507857 60507853 60507858 +
cacagtaatccaatgctcctgt

SEQ ID NO: 202332 - DNA, 22 bp, Artificial Sequence
  Synthetic oligonucleotide; TTC chr2 60507837 60507858 60507854 60507859 +
acagtaatccaatgctcctgta

SEQ ID NO: 202333 - DNA, 22 bp, Artificial Sequence
  Synthetic oligonucleotide; CTC chr2 60507854 60507875 60507871 60507876 +
ctgtaacaaaggacagcatact

SEQ ID NO: 202334 - DNA, 22 bp, Artificial Sequence
  Synthetic oligonucleotide; CTG chr2 60507857 60507878 60507874 60507879 +
taacaaaggacagcatactatg

SEQ ID NO: 202335 - DNA, 22 bp, Artificial Sequence
  Synthetic oligonucleotide; CTA chr2 60507877 60507898 60507894 60507899 +
tgggataattactatggattat

SEQ ID NO: 202336 - DNA, 22 bp, Artificial Sequence
  Synthetic oligonucleotide; TTA chr2 60507888 60507909 60507905 60507910 +
ctatggattattattacagttt

SEQ ID NO: 202337 - DNA, 22 bp, Artificial Sequence
  Synthetic oligonucleotide; CTA chr2 60507891 60507912 60507908 60507913 +
tggattattattacagtttcta

SEQ ID NO: 202338 - DNA, 22 bp, Artificial Sequence
  Synthetic oligonucleotide; TTA chr2 60507898 60507919 60507915 60507920 +
ttattacagtttctaaagcaaa

SEQ ID NO: 202339 - DNA, 22 bp, Artificial Sequence
  Synthetic oligonucleotide; TTA chr2 60507901 60507922 60507918 60507923 +
ttacagtttctaaagcaaaaga

SEQ ID NO: 202340 - DNA, 22 bp, Artificial Sequence
  Synthetic oligonucleotide; TTA chr2 60507904 60507925 60507921 60507926 +
cagtttctaaagcaaaagaaca

SEQ ID NO: 202341 - DNA, 22 bp, Artificial Sequence
  Synthetic oligonucleotide; TTT chr2 60507910 60507931 60507927 60507932 +
ctaaagcaaaagaacaaaaaaa

SEQ ID NO: 202342 - DNA, 22 bp, Artificial Sequence
  Synthetic oligonucleotide; TTC chr2 60507911 60507932 60507928 60507933 +
taaagcaaaagaacaaaaaaaa

SEQ ID NO: 202343 - DNA, 22 bp, Artificial Sequence
  Synthetic oligonucleotide; CTA chr2 60507913 60507934 60507930 60507935 +
aagcaaaagaacaaaaaaaaat

SEQ ID NO: 202344 - DNA, 22 bp, Artificial Sequence
  Synthetic oligonucleotide; TTC chr2 60507937 60507958 60507954 60507959 +
acaaaagacatattacacacgc

SEQ ID NO: 202345 - DNA, 22 bp, Artificial Sequence
  Synthetic oligonucleotide; TTA chr2 60507952 60507973 60507969 60507974 +
cacacgcagatttctaaagctt

SEQ ID NO: 202346 - DNA, 22 bp, Artificial Sequence
  Synthetic oligonucleotide; TTT chr2 60507965 60507986 60507982 60507987 +
ctaaagctttaaaatcatatgg

SEQ ID NO: 202347 - DNA, 22 bp, Artificial Sequence
  Synthetic oligonucleotide; TTC chr2 60507966 60507987 60507983 60507988 +
taaagctttaaaatcatatggt

SEQ ID NO: 202348 - DNA, 22 bp, Artificial Sequence
  Synthetic oligonucleotide; CTA chr2 60507968 60507989 60507985 60507990 +
aagctttaaaatcatatggtct

SEQ ID NO: 202349 - DNA, 22 bp, Artificial Sequence
  Synthetic oligonucleotide; CTT chr2 60507974 60507995 60507991 60507996 +
taaaatcatatggtcttcggtg

SEQ ID NO: 202350 - DNA, 22 bp, Artificial Sequence
  Synthetic oligonucleotide; TTT chr2 60507975 60507996 60507992 60507997 +
aaaatcatatggtcttcggtgt

SEQ ID NO: 202351 - DNA, 22 bp, Artificial Sequence
  Synthetic oligonucleotide; TTA chr2 60507976 60507997 60507993 60507998 +
aaatcatatggtcttcggtgtt

SEQ ID NO: 202352 - DNA, 22 bp, Artificial Sequence
  Synthetic oligonucleotide; CTT chr2 60507991 60508012 60508008 60508013 +
cggtgttggttcctatggggtt

SEQ ID NO: 202353 - DNA, 22 bp, Artificial Sequence
  Synthetic oligonucleotide; TTC chr2 60507992 60508013 60508009 60508014 +
ggtgttggttcctatggggtta

SEQ ID NO: 202354 - DNA, 22 bp, Artificial Sequence
  Synthetic oligonucleotide; TTG chr2 60507999 60508020 60508016 60508021 +
gttcctatggggttacggataa

SEQ ID NO: 202355 - DNA, 22 bp, Artificial Sequence
  Synthetic oligonucleotide; TTC chr2 60508003 60508024 60508020 60508025 +
ctatggggttacggataatgcc

SEQ ID NO: 202356 - DNA, 22 bp, Artificial Sequence
  Synthetic oligonucleotide; CTA chr2 60508006 60508027 60508023 60508028 +
tggggttacggataatgcccta

SEQ ID NO: 202357 - DNA, 22 bp, Artificial Sequence
  Synthetic oligonucleotide; TTA chr2 60508014 60508035 60508031 60508036 +
cggataatgccctaactgagca

SEQ ID NO: 202358 - DNA, 22 bp, Artificial Sequence
  Synthetic oligonucleotide; CTA chr2 60508028 60508049 60508045 60508050 +
actgagcacgacagatgcaaac

SEQ ID NO: 202359 - DNA, 22 bp, Artificial Sequence
  Synthetic oligonucleotide; CTG chr2 60508032 60508053 60508049 60508054 +
agcacgacagatgcaaacacaa

SEQ ID NO: 202360 - DNA, 22 bp, Artificial Sequence
  Synthetic oligonucleotide; CTG chr2 60508076 60508097 60508093 60508098 +
aaattctctcatgtcatggtgc

SEQ ID NO: 202361 - DNA, 22 bp, Artificial Sequence
  Synthetic oligonucleotide; TTC chr2 60508082 60508103 60508099 60508104 +
tctcatgtcatggtgcttactg

SEQ ID NO: 202362 - DNA, 22 bp, Artificial Sequence
  Synthetic oligonucleotide; CTC chr2 60508084 60508105 60508101 60508106 +
tcatgtcatggtgcttactgcc

SEQ ID NO: 202363 - DNA, 22 bp, Artificial Sequence
  Synthetic oligonucleotide; CTC chr2 60508086 60508107 60508103 60508108 +
atgtcatggtgcttactgccct

SEQ ID NO: 202364 - DNA, 22 bp, Artificial Sequence
  Synthetic oligonucleotide; CTT chr2 60508100 60508121 60508117 60508122 +
actgccctttctttcacaaaca

SEQ ID NO: 202365 - DNA, 22 bp, Artificial Sequence
  Synthetic oligonucleotide; TTA chr2 60508101 60508122 60508118 60508123 +
ctgccctttctttcacaaacaa

SEQ ID NO: 202366 - DNA, 22 bp, Artificial Sequence
  Synthetic oligonucleotide; CTG chr2 60508104 60508125 60508121 60508126 +
ccctttctttcacaaacaaaag

SEQ ID NO: 202367 - DNA, 22 bp, Artificial Sequence
  Synthetic oligonucleotide; CTT chr2 60508109 60508130 60508126 60508131 +
tctttcacaaacaaaagtagtt

SEQ ID NO: 202368 - DNA, 22 bp, Artificial Sequence
  Synthetic oligonucleotide; TTT chr2 60508110 60508131 60508127 60508132 +
ctttcacaaacaaaagtagttg

SEQ ID NO: 202369 - DNA, 22 bp, Artificial Sequence
  Synthetic oligonucleotide; TTC chr2 60508111 60508132 60508128 60508133 +
tttcacaaacaaaagtagttga

SEQ ID NO: 202370 - DNA, 22 bp, Artificial Sequence
  Synthetic oligonucleotide; CTT chr2 60508113 60508134 60508130 60508135 +
tcacaaacaaaagtagttgagc

SEQ ID NO: 202371 - DNA, 22 bp, Artificial Sequence
  Synthetic oligonucleotide; TTT chr2 60508114 60508135 60508131 60508136 +
cacaaacaaaagtagttgagca

SEQ ID NO: 202372 - DNA, 22 bp, Artificial Sequence
  Synthetic oligonucleotide; TTC chr2 60508115 60508136 60508132 60508137 +
acaaacaaaagtagttgagcaa

SEQ ID NO: 202373 - DNA, 22 bp, Artificial Sequence
  Synthetic oligonucleotide; TTG chr2 60508132 60508153 60508149 60508154 +
agcaacagctaagtagttattc

SEQ ID NO: 202374 - DNA, 22 bp, Artificial Sequence
  Synthetic oligonucleotide; CTA chr2 60508143 60508164 60508160 60508165 +
agtagttattcatctcaaagaa

SEQ ID NO: 202375 - DNA, 22 bp, Artificial Sequence
  Synthetic oligonucleotide; TTA chr2 60508151 60508172 60508168 60508173 +
ttcatctcaaagaaccaaccta

SEQ ID NO: 202376 - DNA, 22 bp, Artificial Sequence
  Synthetic oligonucleotide; TTC chr2 60508154 60508175 60508171 60508176 +
atctcaaagaaccaacctaaaa

SEQ ID NO: 202377 - DNA, 22 bp, Artificial Sequence
  Synthetic oligonucleotide; CTC chr2 60508159 60508180 60508176 60508181 +
aaagaaccaacctaaaattctg

SEQ ID NO: 202378 - DNA, 22 bp, Artificial Sequence
  Synthetic oligonucleotide; CTA chr2 60508173 60508194 60508190 60508195 +
aaattctgacaggcccagcact

SEQ ID NO: 202379 - DNA, 22 bp, Artificial Sequence
  Synthetic oligonucleotide; TTC chr2 60508179 60508200 60508196 60508201 +
tgacaggcccagcactgtctac

SEQ ID NO: 202380 - DNA, 22 bp, Artificial Sequence
  Synthetic oligonucleotide; CTG chr2 60508181 60508202 60508198 60508203 +
acaggcccagcactgtctaccc

SEQ ID NO: 202381 - DNA, 22 bp, Artificial Sequence
  Synthetic oligonucleotide; CTG chr2 60508196 60508217 60508213 60508218 +
tctacccccacccccaaacaac

SEQ ID NO: 202382 - DNA, 22 bp, Artificial Sequence
  Synthetic oligonucleotide; CTA chr2 60508200 60508221 60508217 60508222 +
cccccacccccaaacaacaaca

SEQ ID NO: 202383 - DNA, 22 bp, Artificial Sequence
  Synthetic oligonucleotide; TTA chr2 60508236 60508257 60508253 60508258 +
cacaaataaaaactaggaggaa

SEQ ID NO: 202384 - DNA, 22 bp, Artificial Sequence
  Synthetic oligonucleotide; CTA chr2 60508251 60508272 60508268 60508273 +
ggaggaagctcaaactcatcca

SEQ ID NO: 202385 - DNA, 22 bp, Artificial Sequence
  Synthetic oligonucleotide; CTC chr2 60508262 60508283 60508279 60508284 +
aaactcatccacacttggttca

SEQ ID NO: 202386 - DNA, 22 bp, Artificial Sequence
  Synthetic oligonucleotide; CTC chr2 60508268 60508289 60508285 60508290 +
atccacacttggttcaggacac

SEQ ID NO: 202387 - DNA, 22 bp, Artificial Sequence
  Synthetic oligonucleotide; CTT chr2 60508278 60508299 60508295 60508300 +
ggttcaggacacagggaaggcc

SEQ ID NO: 202388 - DNA, 22 bp, Artificial Sequence
  Synthetic oligonucleotide; TTG chr2 60508279 60508300 60508296 60508301 +
gttcaggacacagggaaggcct

SEQ ID NO: 202389 - DNA, 22 bp, Artificial Sequence
  Synthetic oligonucleotide; TTC chr2 60508283 60508304 60508300 60508305 +
aggacacagggaaggcctgatg

SEQ ID NO: 202390 - DNA, 22 bp, Artificial Sequence
  Synthetic oligonucleotide; CTG chr2 60508302 60508323 60508319 60508324 +
atgtgaaagaggagacagagaa

SEQ ID NO: 202391 - DNA, 22 bp, Artificial Sequence
  Synthetic oligonucleotide; CTT chr2 60508328 60508349 60508345 60508350 +
cctgggtgtgcagaattacacc

SEQ ID NO: 202392 - DNA, 22 bp, Artificial Sequence
  Synthetic oligonucleotide; TTC chr2 60508329 60508350 60508346 60508351 +
ctgggtgtgcagaattacaccc

SEQ ID NO: 202393 - DNA, 22 bp, Artificial Sequence
  Synthetic oligonucleotide; CTG chr2 60508332 60508353 60508349 60508354 +
ggtgtgcagaattacaccccag

SEQ ID NO: 202394 - DNA, 22 bp, Artificial Sequence
  Synthetic oligonucleotide; TTA chr2 60508346 60508367 60508363 60508368 +
caccccaggccacactccctgc

SEQ ID NO: 202395 - DNA, 22 bp, Artificial Sequence
  Synthetic oligonucleotide; CTC chr2 60508363 60508384 60508380 60508385 +
cctgcaggggccacaggagcaa

SEQ ID NO: 202396 - DNA, 22 bp, Artificial Sequence
  Synthetic oligonucleotide; CTG chr2 60508367 60508388 60508384 60508389 +
caggggccacaggagcaagcac

SEQ ID NO: 202397 - DNA, 22 bp, Artificial Sequence
  Synthetic oligonucleotide; CTG chr2 60508391 60508412 60508408 60508413 +
cagccgggtccctgagtctgac

SEQ ID NO: 202398 - DNA, 22 bp, Artificial Sequence
  Synthetic oligonucleotide; CTG chr2 60508405 60508426 60508422 60508427 +
agtctgacttttacccaaacag

SEQ ID NO: 202399 - DNA, 22 bp, Artificial Sequence
  Synthetic oligonucleotide; CTG chr2 60508411 60508432 60508428 60508433 +
acttttacccaaacagggggtt

SEQ ID NO: 202400 - DNA, 22 bp, Artificial Sequence
  Synthetic oligonucleotide; CTT chr2 60508415 60508436 60508432 60508437 +
ttacccaaacagggggttgcca

SEQ ID NO: 202401 - DNA, 22 bp, Artificial Sequence
  Synthetic oligonucleotide; TTT chr2 60508416 60508437 60508433 60508438 +
tacccaaacagggggttgccag

SEQ ID NO: 202402 - DNA, 22 bp, Artificial Sequence
  Synthetic oligonucleotide; TTT chr2 60508417 60508438 60508434 60508439 +
acccaaacagggggttgccagt

SEQ ID NO: 202403 - DNA, 22 bp, Artificial Sequence
  Synthetic oligonucleotide; TTA chr2 60508418 60508439 60508435 60508440 +
cccaaacagggggttgccagtt

SEQ ID NO: 202404 - DNA, 22 bp, Artificial Sequence
  Synthetic oligonucleotide; TTG chr2 60508434 60508455 60508451 60508456 +
ccagttgctgcgagacaaatat

SEQ ID NO: 202405 - DNA, 22 bp, Artificial Sequence
  Synthetic oligonucleotide; TTG chr2 60508441 60508462 60508458 60508463 +
ctgcgagacaaatatccctagc

SEQ ID NO: 202406 - DNA, 22 bp, Artificial Sequence
  Synthetic oligonucleotide; CTG chr2 60508444 60508465 60508461 60508466 +
cgagacaaatatccctagcaca

SEQ ID NO: 202407 - DNA, 22 bp, Artificial Sequence
  Synthetic oligonucleotide; CTA chr2 60508461 60508482 60508478 60508483 +
gcacattacctagttggcaaag

SEQ ID NO: 202408 - DNA, 22 bp, Artificial Sequence
  Synthetic oligonucleotide; TTA chr2 60508469 60508490 60508486 60508491 +
cctagttggcaaaggaatgcaa

SEQ ID NO: 202409 - DNA, 22 bp, Artificial Sequence
  Synthetic oligonucleotide; CTA chr2 60508473 60508494 60508490 60508495 +
gttggcaaaggaatgcaactgg

SEQ ID NO: 202410 - DNA, 22 bp, Artificial Sequence
  Synthetic oligonucleotide; TTG chr2 60508477 60508498 60508494 60508499 +
gcaaaggaatgcaactgggagg

SEQ ID NO: 202411 - DNA, 22 bp, Artificial Sequence
  Synthetic oligonucleotide; CTG chr2 60508494 60508515 60508511 60508516 +
ggaggttctggaatagcacagt

SEQ ID NO: 202412 - DNA, 22 bp, Artificial Sequence
  Synthetic oligonucleotide; TTC chr2 60508502 60508523 60508519 60508524 +
tggaatagcacagtgtggaact

SEQ ID NO: 202413 - DNA, 22 bp, Artificial Sequence
  Synthetic oligonucleotide; CTG chr2 60508504 60508525 60508521 60508526 +
gaatagcacagtgtggaactgc

SEQ ID NO: 202414 - DNA, 22 bp, Artificial Sequence
  Synthetic oligonucleotide; CTG chr2 60508525 60508546 60508542 60508547 +
cactggacttttcctgttctga

SEQ ID NO: 202415 - DNA, 22 bp, Artificial Sequence
  Synthetic oligonucleotide; CTG chr2 60508530 60508551 60508547 60508552 +
gacttttcctgttctgaagagg

SEQ ID NO: 202416 - DNA, 22 bp, Artificial Sequence
  Synthetic oligonucleotide; CTT chr2 60508535 60508556 60508552 60508557 +
ttcctgttctgaagaggacttt

SEQ ID NO: 202417 - DNA, 22 bp, Artificial Sequence
  Synthetic oligonucleotide; TTT chr2 60508536 60508557 60508553 60508558 +
tcctgttctgaagaggactttg

SEQ ID NO: 202418 - DNA, 22 bp, Artificial Sequence
  Synthetic oligonucleotide; TTT chr2 60508537 60508558 60508554 60508559 +
cctgttctgaagaggactttgc

SEQ ID NO: 202419 - DNA, 22 bp, Artificial Sequence
  Synthetic oligonucleotide; TTC chr2 60508538 60508559 60508555 60508560 +
ctgttctgaagaggactttgct

SEQ ID NO: 202420 - DNA, 22 bp, Artificial Sequence
  Synthetic oligonucleotide; CTG chr2 60508541 60508562 60508558 60508563 +
ttctgaagaggactttgctttc

SEQ ID NO: 202421 - DNA, 22 bp, Artificial Sequence
  Synthetic oligonucleotide; TTC chr2 60508544 60508565 60508561 60508566 +
tgaagaggactttgctttcctc

SEQ ID NO: 202422 - DNA, 22 bp, Artificial Sequence
  Synthetic oligonucleotide; CTG chr2 60508546 60508567 60508563 60508568 +
aagaggactttgctttcctccg

SEQ ID NO: 202423 - DNA, 22 bp, Artificial Sequence
  Synthetic oligonucleotide; CTT chr2 60508556 60508577 60508573 60508578 +
tgctttcctccgggatgtaaag

SEQ ID NO: 202424 - DNA, 22 bp, Artificial Sequence
  Synthetic oligonucleotide; TTT chr2 60508557 60508578 60508574 60508579 +
gctttcctccgggatgtaaagc

SEQ ID NO: 202425 - DNA, 22 bp, Artificial Sequence
  Synthetic oligonucleotide; TTG chr2 60508558 60508579 60508575 60508580 +
ctttcctccgggatgtaaagca

SEQ ID NO: 202426 - DNA, 22 bp, Artificial Sequence
  Synthetic oligonucleotide; CTT chr2 60508561 60508582 60508578 60508583 +
tcctccgggatgtaaagcattt

SEQ ID NO: 202427 - DNA, 22 bp, Artificial Sequence
  Synthetic oligonucleotide; TTT chr2 60508562 60508583 60508579 60508584 +
cctccgggatgtaaagcatttg

SEQ ID NO: 202428 - DNA, 22 bp, Artificial Sequence
  Synthetic oligonucleotide; TTC chr2 60508563 60508584 60508580 60508585 +
ctccgggatgtaaagcatttgg

SEQ ID NO: 202429 - DNA, 22 bp, Artificial Sequence
  Synthetic oligonucleotide; CTC chr2 60508566 60508587 60508583 60508588 +
cgggatgtaaagcatttggcag

SEQ ID NO: 202430 - DNA, 22 bp, Artificial Sequence
  Synthetic oligonucleotide; TTT chr2 60508583 60508604 60508600 60508605 +
ggcaggcaaaggacaaaactta

SEQ ID NO: 202431 - DNA, 22 bp, Artificial Sequence
  Synthetic oligonucleotide; TTG chr2 60508584 60508605 60508601 60508606 +
gcaggcaaaggacaaaacttac

SEQ ID NO: 202432 - DNA, 22 bp, Artificial Sequence
  Synthetic oligonucleotide; CTT chr2 60508604 60508625 60508621 60508626 +
acctcaggtactatggcaaact

SEQ ID NO: 202433 - DNA, 22 bp, Artificial Sequence
  Synthetic oligonucleotide; TTA chr2 60508605 60508626 60508622 60508627 +
cctcaggtactatggcaaactg

SEQ ID NO: 202434 - DNA, 22 bp, Artificial Sequence
  Synthetic oligonucleotide; CTC chr2 60508609 60508630 60508626 60508631 +
aggtactatggcaaactggcca

SEQ ID NO: 202435 - DNA, 22 bp, Artificial Sequence
  Synthetic oligonucleotide; CTA chr2 60508617 60508638 60508634 60508639 +
tggcaaactggccaaagagaag

SEQ ID NO: 202436 - DNA, 22 bp, Artificial Sequence
  Synthetic oligonucleotide; CTG chr2 60508627 60508648 60508644 60508649 +
gccaaagagaagcgttgctagg

SEQ ID NO: 202437 - DNA, 22 bp, Artificial Sequence
  Synthetic oligonucleotide; TTG chr2 60508644 60508665 60508661 60508666 +
ctaggagaatggacacggcagg

SEQ ID NO: 202438 - DNA, 22 bp, Artificial Sequence
  Synthetic oligonucleotide; CTA chr2 60508647 60508668 60508664 60508669 +
ggagaatggacacggcaggaaa

SEQ ID NO: 202439 - DNA, 22 bp, Artificial Sequence
  Synthetic oligonucleotide; CTC chr2 60508676 60508697 60508693 60508698 +
agcttggcccaggaagaagctg

SEQ ID NO: 202440 - DNA, 22 bp, Artificial Sequence
  Synthetic oligonucleotide; CTT chr2 60508681 60508702 60508698 60508703 +
ggcccaggaagaagctggcgct

SEQ ID NO: 202441 - DNA, 22 bp, Artificial Sequence
  Synthetic oligonucleotide; TTG chr2 60508682 60508703 60508699 60508704 +
gcccaggaagaagctggcgctc

SEQ ID NO: 202442 - DNA, 22 bp, Artificial Sequence
  Synthetic oligonucleotide; CTG chr2 60508698 60508719 60508715 60508720 +
gcgctcagctacaggggccgtg

SEQ ID NO: 202443 - DNA, 22 bp, Artificial Sequence
  Synthetic oligonucleotide; CTC chr2 60508704 60508725 60508721 60508726 +
agctacaggggccgtgggaata

SEQ ID NO: 202444 - DNA, 22 bp, Artificial Sequence
  Synthetic oligonucleotide; CTA chr2 60508709 60508730 60508726 60508731 +
caggggccgtgggaatagctgg

SEQ ID NO: 202445 - DNA, 22 bp, Artificial Sequence
  Synthetic oligonucleotide; CTG chr2 60508730 60508751 60508747 60508752 +
gaggcctgtgcatttccctgag

SEQ ID NO: 202446 - DNA, 22 bp, Artificial Sequence
  Synthetic oligonucleotide; CTG chr2 60508738 60508759 60508755 60508760 +
tgcatttccctgagggtctcct

SEQ ID NO: 202447 - DNA, 22 bp, Artificial Sequence
  Synthetic oligonucleotide; TTT chr2 60508745 60508766 60508762 60508767 +
ccctgagggtctccttggcgac

SEQ ID NO: 202448 - DNA, 22 bp, Artificial Sequence
  Synthetic oligonucleotide; TTC chr2 60508746 60508767 60508763 60508768 +
cctgagggtctccttggcgaca

SEQ ID NO: 202449 - DNA, 22 bp, Artificial Sequence
  Synthetic oligonucleotide; CTG chr2 60508750 60508771 60508767 60508772 +
agggtctccttggcgacagggc

SEQ ID NO: 202450 - DNA, 22 bp, Artificial Sequence
  Synthetic oligonucleotide; CTC chr2 60508758 60508779 60508775 60508780 +
cttggcgacagggctggacctt

SEQ ID NO: 202451 - DNA, 22 bp, Artificial Sequence
  Synthetic oligonucleotide; CTT chr2 60508761 60508782 60508778 60508783 +
ggcgacagggctggacctttgc

SEQ ID NO: 202452 - DNA, 22 bp, Artificial Sequence
  Synthetic oligonucleotide; TTG chr2 60508762 60508783 60508779 60508784 +
gcgacagggctggacctttgca

SEQ ID NO: 202453 - DNA, 22 bp, Artificial Sequence
  Synthetic oligonucleotide; CTG chr2 60508774 60508795 60508791 60508796 +
gacctttgcactggcagcctgg

SEQ ID NO: 202454 - DNA, 22 bp, Artificial Sequence
  Synthetic oligonucleotide; CTT chr2 60508780 60508801 60508797 60508802 +
tgcactggcagcctggactctt

SEQ ID NO: 202455 - DNA, 22 bp, Artificial Sequence
  Synthetic oligonucleotide; TTT chr2 60508781 60508802 60508798 60508803 +
gcactggcagcctggactcttc

SEQ ID NO: 202456 - DNA, 22 bp, Artificial Sequence
  Synthetic oligonucleotide; TTG chr2 60508782 60508803 60508799 60508804 +
cactggcagcctggactcttct

SEQ ID NO: 202457 - DNA, 22 bp, Artificial Sequence
  Synthetic oligonucleotide; CTG chr2 60508787 60508808 60508804 60508809 +
gcagcctggactcttctctgag

SEQ ID NO: 202458 - DNA, 22 bp, Artificial Sequence
  Synthetic oligonucleotide; CTG chr2 60508795 60508816 60508812 60508817 +
gactcttctctgagctccccct

SEQ ID NO: 202459 - DNA, 22 bp, Artificial Sequence
  Synthetic oligonucleotide; CTC chr2 60508800 60508821 60508817 60508822 +
ttctctgagctcccccttgggt

SEQ ID NO: 202460 - DNA, 22 bp, Artificial Sequence
  Synthetic oligonucleotide; CTT chr2 60508802 60508823 60508819 60508824 +
ctctgagctcccccttgggtta

SEQ ID NO: 202461 - DNA, 22 bp, Artificial Sequence
  Synthetic oligonucleotide; TTC chr2 60508803 60508824 60508820 60508825 +
tctgagctcccccttgggttac

SEQ ID NO: 202462 - DNA, 22 bp, Artificial Sequence
  Synthetic oligonucleotide; CTC chr2 60508805 60508826 60508822 60508827 +
tgagctcccccttgggttacct

SEQ ID NO: 202463 - DNA, 22 bp, Artificial Sequence
  Synthetic oligonucleotide; CTG chr2 60508807 60508828 60508824 60508829 +
agctcccccttgggttacctat

SEQ ID NO: 202464 - DNA, 22 bp, Artificial Sequence
  Synthetic oligonucleotide; CTC chr2 60508812 60508833 60508829 60508834 +
ccccttgggttacctatgattc

SEQ ID NO: 202465 - DNA, 22 bp, Artificial Sequence
  Synthetic oligonucleotide; CTT chr2 60508818 60508839 60508835 60508840 +
gggttacctatgattccagaag

SEQ ID NO: 202466 - DNA, 22 bp, Artificial Sequence
  Synthetic oligonucleotide; TTG chr2 60508819 60508840 60508836 60508841 +
ggttacctatgattccagaaga

SEQ ID NO: 202467 - DNA, 22 bp, Artificial Sequence
  Synthetic oligonucleotide; TTA chr2 60508824 60508845 60508841 60508846 +
cctatgattccagaagagtttg

SEQ ID NO: 202468 - DNA, 22 bp, Artificial Sequence
  Synthetic oligonucleotide; CTA chr2 60508828 60508849 60508845 60508850 +
tgattccagaagagtttgttct

SEQ ID NO: 202469 - DNA, 22 bp, Artificial Sequence
  Synthetic oligonucleotide; TTC chr2 60508834 60508855 60508851 60508856 +
cagaagagtttgttctacatgt

SEQ ID NO: 202470 - DNA, 22 bp, Artificial Sequence
  Synthetic oligonucleotide; TTT chr2 60508845 60508866 60508862 60508867 +
gttctacatgtggcaaagccag

SEQ ID NO: 202471 - DNA, 22 bp, Artificial Sequence
  Synthetic oligonucleotide; TTG chr2 60508846 60508867 60508863 60508868 +
ttctacatgtggcaaagccagc

SEQ ID NO: 202472 - DNA, 22 bp, Artificial Sequence
  Synthetic oligonucleotide; TTC chr2 60508849 60508870 60508866 60508871 +
tacatgtggcaaagccagcacc

SEQ ID NO: 202473 - DNA, 22 bp, Artificial Sequence
  Synthetic oligonucleotide; CTA chr2 60508851 60508872 60508868 60508873 +
catgtggcaaagccagcaccat

SEQ ID NO: 202474 - DNA, 22 bp, Artificial Sequence
  Synthetic oligonucleotide; CTA chr2 60508895 60508916 60508912 60508917 +
aggcctaccttgagggatgtta

SEQ ID NO: 202475 - DNA, 22 bp, Artificial Sequence
  Synthetic oligonucleotide; CTA chr2 60508902 60508923 60508919 60508924 +
ccttgagggatgttaaacttac

SEQ ID NO: 202476 - DNA, 22 bp, Artificial Sequence
  Synthetic oligonucleotide; CTT chr2 60508906 60508927 60508923 60508928 +
gagggatgttaaacttacgccc

SEQ ID NO: 202477 - DNA, 22 bp, Artificial Sequence
  Synthetic oligonucleotide; TTG chr2 60508907 60508928 60508924 60508929 +
agggatgttaaacttacgccct

SEQ ID NO: 202478 - DNA, 22 bp, Artificial Sequence
  Synthetic oligonucleotide; TTA chr2 60508917 60508938 60508934 60508939 +
aacttacgccctacccactgct

SEQ ID NO: 202479 - DNA, 22 bp, Artificial Sequence
  Synthetic oligonucleotide; CTT chr2 60508922 60508943 60508939 60508944 +
acgccctacccactgctactta

SEQ ID NO: 202480 - DNA, 22 bp, Artificial Sequence
  Synthetic oligonucleotide; TTA chr2 60508923 60508944 60508940 60508945 +
cgccctacccactgctacttaa

SEQ ID NO: 202481 - DNA, 22 bp, Artificial Sequence
  Synthetic oligonucleotide; CTA chr2 60508930 60508951 60508947 60508952 +
cccactgctacttaaggtgtct

SEQ ID NO: 202482 - DNA, 22 bp, Artificial Sequence
  Synthetic oligonucleotide; CTG chr2 60508937 60508958 60508954 60508959 +
ctacttaaggtgtcttttgaat

SEQ ID NO: 202483 - DNA, 22 bp, Artificial Sequence
  Synthetic oligonucleotide; CTA chr2 60508940 60508961 60508957 60508962 +
cttaaggtgtcttttgaatcct

SEQ ID NO: 202484 - DNA, 22 bp, Artificial Sequence
  Synthetic oligonucleotide; CTT chr2 60508943 60508964 60508960 60508965 +
aaggtgtcttttgaatcctgag

SEQ ID NO: 202485 - DNA, 22 bp, Artificial Sequence
  Synthetic oligonucleotide; TTA chr2 60508944 60508965 60508961 60508966 +
aggtgtcttttgaatcctgagg

SEQ ID NO: 202486 - DNA, 22 bp, Artificial Sequence
  Synthetic oligonucleotide; CTT chr2 60508953 60508974 60508970 60508975 +
ttgaatcctgaggaccaaggag

SEQ ID NO: 202487 - DNA, 22 bp, Artificial Sequence
  Synthetic oligonucleotide; TTT chr2 60508954 60508975 60508971 60508976 +
tgaatcctgaggaccaaggagc

SEQ ID NO: 202488 - DNA, 22 bp, Artificial Sequence
  Synthetic oligonucleotide; TTT chr2 60508955 60508976 60508972 60508977 +
gaatcctgaggaccaaggagct

SEQ ID NO: 202489 - DNA, 22 bp, Artificial Sequence
  Synthetic oligonucleotide; TTG chr2 60508956 60508977 60508973 60508978 +
aatcctgaggaccaaggagctc

SEQ ID NO: 202490 - DNA, 22 bp, Artificial Sequence
  Synthetic oligonucleotide; CTG chr2 60508963 60508984 60508980 60508985 +
aggaccaaggagctctcctatg

SEQ ID NO: 202491 - DNA, 22 bp, Artificial Sequence
  Synthetic oligonucleotide; CTC chr2 60508978 60508999 60508995 60509000 +
tcctatgacaaggaacctgtca

SEQ ID NO: 202492 - DNA, 22 bp, Artificial Sequence
  Synthetic oligonucleotide; CTC chr2 60508980 60509001 60508997 60509002 +
ctatgacaaggaacctgtcact

SEQ ID NO: 202493 - DNA, 22 bp, Artificial Sequence
  Synthetic oligonucleotide; CTA chr2 60508983 60509004 60509000 60509005 +
tgacaaggaacctgtcactggt

SEQ ID NO: 202494 - DNA, 22 bp, Artificial Sequence
  Synthetic oligonucleotide; CTG chr2 60508997 60509018 60509014 60509019 +
tcactggttcttctgtgattgc

SEQ ID NO: 202495 - DNA, 22 bp, Artificial Sequence
  Synthetic oligonucleotide; CTG chr2 60509003 60509024 60509020 60509025 +
gttcttctgtgattgctaaagc

SEQ ID NO: 202496 - DNA, 22 bp, Artificial Sequence
  Synthetic oligonucleotide; TTC chr2 60509007 60509028 60509024 60509029 +
ttctgtgattgctaaagcctag

SEQ ID NO: 202497 - DNA, 22 bp, Artificial Sequence
  Synthetic oligonucleotide; CTT chr2 60509009 60509030 60509026 60509031 +
ctgtgattgctaaagcctagag

SEQ ID NO: 202498 - DNA, 22 bp, Artificial Sequence
  Synthetic oligonucleotide; TTC chr2 60509010 60509031 60509027 60509032 +
tgtgattgctaaagcctagagg

SEQ ID NO: 202499 - DNA, 22 bp, Artificial Sequence
  Synthetic oligonucleotide; CTG chr2 60509012 60509033 60509029 60509034 +
tgattgctaaagcctagaggac

SEQ ID NO: 202500 - DNA, 22 bp, Artificial Sequence
  Synthetic oligonucleotide; TTG chr2 60509018 60509039 60509035 60509040 +
ctaaagcctagaggacctcctc

SEQ ID NO: 202501 - DNA, 22 bp, Artificial Sequence
  Synthetic oligonucleotide; CTA chr2 60509021 60509042 60509038 60509043 +
aagcctagaggacctcctccaa

SEQ ID NO: 202502 - DNA, 22 bp, Artificial Sequence
  Synthetic oligonucleotide; CTA chr2 60509028 60509049 60509045 60509050 +
gaggacctcctccaaagaaaag

SEQ ID NO: 202503 - DNA, 22 bp, Artificial Sequence
  Synthetic oligonucleotide; CTC chr2 60509037 60509058 60509054 60509059 +
ctccaaagaaaagtggctcaga

SEQ ID NO: 202504 - DNA, 22 bp, Artificial Sequence
  Synthetic oligonucleotide; CTC chr2 60509040 60509061 60509057 60509062 +
caaagaaaagtggctcagacag

SEQ ID NO: 202505 - DNA, 22 bp, Artificial Sequence
  Synthetic oligonucleotide; CTC chr2 60509056 60509077 60509073 60509078 +
agacagaaacactgactcttat

SEQ ID NO: 202506 - DNA, 22 bp, Artificial Sequence
  Synthetic oligonucleotide; CTG chr2 60509070 60509091 60509087 60509092 +
actcttatttctcatcagactc

SEQ ID NO: 202507 - DNA, 22 bp, Artificial Sequence
  Synthetic oligonucleotide; CTC chr2 60509074 60509095 60509091 60509096 +
ttatttctcatcagactccgaa

SEQ ID NO: 202508 - DNA, 22 bp, Artificial Sequence
  Synthetic oligonucleotide; CTT chr2 60509076 60509097 60509093 60509098 +
atttctcatcagactccgaaat

SEQ ID NO: 202509 - DNA, 22 bp, Artificial Sequence
  Synthetic oligonucleotide; TTA chr2 60509077 60509098 60509094 60509099 +
tttctcatcagactccgaaatc

SEQ ID NO: 202510 - DNA, 22 bp, Artificial Sequence
  Synthetic oligonucleotide; TTT chr2 60509080 60509101 60509097 60509102 +
ctcatcagactccgaaatcaca

SEQ ID NO: 202511 - DNA, 22 bp, Artificial Sequence
  Synthetic oligonucleotide; TTC chr2 60509081 60509102 60509098 60509103 +
tcatcagactccgaaatcacag

SEQ ID NO: 202512 - DNA, 22 bp, Artificial Sequence
  Synthetic oligonucleotide; CTC chr2 60509083 60509104 60509100 60509105 +
atcagactccgaaatcacaggc

SEQ ID NO: 202513 - DNA, 22 bp, Artificial Sequence
  Synthetic oligonucleotide; CTC chr2 60509092 60509113 60509109 60509114 +
cgaaatcacaggcttctggtct

SEQ ID NO: 202514 - DNA, 22 bp, Artificial Sequence
  Synthetic oligonucleotide; CTT chr2 60509107 60509128 60509124 60509129 +
ctggtctaaagattcaagctga

SEQ ID NO: 202515 - DNA, 22 bp, Artificial Sequence
  Synthetic oligonucleotide; TTC chr2 60509108 60509129 60509125 60509130 +
tggtctaaagattcaagctgag

SEQ ID NO: 202516 - DNA, 22 bp, Artificial Sequence
  Synthetic oligonucleotide; CTG chr2 60509110 60509131 60509127 60509132 +
gtctaaagattcaagctgagaa

SEQ ID NO: 202517 - DNA, 22 bp, Artificial Sequence
  Synthetic oligonucleotide; CTA chr2 60509115 60509136 60509132 60509137 +
aagattcaagctgagaaacaag

SEQ ID NO: 202518 - DNA, 22 bp, Artificial Sequence
  Synthetic oligonucleotide; TTC chr2 60509122 60509143 60509139 60509144 +
aagctgagaaacaagaaagcaa

SEQ ID NO: 202519 - DNA, 22 bp, Artificial Sequence
  Synthetic oligonucleotide; CTG chr2 60509128 60509149 60509145 60509150 +
agaaacaagaaagcaatttgtt

SEQ ID NO: 202520 - DNA, 22 bp, Artificial Sequence
  Synthetic oligonucleotide; TTT chr2 60509147 60509168 60509164 60509169 +
gtttgattcaggcccttgcaaa

SEQ ID NO: 202521 - DNA, 22 bp, Artificial Sequence
  Synthetic oligonucleotide; TTG chr2 60509148 60509169 60509165 60509170 +
tttgattcaggcccttgcaaat

SEQ ID NO: 202522 - DNA, 22 bp, Artificial Sequence
  Synthetic oligonucleotide; TTT chr2 60509151 60509172 60509168 60509173 +
gattcaggcccttgcaaattac

SEQ ID NO: 202523 - DNA, 22 bp, Artificial Sequence
  Synthetic oligonucleotide; TTG chr2 60509152 60509173 60509169 60509174 +
attcaggcccttgcaaattacc

SEQ ID NO: 202524 - DNA, 22 bp, Artificial Sequence
  Synthetic oligonucleotide; TTC chr2 60509156 60509177 60509173 60509178 +
aggcccttgcaaattacccccc

SEQ ID NO: 202525 - DNA, 22 bp, Artificial Sequence
  Synthetic oligonucleotide; CTT chr2 60509164 60509185 60509181 60509186 +
gcaaattaccccccaataattt

SEQ ID NO: 202526 - DNA, 22 bp, Artificial Sequence
  Synthetic oligonucleotide; TTG chr2 60509165 60509186 60509182 60509187 +
caaattaccccccaataattta

SEQ ID NO: 202527 - DNA, 22 bp, Artificial Sequence
  Synthetic oligonucleotide; TTA chr2 60509172 60509193 60509189 60509194 +
ccccccaataatttacttggtc

SEQ ID NO: 202528 - DNA, 22 bp, Artificial Sequence
  Synthetic oligonucleotide; TTT chr2 60509186 60509207 60509203 60509208 +
acttggtctcagctttggctgg

SEQ ID NO: 202529 - DNA, 22 bp, Artificial Sequence
  Synthetic oligonucleotide; TTA chr2 60509187 60509208 60509204 60509209 +
cttggtctcagctttggctggc

SEQ ID NO: 202530 - DNA, 22 bp, Artificial Sequence
  Synthetic oligonucleotide; CTT chr2 60509190 60509211 60509207 60509212 +
ggtctcagctttggctggcttg

SEQ ID NO: 202531 - DNA, 22 bp, Artificial Sequence
  Synthetic oligonucleotide; TTG chr2 60509191 60509212 60509208 60509213 +
gtctcagctttggctggcttgg

SEQ ID NO: 202532 - DNA, 22 bp, Artificial Sequence
  Synthetic oligonucleotide; CTC chr2 60509196 60509217 60509213 60509218 +
agctttggctggcttggatgtt

SEQ ID NO: 202533 - DNA, 22 bp, Artificial Sequence
  Synthetic oligonucleotide; CTT chr2 60509201 60509222 60509218 60509223 +
tggctggcttggatgttatgag

SEQ ID NO: 202534 - DNA, 22 bp, Artificial Sequence
  Synthetic oligonucleotide; TTT chr2 60509202 60509223 60509219 60509224 +
ggctggcttggatgttatgagg

SEQ ID NO: 202535 - DNA, 22 bp, Artificial Sequence
  Synthetic oligonucleotide; TTG chr2 60509203 60509224 60509220 60509225 +
gctggcttggatgttatgagga

SEQ ID NO: 202536 - DNA, 22 bp, Artificial Sequence
  Synthetic oligonucleotide; CTG chr2 60509207 60509228 60509224 60509229 +
gcttggatgttatgaggattcc

SEQ ID NO: 202537 - DNA, 22 bp, Artificial Sequence
  Synthetic oligonucleotide; CTT chr2 60509211 60509232 60509228 60509233 +
ggatgttatgaggattccaaga

SEQ ID NO: 202538 - DNA, 22 bp, Artificial Sequence
  Synthetic oligonucleotide; TTG chr2 60509212 60509233 60509229 60509234 +
gatgttatgaggattccaagaa

SEQ ID NO: 202539 - DNA, 22 bp, Artificial Sequence
  Synthetic oligonucleotide; TTA chr2 60509219 60509240 60509236 60509241 +
tgaggattccaagaattttttt

SEQ ID NO: 202540 - DNA, 22 bp, Artificial Sequence
  Synthetic oligonucleotide; TTC chr2 60509228 60509249 60509245 60509250 +
caagaatttttttacttttcca

SEQ ID NO: 202541 - DNA, 22 bp, Artificial Sequence
  Synthetic oligonucleotide; TTT chr2 60509237 60509258 60509254 60509259 +
ttttacttttccattagagggc

SEQ ID NO: 202542 - DNA, 22 bp, Artificial Sequence
  Synthetic oligonucleotide; TTT chr2 60509238 60509259 60509255 60509260 +
tttacttttccattagagggct

SEQ ID NO: 202543 - DNA, 22 bp, Artificial Sequence
  Synthetic oligonucleotide; TTT chr2 60509239 60509260 60509256 60509261 +
ttacttttccattagagggctc

SEQ ID NO: 202544 - DNA, 22 bp, Artificial Sequence
  Synthetic oligonucleotide; TTT chr2 60509240 60509261 60509257 60509262 +
tacttttccattagagggctct

SEQ ID NO: 202545 - DNA, 22 bp, Artificial Sequence
  Synthetic oligonucleotide; TTT chr2 60509241 60509262 60509258 60509263 +
acttttccattagagggctctg

SEQ ID NO: 202546 - DNA, 22 bp, Artificial Sequence
  Synthetic oligonucleotide; TTA chr2 60509242 60509263 60509259 60509264 +
cttttccattagagggctctgc

SEQ ID NO: 202547 - DNA, 22 bp, Artificial Sequence
  Synthetic oligonucleotide; CTT chr2 60509245 60509266 60509262 60509267 +
ttccattagagggctctgcact

SEQ ID NO: 202548 - DNA, 22 bp, Artificial Sequence
  Synthetic oligonucleotide; TTT chr2 60509246 60509267 60509263 60509268 +
tccattagagggctctgcactc

SEQ ID NO: 202549 - DNA, 22 bp, Artificial Sequence
  Synthetic oligonucleotide; TTT chr2 60509247 60509268 60509264 60509269 +
ccattagagggctctgcactct

SEQ ID NO: 202550 - DNA, 22 bp, Artificial Sequence
  Synthetic oligonucleotide; TTC chr2 60509248 60509269 60509265 60509270 +
cattagagggctctgcactctc

SEQ ID NO: 202551 - DNA, 22 bp, Artificial Sequence
  Synthetic oligonucleotide; TTA chr2 60509253 60509274 60509270 60509275 +
gagggctctgcactctcctttc

SEQ ID NO: 202552 - DNA, 22 bp, Artificial Sequence
  Synthetic oligonucleotide; CTC chr2 60509261 60509282 60509278 60509283 +
tgcactctcctttcaaggaaaa

SEQ ID NO: 202553 - DNA, 22 bp, Artificial Sequence
  Synthetic oligonucleotide; CTG chr2 60509263 60509284 60509280 60509285 +
cactctcctttcaaggaaaaag

SEQ ID NO: 202554 - DNA, 22 bp, Artificial Sequence
  Synthetic oligonucleotide; CTC chr2 60509268 60509289 60509285 60509290 +
tcctttcaaggaaaaaggctct

SEQ ID NO: 202555 - DNA, 22 bp, Artificial Sequence
  Synthetic oligonucleotide; CTC chr2 60509270 60509291 60509287 60509292 +
ctttcaaggaaaaaggctctat

SEQ ID NO: 202556 - DNA, 22 bp, Artificial Sequence
  Synthetic oligonucleotide; CTT chr2 60509273 60509294 60509290 60509295 +
tcaaggaaaaaggctctatgtg

SEQ ID NO: 202557 - DNA, 22 bp, Artificial Sequence
  Synthetic oligonucleotide; TTT chr2 60509274 60509295 60509291 60509296 +
caaggaaaaaggctctatgtgc

SEQ ID NO: 202558 - DNA, 22 bp, Artificial Sequence
  Synthetic oligonucleotide; TTC chr2 60509275 60509296 60509292 60509297 +
aaggaaaaaggctctatgtgcc

SEQ ID NO: 202559 - DNA, 22 bp, Artificial Sequence
  Synthetic oligonucleotide; CTC chr2 60509289 60509310 60509306 60509311 +
tatgtgccagcccacttctttc

SEQ ID NO: 202560 - DNA, 22 bp, Artificial Sequence
  Synthetic oligonucleotide; CTA chr2 60509291 60509312 60509308 60509313 +
tgtgccagcccacttctttcca

SEQ ID NO: 202561 - DNA, 22 bp, Artificial Sequence
  Synthetic oligonucleotide; CTT chr2 60509306 60509327 60509323 60509328 +
ctttccagaaatggggaaaggg

SEQ ID NO: 202562 - DNA, 22 bp, Artificial Sequence
  Synthetic oligonucleotide; TTC chr2 60509307 60509328 60509324 60509329 +
tttccagaaatggggaaaggga

SEQ ID NO: 202563 - DNA, 22 bp, Artificial Sequence
  Synthetic oligonucleotide; CTT chr2 60509309 60509330 60509326 60509331 +
tccagaaatggggaaagggagg

SEQ ID NO: 202564 - DNA, 22 bp, Artificial Sequence
  Synthetic oligonucleotide; TTT chr2 60509310 60509331 60509327 60509332 +
ccagaaatggggaaagggagga

SEQ ID NO: 202565 - DNA, 22 bp, Artificial Sequence
  Synthetic oligonucleotide; TTC chr2 60509311 60509332 60509328 60509333 +
cagaaatggggaaagggaggag

SEQ ID NO: 202566 - DNA, 22 bp, Artificial Sequence
  Synthetic oligonucleotide; CTG chr2 60509342 60509363 60509359 60509364 +
tggaaaagaggacaacggattt

SEQ ID NO: 202567 - DNA, 22 bp, Artificial Sequence
  Synthetic oligonucleotide; TTT chr2 60509364 60509385 60509381 60509386 +
ccggaagaaattccaagccagg

SEQ ID NO: 202568 - DNA, 22 bp, Artificial Sequence
  Synthetic oligonucleotide; TTC chr2 60509365 60509386 60509382 60509387 +
cggaagaaattccaagccaggg

SEQ ID NO: 202569 - DNA, 22 bp, Artificial Sequence
  Synthetic oligonucleotide; TTC chr2 60509377 60509398 60509394 60509399 +
caagccaggggctaaccgtgga

SEQ ID NO: 202570 - DNA, 22 bp, Artificial Sequence
  Synthetic oligonucleotide; CTA chr2 60509391 60509412 60509408 60509413 +
accgtggacctgagcacagcag

SEQ ID NO: 202571 - DNA, 22 bp, Artificial Sequence
  Synthetic oligonucleotide; CTG chr2 60509403 60509424 60509420 60509425 +
agcacagcagagccacacggac

SEQ ID NO: 202572 - DNA, 22 bp, Artificial Sequence
  Synthetic oligonucleotide; CTC chr2 60509430 60509451 60509447 60509452 +
agaaaacggttctgtggaagca

SEQ ID NO: 202573 - DNA, 22 bp, Artificial Sequence
  Synthetic oligonucleotide; TTC chr2 60509442 60509463 60509459 60509464 +
tgtggaagcacaagacacgtgg

SEQ ID NO: 202574 - DNA, 22 bp, Artificial Sequence
  Synthetic oligonucleotide; CTG chr2 60509444 60509465 60509461 60509466 +
tggaagcacaagacacgtggca

SEQ ID NO: 202575 - DNA, 22 bp, Artificial Sequence
  Synthetic oligonucleotide; CTG chr2 60509478 60509499 60509495 60509500 +
agaagtccaggaaaagatgcag

SEQ ID NO: 202576 - DNA, 22 bp, Artificial Sequence
  Synthetic oligonucleotide; CTT chr2 60509503 60509524 60509520 60509525 +
ccaacccattcctaaatatcac

SEQ ID NO: 202577 - DNA, 22 bp, Artificial Sequence
  Synthetic oligonucleotide; TTC chr2 60509504 60509525 60509521 60509526 +
caacccattcctaaatatcacc

SEQ ID NO: 202578 - DNA, 22 bp, Artificial Sequence
  Synthetic oligonucleotide; TTC chr2 60509514 60509535 60509531 60509536 +
ctaaatatcaccaattaacagc

SEQ ID NO: 202579 - DNA, 22 bp, Artificial Sequence
  Synthetic oligonucleotide; CTA chr2 60509517 60509538 60509534 60509539 +
aatatcaccaattaacagcagc

SEQ ID NO: 202580 - DNA, 22 bp, Artificial Sequence
  Synthetic oligonucleotide; TTA chr2 60509531 60509552 60509548 60509553 +
acagcagctcgatggtctacct

SEQ ID NO: 202581 - DNA, 22 bp, Artificial Sequence
  Synthetic oligonucleotide; CTC chr2 60509541 60509562 60509558 60509563 +
gatggtctacctgagacctgag

SEQ ID NO: 202582 - DNA, 22 bp, Artificial Sequence
  Synthetic oligonucleotide; CTA chr2 60509550 60509571 60509567 60509572 +
cctgagacctgagaaaacaaac

SEQ ID NO: 202583 - DNA, 22 bp, Artificial Sequence
  Synthetic oligonucleotide; CTG chr2 60509554 60509575 60509571 60509576 +
agacctgagaaaacaaacgaag

SEQ ID NO: 202584 - DNA, 22 bp, Artificial Sequence
  Synthetic oligonucleotide; CTG chr2 60509561 60509582 60509578 60509583 +
agaaaacaaacgaagggaaaga

SEQ ID NO: 202585 - DNA, 22 bp, Artificial Sequence
  Synthetic oligonucleotide; CTT chr2 60509607 60509628 60509624 60509629 +
tctggatcaaaagatcaagttg

SEQ ID NO: 202586 - DNA, 22 bp, Artificial Sequence
  Synthetic oligonucleotide; TTT chr2 60509608 60509629 60509625 60509630 +
ctggatcaaaagatcaagttgt

SEQ ID NO: 202587 - DNA, 22 bp, Artificial Sequence
  Synthetic oligonucleotide; TTC chr2 60509609 60509630 60509626 60509631 +
tggatcaaaagatcaagttgtc

SEQ ID NO: 202588 - DNA, 22 bp, Artificial Sequence
  Synthetic oligonucleotide; CTG chr2 60509611 60509632 60509628 60509633 +
gatcaaaagatcaagttgtctt

SEQ ID NO: 202589 - DNA, 22 bp, Artificial Sequence
  Synthetic oligonucleotide; TTG chr2 60509629 60509650 60509646 60509651 +
tctttggtagctaaagaacaac

SEQ ID NO: 202590 - DNA, 22 bp, Artificial Sequence
  Synthetic oligonucleotide; CTT chr2 60509633 60509654 60509650 60509655 +
tggtagctaaagaacaacagag

SEQ ID NO: 202591 - DNA, 22 bp, Artificial Sequence
  Synthetic oligonucleotide; TTT chr2 60509634 60509655 60509651 60509656 +
ggtagctaaagaacaacagaga

SEQ ID NO: 202592 - DNA, 22 bp, Artificial Sequence
  Synthetic oligonucleotide; TTG chr2 60509635 60509656 60509652 60509657 +
gtagctaaagaacaacagagaa

SEQ ID NO: 202593 - DNA, 22 bp, Artificial Sequence
  Synthetic oligonucleotide; CTA chr2 60509642 60509663 60509659 60509664 +
aagaacaacagagaaggaaaaa

SEQ ID NO: 202594 - DNA, 22 bp, Artificial Sequence
  Synthetic oligonucleotide; TTA chr2 60509678 60509699 60509695 60509700 +
ggaggaggagaaaaacacctgg

SEQ ID NO: 202595 - DNA, 22 bp, Artificial Sequence
  Synthetic oligonucleotide; CTG chr2 60509699 60509720 60509716 60509721 +
gccctccccaaagaactcgact

SEQ ID NO: 202596 - DNA, 22 bp, Artificial Sequence
  Synthetic oligonucleotide; CTC chr2 60509705 60509726 60509722 60509727 +
cccaaagaactcgacttaaatc

SEQ ID NO: 202597 - DNA, 22 bp, Artificial Sequence
  Synthetic oligonucleotide; CTC chr2 60509717 60509738 60509734 60509739 +
gacttaaatcatctcagctata

SEQ ID NO: 202598 - DNA, 22 bp, Artificial Sequence
  Synthetic oligonucleotide; CTT chr2 60509722 60509743 60509739 60509744 +
aaatcatctcagctataggcag

SEQ ID NO: 202599 - DNA, 22 bp, Artificial Sequence
  Synthetic oligonucleotide; TTA chr2 60509723 60509744 60509740 60509745 +
aatcatctcagctataggcagt

SEQ ID NO: 202600 - DNA, 22 bp, Artificial Sequence
  Synthetic oligonucleotide; CTC chr2 60509732 60509753 60509749 60509754 +
agctataggcagtcaactgggg

SEQ ID NO: 202601 - DNA, 22 bp, Artificial Sequence
  Synthetic oligonucleotide; CTA chr2 60509737 60509758 60509754 60509759 +
taggcagtcaactggggctctc

SEQ ID NO: 202602 - DNA, 22 bp, Artificial Sequence
  Synthetic oligonucleotide; CTG chr2 60509751 60509772 60509768 60509773 +
gggctctccgaacagccacaat

SEQ ID NO: 202603 - DNA, 22 bp, Artificial Sequence
  Synthetic oligonucleotide; CTC chr2 60509757 60509778 60509774 60509779 +
tccgaacagccacaatcggggg

SEQ ID NO: 202604 - DNA, 22 bp, Artificial Sequence
  Synthetic oligonucleotide; CTC chr2 60509759 60509780 60509776 60509781 +
cgaacagccacaatcggggggc

SEQ ID NO: 202605 - DNA, 22 bp, Artificial Sequence
  Synthetic oligonucleotide; CTA chr2 60509783 60509804 60509800 60509805 +
ctctctttcccctcacgatctt

SEQ ID NO: 202606 - DNA, 22 bp, Artificial Sequence
  Synthetic oligonucleotide; CTC chr2 60509786 60509807 60509803 60509808 +
tctttcccctcacgatcttcct

SEQ ID NO: 202607 - DNA, 22 bp, Artificial Sequence
  Synthetic oligonucleotide; CTC chr2 60509788 60509809 60509805 60509810 +
tttcccctcacgatcttcctga

SEQ ID NO: 202608 - DNA, 22 bp, Artificial Sequence
  Synthetic oligonucleotide; CTT chr2 60509790 60509811 60509807 60509812 +
tcccctcacgatcttcctgaac

SEQ ID NO: 202609 - DNA, 22 bp, Artificial Sequence
  Synthetic oligonucleotide; TTT chr2 60509791 60509812 60509808 60509813 +
cccctcacgatcttcctgaaca

SEQ ID NO: 202610 - DNA, 22 bp, Artificial Sequence
  Synthetic oligonucleotide; TTC chr2 60509792 60509813 60509809 60509814 +
ccctcacgatcttcctgaacag

SEQ ID NO: 202611 - DNA, 22 bp, Artificial Sequence
  Synthetic oligonucleotide; CTC chr2 60509797 60509818 60509814 60509819 +
acgatcttcctgaacagggcag

SEQ ID NO: 202612 - DNA, 22 bp, Artificial Sequence
  Synthetic oligonucleotide; CTT chr2 60509805 60509826 60509822 60509827 +
cctgaacagggcagtagtctag

SEQ ID NO: 202613 - DNA, 22 bp, Artificial Sequence
  Synthetic oligonucleotide; TTC chr2 60509806 60509827 60509823 60509828 +
ctgaacagggcagtagtctagc

SEQ ID NO: 202614 - DNA, 22 bp, Artificial Sequence
  Synthetic oligonucleotide; CTG chr2 60509809 60509830 60509826 60509831 +
aacagggcagtagtctagcatc

SEQ ID NO: 202615 - DNA, 22 bp, Artificial Sequence
  Synthetic oligonucleotide; CTA chr2 60509826 60509847 60509843 60509848 +
gcatccactgaagtcctgaagt

SEQ ID NO: 202616 - DNA, 22 bp, Artificial Sequence
  Synthetic oligonucleotide; CTG chr2 60509836 60509857 60509853 60509858 +
aagtcctgaagtggtgaaggag

SEQ ID NO: 202617 - DNA, 22 bp, Artificial Sequence
  Synthetic oligonucleotide; CTG chr2 60509844 60509865 60509861 60509866 +
aagtggtgaaggagccccagac

SEQ ID NO: 202618 - DNA, 22 bp, Artificial Sequence
  Synthetic oligonucleotide; CTC chr2 60509878 60509899 60509895 60509900 +
tgagcacctccacagcctttct

SEQ ID NO: 202619 - DNA, 22 bp, Artificial Sequence
  Synthetic oligonucleotide; CTG chr2 60509880 60509901 60509897 60509902 +
agcacctccacagcctttctgg

SEQ ID NO: 202620 - DNA, 22 bp, Artificial Sequence
  Synthetic oligonucleotide; CTC chr2 60509888 60509909 60509905 60509910 +
cacagcctttctggcccatccc

SEQ ID NO: 202621 - DNA, 22 bp, Artificial Sequence
  Synthetic oligonucleotide; CTT chr2 60509897 60509918 60509914 60509919 +
tctggcccatcccaataaacag

SEQ ID NO: 202622 - DNA, 22 bp, Artificial Sequence
  Synthetic oligonucleotide; TTT chr2 60509898 60509919 60509915 60509920 +
ctggcccatcccaataaacagc

SEQ ID NO: 202623 - DNA, 22 bp, Artificial Sequence
  Synthetic oligonucleotide; TTC chr2 60509899 60509920 60509916 60509921 +
tggcccatcccaataaacagca

SEQ ID NO: 202624 - DNA, 22 bp, Artificial Sequence
  Synthetic oligonucleotide; CTG chr2 60509901 60509922 60509918 60509923 +
gcccatcccaataaacagcaat

SEQ ID NO: 202625 - DNA, 22 bp, Artificial Sequence
  Synthetic oligonucleotide; TTC chr2 60509925 60509946 60509942 60509947 +
tattctcccagtcaccgagcca

SEQ ID NO: 202626 - DNA, 22 bp, Artificial Sequence
  Synthetic oligonucleotide; CTA chr2 60509927 60509948 60509944 60509949 +
ttctcccagtcaccgagccaca

SEQ ID NO: 202627 - DNA, 22 bp, Artificial Sequence
  Synthetic oligonucleotide; TTC chr2 60509930 60509951 60509947 60509952 +
tcccagtcaccgagccacacat

SEQ ID NO: 202628 - DNA, 22 bp, Artificial Sequence
  Synthetic oligonucleotide; CTC chr2 60509932 60509953 60509949 60509954 +
ccagtcaccgagccacacattt

SEQ ID NO: 202629 - DNA, 22 bp, Artificial Sequence
  Synthetic oligonucleotide; TTT chr2 60509954 60509975 60509971 60509976 +
tggggtccatcttgactcctcc

SEQ ID NO: 202630 - DNA, 22 bp, Artificial Sequence
  Synthetic oligonucleotide; TTT chr2 60509955 60509976 60509972 60509977 +
ggggtccatcttgactcctccc

SEQ ID NO: 202631 - DNA, 22 bp, Artificial Sequence
  Synthetic oligonucleotide; TTG chr2 60509956 60509977 60509973 60509978 +
gggtccatcttgactcctccct

SEQ ID NO: 202632 - DNA, 22 bp, Artificial Sequence
  Synthetic oligonucleotide; CTT chr2 60509967 60509988 60509984 60509989 +
gactcctcccttcctttcatac

SEQ ID NO: 202633 - DNA, 22 bp, Artificial Sequence
  Synthetic oligonucleotide; TTG chr2 60509968 60509989 60509985 60509990 +
actcctcccttcctttcataca

SEQ ID NO: 202634 - DNA, 22 bp, Artificial Sequence
  Synthetic oligonucleotide; CTC chr2 60509972 60509993 60509989 60509994 +
ctcccttcctttcatacaaccc

SEQ ID NO: 202635 - DNA, 22 bp, Artificial Sequence
  Synthetic oligonucleotide; CTC chr2 60509975 60509996 60509992 60509997 +
ccttcctttcatacaacccatc

SEQ ID NO: 202636 - DNA, 22 bp, Artificial Sequence
  Synthetic oligonucleotide; CTT chr2 60509979 60510000 60509996 60510001 +
cctttcatacaacccatcccac

SEQ ID NO: 202637 - DNA, 22 bp, Artificial Sequence
  Synthetic oligonucleotide; TTC chr2 60509980 60510001 60509997 60510002 +
ctttcatacaacccatcccacc

SEQ ID NO: 202638 - DNA, 22 bp, Artificial Sequence
  Synthetic oligonucleotide; CTT chr2 60509983 60510004 60510000 60510005 +
tcatacaacccatcccaccagt

SEQ ID NO: 202639 - DNA, 22 bp, Artificial Sequence
  Synthetic oligonucleotide; TTT chr2 60509984 60510005 60510001 60510006 +
catacaacccatcccaccagtc

SEQ ID NO: 202640 - DNA, 22 bp, Artificial Sequence
  Synthetic oligonucleotide; TTC chr2 60509985 60510006 60510002 60510007 +
atacaacccatcccaccagtca

SEQ ID NO: 202641 - DNA, 22 bp, Artificial Sequence
  Synthetic oligonucleotide; CTG chr2 60510017 60510038 60510034 60510039 +
ccggttttcccttcgaagtatg

SEQ ID NO: 202642 - DNA, 22 bp, Artificial Sequence
  Synthetic oligonucleotide; TTT chr2 60510024 60510045 60510041 60510046 +
tcccttcgaagtatgtccagaa

SEQ ID NO: 202643 - DNA, 22 bp, Artificial Sequence
  Synthetic oligonucleotide; TTT chr2 60510025 60510046 60510042 60510047 +
cccttcgaagtatgtccagaat

SEQ ID NO: 202644 - DNA, 22 bp, Artificial Sequence
  Synthetic oligonucleotide; TTC chr2 60510026 60510047 60510043 60510048 +
ccttcgaagtatgtccagaatc

SEQ ID NO: 202645 - DNA, 22 bp, Artificial Sequence
  Synthetic oligonucleotide; CTT chr2 60510030 60510051 60510047 60510052 +
cgaagtatgtccagaatccagc

SEQ ID NO: 202646 - DNA, 22 bp, Artificial Sequence
  Synthetic oligonucleotide; TTC chr2 60510031 60510052 60510048 60510053 +
gaagtatgtccagaatccagcc

SEQ ID NO: 202647 - DNA, 22 bp, Artificial Sequence
  Synthetic oligonucleotide; CTT chr2 60510057 60510078 60510074 60510079 +
ctcacgtccccaccaccctggt

SEQ ID NO: 202648 - DNA, 22 bp, Artificial Sequence
  Synthetic oligonucleotide; TTC chr2 60510058 60510079 60510075 60510080 +
tcacgtccccaccaccctggtc

SEQ ID NO: 202649 - DNA, 22 bp, Artificial Sequence
  Synthetic oligonucleotide; CTC chr2 60510060 60510081 60510077 60510082 +
acgtccccaccaccctggtcca

SEQ ID NO: 202650 - DNA, 22 bp, Artificial Sequence
  Synthetic oligonucleotide; CTG chr2 60510077 60510098 60510094 60510099 +
gtccacgccaccatcacttgcc

SEQ ID NO: 202651 - DNA, 22 bp, Artificial Sequence
  Synthetic oligonucleotide; CTT chr2 60510096 60510117 60510113 60510118 +
gcctaaaatttgccttctgact

SEQ ID NO: 202652 - DNA, 22 bp, Artificial Sequence
  Synthetic oligonucleotide; TTG chr2 60510097 60510118 60510114 60510119 +
cctaaaatttgccttctgactg

SEQ ID NO: 202653 - DNA, 22 bp, Artificial Sequence
  Synthetic oligonucleotide; CTA chr2 60510101 60510122 60510118 60510123 +
aaatttgccttctgactgcttc

SEQ ID NO: 202654 - DNA, 22 bp, Artificial Sequence
  Synthetic oligonucleotide; TTT chr2 60510107 60510128 60510124 60510129 +
gccttctgactgcttctgcctc

SEQ ID NO: 202655 - DNA, 22 bp, Artificial Sequence
  Synthetic oligonucleotide; TTG chr2 60510108 60510129 60510125 60510130 +
ccttctgactgcttctgcctca

SEQ ID NO: 202656 - DNA, 22 bp, Artificial Sequence
  Synthetic oligonucleotide; CTT chr2 60510112 60510133 60510129 60510134 +
ctgactgcttctgcctcacttt

SEQ ID NO: 202657 - DNA, 22 bp, Artificial Sequence
  Synthetic oligonucleotide; TTC chr2 60510113 60510134 60510130 60510135 +
tgactgcttctgcctcactttc

SEQ ID NO: 202658 - DNA, 22 bp, Artificial Sequence
  Synthetic oligonucleotide; CTG chr2 60510115 60510136 60510132 60510137 +
actgcttctgcctcactttccc

SEQ ID NO: 202659 - DNA, 22 bp, Artificial Sequence
  Synthetic oligonucleotide; CTG chr2 60510119 60510140 60510136 60510141 +
cttctgcctcactttcccatgc

SEQ ID NO: 202660 - DNA, 22 bp, Artificial Sequence
  Synthetic oligonucleotide; CTT chr2 60510122 60510143 60510139 60510144 +
ctgcctcactttcccatgcttg

SEQ ID NO: 202661 - DNA, 22 bp, Artificial Sequence
  Synthetic oligonucleotide; TTC chr2 60510123 60510144 60510140 60510145 +
tgcctcactttcccatgcttga

SEQ ID NO: 202662 - DNA, 22 bp, Artificial Sequence
  Synthetic oligonucleotide; CTG chr2 60510125 60510146 60510142 60510147 +
cctcactttcccatgcttgagt

SEQ ID NO: 202663 - DNA, 22 bp, Artificial Sequence
  Synthetic oligonucleotide; CTC chr2 60510129 60510150 60510146 60510151 +
actttcccatgcttgagtctca

SEQ ID NO: 202664 - DNA, 22 bp, Artificial Sequence
  Synthetic oligonucleotide; CTT chr2 60510133 60510154 60510150 60510155 +
tcccatgcttgagtctcaaaat

SEQ ID NO: 202665 - DNA, 22 bp, Artificial Sequence
  Synthetic oligonucleotide; TTT chr2 60510134 60510155 60510151 60510156 +
cccatgcttgagtctcaaaatg

SEQ ID NO: 202666 - DNA, 22 bp, Artificial Sequence
  Synthetic oligonucleotide; TTC chr2 60510135 60510156 60510152 60510157 +
ccatgcttgagtctcaaaatgc

SEQ ID NO: 202667 - DNA, 22 bp, Artificial Sequence
  Synthetic oligonucleotide; CTT chr2 60510143 60510164 60510160 60510165 +
gagtctcaaaatgcggcccaag

SEQ ID NO: 202668 - DNA, 22 bp, Artificial Sequence
  Synthetic oligonucleotide; TTG chr2 60510144 60510165 60510161 60510166 +
agtctcaaaatgcggcccaaga

SEQ ID NO: 202669 - DNA, 22 bp, Artificial Sequence
  Synthetic oligonucleotide; CTC chr2 60510150 60510171 60510167 60510172 +
aaaatgcggcccaagagactct

SEQ ID NO: 202670 - DNA, 22 bp, Artificial Sequence
  Synthetic oligonucleotide; CTC chr2 60510171 60510192 60510188 60510193 +
tctggaagcgcaagtcatatga

SEQ ID NO: 202671 - DNA, 22 bp, Artificial Sequence
  Synthetic oligonucleotide; CTC chr2 60510173 60510194 60510190 60510195 +
tggaagcgcaagtcatatgaca

SEQ ID NO: 202672 - DNA, 22 bp, Artificial Sequence
  Synthetic oligonucleotide; CTG chr2 60510175 60510196 60510192 60510197 +
gaagcgcaagtcatatgacatc

SEQ ID NO: 202673 - DNA, 22 bp, Artificial Sequence
  Synthetic oligonucleotide; CTC chr2 60510201 60510222 60510218 60510223 +
ctccagtggcttccatctccct

SEQ ID NO: 202674 - DNA, 22 bp, Artificial Sequence
  Synthetic oligonucleotide; CTC chr2 60510204 60510225 60510221 60510226 +
cagtggcttccatctcccttgg

SEQ ID NO: 202675 - DNA, 22 bp, Artificial Sequence
  Synthetic oligonucleotide; CTT chr2 60510213 60510234 60510230 60510235 +
ccatctcccttggagtcagagc

SEQ ID NO: 202676 - DNA, 22 bp, Artificial Sequence
  Synthetic oligonucleotide; TTC chr2 60510214 60510235 60510231 60510236 +
catctcccttggagtcagagcc

SEQ ID NO: 202677 - DNA, 22 bp, Artificial Sequence
  Synthetic oligonucleotide; CTC chr2 60510220 60510241 60510237 60510242 +
ccttggagtcagagccaaaaat

SEQ ID NO: 202678 - DNA, 22 bp, Artificial Sequence
  Synthetic oligonucleotide; CTT chr2 60510224 60510245 60510241 60510246 +
ggagtcagagccaaaaatccct

SEQ ID NO: 202679 - DNA, 22 bp, Artificial Sequence
  Synthetic oligonucleotide; TTG chr2 60510225 60510246 60510242 60510247 +
gagtcagagccaaaaatccctg

SEQ ID NO: 202680 - DNA, 22 bp, Artificial Sequence
  Synthetic oligonucleotide; CTG chr2 60510247 60510268 60510264 60510269 +
ctctacgtccttcaaggagcca

SEQ ID NO: 202681 - DNA, 22 bp, Artificial Sequence
  Synthetic oligonucleotide; CTC chr2 60510250 60510271 60510267 60510272 +
tacgtccttcaaggagccagct

SEQ ID NO: 202682 - DNA, 22 bp, Artificial Sequence
  Synthetic oligonucleotide; CTA chr2 60510252 60510273 60510269 60510274 +
cgtccttcaaggagccagctgg

SEQ ID NO: 202683 - DNA, 22 bp, Artificial Sequence
  Synthetic oligonucleotide; CTT chr2 60510259 60510280 60510276 60510281 +
caaggagccagctggtctcctc

SEQ ID NO: 202684 - DNA, 22 bp, Artificial Sequence
  Synthetic oligonucleotide; TTC chr2 60510260 60510281 60510277 60510282 +
aaggagccagctggtctcctct

SEQ ID NO: 202685 - DNA, 22 bp, Artificial Sequence
  Synthetic oligonucleotide; CTG chr2 60510273 60510294 60510290 60510295 +
gtctcctctcctcctcctcctg

SEQ ID NO: 202686 - DNA, 22 bp, Artificial Sequence
  Synthetic oligonucleotide; CTC chr2 60510278 60510299 60510295 60510300 +
ctctcctcctcctcctgcactc

SEQ ID NO: 202687 - DNA, 22 bp, Artificial Sequence
  Synthetic oligonucleotide; CTC chr2 60510281 60510302 60510298 60510303 +
tcctcctcctcctgcactcttt

SEQ ID NO: 202688 - DNA, 22 bp, Artificial Sequence
  Synthetic oligonucleotide; CTC chr2 60510283 60510304 60510300 60510305 +
ctcctcctcctgcactctttcc

SEQ ID NO: 202689 - DNA, 22 bp, Artificial Sequence
  Synthetic oligonucleotide; CTC chr2 60510286 60510307 60510303 60510308 +
ctcctcctgcactctttccact

SEQ ID NO: 202690 - DNA, 22 bp, Artificial Sequence
  Synthetic oligonucleotide; CTC chr2 60510289 60510310 60510306 60510311 +
ctcctgcactctttccactctg

SEQ ID NO: 202691 - DNA, 22 bp, Artificial Sequence
  Synthetic oligonucleotide; CTC chr2 60510292 60510313 60510309 60510314 +
ctgcactctttccactctgacc

SEQ ID NO: 202692 - DNA, 22 bp, Artificial Sequence
  Synthetic oligonucleotide; CTG chr2 60510295 60510316 60510312 60510317 +
cactctttccactctgacctca

SEQ ID NO: 202693 - DNA, 22 bp, Artificial Sequence
  Synthetic oligonucleotide; CTC chr2 60510300 60510321 60510317 60510322 +
tttccactctgacctcagggcc

SEQ ID NO: 202694 - DNA, 22 bp, Artificial Sequence
  Synthetic oligonucleotide; CTT chr2 60510302 60510323 60510319 60510324 +
tccactctgacctcagggcccc

SEQ ID NO: 202695 - DNA, 22 bp, Artificial Sequence
  Synthetic oligonucleotide; TTT chr2 60510303 60510324 60510320 60510325 +
ccactctgacctcagggcccct

SEQ ID NO: 202696 - DNA, 22 bp, Artificial Sequence
  Synthetic oligonucleotide; TTC chr2 60510304 60510325 60510321 60510326 +
cactctgacctcagggcccctt

SEQ ID NO: 202697 - DNA, 22 bp, Artificial Sequence
  Synthetic oligonucleotide; CTC chr2 60510309 60510330 60510326 60510331 +
tgacctcagggccccttgctcc

SEQ ID NO: 202698 - DNA, 22 bp, Artificial Sequence
  Synthetic oligonucleotide; CTG chr2 60510311 60510332 60510328 60510333 +
acctcagggccccttgctcctc

SEQ ID NO: 202699 - DNA, 22 bp, Artificial Sequence
  Synthetic oligonucleotide; CTC chr2 60510316 60510337 60510333 60510338 +
agggccccttgctcctcctcca

SEQ ID NO: 202700 - DNA, 22 bp, Artificial Sequence
  Synthetic oligonucleotide; CTT chr2 60510326 60510347 60510343 60510348 +
gctcctcctccagtagccaggc

SEQ ID NO: 202701 - DNA, 22 bp, Artificial Sequence
  Synthetic oligonucleotide; TTG chr2 60510327 60510348 60510344 60510349 +
ctcctcctccagtagccaggcg

SEQ ID NO: 202702 - DNA, 22 bp, Artificial Sequence
  Synthetic oligonucleotide; CTC chr2 60510330 60510351 60510347 60510352 +
ctcctccagtagccaggcgtat

SEQ ID NO: 202703 - DNA, 22 bp, Artificial Sequence
  Synthetic oligonucleotide; CTC chr2 60510333 60510354 60510350 60510355 +
ctccagtagccaggcgtattac

SEQ ID NO: 202704 - DNA, 22 bp, Artificial Sequence
  Synthetic oligonucleotide; CTC chr2 60510336 60510357 60510353 60510358 +
cagtagccaggcgtattacaca

SEQ ID NO: 202705 - DNA, 22 bp, Artificial Sequence
  Synthetic oligonucleotide; TTA chr2 60510354 60510375 60510371 60510376 +
cacacaaggtctctgctctcta

SEQ ID NO: 202706 - DNA, 22 bp, Artificial Sequence
  Synthetic oligonucleotide; CTC chr2 60510367 60510388 60510384 60510389 +
tgctctctacacactcttcctg

SEQ ID NO: 202707 - DNA, 22 bp, Artificial Sequence
  Synthetic oligonucleotide; CTG chr2 60510369 60510390 60510386 60510391 +
ctctctacacactcttcctgga

SEQ ID NO: 202708 - DNA, 22 bp, Artificial Sequence
  Synthetic oligonucleotide; CTC chr2 60510372 60510393 60510389 60510394 +
tctacacactcttcctggaacc

SEQ ID NO: 202709 - DNA, 22 bp, Artificial Sequence
  Synthetic oligonucleotide; CTC chr2 60510374 60510395 60510391 60510396 +
tacacactcttcctggaaccat

SEQ ID NO: 202710 - DNA, 22 bp, Artificial Sequence
  Synthetic oligonucleotide; CTA chr2 60510376 60510397 60510393 60510398 +
cacactcttcctggaaccatct

SEQ ID NO: 202711 - DNA, 22 bp, Artificial Sequence
  Synthetic oligonucleotide; CTC chr2 60510383 60510404 60510400 60510405 +
ttcctggaaccatcttctcaaa

SEQ ID NO: 202712 - DNA, 22 bp, Artificial Sequence
  Synthetic oligonucleotide; CTT chr2 60510385 60510406 60510402 60510407 +
cctggaaccatcttctcaaaat

SEQ ID NO: 202713 - DNA, 22 bp, Artificial Sequence
  Synthetic oligonucleotide; TTC chr2 60510386 60510407 60510403 60510408 +
ctggaaccatcttctcaaaatt

SEQ ID NO: 202714 - DNA, 22 bp, Artificial Sequence
  Synthetic oligonucleotide; CTG chr2 60510389 60510410 60510406 60510411 +
gaaccatcttctcaaaattctc

SEQ ID NO: 202715 - DNA, 22 bp, Artificial Sequence
  Synthetic oligonucleotide; CTT chr2 60510399 60510420 60510416 60510421 +
ctcaaaattctcatggccaact

SEQ ID NO: 202716 - DNA, 22 bp, Artificial Sequence
  Synthetic oligonucleotide; TTC chr2 60510400 60510421 60510417 60510422 +
tcaaaattctcatggccaactt

SEQ ID NO: 202717 - DNA, 22 bp, Artificial Sequence
  Synthetic oligonucleotide; CTC chr2 60510402 60510423 60510419 60510424 +
aaaattctcatggccaacttcc

SEQ ID NO: 202718 - DNA, 22 bp, Artificial Sequence
  Synthetic oligonucleotide; TTC chr2 60510409 60510430 60510426 60510431 +
tcatggccaacttcctcacctc

SEQ ID NO: 202719 - DNA, 22 bp, Artificial Sequence
  Synthetic oligonucleotide; CTC chr2 60510411 60510432 60510428 60510433 +
atggccaacttcctcacctctt

SEQ ID NO: 202720 - DNA, 22 bp, Artificial Sequence
  Synthetic oligonucleotide; CTT chr2 60510422 60510443 60510439 60510444 +
cctcacctctttggagcctttg

SEQ ID NO: 202721 - DNA, 22 bp, Artificial Sequence
  Synthetic oligonucleotide; TTC chr2 60510423 60510444 60510440 60510445 +
ctcacctctttggagcctttgc

SEQ ID NO: 202722 - DNA, 22 bp, Artificial Sequence
  Synthetic oligonucleotide; CTC chr2 60510426 60510447 60510443 60510448 +
acctctttggagcctttgcttc

SEQ ID NO: 202723 - DNA, 22 bp, Artificial Sequence
  Synthetic oligonucleotide; CTC chr2 60510431 60510452 60510448 60510453 +
tttggagcctttgcttctcatt

SEQ ID NO: 202724 - DNA, 22 bp, Artificial Sequence
  Synthetic oligonucleotide; CTT chr2 60510433 60510454 60510450 60510455 +
tggagcctttgcttctcattgg

SEQ ID NO: 202725 - DNA, 22 bp, Artificial Sequence
  Synthetic oligonucleotide; TTT chr2 60510434 60510455 60510451 60510456 +
ggagcctttgcttctcattggg

SEQ ID NO: 202726 - DNA, 22 bp, Artificial Sequence
  Synthetic oligonucleotide; TTG chr2 60510435 60510456 60510452 60510457 +
gagcctttgcttctcattgggc

SEQ ID NO: 202727 - DNA, 22 bp, Artificial Sequence
  Synthetic oligonucleotide; CTT chr2 60510442 60510463 60510459 60510464 +
tgcttctcattgggccttccct

SEQ ID NO: 202728 - DNA, 22 bp, Artificial Sequence
  Synthetic oligonucleotide; TTT chr2 60510443 60510464 60510460 60510465 +
gcttctcattgggccttcccta

SEQ ID NO: 202729 - DNA, 22 bp, Artificial Sequence
  Synthetic oligonucleotide; TTG chr2 60510444 60510465 60510461 60510466 +
cttctcattgggccttccctaa

SEQ ID NO: 202730 - DNA, 22 bp, Artificial Sequence
  Synthetic oligonucleotide; CTT chr2 60510447 60510468 60510464 60510469 +
ctcattgggccttccctaatta

SEQ ID NO: 202731 - DNA, 22 bp, Artificial Sequence
  Synthetic oligonucleotide; TTC chr2 60510448 60510469 60510465 60510470 +
tcattgggccttccctaattat

SEQ ID NO: 202732 - DNA, 22 bp, Artificial Sequence
  Synthetic oligonucleotide; CTC chr2 60510450 60510471 60510467 60510472 +
attgggccttccctaattatcc

SEQ ID NO: 202733 - DNA, 22 bp, Artificial Sequence
  Synthetic oligonucleotide; TTG chr2 60510454 60510475 60510471 60510476 +
ggccttccctaattatcctatt

SEQ ID NO: 202734 - DNA, 22 bp, Artificial Sequence
  Synthetic oligonucleotide; CTT chr2 60510460 60510481 60510477 60510482 +
ccctaattatcctatttaaaag

SEQ ID NO: 202735 - DNA, 22 bp, Artificial Sequence
  Synthetic oligonucleotide; TTC chr2 60510461 60510482 60510478 60510483 +
cctaattatcctatttaaaagc

SEQ ID NO: 202736 - DNA, 22 bp, Artificial Sequence
  Synthetic oligonucleotide; CTA chr2 60510465 60510486 60510482 60510487 +
attatcctatttaaaagcctgg

SEQ ID NO: 202737 - DNA, 22 bp, Artificial Sequence
  Synthetic oligonucleotide; TTA chr2 60510469 60510490 60510486 60510491 +
tcctatttaaaagcctggtcac

SEQ ID NO: 202738 - DNA, 22 bp, Artificial Sequence
  Synthetic oligonucleotide; CTA chr2 60510474 60510495 60510491 60510496 +
tttaaaagcctggtcaccatgc

SEQ ID NO: 202739 - DNA, 22 bp, Artificial Sequence
  Synthetic oligonucleotide; TTT chr2 60510477 60510498 60510494 60510499 +
aaaagcctggtcaccatgcacc

SEQ ID NO: 202740 - DNA, 22 bp, Artificial Sequence
  Synthetic oligonucleotide; TTA chr2 60510478 60510499 60510495 60510500 +
aaagcctggtcaccatgcaccc

SEQ ID NO: 202741 - DNA, 22 bp, Artificial Sequence
  Synthetic oligonucleotide; CTG chr2 60510486 60510507 60510503 60510508 +
gtcaccatgcaccccttacccc

SEQ ID NO: 202742 - DNA, 22 bp, Artificial Sequence
  Synthetic oligonucleotide; CTT chr2 60510503 60510524 60510520 60510525 +
acccctcttccccaccttattt

SEQ ID NO: 202743 - DNA, 22 bp, Artificial Sequence
  Synthetic oligonucleotide; TTA chr2 60510504 60510525 60510521 60510526 +
cccctcttccccaccttatttt

SEQ ID NO: 202744 - DNA, 22 bp, Artificial Sequence
  Synthetic oligonucleotide; CTC chr2 60510510 60510531 60510527 60510532 +
ttccccaccttattttcgtgca

SEQ ID NO: 202745 - DNA, 22 bp, Artificial Sequence
  Synthetic oligonucleotide; CTT chr2 60510512 60510533 60510529 60510534 +
ccccaccttattttcgtgcagg

SEQ ID NO: 202746 - DNA, 22 bp, Artificial Sequence
  Synthetic oligonucleotide; TTC chr2 60510513 60510534 60510530 60510535 +
cccaccttattttcgtgcaggc

SEQ ID NO: 202747 - DNA, 22 bp, Artificial Sequence
  Synthetic oligonucleotide; CTT chr2 60510521 60510542 60510538 60510543 +
attttcgtgcaggcagtttgat

SEQ ID NO: 202748 - DNA, 22 bp, Artificial Sequence
  Synthetic oligonucleotide; TTA chr2 60510522 60510543 60510539 60510544 +
ttttcgtgcaggcagtttgatc

SEQ ID NO: 202749 - DNA, 22 bp, Artificial Sequence
  Synthetic oligonucleotide; TTT chr2 60510525 60510546 60510542 60510547 +
tcgtgcaggcagtttgatcttc

SEQ ID NO: 202750 - DNA, 22 bp, Artificial Sequence
  Synthetic oligonucleotide; TTT chr2 60510526 60510547 60510543 60510548 +
cgtgcaggcagtttgatcttct

SEQ ID NO: 202751 - DNA, 22 bp, Artificial Sequence
  Synthetic oligonucleotide; TTC chr2 60510527 60510548 60510544 60510549 +
gtgcaggcagtttgatcttctc

SEQ ID NO: 202752 - DNA, 22 bp, Artificial Sequence
  Synthetic oligonucleotide; TTT chr2 60510540 60510561 60510557 60510562 +
gatcttctcttgccatactata

SEQ ID NO: 202753 - DNA, 22 bp, Artificial Sequence
  Synthetic oligonucleotide; TTG chr2 60510541 60510562 60510558 60510563 +
atcttctcttgccatactatat

SEQ ID NO: 202754 - DNA, 22 bp, Artificial Sequence
  Synthetic oligonucleotide; CTT chr2 60510546 60510567 60510563 60510568 +
ctcttgccatactatataattc

SEQ ID NO: 202755 - DNA, 22 bp, Artificial Sequence
  Synthetic oligonucleotide; TTC chr2 60510547 60510568 60510564 60510569 +
tcttgccatactatataattca

SEQ ID NO: 202756 - DNA, 22 bp, Artificial Sequence
  Synthetic oligonucleotide; CTC chr2 60510549 60510570 60510566 60510571 +
ttgccatactatataattcaca

SEQ ID NO: 202757 - DNA, 22 bp, Artificial Sequence
  Synthetic oligonucleotide; CTT chr2 60510551 60510572 60510568 60510573 +
gccatactatataattcacata

SEQ ID NO: 202758 - DNA, 22 bp, Artificial Sequence
  Synthetic oligonucleotide; TTG chr2 60510552 60510573 60510569 60510574 +
ccatactatataattcacatat

SEQ ID NO: 202759 - DNA, 22 bp, Artificial Sequence
  Synthetic oligonucleotide; CTA chr2 60510560 60510581 60510577 60510582 +
tataattcacatatttattggt

SEQ ID NO: 202760 - DNA, 22 bp, Artificial Sequence
  Synthetic oligonucleotide; TTC chr2 60510568 60510589 60510585 60510590 +
acatatttattggtgcatcttc

SEQ ID NO: 202761 - DNA, 22 bp, Artificial Sequence
  Synthetic oligonucleotide; TTT chr2 60510576 60510597 60510593 60510598 +
attggtgcatcttctgtctctc

SEQ ID NO: 202762 - DNA, 22 bp, Artificial Sequence
  Synthetic oligonucleotide; TTA chr2 60510577 60510598 60510594 60510599 +
ttggtgcatcttctgtctctcc

SEQ ID NO: 202763 - DNA, 22 bp, Artificial Sequence
  Synthetic oligonucleotide; TTG chr2 60510580 60510601 60510597 60510602 +
gtgcatcttctgtctctcccca

SEQ ID NO: 202764 - DNA, 22 bp, Artificial Sequence
  Synthetic oligonucleotide; CTT chr2 60510589 60510610 60510606 60510611 +
ctgtctctccccagctagaaag

SEQ ID NO: 202765 - DNA, 22 bp, Artificial Sequence
  Synthetic oligonucleotide; TTC chr2 60510590 60510611 60510607 60510612 +
tgtctctccccagctagaaagg

SEQ ID NO: 202766 - DNA, 22 bp, Artificial Sequence
  Synthetic oligonucleotide; CTG chr2 60510592 60510613 60510609 60510614 +
tctctccccagctagaaagggg

SEQ ID NO: 202767 - DNA, 22 bp, Artificial Sequence
  Synthetic oligonucleotide; CTC chr2 60510596 60510617 60510613 60510618 +
tccccagctagaaagggggtgc

SEQ ID NO: 202768 - DNA, 22 bp, Artificial Sequence
  Synthetic oligonucleotide; CTC chr2 60510598 60510619 60510615 60510620 +
cccagctagaaagggggtgcca

SEQ ID NO: 202769 - DNA, 22 bp, Artificial Sequence
  Synthetic oligonucleotide; CTA chr2 60510606 60510627 60510623 60510628 +
gaaagggggtgccacaagagca

SEQ ID NO: 202770 - DNA, 22 bp, Artificial Sequence
  Synthetic oligonucleotide; TTT chr2 60510636 60510657 60510653 60510658 +
ttaaggctttctatgcccaaca

SEQ ID NO: 202771 - DNA, 22 bp, Artificial Sequence
  Synthetic oligonucleotide; TTT chr2 60510637 60510658 60510654 60510659 +
taaggctttctatgcccaacac

SEQ ID NO: 202772 - DNA, 22 bp, Artificial Sequence
  Synthetic oligonucleotide; TTT chr2 60510638 60510659 60510655 60510660 +
aaggctttctatgcccaacacc

SEQ ID NO: 202773 - DNA, 22 bp, Artificial Sequence
  Synthetic oligonucleotide; TTA chr2 60510639 60510660 60510656 60510661 +
aggctttctatgcccaacacca

SEQ ID NO: 202774 - DNA, 22 bp, Artificial Sequence
  Synthetic oligonucleotide; CTT chr2 60510645 60510666 60510662 60510667 +
tctatgcccaacaccaagaacc

SEQ ID NO: 202775 - DNA, 22 bp, Artificial Sequence
  Synthetic oligonucleotide; TTT chr2 60510646 60510667 60510663 60510668 +
ctatgcccaacaccaagaaccg

SEQ ID NO: 202776 - DNA, 22 bp, Artificial Sequence
  Synthetic oligonucleotide; TTC chr2 60510647 60510668 60510664 60510669 +
tatgcccaacaccaagaaccgt

SEQ ID NO: 202777 - DNA, 22 bp, Artificial Sequence
  Synthetic oligonucleotide; CTA chr2 60510649 60510670 60510666 60510671 +
tgcccaacaccaagaaccgttc

SEQ ID NO: 202778 - DNA, 22 bp, Artificial Sequence
  Synthetic oligonucleotide; TTC chr2 60510671 60510692 60510688 60510693 +
ccagcatgtggcaggtgttcaa

SEQ ID NO: 202779 - DNA, 22 bp, Artificial Sequence
  Synthetic oligonucleotide; TTC chr2 60510691 60510712 60510708 60510713 +
aaaatatttgttgaaaaatgaa

SEQ ID NO: 202780 - DNA, 22 bp, Artificial Sequence
  Synthetic oligonucleotide; TTT chr2 60510700 60510721 60510717 60510722 +
gttgaaaaatgaatgagtgaac

SEQ ID NO: 202781 - DNA, 22 bp, Artificial Sequence
  Synthetic oligonucleotide; TTG chr2 60510701 60510722 60510718 60510723 +
ttgaaaaatgaatgagtgaacc

SEQ ID NO: 202782 - DNA, 22 bp, Artificial Sequence
  Synthetic oligonucleotide; TTG chr2 60510704 60510725 60510721 60510726 +
aaaaatgaatgagtgaaccttc

SEQ ID NO: 202783 - DNA, 22 bp, Artificial Sequence
  Synthetic oligonucleotide; CTT chr2 60510725 60510746 60510742 60510747 +
cacaattccaaactgccaggag

SEQ ID NO: 202784 - DNA, 22 bp, Artificial Sequence
  Synthetic oligonucleotide; TTC chr2 60510726 60510747 60510743 60510748 +
acaattccaaactgccaggagg

SEQ ID NO: 202785 - DNA, 22 bp, Artificial Sequence
  Synthetic oligonucleotide; TTC chr2 60510733 60510754 60510750 60510755 +
caaactgccaggaggccactca

SEQ ID NO: 202786 - DNA, 22 bp, Artificial Sequence
  Synthetic oligonucleotide; CTG chr2 60510740 60510761 60510757 60510762 +
ccaggaggccactcaatgccat

SEQ ID NO: 202787 - DNA, 22 bp, Artificial Sequence
  Synthetic oligonucleotide; CTC chr2 60510754 60510775 60510771 60510776 +
aatgccatatctataaaactgt

SEQ ID NO: 202788 - DNA, 22 bp, Artificial Sequence
  Synthetic oligonucleotide; CTA chr2 60510767 60510788 60510784 60510789 +
taaaactgtcaggcagcccaac

SEQ ID NO: 202789 - DNA, 22 bp, Artificial Sequence
  Synthetic oligonucleotide; CTG chr2 60510775 60510796 60510792 60510797 +
tcaggcagcccaacctgggggc

SEQ ID NO: 202790 - DNA, 22 bp, Artificial Sequence
  Synthetic oligonucleotide; CTG chr2 60510792 60510813 60510809 60510814 +
ggggcactttagctttggatct

SEQ ID NO: 202791 - DNA, 22 bp, Artificial Sequence
  Synthetic oligonucleotide; CTT chr2 60510801 60510822 60510818 60510823 +
tagctttggatcttgggtttga

SEQ ID NO: 202792 - DNA, 22 bp, Artificial Sequence
  Synthetic oligonucleotide; TTT chr2 60510802 60510823 60510819 60510824 +
agctttggatcttgggtttgag

SEQ ID NO: 202793 - DNA, 22 bp, Artificial Sequence
  Synthetic oligonucleotide; TTA chr2 60510803 60510824 60510820 60510825 +
gctttggatcttgggtttgagc

SEQ ID NO: 202794 - DNA, 22 bp, Artificial Sequence
  Synthetic oligonucleotide; CTT chr2 60510807 60510828 60510824 60510829 +
tggatcttgggtttgagccaga

SEQ ID NO: 202795 - DNA, 22 bp, Artificial Sequence
  Synthetic oligonucleotide; TTT chr2 60510808 60510829 60510825 60510830 +
ggatcttgggtttgagccagat

SEQ ID NO: 202796 - DNA, 22 bp, Artificial Sequence
  Synthetic oligonucleotide; TTG chr2 60510809 60510830 60510826 60510831 +
gatcttgggtttgagccagatt

SEQ ID NO: 202797 - DNA, 22 bp, Artificial Sequence
  Synthetic oligonucleotide; CTT chr2 60510815 60510836 60510832 60510837 +
gggtttgagccagattccattt

SEQ ID NO: 202798 - DNA, 22 bp, Artificial Sequence
  Synthetic oligonucleotide; TTG chr2 60510816 60510837 60510833 60510838 +
ggtttgagccagattccatttt

SEQ ID NO: 202799 - DNA, 22 bp, Artificial Sequence
  Synthetic oligonucleotide; TTT chr2 60510821 60510842 60510838 60510843 +
gagccagattccattttcccca

SEQ ID NO: 202800 - DNA, 22 bp, Artificial Sequence
  Synthetic oligonucleotide; TTG chr2 60510822 60510843 60510839 60510844 +
agccagattccattttccccac

SEQ ID NO: 202801 - DNA, 22 bp, Artificial Sequence
  Synthetic oligonucleotide; TTC chr2 60510832 60510853 60510849 60510854 +
cattttccccacaggccctgag

SEQ ID NO: 202802 - DNA, 22 bp, Artificial Sequence
  Synthetic oligonucleotide; TTT chr2 60510837 60510858 60510854 60510859 +
tccccacaggccctgagaccca

SEQ ID NO: 202803 - DNA, 22 bp, Artificial Sequence
  Synthetic oligonucleotide; TTT chr2 60510838 60510859 60510855 60510860 +
ccccacaggccctgagacccac

SEQ ID NO: 202804 - DNA, 22 bp, Artificial Sequence
  Synthetic oligonucleotide; TTC chr2 60510839 60510860 60510856 60510861 +
cccacaggccctgagacccaca

SEQ ID NO: 202805 - DNA, 22 bp, Artificial Sequence
  Synthetic oligonucleotide; CTG chr2 60510852 60510873 60510869 60510874 +
agacccacagggaagagctttt

SEQ ID NO: 202806 - DNA, 22 bp, Artificial Sequence
  Synthetic oligonucleotide; CTT chr2 60510872 60510893 60510889 60510894 +
ttgcattataatgtaaatggag

SEQ ID NO: 202807 - DNA, 22 bp, Artificial Sequence
  Synthetic oligonucleotide; TTT chr2 60510873 60510894 60510890 60510895 +
tgcattataatgtaaatggagg

SEQ ID NO: 202808 - DNA, 22 bp, Artificial Sequence
  Synthetic oligonucleotide; TTT chr2 60510874 60510895 60510891 60510896 +
gcattataatgtaaatggaggg

SEQ ID NO: 202809 - DNA, 22 bp, Artificial Sequence
  Synthetic oligonucleotide; TTG chr2 60510875 60510896 60510892 60510897 +
cattataatgtaaatggagggg

SEQ ID NO: 202810 - DNA, 22 bp, Artificial Sequence
  Synthetic oligonucleotide; TTA chr2 60510880 60510901 60510897 60510902 +
taatgtaaatggaggggttgag

SEQ ID NO: 202811 - DNA, 22 bp, Artificial Sequence
  Synthetic oligonucleotide; TTG chr2 60510900 60510921 60510917 60510922 +
agctggtttgggggaacccttg

SEQ ID NO: 202812 - DNA, 22 bp, Artificial Sequence
  Synthetic oligonucleotide; CTG chr2 60510905 60510926 60510922 60510927 +
gtttgggggaacccttgacagg

SEQ ID NO: 202813 - DNA, 22 bp, Artificial Sequence
  Synthetic oligonucleotide; TTT chr2 60510909 60510930 60510926 60510931 +
gggggaacccttgacaggagcc

SEQ ID NO: 202814 - DNA, 22 bp, Artificial Sequence
  Synthetic oligonucleotide; TTG chr2 60510910 60510931 60510927 60510932 +
ggggaacccttgacaggagcca

SEQ ID NO: 202815 - DNA, 22 bp, Artificial Sequence
  Synthetic oligonucleotide; CTT chr2 60510921 60510942 60510938 60510943 +
gacaggagccagttaaaaccaa

SEQ ID NO: 202816 - DNA, 22 bp, Artificial Sequence
  Synthetic oligonucleotide; TTG chr2 60510922 60510943 60510939 60510944 +
acaggagccagttaaaaccaaa

SEQ ID NO: 202817 - DNA, 22 bp, Artificial Sequence
  Synthetic oligonucleotide; TTA chr2 60510936 60510957 60510953 60510958 +
aaaccaaacgaaagtctttcct

SEQ ID NO: 202818 - DNA, 22 bp, Artificial Sequence
  Synthetic oligonucleotide; CTT chr2 60510954 60510975 60510971 60510976 +
tcctaaggcttaggtggagcct

SEQ ID NO: 202819 - DNA, 22 bp, Artificial Sequence
  Synthetic oligonucleotide; TTT chr2 60510955 60510976 60510972 60510977 +
cctaaggcttaggtggagcctc

SEQ ID NO: 202820 - DNA, 22 bp, Artificial Sequence
  Synthetic oligonucleotide; TTC chr2 60510956 60510977 60510973 60510978 +
ctaaggcttaggtggagcctct

SEQ ID NO: 202821 - DNA, 22 bp, Artificial Sequence
  Synthetic oligonucleotide; CTA chr2 60510959 60510980 60510976 60510981 +
aggcttaggtggagcctctaga

SEQ ID NO: 202822 - DNA, 22 bp, Artificial Sequence
  Synthetic oligonucleotide; CTT chr2 60510965 60510986 60510982 60510987 +
aggtggagcctctagaaagagg

SEQ ID NO: 202823 - DNA, 22 bp, Artificial Sequence
  Synthetic oligonucleotide; TTA chr2 60510966 60510987 60510983 60510988 +
ggtggagcctctagaaagaggg

SEQ ID NO: 202824 - DNA, 22 bp, Artificial Sequence
  Synthetic oligonucleotide; CTC chr2 60510977 60510998 60510994 60510999 +
tagaaagaggggctgagagcct

SEQ ID NO: 202825 - DNA, 22 bp, Artificial Sequence
  Synthetic oligonucleotide; CTA chr2 60510979 60511000 60510996 60511001 +
gaaagaggggctgagagcctgg

SEQ ID NO: 202826 - DNA, 22 bp, Artificial Sequence
  Synthetic oligonucleotide; CTG chr2 60510992 60511013 60511009 60511014 +
agagcctggggaagagccaacc

SEQ ID NO: 202827 - DNA, 22 bp, Artificial Sequence
  Synthetic oligonucleotide; CTG chr2 60511000 60511021 60511017 60511022 +
gggaagagccaaccaccagcag

SEQ ID NO: 202828 - DNA, 22 bp, Artificial Sequence
  Synthetic oligonucleotide; TTC chr2 60511025 60511046 60511042 60511047 +
ctcagagttcttcccactgggg

SEQ ID NO: 202829 - DNA, 22 bp, Artificial Sequence
  Synthetic oligonucleotide; CTC chr2 60511028 60511049 60511045 60511050 +
agagttcttcccactggggctg

SEQ ID NO: 202830 - DNA, 22 bp, Artificial Sequence
  Synthetic oligonucleotide; TTC chr2 60511035 60511056 60511052 60511057 +
ttcccactggggctgtgcagcc

SEQ ID NO: 202831 - DNA, 22 bp, Artificial Sequence
  Synthetic oligonucleotide; CTT chr2 60511037 60511058 60511054 60511059 +
cccactggggctgtgcagccaa

SEQ ID NO: 202832 - DNA, 22 bp, Artificial Sequence
  Synthetic oligonucleotide; TTC chr2 60511038 60511059 60511055 60511060 +
ccactggggctgtgcagccaac

SEQ ID NO: 202833 - DNA, 22 bp, Artificial Sequence
  Synthetic oligonucleotide; CTG chr2 60511044 60511065 60511061 60511066 +
gggctgtgcagccaactgcgtt
